United States Patent Application Publication US 2016/0319361 A1 - sequence listing, part 17

SEQ ID NO: 449292 - DNA, 30 bp, Artificial Sequence
  Synthetic oligonucleotide
ctggggaagtcgcaaaagctgccccagcgc

SEQ ID NO: 449293 - DNA, 30 bp, Artificial Sequence
  Synthetic oligonucleotide
catataacagctagggcgacattgcagcgc

SEQ ID NO: 449294 - DNA, 30 bp, Artificial Sequence
  Synthetic oligonucleotide
attcgactgatgttaacttcttgtcagcgc

SEQ ID NO: 449295 - DNA, 30 bp, Artificial Sequence
  Synthetic oligonucleotide
tatttgacagccatgcgacggattcagcgc

SEQ ID NO: 449296 - DNA, 30 bp, Artificial Sequence
  Synthetic oligonucleotide
tcctggcatgaagttgcgattccagagcgc

SEQ ID NO: 449297 - DNA, 30 bp, Artificial Sequence
  Synthetic oligonucleotide
tagtcataggcgaagcactcgatggagcgc

SEQ ID NO: 449298 - DNA, 30 bp, Artificial Sequence
  Synthetic oligonucleotide
tgttatctctggggctacacgcgtgagcgc

SEQ ID NO: 449299 - DNA, 30 bp, Artificial Sequence
  Synthetic oligonucleotide
tgtttctgactgaattctagatgtgagcgc

SEQ ID NO: 449300 - DNA, 30 bp, Artificial Sequence
  Synthetic oligonucleotide
cagacaatttgatatacatgggtatagcgc

SEQ ID NO: 449301 - DNA, 30 bp, Artificial Sequence
  Synthetic oligonucleotide
gttttgtgcgacttcatgcgtttctagcgc

SEQ ID NO: 449302 - DNA, 30 bp, Artificial Sequence
  Synthetic oligonucleotide
ctttactgcagagtttactagatgtagcgc

SEQ ID NO: 449303 - DNA, 30 bp, Artificial Sequence
  Synthetic oligonucleotide
atataattcacccggtttccgttgtagcgc

SEQ ID NO: 449304 - DNA, 30 bp, Artificial Sequence
  Synthetic oligonucleotide
gcagtagggcataccttgcatccttagcgc

SEQ ID NO: 449305 - DNA, 30 bp, Artificial Sequence
  Synthetic oligonucleotide
aagcacctgtatgcgctaagtttttagcgc

SEQ ID NO: 449306 - DNA, 30 bp, Artificial Sequence
  Synthetic oligonucleotide
taagtatcgcgcggtcaaattttaacgcgc

SEQ ID NO: 449307 - DNA, 30 bp, Artificial Sequence
  Synthetic oligonucleotide
gtgagggctcgttatggacatagcacgcgc

SEQ ID NO: 449308 - DNA, 30 bp, Artificial Sequence
  Synthetic oligonucleotide
gcccatgcgtagggtgggggcgagacgcgc

SEQ ID NO: 449309 - DNA, 30 bp, Artificial Sequence
  Synthetic oligonucleotide
gtgattaggatttccatgcgggcgacgcgc

SEQ ID NO: 449310 - DNA, 30 bp, Artificial Sequence
  Synthetic oligonucleotide
cgacccactttagatgaggggaggacgcgc

SEQ ID NO: 449311 - DNA, 30 bp, Artificial Sequence
  Synthetic oligonucleotide
tccggtcaacagggaatattgtggacgcgc

SEQ ID NO: 449312 - DNA, 30 bp, Artificial Sequence
  Synthetic oligonucleotide
gcatgtcagactctactccgaagtacgcgc

SEQ ID NO: 449313 - DNA, 30 bp, Artificial Sequence
  Synthetic oligonucleotide
gccccgcactatggaatgggtcgtacgcgc

SEQ ID NO: 449314 - DNA, 30 bp, Artificial Sequence
  Synthetic oligonucleotide
atttggttatcctcgatagactgtacgcgc

SEQ ID NO: 449315 - DNA, 30 bp, Artificial Sequence
  Synthetic oligonucleotide
tcacaactaccctaactggtagttacgcgc

SEQ ID NO: 449316 - DNA, 30 bp, Artificial Sequence
  Synthetic oligonucleotide
cgtcggcggtccggatacatgacaccgcgc

SEQ ID NO: 449317 - DNA, 30 bp, Artificial Sequence
  Synthetic oligonucleotide
ataggcagtgagatgaggagacccccgcgc

SEQ ID NO: 449318 - DNA, 30 bp, Artificial Sequence
  Synthetic oligonucleotide
ctgctcctacgacgtaaaatagctccgcgc

SEQ ID NO: 449319 - DNA, 30 bp, Artificial Sequence
  Synthetic oligonucleotide
attatcttaaagagggggtaacgcgcgcgc

SEQ ID NO: 449320 - DNA, 30 bp, Artificial Sequence
  Synthetic oligonucleotide
aagggacgggactcccgcgttacggcgcgc

SEQ ID NO: 449321 - DNA, 30 bp, Artificial Sequence
  Synthetic oligonucleotide
aaaagttccgtcttgttgggtcatgcgcgc

SEQ ID NO: 449322 - DNA, 30 bp, Artificial Sequence
  Synthetic oligonucleotide
aagtgaaatactatggagaataaatcgcgc

SEQ ID NO: 449323 - DNA, 30 bp, Artificial Sequence
  Synthetic oligonucleotide
attcctctatggacgcatctcagatcgcgc

SEQ ID NO: 449324 - DNA, 30 bp, Artificial Sequence
  Synthetic oligonucleotide
ttgagcggtctcttttacaggagatcgcgc

SEQ ID NO: 449325 - DNA, 30 bp, Artificial Sequence
  Synthetic oligonucleotide
ccagtttgctgtcctgcctttagatcgcgc

SEQ ID NO: 449326 - DNA, 30 bp, Artificial Sequence
  Synthetic oligonucleotide
gtcatagcataactcggggttcggtcgcgc

SEQ ID NO: 449327 - DNA, 30 bp, Artificial Sequence
  Synthetic oligonucleotide
tgatggcctaacggcgagcgattttcgcgc

SEQ ID NO: 449328 - DNA, 30 bp, Artificial Sequence
  Synthetic oligonucleotide
agccggatacatggatgtggatgaaggcgc

SEQ ID NO: 449329 - DNA, 30 bp, Artificial Sequence
  Synthetic oligonucleotide
tctggacaaagtgccccgcaagtaaggcgc

SEQ ID NO: 449330 - DNA, 30 bp, Artificial Sequence
  Synthetic oligonucleotide
acaggaaatggcgcttgttatttcaggcgc

SEQ ID NO: 449331 - DNA, 30 bp, Artificial Sequence
  Synthetic oligonucleotide
ataagtaccgcgaaaagaagtcgacggcgc

SEQ ID NO: 449332 - DNA, 30 bp, Artificial Sequence
  Synthetic oligonucleotide
tggggagcgtctgggactaaggtccggcgc

SEQ ID NO: 449333 - DNA, 30 bp, Artificial Sequence
  Synthetic oligonucleotide
ccgttattcgaactttcagataggcggcgc

SEQ ID NO: 449334 - DNA, 30 bp, Artificial Sequence
  Synthetic oligonucleotide
agttggcacatactattttccgggcggcgc

SEQ ID NO: 449335 - DNA, 30 bp, Artificial Sequence
  Synthetic oligonucleotide
acaggttgtactagacgacgatggcggcgc

SEQ ID NO: 449336 - DNA, 30 bp, Artificial Sequence
  Synthetic oligonucleotide
aggatagggcacgtggggattatagggcgc

SEQ ID NO: 449337 - DNA, 30 bp, Artificial Sequence
  Synthetic oligonucleotide
ctccctatcggctcacgtcccggcgggcgc

SEQ ID NO: 449338 - DNA, 30 bp, Artificial Sequence
  Synthetic oligonucleotide
taaatgcgcccatccggccgtgtcgggcgc

SEQ ID NO: 449339 - DNA, 30 bp, Artificial Sequence
  Synthetic oligonucleotide
ttcaacctttcgtcgcgatacttcgggcgc

SEQ ID NO: 449340 - DNA, 30 bp, Artificial Sequence
  Synthetic oligonucleotide
ttggaacagcggcagcgtaaattggggcgc

SEQ ID NO: 449341 - DNA, 30 bp, Artificial Sequence
  Synthetic oligonucleotide
cttttatgagcgttctgggttaatgggcgc

SEQ ID NO: 449342 - DNA, 30 bp, Artificial Sequence
  Synthetic oligonucleotide
tagcgtgccttttggaaatgcggtgggcgc

SEQ ID NO: 449343 - DNA, 30 bp, Artificial Sequence
  Synthetic oligonucleotide
tgtcggtatttgaatggatacggatggcgc

SEQ ID NO: 449344 - DNA, 30 bp, Artificial Sequence
  Synthetic oligonucleotide
ggtgaagtggtaggcccagtgcagtggcgc

SEQ ID NO: 449345 - DNA, 30 bp, Artificial Sequence
  Synthetic oligonucleotide
tgtcttctaatgcgtgtctgctgcatgcgc

SEQ ID NO: 449346 - DNA, 30 bp, Artificial Sequence
  Synthetic oligonucleotide
tattcaaaaatacacgctatttagatgcgc

SEQ ID NO: 449347 - DNA, 30 bp, Artificial Sequence
  Synthetic oligonucleotide
tttacaaagaatcttccggaatggatgcgc

SEQ ID NO: 449348 - DNA, 30 bp, Artificial Sequence
  Synthetic oligonucleotide
aatgcgggactctatcatcgatctatgcgc

SEQ ID NO: 449349 - DNA, 30 bp, Artificial Sequence
  Synthetic oligonucleotide
caaaattcgaccttttcgtatagtatgcgc

SEQ ID NO: 449350 - DNA, 30 bp, Artificial Sequence
  Synthetic oligonucleotide
agtagacagctatacctactgggtatgcgc

SEQ ID NO: 449351 - DNA, 30 bp, Artificial Sequence
  Synthetic oligonucleotide
aaccccttggagctatggataccgctgcgc

SEQ ID NO: 449352 - DNA, 30 bp, Artificial Sequence
  Synthetic oligonucleotide
aaactcattcaagaggcaaacaatctgcgc

SEQ ID NO: 449353 - DNA, 30 bp, Artificial Sequence
  Synthetic oligonucleotide
gaggtctgtgttgcagccacggctctgcgc

SEQ ID NO: 449354 - DNA, 30 bp, Artificial Sequence
  Synthetic oligonucleotide
cgccgccggccgagtcagtcggacgtgcgc

SEQ ID NO: 449355 - DNA, 30 bp, Artificial Sequence
  Synthetic oligonucleotide
gatggcgtgctttagacaaaacccgtgcgc

SEQ ID NO: 449356 - DNA, 30 bp, Artificial Sequence
  Synthetic oligonucleotide
cagccacgggttcgtgcccattgcgtgcgc

SEQ ID NO: 449357 - DNA, 30 bp, Artificial Sequence
  Synthetic oligonucleotide
gtcgtttttccgagccggttccgggtgcgc

SEQ ID NO: 449358 - DNA, 30 bp, Artificial Sequence
  Synthetic oligonucleotide
acagtattgctggccaactgtgatgtgcgc

SEQ ID NO: 449359 - DNA, 30 bp, Artificial Sequence
  Synthetic oligonucleotide
taggtatacacgtttacaaacgtcttgcgc

SEQ ID NO: 449360 - DNA, 30 bp, Artificial Sequence
  Synthetic oligonucleotide
agcagcgttcattcaccaaggttcttgcgc

SEQ ID NO: 449361 - DNA, 30 bp, Artificial Sequence
  Synthetic oligonucleotide
taccggccttcagatgagccgcgtttgcgc

SEQ ID NO: 449362 - DNA, 30 bp, Artificial Sequence
  Synthetic oligonucleotide
tatataggtttaggaaggcccgttttgcgc

SEQ ID NO: 449363 - DNA, 30 bp, Artificial Sequence
  Synthetic oligonucleotide
aaccgtcgcttgcgcaccatttcaaatcgc

SEQ ID NO: 449364 - DNA, 30 bp, Artificial Sequence
  Synthetic oligonucleotide
agcgactggtatcgttcctgatacaatcgc

SEQ ID NO: 449365 - DNA, 30 bp, Artificial Sequence
  Synthetic oligonucleotide
ctaacctaaggtcaattttgcagcaatcgc

SEQ ID NO: 449366 - DNA, 30 bp, Artificial Sequence
  Synthetic oligonucleotide
tgggacttatttcttggctgacgcaatcgc

SEQ ID NO: 449367 - DNA, 30 bp, Artificial Sequence
  Synthetic oligonucleotide
gagcggaccagctccttacgtgtcaatcgc

SEQ ID NO: 449368 - DNA, 30 bp, Artificial Sequence
  Synthetic oligonucleotide
atcaaacccagacgtatgtgaagtaatcgc

SEQ ID NO: 449369 - DNA, 30 bp, Artificial Sequence
  Synthetic oligonucleotide
agatttgtgcaccggatctttcgtaatcgc

SEQ ID NO: 449370 - DNA, 30 bp, Artificial Sequence
  Synthetic oligonucleotide
cggtcctctatacgcggtaatagacatcgc

SEQ ID NO: 449371 - DNA, 30 bp, Artificial Sequence
  Synthetic oligonucleotide
attcatcccatggatggggttagacatcgc

SEQ ID NO: 449372 - DNA, 30 bp, Artificial Sequence
  Synthetic oligonucleotide
tataccattgcattaacagcggtagatcgc

SEQ ID NO: 449373 - DNA, 30 bp, Artificial Sequence
  Synthetic oligonucleotide
taacaacagagacggccgggattagatcgc

SEQ ID NO: 449374 - DNA, 30 bp, Artificial Sequence
  Synthetic oligonucleotide
aatcggcagaagtgtcccgtattcgatcgc

SEQ ID NO: 449375 - DNA, 30 bp, Artificial Sequence
  Synthetic oligonucleotide
gttcatctctcgagtggactcacggatcgc

SEQ ID NO: 449376 - DNA, 30 bp, Artificial Sequence
  Synthetic oligonucleotide
ttacgcgcaactccgcttatcatggatcgc

SEQ ID NO: 449377 - DNA, 30 bp, Artificial Sequence
  Synthetic oligonucleotide
gtgagacatcagaatctgtctttggatcgc

SEQ ID NO: 449378 - DNA, 30 bp, Artificial Sequence
  Synthetic oligonucleotide
aaaagggccccaagtcgcctaattgatcgc

SEQ ID NO: 449379 - DNA, 30 bp, Artificial Sequence
  Synthetic oligonucleotide
tgaaagactagcagacaaccgattgatcgc

SEQ ID NO: 449380 - DNA, 30 bp, Artificial Sequence
  Synthetic oligonucleotide
aagtatagaggccatgaggcccaatatcgc

SEQ ID NO: 449381 - DNA, 30 bp, Artificial Sequence
  Synthetic oligonucleotide
aggctttcggcattataattagcctatcgc

SEQ ID NO: 449382 - DNA, 30 bp, Artificial Sequence
  Synthetic oligonucleotide
acgcggaagcagtgacggatagtctatcgc

SEQ ID NO: 449383 - DNA, 30 bp, Artificial Sequence
  Synthetic oligonucleotide
ggttatgtgcgggggattgagagaactcgc

SEQ ID NO: 449384 - DNA, 30 bp, Artificial Sequence
  Synthetic oligonucleotide
agtccgcccggtgtataatatagcactcgc

SEQ ID NO: 449385 - DNA, 30 bp, Artificial Sequence
  Synthetic oligonucleotide
gaaactatacccatcaaaaactctactcgc

SEQ ID NO: 449386 - DNA, 30 bp, Artificial Sequence
  Synthetic oligonucleotide
caggccacggataggaaggcccgacctcgc

SEQ ID NO: 449387 - DNA, 30 bp, Artificial Sequence
  Synthetic oligonucleotide
acatatacgttaccgctgttttcccctcgc

SEQ ID NO: 449388 - DNA, 30 bp, Artificial Sequence
  Synthetic oligonucleotide
tattgacgtagctgttatcggttccctcgc

SEQ ID NO: 449389 - DNA, 30 bp, Artificial Sequence
  Synthetic oligonucleotide
gcgggatgcagccctattgagctgcctcgc

SEQ ID NO: 449390 - DNA, 30 bp, Artificial Sequence
  Synthetic oligonucleotide
attcatgcagtatttggggggggtcctcgc

SEQ ID NO: 449391 - DNA, 30 bp, Artificial Sequence
  Synthetic oligonucleotide
tctttaattgtagggtagtcaatagctcgc

SEQ ID NO: 449392 - DNA, 30 bp, Artificial Sequence
  Synthetic oligonucleotide
tgcccattctcaattgcgtcttaggctcgc

SEQ ID NO: 449393 - DNA, 30 bp, Artificial Sequence
  Synthetic oligonucleotide
ttgataatatctgtgtcgtttgatgctcgc

SEQ ID NO: 449394 - DNA, 30 bp, Artificial Sequence
  Synthetic oligonucleotide
ttgaaggtaagtgagcgtgaatactctcgc

SEQ ID NO: 449395 - DNA, 30 bp, Artificial Sequence
  Synthetic oligonucleotide
taaagattgacgccgtcttaaagctctcgc

SEQ ID NO: 449396 - DNA, 30 bp, Artificial Sequence
  Synthetic oligonucleotide
cgacagcgtgacccgataatgggctctcgc

SEQ ID NO: 449397 - DNA, 30 bp, Artificial Sequence
  Synthetic oligonucleotide
cagctgtgaggtacgctcgatccttctcgc

SEQ ID NO: 449398 - DNA, 30 bp, Artificial Sequence
  Synthetic oligonucleotide
tatactagccacgggtagcttgaaagtcgc

SEQ ID NO: 449399 - DNA, 30 bp, Artificial Sequence
  Synthetic oligonucleotide
tccgacgcttcttctgtcccggcaagtcgc

SEQ ID NO: 449400 - DNA, 30 bp, Artificial Sequence
  Synthetic oligonucleotide
gtagtcaaatattccgacgattgcagtcgc

SEQ ID NO: 449401 - DNA, 30 bp, Artificial Sequence
  Synthetic oligonucleotide
gcgcggtgctcgcatagtgtgcagagtcgc

SEQ ID NO: 449402 - DNA, 30 bp, Artificial Sequence
  Synthetic oligonucleotide
cgcaggcgcctcccttaggtaaatagtcgc

SEQ ID NO: 449403 - DNA, 30 bp, Artificial Sequence
  Synthetic oligonucleotide
ttgcaaccgattatcgatgagtatagtcgc

SEQ ID NO: 449404 - DNA, 30 bp, Artificial Sequence
  Synthetic oligonucleotide
gaatgtgagccatgacaaacgtaacgtcgc

SEQ ID NO: 449405 - DNA, 30 bp, Artificial Sequence
  Synthetic oligonucleotide
gagttacccggtcaattaatgcggcgtcgc

SEQ ID NO: 449406 - DNA, 30 bp, Artificial Sequence
  Synthetic oligonucleotide
ttccatgatcagtacctgctaaacggtcgc

SEQ ID NO: 449407 - DNA, 30 bp, Artificial Sequence
  Synthetic oligonucleotide
gatcacaacgacggggttccggtgggtcgc

SEQ ID NO: 449408 - DNA, 30 bp, Artificial Sequence
  Synthetic oligonucleotide
cagagtggcccagtccgtagttaatgtcgc

SEQ ID NO: 449409 - DNA, 30 bp, Artificial Sequence
  Synthetic oligonucleotide
atacaagtcgtaaattccgtggcatgtcgc

SEQ ID NO: 449410 - DNA, 30 bp, Artificial Sequence
  Synthetic oligonucleotide
ccgcctttcgctgcagagctggtctgtcgc

SEQ ID NO: 449411 - DNA, 30 bp, Artificial Sequence
  Synthetic oligonucleotide
gttcagctctttcgtgcttagatgtgtcgc

SEQ ID NO: 449412 - DNA, 30 bp, Artificial Sequence
  Synthetic oligonucleotide
atgaaggcaagccgacacgaaacttgtcgc

SEQ ID NO: 449413 - DNA, 30 bp, Artificial Sequence
  Synthetic oligonucleotide
gaatttgactataatgtagcatgttgtcgc

SEQ ID NO: 449414 - DNA, 30 bp, Artificial Sequence
  Synthetic oligonucleotide
ttgtcgtacaagcgccggaagctttgtcgc

SEQ ID NO: 449415 - DNA, 30 bp, Artificial Sequence
  Synthetic oligonucleotide
ccgcagtccgatcatttaattaaaattcgc

SEQ ID NO: 449416 - DNA, 30 bp, Artificial Sequence
  Synthetic oligonucleotide
taaatatctaacgtacaacgccaaattcgc

SEQ ID NO: 449417 - DNA, 30 bp, Artificial Sequence
  Synthetic oligonucleotide
tgattcagactcgcgatttaagcccttcgc

SEQ ID NO: 449418 - DNA, 30 bp, Artificial Sequence
  Synthetic oligonucleotide
cacagtgatgttcgtgcatggactcttcgc

SEQ ID NO: 449419 - DNA, 30 bp, Artificial Sequence
  Synthetic oligonucleotide
cttagtagattcaatcattggcgtcttcgc

SEQ ID NO: 449420 - DNA, 30 bp, Artificial Sequence
  Synthetic oligonucleotide
atcttatgtaattcactgactggtcttcgc

SEQ ID NO: 449421 - DNA, 30 bp, Artificial Sequence
  Synthetic oligonucleotide
aaaatacaattatcatttttgcacgttcgc

SEQ ID NO: 449422 - DNA, 30 bp, Artificial Sequence
  Synthetic oligonucleotide
ttctcggtaacccatcgtcgcagggttcgc

SEQ ID NO: 449423 - DNA, 30 bp, Artificial Sequence
  Synthetic oligonucleotide
tatgtgtaagaaccaaaatctttggttcgc

SEQ ID NO: 449424 - DNA, 30 bp, Artificial Sequence
  Synthetic oligonucleotide
ctgttttcgtatcaccggggtttggttcgc

SEQ ID NO: 449425 - DNA, 30 bp, Artificial Sequence
  Synthetic oligonucleotide
gcaggttcatcacatggcgaataatttcgc

SEQ ID NO: 449426 - DNA, 30 bp, Artificial Sequence
  Synthetic oligonucleotide
gagtggcacgtggggatgaattgctttcgc

SEQ ID NO: 449427 - DNA, 30 bp, Artificial Sequence
  Synthetic oligonucleotide
cacaaaaggcgcttacatcagtgttttcgc

SEQ ID NO: 449428 - DNA, 30 bp, Artificial Sequence
  Synthetic oligonucleotide
ctgatctatgttataagaatgtaaaaaggc

SEQ ID NO: 449429 - DNA, 31 bp, Artificial Sequence
  Synthetic oligonucleotide
gcaggctagcttcaggcgcttcgacaaaggc

SEQ ID NO: 449430 - DNA, 30 bp, Artificial Sequence
  Synthetic oligonucleotide
cctgaggctaggtcggaactgaccaaaggc

SEQ ID NO: 449431 - DNA, 30 bp, Artificial Sequence
  Synthetic oligonucleotide
tccgactctgagtcacggctctgcaaaggc

SEQ ID NO: 449432 - DNA, 30 bp, Artificial Sequence
  Synthetic oligonucleotide
gtgcaggccccggggtattgcgcgaaaggc

SEQ ID NO: 449433 - DNA, 30 bp, Artificial Sequence
  Synthetic oligonucleotide
aatctttcctaatctcattaaagtaaaggc

SEQ ID NO: 449434 - DNA, 30 bp, Artificial Sequence
  Synthetic oligonucleotide
gggtggtcgttactgtagtaccttaaaggc

SEQ ID NO: 449435 - DNA, 30 bp, Artificial Sequence
  Synthetic oligonucleotide
ggtattagcatccgaggagtcggacaaggc

SEQ ID NO: 449436 - DNA, 30 bp, Artificial Sequence
  Synthetic oligonucleotide
gtgcctggcgttaatcctattatacaaggc

SEQ ID NO: 449437 - DNA, 31 bp, Artificial Sequence
  Synthetic oligonucleotide
atcccgctatgaagcgatccacgcgcaaggc

SEQ ID NO: 449438 - DNA, 30 bp, Artificial Sequence
  Synthetic oligonucleotide
tagtacgcacaatatatatccttgcaaggc

SEQ ID NO: 449439 - DNA, 30 bp, Artificial Sequence
  Synthetic oligonucleotide
aaggaaggagttttgggggctcttcaaggc

SEQ ID NO: 449440 - DNA, 30 bp, Artificial Sequence
  Synthetic oligonucleotide
gaagatattgagccttcgctgtcagaaggc

SEQ ID NO: 449441 - DNA, 30 bp, Artificial Sequence
  Synthetic oligonucleotide
tctgatggggctttcgttgtacgagaaggc

SEQ ID NO: 449442 - DNA, 30 bp, Artificial Sequence
  Synthetic oligonucleotide
gatatgctagttatgaaatcgtaggaaggc

SEQ ID NO: 449443 - DNA, 30 bp, Artificial Sequence
  Synthetic oligonucleotide
ggggtgaagggcgggccagcttaggaaggc

SEQ ID NO: 449444 - DNA, 30 bp, Artificial Sequence
  Synthetic oligonucleotide
tgtctgcggattactgggcctaatgaaggc

SEQ ID NO: 449445 - DNA, 30 bp, Artificial Sequence
  Synthetic oligonucleotide
gtgggagggccctgacagtaccaataaggc

SEQ ID NO: 449446 - DNA, 30 bp, Artificial Sequence
  Synthetic oligonucleotide
ttcaatggggcgtttagtgcaaagtaaggc

SEQ ID NO: 449447 - DNA, 30 bp, Artificial Sequence
  Synthetic oligonucleotide
tgtttgccatgccctaatggaaagtaaggc

SEQ ID NO: 449448 - DNA, 30 bp, Artificial Sequence
  Synthetic oligonucleotide
gggttatgatcagcggcggtgaggtaaggc

SEQ ID NO: 449449 - DNA, 30 bp, Artificial Sequence
  Synthetic oligonucleotide
agtcaaaagatcgggacagccaattaaggc

SEQ ID NO: 449450 - DNA, 30 bp, Artificial Sequence
  Synthetic oligonucleotide
ttctgttgatgggctgacttgagttaaggc

SEQ ID NO: 449451 - DNA, 30 bp, Artificial Sequence
  Synthetic oligonucleotide
atatctataataggtcattggagaacaggc

SEQ ID NO: 449452 - DNA, 30 bp, Artificial Sequence
  Synthetic oligonucleotide
tgatacattacatatggtggtgacacaggc

SEQ ID NO: 449453 - DNA, 30 bp, Artificial Sequence
  Synthetic oligonucleotide
gccggctatgaaccgtattgaaagacaggc

SEQ ID NO: 449454 - DNA, 30 bp, Artificial Sequence
  Synthetic oligonucleotide
attaattcatcagtcggcctcggcccaggc

SEQ ID NO: 449455 - DNA, 30 bp, Artificial Sequence
  Synthetic oligonucleotide
gtataatcggaccgattctccctcccaggc

SEQ ID NO: 449456 - DNA, 30 bp, Artificial Sequence
  Synthetic oligonucleotide
acgggcgtagctgccgcctggcatccaggc

SEQ ID NO: 449457 - DNA, 30 bp, Artificial Sequence
  Synthetic oligonucleotide
aagcttttaaattccggattaactccaggc

SEQ ID NO: 449458 - DNA, 30 bp, Artificial Sequence
  Synthetic oligonucleotide
tgctcttattaactgctatgtgttccaggc

SEQ ID NO: 449459 - DNA, 30 bp, Artificial Sequence
  Synthetic oligonucleotide
atacggcaccctaaggatgagcacgcaggc

SEQ ID NO: 449460 - DNA, 30 bp, Artificial Sequence
  Synthetic oligonucleotide
ctcgtctgtcaaacgctttcacaggcaggc

SEQ ID NO: 449461 - DNA, 30 bp, Artificial Sequence
  Synthetic oligonucleotide
aatataaaatggacggctaatatggcaggc

SEQ ID NO: 449462 - DNA, 30 bp, Artificial Sequence
  Synthetic oligonucleotide
ccccattcttactcatcgaattatgcaggc

SEQ ID NO: 449463 - DNA, 30 bp, Artificial Sequence
  Synthetic oligonucleotide
tacaccagacaatgagcagcatgtgcaggc

SEQ ID NO: 449464 - DNA, 30 bp, Artificial Sequence
  Synthetic oligonucleotide
tttggaaaggtgccccgtgcttttgcaggc

SEQ ID NO: 449465 - DNA, 30 bp, Artificial Sequence
  Synthetic oligonucleotide
gatagaatggtctggatccggtcatcaggc

SEQ ID NO: 449466 - DNA, 30 bp, Artificial Sequence
  Synthetic oligonucleotide
gtgaaatgactgattgtttgaatatcaggc

SEQ ID NO: 449467 - DNA, 30 bp, Artificial Sequence
  Synthetic oligonucleotide
gagtgtggcggtacctcttggggctcaggc

SEQ ID NO: 449468 - DNA, 30 bp, Artificial Sequence
  Synthetic oligonucleotide
gctctgtgaccggcggtaccttcgtcaggc

SEQ ID NO: 449469 - DNA, 30 bp, Artificial Sequence
  Synthetic oligonucleotide
gggaaaaatgacattctaaattattcaggc

SEQ ID NO: 449470 - DNA, 30 bp, Artificial Sequence
  Synthetic oligonucleotide
atacaattttgcgggtacccaatttcaggc

SEQ ID NO: 449471 - DNA, 30 bp, Artificial Sequence
  Synthetic oligonucleotide
ttaatgcgatgaatttgaatgcgaagaggc

SEQ ID NO: 449472 - DNA, 30 bp, Artificial Sequence
  Synthetic oligonucleotide
tatttaaggggagctaggaggggaagaggc

SEQ ID NO: 449473 - DNA, 30 bp, Artificial Sequence
  Synthetic oligonucleotide
aacgtagcggcgcatgagtgtcccagaggc

SEQ ID NO: 449474 - DNA, 30 bp, Artificial Sequence
  Synthetic oligonucleotide
gatacgtcggtcagcaaaacctccagaggc

SEQ ID NO: 449475 - DNA, 30 bp, Artificial Sequence
  Synthetic oligonucleotide
gccctcgtaagttatttgactaagagaggc

SEQ ID NO: 449476 - DNA, 30 bp, Artificial Sequence
  Synthetic oligonucleotide
gtattacgaccgcatcaaacgctgagaggc

SEQ ID NO: 449477 - DNA, 30 bp, Artificial Sequence
  Synthetic oligonucleotide
ctgattttatcggacaatctctatagaggc

SEQ ID NO: 449478 - DNA, 30 bp, Artificial Sequence
  Synthetic oligonucleotide
tcaggatacggtgcatagccgcctagaggc

SEQ ID NO: 449479 - DNA, 30 bp, Artificial Sequence
  Synthetic oligonucleotide
ggtgcggctgcagggtgaacgagacgaggc

SEQ ID NO: 449480 - DNA, 30 bp, Artificial Sequence
  Synthetic oligonucleotide
ggaccacttgctagtcgttggagccgaggc

SEQ ID NO: 449481 - DNA, 30 bp, Artificial Sequence
  Synthetic oligonucleotide
agacacctggcccgtaagttggaaggaggc

SEQ ID NO: 449482 - DNA, 30 bp, Artificial Sequence
  Synthetic oligonucleotide
tatttctctgggccgcatgatgtaggaggc

SEQ ID NO: 449483 - DNA, 30 bp, Artificial Sequence
  Synthetic oligonucleotide
ggtgccacactcgcctgggcaaacggaggc

SEQ ID NO: 449484 - DNA, 30 bp, Artificial Sequence
  Synthetic oligonucleotide
ataaacgaattaggttatgcgaccggaggc

SEQ ID NO: 449485 - DNA, 30 bp, Artificial Sequence
  Synthetic oligonucleotide
ggatcttcggttagcacatcccccggaggc

SEQ ID NO: 449486 - DNA, 30 bp, Artificial Sequence
  Synthetic oligonucleotide
aggatgacctgccggtatagctccggaggc

SEQ ID NO: 449487 - DNA, 30 bp, Artificial Sequence
  Synthetic oligonucleotide
aattatgtactcatcatgatacgcggaggc

SEQ ID NO: 449488 - DNA, 30 bp, Artificial Sequence
  Synthetic oligonucleotide
atttgtgctgccggtaaatctctcggaggc

SEQ ID NO: 449489 - DNA, 30 bp, Artificial Sequence
  Synthetic oligonucleotide
gctcgttcacctgtgtcggttctcggaggc

SEQ ID NO: 449490 - DNA, 30 bp, Artificial Sequence
  Synthetic oligonucleotide
ggggccgccggcgtaaagtgggtcggaggc

SEQ ID NO: 449491 - DNA, 30 bp, Artificial Sequence
  Synthetic oligonucleotide
attcccagtgttggcagcggagcgggaggc

SEQ ID NO: 449492 - DNA, 30 bp, Artificial Sequence
  Synthetic oligonucleotide
tcgcaccaagcggcggcagcatatggaggc

SEQ ID NO: 449493 - DNA, 30 bp, Artificial Sequence
  Synthetic oligonucleotide
gctatattcacattgatattgcctggaggc

SEQ ID NO: 449494 - DNA, 30 bp, Artificial Sequence
  Synthetic oligonucleotide
caacgaattggtatcaggtttcttggaggc

SEQ ID NO: 449495 - DNA, 30 bp, Artificial Sequence
  Synthetic oligonucleotide
catcggatctttggtagactcaaatgaggc

SEQ ID NO: 449496 - DNA, 30 bp, Artificial Sequence
  Synthetic oligonucleotide
gaactcgtgcgagtagggcgagcctgaggc

SEQ ID NO: 449497 - DNA, 30 bp, Artificial Sequence
  Synthetic oligonucleotide
cggcagctttggctcgttttaatctgaggc

SEQ ID NO: 449498 - DNA, 30 bp, Artificial Sequence
  Synthetic oligonucleotide
tagatttcttggccgagacaagagtgaggc

SEQ ID NO: 449499 - DNA, 30 bp, Artificial Sequence
  Synthetic oligonucleotide
catcggacaaccgggtgaggttagtgaggc

SEQ ID NO: 449500 - DNA, 30 bp, Artificial Sequence
  Synthetic oligonucleotide
tagtatagagaaaagtcccctacgtgaggc

SEQ ID NO: 449501 - DNA, 30 bp, Artificial Sequence
  Synthetic oligonucleotide
tctcccggaccgctgcaaggagtttgaggc

SEQ ID NO: 449502 - DNA, 30 bp, Artificial Sequence
  Synthetic oligonucleotide
aagtgtaggggccgataccgtaacataggc

SEQ ID NO: 449503 - DNA, 30 bp, Artificial Sequence
  Synthetic oligonucleotide
aaagtgcgcgtcagcctagtggacataggc

SEQ ID NO: 449504 - DNA, 30 bp, Artificial Sequence
  Synthetic oligonucleotide
gctattctgttcgtctttggcaccataggc

SEQ ID NO: 449505 - DNA, 30 bp, Artificial Sequence
  Synthetic oligonucleotide
caaaaaataatggcgtggtcttccataggc

SEQ ID NO: 449506 - DNA, 30 bp, Artificial Sequence
  Synthetic oligonucleotide
ggcactcactgtagtctgagcgtcataggc

SEQ ID NO: 449507 - DNA, 30 bp, Artificial Sequence
  Synthetic oligonucleotide
gaaatgcccgaagtctggggattcataggc

SEQ ID NO: 449508 - DNA, 30 bp, Artificial Sequence
  Synthetic oligonucleotide
aatcaatttttgtctcttggaaagataggc

SEQ ID NO: 449509 - DNA, 30 bp, Artificial Sequence
  Synthetic oligonucleotide
gtgacaagtctgtaaggcaagatgataggc

SEQ ID NO: 449510 - DNA, 30 bp, Artificial Sequence
  Synthetic oligonucleotide
accacggacgcacttatcagcgtgataggc

SEQ ID NO: 449511 - DNA, 30 bp, Artificial Sequence
  Synthetic oligonucleotide
aagatttatttgtaaacaattttcctaggc

SEQ ID NO: 449512 - DNA, 30 bp, Artificial Sequence
  Synthetic oligonucleotide
gagccgaactccagcagccaagtgctaggc

SEQ ID NO: 449513 - DNA, 30 bp, Artificial Sequence
  Synthetic oligonucleotide
tatcaaaaattgtgatgtggacatctaggc

SEQ ID NO: 449514 - DNA, 30 bp, Artificial Sequence
  Synthetic oligonucleotide
aacctttagttcggcacacaatgtctaggc

SEQ ID NO: 449515 - DNA, 30 bp, Artificial Sequence
  Synthetic oligonucleotide
aaatatcttcccggtcgttcttgtctaggc

SEQ ID NO: 449516 - DNA, 30 bp, Artificial Sequence
  Synthetic oligonucleotide
tgaagcgtgaggtgagttcgttcagtaggc

SEQ ID NO: 449517 - DNA, 30 bp, Artificial Sequence
  Synthetic oligonucleotide
atctggtgtttttgtaagtagggagtaggc

SEQ ID NO: 449518 - DNA, 31 bp, Artificial Sequence
  Synthetic oligonucleotide
atgtttctagacgattcgtgtttccgtaggc

SEQ ID NO: 449519 - DNA, 30 bp, Artificial Sequence
  Synthetic oligonucleotide
tttttccccgcaaacggcaatcgcgtaggc

SEQ ID NO: 449520 - DNA, 30 bp, Artificial Sequence
  Synthetic oligonucleotide
tttgctaaatgaatcatttgccaggtaggc

SEQ ID NO: 449521 - DNA, 30 bp, Artificial Sequence
  Synthetic oligonucleotide
gcatcccgagagtggccttcccgggtaggc

SEQ ID NO: 449522 - DNA, 30 bp, Artificial Sequence
  Synthetic oligonucleotide
tacaattgttgattcgcaaactctgtaggc

SEQ ID NO: 449523 - DNA, 30 bp, Artificial Sequence
  Synthetic oligonucleotide
gctctatgcagctaccatgtttgtgtaggc

SEQ ID NO: 449524 - DNA, 30 bp, Artificial Sequence
  Synthetic oligonucleotide
gaggttcctctcacatacgttaaattaggc

SEQ ID NO: 449525 - DNA, 30 bp, Artificial Sequence
  Synthetic oligonucleotide
tatctctttaatgcagggacggaattaggc

SEQ ID NO: 449526 - DNA, 30 bp, Artificial Sequence
  Synthetic oligonucleotide
actcctgacgcgaactgagtgggattaggc

SEQ ID NO: 449527 - DNA, 30 bp, Artificial Sequence
  Synthetic oligonucleotide
gtggttgtagttgctcatgcgttattaggc

SEQ ID NO: 449528 - DNA, 30 bp, Artificial Sequence
  Synthetic oligonucleotide
gagcaacaggcagcatatgtgatgttaggc

SEQ ID NO: 449529 - DNA, 30 bp, Artificial Sequence
  Synthetic oligonucleotide
atgcagtgaagagggaaggcacatttaggc

SEQ ID NO: 449530 - DNA, 30 bp, Artificial Sequence
  Synthetic oligonucleotide
acgatctcaatctatccggcgagtttaggc

SEQ ID NO: 449531 - DNA, 31 bp, Artificial Sequence
  Synthetic oligonucleotide
agcgtgcctacttaaacccctggttttaggc

SEQ ID NO: 449532 - DNA, 30 bp, Artificial Sequence
  Synthetic oligonucleotide
cccgtggcttgcctagcttaggaaaacggc

SEQ ID NO: 449533 - DNA, 30 bp, Artificial Sequence
  Synthetic oligonucleotide
ggcaggcgcagccgcgagcggggaaacggc

SEQ ID NO: 449534 - DNA, 30 bp, Artificial Sequence
  Synthetic oligonucleotide
aataaatactgctctgtattcatcaacggc

SEQ ID NO: 449535 - DNA, 30 bp, Artificial Sequence
  Synthetic oligonucleotide
tcagaattatgtacttttggcaagaacggc

SEQ ID NO: 449536 - DNA, 30 bp, Artificial Sequence
  Synthetic oligonucleotide
aaaccataatatggtcagccctagaacggc

SEQ ID NO: 449537 - DNA, 30 bp, Artificial Sequence
  Synthetic oligonucleotide
taacatatgccttacacggcgatgaacggc

SEQ ID NO: 449538 - DNA, 30 bp, Artificial Sequence
  Synthetic oligonucleotide
agtacaatttcgggcggagcacctaacggc

SEQ ID NO: 449539 - DNA, 30 bp, Artificial Sequence
  Synthetic oligonucleotide
cataactctgggcattactccggtaacggc

SEQ ID NO: 449540 - DNA, 30 bp, Artificial Sequence
  Synthetic oligonucleotide
ccaatccaccgcaggcaacatgttaacggc

SEQ ID NO: 449541 - DNA, 30 bp, Artificial Sequence
  Synthetic oligonucleotide
cgcgtaatttgctcaattttacgacacggc

SEQ ID NO: 449542 - DNA, 30 bp, Artificial Sequence
  Synthetic oligonucleotide
ggtactcgatagaagtaataactacacggc

SEQ ID NO: 449543 - DNA, 30 bp, Artificial Sequence
  Synthetic oligonucleotide
tggttggcctgccagaagttggtacacggc

SEQ ID NO: 449544 - DNA, 30 bp, Artificial Sequence
  Synthetic oligonucleotide
atcatcaagttgtcttagtgacaccacggc

SEQ ID NO: 449545 - DNA, 30 bp, Artificial Sequence
  Synthetic oligonucleotide
aggcaattggcaggacacgcgggccacggc

SEQ ID NO: 449546 - DNA, 30 bp, Artificial Sequence
  Synthetic oligonucleotide
cccgccttagggggcaagtaatcgcacggc

SEQ ID NO: 449547 - DNA, 30 bp, Artificial Sequence
  Synthetic oligonucleotide
cgcactcactgttagagcgagatgcacggc

SEQ ID NO: 449548 - DNA, 30 bp, Artificial Sequence
  Synthetic oligonucleotide
ttgaagagccgtttagtatcgaatcacggc

SEQ ID NO: 449549 - DNA, 30 bp, Artificial Sequence
  Synthetic oligonucleotide
tcaaagcaccagtactgcttagatcacggc

SEQ ID NO: 449550 - DNA, 30 bp, Artificial Sequence
  Synthetic oligonucleotide
ctaccgggtgcacatcacgcacctcacggc

SEQ ID NO: 449551 - DNA, 30 bp, Artificial Sequence
  Synthetic oligonucleotide
ggccccatctgactgtgttttcctcacggc

SEQ ID NO: 449552 - DNA, 30 bp, Artificial Sequence
  Synthetic oligonucleotide
tggttctatttccccgccgtatcagacggc

SEQ ID NO: 449553 - DNA, 30 bp, Artificial Sequence
  Synthetic oligonucleotide
tttgcgatccagttgtgttgaaacgacggc

SEQ ID NO: 449554 - DNA, 30 bp, Artificial Sequence
  Synthetic oligonucleotide
ctacccgcgcaatctcgcgggaccgacggc

SEQ ID NO: 449555 - DNA, 30 bp, Artificial Sequence
  Synthetic oligonucleotide
gggtgtggattttcactacaaggggacggc

SEQ ID NO: 449556 - DNA, 30 bp, Artificial Sequence
  Synthetic oligonucleotide
ccggctgctgcccgtagtctcgatgacggc

SEQ ID NO: 449557 - DNA, 30 bp, Artificial Sequence
  Synthetic oligonucleotide
cgcgattcgtccagatgggcgggatacggc

SEQ ID NO: 449558 - DNA, 30 bp, Artificial Sequence
  Synthetic oligonucleotide
attagccaggttcgtagtaaaccctacggc

SEQ ID NO: 449559 - DNA, 30 bp, Artificial Sequence
  Synthetic oligonucleotide
ggcctgcgttctcgagggaagatgtacggc

SEQ ID NO: 449560 - DNA, 30 bp, Artificial Sequence
  Synthetic oligonucleotide
gcacctctgcagttcaggaacttgtacggc

SEQ ID NO: 449561 - DNA, 30 bp, Artificial Sequence
  Synthetic oligonucleotide
gtcacttcggggtagaggctttattacggc

SEQ ID NO: 449562 - DNA, 30 bp, Artificial Sequence
  Synthetic oligonucleotide
tgtagggggacgagattaaccggaaccggc

SEQ ID NO: 449563 - DNA, 30 bp, Artificial Sequence
  Synthetic oligonucleotide
attagtggcaagtgagcgcgtctaaccggc

SEQ ID NO: 449564 - DNA, 30 bp, Artificial Sequence
  Synthetic oligonucleotide
accagacgtatgcagcttatgtggaccggc

SEQ ID NO: 449565 - DNA, 30 bp, Artificial Sequence
  Synthetic oligonucleotide
tgaccgacagcattaggtcatggtaccggc

SEQ ID NO: 449566 - DNA, 30 bp, Artificial Sequence
  Synthetic oligonucleotide
aatggcagggccggcggtcgagaacccggc

SEQ ID NO: 449567 - DNA, 30 bp, Artificial Sequence
  Synthetic oligonucleotide
attgtgggaattcggtgaaagtcacccggc

SEQ ID NO: 449568 - DNA, 30 bp, Artificial Sequence
  Synthetic oligonucleotide
ggcttcggggggtttaaacggttacccggc

SEQ ID NO: 449569 - DNA, 30 bp, Artificial Sequence
  Synthetic oligonucleotide
aaacacaagttcttagtaaatgcccccggc

SEQ ID NO: 449570 - DNA, 30 bp, Artificial Sequence
  Synthetic oligonucleotide
actacttggagtcagtgaggtacagccggc

SEQ ID NO: 449571 - DNA, 30 bp, Artificial Sequence
  Synthetic oligonucleotide
catttttgatacaggtcgttatcagccggc

SEQ ID NO: 449572 - DNA, 30 bp, Artificial Sequence
  Synthetic oligonucleotide
ggcagagtcccaagtcactcgagagccggc

SEQ ID NO: 449573 - DNA, 30 bp, Artificial Sequence
  Synthetic oligonucleotide
attatatgaaaatttatatcgcgagccggc

SEQ ID NO: 449574 - DNA, 30 bp, Artificial Sequence
  Synthetic oligonucleotide
gagtaaatatcgcaagcctatccggccggc

SEQ ID NO: 449575 - DNA, 30 bp, Artificial Sequence
  Synthetic oligonucleotide
aaatcggcctcaggctcagctagggccggc

SEQ ID NO: 449576 - DNA, 30 bp, Artificial Sequence
  Synthetic oligonucleotide
gtattcgcgctttgcaggggcttggccggc

SEQ ID NO: 449577 - DNA, 30 bp, Artificial Sequence
  Synthetic oligonucleotide
gagtagtatcagattaggacctggtccggc

SEQ ID NO: 449578 - DNA, 30 bp, Artificial Sequence
  Synthetic oligonucleotide
tccttgcgacattctgaggctgtgtccggc

SEQ ID NO: 449579 - DNA, 30 bp, Artificial Sequence
  Synthetic oligonucleotide
gacttaattaactggtaggccagttccggc

SEQ ID NO: 449580 - DNA, 30 bp, Artificial Sequence
  Synthetic oligonucleotide
aaatcgacagagtcaccggtcctttccggc

SEQ ID NO: 449581 - DNA, 30 bp, Artificial Sequence
  Synthetic oligonucleotide
atttggagcccaagaaggtcattttccggc

SEQ ID NO: 449582 - DNA, 30 bp, Artificial Sequence
  Synthetic oligonucleotide
tcgtaaggccgcgctattctgtaaagcggc

SEQ ID NO: 449583 - DNA, 30 bp, Artificial Sequence
  Synthetic oligonucleotide
gcgcgctagaaaacacttggtttaagcggc

SEQ ID NO: 449584 - DNA, 30 bp, Artificial Sequence
  Synthetic oligonucleotide
ttgttaagactagccatatgagggagcggc

SEQ ID NO: 449585 - DNA, 30 bp, Artificial Sequence
  Synthetic oligonucleotide
ataaactccggcggcaggattcaccgcggc

SEQ ID NO: 449586 - DNA, 30 bp, Artificial Sequence
  Synthetic oligonucleotide
ggttagtctgtcatattattagggcgcggc

SEQ ID NO: 449587 - DNA, 30 bp, Artificial Sequence
  Synthetic oligonucleotide
gtcttgcaccggcttgagtagtggcgcggc

SEQ ID NO: 449588 - DNA, 30 bp, Artificial Sequence
  Synthetic oligonucleotide
tcatacatatctaaccctatgatgcgcggc

SEQ ID NO: 449589 - DNA, 30 bp, Artificial Sequence
  Synthetic oligonucleotide
gaaagatcggctgacttctggtctcgcggc

SEQ ID NO: 449590 - DNA, 30 bp, Artificial Sequence
  Synthetic oligonucleotide
ctgctcattacaaatgtactgccgggcggc

SEQ ID NO: 449591 - DNA, 30 bp, Artificial Sequence
  Synthetic oligonucleotide
taatctgggtcaggtgttacccgtggcggc

SEQ ID NO: 449592 - DNA, 30 bp, Artificial Sequence
  Synthetic oligonucleotide
acggtcgacgccagagccaataaatgcggc

SEQ ID NO: 449593 - DNA, 30 bp, Artificial Sequence
  Synthetic oligonucleotide
aaggaattggaaggtttagaaccatgcggc

SEQ ID NO: 449594 - DNA, 30 bp, Artificial Sequence
  Synthetic oligonucleotide
agacaagagcgcaggacagtcggatgcggc

SEQ ID NO: 449595 - DNA, 30 bp, Artificial Sequence
  Synthetic oligonucleotide
ggatttgcaaatctaaggacctgatgcggc

SEQ ID NO: 449596 - DNA, 30 bp, Artificial Sequence
  Synthetic oligonucleotide
tcggcgcatcggatctcgaccgcctgcggc

SEQ ID NO: 449597 - DNA, 30 bp, Artificial Sequence
  Synthetic oligonucleotide
catcgcacacctcattgtgactcctgcggc

SEQ ID NO: 449598 - DNA, 30 bp, Artificial Sequence
  Synthetic oligonucleotide
actcccactatgagagtcttatgctgcggc

SEQ ID NO: 449599 - DNA, 30 bp, Artificial Sequence
  Synthetic oligonucleotide
cctaccggtccccggggggatcggtgcggc

SEQ ID NO: 449600 - DNA, 30 bp, Artificial Sequence
  Synthetic oligonucleotide
atcaagggttttgggtgattttggtgcggc

SEQ ID NO: 449601 - DNA, 30 bp, Artificial Sequence
  Synthetic oligonucleotide
tatccaagctgcgtttagatattaatcggc

SEQ ID NO: 449602 - DNA, 30 bp, Artificial Sequence
  Synthetic oligonucleotide
ctgcacactgagtgacagcaaaccatcggc

SEQ ID NO: 449603 - DNA, 30 bp, Artificial Sequence
  Synthetic oligonucleotide
acgcaatgcggcgagctgcggatcatcggc

SEQ ID NO: 449604 - DNA, 30 bp, Artificial Sequence
  Synthetic oligonucleotide
aggacgaaacttatcatatgacggatcggc

SEQ ID NO: 449605 - DNA, 30 bp, Artificial Sequence
  Synthetic oligonucleotide
gcagtccgttagatctattagtatatcggc

SEQ ID NO: 449606 - DNA, 30 bp, Artificial Sequence
  Synthetic oligonucleotide
gataggttaatgtacggagcatacctcggc

SEQ ID NO: 449607 - DNA, 30 bp, Artificial Sequence
  Synthetic oligonucleotide
aacgcgctattaccgtgaacgggcctcggc

SEQ ID NO: 449608 - DNA, 30 bp, Artificial Sequence
  Synthetic oligonucleotide
tggataggaggattcagaagctggctcggc

SEQ ID NO: 449609 - DNA, 30 bp, Artificial Sequence
  Synthetic oligonucleotide
attttgacccgacgcatggtcaccgtcggc

SEQ ID NO: 449610 - DNA, 30 bp, Artificial Sequence
  Synthetic oligonucleotide
gagccgcggcgggtgtgcgctgaggtcggc

SEQ ID NO: 449611 - DNA, 30 bp, Artificial Sequence
  Synthetic oligonucleotide
cctctcagcacgggccgttctaatgtcggc

SEQ ID NO: 449612 - DNA, 30 bp, Artificial Sequence
  Synthetic oligonucleotide
gaatgtttagtagtcacggcggcattcggc

SEQ ID NO: 449613 - DNA, 30 bp, Artificial Sequence
  Synthetic oligonucleotide
gttgcctcgcctgttgctataggattcggc

SEQ ID NO: 449614 - DNA, 30 bp, Artificial Sequence
  Synthetic oligonucleotide
tacgcttgctgcgatgaactgtgattcggc

SEQ ID NO: 449615 - DNA, 30 bp, Artificial Sequence
  Synthetic oligonucleotide
gtagtcttggagtgactcaggatattcggc

SEQ ID NO: 449616 - DNA, 30 bp, Artificial Sequence
  Synthetic oligonucleotide
gcaattatgccgagcgtctcgttcttcggc

SEQ ID NO: 449617 - DNA, 30 bp, Artificial Sequence
  Synthetic oligonucleotide
ggacgattttgtgcgggcagaccgttcggc

SEQ ID NO: 449618 - DNA, 30 bp, Artificial Sequence
  Synthetic oligonucleotide
tgccgctactgcgcggcgtccactttcggc

SEQ ID NO: 449619 - DNA, 30 bp, Artificial Sequence
  Synthetic oligonucleotide
tttcttgggggcccataacatgaaaagggc

SEQ ID NO: 449620 - DNA, 30 bp, Artificial Sequence
  Synthetic oligonucleotide
gctcttgccagggtcgagtgtccaaagggc

SEQ ID NO: 449621 - DNA, 30 bp, Artificial Sequence
  Synthetic oligonucleotide
gacccatccgtcaaatttatggtaaagggc

SEQ ID NO: 449622 - DNA, 31 bp, Artificial Sequence
  Synthetic oligonucleotide
tatattaggcagcgtagatctaaggaagggc

SEQ ID NO: 449623 - DNA, 30 bp, Artificial Sequence
  Synthetic oligonucleotide
attattgagttcagtgggtcgtataagggc

SEQ ID NO: 449624 - DNA, 30 bp, Artificial Sequence
  Synthetic oligonucleotide
cgtagttgccgagtttcgaaatttaagggc

SEQ ID NO: 449625 - DNA, 30 bp, Artificial Sequence
  Synthetic oligonucleotide
gcgggctgtcactgcgaacgaggacagggc

SEQ ID NO: 449626 - DNA, 30 bp, Artificial Sequence
  Synthetic oligonucleotide
tagtaactccaaatggtgttcccccagggc

SEQ ID NO: 449627 - DNA, 30 bp, Artificial Sequence
  Synthetic oligonucleotide
acgcccctgggggtgcgtccatttcagggc

SEQ ID NO: 449628 - DNA, 30 bp, Artificial Sequence
  Synthetic oligonucleotide
gctcgacagtctgcccacgttgtagagggc

SEQ ID NO: 449629 - DNA, 30 bp, Artificial Sequence
  Synthetic oligonucleotide
gtagtgattaggaggcggaaacacgagggc

SEQ ID NO: 449630 - DNA, 30 bp, Artificial Sequence
  Synthetic oligonucleotide
aaaggagcgtgtggacttagacacgagggc

SEQ ID NO: 449631 - DNA, 30 bp, Artificial Sequence
  Synthetic oligonucleotide
gacagtgaggacgccggggccggggagggc

SEQ ID NO: 449632 - DNA, 30 bp, Artificial Sequence
  Synthetic oligonucleotide
tcctgaccctggtgcggcattgtggagggc

SEQ ID NO: 449633 - DNA, 30 bp, Artificial Sequence
  Synthetic oligonucleotide
aacactgtgccatagtggtttaatgagggc

SEQ ID NO: 449634 - DNA, 30 bp, Artificial Sequence
  Synthetic oligonucleotide
gacattacactgaaatccgtgggatagggc

SEQ ID NO: 449635 - DNA, 30 bp, Artificial Sequence
  Synthetic oligonucleotide
agggaacggtcatgattggacacctagggc

SEQ ID NO: 449636 - DNA, 30 bp, Artificial Sequence
  Synthetic oligonucleotide
aattgtaggagcggagagactgggtagggc

SEQ ID NO: 449637 - DNA, 30 bp, Artificial Sequence
  Synthetic oligonucleotide
tttaagatgttctccgttatgacttagggc

SEQ ID NO: 449638 - DNA, 30 bp, Artificial Sequence
  Synthetic oligonucleotide
agacctcctgacagtgcatgtgtttagggc

SEQ ID NO: 449639 - DNA, 30 bp, Artificial Sequence
  Synthetic oligonucleotide
tcccttccagtgaaggtatcgttttagggc

SEQ ID NO: 449640 - DNA, 30 bp, Artificial Sequence
  Synthetic oligonucleotide
cggggccggcatataaggtccaaaacgggc

SEQ ID NO: 449641 - DNA, 30 bp, Artificial Sequence
  Synthetic oligonucleotide
gtactgtgggaacgccgcacacaaacgggc

SEQ ID NO: 449642 - DNA, 30 bp, Artificial Sequence
  Synthetic oligonucleotide
cacctaattcatggctaataacgcacgggc

SEQ ID NO: 449643 - DNA, 30 bp, Artificial Sequence
  Synthetic oligonucleotide
cccctaaccggtctagcccgcgagacgggc

SEQ ID NO: 449644 - DNA, 30 bp, Artificial Sequence
  Synthetic oligonucleotide
ttacccccaaggggtaagcctctaccgggc

SEQ ID NO: 449645 - DNA, 30 bp, Artificial Sequence
  Synthetic oligonucleotide
aaatttgggagctattaagggttaccgggc

SEQ ID NO: 449646 - DNA, 30 bp, Artificial Sequence
  Synthetic oligonucleotide
aatattaatgaagagggtatgtttccgggc

SEQ ID NO: 449647 - DNA, 30 bp, Artificial Sequence
  Synthetic oligonucleotide
gaggcgcctgcggaagtgcctaaagcgggc

SEQ ID NO: 449648 - DNA, 30 bp, Artificial Sequence
  Synthetic oligonucleotide
gaacgtagtgcgtgtagtatatgagcgggc

SEQ ID NO: 449649 - DNA, 30 bp, Artificial Sequence
  Synthetic oligonucleotide
ctctgccgtcaaggatttctcgccgcgggc

SEQ ID NO: 449650 - DNA, 30 bp, Artificial Sequence
  Synthetic oligonucleotide
gcaataactacgtctattgaggccgcgggc

SEQ ID NO: 449651 - DNA, 30 bp, Artificial Sequence
  Synthetic oligonucleotide
acttgtccgtttctaccagctggcgcgggc

SEQ ID NO: 449652 - DNA, 31 bp, Artificial Sequence
  Synthetic oligonucleotide
gttgtgagtaaacggacaggcccatgcgggc

SEQ ID NO: 449653 - DNA, 30 bp, Artificial Sequence
  Synthetic oligonucleotide
ccctccacgtcagtaaaaaaataatcgggc

SEQ ID NO: 449654 - DNA, 30 bp, Artificial Sequence
  Synthetic oligonucleotide
cagtagccctggccgaccggtgtatcgggc

SEQ ID NO: 449655 - DNA, 30 bp, Artificial Sequence
  Synthetic oligonucleotide
acatcgccggagcctccccaggcaaggggc

SEQ ID NO: 449656 - DNA, 30 bp, Artificial Sequence
  Synthetic oligonucleotide
ggttacagctggttccatggggcaaggggc

SEQ ID NO: 449657 - DNA, 30 bp, Artificial Sequence
  Synthetic oligonucleotide
ttacggcctaactctttatactgaaggggc

SEQ ID NO: 449658 - DNA, 30 bp, Artificial Sequence
  Synthetic oligonucleotide
ctcagcgtctcacacgaaagtgagaggggc

SEQ ID NO: 449659 - DNA, 30 bp, Artificial Sequence
  Synthetic oligonucleotide
ttactcagccgtcaccaaacgtggaggggc

SEQ ID NO: 449660 - DNA, 30 bp, Artificial Sequence
  Synthetic oligonucleotide
actttagaagcaagtgccgctattaggggc

SEQ ID NO: 449661 - DNA, 30 bp, Artificial Sequence
  Synthetic oligonucleotide
cgttcttgcaaatagccgatacttaggggc

SEQ ID NO: 449662 - DNA, 30 bp, Artificial Sequence
  Synthetic oligonucleotide
ggggtcatctgaataagagcccttaggggc

SEQ ID NO: 449663 - DNA, 30 bp, Artificial Sequence
  Synthetic oligonucleotide
gagagcattttcttgacgcccgaccggggc

SEQ ID NO: 449664 - DNA, 30 bp, Artificial Sequence
  Synthetic oligonucleotide
agcaccccaaacattgactataagcggggc

SEQ ID NO: 449665 - DNA, 30 bp, Artificial Sequence
  Synthetic oligonucleotide
cacacttcgggtatcgggagctagcggggc

SEQ ID NO: 449666 - DNA, 30 bp, Artificial Sequence
  Synthetic oligonucleotide
atgggagtatcagtaacgtgttagcggggc

SEQ ID NO: 449667 - DNA, 30 bp, Artificial Sequence
  Synthetic oligonucleotide
gacatctcgttcggagagatgcatcggggc

SEQ ID NO: 449668 - DNA, 30 bp, Artificial Sequence
  Synthetic oligonucleotide
ataatgagtacctttctgaggaaagggggc

SEQ ID NO: 449669 - DNA, 30 bp, Artificial Sequence
  Synthetic oligonucleotide
ggagcactaaaggaatggacgcaggggggc

SEQ ID NO: 449670 - DNA, 30 bp, Artificial Sequence
  Synthetic oligonucleotide
gacttccgttcctgttgttgtacggggggc

SEQ ID NO: 449671 - DNA, 30 bp, Artificial Sequence
  Synthetic oligonucleotide
gttttagaccttctgaccgtggcggggggc

SEQ ID NO: 449672 - DNA, 40 bp, Artificial Sequence
  Synthetic oligonucleotide
aagataatacattcatggtatggtcggggatcgggggggc

SEQ ID NO: 449673 - DNA, 30 bp, Artificial Sequence
  Synthetic oligonucleotide
gggggctaacagattcctcaggatgggggc

SEQ ID NO: 449674 - DNA, 30 bp, Artificial Sequence
  Synthetic oligonucleotide
cgcaggattgtcaattggtggtatgggggc

SEQ ID NO: 449675 - DNA, 30 bp, Artificial Sequence
  Synthetic oligonucleotide
taattctagatgctcattggccctgggggc

SEQ ID NO: 449676 - DNA, 30 bp, Artificial Sequence
  Synthetic oligonucleotide
gtcggacttaataatctggacaaatggggc

SEQ ID NO: 449677 - DNA, 30 bp, Artificial Sequence
  Synthetic oligonucleotide
attgggatcaactagtgtcgttcatggggc

SEQ ID NO: 449678 - DNA, 30 bp, Artificial Sequence
  Synthetic oligonucleotide
actttgctggcatacgttgccatatggggc

SEQ ID NO: 449679 - DNA, 30 bp, Artificial Sequence
  Synthetic oligonucleotide
aaacgggaggagcttggttctcagtggggc

SEQ ID NO: 449680 - DNA, 30 bp, Artificial Sequence
  Synthetic oligonucleotide
ggttgtaggaagtgtggtagccattggggc

SEQ ID NO: 449681 - DNA, 30 bp, Artificial Sequence
  Synthetic oligonucleotide
atcttaacggacccgattccaacttggggc

SEQ ID NO: 449682 - DNA, 30 bp, Artificial Sequence
  Synthetic oligonucleotide
acctaggcggtcggagcgtgggcttggggc

SEQ ID NO: 449683 - DNA, 30 bp, Artificial Sequence
  Synthetic oligonucleotide
ccaatttagccttgtttagtgagttggggc

SEQ ID NO: 449684 - DNA, 30 bp, Artificial Sequence
  Synthetic oligonucleotide
agagctcggggctattatcgaggttggggc

SEQ ID NO: 449685 - DNA, 30 bp, Artificial Sequence
  Synthetic oligonucleotide
ctcgggttaattcggtgtcaattttggggc

SEQ ID NO: 449686 - DNA, 30 bp, Artificial Sequence
  Synthetic oligonucleotide
tagctctcactcaacacgcgaaaaatgggc

SEQ ID NO: 449687 - DNA, 30 bp, Artificial Sequence
  Synthetic oligonucleotide
cccggcgtcggagcaaccaggggaatgggc

SEQ ID NO: 449688 - DNA, 30 bp, Artificial Sequence
  Synthetic oligonucleotide
ctttgtcaaagatcgtaatatcgcatgggc

SEQ ID NO: 449689 - DNA, 30 bp, Artificial Sequence
  Synthetic oligonucleotide
aaaggacgttaatcgccaaccgcgatgggc

SEQ ID NO: 449690 - DNA, 30 bp, Artificial Sequence
  Synthetic oligonucleotide
tttcttcggtgctgcaacaattggatgggc

SEQ ID NO: 449691 - DNA, 30 bp, Artificial Sequence
  Synthetic oligonucleotide
ttcctcgcactgtttctcagcaatatgggc

SEQ ID NO: 449692 - DNA, 30 bp, Artificial Sequence
  Synthetic oligonucleotide
actagttactcgttagccccgggtatgggc

SEQ ID NO: 449693 - DNA, 30 bp, Artificial Sequence
  Synthetic oligonucleotide
gcgagcctgtgttggagttaataactgggc

SEQ ID NO: 449694 - DNA, 30 bp, Artificial Sequence
  Synthetic oligonucleotide
ttagcaggacacttcactacaggactgggc

SEQ ID NO: 449695 - DNA, 30 bp, Artificial Sequence
  Synthetic oligonucleotide
acttaggtgcacactgcacgtatcctgggc

SEQ ID NO: 449696 - DNA, 30 bp, Artificial Sequence
  Synthetic oligonucleotide
tccgatagtggaccgtgatgggagctgggc

SEQ ID NO: 449697 - DNA, 30 bp, Artificial Sequence
  Synthetic oligonucleotide
tattggcgcatacagagtattacgctgggc

SEQ ID NO: 449698 - DNA, 30 bp, Artificial Sequence
  Synthetic oligonucleotide
gacgcgaatcaagggatgttcgggctgggc

SEQ ID NO: 449699 - DNA, 30 bp, Artificial Sequence
  Synthetic oligonucleotide
ggccttatcagactaagttttgatctgggc

SEQ ID NO: 449700 - DNA, 30 bp, Artificial Sequence
  Synthetic oligonucleotide
gccttactgtatgaacagaaacctctgggc

SEQ ID NO: 449701 - DNA, 30 bp, Artificial Sequence
  Synthetic oligonucleotide
ttttctattgttaaaaaccagggtctgggc

SEQ ID NO: 449702 - DNA, 30 bp, Artificial Sequence
  Synthetic oligonucleotide
ggaatttcgcagtttagtctagacgtgggc

SEQ ID NO: 449703 - DNA, 30 bp, Artificial Sequence
  Synthetic oligonucleotide
actaaacttctaaatttgtataccgtgggc

SEQ ID NO: 449704 - DNA, 30 bp, Artificial Sequence
  Synthetic oligonucleotide
ggcttaaatcatgtcaaggccggattgggc

SEQ ID NO: 449705 - DNA, 30 bp, Artificial Sequence
  Synthetic oligonucleotide
tcccccctacataggtatgcccacttgggc

SEQ ID NO: 449706 - DNA, 30 bp, Artificial Sequence
  Synthetic oligonucleotide
aggtcgtgcgggattaagatccgcttgggc

SEQ ID NO: 449707 - DNA, 30 bp, Artificial Sequence
  Synthetic oligonucleotide
gtcatgttctacggctctaataggttgggc

SEQ ID NO: 449708 - DNA, 30 bp, Artificial Sequence
  Synthetic oligonucleotide
cctggggtaccttacgcaccagtgttgggc

SEQ ID NO: 449709 - DNA, 30 bp, Artificial Sequence
  Synthetic oligonucleotide
ccggtacctggtaccctatgacgtttgggc

SEQ ID NO: 449710 - DNA, 30 bp, Artificial Sequence
  Synthetic oligonucleotide
gttccaaaaattcaatttgccttaaatggc

SEQ ID NO: 449711 - DNA, 30 bp, Artificial Sequence
  Synthetic oligonucleotide
cccttatgttatcacggtcttcgcaatggc

SEQ ID NO: 449712 - DNA, 29 bp, Artificial Sequence
  Synthetic oligonucleotide
actttaacgcgtctcaccgatgcaatggc

SEQ ID NO: 449713 - DNA, 30 bp, Artificial Sequence
  Synthetic oligonucleotide
gtgcctataaaagcccgcagcaataatggc

SEQ ID NO: 449714 - DNA, 30 bp, Artificial Sequence
  Synthetic oligonucleotide
agggaagacttgccctcggagcttaatggc

SEQ ID NO: 449715 - DNA, 30 bp, Artificial Sequence
  Synthetic oligonucleotide
taacttgataatataatgattgaacatggc

SEQ ID NO: 449716 - DNA, 30 bp, Artificial Sequence
  Synthetic oligonucleotide
ggtcttcccaggatggggccttgacatggc

SEQ ID NO: 449717 - DNA, 30 bp, Artificial Sequence
  Synthetic oligonucleotide
tctctatttcagccgtctgcaatacatggc

SEQ ID NO: 449718 - DNA, 30 bp, Artificial Sequence
  Synthetic oligonucleotide
ttaccagtacaggttgtttagaagcatggc

SEQ ID NO: 449719 - DNA, 30 bp, Artificial Sequence
  Synthetic oligonucleotide
ttttctacagacgagaatgaaggtcatggc

SEQ ID NO: 449720 - DNA, 30 bp, Artificial Sequence
  Synthetic oligonucleotide
ggggcggtatgtccatagagttgagatggc

SEQ ID NO: 449721 - DNA, 30 bp, Artificial Sequence
  Synthetic oligonucleotide
tgcctttatatatcctaaaataaggatggc

SEQ ID NO: 449722 - DNA, 30 bp, Artificial Sequence
  Synthetic oligonucleotide
cagcttatccagactataaggtcggatggc

SEQ ID NO: 449723 - DNA, 30 bp, Artificial Sequence
  Synthetic oligonucleotide
ggcctcctgccggtgctagctcatgatggc

SEQ ID NO: 449724 - DNA, 30 bp, Artificial Sequence
  Synthetic oligonucleotide
cgctcaccccgcagttgctgcgcctatggc

SEQ ID NO: 449725 - DNA, 30 bp, Artificial Sequence
  Synthetic oligonucleotide
ttaagtggcaggcggcctacagggtatggc

SEQ ID NO: 449726 - DNA, 30 bp, Artificial Sequence
  Synthetic oligonucleotide
cccaccagggggtggataaatagttatggc

SEQ ID NO: 449727 - DNA, 30 bp, Artificial Sequence
  Synthetic oligonucleotide
aaccactcgtgcacttataaacacactggc

SEQ ID NO: 449728 - DNA, 30 bp, Artificial Sequence
  Synthetic oligonucleotide
ggaattgtctcgttttggtctgacactggc

SEQ ID NO: 449729 - DNA, 30 bp, Artificial Sequence
  Synthetic oligonucleotide
gcgtaatgccttttctgtctcggtactggc

SEQ ID NO: 449730 - DNA, 30 bp, Artificial Sequence
  Synthetic oligonucleotide
gcaatgccatgtttcgcgcgcgtacctggc

SEQ ID NO: 449731 - DNA, 30 bp, Artificial Sequence
  Synthetic oligonucleotide
ggtgtggcccgacagggtctgtaccctggc

SEQ ID NO: 449732 - DNA, 30 bp, Artificial Sequence
  Synthetic oligonucleotide
aaatggagcagcgagctgtcccagcctggc

SEQ ID NO: 449733 - DNA, 30 bp, Artificial Sequence
  Synthetic oligonucleotide
gtaatttataagtcagagagacgtcctggc

SEQ ID NO: 449734 - DNA, 30 bp, Artificial Sequence
  Synthetic oligonucleotide
aatgagttacggggggctgctgaggctggc

SEQ ID NO: 449735 - DNA, 30 bp, Artificial Sequence
  Synthetic oligonucleotide
cccggaatctttcagtgtgtcgcggctggc

SEQ ID NO: 449736 - DNA, 30 bp, Artificial Sequence
  Synthetic oligonucleotide
gccgctcggatggagcatgaggcctctggc

SEQ ID NO: 449737 - DNA, 30 bp, Artificial Sequence
  Synthetic oligonucleotide
aaagtaatgttatcttatcttgcgtctggc

SEQ ID NO: 449738 - DNA, 30 bp, Artificial Sequence
  Synthetic oligonucleotide
gtatagtttctggcactgcgaacttctggc

SEQ ID NO: 449739 - DNA, 30 bp, Artificial Sequence
  Synthetic oligonucleotide
cctttaactcttgaccttagctgttctggc

SEQ ID NO: 449740 - DNA, 30 bp, Artificial Sequence
  Synthetic oligonucleotide
gctattctgcctggtcgcgaaataagtggc

SEQ ID NO: 449741 - DNA, 30 bp, Artificial Sequence
  Synthetic oligonucleotide
tgaagttaaccaccctctcatccgagtggc

SEQ ID NO: 449742 - DNA, 30 bp, Artificial Sequence
  Synthetic oligonucleotide
tttccccgcattctgcagctttcgagtggc

SEQ ID NO: 449743 - DNA, 30 bp, Artificial Sequence
  Synthetic oligonucleotide
cggctggccggaatgtgtgtcctgagtggc

SEQ ID NO: 449744 - DNA, 30 bp, Artificial Sequence
  Synthetic oligonucleotide
tcgatgccattgatagtaagtcgtagtggc

SEQ ID NO: 449745 - DNA, 30 bp, Artificial Sequence
  Synthetic oligonucleotide
tcttcctaatatcaatgtcatgaacgtggc

SEQ ID NO: 449746 - DNA, 30 bp, Artificial Sequence
  Synthetic oligonucleotide
ggatagggattctttacctgtacccgtggc

SEQ ID NO: 449747 - DNA, 30 bp, Artificial Sequence
  Synthetic oligonucleotide
ttggggggcggcttggggtctctgcgtggc

SEQ ID NO: 449748 - DNA, 30 bp, Artificial Sequence
  Synthetic oligonucleotide
gcagggctcttattgaacatgtgtcgtggc

SEQ ID NO: 449749 - DNA, 30 bp, Artificial Sequence
  Synthetic oligonucleotide
gaatttgcgaagcgcttggagattcgtggc

SEQ ID NO: 449750 - DNA, 30 bp, Artificial Sequence
  Synthetic oligonucleotide
ggcatgttttccttgtctagaagaggtggc

SEQ ID NO: 449751 - DNA, 30 bp, Artificial Sequence
  Synthetic oligonucleotide
gttaaacgcctcctgactcctggatgtggc

SEQ ID NO: 449752 - DNA, 30 bp, Artificial Sequence
  Synthetic oligonucleotide
ttggaaacagggccactttcgtcgtgtggc

SEQ ID NO: 449753 - DNA, 30 bp, Artificial Sequence
  Synthetic oligonucleotide
cctcggcgcggtcgtcaacaagcttgtggc

SEQ ID NO: 449754 - DNA, 30 bp, Artificial Sequence
  Synthetic oligonucleotide
tgttcatactataactttgaggcaattggc

SEQ ID NO: 449755 - DNA, 30 bp, Artificial Sequence
  Synthetic oligonucleotide
cacgggtggttacagaaatatggaattggc

SEQ ID NO: 449756 - DNA, 30 bp, Artificial Sequence
  Synthetic oligonucleotide
aaaaacaaagacgatctttgtggaattggc

SEQ ID NO: 449757 - DNA, 30 bp, Artificial Sequence
  Synthetic oligonucleotide
gataattggtagaagcgaacgctaattggc

SEQ ID NO: 449758 - DNA, 30 bp, Artificial Sequence
  Synthetic oligonucleotide
acagtgctccaacgagcacatgtaattggc

SEQ ID NO: 449759 - DNA, 30 bp, Artificial Sequence
  Synthetic oligonucleotide
gggtcaaggggggtaaacggggggcttggc

SEQ ID NO: 449760 - DNA, 30 bp, Artificial Sequence
  Synthetic oligonucleotide
cgctacatatccttcttaaatcttcttggc

SEQ ID NO: 449761 - DNA, 30 bp, Artificial Sequence
  Synthetic oligonucleotide
attcagcgttcattacatagacaagttggc

SEQ ID NO: 449762 - DNA, 30 bp, Artificial Sequence
  Synthetic oligonucleotide
ggccagaatgctcttttaggtccagttggc

SEQ ID NO: 449763 - DNA, 30 bp, Artificial Sequence
  Synthetic oligonucleotide
gacacacagcggccctggcagagagttggc

SEQ ID NO: 449764 - DNA, 30 bp, Artificial Sequence
  Synthetic oligonucleotide
agatcgcttccaatttgcagaggcgttggc

SEQ ID NO: 449765 - DNA, 30 bp, Artificial Sequence
  Synthetic oligonucleotide
gttttcggcgtcgcggtgaataaggttggc

SEQ ID NO: 449766 - DNA, 30 bp, Artificial Sequence
  Synthetic oligonucleotide
gaagagtccagacgcgacgcttaggttggc

SEQ ID NO: 449767 - DNA, 30 bp, Artificial Sequence
  Synthetic oligonucleotide
ataataggaaccaccatacttagggttggc

SEQ ID NO: 449768 - DNA, 30 bp, Artificial Sequence
  Synthetic oligonucleotide
ctgtgagaattttgcgcagtcggggttggc

SEQ ID NO: 449769 - DNA, 30 bp, Artificial Sequence
  Synthetic oligonucleotide
cgtgtacatggtaagcataccatggttggc

SEQ ID NO: 449770 - DNA, 30 bp, Artificial Sequence
  Synthetic oligonucleotide
tcccagcgccgatttagggcacttgttggc

SEQ ID NO: 449771 - DNA, 30 bp, Artificial Sequence
  Synthetic oligonucleotide
ttggcaatctggaagtagtgaaaatttggc

SEQ ID NO: 449772 - DNA, 30 bp, Artificial Sequence
  Synthetic oligonucleotide
gtgggcagccttcctagttaccgatttggc

SEQ ID NO: 449773 - DNA, 30 bp, Artificial Sequence
  Synthetic oligonucleotide
tagactgggtaaagccggcagggctttggc

SEQ ID NO: 449774 - DNA, 29 bp, Artificial Sequence
  Synthetic oligonucleotide
acgagcggttgtgtggtggtccttttggc

SEQ ID NO: 449775 - DNA, 30 bp, Artificial Sequence
  Synthetic oligonucleotide
aaatatcatgtgaaatgataacacaaatgc

SEQ ID NO: 449776 - DNA, 30 bp, Artificial Sequence
  Synthetic oligonucleotide
gatccaaaagccggcatatacggcaaatgc

SEQ ID NO: 449777 - DNA, 30 bp, Artificial Sequence
  Synthetic oligonucleotide
atccggtagcaacgattattcttcaaatgc

SEQ ID NO: 449778 - DNA, 30 bp, Artificial Sequence
  Synthetic oligonucleotide
tctttagatggaatcggttctccgaaatgc

SEQ ID NO: 449779 - DNA, 30 bp, Artificial Sequence
  Synthetic oligonucleotide
gttatccataatcgaacattcgggaaatgc

SEQ ID NO: 449780 - DNA, 30 bp, Artificial Sequence
  Synthetic oligonucleotide
ttgtatgctacagcattaaggaataaatgc

SEQ ID NO: 449781 - DNA, 30 bp, Artificial Sequence
  Synthetic oligonucleotide
tcataatttacgtaatattggggtaaatgc

SEQ ID NO: 449782 - DNA, 30 bp, Artificial Sequence
  Synthetic oligonucleotide
taatacggcagggtaaagcgtattaaatgc

SEQ ID NO: 449783 - DNA, 30 bp, Artificial Sequence
  Synthetic oligonucleotide
tatgagttagcgctcaattgcacacaatgc

SEQ ID NO: 449784 - DNA, 30 bp, Artificial Sequence
  Synthetic oligonucleotide
gatagcggggtcataatgcgccaccaatgc

SEQ ID NO: 449785 - DNA, 30 bp, Artificial Sequence
  Synthetic oligonucleotide
ccgacgctggtgcagcacgacctgcaatgc

SEQ ID NO: 449786 - DNA, 30 bp, Artificial Sequence
  Synthetic oligonucleotide
cgcagctcaacatccttaagctatcaatgc

SEQ ID NO: 449787 - DNA, 30 bp, Artificial Sequence
  Synthetic oligonucleotide
aactcatattagtgatctactagtcaatgc

SEQ ID NO: 449788 - DNA, 30 bp, Artificial Sequence
  Synthetic oligonucleotide
taggttaactgagcaaactcagttcaatgc

SEQ ID NO: 449789 - DNA, 30 bp, Artificial Sequence
  Synthetic oligonucleotide
gcgacttgattcggtagaaagcgcgaatgc

SEQ ID NO: 449790 - DNA, 30 bp, Artificial Sequence
  Synthetic oligonucleotide
gcttaataacgcaacagtgtacaggaatgc

SEQ ID NO: 449791 - DNA, 30 bp, Artificial Sequence
  Synthetic oligonucleotide
agaatggagcatgacgaccccgaggaatgc

SEQ ID NO: 449792 - DNA, 30 bp, Artificial Sequence
  Synthetic oligonucleotide
actcctagctcttaggcttaccatgaatgc

SEQ ID NO: 449793 - DNA, 30 bp, Artificial Sequence
  Synthetic oligonucleotide
gcggatgcggatagtacttccgctgaatgc

SEQ ID NO: 449794 - DNA, 30 bp, Artificial Sequence
  Synthetic oligonucleotide
gcggtgcttccgtaatactcctctgaatgc

SEQ ID NO: 449795 - DNA, 30 bp, Artificial Sequence
  Synthetic oligonucleotide
tattatagccatatctgattttgtgaatgc

SEQ ID NO: 449796 - DNA, 30 bp, Artificial Sequence
  Synthetic oligonucleotide
cgagcctaccagtgcggataacaataatgc

SEQ ID NO: 449797 - DNA, 30 bp, Artificial Sequence
  Synthetic oligonucleotide
ttgtagtagtggaattttgtccaataatgc

SEQ ID NO: 449798 - DNA, 30 bp, Artificial Sequence
  Synthetic oligonucleotide
tattagtcgtgatacaaagctatctaatgc

SEQ ID NO: 449799 - DNA, 30 bp, Artificial Sequence
  Synthetic oligonucleotide
gtgtgctatggatgccttaatttctaatgc

SEQ ID NO: 449800 - DNA, 30 bp, Artificial Sequence
  Synthetic oligonucleotide
cgcagtccgttaagtgagttacggtaatgc

SEQ ID NO: 449801 - DNA, 30 bp, Artificial Sequence
  Synthetic oligonucleotide
tgtgacgagagtgtccttacccggtaatgc

SEQ ID NO: 449802 - DNA, 30 bp, Artificial Sequence
  Synthetic oligonucleotide
atcgcagcgcgacactaaccaatgtaatgc

SEQ ID NO: 449803 - DNA, 30 bp, Artificial Sequence
  Synthetic oligonucleotide
aataagaattaacagctccaactgtaatgc

SEQ ID NO: 449804 - DNA, 30 bp, Artificial Sequence
  Synthetic oligonucleotide
atatcagctcgtttttgcccaacttaatgc

SEQ ID NO: 449805 - DNA, 30 bp, Artificial Sequence
  Synthetic oligonucleotide
attttaaggtttaaatgtaggggaacatgc

SEQ ID NO: 449806 - DNA, 30 bp, Artificial Sequence
  Synthetic oligonucleotide
tacagcataagacgtttaaattgaacatgc

SEQ ID NO: 449807 - DNA, 30 bp, Artificial Sequence
  Synthetic oligonucleotide
taagtttttgagtttcgtagattcacatgc

SEQ ID NO: 449808 - DNA, 30 bp, Artificial Sequence
  Synthetic oligonucleotide
ccagacgggcttgatggcaagtagacatgc

SEQ ID NO: 449809 - DNA, 30 bp, Artificial Sequence
  Synthetic oligonucleotide
tcggaatacagtcccctcgaatggacatgc

SEQ ID NO: 449810 - DNA, 30 bp, Artificial Sequence
  Synthetic oligonucleotide
cattacgcggggcagctcgccgtgacatgc

SEQ ID NO: 449811 - DNA, 30 bp, Artificial Sequence
  Synthetic oligonucleotide
tattgggtcaatacctataccagtacatgc

SEQ ID NO: 449812 - DNA, 30 bp, Artificial Sequence
  Synthetic oligonucleotide
gaatcgttacggtcacagcccagtacatgc

SEQ ID NO: 449813 - DNA, 30 bp, Artificial Sequence
  Synthetic oligonucleotide
caatgcgacctcgatcggcaatgtacatgc

SEQ ID NO: 449814 - DNA, 30 bp, Artificial Sequence
  Synthetic oligonucleotide
aagtgttggtgggagtatagcccaccatgc

SEQ ID NO: 449815 - DNA, 30 bp, Artificial Sequence
  Synthetic oligonucleotide
gttctcatctaagcctcggcgataccatgc

SEQ ID NO: 449816 - DNA, 30 bp, Artificial Sequence
  Synthetic oligonucleotide
cggccgaggtcacgcacaggagtaccatgc

SEQ ID NO: 449817 - DNA, 30 bp, Artificial Sequence
  Synthetic oligonucleotide
gagggccttacatggcactaaaagccatgc

SEQ ID NO: 449818 - DNA, 30 bp, Artificial Sequence
  Synthetic oligonucleotide
ttctatacgcaatacagtggtaggccatgc

SEQ ID NO: 449819 - DNA, 30 bp, Artificial Sequence
  Synthetic oligonucleotide
ggaaatactaaggggatataatccgcatgc

SEQ ID NO: 449820 - DNA, 30 bp, Artificial Sequence
  Synthetic oligonucleotide
agtagttatagtgcctcagaacgcgcatgc

SEQ ID NO: 449821 - DNA, 30 bp, Artificial Sequence
  Synthetic oligonucleotide
acagcgaaattgcgcccgtaatgcgcatgc

SEQ ID NO: 449822 - DNA, 30 bp, Artificial Sequence
  Synthetic oligonucleotide
tttaattgattggcattgcgagcggcatgc

SEQ ID NO: 449823 - DNA, 30 bp, Artificial Sequence
  Synthetic oligonucleotide
gtgtgttctgcgcagcggtgatcggcatgc

SEQ ID NO: 449824 - DNA, 30 bp, Artificial Sequence
  Synthetic oligonucleotide
aaaggtttatagtcacaattatttgcatgc

SEQ ID NO: 449825 - DNA, 30 bp, Artificial Sequence
  Synthetic oligonucleotide
aactaggacttactgagctggacgtcatgc

SEQ ID NO: 449826 - DNA, 30 bp, Artificial Sequence
  Synthetic oligonucleotide
cgcgccttagggaaatctggtctgagatgc

SEQ ID NO: 449827 - DNA, 30 bp, Artificial Sequence
  Synthetic oligonucleotide
cgcctcccgtaccgcctccatactagatgc

SEQ ID NO: 449828 - DNA, 30 bp, Artificial Sequence
  Synthetic oligonucleotide
agtacgatgttgagcgttccttgtagatgc

SEQ ID NO: 449829 - DNA, 30 bp, Artificial Sequence
  Synthetic oligonucleotide
tggtttccttcgaggactcacgaacgatgc

SEQ ID NO: 449830 - DNA, 27 bp, Artificial Sequence
  Synthetic oligonucleotide
tcttacactgcgataattacacgatgc

SEQ ID NO: 449831 - DNA, 30 bp, Artificial Sequence
  Synthetic oligonucleotide
gtctatacactctggttattacagcgatgc

SEQ ID NO: 449832 - DNA, 30 bp, Artificial Sequence
  Synthetic oligonucleotide
cgcggcgcgtgctagtgacaccagcgatgc

SEQ ID NO: 449833 - DNA, 30 bp, Artificial Sequence
  Synthetic oligonucleotide
agcagcgacaggtatgggtacattcgatgc

SEQ ID NO: 449834 - DNA, 30 bp, Artificial Sequence
  Synthetic oligonucleotide
acggagcattgtgaagcatgccaaggatgc

SEQ ID NO: 449835 - DNA, 30 bp, Artificial Sequence
  Synthetic oligonucleotide
gtgaatggatcgattacaatggaaggatgc

SEQ ID NO: 449836 - DNA, 30 bp, Artificial Sequence
  Synthetic oligonucleotide
cgggtggaccgtgccgctgatgcaggatgc

SEQ ID NO: 449837 - DNA, 30 bp, Artificial Sequence
  Synthetic oligonucleotide
aagggcttttttcaacaaacttcaggatgc

SEQ ID NO: 449838 - DNA, 29 bp, Artificial Sequence
  Synthetic oligonucleotide
gtagcactacccacggtgtaaccggatgc

SEQ ID NO: 449839 - DNA, 30 bp, Artificial Sequence
  Synthetic oligonucleotide
tgggttcttgggagcgattgtctcggatgc

SEQ ID NO: 449840 - DNA, 30 bp, Artificial Sequence
  Synthetic oligonucleotide
tgttacaagattgccacccaaacgggatgc

SEQ ID NO: 449841 - DNA, 30 bp, Artificial Sequence
  Synthetic oligonucleotide
tcgggaaccgttatggtactgtggggatgc

SEQ ID NO: 449842 - DNA, 30 bp, Artificial Sequence
  Synthetic oligonucleotide
gtgtaacagattactgatgtgctgggatgc

SEQ ID NO: 449843 - DNA, 30 bp, Artificial Sequence
  Synthetic oligonucleotide
ccggtttttatgatagctcagtctggatgc

SEQ ID NO: 449844 - DNA, 30 bp, Artificial Sequence
  Synthetic oligonucleotide
tgcgcaccacagccgtccatagaatgatgc

SEQ ID NO: 449845 - DNA, 30 bp, Artificial Sequence
  Synthetic oligonucleotide
gatcttgtttggatttccggccgatgatgc

SEQ ID NO: 449846 - DNA, 30 bp, Artificial Sequence
  Synthetic oligonucleotide
acgagcagtaagtatttgataatatgatgc

SEQ ID NO: 449847 - DNA, 30 bp, Artificial Sequence
  Synthetic oligonucleotide
gccaaccttttcgctggtttcgggtgatgc

SEQ ID NO: 449848 - DNA, 30 bp, Artificial Sequence
  Synthetic oligonucleotide
ttgtggatacctctggataccgattgatgc

SEQ ID NO: 449849 - DNA, 30 bp, Artificial Sequence
  Synthetic oligonucleotide
cctatcatggtccgcatccgggcttgatgc

SEQ ID NO: 449850 - DNA, 30 bp, Artificial Sequence
  Synthetic oligonucleotide
cttgacacgtttgaggttctaagttgatgc

SEQ ID NO: 449851 - DNA, 30 bp, Artificial Sequence
  Synthetic oligonucleotide
cctgtaatgcgcgggggaattagttgatgc

SEQ ID NO: 449852 - DNA, 30 bp, Artificial Sequence
  Synthetic oligonucleotide
tagtgtacggcccgcggcaatcgttgatgc

SEQ ID NO: 449853 - DNA, 30 bp, Artificial Sequence
  Synthetic oligonucleotide
aacccccatcacggttaccttggttgatgc

SEQ ID NO: 449854 - DNA, 30 bp, Artificial Sequence
  Synthetic oligonucleotide
gtcctcggattagctcattgcctaatatgc

SEQ ID NO: 449855 - DNA, 30 bp, Artificial Sequence
  Synthetic oligonucleotide
tccgggtctgcgagctcctttgtaatatgc

SEQ ID NO: 449856 - DNA, 30 bp, Artificial Sequence
  Synthetic oligonucleotide
actagatggagggaagatcgcaacatatgc

SEQ ID NO: 449857 - DNA, 30 bp, Artificial Sequence
  Synthetic oligonucleotide
actttagtggcccggtcgaccagcatatgc

SEQ ID NO: 449858 - DNA, 30 bp, Artificial Sequence
  Synthetic oligonucleotide
gctgaccggtgtaggacgcgaatgatatgc

SEQ ID NO: 449859 - DNA, 30 bp, Artificial Sequence
  Synthetic oligonucleotide
gtccatctacaataccgcacattgatatgc

SEQ ID NO: 449860 - DNA, 30 bp, Artificial Sequence
  Synthetic oligonucleotide
aaggctagatatgctccttgagatatatgc

SEQ ID NO: 449861 - DNA, 30 bp, Artificial Sequence
  Synthetic oligonucleotide
ggagggtctcaatacgtaggctgtatatgc

SEQ ID NO: 449862 - DNA, 30 bp, Artificial Sequence
  Synthetic oligonucleotide
atattcagccatggcagtgcggttatatgc

SEQ ID NO: 449863 - DNA, 30 bp, Artificial Sequence
  Synthetic oligonucleotide
ggttgactttcgtgcttttgttgactatgc

SEQ ID NO: 449864 - DNA, 30 bp, Artificial Sequence
  Synthetic oligonucleotide
ttatagttgaatccttctcggtagctatgc

SEQ ID NO: 449865 - DNA, 29 bp, Artificial Sequence
  Synthetic oligonucleotide
gccgctcataggcgcctgcgcctctatgc

SEQ ID NO: 449866 - DNA, 30 bp, Artificial Sequence
  Synthetic oligonucleotide
atgaggctgggagtcagagattctctatgc

SEQ ID NO: 449867 - DNA, 30 bp, Artificial Sequence
  Synthetic oligonucleotide
atacgaccatctccagtggtcctagtatgc

SEQ ID NO: 449868 - DNA, 30 bp, Artificial Sequence
  Synthetic oligonucleotide
gctggatactccatacggttcgccgtatgc

SEQ ID NO: 449869 - DNA, 30 bp, Artificial Sequence
  Synthetic oligonucleotide
ttcttaatgaagggggatagcttcgtatgc

SEQ ID NO: 449870 - DNA, 30 bp, Artificial Sequence
  Synthetic oligonucleotide
gtcatcaatcgaggattgtgatgggtatgc

SEQ ID NO: 449871 - DNA, 30 bp, Artificial Sequence
  Synthetic oligonucleotide
aaaaataaccctgtcgaaagccctgtatgc

SEQ ID NO: 449872 - DNA, 30 bp, Artificial Sequence
  Synthetic oligonucleotide
gcgcgcattttgcctcagcttgccttatgc

SEQ ID NO: 449873 - DNA, 30 bp, Artificial Sequence
  Synthetic oligonucleotide
atacttagggttgtccatgacagcttatgc

SEQ ID NO: 449874 - DNA, 30 bp, Artificial Sequence
  Synthetic oligonucleotide
tagtattagctaactttcttatagttatgc

SEQ ID NO: 449875 - DNA, 30 bp, Artificial Sequence
  Synthetic oligonucleotide
tcggttccatcaacgggctaaacgttatgc

SEQ ID NO: 449876 - DNA, 30 bp, Artificial Sequence
  Synthetic oligonucleotide
ttatgttcttgagacgcactagcgttatgc

SEQ ID NO: 449877 - DNA, 30 bp, Artificial Sequence
  Synthetic oligonucleotide
gccgtcttcacacccgagcatgtgttatgc

SEQ ID NO: 449878 - DNA, 30 bp, Artificial Sequence
  Synthetic oligonucleotide
tcaggacaatgtttatcgctacatttatgc

SEQ ID NO: 449879 - DNA, 30 bp, Artificial Sequence
  Synthetic oligonucleotide
ataagaaaccgctaatctgctactttatgc

SEQ ID NO: 449880 - DNA, 30 bp, Artificial Sequence
  Synthetic oligonucleotide
cactttggaggggggtcgcagcgtttatgc

SEQ ID NO: 449881 - DNA, 30 bp, Artificial Sequence
  Synthetic oligonucleotide
taataagtactaaatgtgtagcttttatgc

SEQ ID NO: 449882 - DNA, 30 bp, Artificial Sequence
  Synthetic oligonucleotide
ggagaggccgatcgggtgtacgttttatgc

SEQ ID NO: 449883 - DNA, 30 bp, Artificial Sequence
  Synthetic oligonucleotide
gtcggactccaatccgggtctcaaaactgc

SEQ ID NO: 449884 - DNA, 30 bp, Artificial Sequence
  Synthetic oligonucleotide
gaatgtttataagcatcgtacgtaaactgc

SEQ ID NO: 449885 - DNA, 30 bp, Artificial Sequence
  Synthetic oligonucleotide
aataacgttatcactggagatctcaactgc

SEQ ID NO: 449886 - DNA, 30 bp, Artificial Sequence
  Synthetic oligonucleotide
tggcacacaagtgtttgatgctctaactgc

SEQ ID NO: 449887 - DNA, 30 bp, Artificial Sequence
  Synthetic oligonucleotide
ccctagtgtttcgaaggagtacaccactgc

SEQ ID NO: 449888 - DNA, 30 bp, Artificial Sequence
  Synthetic oligonucleotide
aaagagcaagatatctccacgcagcactgc

SEQ ID NO: 449889 - DNA, 30 bp, Artificial Sequence
  Synthetic oligonucleotide
tagtctagtacggaagcgcactttcactgc

SEQ ID NO: 449890 - DNA, 30 bp, Artificial Sequence
  Synthetic oligonucleotide
gcgatgcatttaccaactgttttagactgc

SEQ ID NO: 449891 - DNA, 30 bp, Artificial Sequence
  Synthetic oligonucleotide
ggcggctatatgtgatatcccgtcgactgc

SEQ ID NO: 449892 - DNA, 30 bp, Artificial Sequence
  Synthetic oligonucleotide
gcagccgtctatcggtccatccgtgactgc

SEQ ID NO: 449893 - DNA, 30 bp, Artificial Sequence
  Synthetic oligonucleotide
agaattcaatctcttcacgatttatactgc

SEQ ID NO: 449894 - DNA, 30 bp, Artificial Sequence
  Synthetic oligonucleotide
aaatttaataaaatcacgcaaaactactgc

SEQ ID NO: 449895 - DNA, 30 bp, Artificial Sequence
  Synthetic oligonucleotide
ttatcaagattctcagggtcgcagtactgc

SEQ ID NO: 449896 - DNA, 30 bp, Artificial Sequence
  Synthetic oligonucleotide
ggcaggccctcagtcacgagttggtactgc

SEQ ID NO: 449897 - DNA, 30 bp, Artificial Sequence
  Synthetic oligonucleotide
gacacggtgttgattcgtatggattactgc

SEQ ID NO: 449898 - DNA, 30 bp, Artificial Sequence
  Synthetic oligonucleotide
ctcggaatgctcggcgagtctgtttactgc

SEQ ID NO: 449899 - DNA, 30 bp, Artificial Sequence
  Synthetic oligonucleotide
tagttgctcaggaggttgacagacacctgc

SEQ ID NO: 449900 - DNA, 30 bp, Artificial Sequence
  Synthetic oligonucleotide
cgccgacacatgcggttgttctacacctgc

SEQ ID NO: 449901 - DNA, 30 bp, Artificial Sequence
  Synthetic oligonucleotide
tgcgtgtggggagaccccacaaccacctgc

SEQ ID NO: 449902 - DNA, 30 bp, Artificial Sequence
  Synthetic oligonucleotide
ggcataccctggtacactttgtgcacctgc

SEQ ID NO: 449903 - DNA, 30 bp, Artificial Sequence
  Synthetic oligonucleotide
aataactgctgaatactggatacgacctgc

SEQ ID NO: 449904 - DNA, 30 bp, Artificial Sequence
  Synthetic oligonucleotide
cagacgtcgagtaaataggactcgacctgc

SEQ ID NO: 449905 - DNA, 30 bp, Artificial Sequence
  Synthetic oligonucleotide
agtataattgtttcatcttttgtgacctgc

SEQ ID NO: 449906 - DNA, 30 bp, Artificial Sequence
  Synthetic oligonucleotide
ccctcgaatggccgctctgcgcaagcctgc

SEQ ID NO: 449907 - DNA, 30 bp, Artificial Sequence
  Synthetic oligonucleotide
gtgagtccgttctatagtcctggagcctgc

SEQ ID NO: 449908 - DNA, 30 bp, Artificial Sequence
  Synthetic oligonucleotide
tagacccttgtggctccaggcggcgcctgc

SEQ ID NO: 449909 - DNA, 30 bp, Artificial Sequence
  Synthetic oligonucleotide
aaggtacgtgatattattcctgcggcctgc

SEQ ID NO: 449910 - DNA, 30 bp, Artificial Sequence
  Synthetic oligonucleotide
aacctcgttataaaacgttttgtggcctgc

SEQ ID NO: 449911 - DNA, 30 bp, Artificial Sequence
  Synthetic oligonucleotide
atgcacggctgaccagatggcgctgcctgc

SEQ ID NO: 449912 - DNA, 30 bp, Artificial Sequence
  Synthetic oligonucleotide
accctaattatcatacaaggggctgcctgc

SEQ ID NO: 449913 - DNA, 30 bp, Artificial Sequence
  Synthetic oligonucleotide
agcagggccggttccaacacctctgcctgc

SEQ ID NO: 449914 - DNA, 30 bp, Artificial Sequence
  Synthetic oligonucleotide
gcccagcgcgaagctttcagaacctcctgc

SEQ ID NO: 449915 - DNA, 30 bp, Artificial Sequence
  Synthetic oligonucleotide
ttacagtcaaggattgccccttagtcctgc

SEQ ID NO: 449916 - DNA, 30 bp, Artificial Sequence
  Synthetic oligonucleotide
ggtgacttacatcctcagctttggtcctgc

SEQ ID NO: 449917 - DNA, 30 bp, Artificial Sequence
  Synthetic oligonucleotide
tgcacaggataactacttgggtcttcctgc

SEQ ID NO: 449918 - DNA, 30 bp, Artificial Sequence
  Synthetic oligonucleotide
gcagttgaccaagtcgctatgccaagctgc

SEQ ID NO: 449919 - DNA, 30 bp, Artificial Sequence
  Synthetic oligonucleotide
gccacgtcggtcgtagatccggtaagctgc

SEQ ID NO: 449920 - DNA, 30 bp, Artificial Sequence
  Synthetic oligonucleotide
aatgtgtcttagccagacggaaccagctgc

SEQ ID NO: 449921 - DNA, 30 bp, Artificial Sequence
  Synthetic oligonucleotide
attctgtaaatgtaacagcacaccagctgc

SEQ ID NO: 449922 - DNA, 30 bp, Artificial Sequence
  Synthetic oligonucleotide
ctccgctcggggactgccgcacgcagctgc

SEQ ID NO: 449923 - DNA, 30 bp, Artificial Sequence
  Synthetic oligonucleotide
actgaattttgatcgctgcgcggcagctgc

SEQ ID NO: 449924 - DNA, 30 bp, Artificial Sequence
  Synthetic oligonucleotide
agtgttctactgtggtgacggaggagctgc

SEQ ID NO: 449925 - DNA, 30 bp, Artificial Sequence
  Synthetic oligonucleotide
cactacgccgttctggtattgcttagctgc

SEQ ID NO: 449926 - DNA, 30 bp, Artificial Sequence
  Synthetic oligonucleotide
aatttcgaagggaattgattataacgctgc

SEQ ID NO: 449927 - DNA, 30 bp, Artificial Sequence
  Synthetic oligonucleotide
tggttttatcctgagctaagccatcgctgc

SEQ ID NO: 449928 - DNA, 30 bp, Artificial Sequence
  Synthetic oligonucleotide
gtcctctaccgaaaatctacgtatcgctgc

SEQ ID NO: 449929 - DNA, 30 bp, Artificial Sequence
  Synthetic oligonucleotide
gtgatcttgcttaaattgcccgttcgctgc

SEQ ID NO: 449930 - DNA, 30 bp, Artificial Sequence
  Synthetic oligonucleotide
gtgttccgcggttaacctcggtttcgctgc

SEQ ID NO: 449931 - DNA, 30 bp, Artificial Sequence
  Synthetic oligonucleotide
caatcggtatcctgtgcgtattaaggctgc

SEQ ID NO: 449932 - DNA, 30 bp, Artificial Sequence
  Synthetic oligonucleotide
tcttcagcttccttgggtgctccaggctgc

SEQ ID NO: 449933 - DNA, 30 bp, Artificial Sequence
  Synthetic oligonucleotide
caggtaggagaactggttggtccaggctgc

SEQ ID NO: 449934 - DNA, 30 bp, Artificial Sequence
  Synthetic oligonucleotide
cgaaatagcaagcgggactaaaccggctgc

SEQ ID NO: 449935 - DNA, 30 bp, Artificial Sequence
  Synthetic oligonucleotide
tttctactggcatacaaaacttagggctgc

SEQ ID NO: 449936 - DNA, 30 bp, Artificial Sequence
  Synthetic oligonucleotide
atagcgctggcaatctatcaatcgggctgc

SEQ ID NO: 449937 - DNA, 30 bp, Artificial Sequence
  Synthetic oligonucleotide
ttacgtcgcgctgcggtgtacttgggctgc

SEQ ID NO: 449938 - DNA, 30 bp, Artificial Sequence
  Synthetic oligonucleotide
ttaaaggcattgcatgggcttatatgctgc

SEQ ID NO: 449939 - DNA, 30 bp, Artificial Sequence
  Synthetic oligonucleotide
gttctagtgaaaatcattatcccctgctgc

SEQ ID NO: 449940 - DNA, 30 bp, Artificial Sequence
  Synthetic oligonucleotide
attatggtcctatgcagctgtgcctgctgc

SEQ ID NO: 449941 - DNA, 30 bp, Artificial Sequence
  Synthetic oligonucleotide
gacttttgtacgtttcttaacagctgctgc

SEQ ID NO: 449942 - DNA, 30 bp, Artificial Sequence
  Synthetic oligonucleotide
ggctacttgccaacaaagttggggtgctgc

SEQ ID NO: 449943 - DNA, 30 bp, Artificial Sequence
  Synthetic oligonucleotide
cgaaacgcttacgcctcccctgggtgctgc

SEQ ID NO: 449944 - DNA, 30 bp, Artificial Sequence
  Synthetic oligonucleotide
acctgcctgtaatgatgaagccattgctgc

SEQ ID NO: 449945 - DNA, 30 bp, Artificial Sequence
  Synthetic oligonucleotide
ctttcatttgtgtattcgtcaccttgctgc

SEQ ID NO: 449946 - DNA, 30 bp, Artificial Sequence
  Synthetic oligonucleotide
ccccgtaaaaattctcgatggaccatctgc

SEQ ID NO: 449947 - DNA, 30 bp, Artificial Sequence
  Synthetic oligonucleotide
acccggccacggggaaaatttgagatctgc

SEQ ID NO: 449948 - DNA, 30 bp, Artificial Sequence
  Synthetic oligonucleotide
tactgtgagtctccaaaccgttctatctgc

SEQ ID NO: 449949 - DNA, 30 bp, Artificial Sequence
  Synthetic oligonucleotide
gtcttaaaggtctccgtgagaagactctgc

SEQ ID NO: 449950 - DNA, 30 bp, Artificial Sequence
  Synthetic oligonucleotide
aaatttcaatgcgaaggttcgggactctgc

SEQ ID NO: 449951 - DNA, 30 bp, Artificial Sequence
  Synthetic oligonucleotide
gatgacaggtctgtgatacgtgtgctctgc

SEQ ID NO: 449952 - DNA, 30 bp, Artificial Sequence
  Synthetic oligonucleotide
atggtgtgtatccgttcacacagcgtctgc

SEQ ID NO: 449953 - DNA, 30 bp, Artificial Sequence
  Synthetic oligonucleotide
aagttattgaccagtagagtccgcgtctgc

SEQ ID NO: 449954 - DNA, 30 bp, Artificial Sequence
  Synthetic oligonucleotide
ctggtccaatgcgagcacagagaggtctgc

SEQ ID NO: 449955 - DNA, 30 bp, Artificial Sequence
  Synthetic oligonucleotide
tttgagatagagcagtttattgtattctgc

SEQ ID NO: 449956 - DNA, 30 bp, Artificial Sequence
  Synthetic oligonucleotide
atcgatgtatcgcagcttatgaacttctgc

SEQ ID NO: 449957 - DNA, 30 bp, Artificial Sequence
  Synthetic oligonucleotide
aatgcggttctcgctgacccagcgttctgc

SEQ ID NO: 449958 - DNA, 30 bp, Artificial Sequence
  Synthetic oligonucleotide
ccgggagcgcccagcaggagagatttctgc

SEQ ID NO: 449959 - DNA, 30 bp, Artificial Sequence
  Synthetic oligonucleotide
aaactgggaagctaatggtgtagtttctgc

SEQ ID NO: 449960 - DNA, 30 bp, Artificial Sequence
  Synthetic oligonucleotide
ttgtactttgagggttgttctagcaagtgc

SEQ ID NO: 449961 - DNA, 30 bp, Artificial Sequence
  Synthetic oligonucleotide
caagcgtcggcagcaacgctaatcaagtgc

SEQ ID NO: 449962 - DNA, 30 bp, Artificial Sequence
  Synthetic oligonucleotide
aggaagcatatatgcgcgtattcgaagtgc

SEQ ID NO: 449963 - DNA, 30 bp, Artificial Sequence
  Synthetic oligonucleotide
taacccgcctcccaagcgattgggaagtgc

SEQ ID NO: 449964 - DNA, 30 bp, Artificial Sequence
  Synthetic oligonucleotide
ttgaattggcatgttgcttagaaacagtgc

SEQ ID NO: 449965 - DNA, 30 bp, Artificial Sequence
  Synthetic oligonucleotide
tatttgctcagtggtgcgggtacacagtgc

SEQ ID NO: 449966 - DNA, 30 bp, Artificial Sequence
  Synthetic oligonucleotide
accctgtcactccacgcgttcacccagtgc

SEQ ID NO: 449967 - DNA, 30 bp, Artificial Sequence
  Synthetic oligonucleotide
tgagaatacatgcgagtgagatatcagtgc

SEQ ID NO: 449968 - DNA, 30 bp, Artificial Sequence
  Synthetic oligonucleotide
gcacaattacgtcggtagttctgtcagtgc

SEQ ID NO: 449969 - DNA, 30 bp, Artificial Sequence
  Synthetic oligonucleotide
aagaaagaaagtttcggaaactttcagtgc

SEQ ID NO: 449970 - DNA, 30 bp, Artificial Sequence
  Synthetic oligonucleotide
aattcaagcctgcgaaagatgtttcagtgc

SEQ ID NO: 449971 - DNA, 30 bp, Artificial Sequence
  Synthetic oligonucleotide
gaggcggcgccagcagtgggtccggagtgc

SEQ ID NO: 449972 - DNA, 30 bp, Artificial Sequence
  Synthetic oligonucleotide
atatagttactactacaacggtcggagtgc

SEQ ID NO: 449973 - DNA, 30 bp, Artificial Sequence
  Synthetic oligonucleotide
gatggccggggcgttcgggtgggggagtgc

SEQ ID NO: 449974 - DNA, 30 bp, Artificial Sequence
  Synthetic oligonucleotide
tggatatggcgggcctgcgcggttgagtgc

SEQ ID NO: 449975 - DNA, 30 bp, Artificial Sequence
  Synthetic oligonucleotide
aaccttatcctagaaaagcgaaaatagtgc

SEQ ID NO: 449976 - DNA, 30 bp, Artificial Sequence
  Synthetic oligonucleotide
gtggcttgaaaagtcatcggcacatagtgc

SEQ ID NO: 449977 - DNA, 30 bp, Artificial Sequence
  Synthetic oligonucleotide
aaaatatttacttcaggggtggcatagtgc

SEQ ID NO: 449978 - DNA, 30 bp, Artificial Sequence
  Synthetic oligonucleotide
aataatatcgatcttttcgcttactagtgc

SEQ ID NO: 449979 - DNA, 30 bp, Artificial Sequence
  Synthetic oligonucleotide
actataatcgtagctcgcaccgcctagtgc

SEQ ID NO: 449980 - DNA, 30 bp, Artificial Sequence
  Synthetic oligonucleotide
cttcggttattttatagcacgaattagtgc

SEQ ID NO: 449981 - DNA, 30 bp, Artificial Sequence
  Synthetic oligonucleotide
atacatgcgatttgaggtaagcattagtgc

SEQ ID NO: 449982 - DNA, 30 bp, Artificial Sequence
  Synthetic oligonucleotide
cctgttagtacagaaatggctcattagtgc

SEQ ID NO: 449983 - DNA, 30 bp, Artificial Sequence
  Synthetic oligonucleotide
attctatatgcgcacagtatggattagtgc

SEQ ID NO: 449984 - DNA, 30 bp, Artificial Sequence
  Synthetic oligonucleotide
gtttgtgtttgtaagtatgatgaaacgtgc

SEQ ID NO: 449985 - DNA, 30 bp, Artificial Sequence
  Synthetic oligonucleotide
aaccgtgcggtgaagcaacccgtaacgtgc

SEQ ID NO: 449986 - DNA, 30 bp, Artificial Sequence
  Synthetic oligonucleotide
tcaatacgcatgcgcttgtgttgcacgtgc

SEQ ID NO: 449987 - DNA, 30 bp, Artificial Sequence
  Synthetic oligonucleotide
cttatgattgttatgctaaaatttacgtgc

SEQ ID NO: 449988 - DNA, 30 bp, Artificial Sequence
  Synthetic oligonucleotide
tgatactacccgctgtggtagtttacgtgc

SEQ ID NO: 449989 - DNA, 30 bp, Artificial Sequence
  Synthetic oligonucleotide
aaattcgcttgttcccagctcaggccgtgc

SEQ ID NO: 449990 - DNA, 30 bp, Artificial Sequence
  Synthetic oligonucleotide
ggggtacttaccgattaggctaccgcgtgc

SEQ ID NO: 449991 - DNA, 30 bp, Artificial Sequence
  Synthetic oligonucleotide
ctgccaaaattgtgttagtaaaaaaggtgc

SEQ ID NO: 449992 - DNA, 30 bp, Artificial Sequence
  Synthetic oligonucleotide
ggggcaatcctccctcaggcgttaaggtgc

SEQ ID NO: 449993 - DNA, 30 bp, Artificial Sequence
  Synthetic oligonucleotide
gcggcacaaaacaattgcatgagcaggtgc

SEQ ID NO: 449994 - DNA, 30 bp, Artificial Sequence
  Synthetic oligonucleotide
gcctgagaaggggatgggccgcagaggtgc

SEQ ID NO: 449995 - DNA, 30 bp, Artificial Sequence
  Synthetic oligonucleotide
gctttcacccgtttcaaccgcaataggtgc

SEQ ID NO: 449996 - DNA, 30 bp, Artificial Sequence
  Synthetic oligonucleotide
gacttagacgtctgtgaccggcctaggtgc

SEQ ID NO: 449997 - DNA, 30 bp, Artificial Sequence
  Synthetic oligonucleotide
tgtccactggaataaacttgagaacggtgc

SEQ ID NO: 449998 - DNA, 30 bp, Artificial Sequence
  Synthetic oligonucleotide
tcgggcccacccgctgtggacgaacggtgc

SEQ ID NO: 449999 - DNA, 30 bp, Artificial Sequence
  Synthetic oligonucleotide
ttgaatgtgtgcctacgcgcggcacggtgc

SEQ ID NO: 450000 - DNA, 30 bp, Artificial Sequence
  Synthetic oligonucleotide
caaagataaaagttgtttatggcacggtgc

SEQ ID NO: 450001 - DNA, 30 bp, Artificial Sequence
  Synthetic oligonucleotide
cattccgcttcgaattcacaattacggtgc

SEQ ID NO: 450002 - DNA, 30 bp, Artificial Sequence
  Synthetic oligonucleotide
tcctgtaagttggatcagagaccccggtgc

SEQ ID NO: 450003 - DNA, 30 bp, Artificial Sequence
  Synthetic oligonucleotide
aacgatgggatctggaagttgccgcggtgc

SEQ ID NO: 450004 - DNA, 30 bp, Artificial Sequence
  Synthetic oligonucleotide
atcaccccgtgggggttgattcggcggtgc

SEQ ID NO: 450005 - DNA, 30 bp, Artificial Sequence
  Synthetic oligonucleotide
tgttttgaaggatcaggtagattgcggtgc

SEQ ID NO: 450006 - DNA, 30 bp, Artificial Sequence
  Synthetic oligonucleotide
gacgcttatgcgtattgccgacccgggtgc

SEQ ID NO: 450007 - DNA, 30 bp, Artificial Sequence
  Synthetic oligonucleotide
gtcctaccgagcgttacgaatctggggtgc

SEQ ID NO: 450008 - DNA, 30 bp, Artificial Sequence
  Synthetic oligonucleotide
cataacccatatagcgcttctaaatggtgc

SEQ ID NO: 450009 - DNA, 30 bp, Artificial Sequence
  Synthetic oligonucleotide
cccgggttatgagtgtccgttgaatggtgc

SEQ ID NO: 450010 - DNA, 30 bp, Artificial Sequence
  Synthetic oligonucleotide
catcttgcatggcaagacaaacggtggtgc

SEQ ID NO: 450011 - DNA, 30 bp, Artificial Sequence
  Synthetic oligonucleotide
tactggcctacctgttacctatattggtgc

SEQ ID NO: 450012 - DNA, 30 bp, Artificial Sequence
  Synthetic oligonucleotide
gaagtttccgaatacaattgaccttggtgc

SEQ ID NO: 450013 - DNA, 30 bp, Artificial Sequence
  Synthetic oligonucleotide
gaacgtgcttcagaaaagtagcaaatgtgc

SEQ ID NO: 450014 - DNA, 30 bp, Artificial Sequence
  Synthetic oligonucleotide
gaaaatggagacgacaagtacgcaatgtgc

SEQ ID NO: 450015 - DNA, 30 bp, Artificial Sequence
  Synthetic oligonucleotide
cccagaaaccctgcacaaagtgcaatgtgc

SEQ ID NO: 450016 - DNA, 30 bp, Artificial Sequence
  Synthetic oligonucleotide
aacgcttgttataagtgtaggggcatgtgc

SEQ ID NO: 450017 - DNA, 30 bp, Artificial Sequence
  Synthetic oligonucleotide
tccctttgcctacaatgttttggcatgtgc

SEQ ID NO: 450018 - DNA, 30 bp, Artificial Sequence
  Synthetic oligonucleotide
cgcattgctcgtagcgctttaatcatgtgc

SEQ ID NO: 450019 - DNA, 30 bp, Artificial Sequence
  Synthetic oligonucleotide
cgtctcagtattagttgtagtatgatgtgc

SEQ ID NO: 450020 - DNA, 30 bp, Artificial Sequence
  Synthetic oligonucleotide
gattcatgtgaccgggcggggcttatgtgc

SEQ ID NO: 450021 - DNA, 30 bp, Artificial Sequence
  Synthetic oligonucleotide
ttcatgagtcgggagaggcccttactgtgc

SEQ ID NO: 450022 - DNA, 30 bp, Artificial Sequence
  Synthetic oligonucleotide
cgcatgctgtcgaaggattagaccctgtgc

SEQ ID NO: 450023 - DNA, 30 bp, Artificial Sequence
  Synthetic oligonucleotide
ccatctgtaatttaatatgtctggctgtgc

SEQ ID NO: 450024 - DNA, 30 bp, Artificial Sequence
  Synthetic oligonucleotide
gtcggagtagcaccgttgatgcttctgtgc

SEQ ID NO: 450025 - DNA, 30 bp, Artificial Sequence
  Synthetic oligonucleotide
tgttgtatatgtcgcgtcataaaagtgtgc

SEQ ID NO: 450026 - DNA, 30 bp, Artificial Sequence
  Synthetic oligonucleotide
tgcagaccatgcacacctgctctagtgtgc

SEQ ID NO: 450027 - DNA, 30 bp, Artificial Sequence
  Synthetic oligonucleotide
tgtcttcaggtcggaccgaccgctgtgtgc

SEQ ID NO: 450028 - DNA, 30 bp, Artificial Sequence
  Synthetic oligonucleotide
gagagcccttagactaagccagaattgtgc

SEQ ID NO: 450029 - DNA, 30 bp, Artificial Sequence
  Synthetic oligonucleotide
tggcaaacacagcgacacgtcgaattgtgc

SEQ ID NO: 450030 - DNA, 30 bp, Artificial Sequence
  Synthetic oligonucleotide
gttagtgcaatcgaactttttgtattgtgc

SEQ ID NO: 450031 - DNA, 30 bp, Artificial Sequence
  Synthetic oligonucleotide
tggtgagacgcatctctttatcccttgtgc

SEQ ID NO: 450032 - DNA, 30 bp, Artificial Sequence
  Synthetic oligonucleotide
gcggtgaagttcatcaagtttatcttgtgc

SEQ ID NO: 450033 - DNA, 30 bp, Artificial Sequence
  Synthetic oligonucleotide
cgagtttcaaaatttaggttcgtgttgtgc

SEQ ID NO: 450034 - DNA, 30 bp, Artificial Sequence
  Synthetic oligonucleotide
gctgctagaagctctcccccgttgttgtgc

SEQ ID NO: 450035 - DNA, 30 bp, Artificial Sequence
  Synthetic oligonucleotide
gatgcagcccctgagtccccgcgtttgtgc

SEQ ID NO: 450036 - DNA, 30 bp, Artificial Sequence
  Synthetic oligonucleotide
accccctctactttattctagcttttgtgc

SEQ ID NO: 450037 - DNA, 30 bp, Artificial Sequence
  Synthetic oligonucleotide
gtaacggagaacctatcacgtagtaattgc

SEQ ID NO: 450038 - DNA, 30 bp, Artificial Sequence
  Synthetic oligonucleotide
agattgggaaccccctcataatcacattgc

SEQ ID NO: 450039 - DNA, 30 bp, Artificial Sequence
  Synthetic oligonucleotide
ctggaccgattatggcacagatgccattgc

SEQ ID NO: 450040 - DNA, 30 bp, Artificial Sequence
  Synthetic oligonucleotide
ttaatgaaatgttaaaactgtgtccattgc

SEQ ID NO: 450041 - DNA, 30 bp, Artificial Sequence
  Synthetic oligonucleotide
ctaccgtggatatcgcattgcagtcattgc

SEQ ID NO: 450042 - DNA, 30 bp, Artificial Sequence
  Synthetic oligonucleotide
tgtgttaatctaccaaagttggttcattgc

SEQ ID NO: 450043 - DNA, 30 bp, Artificial Sequence
  Synthetic oligonucleotide
atattataatatctcgctcatcacgattgc

SEQ ID NO: 450044 - DNA, 30 bp, Artificial Sequence
  Synthetic oligonucleotide
taacgtttacttggcgaagcaaaggattgc

SEQ ID NO: 450045 - DNA, 30 bp, Artificial Sequence
  Synthetic oligonucleotide
agaaatttctagggagatataaaggattgc

SEQ ID NO: 450046 - DNA, 30 bp, Artificial Sequence
  Synthetic oligonucleotide
cgtcgtgatcggagccgcaaccaggattgc

SEQ ID NO: 450047 - DNA, 30 bp, Artificial Sequence
  Synthetic oligonucleotide
tatagtaagggcccttagatgggtgattgc

SEQ ID NO: 450048 - DNA, 30 bp, Artificial Sequence
  Synthetic oligonucleotide
gtcttattccattggatcaacattgattgc

SEQ ID NO: 450049 - DNA, 30 bp, Artificial Sequence
  Synthetic oligonucleotide
gcagtgtgtttccaggatgttggatattgc

SEQ ID NO: 450050 - DNA, 30 bp, Artificial Sequence
  Synthetic oligonucleotide
tgttaaaagtactccataagctgatattgc

SEQ ID NO: 450051 - DNA, 30 bp, Artificial Sequence
  Synthetic oligonucleotide
gaagaacactcacggctcgacgcctattgc

SEQ ID NO: 450052 - DNA, 30 bp, Artificial Sequence
  Synthetic oligonucleotide
atacttaacagagagttggagatctattgc

SEQ ID NO: 450053 - DNA, 30 bp, Artificial Sequence
  Synthetic oligonucleotide
ttgtgaactttgtggaggtaatagtattgc

SEQ ID NO: 450054 - DNA, 30 bp, Artificial Sequence
  Synthetic oligonucleotide
aacccatctgtgtccttctggtcgtattgc

SEQ ID NO: 450055 - DNA, 30 bp, Artificial Sequence
  Synthetic oligonucleotide
gcaaaagacgaggatttcacccgttattgc

SEQ ID NO: 450056 - DNA, 30 bp, Artificial Sequence
  Synthetic oligonucleotide
gttgatgctagtctgccggcactttattgc

SEQ ID NO: 450057 - DNA, 30 bp, Artificial Sequence
  Synthetic oligonucleotide
agtgcatccccagagtccgaggtttattgc

SEQ ID NO: 450058 - DNA, 30 bp, Artificial Sequence
  Synthetic oligonucleotide
tatgccgttctatcagttgtattttattgc

SEQ ID NO: 450059 - DNA, 30 bp, Artificial Sequence
  Synthetic oligonucleotide
cattaaacggacggacagccatagacttgc

SEQ ID NO: 450060 - DNA, 30 bp, Artificial Sequence
  Synthetic oligonucleotide
aatgtttcggaactaactcctcatacttgc

SEQ ID NO: 450061 - DNA, 30 bp, Artificial Sequence
  Synthetic oligonucleotide
tataaccgggaaggctgaaattgtacttgc

SEQ ID NO: 450062 - DNA, 30 bp, Artificial Sequence
  Synthetic oligonucleotide
gctatagtaggtcaacgaagtgcaccttgc

SEQ ID NO: 450063 - DNA, 30 bp, Artificial Sequence
  Synthetic oligonucleotide
gtatttcaagtcgtcagaggctgcccttgc

SEQ ID NO: 450064 - DNA, 30 bp, Artificial Sequence
  Synthetic oligonucleotide
ctttaggctccgcgcgcagtgtagccttgc

SEQ ID NO: 450065 - DNA, 30 bp, Artificial Sequence
  Synthetic oligonucleotide
gctcaaaatcttaaatagtggatgccttgc

SEQ ID NO: 450066 - DNA, 30 bp, Artificial Sequence
  Synthetic oligonucleotide
gccgactttaagttttttgtacatccttgc

SEQ ID NO: 450067 - DNA, 30 bp, Artificial Sequence
  Synthetic oligonucleotide
tcaaaggtggtggagcgggtggttccttgc

SEQ ID NO: 450068 - DNA, 30 bp, Artificial Sequence
  Synthetic oligonucleotide
gggtgttggacttgactttggcaagcttgc

SEQ ID NO: 450069 - DNA, 30 bp, Artificial Sequence
  Synthetic oligonucleotide
gtctccgtgattttcagttatgcagcttgc

SEQ ID NO: 450070 - DNA, 30 bp, Artificial Sequence
  Synthetic oligonucleotide
cttcgtacaaattaagtagacaccgcttgc

SEQ ID NO: 450071 - DNA, 30 bp, Artificial Sequence
  Synthetic oligonucleotide
gggtgagttggttgtaatcttgccgcttgc

SEQ ID NO: 450072 - DNA, 30 bp, Artificial Sequence
  Synthetic oligonucleotide
agagcagatgacttgccgctgggcgcttgc

SEQ ID NO: 450073 - DNA, 30 bp, Artificial Sequence
  Synthetic oligonucleotide
ttaagacttagcggatctcgggcggcttgc

SEQ ID NO: 450074 - DNA, 30 bp, Artificial Sequence
  Synthetic oligonucleotide
aaagcacccgtgtctaataaacgggcttgc

SEQ ID NO: 450075 - DNA, 30 bp, Artificial Sequence
  Synthetic oligonucleotide
gcgaggtagccaaggagatcccgtgcttgc

SEQ ID NO: 450076 - DNA, 30 bp, Artificial Sequence
  Synthetic oligonucleotide
gtgctccaagtgatttacgcacttgcttgc

SEQ ID NO: 450077 - DNA, 30 bp, Artificial Sequence
  Synthetic oligonucleotide
cccacctctgcccggaaatcacgctcttgc

SEQ ID NO: 450078 - DNA, 30 bp, Artificial Sequence
  Synthetic oligonucleotide
taaccggttcacttctccttgcgttcttgc

SEQ ID NO: 450079 - DNA, 30 bp, Artificial Sequence
  Synthetic oligonucleotide
ggcaccccgttaccgggatttgcaagttgc

SEQ ID NO: 450080 - DNA, 30 bp, Artificial Sequence
  Synthetic oligonucleotide
aattggcagtttagactcttcgtcagttgc

SEQ ID NO: 450081 - DNA, 30 bp, Artificial Sequence
  Synthetic oligonucleotide
gcgttccttcgacgactgtccaaacgttgc

SEQ ID NO: 450082 - DNA, 30 bp, Artificial Sequence
  Synthetic oligonucleotide
ttgggggcgactaaggtagtttaacgttgc

SEQ ID NO: 450083 - DNA, 30 bp, Artificial Sequence
  Synthetic oligonucleotide
tgccatttttgacacgttcaagcgcgttgc

SEQ ID NO: 450084 - DNA, 30 bp, Artificial Sequence
  Synthetic oligonucleotide
cgtaccgtaaagaggaattggtaaggttgc

SEQ ID NO: 450085 - DNA, 30 bp, Artificial Sequence
  Synthetic oligonucleotide
cgacttttgcaccatctaaccgtaggttgc

SEQ ID NO: 450086 - DNA, 30 bp, Artificial Sequence
  Synthetic oligonucleotide
ttatgctagcaagaccggcaaccgggttgc

SEQ ID NO: 450087 - DNA, 30 bp, Artificial Sequence
  Synthetic oligonucleotide
caagttttccccaacctatttgggggttgc

SEQ ID NO: 450088 - DNA, 30 bp, Artificial Sequence
  Synthetic oligonucleotide
tccgatctctcagcagagaaacatggttgc

SEQ ID NO: 450089 - DNA, 30 bp, Artificial Sequence
  Synthetic oligonucleotide
gctgctaggcaccgtgcaaatcttggttgc

SEQ ID NO: 450090 - DNA, 30 bp, Artificial Sequence
  Synthetic oligonucleotide
gtggggctattatctcttcccacatgttgc

SEQ ID NO: 450091 - DNA, 30 bp, Artificial Sequence
  Synthetic oligonucleotide
acgatgcaacatagctgatgcctatgttgc

SEQ ID NO: 450092 - DNA, 30 bp, Artificial Sequence
  Synthetic oligonucleotide
tgtagatcgtgccggccctcattatgttgc

SEQ ID NO: 450093 - DNA, 30 bp, Artificial Sequence
  Synthetic oligonucleotide
tataggtaagcacttcaagtgtcctgttgc

SEQ ID NO: 450094 - DNA, 30 bp, Artificial Sequence
  Synthetic oligonucleotide
tctacatctactcataagatagggtgttgc

SEQ ID NO: 450095 - DNA, 30 bp, Artificial Sequence
  Synthetic oligonucleotide
tcctgagacctgcaactcgagtggtgttgc

SEQ ID NO: 450096 - DNA, 30 bp, Artificial Sequence
  Synthetic oligonucleotide
ttagtcaattaagatccagatatgtgttgc

SEQ ID NO: 450097 - DNA, 30 bp, Artificial Sequence
  Synthetic oligonucleotide
gtgttgtgacatgtggactcgttgtgttgc

SEQ ID NO: 450098 - DNA, 30 bp, Artificial Sequence
  Synthetic oligonucleotide
gagacgcattcaagtagacttgattgttgc

SEQ ID NO: 450099 - DNA, 30 bp, Artificial Sequence
  Synthetic oligonucleotide
ggacacactgtcggtcatataacttgttgc

SEQ ID NO: 450100 - DNA, 30 bp, Artificial Sequence
  Synthetic oligonucleotide
ctggaagttttaatgatctggggcatttgc

SEQ ID NO: 450101 - DNA, 30 bp, Artificial Sequence
  Synthetic oligonucleotide
ttgatctattgggttcatgctaggatttgc

SEQ ID NO: 450102 - DNA, 30 bp, Artificial Sequence
  Synthetic oligonucleotide
gtgttttgtgtttttcaactttggatttgc

SEQ ID NO: 450103 - DNA, 30 bp, Artificial Sequence
  Synthetic oligonucleotide
gattgacgatacaacattgtacgcctttgc

SEQ ID NO: 450104 - DNA, 30 bp, Artificial Sequence
  Synthetic oligonucleotide
acatctatactaaatcatttgcgcctttgc

SEQ ID NO: 450105 - DNA, 30 bp, Artificial Sequence
  Synthetic oligonucleotide
tttacactcagtgcgggatagcagctttgc

SEQ ID NO: 450106 - DNA, 30 bp, Artificial Sequence
  Synthetic oligonucleotide
ttgccataagtaaaggaaggaaatctttgc

SEQ ID NO: 450107 - DNA, 30 bp, Artificial Sequence
  Synthetic oligonucleotide
cgcatgcgttaccgcaaagacagtctttgc

SEQ ID NO: 450108 - DNA, 30 bp, Artificial Sequence
  Synthetic oligonucleotide
cgcaagaggctttcagtgtcgggagtttgc

SEQ ID NO: 450109 - DNA, 30 bp, Artificial Sequence
  Synthetic oligonucleotide
tagatgccccttgatcgtccgagcgtttgc

SEQ ID NO: 450110 - DNA, 30 bp, Artificial Sequence
  Synthetic oligonucleotide
atcttctgtatcagactgcacgcggtttgc

SEQ ID NO: 450111 - DNA, 30 bp, Artificial Sequence
  Synthetic oligonucleotide
gcgtgaaacagtgcttttaggctggtttgc

SEQ ID NO: 450112 - DNA, 30 bp, Artificial Sequence
  Synthetic oligonucleotide
aacaactcctctgagtaagatattgtttgc

SEQ ID NO: 450113 - DNA, 30 bp, Artificial Sequence
  Synthetic oligonucleotide
tggccaaataactgcgctgagttcttttgc

SEQ ID NO: 450114 - DNA, 30 bp, Artificial Sequence
  Synthetic oligonucleotide
tgagatggctatgtaattgacaagttttgc

SEQ ID NO: 450115 - DNA, 30 bp, Artificial Sequence
  Synthetic oligonucleotide
cacactatatagatttggatacagttttgc

SEQ ID NO: 450116 - DNA, 30 bp, Artificial Sequence
  Synthetic oligonucleotide
atttctatctgtgtagtcggggctttttgc

SEQ ID NO: 450117 - DNA, 30 bp, Artificial Sequence
  Synthetic oligonucleotide
cccccgacgacccttgagtcttgtttttgc

SEQ ID NO: 450118 - DNA, 30 bp, Artificial Sequence
  Synthetic oligonucleotide
gccttcaggtcacggccgaagacaaaaatc

SEQ ID NO: 450119 - DNA, 30 bp, Artificial Sequence
  Synthetic oligonucleotide
ctgactacctttgacaagctctgaaaaatc

SEQ ID NO: 450120 - DNA, 30 bp, Artificial Sequence
  Synthetic oligonucleotide
aattacccacagcgtacaaacgtaaaaatc

SEQ ID NO: 450121 - DNA, 30 bp, Artificial Sequence
  Synthetic oligonucleotide
catgatgaaacgtttgaacctagcaaaatc

SEQ ID NO: 450122 - DNA, 30 bp, Artificial Sequence
  Synthetic oligonucleotide
ggactttataataaacgacgtgtcaaaatc

SEQ ID NO: 450123 - DNA, 30 bp, Artificial Sequence
  Synthetic oligonucleotide
ggttcactaggccccaatggactgaaaatc

SEQ ID NO: 450124 - DNA, 30 bp, Artificial Sequence
  Synthetic oligonucleotide
ctttttaaacgattaaaatgtgtgaaaatc

SEQ ID NO: 450125 - DNA, 30 bp, Artificial Sequence
  Synthetic oligonucleotide
gaaagataaggcattccaattactaaaatc

SEQ ID NO: 450126 - DNA, 30 bp, Artificial Sequence
  Synthetic oligonucleotide
ggaggataaacatcgctgaccctacaaatc

SEQ ID NO: 450127 - DNA, 30 bp, Artificial Sequence
  Synthetic oligonucleotide
gacaattacactctgttccaataccaaatc

SEQ ID NO: 450128 - DNA, 30 bp, Artificial Sequence
  Synthetic oligonucleotide
cagaaagccgtgctcaggcgcacccaaatc

SEQ ID NO: 450129 - DNA, 30 bp, Artificial Sequence
  Synthetic oligonucleotide
ctttgcacaagatgaaggcgtgagcaaatc

SEQ ID NO: 450130 - DNA, 30 bp, Artificial Sequence
  Synthetic oligonucleotide
atggcattagcttgagctaaatagcaaatc

SEQ ID NO: 450131 - DNA, 30 bp, Artificial Sequence
  Synthetic oligonucleotide
gttagtttgacgttctgaattgcgcaaatc

SEQ ID NO: 450132 - DNA, 30 bp, Artificial Sequence
  Synthetic oligonucleotide
gatctgaggttagcattcgtgaggcaaatc

SEQ ID NO: 450133 - DNA, 30 bp, Artificial Sequence
  Synthetic oligonucleotide
tggggcttatcccctagctgatttcaaatc

SEQ ID NO: 450134 - DNA, 30 bp, Artificial Sequence
  Synthetic oligonucleotide
gcacagtttgcctttgacattccagaaatc

SEQ ID NO: 450135 - DNA, 30 bp, Artificial Sequence
  Synthetic oligonucleotide
attagttagggaagttgattgatagaaatc

SEQ ID NO: 450136 - DNA, 30 bp, Artificial Sequence
  Synthetic oligonucleotide
atatagaagcatgtaatcatttcggaaatc

SEQ ID NO: 450137 - DNA, 30 bp, Artificial Sequence
  Synthetic oligonucleotide
agcaggcgtttcggacagacaggggaaatc

SEQ ID NO: 450138 - DNA, 30 bp, Artificial Sequence
  Synthetic oligonucleotide
tacggaaatatagctcactacggggaaatc

SEQ ID NO: 450139 - DNA, 30 bp, Artificial Sequence
  Synthetic oligonucleotide
tcatcggaaattataaacttgaaataaatc

SEQ ID NO: 450140 - DNA, 30 bp, Artificial Sequence
  Synthetic oligonucleotide
ggcggttggactctccttgggagataaatc

SEQ ID NO: 450141 - DNA, 30 bp, Artificial Sequence
  Synthetic oligonucleotide
tggctcattgggtttaaagagatataaatc

SEQ ID NO: 450142 - DNA, 30 bp, Artificial Sequence
  Synthetic oligonucleotide
gcgaaaaattgtcaacgacgcttataaatc

SEQ ID NO: 450143 - DNA, 30 bp, Artificial Sequence
  Synthetic oligonucleotide
gagtctttccaaacagccgttcactaaatc

SEQ ID NO: 450144 - DNA, 30 bp, Artificial Sequence
  Synthetic oligonucleotide
gtatatcgatcatggggcgagctctaaatc

SEQ ID NO: 450145 - DNA, 30 bp, Artificial Sequence
  Synthetic oligonucleotide
gggaaaagaccctgacgcgggcagtaaatc

SEQ ID NO: 450146 - DNA, 31 bp, Artificial Sequence
  Synthetic oligonucleotide
tttgttggaattacaaatctacaggtaaatc

SEQ ID NO: 450147 - DNA, 30 bp, Artificial Sequence
  Synthetic oligonucleotide
tactgagctatggcgagcccgtggtaaatc

SEQ ID NO: 450148 - DNA, 30 bp, Artificial Sequence
  Synthetic oligonucleotide
aagcttgcgggtcccctatttaattaaatc

SEQ ID NO: 450149 - DNA, 30 bp, Artificial Sequence
  Synthetic oligonucleotide
tgaccggagtattacggcccctgttaaatc

SEQ ID NO: 450150 - DNA, 30 bp, Artificial Sequence
  Synthetic oligonucleotide
gtgggtccgatgttcttgtaaagaacaatc

SEQ ID NO: 450151 - DNA, 30 bp, Artificial Sequence
  Synthetic oligonucleotide
gttgttagtacggcatttagtatgacaatc

SEQ ID NO: 450152 - DNA, 30 bp, Artificial Sequence
  Synthetic oligonucleotide
aacctccggtaggccggagggttgacaatc

SEQ ID NO: 450153 - DNA, 30 bp, Artificial Sequence
  Synthetic oligonucleotide
cattctaatatgaatatgtagaatacaatc

SEQ ID NO: 450154 - DNA, 30 bp, Artificial Sequence
  Synthetic oligonucleotide
ggaaaatgggggaatatcatatttacaatc

SEQ ID NO: 450155 - DNA, 30 bp, Artificial Sequence
  Synthetic oligonucleotide
ttattagctgataggtgaggcagaccaatc

SEQ ID NO: 450156 - DNA, 30 bp, Artificial Sequence
  Synthetic oligonucleotide
ccgggatttaatgaataaccggacccaatc

SEQ ID NO: 450157 - DNA, 31 bp, Artificial Sequence
  Synthetic oligonucleotide
gtaggggttggagcctatctctgcgccaatc

SEQ ID NO: 450158 - DNA, 30 bp, Artificial Sequence
  Synthetic oligonucleotide
ccaggagtgacctagcgtggcttgccaatc

SEQ ID NO: 450159 - DNA, 30 bp, Artificial Sequence
  Synthetic oligonucleotide
gctattgaatcgattcgattagctccaatc

SEQ ID NO: 450160 - DNA, 30 bp, Artificial Sequence
  Synthetic oligonucleotide
tggtcaagtgtagaacgcctttaagcaatc

SEQ ID NO: 450161 - DNA, 30 bp, Artificial Sequence
  Synthetic oligonucleotide
tcatatggacacgaacttgcaccagcaatc

SEQ ID NO: 450162 - DNA, 30 bp, Artificial Sequence
  Synthetic oligonucleotide
gcagctttacaatggacagaaggcgcaatc

SEQ ID NO: 450163 - DNA, 30 bp, Artificial Sequence
  Synthetic oligonucleotide
gacatcgggaacccgatctcatgcgcaatc

SEQ ID NO: 450164 - DNA, 30 bp, Artificial Sequence
  Synthetic oligonucleotide
ttttggaggctcggggttcaccgggcaatc

SEQ ID NO: 450165 - DNA, 29 bp, Artificial Sequence
  Synthetic oligonucleotide
agatgcggcgtatcaacagattggcaatc

SEQ ID NO: 450166 - DNA, 28 bp, Artificial Sequence
  Synthetic oligonucleotide
atggtcgctcaagctcagttaatcaatc

SEQ ID NO: 450167 - DNA, 30 bp, Artificial Sequence
  Synthetic oligonucleotide
tgtggtggaccggtttttgatagatcaatc

SEQ ID NO: 450168 - DNA, 30 bp, Artificial Sequence
  Synthetic oligonucleotide
agacctaaccggcttcctggacgatcaatc

SEQ ID NO: 450169 - DNA, 30 bp, Artificial Sequence
  Synthetic oligonucleotide
accttttacgttgtatatagctactcaatc

SEQ ID NO: 450170 - DNA, 30 bp, Artificial Sequence
  Synthetic oligonucleotide
agaatatcgcgagggttttcgctctcaatc

SEQ ID NO: 450171 - DNA, 30 bp, Artificial Sequence
  Synthetic oligonucleotide
ctacgatagtttttcgtctagtggtcaatc

SEQ ID NO: 450172 - DNA, 30 bp, Artificial Sequence
  Synthetic oligonucleotide
tgtacgggcgtcccgaacgccgattcaatc

SEQ ID NO: 450173 - DNA, 30 bp, Artificial Sequence
  Synthetic oligonucleotide
gcctgtgcgagcacactcgcttgaagaatc

SEQ ID NO: 450174 - DNA, 30 bp, Artificial Sequence
  Synthetic oligonucleotide
cagcacaatcgttagttgcccagcagaatc

SEQ ID NO: 450175 - DNA, 30 bp, Artificial Sequence
  Synthetic oligonucleotide
gcctggggccctgaacatggtttcagaatc

SEQ ID NO: 450176 - DNA, 30 bp, Artificial Sequence
  Synthetic oligonucleotide
aaagctcggtagtgtgcacactcgagaatc

SEQ ID NO: 450177 - DNA, 30 bp, Artificial Sequence
  Synthetic oligonucleotide
atatcgtctgtctatcgttcacatagaatc

SEQ ID NO: 450178 - DNA, 30 bp, Artificial Sequence
  Synthetic oligonucleotide
ttcatctcggtccccagtggccatagaatc

SEQ ID NO: 450179 - DNA, 28 bp, Artificial Sequence
  Synthetic oligonucleotide
attccgaggtagacagacggttagaatc

SEQ ID NO: 450180 - DNA, 31 bp, Artificial Sequence
  Synthetic oligonucleotide
cgtctcatctaactcctgcgaaatacgaatc

SEQ ID NO: 450181 - DNA, 30 bp, Artificial Sequence
  Synthetic oligonucleotide
cccgctcttcgaaagcgcacagtacgaatc

SEQ ID NO: 450182 - DNA, 30 bp, Artificial Sequence
  Synthetic oligonucleotide
actccgccgcggcaaaagccaggccgaatc

SEQ ID NO: 450183 - DNA, 30 bp, Artificial Sequence
  Synthetic oligonucleotide
gagtctagatgaagttgcaaacatcgaatc

SEQ ID NO: 450184 - DNA, 30 bp, Artificial Sequence
  Synthetic oligonucleotide
tgttccaagacatatttagcttatcgaatc

SEQ ID NO: 450185 - DNA, 30 bp, Artificial Sequence
  Synthetic oligonucleotide
tcgactcagacagcaaccaagataggaatc

SEQ ID NO: 450186 - DNA, 30 bp, Artificial Sequence
  Synthetic oligonucleotide
agggttccctctttaatttctcacggaatc

SEQ ID NO: 450187 - DNA, 29 bp, Artificial Sequence
  Synthetic oligonucleotide
acactccgcaagcgtggtgtcacggaatc

SEQ ID NO: 450188 - DNA, 30 bp, Artificial Sequence
  Synthetic oligonucleotide
agtgtccatgtgctttccggatgcggaatc

SEQ ID NO: 450189 - DNA, 30 bp, Artificial Sequence
  Synthetic oligonucleotide
gattttaattagtttggagtttgcggaatc

SEQ ID NO: 450190 - DNA, 30 bp, Artificial Sequence
  Synthetic oligonucleotide
tagctgattcggaacatttacaagggaatc

SEQ ID NO: 450191 - DNA, 30 bp, Artificial Sequence
  Synthetic oligonucleotide
cccgtgaactcctggacgacgcagggaatc

SEQ ID NO: 450192 - DNA, 30 bp, Artificial Sequence
  Synthetic oligonucleotide
acgaagccgcagctcaggtcagatggaatc

SEQ ID NO: 450193 - DNA, 30 bp, Artificial Sequence
  Synthetic oligonucleotide
ttcgtcatcgtctaggcggagtatggaatc

SEQ ID NO: 450194 - DNA, 30 bp, Artificial Sequence
  Synthetic oligonucleotide
gtcgtggtaacgggggggaggggtggaatc

SEQ ID NO: 450195 - DNA, 30 bp, Artificial Sequence
  Synthetic oligonucleotide
ttcacggggtatgtgggtccaattggaatc

SEQ ID NO: 450196 - DNA, 30 bp, Artificial Sequence
  Synthetic oligonucleotide
atatagcgcttaacggttttcattggaatc

SEQ ID NO: 450197 - DNA, 30 bp, Artificial Sequence
  Synthetic oligonucleotide
ggtatatacgtacttcggcggcgatgaatc

SEQ ID NO: 450198 - DNA, 30 bp, Artificial Sequence
  Synthetic oligonucleotide
cacattttggcccactagcttcgatgaatc

SEQ ID NO: 450199 - DNA, 30 bp, Artificial Sequence
  Synthetic oligonucleotide
gtcgtatatcggcctgtcatcatatgaatc

SEQ ID NO: 450200 - DNA, 30 bp, Artificial Sequence
  Synthetic oligonucleotide
catctaggcgtaagtcggcagtgttgaatc

SEQ ID NO: 450201 - DNA, 30 bp, Artificial Sequence
  Synthetic oligonucleotide
gtatacatatagtcggtgtggtgttgaatc

SEQ ID NO: 450202 - DNA, 30 bp, Artificial Sequence
  Synthetic oligonucleotide
aacgtaaatcaaacttgattagtttgaatc

SEQ ID NO: 450203 - DNA, 30 bp, Artificial Sequence
  Synthetic oligonucleotide
tatagaaacaaatcgctaagattttgaatc

SEQ ID NO: 450204 - DNA, 30 bp, Artificial Sequence
  Synthetic oligonucleotide
aggttataatcagggtctgatttttgaatc

SEQ ID NO: 450205 - DNA, 30 bp, Artificial Sequence
  Synthetic oligonucleotide
tcaaatacccgggacgtgtacagaataatc

SEQ ID NO: 450206 - DNA, 30 bp, Artificial Sequence
  Synthetic oligonucleotide
aagtattaagttcaccccatcaagataatc

SEQ ID NO: 450207 - DNA, 30 bp, Artificial Sequence
  Synthetic oligonucleotide
taatttggtgcaatctcttcctagataatc

SEQ ID NO: 450208 - DNA, 30 bp, Artificial Sequence
  Synthetic oligonucleotide
aaagattgtctgtgttacctctggataatc

SEQ ID NO: 450209 - DNA, 30 bp, Artificial Sequence
  Synthetic oligonucleotide
tatcaacggttaacctaacctttgataatc

SEQ ID NO: 450210 - DNA, 30 bp, Artificial Sequence
  Synthetic oligonucleotide
accatatccatcgctgacgaagatataatc

SEQ ID NO: 450211 - DNA, 30 bp, Artificial Sequence
  Synthetic oligonucleotide
aaatgtcaattagacgcgcgttatataatc

SEQ ID NO: 450212 - DNA, 30 bp, Artificial Sequence
  Synthetic oligonucleotide
atacctcatccgcctgagtttcctataatc

SEQ ID NO: 450213 - DNA, 30 bp, Artificial Sequence
  Synthetic oligonucleotide
gatgtctattctggttcagcaattataatc

SEQ ID NO: 450214 - DNA, 30 bp, Artificial Sequence
  Synthetic oligonucleotide
ttagcggccgcttgatataggattataatc

SEQ ID NO: 450215 - DNA, 30 bp, Artificial Sequence
  Synthetic oligonucleotide
agtctctgcgaaccaagccttgttataatc

SEQ ID NO: 450216 - DNA, 30 bp, Artificial Sequence
  Synthetic oligonucleotide
gggcgatgggaattttccacggagctaatc

SEQ ID NO: 450217 - DNA, 30 bp, Artificial Sequence
  Synthetic oligonucleotide
atagcacgtcgctctaattagtagctaatc

SEQ ID NO: 450218 - DNA, 30 bp, Artificial Sequence
  Synthetic oligonucleotide
atgtatgattggttagtatggtggctaatc

SEQ ID NO: 450219 - DNA, 30 bp, Artificial Sequence
  Synthetic oligonucleotide
taggtcgtagcgcaaacatacatgctaatc

SEQ ID NO: 450220 - DNA, 30 bp, Artificial Sequence
  Synthetic oligonucleotide
ttgccgcattatcctgccccgttgctaatc

SEQ ID NO: 450221 - DNA, 30 bp, Artificial Sequence
  Synthetic oligonucleotide
tcgatgattagaaaggctattcctctaatc

SEQ ID NO: 450222 - DNA, 30 bp, Artificial Sequence
  Synthetic oligonucleotide
gtgcgaggcttagatgcagcccttctaatc

SEQ ID NO: 450223 - DNA, 30 bp, Artificial Sequence
  Synthetic oligonucleotide
aattggcgttaacgttctgctccagtaatc

SEQ ID NO: 450224 - DNA, 30 bp, Artificial Sequence
  Synthetic oligonucleotide
acggtcgcttccgcacgggggcgagtaatc

SEQ ID NO: 450225 - DNA, 30 bp, Artificial Sequence
  Synthetic oligonucleotide
aatggaccttaacgtttactatgagtaatc

SEQ ID NO: 450226 - DNA, 30 bp, Artificial Sequence
  Synthetic oligonucleotide
tcgccgaggtgcaataaggggatagtaatc

SEQ ID NO: 450227 - DNA, 30 bp, Artificial Sequence
  Synthetic oligonucleotide
gttgtcgttgattggaatttcaccgtaatc

SEQ ID NO: 450228 - DNA, 30 bp, Artificial Sequence
  Synthetic oligonucleotide
tagaatgcagtccggcagctatcggtaatc

SEQ ID NO: 450229 - DNA, 30 bp, Artificial Sequence
  Synthetic oligonucleotide
tttacgtctggaactctatgaaatgtaatc

SEQ ID NO: 450230 - DNA, 30 bp, Artificial Sequence
  Synthetic oligonucleotide
ggatcggtcactgggggagcgttattaatc

SEQ ID NO: 450231 - DNA, 30 bp, Artificial Sequence
  Synthetic oligonucleotide
tgcttgtacgaaaaattgcttctcttaatc

SEQ ID NO: 450232 - DNA, 30 bp, Artificial Sequence
  Synthetic oligonucleotide
caagtgtttacgttcaacctaaagttaatc

SEQ ID NO: 450233 - DNA, 30 bp, Artificial Sequence
  Synthetic oligonucleotide
aaaagaatagtgcaatagcgggatttaatc

SEQ ID NO: 450234 - DNA, 30 bp, Artificial Sequence
  Synthetic oligonucleotide
aattgtgaaaatcagcttttcactttaatc

SEQ ID NO: 450235 - DNA, 30 bp, Artificial Sequence
  Synthetic oligonucleotide
aaaaattcatctaatatgaagggtttaatc

SEQ ID NO: 450236 - DNA, 31 bp, Artificial Sequence
  Synthetic oligonucleotide
ccatccttggttaaaaaggggtattttaatc

SEQ ID NO: 450237 - DNA, 30 bp, Artificial Sequence
  Synthetic oligonucleotide
gttcggaggctgtacggggaataaaacatc

SEQ ID NO: 450238 - DNA, 30 bp, Artificial Sequence
  Synthetic oligonucleotide
ccacctccacttcacgggtcacacaacatc

SEQ ID NO: 450239 - DNA, 30 bp, Artificial Sequence
  Synthetic oligonucleotide
cgtatcgcaccccgagggctgctcaacatc

SEQ ID NO: 450240 - DNA, 30 bp, Artificial Sequence
  Synthetic oligonucleotide
ttgttaggttttgaaatctggccgaacatc

SEQ ID NO: 450241 - DNA, 30 bp, Artificial Sequence
  Synthetic oligonucleotide
gctaagtgctcagtacttttaaggaacatc

SEQ ID NO: 450242 - DNA, 30 bp, Artificial Sequence
  Synthetic oligonucleotide
accgcaatatagccacgagctactaacatc

SEQ ID NO: 450243 - DNA, 30 bp, Artificial Sequence
  Synthetic oligonucleotide
cagaccttaaggttaacgctctaacacatc

SEQ ID NO: 450244 - DNA, 30 bp, Artificial Sequence
  Synthetic oligonucleotide
cacagacggagctcttagagaacacacatc

SEQ ID NO: 450245 - DNA, 30 bp, Artificial Sequence
  Synthetic oligonucleotide
tgtacttgcgcttccaccataccacacatc

SEQ ID NO: 450246 - DNA, 30 bp, Artificial Sequence
  Synthetic oligonucleotide
attctaatggtatggcgatggccacacatc

SEQ ID NO: 450247 - DNA, 30 bp, Artificial Sequence
  Synthetic oligonucleotide
gcggtgcggagattcaggggggtacacatc

SEQ ID NO: 450248 - DNA, 30 bp, Artificial Sequence
  Synthetic oligonucleotide
cccgcggtgtacggatgattagtccacatc

SEQ ID NO: 450249 - DNA, 30 bp, Artificial Sequence
  Synthetic oligonucleotide
tattaccgcgtatttactgaggctcacatc

SEQ ID NO: 450250 - DNA, 30 bp, Artificial Sequence
  Synthetic oligonucleotide
acttatttgttggcgaaccagcgtcacatc

SEQ ID NO: 450251 - DNA, 30 bp, Artificial Sequence
  Synthetic oligonucleotide
tgcaaattacctgatgtcataaaagacatc

SEQ ID NO: 450252 - DNA, 30 bp, Artificial Sequence
  Synthetic oligonucleotide
cgggtactctctttatcggagagagacatc

SEQ ID NO: 450253 - DNA, 30 bp, Artificial Sequence
  Synthetic oligonucleotide
ggttctcccgatcatttgagaggagacatc

SEQ ID NO: 450254 - DNA, 30 bp, Artificial Sequence
  Synthetic oligonucleotide
ccttatttacttttctctacggcggacatc

SEQ ID NO: 450255 - DNA, 30 bp, Artificial Sequence
  Synthetic oligonucleotide
tttgtcccggggtcatggcataatgacatc

SEQ ID NO: 450256 - DNA, 30 bp, Artificial Sequence
  Synthetic oligonucleotide
catttgcacctcatacgaagcatatacatc

SEQ ID NO: 450257 - DNA, 30 bp, Artificial Sequence
  Synthetic oligonucleotide
tctcatagccgcaacaactatctctacatc

SEQ ID NO: 450258 - DNA, 30 bp, Artificial Sequence
  Synthetic oligonucleotide
gttcgctcggggttagaggccataaccatc

SEQ ID NO: 450259 - DNA, 30 bp, Artificial Sequence
  Synthetic oligonucleotide
tcccggtctagggaaccgatacggaccatc

SEQ ID NO: 450260 - DNA, 30 bp, Artificial Sequence
  Synthetic oligonucleotide
ttaggagcccaattttcattatggaccatc

SEQ ID NO: 450261 - DNA, 30 bp, Artificial Sequence
  Synthetic oligonucleotide
ttaacggtgggcccggaatgaaataccatc

SEQ ID NO: 450262 - DNA, 30 bp, Artificial Sequence
  Synthetic oligonucleotide
tgtacttatgttaaaaagctggataccatc

SEQ ID NO: 450263 - DNA, 30 bp, Artificial Sequence
  Synthetic oligonucleotide
cccttttggtcagataactaacaccccatc

SEQ ID NO: 450264 - DNA, 30 bp, Artificial Sequence
  Synthetic oligonucleotide
ttacattgtgcatggatagttcagcccatc

SEQ ID NO: 450265 - DNA, 30 bp, Artificial Sequence
  Synthetic oligonucleotide
tacagggatatacaaaatgtatagcccatc

SEQ ID NO: 450266 - DNA, 30 bp, Artificial Sequence
  Synthetic oligonucleotide
tcgttgctcgacagcgctttttagcccatc

SEQ ID NO: 450267 - DNA, 30 bp, Artificial Sequence
  Synthetic oligonucleotide
ttatgccccaagctgccgatagttcccatc

SEQ ID NO: 450268 - DNA, 30 bp, Artificial Sequence
  Synthetic oligonucleotide
aggtcatatcaggttagcctagcagccatc

SEQ ID NO: 450269 - DNA, 30 bp, Artificial Sequence
  Synthetic oligonucleotide
aacgtagtatagtctcgcgccgcagccatc

SEQ ID NO: 450270 - DNA, 30 bp, Artificial Sequence
  Synthetic oligonucleotide
gacacctcgttgtggcctcttgaggccatc

SEQ ID NO: 450271 - DNA, 30 bp, Artificial Sequence
  Synthetic oligonucleotide
agcgtcagagggataggtcatacggccatc

SEQ ID NO: 450272 - DNA, 30 bp, Artificial Sequence
  Synthetic oligonucleotide
agatgttcgtgccctatagggccggccatc

SEQ ID NO: 450273 - DNA, 30 bp, Artificial Sequence
  Synthetic oligonucleotide
ggtatctggtaccctaaggctggggccatc

SEQ ID NO: 450274 - DNA, 30 bp, Artificial Sequence
  Synthetic oligonucleotide
ggtgtgtgggggtattctactgctgccatc

SEQ ID NO: 450275 - DNA, 30 bp, Artificial Sequence
  Synthetic oligonucleotide
cagggcttgtttataaattataaatccatc

SEQ ID NO: 450276 - DNA, 30 bp, Artificial Sequence
  Synthetic oligonucleotide
tgctatgggacactccagtgaccatccatc

SEQ ID NO: 450277 - DNA, 30 bp, Artificial Sequence
  Synthetic oligonucleotide
ttcacttatccaccggatagtccctccatc

SEQ ID NO: 450278 - DNA, 30 bp, Artificial Sequence
  Synthetic oligonucleotide
cagtagggctacccgatgtagtcgtccatc

SEQ ID NO: 450279 - DNA, 30 bp, Artificial Sequence
  Synthetic oligonucleotide
taaaatgccctcgggtagtcacaaagcatc

SEQ ID NO: 450280 - DNA, 30 bp, Artificial Sequence
  Synthetic oligonucleotide
attgatgcagtcccatgacgaggaagcatc

SEQ ID NO: 450281 - DNA, 30 bp, Artificial Sequence
  Synthetic oligonucleotide
tctggtaagtacctaacctagggaagcatc

SEQ ID NO: 450282 - DNA, 30 bp, Artificial Sequence
  Synthetic oligonucleotide
gcactcttttcgaaacacagttgaagcatc

SEQ ID NO: 450283 - DNA, 30 bp, Artificial Sequence
  Synthetic oligonucleotide
gttatgggagcgccatcacagtacagcatc

SEQ ID NO: 450284 - DNA, 30 bp, Artificial Sequence
  Synthetic oligonucleotide
caaatatactagtggtaaatatgtagcatc

SEQ ID NO: 450285 - DNA, 30 bp, Artificial Sequence
  Synthetic oligonucleotide
aagccatagttccacgtctatacacgcatc

SEQ ID NO: 450286 - DNA, 30 bp, Artificial Sequence
  Synthetic oligonucleotide
cgcagcgaaatcttcgagggtacccgcatc

SEQ ID NO: 450287 - DNA, 30 bp, Artificial Sequence
  Synthetic oligonucleotide
atctgggatggaacacctgtccatcgcatc

SEQ ID NO: 450288 - DNA, 30 bp, Artificial Sequence
  Synthetic oligonucleotide
atcttctcgatttattgatcgccaggcatc

SEQ ID NO: 450289 - DNA, 30 bp, Artificial Sequence
  Synthetic oligonucleotide
cagactggatctctcatatatagaggcatc

SEQ ID NO: 450290 - DNA, 30 bp, Artificial Sequence
  Synthetic oligonucleotide
gtatcttctgaaccgcaggcacacggcatc

SEQ ID NO: 450291 - DNA, 30 bp, Artificial Sequence
  Synthetic oligonucleotide
acggtggtttgtgtactgcggcgcggcatc

SEQ ID NO: 450292 - DNA, 30 bp, Artificial Sequence
  Synthetic oligonucleotide
gtctagcccagacatccgccatggggcatc

SEQ ID NO: 450293 - DNA, 30 bp, Artificial Sequence
  Synthetic oligonucleotide
tgtgttctaaacatcaactctcatggcatc

SEQ ID NO: 450294 - DNA, 30 bp, Artificial Sequence
  Synthetic oligonucleotide
actgggacccgttccccggaatttggcatc

SEQ ID NO: 450295 - DNA, 30 bp, Artificial Sequence
  Synthetic oligonucleotide
cttaaaaagcatgcacttatagtctgcatc

SEQ ID NO: 450296 - DNA, 30 bp, Artificial Sequence
  Synthetic oligonucleotide
gtccctaaattttcatccatttcgtgcatc

SEQ ID NO: 450297 - DNA, 30 bp, Artificial Sequence
  Synthetic oligonucleotide
taggtcaatccctctacagtctggtgcatc

SEQ ID NO: 450298 - DNA, 30 bp, Artificial Sequence
  Synthetic oligonucleotide
tttgtaatcttgctgtatcagctttgcatc

SEQ ID NO: 450299 - DNA, 30 bp, Artificial Sequence
  Synthetic oligonucleotide
gtaaaacaggaagcaggcaaacaaatcatc

SEQ ID NO: 450300 - DNA, 30 bp, Artificial Sequence
  Synthetic oligonucleotide
tttgcagcatgtgacccgtaagcaatcatc

SEQ ID NO: 450301 - DNA, 30 bp, Artificial Sequence
  Synthetic oligonucleotide
gttatcatctttccgcatcgtatcatcatc

SEQ ID NO: 450302 - DNA, 30 bp, Artificial Sequence
  Synthetic oligonucleotide
ctgggatatgaatataatgagaatatcatc

SEQ ID NO: 450303 - DNA, 30 bp, Artificial Sequence
  Synthetic oligonucleotide
ctcgatagggtatggcgatcctatatcatc

SEQ ID NO: 450304 - DNA, 30 bp, Artificial Sequence
  Synthetic oligonucleotide
acccagtgtggtgtacgaactacactcatc

SEQ ID NO: 450305 - DNA, 30 bp, Artificial Sequence
  Synthetic oligonucleotide
cgctacatccatacgctctcgtacctcatc

SEQ ID NO: 450306 - DNA, 30 bp, Artificial Sequence
  Synthetic oligonucleotide
cacttcccaggagctttccaatagctcatc

SEQ ID NO: 450307 - DNA, 30 bp, Artificial Sequence
  Synthetic oligonucleotide
ctaggcgggtaccaagctgtttagctcatc

SEQ ID NO: 450308 - DNA, 30 bp, Artificial Sequence
  Synthetic oligonucleotide
cctgctttcagcgatgagaagtttctcatc

SEQ ID NO: 450309 - DNA, 30 bp, Artificial Sequence
  Synthetic oligonucleotide
aatctgagaactttgacgacctcagtcatc

SEQ ID NO: 450310 - DNA, 30 bp, Artificial Sequence
  Synthetic oligonucleotide
tatttatgactagccggcactcaggtcatc

SEQ ID NO: 450311 - DNA, 30 bp, Artificial Sequence
  Synthetic oligonucleotide
cccatgaatggcaggggatctactgtcatc

SEQ ID NO: 450312 - DNA, 30 bp, Artificial Sequence
  Synthetic oligonucleotide
accaacgcaggcttgtaagaacctgtcatc

SEQ ID NO: 450313 - DNA, 30 bp, Artificial Sequence
  Synthetic oligonucleotide
gaaaaaaaccacctaaataccgtcttcatc

SEQ ID NO: 450314 - DNA, 30 bp, Artificial Sequence
  Synthetic oligonucleotide
tacgtggtagaaatagatcaattcttcatc

SEQ ID NO: 450315 - DNA, 30 bp, Artificial Sequence
  Synthetic oligonucleotide
agtaacgctaagttccttacgacaaagatc

SEQ ID NO: 450316 - DNA, 30 bp, Artificial Sequence
  Synthetic oligonucleotide
ccactcggttgggaataggatgtaaagatc

SEQ ID NO: 450317 - DNA, 30 bp, Artificial Sequence
  Synthetic oligonucleotide
agaggcgttttgcgctataccgacaagatc

SEQ ID NO: 450318 - DNA, 30 bp, Artificial Sequence
  Synthetic oligonucleotide
tataagaaggacgtaacttggtacaagatc

SEQ ID NO: 450319 - DNA, 30 bp, Artificial Sequence
  Synthetic oligonucleotide
aactgcctcaattcgtggcacaataagatc

SEQ ID NO: 450320 - DNA, 30 bp, Artificial Sequence
  Synthetic oligonucleotide
atctcgtatattacggggggtattaagatc

SEQ ID NO: 450321 - DNA, 30 bp, Artificial Sequence
  Synthetic oligonucleotide
attgaatccacaaattcaaattttaagatc

SEQ ID NO: 450322 - DNA, 30 bp, Artificial Sequence
  Synthetic oligonucleotide
gagtttgtaggtgtatgaggtacacagatc

SEQ ID NO: 450323 - DNA, 31 bp, Artificial Sequence
  Synthetic oligonucleotide
ggcgtaaatactctatggttttcgacagatc

SEQ ID NO: 450324 - DNA, 30 bp, Artificial Sequence
  Synthetic oligonucleotide
ggctttacatagctacccgtgtcgcagatc

SEQ ID NO: 450325 - DNA, 30 bp, Artificial Sequence
  Synthetic oligonucleotide
gtgctggaatcatctattttatatcagatc

SEQ ID NO: 450326 - DNA, 30 bp, Artificial Sequence
  Synthetic oligonucleotide
gagtgtcatcaaagtagtcctgttcagatc

SEQ ID NO: 450327 - DNA, 30 bp, Artificial Sequence
  Synthetic oligonucleotide
caggagttcgcagcttccacttgagagatc

SEQ ID NO: 450328 - DNA, 30 bp, Artificial Sequence
  Synthetic oligonucleotide
agcctcatttgtaggtcgccgttagagatc

SEQ ID NO: 450329 - DNA, 30 bp, Artificial Sequence
  Synthetic oligonucleotide
agccgatcctgcgtggccctcgtcgagatc

SEQ ID NO: 450330 - DNA, 30 bp, Artificial Sequence
  Synthetic oligonucleotide
gaatgacgcgaagaaattaatagggagatc

SEQ ID NO: 450331 - DNA, 30 bp, Artificial Sequence
  Synthetic oligonucleotide
actgatatgtgaacgttgggtttggagatc

SEQ ID NO: 450332 - DNA, 30 bp, Artificial Sequence
  Synthetic oligonucleotide
cttcttccaacatgtcccttcgcatagatc

SEQ ID NO: 450333 - DNA, 30 bp, Artificial Sequence
  Synthetic oligonucleotide
attatctggccgactccggagcgatagatc

SEQ ID NO: 450334 - DNA, 30 bp, Artificial Sequence
  Synthetic oligonucleotide
atcgcaagagccgacgtcacagactagatc

SEQ ID NO: 450335 - DNA, 30 bp, Artificial Sequence
  Synthetic oligonucleotide
atctaagtgatgggagaatgcaagtagatc

SEQ ID NO: 450336 - DNA, 30 bp, Artificial Sequence
  Synthetic oligonucleotide
gcgctctaagtagaattggagtgttagatc

SEQ ID NO: 450337 - DNA, 30 bp, Artificial Sequence
  Synthetic oligonucleotide
gacatataagcagaatgtgtaatttagatc

SEQ ID NO: 450338 - DNA, 30 bp, Artificial Sequence
  Synthetic oligonucleotide
gtacttagcgatccatgagacgcaacgatc

SEQ ID NO: 450339 - DNA, 30 bp, Artificial Sequence
  Synthetic oligonucleotide
tcgcgtcggtaggcttgtaggtgaacgatc

SEQ ID NO: 450340 - DNA, 30 bp, Artificial Sequence
  Synthetic oligonucleotide
tgttgcgtgccgcatatggctcgcacgatc

SEQ ID NO: 450341 - DNA, 30 bp, Artificial Sequence
  Synthetic oligonucleotide
ttaatcgtacttgagaaagatggcacgatc

SEQ ID NO: 450342 - DNA, 30 bp, Artificial Sequence
  Synthetic oligonucleotide
aataggcagttggttcctccacttacgatc

SEQ ID NO: 450343 - DNA, 30 bp, Artificial Sequence
  Synthetic oligonucleotide
gagttgcatacttcctccttaccaccgatc

SEQ ID NO: 450344 - DNA, 30 bp, Artificial Sequence
  Synthetic oligonucleotide
ttaatgtttcgcgttcgttggaatccgatc

SEQ ID NO: 450345 - DNA, 30 bp, Artificial Sequence
  Synthetic oligonucleotide
tgagtcttagacgtagtttcaactccgatc

SEQ ID NO: 450346 - DNA, 30 bp, Artificial Sequence
  Synthetic oligonucleotide
ccccagaaccggggaatccggttagcgatc

SEQ ID NO: 450347 - DNA, 30 bp, Artificial Sequence
  Synthetic oligonucleotide
gggttgatttgagattcttataagtcgatc

SEQ ID NO: 450348 - DNA, 30 bp, Artificial Sequence
  Synthetic oligonucleotide
acagctgattattagacagtaaattcgatc

SEQ ID NO: 450349 - DNA, 30 bp, Artificial Sequence
  Synthetic oligonucleotide
tatacagttatgggtagagataaaaggatc

SEQ ID NO: 450350 - DNA, 30 bp, Artificial Sequence
  Synthetic oligonucleotide
taattcgccaggatctttgtatttaggatc

SEQ ID NO: 450351 - DNA, 30 bp, Artificial Sequence
  Synthetic oligonucleotide
atttcgaacctggtgaaggcacaacggatc

SEQ ID NO: 450352 - DNA, 30 bp, Artificial Sequence
  Synthetic oligonucleotide
ggacggcctggcccgtattaagcacggatc

SEQ ID NO: 450353 - DNA, 30 bp, Artificial Sequence
  Synthetic oligonucleotide
cttctcccccggctgtagtcagaccggatc

SEQ ID NO: 450354 - DNA, 30 bp, Artificial Sequence
  Synthetic oligonucleotide
gtaacctttgtgtttcgatgaatgcggatc

SEQ ID NO: 450355 - DNA, 30 bp, Artificial Sequence
  Synthetic oligonucleotide
ttgacttcgaggagagaaaattatcggatc

SEQ ID NO: 450356 - DNA, 30 bp, Artificial Sequence
  Synthetic oligonucleotide
tgtagaccacatgggcgtccgctagggatc

SEQ ID NO: 450357 - DNA, 30 bp, Artificial Sequence
  Synthetic oligonucleotide
aaaaaagtcatagatggacatcacgggatc

SEQ ID NO: 450358 - DNA, 30 bp, Artificial Sequence
  Synthetic oligonucleotide
ggaacaggggccgaggcgtaactcgggatc

SEQ ID NO: 450359 - DNA, 30 bp, Artificial Sequence
  Synthetic oligonucleotide
taagttgttgttcgtggacctcaggggatc

SEQ ID NO: 450360 - DNA, 30 bp, Artificial Sequence
  Synthetic oligonucleotide
agtaggggctttgcgggcctacgtgggatc

SEQ ID NO: 450361 - DNA, 30 bp, Artificial Sequence
  Synthetic oligonucleotide
tcttttacgaggtaatttccgtaatggatc

SEQ ID NO: 450362 - DNA, 30 bp, Artificial Sequence
  Synthetic oligonucleotide
gctgtgtagctaagccttcggcgatggatc

SEQ ID NO: 450363 - DNA, 30 bp, Artificial Sequence
  Synthetic oligonucleotide
ttggttggaattagctgtaggtcctggatc

SEQ ID NO: 450364 - DNA, 30 bp, Artificial Sequence
  Synthetic oligonucleotide
gaccgacatgggcgatttttattctggatc

SEQ ID NO: 450365 - DNA, 30 bp, Artificial Sequence
  Synthetic oligonucleotide
gagctttgtagactccatcaggcttggatc

SEQ ID NO: 450366 - DNA, 30 bp, Artificial Sequence
  Synthetic oligonucleotide
catctatgtcgagtcctatttgaaatgatc

SEQ ID NO: 450367 - DNA, 30 bp, Artificial Sequence
  Synthetic oligonucleotide
taaggcaggaagtaattggactcaatgatc

SEQ ID NO: 450368 - DNA, 30 bp, Artificial Sequence
  Synthetic oligonucleotide
tcagatgtcccggttacgtcgctaatgatc

SEQ ID NO: 450369 - DNA, 30 bp, Artificial Sequence
  Synthetic oligonucleotide
ctctaatggagtacgtagcgaagcatgatc

SEQ ID NO: 450370 - DNA, 30 bp, Artificial Sequence
  Synthetic oligonucleotide
gtaatccatgaacgaagacaacggatgatc

SEQ ID NO: 450371 - DNA, 30 bp, Artificial Sequence
  Synthetic oligonucleotide
catgcatttacgagatagtctcggatgatc

SEQ ID NO: 450372 - DNA, 30 bp, Artificial Sequence
  Synthetic oligonucleotide
tgtccgctggcggtattcgtataactgatc

SEQ ID NO: 450373 - DNA, 30 bp, Artificial Sequence
  Synthetic oligonucleotide
gccgaggcagagtccggaccttcgctgatc

SEQ ID NO: 450374 - DNA, 30 bp, Artificial Sequence
  Synthetic oligonucleotide
gggacttatcaacccggctgacggctgatc

SEQ ID NO: 450375 - DNA, 30 bp, Artificial Sequence
  Synthetic oligonucleotide
tcttcaacaggtcgcaagcatcggctgatc

SEQ ID NO: 450376 - DNA, 30 bp, Artificial Sequence
  Synthetic oligonucleotide
gaaacacaattcggttcgtagcctctgatc

SEQ ID NO: 450377 - DNA, 30 bp, Artificial Sequence
  Synthetic oligonucleotide
gagaatcatttcaaggggacttctctgatc

SEQ ID NO: 450378 - DNA, 30 bp, Artificial Sequence
  Synthetic oligonucleotide
ccactatttgtacctagtcgctttctgatc

SEQ ID NO: 450379 - DNA, 30 bp, Artificial Sequence
  Synthetic oligonucleotide
atcaggggccaatgtgctggcgcagtgatc

SEQ ID NO: 450380 - DNA, 30 bp, Artificial Sequence
  Synthetic oligonucleotide
atcgcgcacagaatagaaaactccgtgatc

SEQ ID NO: 450381 - DNA, 30 bp, Artificial Sequence
  Synthetic oligonucleotide
atcagatcgtaactttgaaaccgcgtgatc

SEQ ID NO: 450382 - DNA, 30 bp, Artificial Sequence
  Synthetic oligonucleotide
gtgatttcagtagccctgtatggcgtgatc

SEQ ID NO: 450383 - DNA, 30 bp, Artificial Sequence
  Synthetic oligonucleotide
tgcttcgaaccatcagactccgaggtgatc

SEQ ID NO: 450384 - DNA, 30 bp, Artificial Sequence
  Synthetic oligonucleotide
ggtgcggtcgttctaggagtttcggtgatc

SEQ ID NO: 450385 - DNA, 30 bp, Artificial Sequence
  Synthetic oligonucleotide
attagtaccacgtgatattatactgtgatc

SEQ ID NO: 450386 - DNA, 30 bp, Artificial Sequence
  Synthetic oligonucleotide
cgcctaactgatctcctgcggggtgtgatc

SEQ ID NO: 450387 - DNA, 30 bp, Artificial Sequence
  Synthetic oligonucleotide
tcggatttgtcgacccatgaccgattgatc

SEQ ID NO: 450388 - DNA, 30 bp, Artificial Sequence
  Synthetic oligonucleotide
ggagcagtctaggtaacccggaccttgatc

SEQ ID NO: 450389 - DNA, 30 bp, Artificial Sequence
  Synthetic oligonucleotide
gatacagttcaggctgagtcttccttgatc

SEQ ID NO: 450390 - DNA, 30 bp, Artificial Sequence
  Synthetic oligonucleotide
tgtatgcatacagttatctcagggttgatc

SEQ ID NO: 450391 - DNA, 30 bp, Artificial Sequence
  Synthetic oligonucleotide
ctccgtgctcagcatccagacattttgatc

SEQ ID NO: 450392 - DNA, 30 bp, Artificial Sequence
  Synthetic oligonucleotide
ggtagcgccagctggatgtccgccaatatc

SEQ ID NO: 450393 - DNA, 30 bp, Artificial Sequence
  Synthetic oligonucleotide
agagagaagatgttttggagatccaatatc

SEQ ID NO: 450394 - DNA, 30 bp, Artificial Sequence
  Synthetic oligonucleotide
tctatcgcagcgcatgcatctcataatatc

SEQ ID NO: 450395 - DNA, 30 bp, Artificial Sequence
  Synthetic oligonucleotide
gtttacttggtctatttgtcagaccatatc

SEQ ID NO: 450396 - DNA, 30 bp, Artificial Sequence
  Synthetic oligonucleotide
caaataggcaacatgtaaaatgagcatatc

SEQ ID NO: 450397 - DNA, 30 bp, Artificial Sequence
  Synthetic oligonucleotide
taggacccttagctatgaggcaggcatatc

SEQ ID NO: 450398 - DNA, 30 bp, Artificial Sequence
  Synthetic oligonucleotide
aaatcaggacctgtataagtacggcatatc

SEQ ID NO: 450399 - DNA, 30 bp, Artificial Sequence
  Synthetic oligonucleotide
ggtatggagatttggcctggttaagatatc

SEQ ID NO: 450400 - DNA, 30 bp, Artificial Sequence
  Synthetic oligonucleotide
aatgtcatttatgaacgtgtaggcgatatc

SEQ ID NO: 450401 - DNA, 30 bp, Artificial Sequence
  Synthetic oligonucleotide
tatgtatgttgagctttcgctgaggatatc

SEQ ID NO: 450402 - DNA, 30 bp, Artificial Sequence
  Synthetic oligonucleotide
gactgtactaaaccctatcatcctgatatc

SEQ ID NO: 450403 - DNA, 30 bp, Artificial Sequence
  Synthetic oligonucleotide
aaacattttcaccggtggtatcttgatatc

SEQ ID NO: 450404 - DNA, 30 bp, Artificial Sequence
  Synthetic oligonucleotide
aggatcgagttcacgacattatttgatatc

SEQ ID NO: 450405 - DNA, 30 bp, Artificial Sequence
  Synthetic oligonucleotide
ggggtcctgagatcactctgaatatatatc

SEQ ID NO: 450406 - DNA, 30 bp, Artificial Sequence
  Synthetic oligonucleotide
gaggaagttgagcgcacgccggtatatatc

SEQ ID NO: 450407 - DNA, 30 bp, Artificial Sequence
  Synthetic oligonucleotide
agcttttaggcaaatttagtaggctatatc

SEQ ID NO: 450408 - DNA, 30 bp, Artificial Sequence
  Synthetic oligonucleotide
agctatgagcccttagtagatttctatatc

SEQ ID NO: 450409 - DNA, 30 bp, Artificial Sequence
  Synthetic oligonucleotide
ttagacgtcttacgatttgaaaggtatatc

SEQ ID NO: 450410 - DNA, 30 bp, Artificial Sequence
  Synthetic oligonucleotide
cagtccagaagggctgtagaatcaactatc

SEQ ID NO: 450411 - DNA, 31 bp, Artificial Sequence
  Synthetic oligonucleotide
tttcccaaggggacttattcgcgccactatc

SEQ ID NO: 450412 - DNA, 30 bp, Artificial Sequence
  Synthetic oligonucleotide
aaaataccctaactttcgttaatgactatc

SEQ ID NO: 450413 - DNA, 30 bp, Artificial Sequence
  Synthetic oligonucleotide
caagtaccggagatgcaccagttgactatc

SEQ ID NO: 450414 - DNA, 30 bp, Artificial Sequence
  Synthetic oligonucleotide
aggtgggacgaccttagaacgcatactatc

SEQ ID NO: 450415 - DNA, 30 bp, Artificial Sequence
  Synthetic oligonucleotide
taatcactgtgccctgcttgcccacctatc

SEQ ID NO: 450416 - DNA, 30 bp, Artificial Sequence
  Synthetic oligonucleotide
ccatgctgtgaggcttcctacggacctatc

SEQ ID NO: 450417 - DNA, 30 bp, Artificial Sequence
  Synthetic oligonucleotide
agtggggtcgatccccaaacgagccctatc

SEQ ID NO: 450418 - DNA, 30 bp, Artificial Sequence
  Synthetic oligonucleotide
tccatcattcatctcctctgtggccctatc

SEQ ID NO: 450419 - DNA, 30 bp, Artificial Sequence
  Synthetic oligonucleotide
acatgcccgccccctctagagacgcctatc

SEQ ID NO: 450420 - DNA, 30 bp, Artificial Sequence
  Synthetic oligonucleotide
ttcactatggaagtccgttatcggcctatc

SEQ ID NO: 450421 - DNA, 30 bp, Artificial Sequence
  Synthetic oligonucleotide
cgataggaggtccacgcatgcgcagctatc

SEQ ID NO: 450422 - DNA, 30 bp, Artificial Sequence
  Synthetic oligonucleotide
tcctaggagcactgatgtcgctcagctatc

SEQ ID NO: 450423 - DNA, 30 bp, Artificial Sequence
  Synthetic oligonucleotide
ttcaagatatgggacggccacggcgctatc

SEQ ID NO: 450424 - DNA, 30 bp, Artificial Sequence
  Synthetic oligonucleotide
aaaagggccgtgttctcaacgacggctatc

SEQ ID NO: 450425 - DNA, 30 bp, Artificial Sequence
  Synthetic oligonucleotide
ggtttacacctaatagagatatatgctatc

SEQ ID NO: 450426 - DNA, 30 bp, Artificial Sequence
  Synthetic oligonucleotide
gaatccaagtgaagttaactccctgctatc

SEQ ID NO: 450427 - DNA, 30 bp, Artificial Sequence
  Synthetic oligonucleotide
atttgggtaatgggtttgcattctgctatc

SEQ ID NO: 450428 - DNA, 30 bp, Artificial Sequence
  Synthetic oligonucleotide
gccaagatcgtatgctgcaaaattgctatc

SEQ ID NO: 450429 - DNA, 30 bp, Artificial Sequence
  Synthetic oligonucleotide
aaacaccttcatacttctcggtcctctatc

SEQ ID NO: 450430 - DNA, 30 bp, Artificial Sequence
  Synthetic oligonucleotide
gaatagagagcaggcagtcgagtctctatc

SEQ ID NO: 450431 - DNA, 30 bp, Artificial Sequence
  Synthetic oligonucleotide
taacgcaatagacactagagtatgtctatc

SEQ ID NO: 450432 - DNA, 30 bp, Artificial Sequence
  Synthetic oligonucleotide
gagaatttaaacctgtgacgttcttctatc

SEQ ID NO: 450433 - DNA, 30 bp, Artificial Sequence
  Synthetic oligonucleotide
atgatagttcttgatgtatttagttctatc

SEQ ID NO: 450434 - DNA, 30 bp, Artificial Sequence
  Synthetic oligonucleotide
gacgcaagcacatcgcgtaatttaagtatc

SEQ ID NO: 450435 - DNA, 30 bp, Artificial Sequence
  Synthetic oligonucleotide
ctcttgggtgcgacgtgggatcccagtatc

SEQ ID NO: 450436 - DNA, 30 bp, Artificial Sequence
  Synthetic oligonucleotide
ttctggtttagaaaatcggccccgagtatc

SEQ ID NO: 450437 - DNA, 30 bp, Artificial Sequence
  Synthetic oligonucleotide
aaggtgatatgattcgatggatctagtatc

SEQ ID NO: 450438 - DNA, 30 bp, Artificial Sequence
  Synthetic oligonucleotide
gatattaagaattcacccccttgtagtatc

SEQ ID NO: 450439 - DNA, 30 bp, Artificial Sequence
  Synthetic oligonucleotide
cgtacattccaaagtgtaaactttagtatc

SEQ ID NO: 450440 - DNA, 30 bp, Artificial Sequence
  Synthetic oligonucleotide
gttccacgtgtaacaaatgcggaacgtatc

SEQ ID NO: 450441 - DNA, 30 bp, Artificial Sequence
  Synthetic oligonucleotide
ttcctttgtcaggggtactcctcacgtatc

SEQ ID NO: 450442 - DNA, 30 bp, Artificial Sequence
  Synthetic oligonucleotide
gtggagtcgaggcgcttcctgggacgtatc

SEQ ID NO: 450443 - DNA, 30 bp, Artificial Sequence
  Synthetic oligonucleotide
ttactctagatggaaaagtcattccgtatc

SEQ ID NO: 450444 - DNA, 30 bp, Artificial Sequence
  Synthetic oligonucleotide
gttgttgagtgagaaggggaggtgcgtatc

SEQ ID NO: 450445 - DNA, 30 bp, Artificial Sequence
  Synthetic oligonucleotide
tgtgctttgttcgatagatcgagtcgtatc

SEQ ID NO: 450446 - DNA, 30 bp, Artificial Sequence
  Synthetic oligonucleotide
ggcctattaatatcagtaaacgcaggtatc

SEQ ID NO: 450447 - DNA, 30 bp, Artificial Sequence
  Synthetic oligonucleotide
attttgaaagcgaacttacagtcaggtatc

SEQ ID NO: 450448 - DNA, 30 bp, Artificial Sequence
  Synthetic oligonucleotide
aaaagtaacgtgtacgcataacgcggtatc

SEQ ID NO: 450449 - DNA, 30 bp, Artificial Sequence
  Synthetic oligonucleotide
cgccagttgcaccgccgtcgattcggtatc

SEQ ID NO: 450450 - DNA, 30 bp, Artificial Sequence
  Synthetic oligonucleotide
acaagcacagtataatgcggctaatgtatc

SEQ ID NO: 450451 - DNA, 30 bp, Artificial Sequence
  Synthetic oligonucleotide
atttccctgggatcgcatctttcctgtatc

SEQ ID NO: 450452 - DNA, 30 bp, Artificial Sequence
  Synthetic oligonucleotide
cataccgcaatcttgcgtagcgtctgtatc

SEQ ID NO: 450453 - DNA, 30 bp, Artificial Sequence
  Synthetic oligonucleotide
ggaatcatttacccgggaggtgagtgtatc

SEQ ID NO: 450454 - DNA, 30 bp, Artificial Sequence
  Synthetic oligonucleotide
tgtaggggacctctagtattttagtgtatc

SEQ ID NO: 450455 - DNA, 30 bp, Artificial Sequence
  Synthetic oligonucleotide
agtagtataggcaaattatatgggtgtatc

SEQ ID NO: 450456 - DNA, 30 bp, Artificial Sequence
  Synthetic oligonucleotide
gtccaagcgagcatgctaattccttgtatc

SEQ ID NO: 450457 - DNA, 30 bp, Artificial Sequence
  Synthetic oligonucleotide
tacacgctttagacagtggtgcgttgtatc

SEQ ID NO: 450458 - DNA, 30 bp, Artificial Sequence
  Synthetic oligonucleotide
taacagtttctggaatgctggctaattatc

SEQ ID NO: 450459 - DNA, 30 bp, Artificial Sequence
  Synthetic oligonucleotide
ccggcaggggacgggtatttaggcattatc

SEQ ID NO: 450460 - DNA, 30 bp, Artificial Sequence
  Synthetic oligonucleotide
tttagtatccaccagcagggaaagattatc

SEQ ID NO: 450461 - DNA, 30 bp, Artificial Sequence
  Synthetic oligonucleotide
gtcaagccggaggtgagctggtagattatc

SEQ ID NO: 450462 - DNA, 30 bp, Artificial Sequence
  Synthetic oligonucleotide
tggcctctcgatttcagacatccgattatc

SEQ ID NO: 450463 - DNA, 30 bp, Artificial Sequence
  Synthetic oligonucleotide
ttatcgctctcgatgggctacgggattatc

SEQ ID NO: 450464 - DNA, 30 bp, Artificial Sequence
  Synthetic oligonucleotide
agtacgcggccacagtcgctcaatattatc

SEQ ID NO: 450465 - DNA, 30 bp, Artificial Sequence
  Synthetic oligonucleotide
ataaataattagatcgcaaattttattatc

SEQ ID NO: 450466 - DNA, 30 bp, Artificial Sequence
  Synthetic oligonucleotide
tataaacatctatgctaatgctcccttatc

SEQ ID NO: 450467 - DNA, 30 bp, Artificial Sequence
  Synthetic oligonucleotide
cacggccccacgactcacgtgggtcttatc

SEQ ID NO: 450468 - DNA, 30 bp, Artificial Sequence
  Synthetic oligonucleotide
aatatctcaaacctttgtcaggaagttatc

SEQ ID NO: 450469 - DNA, 30 bp, Artificial Sequence
  Synthetic oligonucleotide
gggtgacaagtatgatagctgcgagttatc

SEQ ID NO: 450470 - DNA, 30 bp, Artificial Sequence
  Synthetic oligonucleotide
tagctaatcgttgaaactcgtttagttatc

SEQ ID NO: 450471 - DNA, 30 bp, Artificial Sequence
  Synthetic oligonucleotide
gactaaacgcaactgcatggcgcggttatc

SEQ ID NO: 450472 - DNA, 31 bp, Artificial Sequence
  Synthetic oligonucleotide
agactgcgccatgtagctaaatggggttatc

SEQ ID NO: 450473 - DNA, 30 bp, Artificial Sequence
  Synthetic oligonucleotide
agagcattaagtagcccggcgctggttatc

SEQ ID NO: 450474 - DNA, 30 bp, Artificial Sequence
  Synthetic oligonucleotide
ttcttcttggaatggcgacttcatgttatc

SEQ ID NO: 450475 - DNA, 30 bp, Artificial Sequence
  Synthetic oligonucleotide
attccataatttgacttgggtggtgttatc

SEQ ID NO: 450476 - DNA, 30 bp, Artificial Sequence
  Synthetic oligonucleotide
tggggactaggcagagcctacgttgttatc

SEQ ID NO: 450477 - DNA, 30 bp, Artificial Sequence
  Synthetic oligonucleotide
cagacgcaatctgcttcttgcacatttatc

SEQ ID NO: 450478 - DNA, 30 bp, Artificial Sequence
  Synthetic oligonucleotide
tatctaaatagtaggcgtagtacgtttatc

SEQ ID NO: 450479 - DNA, 30 bp, Artificial Sequence
  Synthetic oligonucleotide
tgcacgtttcaaatataaaagtggtttatc

SEQ ID NO: 450480 - DNA, 30 bp, Artificial Sequence
  Synthetic oligonucleotide
tgcagcacggtaacgtctgcagattttatc

SEQ ID NO: 450481 - DNA, 30 bp, Artificial Sequence
  Synthetic oligonucleotide
tataccacttttgaaagaatcttttttatc

SEQ ID NO: 450482 - DNA, 30 bp, Artificial Sequence
  Synthetic oligonucleotide
ttgtatgcccatctcactaagttttttatc

SEQ ID NO: 450483 - DNA, 29 bp, Artificial Sequence
  Synthetic oligonucleotide
caagtgtccaaaattgattgttttttatc

SEQ ID NO: 450484 - DNA, 30 bp, Artificial Sequence
  Synthetic oligonucleotide
gagcatatgcccattacccggagcaaactc

SEQ ID NO: 450485 - DNA, 30 bp, Artificial Sequence
  Synthetic oligonucleotide
gaccccggctcgtccgcagatagcaaactc

SEQ ID NO: 450486 - DNA, 30 bp, Artificial Sequence
  Synthetic oligonucleotide
gcttttgattataaacatagaatcaaactc

SEQ ID NO: 450487 - DNA, 30 bp, Artificial Sequence
  Synthetic oligonucleotide
gctattaaccaccaatttaccgagaaactc

SEQ ID NO: 450488 - DNA, 30 bp, Artificial Sequence
  Synthetic oligonucleotide
tttatagatcttacttttgcgccgaaactc

SEQ ID NO: 450489 - DNA, 30 bp, Artificial Sequence
  Synthetic oligonucleotide
aatcgtaatcaagttatcgaggcgaaactc

SEQ ID NO: 450490 - DNA, 30 bp, Artificial Sequence
  Synthetic oligonucleotide
gacttgttcgaagtcgggtactggaaactc

SEQ ID NO: 450491 - DNA, 30 bp, Artificial Sequence
  Synthetic oligonucleotide
gaatctacgcagattagcactaataaactc

SEQ ID NO: 450492 - DNA, 30 bp, Artificial Sequence
  Synthetic oligonucleotide
gaattatgaattcagtagtttggacaactc

SEQ ID NO: 450493 - DNA, 30 bp, Artificial Sequence
  Synthetic oligonucleotide
ctcgccttagctctctgtggtagccaactc

SEQ ID NO: 450494 - DNA, 30 bp, Artificial Sequence
  Synthetic oligonucleotide
aagacacccataatttttggcgcagaactc

SEQ ID NO: 450495 - DNA, 30 bp, Artificial Sequence
  Synthetic oligonucleotide
ctattgagcttagttcagctgggagaactc

SEQ ID NO: 450496 - DNA, 30 bp, Artificial Sequence
  Synthetic oligonucleotide
gcctaccccaaagagctggcacacgaactc

SEQ ID NO: 450497 - DNA, 30 bp, Artificial Sequence
  Synthetic oligonucleotide
cattacatgcggagccccccgcccgaactc

SEQ ID NO: 450498 - DNA, 30 bp, Artificial Sequence
  Synthetic oligonucleotide
gggaatatgaacaacggcgacgtcgaactc

SEQ ID NO: 450499 - DNA, 30 bp, Artificial Sequence
  Synthetic oligonucleotide
gcgcaccgtgactgcatctagcaggaactc

SEQ ID NO: 450500 - DNA, 30 bp, Artificial Sequence
  Synthetic oligonucleotide
aaacgggttgtttgacaagtcggggaactc

SEQ ID NO: 450501 - DNA, 30 bp, Artificial Sequence
  Synthetic oligonucleotide
tgggtgggttaagtgtgggaccttgaactc

SEQ ID NO: 450502 - DNA, 30 bp, Artificial Sequence
  Synthetic oligonucleotide
agaccgtgaaagagttagccagtgtaactc

SEQ ID NO: 450503 - DNA, 30 bp, Artificial Sequence
  Synthetic oligonucleotide
gcaaagaaggtaaaagttttaaattaactc

SEQ ID NO: 450504 - DNA, 30 bp, Artificial Sequence
  Synthetic oligonucleotide
tcgcagatgagtagatcacacggttaactc

SEQ ID NO: 450505 - DNA, 30 bp, Artificial Sequence
  Synthetic oligonucleotide
tgagccacctactttttattggtttaactc

SEQ ID NO: 450506 - DNA, 30 bp, Artificial Sequence
  Synthetic oligonucleotide
tcgcgacatgagaagtctaaaataacactc

SEQ ID NO: 450507 - DNA, 30 bp, Artificial Sequence
  Synthetic oligonucleotide
gttataatagtgtagatgcacaagacactc

SEQ ID NO: 450508 - DNA, 30 bp, Artificial Sequence
  Synthetic oligonucleotide
cactagagtacagtgtctcatggaccactc

SEQ ID NO: 450509 - DNA, 30 bp, Artificial Sequence
  Synthetic oligonucleotide
taaagtccatggtaatgactgcatccactc

SEQ ID NO: 450510 - DNA, 30 bp, Artificial Sequence
  Synthetic oligonucleotide
gccacagtactgttactagaataagcactc

SEQ ID NO: 450511 - DNA, 30 bp, Artificial Sequence
  Synthetic oligonucleotide
ccggggtacacctatcgtggataggcactc

SEQ ID NO: 450512 - DNA, 30 bp, Artificial Sequence
  Synthetic oligonucleotide
gttgtgactgcggaaccggcttaggcactc

SEQ ID NO: 450513 - DNA, 30 bp, Artificial Sequence
  Synthetic oligonucleotide
gtggtgaaagtcacctcgtttagggcactc

SEQ ID NO: 450514 - DNA, 30 bp, Artificial Sequence
  Synthetic oligonucleotide
accggaatcattgaaatgatcggggcactc

SEQ ID NO: 450515 - DNA, 30 bp, Artificial Sequence
  Synthetic oligonucleotide
acacatcatgtgcagttatcatctgcactc

SEQ ID NO: 450516 - DNA, 30 bp, Artificial Sequence
  Synthetic oligonucleotide
ataaatgtcgcgtattggtgttaatcactc

SEQ ID NO: 450517 - DNA, 30 bp, Artificial Sequence
  Synthetic oligonucleotide
actaccaacgggccctcagatgcatcactc

SEQ ID NO: 450518 - DNA, 30 bp, Artificial Sequence
  Synthetic oligonucleotide
ggttgttgcgggtcgtgttgtatatcactc

SEQ ID NO: 450519 - DNA, 31 bp, Artificial Sequence
  Synthetic oligonucleotide
attctttcatggaatccttggattatcactc

SEQ ID NO: 450520 - DNA, 30 bp, Artificial Sequence
  Synthetic oligonucleotide
tagaggagatcggacgctaccctctcactc

SEQ ID NO: 450521 - DNA, 30 bp, Artificial Sequence
  Synthetic oligonucleotide
ttgaaaatgttataactacggctctcactc

SEQ ID NO: 450522 - DNA, 30 bp, Artificial Sequence
  Synthetic oligonucleotide
ggccaatagcgacgacagagtgagtcactc

SEQ ID NO: 450523 - DNA, 30 bp, Artificial Sequence
  Synthetic oligonucleotide
ttttgtcaacgaaaactcaaagaaagactc

SEQ ID NO: 450524 - DNA, 30 bp, Artificial Sequence
  Synthetic oligonucleotide
tggggtcacacgttgaaggtcgacagactc

SEQ ID NO: 450525 - DNA, 30 bp, Artificial Sequence
  Synthetic oligonucleotide
ccttcgtttccggacgtagacaccagactc

SEQ ID NO: 450526 - DNA, 30 bp, Artificial Sequence
  Synthetic oligonucleotide
tagagacacgacctgatcgattgcagactc

SEQ ID NO: 450527 - DNA, 30 bp, Artificial Sequence
  Synthetic oligonucleotide
aatcatgcgcgatatgtctacccacgactc

SEQ ID NO: 450528 - DNA, 30 bp, Artificial Sequence
  Synthetic oligonucleotide
gggatagtagcggtgaacgcagtccgactc

SEQ ID NO: 450529 - DNA, 30 bp, Artificial Sequence
  Synthetic oligonucleotide
tgaatcctgttgtacagtcgaaagcgactc

SEQ ID NO: 450530 - DNA, 30 bp, Artificial Sequence
  Synthetic oligonucleotide
tgtagcaacgacagaacttaatggcgactc

SEQ ID NO: 450531 - DNA, 30 bp, Artificial Sequence
  Synthetic oligonucleotide
aaccagatagggtgattcacaaacggactc

SEQ ID NO: 450532 - DNA, 30 bp, Artificial Sequence
  Synthetic oligonucleotide
catgatttaacgccggcccgtcacggactc

SEQ ID NO: 450533 - DNA, 30 bp, Artificial Sequence
  Synthetic oligonucleotide
ctgatggccccctttactactaccggactc

SEQ ID NO: 450534 - DNA, 30 bp, Artificial Sequence
  Synthetic oligonucleotide
tgcgttcatcgtgcgtcacactgcggactc

SEQ ID NO: 450535 - DNA, 30 bp, Artificial Sequence
  Synthetic oligonucleotide
tcaacgccgaagttacgttctaagggactc

SEQ ID NO: 450536 - DNA, 30 bp, Artificial Sequence
  Synthetic oligonucleotide
ttagcttcattaagtggatccgtgggactc

SEQ ID NO: 450537 - DNA, 30 bp, Artificial Sequence
  Synthetic oligonucleotide
acagcgtagcggtctaacttatatggactc

SEQ ID NO: 450538 - DNA, 30 bp, Artificial Sequence
  Synthetic oligonucleotide
atagaaagacgcgtacatttatctggactc

SEQ ID NO: 450539 - DNA, 30 bp, Artificial Sequence
  Synthetic oligonucleotide
gataaccctaagacaactacaagtggactc

SEQ ID NO: 450540 - DNA, 30 bp, Artificial Sequence
  Synthetic oligonucleotide
ttaagaagtctgcgaccctacccatgactc

SEQ ID NO: 450541 - DNA, 30 bp, Artificial Sequence
  Synthetic oligonucleotide
tacatggggcgcagactggagatatgactc

SEQ ID NO: 450542 - DNA, 30 bp, Artificial Sequence
  Synthetic oligonucleotide
ctatacagacttttttacgttgtctgactc

SEQ ID NO: 450543 - DNA, 30 bp, Artificial Sequence
  Synthetic oligonucleotide
catacatgttaccagggaacagagtgactc

SEQ ID NO: 450544 - DNA, 30 bp, Artificial Sequence
  Synthetic oligonucleotide
gctttaatgcccaaaggggcaagttgactc

SEQ ID NO: 450545 - DNA, 30 bp, Artificial Sequence
  Synthetic oligonucleotide
aagaattagtcaacatttcacgcaatactc

SEQ ID NO: 450546 - DNA, 30 bp, Artificial Sequence
  Synthetic oligonucleotide
ggaccgagtaaggcatcaagactaatactc

SEQ ID NO: 450547 - DNA, 30 bp, Artificial Sequence
  Synthetic oligonucleotide
ctgcccccttattgttataagttaatactc

SEQ ID NO: 450548 - DNA, 30 bp, Artificial Sequence
  Synthetic oligonucleotide
attttggtaaaagagatgaatcacatactc

SEQ ID NO: 450549 - DNA, 30 bp, Artificial Sequence
  Synthetic oligonucleotide
ggacccctataaatttctgagggcatactc

SEQ ID NO: 450550 - DNA, 30 bp, Artificial Sequence
  Synthetic oligonucleotide
tctgtcaacatgtatcttgttggcatactc

SEQ ID NO: 450551 - DNA, 30 bp, Artificial Sequence
  Synthetic oligonucleotide
attgtattttcaggtttatatgatatactc

SEQ ID NO: 450552 - DNA, 30 bp, Artificial Sequence
  Synthetic oligonucleotide
gttagcgcttgtacaatgtcttacctactc

SEQ ID NO: 450553 - DNA, 30 bp, Artificial Sequence
  Synthetic oligonucleotide
atctgcatctaataagtaaagaaagtactc

SEQ ID NO: 450554 - DNA, 30 bp, Artificial Sequence
  Synthetic oligonucleotide
catatgtagtaaatacctccgggagtactc

SEQ ID NO: 450555 - DNA, 30 bp, Artificial Sequence
  Synthetic oligonucleotide
gagcggcactaagtgtttatttgagtactc

SEQ ID NO: 450556 - DNA, 30 bp, Artificial Sequence
  Synthetic oligonucleotide
gctgggaacacagtaggagtgatcgtactc

SEQ ID NO: 450557 - DNA, 30 bp, Artificial Sequence
  Synthetic oligonucleotide
gttcgccattatttaggcaaaacggtactc

SEQ ID NO: 450558 - DNA, 30 bp, Artificial Sequence
  Synthetic oligonucleotide
ggtgggtggagaggatgcagcatggtactc

SEQ ID NO: 450559 - DNA, 30 bp, Artificial Sequence
  Synthetic oligonucleotide
gttatcgttgccgctcgcccggctgtactc

SEQ ID NO: 450560 - DNA, 30 bp, Artificial Sequence
  Synthetic oligonucleotide
aaacatctttgggcctgccatggtgtactc

SEQ ID NO: 450561 - DNA, 30 bp, Artificial Sequence
  Synthetic oligonucleotide
aacctttgcaggcgtgggacttttgtactc

SEQ ID NO: 450562 - DNA, 30 bp, Artificial Sequence
  Synthetic oligonucleotide
caatttgtggggttcaagcaacaattactc

SEQ ID NO: 450563 - DNA, 30 bp, Artificial Sequence
  Synthetic oligonucleotide
attattttatcataaaggtggccattactc

SEQ ID NO: 450564 - DNA, 30 bp, Artificial Sequence
  Synthetic oligonucleotide
gacagtgctaatcagacgcataacttactc

SEQ ID NO: 450565 - DNA, 30 bp, Artificial Sequence
  Synthetic oligonucleotide
tataaggtgccgtcccctaaaggcttactc

SEQ ID NO: 450566 - DNA, 30 bp, Artificial Sequence
  Synthetic oligonucleotide
ctatggtttctgtctctctaaaagttactc

SEQ ID NO: 450567 - DNA, 30 bp, Artificial Sequence
  Synthetic oligonucleotide
aattcccgcacggcatcgtacaagttactc

SEQ ID NO: 450568 - DNA, 29 bp, Artificial Sequence
  Synthetic oligonucleotide
caggacctgatggacgccctcagttactc

SEQ ID NO: 450569 - DNA, 30 bp, Artificial Sequence
  Synthetic oligonucleotide
gttgactcttatatacagctatagttactc

SEQ ID NO: 450570 - DNA, 30 bp, Artificial Sequence
  Synthetic oligonucleotide
gataattttgccggtaaagacatgttactc

SEQ ID NO: 450571 - DNA, 30 bp, Artificial Sequence
  Synthetic oligonucleotide
ggtctgaggtttgggttcggggtgttactc

SEQ ID NO: 450572 - DNA, 30 bp, Artificial Sequence
  Synthetic oligonucleotide
tctacgccagtatccgagccacctttactc

SEQ ID NO: 450573 - DNA, 30 bp, Artificial Sequence
  Synthetic oligonucleotide
gcatgaagattccgagaaagacctttactc

SEQ ID NO: 450574 - DNA, 30 bp, Artificial Sequence
  Synthetic oligonucleotide
gtagttgacttaagttctctttctttactc

SEQ ID NO: 450575 - DNA, 30 bp, Artificial Sequence
  Synthetic oligonucleotide
tcagtcctgaatatacagggaagtttactc

SEQ ID NO: 450576 - DNA, 30 bp, Artificial Sequence
  Synthetic oligonucleotide
ggctttagttaggataaggtctgtttactc

SEQ ID NO: 450577 - DNA, 30 bp, Artificial Sequence
  Synthetic oligonucleotide
atatactatacgttgaccaatgcaaacctc

SEQ ID NO: 450578 - DNA, 30 bp, Artificial Sequence
  Synthetic oligonucleotide
ttcaccatcagtaacaccaacggaaacctc

SEQ ID NO: 450579 - DNA, 30 bp, Artificial Sequence
  Synthetic oligonucleotide
actaattcatgaatcagttgcaacaacctc

SEQ ID NO: 450580 - DNA, 30 bp, Artificial Sequence
  Synthetic oligonucleotide
gtggttgcgccggtacgaatacgcaacctc

SEQ ID NO: 450581 - DNA, 30 bp, Artificial Sequence
  Synthetic oligonucleotide
ggagggtccccatgttgggctgggaacctc

SEQ ID NO: 450582 - DNA, 30 bp, Artificial Sequence
  Synthetic oligonucleotide
ttaacaatataggcttttaacggtaacctc

SEQ ID NO: 450583 - DNA, 30 bp, Artificial Sequence
  Synthetic oligonucleotide
agcttattcactctgctcagcgttaacctc

SEQ ID NO: 450584 - DNA, 30 bp, Artificial Sequence
  Synthetic oligonucleotide
ggggatgtatgcaatgcaatgccgcacctc

SEQ ID NO: 450585 - DNA, 30 bp, Artificial Sequence
  Synthetic oligonucleotide
tcatcaaaccaatgaagcaggaggcacctc

SEQ ID NO: 450586 - DNA, 30 bp, Artificial Sequence
  Synthetic oligonucleotide
gaagacatttttccacgccacctgcacctc

SEQ ID NO: 450587 - DNA, 30 bp, Artificial Sequence
  Synthetic oligonucleotide
cggttctgaggtagtgtggcgttgcacctc

SEQ ID NO: 450588 - DNA, 30 bp, Artificial Sequence
  Synthetic oligonucleotide
gtttcagtcttgtctcgggtagatcacctc

SEQ ID NO: 450589 - DNA, 30 bp, Artificial Sequence
  Synthetic oligonucleotide
taagtgctacaaaaaactgactctcacctc

SEQ ID NO: 450590 - DNA, 30 bp, Artificial Sequence
  Synthetic oligonucleotide
ctatgctgggagacatactttagtcacctc

SEQ ID NO: 450591 - DNA, 30 bp, Artificial Sequence
  Synthetic oligonucleotide
tgtaacttgagatatggaaagtgtcacctc

SEQ ID NO: 450592 - DNA, 30 bp, Artificial Sequence
  Synthetic oligonucleotide
caatatagcatcatcgcatactttcacctc

SEQ ID NO: 450593 - DNA, 30 bp, Artificial Sequence
  Synthetic oligonucleotide
ccgcacccacccgagagtattcaagacctc

SEQ ID NO: 450594 - DNA, 30 bp, Artificial Sequence
  Synthetic oligonucleotide
gagtgtgacagggatcgctagggagacctc

SEQ ID NO: 450595 - DNA, 29 bp, Artificial Sequence
  Synthetic oligonucleotide
catcacactagcaacagggatacgacctc

SEQ ID NO: 450596 - DNA, 30 bp, Artificial Sequence
  Synthetic oligonucleotide
gatcggtggtctttggaaaagtgcgacctc

SEQ ID NO: 450597 - DNA, 30 bp, Artificial Sequence
  Synthetic oligonucleotide
atgggaggggttatacattgcctcgacctc

SEQ ID NO: 450598 - DNA, 30 bp, Artificial Sequence
  Synthetic oligonucleotide
atttcatatttcacccgatcttatgacctc

SEQ ID NO: 450599 - DNA, 30 bp, Artificial Sequence
  Synthetic oligonucleotide
ttatccttgctaggtcttggctagtacctc

SEQ ID NO: 450600 - DNA, 30 bp, Artificial Sequence
  Synthetic oligonucleotide
tcacagactctttgcagaaatagaaccctc

SEQ ID NO: 450601 - DNA, 30 bp, Artificial Sequence
  Synthetic oligonucleotide
gatctaagatgactggtaggctccaccctc

SEQ ID NO: 450602 - DNA, 30 bp, Artificial Sequence
  Synthetic oligonucleotide
ccatctacataattctaacgctggaccctc

SEQ ID NO: 450603 - DNA, 28 bp, Artificial Sequence
  Synthetic oligonucleotide
aacaacgtcttgagatcccctacccctc

SEQ ID NO: 450604 - DNA, 30 bp, Artificial Sequence
  Synthetic oligonucleotide
taaaaaactgtaaagggtcaaagccccctc

SEQ ID NO: 450605 - DNA, 30 bp, Artificial Sequence
  Synthetic oligonucleotide
agtttcgttttatccttccattagcccctc

SEQ ID NO: 450606 - DNA, 30 bp, Artificial Sequence
  Synthetic oligonucleotide
ggacatcataaatatatagccaggcccctc

SEQ ID NO: 450607 - DNA, 31 bp, Artificial Sequence
  Synthetic oligonucleotide
tgaaaaggctaacatggaccctaggcccctc

SEQ ID NO: 450608 - DNA, 30 bp, Artificial Sequence
  Synthetic oligonucleotide
taccattcatgtcaaatcagcttgcccctc

SEQ ID NO: 450609 - DNA, 30 bp, Artificial Sequence
  Synthetic oligonucleotide
cctcgatccctttgaggcggctatcccctc

SEQ ID NO: 450610 - DNA, 30 bp, Artificial Sequence
  Synthetic oligonucleotide
catccccgcgaggacctttgctgtcccctc

SEQ ID NO: 450611 - DNA, 30 bp, Artificial Sequence
  Synthetic oligonucleotide
actattatgcacttttaagaaaaagccctc

SEQ ID NO: 450612 - DNA, 30 bp, Artificial Sequence
  Synthetic oligonucleotide
ctcctaatccattgaatggtaaaggccctc

SEQ ID NO: 450613 - DNA, 30 bp, Artificial Sequence
  Synthetic oligonucleotide
agggtcagttcggcttggtgggtatccctc

SEQ ID NO: 450614 - DNA, 30 bp, Artificial Sequence
  Synthetic oligonucleotide
ccagatatgcctgtatagacggcctccctc

SEQ ID NO: 450615 - DNA, 30 bp, Artificial Sequence
  Synthetic oligonucleotide
ggtcggcaccactaaagtcgacgctccctc

SEQ ID NO: 450616 - DNA, 30 bp, Artificial Sequence
  Synthetic oligonucleotide
cgtatcagaatgtctagtatgttctccctc

SEQ ID NO: 450617 - DNA, 30 bp, Artificial Sequence
  Synthetic oligonucleotide
ggtggaactgggggccatactcattccctc

SEQ ID NO: 450618 - DNA, 30 bp, Artificial Sequence
  Synthetic oligonucleotide
gccagctcccttggctatctaggttccctc

SEQ ID NO: 450619 - DNA, 30 bp, Artificial Sequence
  Synthetic oligonucleotide
gactgggacgtaagtaagactgggagcctc

SEQ ID NO: 450620 - DNA, 30 bp, Artificial Sequence
  Synthetic oligonucleotide
tatagagtttgtgggtcttgttggagcctc

SEQ ID NO: 450621 - DNA, 30 bp, Artificial Sequence
  Synthetic oligonucleotide
actatgtgtgtgagttgtctttttagcctc

SEQ ID NO: 450622 - DNA, 30 bp, Artificial Sequence
  Synthetic oligonucleotide
cgttggcaggcgtggcggtatgcacgcctc

SEQ ID NO: 450623 - DNA, 30 bp, Artificial Sequence
  Synthetic oligonucleotide
gccaattcttacggagtaattctccgcctc

SEQ ID NO: 450624 - DNA, 30 bp, Artificial Sequence
  Synthetic oligonucleotide
aaaaggtccgcccttagaacaaatcgcctc

SEQ ID NO: 450625 - DNA, 30 bp, Artificial Sequence
  Synthetic oligonucleotide
cacggccgttggggttagggggctcgcctc

SEQ ID NO: 450626 - DNA, 30 bp, Artificial Sequence
  Synthetic oligonucleotide
accctaatgaggtccgacgtcctcggcctc

SEQ ID NO: 450627 - DNA, 30 bp, Artificial Sequence
  Synthetic oligonucleotide
ctcagcgacaaactgacatgcaaatgcctc

SEQ ID NO: 450628 - DNA, 30 bp, Artificial Sequence
  Synthetic oligonucleotide
gacgttaggccgtgagttaggggatgcctc

SEQ ID NO: 450629 - DNA, 30 bp, Artificial Sequence
  Synthetic oligonucleotide
ttattccggcaggtctacgacacttgcctc

SEQ ID NO: 450630 - DNA, 30 bp, Artificial Sequence
  Synthetic oligonucleotide
aaagcaagcttcagcgtaatcagttgcctc

SEQ ID NO: 450631 - DNA, 30 bp, Artificial Sequence
  Synthetic oligonucleotide
tgcccgctcattaaggtaatgacaatcctc

SEQ ID NO: 450632 - DNA, 30 bp, Artificial Sequence
  Synthetic oligonucleotide
tttgatgcatcaaagatcatggggatcctc

SEQ ID NO: 450633 - DNA, 30 bp, Artificial Sequence
  Synthetic oligonucleotide
aaaatgattcggtacacgtcaatactcctc

SEQ ID NO: 450634 - DNA, 30 bp, Artificial Sequence
  Synthetic oligonucleotide
aatgtaattttgctatgagcccacctcctc

SEQ ID NO: 450635 - DNA, 30 bp, Artificial Sequence
  Synthetic oligonucleotide
taacgctatctcattctttagacgctcctc

SEQ ID NO: 450636 - DNA, 30 bp, Artificial Sequence
  Synthetic oligonucleotide
tccatcgctgtcgctgttgggctagtcctc

SEQ ID NO: 450637 - DNA, 30 bp, Artificial Sequence
  Synthetic oligonucleotide
gttctatgagggggatacaagccggtcctc

SEQ ID NO: 450638 - DNA, 30 bp, Artificial Sequence
  Synthetic oligonucleotide
catggtccaaacggtaagccttgggtcctc

SEQ ID NO: 450639 - DNA, 30 bp, Artificial Sequence
  Synthetic oligonucleotide
cgtgttttgctacacgggtggtaattcctc

SEQ ID NO: 450640 - DNA, 30 bp, Artificial Sequence
  Synthetic oligonucleotide
ctgattatttcgcaccggattcagttcctc

SEQ ID NO: 450641 - DNA, 30 bp, Artificial Sequence
  Synthetic oligonucleotide
gaggtcggccacaggccatgtctgttcctc

SEQ ID NO: 450642 - DNA, 30 bp, Artificial Sequence
  Synthetic oligonucleotide
atcacgtgggctcagtttactcatttcctc

SEQ ID NO: 450643 - DNA, 30 bp, Artificial Sequence
  Synthetic oligonucleotide
ccctcggctgaaatactattctatttcctc

SEQ ID NO: 450644 - DNA, 30 bp, Artificial Sequence
  Synthetic oligonucleotide
atgggagctgacgtaatgcagaaaaagctc

SEQ ID NO: 450645 - DNA, 30 bp, Artificial Sequence
  Synthetic oligonucleotide
gtggagatctcccccccccgatacaagctc

SEQ ID NO: 450646 - DNA, 30 bp, Artificial Sequence
  Synthetic oligonucleotide
ccgatatccaagccgatgggctccaagctc

SEQ ID NO: 450647 - DNA, 30 bp, Artificial Sequence
  Synthetic oligonucleotide
aaaggctgactttctggtacacagcagctc

SEQ ID NO: 450648 - DNA, 30 bp, Artificial Sequence
  Synthetic oligonucleotide
cacctggttaattagtggtacaggcagctc

SEQ ID NO: 450649 - DNA, 30 bp, Artificial Sequence
  Synthetic oligonucleotide
attaaagtaggatcatccggacgtcagctc

SEQ ID NO: 450650 - DNA, 30 bp, Artificial Sequence
  Synthetic oligonucleotide
ctcccgccaatttatctttttgcagagctc

SEQ ID NO: 450651 - DNA, 30 bp, Artificial Sequence
  Synthetic oligonucleotide
ttggcgtagaactcatccaaggcggagctc

SEQ ID NO: 450652 - DNA, 30 bp, Artificial Sequence
  Synthetic oligonucleotide
ttttcaaccgagcaggaaactgtggagctc

SEQ ID NO: 450653 - DNA, 30 bp, Artificial Sequence
  Synthetic oligonucleotide
cttatttatagtaataaggggcctgagctc

SEQ ID NO: 450654 - DNA, 30 bp, Artificial Sequence
  Synthetic oligonucleotide
aacacctttcttaggttatcatttgagctc

SEQ ID NO: 450655 - DNA, 30 bp, Artificial Sequence
  Synthetic oligonucleotide
tatgccatccggcccagcttggaatagctc

SEQ ID NO: 450656 - DNA, 30 bp, Artificial Sequence
  Synthetic oligonucleotide
tcccattcggaccaatagggggcatagctc

SEQ ID NO: 450657 - DNA, 30 bp, Artificial Sequence
  Synthetic oligonucleotide
ctttcttacagtagaaacgaggggtagctc

SEQ ID NO: 450658 - DNA, 30 bp, Artificial Sequence
  Synthetic oligonucleotide
tgttaactctataataacggttattagctc

SEQ ID NO: 450659 - DNA, 30 bp, Artificial Sequence
  Synthetic oligonucleotide
tccctgctctaatgagctcaaagttagctc

SEQ ID NO: 450660 - DNA, 30 bp, Artificial Sequence
  Synthetic oligonucleotide
tctcttgacaatcttccgtaccgttagctc

SEQ ID NO: 450661 - DNA, 30 bp, Artificial Sequence
  Synthetic oligonucleotide
aggtacccgcgcaagattcgttgttagctc

SEQ ID NO: 450662 - DNA, 30 bp, Artificial Sequence
  Synthetic oligonucleotide
gtcgactcatcattcaggtggagaacgctc

SEQ ID NO: 450663 - DNA, 30 bp, Artificial Sequence
  Synthetic oligonucleotide
gcaccatttgttgtcaaagcacgaacgctc

SEQ ID NO: 450664 - DNA, 30 bp, Artificial Sequence
  Synthetic oligonucleotide
ttcgttaagataatcttgcatgtaacgctc

SEQ ID NO: 450665 - DNA, 30 bp, Artificial Sequence
  Synthetic oligonucleotide
gggaatattcgtacttggagttagacgctc

SEQ ID NO: 450666 - DNA, 30 bp, Artificial Sequence
  Synthetic oligonucleotide
caattatcttgtgagcgtacaacgacgctc

SEQ ID NO: 450667 - DNA, 30 bp, Artificial Sequence
  Synthetic oligonucleotide
gtaacgtccgtccaatggtcggcgacgctc

SEQ ID NO: 450668 - DNA, 30 bp, Artificial Sequence
  Synthetic oligonucleotide
gcgggaagttcccatggccggctcccgctc

SEQ ID NO: 450669 - DNA, 30 bp, Artificial Sequence
  Synthetic oligonucleotide
acgcgaaagctcctgtataccggagcgctc

SEQ ID NO: 450670 - DNA, 30 bp, Artificial Sequence
  Synthetic oligonucleotide
gctacggcgttttcggatgcttacgcgctc

SEQ ID NO: 450671 - DNA, 30 bp, Artificial Sequence
  Synthetic oligonucleotide
tcaaccagttgagtggcttcatccgcgctc

SEQ ID NO: 450672 - DNA, 30 bp, Artificial Sequence
  Synthetic oligonucleotide
aaacgtcgaagttaatattggcgcgcgctc

SEQ ID NO: 450673 - DNA, 30 bp, Artificial Sequence
  Synthetic oligonucleotide
tgttaattaattgcaatgtttctggcgctc

SEQ ID NO: 450674 - DNA, 30 bp, Artificial Sequence
  Synthetic oligonucleotide
cggtggagcacacaagaggtgtatgcgctc

SEQ ID NO: 450675 - DNA, 30 bp, Artificial Sequence
  Synthetic oligonucleotide
taccttcactgagacacaaaggcatcgctc

SEQ ID NO: 450676 - DNA, 30 bp, Artificial Sequence
  Synthetic oligonucleotide
attttggtctatgtttttcattactcgctc

SEQ ID NO: 450677 - DNA, 30 bp, Artificial Sequence
  Synthetic oligonucleotide
caaagtctttcacacccttacaattcgctc

SEQ ID NO: 450678 - DNA, 30 bp, Artificial Sequence
  Synthetic oligonucleotide
aagctcccgagaagtggatcgccttcgctc

SEQ ID NO: 450679 - DNA, 30 bp, Artificial Sequence
  Synthetic oligonucleotide
ataagggggggagtcaacacttgttcgctc

SEQ ID NO: 450680 - DNA, 30 bp, Artificial Sequence
  Synthetic oligonucleotide
tcaagtgagttgtatctatatcaaaggctc

SEQ ID NO: 450681 - DNA, 30 bp, Artificial Sequence
  Synthetic oligonucleotide
attatttacggaacgcaacactaaaggctc

SEQ ID NO: 450682 - DNA, 30 bp, Artificial Sequence
  Synthetic oligonucleotide
gaaagccaagcaccagtgcaggtaaggctc

SEQ ID NO: 450683 - DNA, 30 bp, Artificial Sequence
  Synthetic oligonucleotide
tcttcacggtccgaaagcacttacaggctc

SEQ ID NO: 450684 - DNA, 30 bp, Artificial Sequence
  Synthetic oligonucleotide
gatccgagacactgcgacagtaccaggctc

SEQ ID NO: 450685 - DNA, 30 bp, Artificial Sequence
  Synthetic oligonucleotide
cgacggtagggccgcacggcacgcaggctc

SEQ ID NO: 450686 - DNA, 30 bp, Artificial Sequence
  Synthetic oligonucleotide
tcatgtgatctggtcagcttttcgaggctc

SEQ ID NO: 450687 - DNA, 30 bp, Artificial Sequence
  Synthetic oligonucleotide
attacagtattggtggtcccttggaggctc

SEQ ID NO: 450688 - DNA, 30 bp, Artificial Sequence
  Synthetic oligonucleotide
aaatgagagcaatcagtgacgtataggctc

SEQ ID NO: 450689 - DNA, 30 bp, Artificial Sequence
  Synthetic oligonucleotide
tttaatatgtgactatttactccccggctc

SEQ ID NO: 450690 - DNA, 30 bp, Artificial Sequence
  Synthetic oligonucleotide
agcccggacaaggctactaagacgcggctc

SEQ ID NO: 450691 - DNA, 30 bp, Artificial Sequence
  Synthetic oligonucleotide
ctactcgcgccggagcgaacggacgggctc

SEQ ID NO: 450692 - DNA, 30 bp, Artificial Sequence
  Synthetic oligonucleotide
ctgaccccgcgtacccttgagggcgggctc

SEQ ID NO: 450693 - DNA, 30 bp, Artificial Sequence
  Synthetic oligonucleotide
atacgtggttctgagattatcgtcgggctc

SEQ ID NO: 450694 - DNA, 30 bp, Artificial Sequence
  Synthetic oligonucleotide
atttacgttagaggccctattccggggctc

SEQ ID NO: 450695 - DNA, 30 bp, Artificial Sequence
  Synthetic oligonucleotide
gttggttcataactggcgttccgggggctc

SEQ ID NO: 450696 - DNA, 30 bp, Artificial Sequence
  Synthetic oligonucleotide
atacgttcccctaattgattcctggggctc

SEQ ID NO: 450697 - DNA, 30 bp, Artificial Sequence
  Synthetic oligonucleotide
gagaaattaagcgaacgttagtgtgggctc

SEQ ID NO: 450698 - DNA, 30 bp, Artificial Sequence
  Synthetic oligonucleotide
caagcccaatccagtcgtcggcttgggctc

SEQ ID NO: 450699 - DNA, 30 bp, Artificial Sequence
  Synthetic oligonucleotide
tgggagccattggagtaagctgtatggctc

SEQ ID NO: 450700 - DNA, 30 bp, Artificial Sequence
  Synthetic oligonucleotide
tatggctggatgatcggtaatatctggctc

SEQ ID NO: 450701 - DNA, 30 bp, Artificial Sequence
  Synthetic oligonucleotide
caaattgcatcaccaagtactgggtggctc

SEQ ID NO: 450702 - DNA, 30 bp, Artificial Sequence
  Synthetic oligonucleotide
tggaggggtcatcaacaggctgtttggctc

SEQ ID NO: 450703 - DNA, 30 bp, Artificial Sequence
  Synthetic oligonucleotide
aaggtttgccggagcaaaataccaatgctc

SEQ ID NO: 450704 - DNA, 30 bp, Artificial Sequence
  Synthetic oligonucleotide
gctcttctgatcctgagaaacctaatgctc

SEQ ID NO: 450705 - DNA, 30 bp, Artificial Sequence
  Synthetic oligonucleotide
tataactccggacccttttggaacatgctc

SEQ ID NO: 450706 - DNA, 30 bp, Artificial Sequence
  Synthetic oligonucleotide
ccttcgaggctcagccagtgggtcatgctc

SEQ ID NO: 450707 - DNA, 30 bp, Artificial Sequence
  Synthetic oligonucleotide
gttggcacatttgatcccaatcttatgctc

SEQ ID NO: 450708 - DNA, 30 bp, Artificial Sequence
  Synthetic oligonucleotide
atctcgctatatattagttagcagctgctc

SEQ ID NO: 450709 - DNA, 30 bp, Artificial Sequence
  Synthetic oligonucleotide
gtagggtcagggcggcccactgagctgctc

SEQ ID NO: 450710 - DNA, 30 bp, Artificial Sequence
  Synthetic oligonucleotide
aagtgccacttgttatgacaatcgctgctc

SEQ ID NO: 450711 - DNA, 30 bp, Artificial Sequence
  Synthetic oligonucleotide
gtagggcttgacggggtcagggggctgctc

SEQ ID NO: 450712 - DNA, 30 bp, Artificial Sequence
  Synthetic oligonucleotide
agtccccttacctgatcgggtctgctgctc

SEQ ID NO: 450713 - DNA, 30 bp, Artificial Sequence
  Synthetic oligonucleotide
ccattcttgccattgtgccgcttgctgctc

SEQ ID NO: 450714 - DNA, 30 bp, Artificial Sequence
  Synthetic oligonucleotide
agttccgacagagaacactcggttctgctc

SEQ ID NO: 450715 - DNA, 30 bp, Artificial Sequence
  Synthetic oligonucleotide
aattagacatgaattaatagtgttctgctc

SEQ ID NO: 450716 - DNA, 30 bp, Artificial Sequence
  Synthetic oligonucleotide
cagtagggctctgcattagttgcagtgctc

SEQ ID NO: 450717 - DNA, 30 bp, Artificial Sequence
  Synthetic oligonucleotide
gccggttaataagctatgatcggcgtgctc

SEQ ID NO: 450718 - DNA, 28 bp, Artificial Sequence
  Synthetic oligonucleotide
atactacaactgtagttttatcgtgctc

SEQ ID NO: 450719 - DNA, 30 bp, Artificial Sequence
  Synthetic oligonucleotide
acccgggcgcttcgggtagcggtcgtgctc

SEQ ID NO: 450720 - DNA, 30 bp, Artificial Sequence
  Synthetic oligonucleotide
cgcaccgcatcatcacagaactcggtgctc

SEQ ID NO: 450721 - DNA, 30 bp, Artificial Sequence
  Synthetic oligonucleotide
atttggtttggtcgagtagttggggtgctc

SEQ ID NO: 450722 - DNA, 31 bp, Artificial Sequence
  Synthetic oligonucleotide
tcaaggtagagagacggctgaagatgtgctc

SEQ ID NO: 450723 - DNA, 30 bp, Artificial Sequence
  Synthetic oligonucleotide
cttttgcggtggcgtaaacaggctgtgctc

SEQ ID NO: 450724 - DNA, 30 bp, Artificial Sequence
  Synthetic oligonucleotide
ggatcctattccaaacacgggcgcttgctc

SEQ ID NO: 450725 - DNA, 30 bp, Artificial Sequence
  Synthetic oligonucleotide
caagtaatgaggtactatcgggccaatctc

SEQ ID NO: 450726 - DNA, 30 bp, Artificial Sequence
  Synthetic oligonucleotide
aacgaaggcagttgagacgcatagaatctc

SEQ ID NO: 450727 - DNA, 30 bp, Artificial Sequence
  Synthetic oligonucleotide
ggtagagctgtagatggtgtatgccatctc

SEQ ID NO: 450728 - DNA, 30 bp, Artificial Sequence
  Synthetic oligonucleotide
gcaagattatgtggagctggatatcatctc

SEQ ID NO: 450729 - DNA, 30 bp, Artificial Sequence
  Synthetic oligonucleotide
tagggtcgtggcaatgccagagctcatctc

SEQ ID NO: 450730 - DNA, 30 bp, Artificial Sequence
  Synthetic oligonucleotide
tagttttagtagatgtcgagttctcatctc

SEQ ID NO: 450731 - DNA, 30 bp, Artificial Sequence
  Synthetic oligonucleotide
attcgatcaggttaggatatatgagatctc

SEQ ID NO: 450732 - DNA, 30 bp, Artificial Sequence
  Synthetic oligonucleotide
cgcaataaattctatggggtctacgatctc

SEQ ID NO: 450733 - DNA, 30 bp, Artificial Sequence
  Synthetic oligonucleotide
ttttggaaccagtggcttgaccccgatctc

SEQ ID NO: 450734 - DNA, 30 bp, Artificial Sequence
  Synthetic oligonucleotide
gagtggagctcgccagattctagcgatctc

SEQ ID NO: 450735 - DNA, 30 bp, Artificial Sequence
  Synthetic oligonucleotide
ggccgcggaacactcggccgccgcgatctc

SEQ ID NO: 450736 - DNA, 30 bp, Artificial Sequence
  Synthetic oligonucleotide
cagatattgatcgctatgcaaggcgatctc

SEQ ID NO: 450737 - DNA, 30 bp, Artificial Sequence
  Synthetic oligonucleotide
acgtttcccgcatatatcattcgggatctc

SEQ ID NO: 450738 - DNA, 30 bp, Artificial Sequence
  Synthetic oligonucleotide
cagaggtcttttaatctaccagaatatctc

SEQ ID NO: 450739 - DNA, 30 bp, Artificial Sequence
  Synthetic oligonucleotide
gggtcaactgctctctgttaaatatatctc

SEQ ID NO: 450740 - DNA, 30 bp, Artificial Sequence
  Synthetic oligonucleotide
agcaggggccggcgctgcccgtgctatctc

SEQ ID NO: 450741 - DNA, 30 bp, Artificial Sequence
  Synthetic oligonucleotide
cctaagggttgtggaaggccagtctatctc

SEQ ID NO: 450742 - DNA, 30 bp, Artificial Sequence
  Synthetic oligonucleotide
ccaatcatggaaccccttgaccggtatctc

SEQ ID NO: 450743 - DNA, 30 bp, Artificial Sequence
  Synthetic oligonucleotide
tactgagttgaaccataaatggggtatctc

SEQ ID NO: 450744 - DNA, 30 bp, Artificial Sequence
  Synthetic oligonucleotide
tgggctacaccgtaggtaagccattatctc

SEQ ID NO: 450745 - DNA, 30 bp, Artificial Sequence
  Synthetic oligonucleotide
tccgcagccgacatatgaacatgttatctc

SEQ ID NO: 450746 - DNA, 30 bp, Artificial Sequence
  Synthetic oligonucleotide
tatccaccttttcctagattcttttatctc

SEQ ID NO: 450747 - DNA, 30 bp, Artificial Sequence
  Synthetic oligonucleotide
aaccagggtgccgcttgcgtataaactctc

SEQ ID NO: 450748 - DNA, 30 bp, Artificial Sequence
  Synthetic oligonucleotide
atcatgctacagcgcagtggagtgactctc

SEQ ID NO: 450749 - DNA, 30 bp, Artificial Sequence
  Synthetic oligonucleotide
ctgaggcagaagaagggtaagcgtactctc

SEQ ID NO: 450750 - DNA, 30 bp, Artificial Sequence
  Synthetic oligonucleotide
agtactatgggataccgggcagttactctc

SEQ ID NO: 450751 - DNA, 30 bp, Artificial Sequence
  Synthetic oligonucleotide
cctttaaggccagtacactatgttactctc

SEQ ID NO: 450752 - DNA, 30 bp, Artificial Sequence
  Synthetic oligonucleotide
atgagttatcatttatgagaggcacctctc

SEQ ID NO: 450753 - DNA, 30 bp, Artificial Sequence
  Synthetic oligonucleotide
gccctctatatagagcagggactacctctc

SEQ ID NO: 450754 - DNA, 30 bp, Artificial Sequence
  Synthetic oligonucleotide
tttttagcggccgagacctcgtgccctctc

SEQ ID NO: 450755 - DNA, 30 bp, Artificial Sequence
  Synthetic oligonucleotide
gtgacgatcaatgcccgcccaccgcctctc

SEQ ID NO: 450756 - DNA, 30 bp, Artificial Sequence
  Synthetic oligonucleotide
catgactccggagttttaagtagtcctctc

SEQ ID NO: 450757 - DNA, 30 bp, Artificial Sequence
  Synthetic oligonucleotide
gataaacaatattcggtcctgctagctctc

SEQ ID NO: 450758 - DNA, 30 bp, Artificial Sequence
  Synthetic oligonucleotide
cgtaatttgtcttggactaaccgggctctc

SEQ ID NO: 450759 - DNA, 30 bp, Artificial Sequence
  Synthetic oligonucleotide
gcaaaatgggtaacccatacgcgggctctc

SEQ ID NO: 450760 - DNA, 30 bp, Artificial Sequence
  Synthetic oligonucleotide
ttattctatgtgcaggtcgcaggggctctc

SEQ ID NO: 450761 - DNA, 30 bp, Artificial Sequence
  Synthetic oligonucleotide
atctttctcagaactgcctaagatgctctc

SEQ ID NO: 450762 - DNA, 30 bp, Artificial Sequence
  Synthetic oligonucleotide
gtagggaacataacggatagttatgctctc

SEQ ID NO: 450763 - DNA, 30 bp, Artificial Sequence
  Synthetic oligonucleotide
ctttctcgatctcccttactaggatctctc

SEQ ID NO: 450764 - DNA, 30 bp, Artificial Sequence
  Synthetic oligonucleotide
ctatgttttgtgccggcagaattatctctc

SEQ ID NO: 450765 - DNA, 30 bp, Artificial Sequence
  Synthetic oligonucleotide
tgtttcgcgttcgatatatgcaactctctc

SEQ ID NO: 450766 - DNA, 30 bp, Artificial Sequence
  Synthetic oligonucleotide
agattcgcttgctgttgccttccgtctctc

SEQ ID NO: 450767 - DNA, 30 bp, Artificial Sequence
  Synthetic oligonucleotide
tgcgcaagatccatgaagtagggttctctc

SEQ ID NO: 450768 - DNA, 30 bp, Artificial Sequence
  Synthetic oligonucleotide
ttgccagctcgtcctcattgtaccagtctc

SEQ ID NO: 450769 - DNA, 30 bp, Artificial Sequence
  Synthetic oligonucleotide
aattcaagagtcttttaggctgggagtctc

SEQ ID NO: 450770 - DNA, 30 bp, Artificial Sequence
  Synthetic oligonucleotide
tgtaatctagtgggatacgtaatgagtctc

SEQ ID NO: 450771 - DNA, 30 bp, Artificial Sequence
  Synthetic oligonucleotide
cctgacttctctcatggaatgttgagtctc

SEQ ID NO: 450772 - DNA, 30 bp, Artificial Sequence
  Synthetic oligonucleotide
cgtacccgcgtatgagctggttatagtctc

SEQ ID NO: 450773 - DNA, 30 bp, Artificial Sequence
  Synthetic oligonucleotide
gcttaccgttttgccatacgacaccgtctc

SEQ ID NO: 450774 - DNA, 30 bp, Artificial Sequence
  Synthetic oligonucleotide
ggtatttagtctattaatacggcccgtctc

SEQ ID NO: 450775 - DNA, 30 bp, Artificial Sequence
  Synthetic oligonucleotide
acatgcgatcggtttttacaatagcgtctc

SEQ ID NO: 450776 - DNA, 30 bp, Artificial Sequence
  Synthetic oligonucleotide
tccacacaaattcagagacgcctgcgtctc

SEQ ID NO: 450777 - DNA, 30 bp, Artificial Sequence
  Synthetic oligonucleotide
atgagggatgattacggtcactatcgtctc

SEQ ID NO: 450778 - DNA, 30 bp, Artificial Sequence
  Synthetic oligonucleotide
aagctaaactaaaggtcccgtcaaggtctc

SEQ ID NO: 450779 - DNA, 30 bp, Artificial Sequence
  Synthetic oligonucleotide
tcaatctctgcgacgtaaaggtaaggtctc

SEQ ID NO: 450780 - DNA, 30 bp, Artificial Sequence
  Synthetic oligonucleotide
tgggtagtggtacccaagtcgccaggtctc

SEQ ID NO: 450781 - DNA, 30 bp, Artificial Sequence
  Synthetic oligonucleotide
tcgtctaggagtttctaaaatcgcggtctc

SEQ ID NO: 450782 - DNA, 30 bp, Artificial Sequence
  Synthetic oligonucleotide
taaccactgatgtgatgcccaatcggtctc

SEQ ID NO: 450783 - DNA, 30 bp, Artificial Sequence
  Synthetic oligonucleotide
ataccaagtgattaagcaaacggtggtctc

SEQ ID NO: 450784 - DNA, 30 bp, Artificial Sequence
  Synthetic oligonucleotide
taatgatccatgcaaaatgcaggatgtctc

SEQ ID NO: 450785 - DNA, 30 bp, Artificial Sequence
  Synthetic oligonucleotide
tgagatggaccctttttagtcgactgtctc

SEQ ID NO: 450786 - DNA, 30 bp, Artificial Sequence
  Synthetic oligonucleotide
cagcccatcgcacgcatacaggcttgtctc

SEQ ID NO: 450787 - DNA, 30 bp, Artificial Sequence
  Synthetic oligonucleotide
gggcagccgactttcaaaaagtgttgtctc

SEQ ID NO: 450788 - DNA, 30 bp, Artificial Sequence
  Synthetic oligonucleotide
tgcccacccgtgcccttcgattcaattctc

SEQ ID NO: 450789 - DNA, 30 bp, Artificial Sequence
  Synthetic oligonucleotide
ctgctgtgggaatagaaatgcatgattctc

SEQ ID NO: 450790 - DNA, 30 bp, Artificial Sequence
  Synthetic oligonucleotide
ttccataaggcgggtcagctcgatattctc

SEQ ID NO: 450791 - DNA, 30 bp, Artificial Sequence
  Synthetic oligonucleotide
catttgcctatcgtagtagatcgtattctc

SEQ ID NO: 450792 - DNA, 30 bp, Artificial Sequence
  Synthetic oligonucleotide
tacattgcgtgaggagttctcattattctc

SEQ ID NO: 450793 - DNA, 30 bp, Artificial Sequence
  Synthetic oligonucleotide
aaggacacagtttattgcctatttattctc

SEQ ID NO: 450794 - DNA, 30 bp, Artificial Sequence
  Synthetic oligonucleotide
tttgggagaagtgcgtaagccagacttctc

SEQ ID NO: 450795 - DNA, 30 bp, Artificial Sequence
  Synthetic oligonucleotide
ctgtgaagcgcggacgcatacaaccttctc

SEQ ID NO: 450796 - DNA, 30 bp, Artificial Sequence
  Synthetic oligonucleotide
atagtacgtttctccggatattcgcttctc

SEQ ID NO: 450797 - DNA, 30 bp, Artificial Sequence
  Synthetic oligonucleotide
aaccttatgcagaggaagggctgtcttctc

SEQ ID NO: 450798 - DNA, 30 bp, Artificial Sequence
  Synthetic oligonucleotide
ttctcaaatcttagaataatcgaagttctc

SEQ ID NO: 450799 - DNA, 30 bp, Artificial Sequence
  Synthetic oligonucleotide
catagcgttgattaggcaggttgagttctc

SEQ ID NO: 450800 - DNA, 30 bp, Artificial Sequence
  Synthetic oligonucleotide
atctattaagtcattactcaaacggttctc

SEQ ID NO: 450801 - DNA, 30 bp, Artificial Sequence
  Synthetic oligonucleotide
acataccatctttccgcatatacggttctc

SEQ ID NO: 450802 - DNA, 30 bp, Artificial Sequence
  Synthetic oligonucleotide
gtaacccttaaaggtcgtccgcatgttctc

SEQ ID NO: 450803 - DNA, 30 bp, Artificial Sequence
  Synthetic oligonucleotide
gttatagagattgccgccttaattgttctc

SEQ ID NO: 450804 - DNA, 30 bp, Artificial Sequence
  Synthetic oligonucleotide
ttgagagctggtgataaatgagtatttctc

SEQ ID NO: 450805 - DNA, 30 bp, Artificial Sequence
  Synthetic oligonucleotide
gactataactacaacgcagtaaactttctc

SEQ ID NO: 450806 - DNA, 30 bp, Artificial Sequence
  Synthetic oligonucleotide
cgtgtgatcaaccggtcggggagctttctc

SEQ ID NO: 450807 - DNA, 30 bp, Artificial Sequence
  Synthetic oligonucleotide
gagcaattcagcgctccagctgggtttctc

SEQ ID NO: 450808 - DNA, 30 bp, Artificial Sequence
  Synthetic oligonucleotide
ttatgctcttgttatatttgcttgtttctc

SEQ ID NO: 450809 - DNA, 30 bp, Artificial Sequence
  Synthetic oligonucleotide
gaagagacgagccatactcgtagttttctc

SEQ ID NO: 450810 - DNA, 30 bp, Artificial Sequence
  Synthetic oligonucleotide
tcttgcattatcggtattcgcgaaaaagtc

SEQ ID NO: 450811 - DNA, 30 bp, Artificial Sequence
  Synthetic oligonucleotide
ttatggcgctgattcgtttgttaaaaagtc

SEQ ID NO: 450812 - DNA, 30 bp, Artificial Sequence
  Synthetic oligonucleotide
gacgcgtgttcaaacacataactaaaagtc

SEQ ID NO: 450813 - DNA, 30 bp, Artificial Sequence
  Synthetic oligonucleotide
agctaaaggtcctatacacgatgcaaagtc

SEQ ID NO: 450814 - DNA, 30 bp, Artificial Sequence
  Synthetic oligonucleotide
tagcatactggaacctaatttttcaaagtc

SEQ ID NO: 450815 - DNA, 30 bp, Artificial Sequence
  Synthetic oligonucleotide
cgtttaactccgaggaccgtcactaaagtc

SEQ ID NO: 450816 - DNA, 30 bp, Artificial Sequence
  Synthetic oligonucleotide
aatctgcccatgggaagcttgtcacaagtc

SEQ ID NO: 450817 - DNA, 30 bp, Artificial Sequence
  Synthetic oligonucleotide
ctcctgtgctgttgtatgattcgacaagtc

SEQ ID NO: 450818 - DNA, 30 bp, Artificial Sequence
  Synthetic oligonucleotide
tgtagcagtaagtccttctcgcaccaagtc

SEQ ID NO: 450819 - DNA, 30 bp, Artificial Sequence
  Synthetic oligonucleotide
aatgatgatggccgcaacctcgcccaagtc

SEQ ID NO: 450820 - DNA, 30 bp, Artificial Sequence
  Synthetic oligonucleotide
ctggattggatgttacttgtaacgcaagtc

SEQ ID NO: 450821 - DNA, 30 bp, Artificial Sequence
  Synthetic oligonucleotide
tctagggcttgtgatgggtcaaggcaagtc

SEQ ID NO: 450822 - DNA, 30 bp, Artificial Sequence
  Synthetic oligonucleotide
tcagtggggcgcagatcgggggtgcaagtc

SEQ ID NO: 450823 - DNA, 30 bp, Artificial Sequence
  Synthetic oligonucleotide
cgagccttaccgctactgctctgggaagtc

SEQ ID NO: 450824 - DNA, 30 bp, Artificial Sequence
  Synthetic oligonucleotide
gtatattcatggtatccggtagttgaagtc

SEQ ID NO: 450825 - DNA, 30 bp, Artificial Sequence
  Synthetic oligonucleotide
atcaatgtgggggcttcttcttttgaagtc

SEQ ID NO: 450826 - DNA, 30 bp, Artificial Sequence
  Synthetic oligonucleotide
aatatatcgacgataatgctactataagtc

SEQ ID NO: 450827 - DNA, 30 bp, Artificial Sequence
  Synthetic oligonucleotide
actcgatctgggcagctttggtggtaagtc

SEQ ID NO: 450828 - DNA, 30 bp, Artificial Sequence
  Synthetic oligonucleotide
ggctaagttccatccccgctagtgtaagtc

SEQ ID NO: 450829 - DNA, 30 bp, Artificial Sequence
  Synthetic oligonucleotide
ctgctaggctcctaagcatcgcattaagtc

SEQ ID NO: 450830 - DNA, 30 bp, Artificial Sequence
  Synthetic oligonucleotide
agggacgagccgggtcgattatgttaagtc

SEQ ID NO: 450831 - DNA, 30 bp, Artificial Sequence
  Synthetic oligonucleotide
ttatcatggtcccccgcctggaccacagtc

SEQ ID NO: 450832 - DNA, 30 bp, Artificial Sequence
  Synthetic oligonucleotide
gaatactatgcgaatgcattcggcacagtc

SEQ ID NO: 450833 - DNA, 30 bp, Artificial Sequence
  Synthetic oligonucleotide
gcgtagctctgctggagggcagagacagtc

SEQ ID NO: 450834 - DNA, 30 bp, Artificial Sequence
  Synthetic oligonucleotide
ctaggttattgcgatgctttacgtacagtc

SEQ ID NO: 450835 - DNA, 30 bp, Artificial Sequence
  Synthetic oligonucleotide
cgcagttatacgaaaaataatattacagtc

SEQ ID NO: 450836 - DNA, 30 bp, Artificial Sequence
  Synthetic oligonucleotide
atcgattaagctatggtagtgcttacagtc

SEQ ID NO: 450837 - DNA, 30 bp, Artificial Sequence
  Synthetic oligonucleotide
actcgtgggcagaggccagctgttacagtc

SEQ ID NO: 450838 - DNA, 30 bp, Artificial Sequence
  Synthetic oligonucleotide
cgtacctgagcagcccgacggtaaccagtc

SEQ ID NO: 450839 - DNA, 30 bp, Artificial Sequence
  Synthetic oligonucleotide
cgccctatgctggagttacggtgaccagtc

SEQ ID NO: 450840 - DNA, 30 bp, Artificial Sequence
  Synthetic oligonucleotide
ggccagggtattaacgttatttgaccagtc

SEQ ID NO: 450841 - DNA, 30 bp, Artificial Sequence
  Synthetic oligonucleotide
acttgatattagacacgcatattaccagtc

SEQ ID NO: 450842 - DNA, 30 bp, Artificial Sequence
  Synthetic oligonucleotide
cgactttcgcaggaggggtgcattccagtc

SEQ ID NO: 450843 - DNA, 30 bp, Artificial Sequence
  Synthetic oligonucleotide
gggaccttgcagggcggggttattccagtc

SEQ ID NO: 450844 - DNA, 30 bp, Artificial Sequence
  Synthetic oligonucleotide
tatacaaacgttgccgagtggtttccagtc

SEQ ID NO: 450845 - DNA, 30 bp, Artificial Sequence
  Synthetic oligonucleotide
gcgactggatcgtgagacatttttccagtc

SEQ ID NO: 450846 - DNA, 30 bp, Artificial Sequence
  Synthetic oligonucleotide
tacgggcatcatctgggtacggcagcagtc

SEQ ID NO: 450847 - DNA, 30 bp, Artificial Sequence
  Synthetic oligonucleotide
agtgagcttaaagagttagggtacgcagtc

SEQ ID NO: 450848 - DNA, 30 bp, Artificial Sequence
  Synthetic oligonucleotide
gctatatgggatgcgattagcgccgcagtc

SEQ ID NO: 450849 - DNA, 30 bp, Artificial Sequence
  Synthetic oligonucleotide
tccaaggacacgttctgcctagcggcagtc

SEQ ID NO: 450850 - DNA, 30 bp, Artificial Sequence
  Synthetic oligonucleotide
tagtgctggccgagctcaattctggcagtc

SEQ ID NO: 450851 - DNA, 30 bp, Artificial Sequence
  Synthetic oligonucleotide
gattgccggaccgactgtgcaagtgcagtc

SEQ ID NO: 450852 - DNA, 30 bp, Artificial Sequence
  Synthetic oligonucleotide
gtagactcgcgatgattggacgtctcagtc

SEQ ID NO: 450853 - DNA, 30 bp, Artificial Sequence
  Synthetic oligonucleotide
atacccttggggacggaatggcagtcagtc

SEQ ID NO: 450854 - DNA, 30 bp, Artificial Sequence
  Synthetic oligonucleotide
ctccggttgaatggatgacctcggtcagtc

SEQ ID NO: 450855 - DNA, 30 bp, Artificial Sequence
  Synthetic oligonucleotide
aaaccgattgatacctgcatcagaagagtc

SEQ ID NO: 450856 - DNA, 30 bp, Artificial Sequence
  Synthetic oligonucleotide
ccgttccgcgtgcagaacctgatcagagtc

SEQ ID NO: 450857 - DNA, 30 bp, Artificial Sequence
  Synthetic oligonucleotide
agggttttgccctactcgccgacgagagtc

SEQ ID NO: 450858 - DNA, 30 bp, Artificial Sequence
  Synthetic oligonucleotide
aatttgttagtatctgcataattgagagtc

SEQ ID NO: 450859 - DNA, 30 bp, Artificial Sequence
  Synthetic oligonucleotide
actctctctagatacaacgcttgtagagtc

SEQ ID NO: 450860 - DNA, 30 bp, Artificial Sequence
  Synthetic oligonucleotide
agcaatttgtcgttcctctaaaaacgagtc

SEQ ID NO: 450861 - DNA, 30 bp, Artificial Sequence
  Synthetic oligonucleotide
ggcggagtgtctgggagtcgggaccgagtc

SEQ ID NO: 450862 - DNA, 30 bp, Artificial Sequence
  Synthetic oligonucleotide
tattagtctccaaagcgacaaagcggagtc

SEQ ID NO: 450863 - DNA, 30 bp, Artificial Sequence
  Synthetic oligonucleotide
gcgaacatgtgccaatcttgatgcggagtc

SEQ ID NO: 450864 - DNA, 30 bp, Artificial Sequence
  Synthetic oligonucleotide
tcacccgcattctgatttggcttcggagtc

SEQ ID NO: 450865 - DNA, 30 bp, Artificial Sequence
  Synthetic oligonucleotide
ggtgtggagacgatagacacacagggagtc

SEQ ID NO: 450866 - DNA, 30 bp, Artificial Sequence
  Synthetic oligonucleotide
tactacctcctcaacacaattaggggagtc

SEQ ID NO: 450867 - DNA, 30 bp, Artificial Sequence
  Synthetic oligonucleotide
taagaatcccttacaaagttcttgggagtc

SEQ ID NO: 450868 - DNA, 30 bp, Artificial Sequence
  Synthetic oligonucleotide
tggctttcgggttgtctgtcagactgagtc

SEQ ID NO: 450869 - DNA, 30 bp, Artificial Sequence
  Synthetic oligonucleotide
aaatactaacacgggagacactcctgagtc

SEQ ID NO: 450870 - DNA, 30 bp, Artificial Sequence
  Synthetic oligonucleotide
cgcaattacggtcccttttggccgtgagtc

SEQ ID NO: 450871 - DNA, 30 bp, Artificial Sequence
  Synthetic oligonucleotide
acgtgttttatatatcaccaaatgtgagtc

SEQ ID NO: 450872 - DNA, 30 bp, Artificial Sequence
  Synthetic oligonucleotide
atttacactgcaagacatgtacaaatagtc

SEQ ID NO: 450873 - DNA, 30 bp, Artificial Sequence
  Synthetic oligonucleotide
atagggacgctcaggtatgactaaatagtc

SEQ ID NO: 450874 - DNA, 30 bp, Artificial Sequence
  Synthetic oligonucleotide
gcagacgttgtatcatttgggtcaatagtc

SEQ ID NO: 450875 - DNA, 30 bp, Artificial Sequence
  Synthetic oligonucleotide
aaactagtatcggctcggtcgtgaatagtc

SEQ ID NO: 450876 - DNA, 30 bp, Artificial Sequence
  Synthetic oligonucleotide
tgagctaaagtggtcccccttataatagtc

SEQ ID NO: 450877 - DNA, 30 bp, Artificial Sequence
  Synthetic oligonucleotide
ccttgatatcattgtgcagaggacatagtc

SEQ ID NO: 450878 - DNA, 30 bp, Artificial Sequence
  Synthetic oligonucleotide
ggtgtatacactgagcgcaatggcatagtc

SEQ ID NO: 450879 - DNA, 30 bp, Artificial Sequence
  Synthetic oligonucleotide
gttcacacgttgagaacaggaatcatagtc

SEQ ID NO: 450880 - DNA, 30 bp, Artificial Sequence
  Synthetic oligonucleotide
tctgatactgaccatggttttgagatagtc

SEQ ID NO: 450881 - DNA, 30 bp, Artificial Sequence
  Synthetic oligonucleotide
agcttctaaccagacttccgtgggatagtc

SEQ ID NO: 450882 - DNA, 30 bp, Artificial Sequence
  Synthetic oligonucleotide
gagtcttgctcaagggttgtctatatagtc

SEQ ID NO: 450883 - DNA, 29 bp, Artificial Sequence
  Synthetic oligonucleotide
aggagtcttcctttgctggggctatagtc

SEQ ID NO: 450884 - DNA, 30 bp, Artificial Sequence
  Synthetic oligonucleotide
ctctagctcgtgtattttcttagtatagtc

SEQ ID NO: 450885 - DNA, 30 bp, Artificial Sequence
  Synthetic oligonucleotide
cacggacgcctgatgcgttttcgtatagtc

SEQ ID NO: 450886 - DNA, 30 bp, Artificial Sequence
  Synthetic oligonucleotide
tgcctgtaaactgtgccagttgtactagtc

SEQ ID NO: 450887 - DNA, 30 bp, Artificial Sequence
  Synthetic oligonucleotide
ggtcttctcttgcatatgacgtacctagtc

SEQ ID NO: 450888 - DNA, 30 bp, Artificial Sequence
  Synthetic oligonucleotide
tatgatgcgtttggggcgtcccgcctagtc

SEQ ID NO: 450889 - DNA, 30 bp, Artificial Sequence
  Synthetic oligonucleotide
ttctttactaagttcttgagtaagctagtc

SEQ ID NO: 450890 - DNA, 30 bp, Artificial Sequence
  Synthetic oligonucleotide
tagcaacgttcagcacagctgatgctagtc

SEQ ID NO: 450891 - DNA, 30 bp, Artificial Sequence
  Synthetic oligonucleotide
tttgttggtgttgtttgagagctgctagtc

SEQ ID NO: 450892 - DNA, 30 bp, Artificial Sequence
  Synthetic oligonucleotide
ccctttttttctttttaaatctctctagtc

SEQ ID NO: 450893 - DNA, 30 bp, Artificial Sequence
  Synthetic oligonucleotide
cgctaacggctatccgaacgcattctagtc

SEQ ID NO: 450894 - DNA, 30 bp, Artificial Sequence
  Synthetic oligonucleotide
ttaaagcttatgaacgctggtcaagtagtc

SEQ ID NO: 450895 - DNA, 30 bp, Artificial Sequence
  Synthetic oligonucleotide
cgggtaaagacggccttttcttacgtagtc

SEQ ID NO: 450896 - DNA, 30 bp, Artificial Sequence
  Synthetic oligonucleotide
tcagaccagtgacactgcctcatcgtagtc

SEQ ID NO: 450897 - DNA, 30 bp, Artificial Sequence
  Synthetic oligonucleotide
gttttagttcggattgaaactggattagtc

SEQ ID NO: 450898 - DNA, 30 bp, Artificial Sequence
  Synthetic oligonucleotide
ggcttggggccgctaagattgttattagtc

SEQ ID NO: 450899 - DNA, 30 bp, Artificial Sequence
  Synthetic oligonucleotide
cttgcagatacacggcacgttcacttagtc

SEQ ID NO: 450900 - DNA, 30 bp, Artificial Sequence
  Synthetic oligonucleotide
tagccttccggacttcttttaaagttagtc

SEQ ID NO: 450901 - DNA, 30 bp, Artificial Sequence
  Synthetic oligonucleotide
tgtatttagggcagaacgtttaatttagtc

SEQ ID NO: 450902 - DNA, 30 bp, Artificial Sequence
  Synthetic oligonucleotide
gtacatccgcattcaggaacggctttagtc

SEQ ID NO: 450903 - DNA, 30 bp, Artificial Sequence
  Synthetic oligonucleotide
caaacttgtgggggcgattaatctttagtc

SEQ ID NO: 450904 - DNA, 30 bp, Artificial Sequence
  Synthetic oligonucleotide
tgatttgtggtatcccaagaatttttagtc

SEQ ID NO: 450905 - DNA, 30 bp, Artificial Sequence
  Synthetic oligonucleotide
taagaagactctgatgttcgagagaacgtc

SEQ ID NO: 450906 - DNA, 30 bp, Artificial Sequence
  Synthetic oligonucleotide
ttaaaaacacgtttggccctgtggaacgtc

SEQ ID NO: 450907 - DNA, 30 bp, Artificial Sequence
  Synthetic oligonucleotide
gtacataaggagttcacctggaaacacgtc

SEQ ID NO: 450908 - DNA, 30 bp, Artificial Sequence
  Synthetic oligonucleotide
ttttgcagatacgggtatctataacacgtc

SEQ ID NO: 450909 - DNA, 30 bp, Artificial Sequence
  Synthetic oligonucleotide
ttcgcagcatcgattaccaggttacacgtc

SEQ ID NO: 450910 - DNA, 30 bp, Artificial Sequence
  Synthetic oligonucleotide
aacacacgctacaaggggcccttccacgtc

SEQ ID NO: 450911 - DNA, 30 bp, Artificial Sequence
  Synthetic oligonucleotide
accaatctcgttttgtgcgggtatcacgtc

SEQ ID NO: 450912 - DNA, 30 bp, Artificial Sequence
  Synthetic oligonucleotide
ggagatcattgcaggacgtgtattcacgtc

SEQ ID NO: 450913 - DNA, 30 bp, Artificial Sequence
  Synthetic oligonucleotide
gctattactcgctttaccccaaaagacgtc

SEQ ID NO: 450914 - DNA, 30 bp, Artificial Sequence
  Synthetic oligonucleotide
gtttggcattggctacattatttagacgtc

SEQ ID NO: 450915 - DNA, 30 bp, Artificial Sequence
  Synthetic oligonucleotide
taaagctagtcacaatatttatacgacgtc

SEQ ID NO: 450916 - DNA, 30 bp, Artificial Sequence
  Synthetic oligonucleotide
cctcctaacagtatccaccggtacgacgtc

SEQ ID NO: 450917 - DNA, 30 bp, Artificial Sequence
  Synthetic oligonucleotide
atacggcggtaagttttcggtaccgacgtc

SEQ ID NO: 450918 - DNA, 30 bp, Artificial Sequence
  Synthetic oligonucleotide
gattctgagcggaatactcgtgtcgacgtc

SEQ ID NO: 450919 - DNA, 30 bp, Artificial Sequence
  Synthetic oligonucleotide
gactggggaatccggaggataggggacgtc

SEQ ID NO: 450920 - DNA, 30 bp, Artificial Sequence
  Synthetic oligonucleotide
gattgctggtatgattctagcgctgacgtc

SEQ ID NO: 450921 - DNA, 30 bp, Artificial Sequence
  Synthetic oligonucleotide
agtgagccgcgaaaagctgtaattgacgtc

SEQ ID NO: 450922 - DNA, 30 bp, Artificial Sequence
  Synthetic oligonucleotide
tggagacttcaccgcaggtttaagtacgtc

SEQ ID NO: 450923 - DNA, 30 bp, Artificial Sequence
  Synthetic oligonucleotide
ttagatagtagggccgcagtgggttacgtc

SEQ ID NO: 450924 - DNA, 30 bp, Artificial Sequence
  Synthetic oligonucleotide
ggcacccaggttgcgagtaagccacccgtc

SEQ ID NO: 450925 - DNA, 30 bp, Artificial Sequence
  Synthetic oligonucleotide
ttgaagatttatggaatgagatgacccgtc

SEQ ID NO: 450926 - DNA, 30 bp, Artificial Sequence
  Synthetic oligonucleotide
gcaacgactaccgtttgaggcactcccgtc

SEQ ID NO: 450927 - DNA, 30 bp, Artificial Sequence
  Synthetic oligonucleotide
tgccttgtggtcgtttatttatgtcccgtc

SEQ ID NO: 450928 - DNA, 30 bp, Artificial Sequence
  Synthetic oligonucleotide
gaaaggtcaaggccccggggatacgccgtc

SEQ ID NO: 450929 - DNA, 30 bp, Artificial Sequence
  Synthetic oligonucleotide
ggctcctactatgtggccgctaaggccgtc

SEQ ID NO: 450930 - DNA, 30 bp, Artificial Sequence
  Synthetic oligonucleotide
cactgacggtgtcggaatccctaatccgtc

SEQ ID NO: 450931 - DNA, 28 bp, Artificial Sequence
  Synthetic oligonucleotide
gtgaggtatcagtacggtctcatccgtc

SEQ ID NO: 450932 - DNA, 30 bp, Artificial Sequence
  Synthetic oligonucleotide
tgtactaaaagtacggcccggagttccgtc

SEQ ID NO: 450933 - DNA, 30 bp, Artificial Sequence
  Synthetic oligonucleotide
gaatattgttgcggtcgtatgtaaagcgtc

SEQ ID NO: 450934 - DNA, 30 bp, Artificial Sequence
  Synthetic oligonucleotide
cacacccattgggtgtaatacccaagcgtc

SEQ ID NO: 450935 - DNA, 31 bp, Artificial Sequence
  Synthetic oligonucleotide
gtcccatacgcctcacgattaattaagcgtc

SEQ ID NO: 450936 - DNA, 30 bp, Artificial Sequence
  Synthetic oligonucleotide
gtcatcaaattttaataaccacacagcgtc

SEQ ID NO: 450937 - DNA, 30 bp, Artificial Sequence
  Synthetic oligonucleotide
ctcaaggcctcgaagggggaatgcagcgtc

SEQ ID NO: 450938 - DNA, 30 bp, Artificial Sequence
  Synthetic oligonucleotide
ggaatcgcagagtctgttcagatgagcgtc

SEQ ID NO: 450939 - DNA, 30 bp, Artificial Sequence
  Synthetic oligonucleotide
ggtttcaggacaccggtctacggtagcgtc

SEQ ID NO: 450940 - DNA, 30 bp, Artificial Sequence
  Synthetic oligonucleotide
cctacctagtggtaatgctgtacacgcgtc

SEQ ID NO: 450941 - DNA, 30 bp, Artificial Sequence
  Synthetic oligonucleotide
gaatctaccgcaatacagctatgacgcgtc

SEQ ID NO: 450942 - DNA, 30 bp, Artificial Sequence
  Synthetic oligonucleotide
tttgttttctaaacaacccgggtacgcgtc

SEQ ID NO: 450943 - DNA, 30 bp, Artificial Sequence
  Synthetic oligonucleotide
gggtcttctcttagggttcaagaccgcgtc

SEQ ID NO: 450944 - DNA, 30 bp, Artificial Sequence
  Synthetic oligonucleotide
tcatcagctcgacaccgcttctaccgcgtc

SEQ ID NO: 450945 - DNA, 30 bp, Artificial Sequence
  Synthetic oligonucleotide
ttacatacaatcgtgtcccgcagccgcgtc

SEQ ID NO: 450946 - DNA, 30 bp, Artificial Sequence
  Synthetic oligonucleotide
aatacgcaggctaacttttgagcgcgcgtc

SEQ ID NO: 450947 - DNA, 30 bp, Artificial Sequence
  Synthetic oligonucleotide
acaggcaccgagcggctccgtgggcgcgtc

SEQ ID NO: 450948 - DNA, 30 bp, Artificial Sequence
  Synthetic oligonucleotide
atagttaacgacgtcagtgcgtgtcgcgtc

SEQ ID NO: 450949 - DNA, 30 bp, Artificial Sequence
  Synthetic oligonucleotide
gtactcctcatagagctcggcccaggcgtc

SEQ ID NO: 450950 - DNA, 30 bp, Artificial Sequence
  Synthetic oligonucleotide
gcaaacaccgccaggtctaagccaggcgtc

SEQ ID NO: 450951 - DNA, 30 bp, Artificial Sequence
  Synthetic oligonucleotide
cagccgactgcacagttcgtagtaggcgtc

SEQ ID NO: 450952 - DNA, 30 bp, Artificial Sequence
  Synthetic oligonucleotide
atgctttcagccccgtttaggccgggcgtc

SEQ ID NO: 450953 - DNA, 30 bp, Artificial Sequence
  Synthetic oligonucleotide
gtcttttcccggaaccaatcgcgctgcgtc

SEQ ID NO: 450954 - DNA, 30 bp, Artificial Sequence
  Synthetic oligonucleotide
gtagcgggtgatatacctattccgtgcgtc

SEQ ID NO: 450955 - DNA, 30 bp, Artificial Sequence
  Synthetic oligonucleotide
tcgctagcgggcccatgcggtttttgcgtc

SEQ ID NO: 450956 - DNA, 30 bp, Artificial Sequence
  Synthetic oligonucleotide
ggattcgttacgtcgccagctgcaatcgtc

SEQ ID NO: 450957 - DNA, 30 bp, Artificial Sequence
  Synthetic oligonucleotide
tgcaaggatagacgctacgcgcacatcgtc

SEQ ID NO: 450958 - DNA, 30 bp, Artificial Sequence
  Synthetic oligonucleotide
cttcgctgacctgttaggagccccatcgtc

SEQ ID NO: 450959 - DNA, 30 bp, Artificial Sequence
  Synthetic oligonucleotide
ggcccgtggttccgagatgcgtctatcgtc

SEQ ID NO: 450960 - DNA, 30 bp, Artificial Sequence
  Synthetic oligonucleotide
catctccgagtcccggctgaatccctcgtc

SEQ ID NO: 450961 - DNA, 30 bp, Artificial Sequence
  Synthetic oligonucleotide
gccaacggagccggacctacggggctcgtc

SEQ ID NO: 450962 - DNA, 30 bp, Artificial Sequence
  Synthetic oligonucleotide
gtgcttggcccacgcatggaggatctcgtc

SEQ ID NO: 450963 - DNA, 30 bp, Artificial Sequence
  Synthetic oligonucleotide
cccgttatacatagctatcgtggtctcgtc

SEQ ID NO: 450964 - DNA, 30 bp, Artificial Sequence
  Synthetic oligonucleotide
tttgcatctagcaacaaaaaagacgtcgtc

SEQ ID NO: 450965 - DNA, 30 bp, Artificial Sequence
  Synthetic oligonucleotide
tgtccgacaggttgccacgtaatggtcgtc

SEQ ID NO: 450966 - DNA, 30 bp, Artificial Sequence
  Synthetic oligonucleotide
tagaggggacctttggcagtatacttcgtc

SEQ ID NO: 450967 - DNA, 30 bp, Artificial Sequence
  Synthetic oligonucleotide
agcagtacaaagcgcggtcgcggcttcgtc

SEQ ID NO: 450968 - DNA, 30 bp, Artificial Sequence
  Synthetic oligonucleotide
ctcgaataactccgtatagattagttcgtc

SEQ ID NO: 450969 - DNA, 30 bp, Artificial Sequence
  Synthetic oligonucleotide
aaccgggcgggtcgaacgacatcgttcgtc

SEQ ID NO: 450970 - DNA, 30 bp, Artificial Sequence
  Synthetic oligonucleotide
aaatgtcagagacctcctctgattttcgtc

SEQ ID NO: 450971 - DNA, 30 bp, Artificial Sequence
  Synthetic oligonucleotide
aacctttgaaaggacaaaagcataaaggtc

SEQ ID NO: 450972 - DNA, 30 bp, Artificial Sequence
  Synthetic oligonucleotide
taagaccgcagccatctaccatcgaaggtc

SEQ ID NO: 450973 - DNA, 30 bp, Artificial Sequence
  Synthetic oligonucleotide
gagcaggggcagggagcccggttgaaggtc

SEQ ID NO: 450974 - DNA, 30 bp, Artificial Sequence
  Synthetic oligonucleotide
ctaatagcttctggcgtagacagtaaggtc

SEQ ID NO: 450975 - DNA, 30 bp, Artificial Sequence
  Synthetic oligonucleotide
gtttgatcattaagacacgctcaacaggtc

SEQ ID NO: 450976 - DNA, 30 bp, Artificial Sequence
  Synthetic oligonucleotide
atcgcctaatgccacgggcgatgacaggtc

SEQ ID NO: 450977 - DNA, 30 bp, Artificial Sequence
  Synthetic oligonucleotide
ctgttcgttaagttgcgcggacgccaggtc

SEQ ID NO: 450978 - DNA, 30 bp, Artificial Sequence
  Synthetic oligonucleotide
tcgccgaataggtaggccatggcgcaggtc

SEQ ID NO: 450979 - DNA, 30 bp, Artificial Sequence
  Synthetic oligonucleotide
gagctgggccttgttaacatagtgcaggtc

SEQ ID NO: 450980 - DNA, 30 bp, Artificial Sequence
  Synthetic oligonucleotide
tttaagcgtaacatcacatatattcaggtc

SEQ ID NO: 450981 - DNA, 30 bp, Artificial Sequence
  Synthetic oligonucleotide
cagcactacgcccgatgactgtttcaggtc

SEQ ID NO: 450982 - DNA, 30 bp, Artificial Sequence
  Synthetic oligonucleotide
tggagaaggccactttgtttacaagaggtc

SEQ ID NO: 450983 - DNA, 30 bp, Artificial Sequence
  Synthetic oligonucleotide
tcttgtccgctgcgtccgcctagagaggtc

SEQ ID NO: 450984 - DNA, 30 bp, Artificial Sequence
  Synthetic oligonucleotide
caatgatgaaccacaaccacaaccgaggtc

SEQ ID NO: 450985 - DNA, 30 bp, Artificial Sequence
  Synthetic oligonucleotide
ctgctgccgtaggagtctttatccgaggtc

SEQ ID NO: 450986 - DNA, 30 bp, Artificial Sequence
  Synthetic oligonucleotide
tattagaataggagtgagcgcgaggaggtc

SEQ ID NO: 450987 - DNA, 30 bp, Artificial Sequence
  Synthetic oligonucleotide
gtgttgacaacctccgcaccaggggaggtc

SEQ ID NO: 450988 - DNA, 30 bp, Artificial Sequence
  Synthetic oligonucleotide
gcttagaactatgtattcttacatgaggtc

SEQ ID NO: 450989 - DNA, 30 bp, Artificial Sequence
  Synthetic oligonucleotide
aaagataagtttccccggaggagataggtc

SEQ ID NO: 450990 - DNA, 30 bp, Artificial Sequence
  Synthetic oligonucleotide
tggtcccccggcagcgcaacatgataggtc

SEQ ID NO: 450991 - DNA, 30 bp, Artificial Sequence
  Synthetic oligonucleotide
aatccgacgacaaaattgatagactaggtc

SEQ ID NO: 450992 - DNA, 30 bp, Artificial Sequence
  Synthetic oligonucleotide
atttggtacacgcatcgtgagaattaggtc

SEQ ID NO: 450993 - DNA, 30 bp, Artificial Sequence
  Synthetic oligonucleotide
ttgcgtattataagcagacatgtttaggtc

SEQ ID NO: 450994 - DNA, 30 bp, Artificial Sequence
  Synthetic oligonucleotide
attttgagtgtgagtgtagagttttaggtc

SEQ ID NO: 450995 - DNA, 30 bp, Artificial Sequence
  Synthetic oligonucleotide
taagcactcactgcataggtagcaacggtc

SEQ ID NO: 450996 - DNA, 30 bp, Artificial Sequence
  Synthetic oligonucleotide
gtagtacttcactcccatggtataacggtc

SEQ ID NO: 450997 - DNA, 30 bp, Artificial Sequence
  Synthetic oligonucleotide
gcttcgagagaatcggatattttaacggtc

SEQ ID NO: 450998 - DNA, 30 bp, Artificial Sequence
  Synthetic oligonucleotide
taaatcgacaggatggtcggagacacggtc

SEQ ID NO: 450999 - DNA, 30 bp, Artificial Sequence
  Synthetic oligonucleotide
tgttaaggtaccgtcgcgtgcgacacggtc

SEQ ID NO: 451000 - DNA, 30 bp, Artificial Sequence
  Synthetic oligonucleotide
gctgactcgtccatttagtatgccacggtc

SEQ ID NO: 451001 - DNA, 30 bp, Artificial Sequence
  Synthetic oligonucleotide
gaaagggtatctaccgctgaagtcacggtc

SEQ ID NO: 451002 - DNA, 30 bp, Artificial Sequence
  Synthetic oligonucleotide
gctctgaaatgaattgcagcggagacggtc

SEQ ID NO: 451003 - DNA, 30 bp, Artificial Sequence
  Synthetic oligonucleotide
gagaagtttcgattttcgtgaatgacggtc

SEQ ID NO: 451004 - DNA, 30 bp, Artificial Sequence
  Synthetic oligonucleotide
ttccacgcaacctacggtgttaacccggtc

SEQ ID NO: 451005 - DNA, 30 bp, Artificial Sequence
  Synthetic oligonucleotide
attcaagcccacgaaggcgatcagccggtc

SEQ ID NO: 451006 - DNA, 30 bp, Artificial Sequence
  Synthetic oligonucleotide
catgcagcatcaacctttgttactccggtc

SEQ ID NO: 451007 - DNA, 30 bp, Artificial Sequence
  Synthetic oligonucleotide
tggtaaaataatcgatatcatgaagcggtc

SEQ ID NO: 451008 - DNA, 30 bp, Artificial Sequence
  Synthetic oligonucleotide
cctaatagtgattttcacggtgcggcggtc

SEQ ID NO: 451009 - DNA, 30 bp, Artificial Sequence
  Synthetic oligonucleotide
gtggtattagaatagtcaatggatgcggtc

SEQ ID NO: 451010 - DNA, 30 bp, Artificial Sequence
  Synthetic oligonucleotide
taactcatacttgatgcatcgagtgcggtc

SEQ ID NO: 451011 - DNA, 30 bp, Artificial Sequence
  Synthetic oligonucleotide
ccggattgaccggatgctacccgtgcggtc

SEQ ID NO: 451012 - DNA, 30 bp, Artificial Sequence
  Synthetic oligonucleotide
aaataagactgctgcagtggatgtgcggtc

SEQ ID NO: 451013 - DNA, 30 bp, Artificial Sequence
  Synthetic oligonucleotide
ttctaattccagcggatcactatctcggtc

SEQ ID NO: 451014 - DNA, 30 bp, Artificial Sequence
  Synthetic oligonucleotide
aataagcgtagcttcaccgttgtctcggtc

SEQ ID NO: 451015 - DNA, 30 bp, Artificial Sequence
  Synthetic oligonucleotide
gtaatcagcctccatatgacatagtcggtc

SEQ ID NO: 451016 - DNA, 30 bp, Artificial Sequence
  Synthetic oligonucleotide
aagaattgacccaccatagctttaagggtc

SEQ ID NO: 451017 - DNA, 30 bp, Artificial Sequence
  Synthetic oligonucleotide
aaaagaggctattgagactttttaagggtc

SEQ ID NO: 451018 - DNA, 30 bp, Artificial Sequence
  Synthetic oligonucleotide
cgtatgggtccaaaccggcctccgagggtc

SEQ ID NO: 451019 - DNA, 30 bp, Artificial Sequence
  Synthetic oligonucleotide
ggaggctcctttggcataggaaggagggtc

SEQ ID NO: 451020 - DNA, 30 bp, Artificial Sequence
  Synthetic oligonucleotide
tgtcaattcctttgcagcccatatagggtc

SEQ ID NO: 451021 - DNA, 30 bp, Artificial Sequence
  Synthetic oligonucleotide
tcagccaccagtaaatgtcggccacgggtc

SEQ ID NO: 451022 - DNA, 30 bp, Artificial Sequence
  Synthetic oligonucleotide
gaaagtattatcgaacggcatagccgggtc

SEQ ID NO: 451023 - DNA, 30 bp, Artificial Sequence
  Synthetic oligonucleotide
cagttgtccagatgcttgttatcgcgggtc

SEQ ID NO: 451024 - DNA, 30 bp, Artificial Sequence
  Synthetic oligonucleotide
tggcgacgctgaaaatgtcatagtcgggtc

SEQ ID NO: 451025 - DNA, 30 bp, Artificial Sequence
  Synthetic oligonucleotide
ggcaccgttcgagatcttgcacaaggggtc

SEQ ID NO: 451026 - DNA, 30 bp, Artificial Sequence
  Synthetic oligonucleotide
tccttaggtcaaagtacgaccggaggggtc

SEQ ID NO: 451027 - DNA, 30 bp, Artificial Sequence
  Synthetic oligonucleotide
ttcatatatagcagcgacaatggcggggtc

SEQ ID NO: 451028 - DNA, 30 bp, Artificial Sequence
  Synthetic oligonucleotide
ccaccacataacaaaagtccccatggggtc

SEQ ID NO: 451029 - DNA, 30 bp, Artificial Sequence
  Synthetic oligonucleotide
acgtaagttgttaataaatcaactggggtc

SEQ ID NO: 451030 - DNA, 30 bp, Artificial Sequence
  Synthetic oligonucleotide
cggagtgacacacccattacataatgggtc

SEQ ID NO: 451031 - DNA, 30 bp, Artificial Sequence
  Synthetic oligonucleotide
gattgtctgttggcggtcggtgtatgggtc

SEQ ID NO: 451032 - DNA, 30 bp, Artificial Sequence
  Synthetic oligonucleotide
aagacagattaaaagttaactttatgggtc

SEQ ID NO: 451033 - DNA, 30 bp, Artificial Sequence
  Synthetic oligonucleotide
tatgaaagttaatatgatcacgtctgggtc

SEQ ID NO: 451034 - DNA, 30 bp, Artificial Sequence
  Synthetic oligonucleotide
gcaggcaacctcaggcgtgtgccgtgggtc

SEQ ID NO: 451035 - DNA, 30 bp, Artificial Sequence
  Synthetic oligonucleotide
ctttaacgattgttctaggtagtgtgggtc

SEQ ID NO: 451036 - DNA, 30 bp, Artificial Sequence
  Synthetic oligonucleotide
gtaacgagccacttattttttcaaatggtc

SEQ ID NO: 451037 - DNA, 30 bp, Artificial Sequence
  Synthetic oligonucleotide
ctccaacggcactgtgtttggcggatggtc

SEQ ID NO: 451038 - DNA, 30 bp, Artificial Sequence
  Synthetic oligonucleotide
ttttcctgcatttggttgagtgtgatggtc

SEQ ID NO: 451039 - DNA, 30 bp, Artificial Sequence
  Synthetic oligonucleotide
tgtgtgcctagcttgaccgtagttatggtc

SEQ ID NO: 451040 - DNA, 30 bp, Artificial Sequence
  Synthetic oligonucleotide
tctacgctcatgagctctagaatcctggtc

SEQ ID NO: 451041 - DNA, 30 bp, Artificial Sequence
  Synthetic oligonucleotide
gtcttattggtagttgttattatcctggtc

SEQ ID NO: 451042 - DNA, 30 bp, Artificial Sequence
  Synthetic oligonucleotide
agggttcctcctcaccggcaaaggctggtc

SEQ ID NO: 451043 - DNA, 30 bp, Artificial Sequence
  Synthetic oligonucleotide
ggaaaaagtattgggtggttcctgctggtc

SEQ ID NO: 451044 - DNA, 30 bp, Artificial Sequence
  Synthetic oligonucleotide
gctatgtatgtgtaccaaaacgctctggtc

SEQ ID NO: 451045 - DNA, 30 bp, Artificial Sequence
  Synthetic oligonucleotide
atgggtaggatcgcagggggtagtctggtc

SEQ ID NO: 451046 - DNA, 30 bp, Artificial Sequence
  Synthetic oligonucleotide
agtctgcgaagccttgttccttgtctggtc

SEQ ID NO: 451047 - DNA, 30 bp, Artificial Sequence
  Synthetic oligonucleotide
ctactgcttagaggtaatcgcgatgtggtc

SEQ ID NO: 451048 - DNA, 30 bp, Artificial Sequence
  Synthetic oligonucleotide
gcgcggagacctgctcggtcacctgtggtc

SEQ ID NO: 451049 - DNA, 30 bp, Artificial Sequence
  Synthetic oligonucleotide
atcagggtttatgtggacgaatctgtggtc

SEQ ID NO: 451050 - DNA, 30 bp, Artificial Sequence
  Synthetic oligonucleotide
gttataaggaagatggtagtttgtgtggtc

SEQ ID NO: 451051 - DNA, 30 bp, Artificial Sequence
  Synthetic oligonucleotide
tcatttatcttaccttctgcccttgtggtc

SEQ ID NO: 451052 - DNA, 30 bp, Artificial Sequence
  Synthetic oligonucleotide
cggcgtgcgggtattaccaagttattggtc

SEQ ID NO: 451053 - DNA, 30 bp, Artificial Sequence
  Synthetic oligonucleotide
attgctaggccagggttgcagcccttggtc

SEQ ID NO: 451054 - DNA, 30 bp, Artificial Sequence
  Synthetic oligonucleotide
tttgaagggtgcattcattagcccttggtc

SEQ ID NO: 451055 - DNA, 30 bp, Artificial Sequence
  Synthetic oligonucleotide
tcatctggtgcagtcgaaaccggcttggtc

SEQ ID NO: 451056 - DNA, 30 bp, Artificial Sequence
  Synthetic oligonucleotide
gagtaacccttactcacgaactgcttggtc

SEQ ID NO: 451057 - DNA, 30 bp, Artificial Sequence
  Synthetic oligonucleotide
ctccgcaagaggggggccggatagttggtc

SEQ ID NO: 451058 - DNA, 30 bp, Artificial Sequence
  Synthetic oligonucleotide
gcagactcaccaatgcgtgtatcgttggtc

SEQ ID NO: 451059 - DNA, 30 bp, Artificial Sequence
  Synthetic oligonucleotide
tctataatcattcgatgcaataggttggtc

SEQ ID NO: 451060 - DNA, 30 bp, Artificial Sequence
  Synthetic oligonucleotide
ttgaaatcgcttggtgcagctcctttggtc

SEQ ID NO: 451061 - DNA, 30 bp, Artificial Sequence
  Synthetic oligonucleotide
caccttgaagacaacaacgcataaaatgtc

SEQ ID NO: 451062 - DNA, 30 bp, Artificial Sequence
  Synthetic oligonucleotide
ttacactgacatatgacatccgcaaatgtc

SEQ ID NO: 451063 - DNA, 30 bp, Artificial Sequence
  Synthetic oligonucleotide
actttatggtcacacttcatgtacaatgtc

SEQ ID NO: 451064 - DNA, 30 bp, Artificial Sequence
  Synthetic oligonucleotide
atcgcaaacacaaacgatgtctccaatgtc

SEQ ID NO: 451065 - DNA, 31 bp, Artificial Sequence
  Synthetic oligonucleotide
cagagtcttgacggatattgttgtcaatgtc

SEQ ID NO: 451066 - DNA, 30 bp, Artificial Sequence
  Synthetic oligonucleotide
ttgggggctagttcatcctatgagaatgtc

SEQ ID NO: 451067 - DNA, 30 bp, Artificial Sequence
  Synthetic oligonucleotide
taccgtacacatttgactttttttaatgtc

SEQ ID NO: 451068 - DNA, 30 bp, Artificial Sequence
  Synthetic oligonucleotide
agttaacgtgcgcaaatcatgacacatgtc

SEQ ID NO: 451069 - DNA, 30 bp, Artificial Sequence
  Synthetic oligonucleotide
gtcaaatagttaagatgatcgcgacatgtc

SEQ ID NO: 451070 - DNA, 30 bp, Artificial Sequence
  Synthetic oligonucleotide
gagtattcggatagtagcattatccatgtc

SEQ ID NO: 451071 - DNA, 30 bp, Artificial Sequence
  Synthetic oligonucleotide
ataagccctgccctcacggtatatcatgtc

SEQ ID NO: 451072 - DNA, 30 bp, Artificial Sequence
  Synthetic oligonucleotide
gcctatctgaccgttagtagggaggatgtc

SEQ ID NO: 451073 - DNA, 30 bp, Artificial Sequence
  Synthetic oligonucleotide
gataggatacacgcaacggaatatgatgtc

SEQ ID NO: 451074 - DNA, 30 bp, Artificial Sequence
  Synthetic oligonucleotide
gcccgtgctggttctagacgtactgatgtc

SEQ ID NO: 451075 - DNA, 30 bp, Artificial Sequence
  Synthetic oligonucleotide
gcatctctacgccgtaataggcttgatgtc

SEQ ID NO: 451076 - DNA, 30 bp, Artificial Sequence
  Synthetic oligonucleotide
cgcatgttgcgcatagtacaagaatatgtc

SEQ ID NO: 451077 - DNA, 30 bp, Artificial Sequence
  Synthetic oligonucleotide
tcggaagggtaagtacaactgtgatatgtc

SEQ ID NO: 451078 - DNA, 30 bp, Artificial Sequence
  Synthetic oligonucleotide
tcaaagagttttattgtcaacctatatgtc

SEQ ID NO: 451079 - DNA, 30 bp, Artificial Sequence
  Synthetic oligonucleotide
gaatagggacttttttaatgtcgctatgtc

SEQ ID NO: 451080 - DNA, 30 bp, Artificial Sequence
  Synthetic oligonucleotide
tttatgatgagcgctaaaagtgcgtatgtc

SEQ ID NO: 451081 - DNA, 30 bp, Artificial Sequence
  Synthetic oligonucleotide
attcttccccgggaatgagaatcgtatgtc

SEQ ID NO: 451082 - DNA, 30 bp, Artificial Sequence
  Synthetic oligonucleotide
ttcaatgcttcgttacaaagtaggtatgtc

SEQ ID NO: 451083 - DNA, 30 bp, Artificial Sequence
  Synthetic oligonucleotide
ctatgaagtatcagtcaagtttattatgtc

SEQ ID NO: 451084 - DNA, 30 bp, Artificial Sequence
  Synthetic oligonucleotide
ctatagtttatagttaagagcggaactgtc

SEQ ID NO: 451085 - DNA, 30 bp, Artificial Sequence
  Synthetic oligonucleotide
gtgatacgattatatgcgctacgcactgtc

SEQ ID NO: 451086 - DNA, 30 bp, Artificial Sequence
  Synthetic oligonucleotide
aactttgcctctggacacacggtcactgtc

SEQ ID NO: 451087 - DNA, 30 bp, Artificial Sequence
  Synthetic oligonucleotide
gagtgatatcatcgaaccgaaaggactgtc

SEQ ID NO: 451088 - DNA, 30 bp, Artificial Sequence
  Synthetic oligonucleotide
tcaagcttagtatttgaaccccggactgtc

SEQ ID NO: 451089 - DNA, 30 bp, Artificial Sequence
  Synthetic oligonucleotide
cagaaattaacggcccctttggctactgtc

SEQ ID NO: 451090 - DNA, 30 bp, Artificial Sequence
  Synthetic oligonucleotide
ttcgtgaggaacgaggtcaattttactgtc

SEQ ID NO: 451091 - DNA, 30 bp, Artificial Sequence
  Synthetic oligonucleotide
atgctgtttttaggcggcggttgtcctgtc

SEQ ID NO: 451092 - DNA, 30 bp, Artificial Sequence
  Synthetic oligonucleotide
ctaactctgtgcgtatcgataattcctgtc

SEQ ID NO: 451093 - DNA, 30 bp, Artificial Sequence
  Synthetic oligonucleotide
aaaagccaggttgttgaagcaaacgctgtc

SEQ ID NO: 451094 - DNA, 30 bp, Artificial Sequence
  Synthetic oligonucleotide
caattgttaaaagtctgcttgtacgctgtc

SEQ ID NO: 451095 - DNA, 30 bp, Artificial Sequence
  Synthetic oligonucleotide
caatccgttttaactggagcatatgctgtc

SEQ ID NO: 451096 - DNA, 30 bp, Artificial Sequence
  Synthetic oligonucleotide
cactcggaacttttcccctcctattctgtc

SEQ ID NO: 451097 - DNA, 30 bp, Artificial Sequence
  Synthetic oligonucleotide
gtggccctaccagagtgaggtgcttctgtc

SEQ ID NO: 451098 - DNA, 30 bp, Artificial Sequence
  Synthetic oligonucleotide
ctcctcgtcgaagggattaagatttctgtc

SEQ ID NO: 451099 - DNA, 30 bp, Artificial Sequence
  Synthetic oligonucleotide
aaaattagttagtcgggaattggaagtgtc

SEQ ID NO: 451100 - DNA, 30 bp, Artificial Sequence
  Synthetic oligonucleotide
aatctcgaatggtggccacaggtaagtgtc

SEQ ID NO: 451101 - DNA, 30 bp, Artificial Sequence
  Synthetic oligonucleotide
attcagacgtctatagaggcattaagtgtc

SEQ ID NO: 451102 - DNA, 30 bp, Artificial Sequence
  Synthetic oligonucleotide
tctgctctcttgcggttgataaacagtgtc

SEQ ID NO: 451103 - DNA, 30 bp, Artificial Sequence
  Synthetic oligonucleotide
gttacgcagattcgaaataagcatagtgtc

SEQ ID NO: 451104 - DNA, 30 bp, Artificial Sequence
  Synthetic oligonucleotide
agtgataattcactctcgatcgttagtgtc

SEQ ID NO: 451105 - DNA, 30 bp, Artificial Sequence
  Synthetic oligonucleotide
tcaccatgatgcagtcagagcgcacgtgtc

SEQ ID NO: 451106 - DNA, 30 bp, Artificial Sequence
  Synthetic oligonucleotide
atttacccgccataaacaagacagcgtgtc

SEQ ID NO: 451107 - DNA, 30 bp, Artificial Sequence
  Synthetic oligonucleotide
ggccgtgactttcaatcggactggcgtgtc

SEQ ID NO: 451108 - DNA, 30 bp, Artificial Sequence
  Synthetic oligonucleotide
gcaggagctacatgcgttgagagtcgtgtc

SEQ ID NO: 451109 - DNA, 30 bp, Artificial Sequence
  Synthetic oligonucleotide
ctaaatggatgtgggagacctatcggtgtc

SEQ ID NO: 451110 - DNA, 30 bp, Artificial Sequence
  Synthetic oligonucleotide
tgcatggttgtcccggcagcgtagggtgtc

SEQ ID NO: 451111 - DNA, 30 bp, Artificial Sequence
  Synthetic oligonucleotide
ggatgtcagggtaccaatctaggatgtgtc

SEQ ID NO: 451112 - DNA, 30 bp, Artificial Sequence
  Synthetic oligonucleotide
gattatctctatgtatcgcactgctgtgtc

SEQ ID NO: 451113 - DNA, 30 bp, Artificial Sequence
  Synthetic oligonucleotide
gtccaaaaggagctcgacagctgctgtgtc

SEQ ID NO: 451114 - DNA, 30 bp, Artificial Sequence
  Synthetic oligonucleotide
gtcgttgacctttactataggtagtgtgtc

SEQ ID NO: 451115 - DNA, 30 bp, Artificial Sequence
  Synthetic oligonucleotide
atgggtggcatggtagtcgggatgtgtgtc

SEQ ID NO: 451116 - DNA, 30 bp, Artificial Sequence
  Synthetic oligonucleotide
ttcatagcacagcctgattctctgtgtgtc

SEQ ID NO: 451117 - DNA, 30 bp, Artificial Sequence
  Synthetic oligonucleotide
gtaagagtaattttaaactggggttgtgtc

SEQ ID NO: 451118 - DNA, 30 bp, Artificial Sequence
  Synthetic oligonucleotide
ttaggattccgagtaatataagacattgtc

SEQ ID NO: 451119 - DNA, 30 bp, Artificial Sequence
  Synthetic oligonucleotide
agaccagataggttctaggttgacattgtc

SEQ ID NO: 451120 - DNA, 30 bp, Artificial Sequence
  Synthetic oligonucleotide
aatgttgaagtgcgcactgctgtcattgtc

SEQ ID NO: 451121 - DNA, 30 bp, Artificial Sequence
  Synthetic oligonucleotide
gaattctagacgcaatgggctgatattgtc

SEQ ID NO: 451122 - DNA, 30 bp, Artificial Sequence
  Synthetic oligonucleotide
gcactttagggaacgccaggttatattgtc

SEQ ID NO: 451123 - DNA, 30 bp, Artificial Sequence
  Synthetic oligonucleotide
tcatttgtagcgggccctttcattattgtc

SEQ ID NO: 451124 - DNA, 30 bp, Artificial Sequence
  Synthetic oligonucleotide
aattttagcaagtgggggtgtgaccttgtc

SEQ ID NO: 451125 - DNA, 30 bp, Artificial Sequence
  Synthetic oligonucleotide
gaagtcgattactttgtaggcccccttgtc

SEQ ID NO: 451126 - DNA, 30 bp, Artificial Sequence
  Synthetic oligonucleotide
agtcctaatgcttggccaaacgcgcttgtc

SEQ ID NO: 451127 - DNA, 30 bp, Artificial Sequence
  Synthetic oligonucleotide
cgagagatccaaattccaccagatcttgtc

SEQ ID NO: 451128 - DNA, 30 bp, Artificial Sequence
  Synthetic oligonucleotide
gggggcctatgtgtgtaaagatgtcttgtc

SEQ ID NO: 451129 - DNA, 30 bp, Artificial Sequence
  Synthetic oligonucleotide
catactgaatcacggtgggtgcaagttgtc

SEQ ID NO: 451130 - DNA, 30 bp, Artificial Sequence
  Synthetic oligonucleotide
gttagtaaagattttgtgttgggagttgtc

SEQ ID NO: 451131 - DNA, 30 bp, Artificial Sequence
  Synthetic oligonucleotide
ggccctacgggacgtcccgcatacgttgtc

SEQ ID NO: 451132 - DNA, 30 bp, Artificial Sequence
  Synthetic oligonucleotide
ttggcagcaaggtactccaacgtcgttgtc

SEQ ID NO: 451133 - DNA, 30 bp, Artificial Sequence
  Synthetic oligonucleotide
acgaaggggacgtgatggtgcacatttgtc

SEQ ID NO: 451134 - DNA, 30 bp, Artificial Sequence
  Synthetic oligonucleotide
agaacaagtcctcatattgtttgatttgtc

SEQ ID NO: 451135 - DNA, 30 bp, Artificial Sequence
  Synthetic oligonucleotide
tgagtttgtgtgtcagtctacatatttgtc

SEQ ID NO: 451136 - DNA, 30 bp, Artificial Sequence
  Synthetic oligonucleotide
gtagaaattggaccatcggtgaactttgtc

SEQ ID NO: 451137 - DNA, 30 bp, Artificial Sequence
  Synthetic oligonucleotide
gacttcctgctggtgggacgggcgtttgtc

SEQ ID NO: 451138 - DNA, 30 bp, Artificial Sequence
  Synthetic oligonucleotide
tgacagccccaaacgctactcgattttgtc

SEQ ID NO: 451139 - DNA, 30 bp, Artificial Sequence
  Synthetic oligonucleotide
tgggggcagcaaaacctaagatattttgtc

SEQ ID NO: 451140 - DNA, 30 bp, Artificial Sequence
  Synthetic oligonucleotide
agcagacttgcaagtatttcatcttttgtc

SEQ ID NO: 451141 - DNA, 30 bp, Artificial Sequence
  Synthetic oligonucleotide
gactcagcagcactgctttacttttttgtc

SEQ ID NO: 451142 - DNA, 30 bp, Artificial Sequence
  Synthetic oligonucleotide
tgacctaaggatagcgcgtcggaaaaattc

SEQ ID NO: 451143 - DNA, 30 bp, Artificial Sequence
  Synthetic oligonucleotide
tgtctcatggtgctcataccgacaaaattc

SEQ ID NO: 451144 - DNA, 30 bp, Artificial Sequence
  Synthetic oligonucleotide
cggctgtggtctgccgcgtgcgtcaaattc

SEQ ID NO: 451145 - DNA, 30 bp, Artificial Sequence
  Synthetic oligonucleotide
ttctgtgtacttgacatagacgagaaattc

SEQ ID NO: 451146 - DNA, 30 bp, Artificial Sequence
  Synthetic oligonucleotide
gctccatgctcccctggttaagggaaattc

SEQ ID NO: 451147 - DNA, 30 bp, Artificial Sequence
  Synthetic oligonucleotide
gtttggcagttcaagccattatggaaattc

SEQ ID NO: 451148 - DNA, 30 bp, Artificial Sequence
  Synthetic oligonucleotide
tgtagggtatatgcccatcaaaataaattc

SEQ ID NO: 451149 - DNA, 30 bp, Artificial Sequence
  Synthetic oligonucleotide
aatttggttaggggatagagatataaattc

SEQ ID NO: 451150 - DNA, 30 bp, Artificial Sequence
  Synthetic oligonucleotide
gcgaaacatgtaatgctgcacgttaaattc

SEQ ID NO: 451151 - DNA, 30 bp, Artificial Sequence
  Synthetic oligonucleotide
atagcagcgattattttaggaacacaattc

SEQ ID NO: 451152 - DNA, 30 bp, Artificial Sequence
  Synthetic oligonucleotide
acttactatgaaagccattgcgcacaattc

SEQ ID NO: 451153 - DNA, 30 bp, Artificial Sequence
  Synthetic oligonucleotide
ccaagccatctgccggcggcaagacaattc

SEQ ID NO: 451154 - DNA, 30 bp, Artificial Sequence
  Synthetic oligonucleotide
gcagcatagcgatgtcgtttcatacaattc

SEQ ID NO: 451155 - DNA, 30 bp, Artificial Sequence
  Synthetic oligonucleotide
tctcagagcttgggtaggacctcccaattc

SEQ ID NO: 451156 - DNA, 30 bp, Artificial Sequence
  Synthetic oligonucleotide
taagtttcatctaaattctttgagcaattc

SEQ ID NO: 451157 - DNA, 30 bp, Artificial Sequence
  Synthetic oligonucleotide
gagggacaaacggggttcctggcgcaattc

SEQ ID NO: 451158 - DNA, 30 bp, Artificial Sequence
  Synthetic oligonucleotide
acttttagtatccggtcataaaatcaattc

SEQ ID NO: 451159 - DNA, 30 bp, Artificial Sequence
  Synthetic oligonucleotide
ggatataccccctcaatgtgggatcaattc

SEQ ID NO: 451160 - DNA, 30 bp, Artificial Sequence
  Synthetic oligonucleotide
aataacatcctctcttttgattatcaattc

SEQ ID NO: 451161 - DNA, 30 bp, Artificial Sequence
  Synthetic oligonucleotide
ttctagtgggcagggcatggtactcaattc

SEQ ID NO: 451162 - DNA, 30 bp, Artificial Sequence
  Synthetic oligonucleotide
aaccatgtttgccagcggtagcaagaattc

SEQ ID NO: 451163 - DNA, 30 bp, Artificial Sequence
  Synthetic oligonucleotide
gcaggtcgctgcacactgtgcggagaattc

SEQ ID NO: 451164 - DNA, 30 bp, Artificial Sequence
  Synthetic oligonucleotide
tctcggcgcaagatttcctcgggagaattc

SEQ ID NO: 451165 - DNA, 30 bp, Artificial Sequence
  Synthetic oligonucleotide
tttcacaaccggttcagacgtgtcgaattc

SEQ ID NO: 451166 - DNA, 30 bp, Artificial Sequence
  Synthetic oligonucleotide
actcggccgtatacggaccaaaaggaattc

SEQ ID NO: 451167 - DNA, 30 bp, Artificial Sequence
  Synthetic oligonucleotide
atgcgaattattgtgagggtaacggaattc

SEQ ID NO: 451168 - DNA, 30 bp, Artificial Sequence
  Synthetic oligonucleotide
ggctagatcgcgcgcgttagagcggaattc

SEQ ID NO: 451169 - DNA, 30 bp, Artificial Sequence
  Synthetic oligonucleotide
tgacatatgctttgtttaatgaatgaattc

SEQ ID NO: 451170 - DNA, 30 bp, Artificial Sequence
  Synthetic oligonucleotide
cctcagttcccacactttatttgtgaattc

SEQ ID NO: 451171 - DNA, 30 bp, Artificial Sequence
  Synthetic oligonucleotide
gatagacgtaatgcaattacggttgaattc

SEQ ID NO: 451172 - DNA, 30 bp, Artificial Sequence
  Synthetic oligonucleotide
gaatgctttaggtgtaggtagtaataattc

SEQ ID NO: 451173 - DNA, 30 bp, Artificial Sequence
  Synthetic oligonucleotide
ccgtctgttgtagcgcccgtgtgctaattc

SEQ ID NO: 451174 - DNA, 30 bp, Artificial Sequence
  Synthetic oligonucleotide
ttcataaggtaaatacacgaggagtaattc

SEQ ID NO: 451175 - DNA, 30 bp, Artificial Sequence
  Synthetic oligonucleotide
gaaaacacgtaacattgacttcgttaattc

SEQ ID NO: 451176 - DNA, 30 bp, Artificial Sequence
  Synthetic oligonucleotide
aggaaaggtcatcttctctatgtttaattc

SEQ ID NO: 451177 - DNA, 30 bp, Artificial Sequence
  Synthetic oligonucleotide
tgtatcgccttacctactgcccaaacattc

SEQ ID NO: 451178 - DNA, 30 bp, Artificial Sequence
  Synthetic oligonucleotide
gctctttcaatgggcacaagcggaacattc

SEQ ID NO: 451179 - DNA, 30 bp, Artificial Sequence
  Synthetic oligonucleotide
gcttgagtaatgacacgcggatgaacattc

SEQ ID NO: 451180 - DNA, 30 bp, Artificial Sequence
  Synthetic oligonucleotide
agcgacgttgctcataatgataagacattc

SEQ ID NO: 451181 - DNA, 30 bp, Artificial Sequence
  Synthetic oligonucleotide
atagatataataataaccgacccgacattc

SEQ ID NO: 451182 - DNA, 30 bp, Artificial Sequence
  Synthetic oligonucleotide
gctgacagattacggcctgcaaatacattc

SEQ ID NO: 451183 - DNA, 31 bp, Artificial Sequence
  Synthetic oligonucleotide
tacagtgggactttgtcggcgtcctacattc

SEQ ID NO: 451184 - DNA, 30 bp, Artificial Sequence
  Synthetic oligonucleotide
tgaatttaagtggtaacaacccttacattc

SEQ ID NO: 451185 - DNA, 29 bp, Artificial Sequence
  Synthetic oligonucleotide
aacctgctaccaagcactcaaaaccattc

SEQ ID NO: 451186 - DNA, 30 bp, Artificial Sequence
  Synthetic oligonucleotide
attgtcctttctgccccaacgggtccattc

SEQ ID NO: 451187 - DNA, 30 bp, Artificial Sequence
  Synthetic oligonucleotide
gtgaataacccggaccaggtcgcagcattc

SEQ ID NO: 451188 - DNA, 30 bp, Artificial Sequence
  Synthetic oligonucleotide
tggatgtgtctcactacaggcggagcattc

SEQ ID NO: 451189 - DNA, 30 bp, Artificial Sequence
  Synthetic oligonucleotide
atattagccgctagtgggaaatgcgcattc

SEQ ID NO: 451190 - DNA, 30 bp, Artificial Sequence
  Synthetic oligonucleotide
agaaagcactattatttatgtctcgcattc

SEQ ID NO: 451191 - DNA, 30 bp, Artificial Sequence
  Synthetic oligonucleotide
cgcagtttgaccgagccataacatgcattc

SEQ ID NO: 451192 - DNA, 30 bp, Artificial Sequence
  Synthetic oligonucleotide
attcgtcagaagatcctagtgatatcattc

SEQ ID NO: 451193 - DNA, 30 bp, Artificial Sequence
  Synthetic oligonucleotide
actatgattcacaagcagcagagctcattc

SEQ ID NO: 451194 - DNA, 30 bp, Artificial Sequence
  Synthetic oligonucleotide
gtctgtgctgcagcgtttttttgctcattc

SEQ ID NO: 451195 - DNA, 30 bp, Artificial Sequence
  Synthetic oligonucleotide
gcgttgagatgtgtagttgggcagtcattc

SEQ ID NO: 451196 - DNA, 30 bp, Artificial Sequence
  Synthetic oligonucleotide
aattgctggcatgaaagccgcccgtcattc

SEQ ID NO: 451197 - DNA, 30 bp, Artificial Sequence
  Synthetic oligonucleotide
cgacaagataaggcgccggagaattcattc

SEQ ID NO: 451198 - DNA, 30 bp, Artificial Sequence
  Synthetic oligonucleotide
aaatccgtaccttccaacacggcttcattc

SEQ ID NO: 451199 - DNA, 30 bp, Artificial Sequence
  Synthetic oligonucleotide
aaccaattgtacgcgtacaagatttcattc

SEQ ID NO: 451200 - DNA, 30 bp, Artificial Sequence
  Synthetic oligonucleotide
tatataatttaacgcaaaaaaaaaagattc

SEQ ID NO: 451201 - DNA, 30 bp, Artificial Sequence
  Synthetic oligonucleotide
aagccggctttgcagtttcaaagcagattc

SEQ ID NO: 451202 - DNA, 30 bp, Artificial Sequence
  Synthetic oligonucleotide
cccccatttgcccgactaagcggcagattc

SEQ ID NO: 451203 - DNA, 30 bp, Artificial Sequence
  Synthetic oligonucleotide
tcgccggcgtacgcagttcaattcagattc

SEQ ID NO: 451204 - DNA, 30 bp, Artificial Sequence
  Synthetic oligonucleotide
atatggaacgcctggtgtaggtatagattc

SEQ ID NO: 451205 - DNA, 30 bp, Artificial Sequence
  Synthetic oligonucleotide
ttctgtgactgaggatacatttatagattc

SEQ ID NO: 451206 - DNA, 30 bp, Artificial Sequence
  Synthetic oligonucleotide
ccacaaaagtgggcggcgttttctagattc

SEQ ID NO: 451207 - DNA, 30 bp, Artificial Sequence
  Synthetic oligonucleotide
ccaggcggtacccactactaaattagattc

SEQ ID NO: 451208 - DNA, 30 bp, Artificial Sequence
  Synthetic oligonucleotide
gtagtctatcccagacagtctattagattc

SEQ ID NO: 451209 - DNA, 30 bp, Artificial Sequence
  Synthetic oligonucleotide
ctaggttcttggtcaaagccagcacgattc

SEQ ID NO: 451210 - DNA, 30 bp, Artificial Sequence
  Synthetic oligonucleotide
gaatcacgtctcccaggatgagaccgattc

SEQ ID NO: 451211 - DNA, 30 bp, Artificial Sequence
  Synthetic oligonucleotide
gaatatatttcatgcaattttcagcgattc

SEQ ID NO: 451212 - DNA, 30 bp, Artificial Sequence
  Synthetic oligonucleotide
ttatgaatgtaactgtgcccgttgcgattc

SEQ ID NO: 451213 - DNA, 30 bp, Artificial Sequence
  Synthetic oligonucleotide
atatgctcacgagagcggtttttgcgattc

SEQ ID NO: 451214 - DNA, 30 bp, Artificial Sequence
  Synthetic oligonucleotide
aagtagtccagtagcatatcacgtcgattc

SEQ ID NO: 451215 - DNA, 30 bp, Artificial Sequence
  Synthetic oligonucleotide
tagacctgcgttaaatttcttgcaggattc

SEQ ID NO: 451216 - DNA, 30 bp, Artificial Sequence
  Synthetic oligonucleotide
ctttctgcgctttctaatgttaagggattc

SEQ ID NO: 451217 - DNA, 30 bp, Artificial Sequence
  Synthetic oligonucleotide
cttcctccccggacgggagtaaatggattc

SEQ ID NO: 451218 - DNA, 30 bp, Artificial Sequence
  Synthetic oligonucleotide
cagctcccataagttcagtagaatggattc

SEQ ID NO: 451219 - DNA, 30 bp, Artificial Sequence
  Synthetic oligonucleotide
gtccggtttgcttgtggacgtcgtggattc

SEQ ID NO: 451220 - DNA, 30 bp, Artificial Sequence
  Synthetic oligonucleotide
tcagtggggtcttgaaggttgtttggattc

SEQ ID NO: 451221 - DNA, 30 bp, Artificial Sequence
  Synthetic oligonucleotide
tctcgtacgcggatcactgggtaatgattc

SEQ ID NO: 451222 - DNA, 30 bp, Artificial Sequence
  Synthetic oligonucleotide
ccatacgcctggtgagttaccaactgattc

SEQ ID NO: 451223 - DNA, 30 bp, Artificial Sequence
  Synthetic oligonucleotide
gcagtttcctaccgctaagtgtactgattc

SEQ ID NO: 451224 - DNA, 30 bp, Artificial Sequence
  Synthetic oligonucleotide
cgagattagcaacagaacctggcctgattc

SEQ ID NO: 451225 - DNA, 30 bp, Artificial Sequence
  Synthetic oligonucleotide
aagtaggtcagagccttggttagttgattc

SEQ ID NO: 451226 - DNA, 30 bp, Artificial Sequence
  Synthetic oligonucleotide
tcagcaaacgagcaccgctcgctttgattc

SEQ ID NO: 451227 - DNA, 30 bp, Artificial Sequence
  Synthetic oligonucleotide
ccagttaccgggtcatattattaaatattc

SEQ ID NO: 451228 - DNA, 30 bp, Artificial Sequence
  Synthetic oligonucleotide
tacagatgtgtatttgtagtcggaatattc

SEQ ID NO: 451229 - DNA, 30 bp, Artificial Sequence
  Synthetic oligonucleotide
ctgctcaatggcagaccttagataatattc

SEQ ID NO: 451230 - DNA, 30 bp, Artificial Sequence
  Synthetic oligonucleotide
gactgggaatgaggtgccatcaccatattc

SEQ ID NO: 451231 - DNA, 30 bp, Artificial Sequence
  Synthetic oligonucleotide
gattaccataataagggtgttggcatattc

SEQ ID NO: 451232 - DNA, 30 bp, Artificial Sequence
  Synthetic oligonucleotide
actgcaccgaagctttcagttacgatattc

SEQ ID NO: 451233 - DNA, 30 bp, Artificial Sequence
  Synthetic oligonucleotide
cgctagtgctattcgttggatgcgatattc

SEQ ID NO: 451234 - DNA, 30 bp, Artificial Sequence
  Synthetic oligonucleotide
gctaaattatcaatgtgtttcatgatattc

SEQ ID NO: 451235 - DNA, 30 bp, Artificial Sequence
  Synthetic oligonucleotide
gtctgaaggacagtgcagaatatgatattc

SEQ ID NO: 451236 - DNA, 30 bp, Artificial Sequence
  Synthetic oligonucleotide
taggacgtagtaatggttttcaatatattc

SEQ ID NO: 451237 - DNA, 30 bp, Artificial Sequence
  Synthetic oligonucleotide
atgtcagttactatactgtaggaactattc

SEQ ID NO: 451238 - DNA, 30 bp, Artificial Sequence
  Synthetic oligonucleotide
aagcctagtagtcgatgggcaatactattc

SEQ ID NO: 451239 - DNA, 30 bp, Artificial Sequence
  Synthetic oligonucleotide
gccctaagtgcattgcacaacaacctattc

SEQ ID NO: 451240 - DNA, 30 bp, Artificial Sequence
  Synthetic oligonucleotide
caatctagagtctctatgattgccctattc

SEQ ID NO: 451241 - DNA, 30 bp, Artificial Sequence
  Synthetic oligonucleotide
agccgactacatatgtcggccagcctattc

SEQ ID NO: 451242 - DNA, 30 bp, Artificial Sequence
  Synthetic oligonucleotide
cttccggtcatttgctggcctcgcctattc

SEQ ID NO: 451243 - DNA, 30 bp, Artificial Sequence
  Synthetic oligonucleotide
tggataaaacaggatctgacaggtctattc

SEQ ID NO: 451244 - DNA, 30 bp, Artificial Sequence
  Synthetic oligonucleotide
aagagtctgtgtatatgtcacggtctattc

SEQ ID NO: 451245 - DNA, 30 bp, Artificial Sequence
  Synthetic oligonucleotide
gcgacatgttcctttgcgacgggtctattc

SEQ ID NO: 451246 - DNA, 30 bp, Artificial Sequence
  Synthetic oligonucleotide
tgtatacaaatgtttttgcatattctattc

SEQ ID NO: 451247 - DNA, 30 bp, Artificial Sequence
  Synthetic oligonucleotide
ctaacacatagcttggaatgtgttctattc

SEQ ID NO: 451248 - DNA, 30 bp, Artificial Sequence
  Synthetic oligonucleotide
ttccataaccttaataagaataaagtattc

SEQ ID NO: 451249 - DNA, 30 bp, Artificial Sequence
  Synthetic oligonucleotide
acacgcccggggtaaatttgataagtattc

SEQ ID NO: 451250 - DNA, 30 bp, Artificial Sequence
  Synthetic oligonucleotide
actaactctacgttagcgcgacctgtattc

SEQ ID NO: 451251 - DNA, 30 bp, Artificial Sequence
  Synthetic oligonucleotide
cagcgatctgagctggtctttcgattattc

SEQ ID NO: 451252 - DNA, 30 bp, Artificial Sequence
  Synthetic oligonucleotide
tagaccgtaaatatccatttcggattattc

SEQ ID NO: 451253 - DNA, 30 bp, Artificial Sequence
  Synthetic oligonucleotide
gattattattcgttgcataaccgcttattc

SEQ ID NO: 451254 - DNA, 31 bp, Artificial Sequence
  Synthetic oligonucleotide
cctgattgaggagtataactggtcgttattc

SEQ ID NO: 451255 - DNA, 30 bp, Artificial Sequence
  Synthetic oligonucleotide
tcaggacaaggttattcttaggggttattc

SEQ ID NO: 451256 - DNA, 30 bp, Artificial Sequence
  Synthetic oligonucleotide
acaaatgggactgacatcattttgttattc

SEQ ID NO: 451257 - DNA, 29 bp, Artificial Sequence
  Synthetic oligonucleotide
gcaggtataagggcatgcaccatttattc

SEQ ID NO: 451258 - DNA, 30 bp, Artificial Sequence
  Synthetic oligonucleotide
tggggtggtggcattattttttatttattc

SEQ ID NO: 451259 - DNA, 30 bp, Artificial Sequence
  Synthetic oligonucleotide
ttcgttattcaacacttttcaactttattc

SEQ ID NO: 451260 - DNA, 30 bp, Artificial Sequence
  Synthetic oligonucleotide
tggataacgcatctctaaggtgctttattc

SEQ ID NO: 451261 - DNA, 30 bp, Artificial Sequence
  Synthetic oligonucleotide
ccgacaccccggtccatctttgctttattc

SEQ ID NO: 451262 - DNA, 30 bp, Artificial Sequence
  Synthetic oligonucleotide
acagagatatggcagctgcggtgtttattc

SEQ ID NO: 451263 - DNA, 30 bp, Artificial Sequence
  Synthetic oligonucleotide
acggcgggttgaacggcgcgcgttttattc

SEQ ID NO: 451264 - DNA, 31 bp, Artificial Sequence
  Synthetic oligonucleotide
tgtatggactttgtgaaatcgacccaacttc

SEQ ID NO: 451265 - DNA, 30 bp, Artificial Sequence
  Synthetic oligonucleotide
ttcttcgatttgggttgctcatccaacttc

SEQ ID NO: 451266 - DNA, 30 bp, Artificial Sequence
  Synthetic oligonucleotide
ctgtggaggagcagtagtcctctcaacttc

SEQ ID NO: 451267 - DNA, 30 bp, Artificial Sequence
  Synthetic oligonucleotide
ctgtcgggcgggtgcaagaagttcaacttc

SEQ ID NO: 451268 - DNA, 30 bp, Artificial Sequence
  Synthetic oligonucleotide
cattgacacaagtaggtcatttagaacttc

SEQ ID NO: 451269 - DNA, 30 bp, Artificial Sequence
  Synthetic oligonucleotide
ggccaggttctgttttcgtgcatgaacttc

SEQ ID NO: 451270 - DNA, 30 bp, Artificial Sequence
  Synthetic oligonucleotide
ataagccagggccacgccggagataacttc

SEQ ID NO: 451271 - DNA, 30 bp, Artificial Sequence
  Synthetic oligonucleotide
ttaattcggtagaaggtgcaagttaacttc

SEQ ID NO: 451272 - DNA, 30 bp, Artificial Sequence
  Synthetic oligonucleotide
gtccgcactgaaggaaagaaagcacacttc

SEQ ID NO: 451273 - DNA, 30 bp, Artificial Sequence
  Synthetic oligonucleotide
tctgggagggcggcagacgccattcacttc

SEQ ID NO: 451274 - DNA, 30 bp, Artificial Sequence
  Synthetic oligonucleotide
attttagaccgcaactctccagtagacttc

SEQ ID NO: 451275 - DNA, 30 bp, Artificial Sequence
  Synthetic oligonucleotide
ccctcgtgccgcggaggggtatacgacttc

SEQ ID NO: 451276 - DNA, 30 bp, Artificial Sequence
  Synthetic oligonucleotide
tacatcttacataagtgccgacgcgacttc

SEQ ID NO: 451277 - DNA, 30 bp, Artificial Sequence
  Synthetic oligonucleotide
tgctgaccacttgatagtaacaaggacttc

SEQ ID NO: 451278 - DNA, 30 bp, Artificial Sequence
  Synthetic oligonucleotide
ttatcgttgccgtgatcccccagggacttc

SEQ ID NO: 451279 - DNA, 30 bp, Artificial Sequence
  Synthetic oligonucleotide
ggtaggcgtcctgcctaggggggtgacttc

SEQ ID NO: 451280 - DNA, 30 bp, Artificial Sequence
  Synthetic oligonucleotide
gagtgggatacatgaccagtcaaatacttc

SEQ ID NO: 451281 - DNA, 30 bp, Artificial Sequence
  Synthetic oligonucleotide
ttactagttcttcatgaataaagctacttc

SEQ ID NO: 451282 - DNA, 30 bp, Artificial Sequence
  Synthetic oligonucleotide
ccaactacacaggccgcggcatcgtacttc

SEQ ID NO: 451283 - DNA, 30 bp, Artificial Sequence
  Synthetic oligonucleotide
acttcaaaatgtatctcgggtcggtacttc

SEQ ID NO: 451284 - DNA, 30 bp, Artificial Sequence
  Synthetic oligonucleotide
gttcggggcctggcccaaatggggtacttc

SEQ ID NO: 451285 - DNA, 30 bp, Artificial Sequence
  Synthetic oligonucleotide
ggcgtgatccagccatttactatgtacttc

SEQ ID NO: 451286 - DNA, 30 bp, Artificial Sequence
  Synthetic oligonucleotide
tgtacagaacacgtctaggtggtgtacttc

SEQ ID NO: 451287 - DNA, 30 bp, Artificial Sequence
  Synthetic oligonucleotide
aaggatttgattctgaattacacttacttc

SEQ ID NO: 451288 - DNA, 30 bp, Artificial Sequence
  Synthetic oligonucleotide
agcagcagcgagtagcgtactccttacttc

SEQ ID NO: 451289 - DNA, 30 bp, Artificial Sequence
  Synthetic oligonucleotide
tcctgccatatataaaagaaagtttacttc

SEQ ID NO: 451290 - DNA, 30 bp, Artificial Sequence
  Synthetic oligonucleotide
tctgtgatacatcggatttcggtttacttc

SEQ ID NO: 451291 - DNA, 30 bp, Artificial Sequence
  Synthetic oligonucleotide
ggtctgatttatctcgcgctatcaaccttc

SEQ ID NO: 451292 - DNA, 30 bp, Artificial Sequence
  Synthetic oligonucleotide
ctgctaacgtagggtccttccggcaccttc

SEQ ID NO: 451293 - DNA, 30 bp, Artificial Sequence
  Synthetic oligonucleotide
gtctttaggctaaatacacctcctaccttc

SEQ ID NO: 451294 - DNA, 30 bp, Artificial Sequence
  Synthetic oligonucleotide
tcgcgctatggccaatctatgtgccccttc

SEQ ID NO: 451295 - DNA, 30 bp, Artificial Sequence
  Synthetic oligonucleotide
ataattacaatggcgcagtcccagcccttc

SEQ ID NO: 451296 - DNA, 30 bp, Artificial Sequence
  Synthetic oligonucleotide
ccaccatctcagtcgacacaggggcccttc

SEQ ID NO: 451297 - DNA, 30 bp, Artificial Sequence
  Synthetic oligonucleotide
gcaggcctgttttacgaagacgctcccttc

SEQ ID NO: 451298 - DNA, 30 bp, Artificial Sequence
  Synthetic oligonucleotide
aggcgtcggtgaaacacatcatgtcccttc

SEQ ID NO: 451299 - DNA, 30 bp, Artificial Sequence
  Synthetic oligonucleotide
tttatggcttgacaggaaagacgcgccttc

SEQ ID NO: 451300 - DNA, 30 bp, Artificial Sequence
  Synthetic oligonucleotide
ttgctatggtaagagactatcgtggccttc

SEQ ID NO: 451301 - DNA, 30 bp, Artificial Sequence
  Synthetic oligonucleotide
ttataacggaagctgtgtcggcttgccttc

SEQ ID NO: 451302 - DNA, 30 bp, Artificial Sequence
  Synthetic oligonucleotide
gagtcagatgagtagttttatccctccttc

SEQ ID NO: 451303 - DNA, 30 bp, Artificial Sequence
  Synthetic oligonucleotide
atcaactggcatttactttcgcattccttc

SEQ ID NO: 451304 - DNA, 30 bp, Artificial Sequence
  Synthetic oligonucleotide
actcatggttacagcttaaagaaacgcttc

SEQ ID NO: 451305 - DNA, 30 bp, Artificial Sequence
  Synthetic oligonucleotide
cgtcggtccccttgactgataccccgcttc

SEQ ID NO: 451306 - DNA, 30 bp, Artificial Sequence
  Synthetic oligonucleotide
tctgattatttaacgtagggctcccgcttc

SEQ ID NO: 451307 - DNA, 30 bp, Artificial Sequence
  Synthetic oligonucleotide
cactgtcctaccccatgaagatgccgcttc

SEQ ID NO: 451308 - DNA, 30 bp, Artificial Sequence
  Synthetic oligonucleotide
gacgacgatacgcggccagaagaaggcttc

SEQ ID NO: 451309 - DNA, 30 bp, Artificial Sequence
  Synthetic oligonucleotide
gccctatttgcctgaataggcctaggcttc

SEQ ID NO: 451310 - DNA, 30 bp, Artificial Sequence
  Synthetic oligonucleotide
aggttattcgatggagcggattcgggcttc

SEQ ID NO: 451311 - DNA, 30 bp, Artificial Sequence
  Synthetic oligonucleotide
ggaacttggaagcgggcgcagactggcttc

SEQ ID NO: 451312 - DNA, 30 bp, Artificial Sequence
  Synthetic oligonucleotide
gcactgcccttcaagctaggatgtggcttc

SEQ ID NO: 451313 - DNA, 30 bp, Artificial Sequence
  Synthetic oligonucleotide
gcagcaaaaatcaatattatcgttggcttc

SEQ ID NO: 451314 - DNA, 30 bp, Artificial Sequence
  Synthetic oligonucleotide
tcaaagatgtcattggtatgcaaatgcttc

SEQ ID NO: 451315 - DNA, 30 bp, Artificial Sequence
  Synthetic oligonucleotide
gcaatcttttttagacgcggtaaatgcttc

SEQ ID NO: 451316 - DNA, 30 bp, Artificial Sequence
  Synthetic oligonucleotide
ttgaggtcatttcgtgccaacacatgcttc

SEQ ID NO: 451317 - DNA, 30 bp, Artificial Sequence
  Synthetic oligonucleotide
ggcggctatcattttagtcgctcatgcttc

SEQ ID NO: 451318 - DNA, 30 bp, Artificial Sequence
  Synthetic oligonucleotide
aagtattgaatgagcaataaacgatgcttc

SEQ ID NO: 451319 - DNA, 30 bp, Artificial Sequence
  Synthetic oligonucleotide
gcagtgaagataatctgtatcacgtgcttc

SEQ ID NO: 451320 - DNA, 30 bp, Artificial Sequence
  Synthetic oligonucleotide
atctgcggttctatagtttggatttgcttc

SEQ ID NO: 451321 - DNA, 30 bp, Artificial Sequence
  Synthetic oligonucleotide
gccccgtcccggcgaccgcggttaatcttc

SEQ ID NO: 451322 - DNA, 30 bp, Artificial Sequence
  Synthetic oligonucleotide
tgtacggtgcgatgccccgattgcatcttc

SEQ ID NO: 451323 - DNA, 30 bp, Artificial Sequence
  Synthetic oligonucleotide
gtagaaaccggagcagctcggatcatcttc

SEQ ID NO: 451324 - DNA, 30 bp, Artificial Sequence
  Synthetic oligonucleotide
ttatatacattgtcgtgctaactgatcttc

SEQ ID NO: 451325 - DNA, 30 bp, Artificial Sequence
  Synthetic oligonucleotide
gagttcaggtctttgctctcggacctcttc

SEQ ID NO: 451326 - DNA, 30 bp, Artificial Sequence
  Synthetic oligonucleotide
tctctcaggttgttcacagagatgctcttc

SEQ ID NO: 451327 - DNA, 30 bp, Artificial Sequence
  Synthetic oligonucleotide
aaactattgtaagcgtaatcttatctcttc

SEQ ID NO: 451328 - DNA, 30 bp, Artificial Sequence
  Synthetic oligonucleotide
aacctcagggctggcccaaggtctctcttc

SEQ ID NO: 451329 - DNA, 30 bp, Artificial Sequence
  Synthetic oligonucleotide
gttccagttcagagaatgtaattagtcttc

SEQ ID NO: 451330 - DNA, 30 bp, Artificial Sequence
  Synthetic oligonucleotide
aaggcggcaactttggcgccgaacgtcttc

SEQ ID NO: 451331 - DNA, 30 bp, Artificial Sequence
  Synthetic oligonucleotide
agcgggagaagaattcggaattgcgtcttc

SEQ ID NO: 451332 - DNA, 30 bp, Artificial Sequence
  Synthetic oligonucleotide
gggtgcggtatccgggtgagacaggtcttc

SEQ ID NO: 451333 - DNA, 30 bp, Artificial Sequence
  Synthetic oligonucleotide
ggttctagggatccatgcgatatggtcttc

SEQ ID NO: 451334 - DNA, 30 bp, Artificial Sequence
  Synthetic oligonucleotide
gaatgcctctgccgcttggaccatgtcttc

SEQ ID NO: 451335 - DNA, 30 bp, Artificial Sequence
  Synthetic oligonucleotide
gcacaggatactcgaccgtattaattcttc

SEQ ID NO: 451336 - DNA, 30 bp, Artificial Sequence
  Synthetic oligonucleotide
tattcttgtttaattcgggcagacttcttc

SEQ ID NO: 451337 - DNA, 30 bp, Artificial Sequence
  Synthetic oligonucleotide
atactccatgcaccatgttctgacttcttc

SEQ ID NO: 451338 - DNA, 30 bp, Artificial Sequence
  Synthetic oligonucleotide
gtttagcccataggatgcgttgacttcttc

SEQ ID NO: 451339 - DNA, 30 bp, Artificial Sequence
  Synthetic oligonucleotide
aagggtcaattgggttgctgctagttcttc

SEQ ID NO: 451340 - DNA, 30 bp, Artificial Sequence
  Synthetic oligonucleotide
ttattgcgaactttttgtcttatgttcttc

SEQ ID NO: 451341 - DNA, 30 bp, Artificial Sequence
  Synthetic oligonucleotide
catagtgcttttcagccgaaacttttcttc

SEQ ID NO: 451342 - DNA, 30 bp, Artificial Sequence
  Synthetic oligonucleotide
accgctggtgtcttttaagtccaaaagttc

SEQ ID NO: 451343 - DNA, 30 bp, Artificial Sequence
  Synthetic oligonucleotide
atagtgcattgttctaccgacacaaagttc

SEQ ID NO: 451344 - DNA, 30 bp, Artificial Sequence
  Synthetic oligonucleotide
ttaggtcctggtgggccctcccgaaagttc

SEQ ID NO: 451345 - DNA, 30 bp, Artificial Sequence
  Synthetic oligonucleotide
atctgcgcaggccatttaaaactaaagttc

SEQ ID NO: 451346 - DNA, 30 bp, Artificial Sequence
  Synthetic oligonucleotide
ttgactggggtgtgcggaactttaaagttc

SEQ ID NO: 451347 - DNA, 30 bp, Artificial Sequence
  Synthetic oligonucleotide
gttatcggagcagggagatagcacaagttc

SEQ ID NO: 451348 - DNA, 30 bp, Artificial Sequence
  Synthetic oligonucleotide
gcaactgggggaaaacgcaaggacaagttc

SEQ ID NO: 451349 - DNA, 30 bp, Artificial Sequence
  Synthetic oligonucleotide
caaggccagtgatcattcgacaccaagttc

SEQ ID NO: 451350 - DNA, 30 bp, Artificial Sequence
  Synthetic oligonucleotide
atattttagctcgatgccttaagcaagttc

SEQ ID NO: 451351 - DNA, 30 bp, Artificial Sequence
  Synthetic oligonucleotide
ttaatgtgtgttctaaactatttcaagttc

SEQ ID NO: 451352 - DNA, 30 bp, Artificial Sequence
  Synthetic oligonucleotide
tctacgtggcatagatctttgacgaagttc

SEQ ID NO: 451353 - DNA, 30 bp, Artificial Sequence
  Synthetic oligonucleotide
tctgaaggcgagcgcttcgatatgaagttc

SEQ ID NO: 451354 - DNA, 30 bp, Artificial Sequence
  Synthetic oligonucleotide
tttaaagggggtatgctacgacaacagttc

SEQ ID NO: 451355 - DNA, 30 bp, Artificial Sequence
  Synthetic oligonucleotide
gcggtcgcagatgagccggcccgccagttc

SEQ ID NO: 451356 - DNA, 30 bp, Artificial Sequence
  Synthetic oligonucleotide
aggagtatcccgggttctacagtccagttc

SEQ ID NO: 451357 - DNA, 30 bp, Artificial Sequence
  Synthetic oligonucleotide
accacaacttctcatacgagcttccagttc

SEQ ID NO: 451358 - DNA, 30 bp, Artificial Sequence
  Synthetic oligonucleotide
ttctctgactgcgggtccctgcagcagttc

SEQ ID NO: 451359 - DNA, 30 bp, Artificial Sequence
  Synthetic oligonucleotide
accagcgatcagcaatcgctagatcagttc

SEQ ID NO: 451360 - DNA, 30 bp, Artificial Sequence
  Synthetic oligonucleotide
gtttgatcaaggaaagctctaagtcagttc

SEQ ID NO: 451361 - DNA, 30 bp, Artificial Sequence
  Synthetic oligonucleotide
accattttctctagcctacctgttcagttc

SEQ ID NO: 451362 - DNA, 30 bp, Artificial Sequence
  Synthetic oligonucleotide
gagtctatcgctagcgtaatttaagagttc

SEQ ID NO: 451363 - DNA, 30 bp, Artificial Sequence
  Synthetic oligonucleotide
aagatttatgcaggctcgaatatcgagttc

SEQ ID NO: 451364 - DNA, 30 bp, Artificial Sequence
  Synthetic oligonucleotide
ccgaaccgctgcctagacacgttggagttc

SEQ ID NO: 451365 - DNA, 30 bp, Artificial Sequence
  Synthetic oligonucleotide
ttccgtgtctcctggggatggacatagttc

SEQ ID NO: 451366 - DNA, 30 bp, Artificial Sequence
  Synthetic oligonucleotide
gaatcgtaattctcttcggcgaggtagttc

SEQ ID NO: 451367 - DNA, 30 bp, Artificial Sequence
  Synthetic oligonucleotide
ctcaacctcaccagtcttgattggtagttc

SEQ ID NO: 451368 - DNA, 30 bp, Artificial Sequence
  Synthetic oligonucleotide
gacgccttgccaggctaccttgattagttc

SEQ ID NO: 451369 - DNA, 30 bp, Artificial Sequence
  Synthetic oligonucleotide
attcatgtattactctatcgtagttagttc

SEQ ID NO: 451370 - DNA, 30 bp, Artificial Sequence
  Synthetic oligonucleotide
cttcgccggcaagaacacgccggttagttc

SEQ ID NO: 451371 - DNA, 30 bp, Artificial Sequence
  Synthetic oligonucleotide
actatttttgtccggaagtgcatttagttc

SEQ ID NO: 451372 - DNA, 30 bp, Artificial Sequence
  Synthetic oligonucleotide
aatctccagaccccgcccgtgaacacgttc

SEQ ID NO: 451373 - DNA, 30 bp, Artificial Sequence
  Synthetic oligonucleotide
tcactcagaacatgctcagcttagacgttc

SEQ ID NO: 451374 - DNA, 30 bp, Artificial Sequence
  Synthetic oligonucleotide
tatacggccgagtcagatccttggacgttc

SEQ ID NO: 451375 - DNA, 30 bp, Artificial Sequence
  Synthetic oligonucleotide
ccatgccgtcgcagaatccctatgacgttc

SEQ ID NO: 451376 - DNA, 30 bp, Artificial Sequence
  Synthetic oligonucleotide
ttacaatatccataaatctgctttacgttc

SEQ ID NO: 451377 - DNA, 30 bp, Artificial Sequence
  Synthetic oligonucleotide
acctaagcggccacatttaattttacgttc

SEQ ID NO: 451378 - DNA, 30 bp, Artificial Sequence
  Synthetic oligonucleotide
ttacgtattgtatagcggtgtcaaccgttc

SEQ ID NO: 451379 - DNA, 30 bp, Artificial Sequence
  Synthetic oligonucleotide
agatcgattttttggagtcagaccccgttc

SEQ ID NO: 451380 - DNA, 30 bp, Artificial Sequence
  Synthetic oligonucleotide
atttttgaccggtaccaacgctagccgttc

SEQ ID NO: 451381 - DNA, 30 bp, Artificial Sequence
  Synthetic oligonucleotide
tcaaagtatagcatctattaggtgccgttc

SEQ ID NO: 451382 - DNA, 30 bp, Artificial Sequence
  Synthetic oligonucleotide
gaattagcgcacagtaagtgccacgcgttc

SEQ ID NO: 451383 - DNA, 30 bp, Artificial Sequence
  Synthetic oligonucleotide
agtcatggaacaagacgcgccggcgcgttc

SEQ ID NO: 451384 - DNA, 30 bp, Artificial Sequence
  Synthetic oligonucleotide
gttccgcttatatagaataagggggcgttc

SEQ ID NO: 451385 - DNA, 30 bp, Artificial Sequence
  Synthetic oligonucleotide
tagaacgctgttgttccactgggtgcgttc

SEQ ID NO: 451386 - DNA, 30 bp, Artificial Sequence
  Synthetic oligonucleotide
ggcttcacctcaacccttgcggttgcgttc

SEQ ID NO: 451387 - DNA, 30 bp, Artificial Sequence
  Synthetic oligonucleotide
atttgggctgacaaggcaaatacatcgttc

SEQ ID NO: 451388 - DNA, 30 bp, Artificial Sequence
  Synthetic oligonucleotide
gttcgttgtaataactaacccctatcgttc

SEQ ID NO: 451389 - DNA, 30 bp, Artificial Sequence
  Synthetic oligonucleotide
atttaccactgtaggcatggcctatcgttc

SEQ ID NO: 451390 - DNA, 30 bp, Artificial Sequence
  Synthetic oligonucleotide
ggagcgggaacggattaaagtcattcgttc

SEQ ID NO: 451391 - DNA, 30 bp, Artificial Sequence
  Synthetic oligonucleotide
tggtgggtaccatacaaatacaaaaggttc

SEQ ID NO: 451392 - DNA, 30 bp, Artificial Sequence
  Synthetic oligonucleotide
aatgatgccgccaaggaagcataaaggttc

SEQ ID NO: 451393 - DNA, 30 bp, Artificial Sequence
  Synthetic oligonucleotide
cttgcggagcggcgtcaagcaggaaggttc

SEQ ID NO: 451394 - DNA, 30 bp, Artificial Sequence
  Synthetic oligonucleotide
aaattacatgacaagttttgttacaggttc

SEQ ID NO: 451395 - DNA, 30 bp, Artificial Sequence
  Synthetic oligonucleotide
agactcgttagagtcaagacttccaggttc

SEQ ID NO: 451396 - DNA, 30 bp, Artificial Sequence
  Synthetic oligonucleotide
gtcaggattccgaacgagatgacgaggttc

SEQ ID NO: 451397 - DNA, 30 bp, Artificial Sequence
  Synthetic oligonucleotide
tgaaagacgcagtcatgcagaaggaggttc

SEQ ID NO: 451398 - DNA, 31 bp, Artificial Sequence
  Synthetic oligonucleotide
cagcggagcttgttagatcgcgtataggttc

SEQ ID NO: 451399 - DNA, 30 bp, Artificial Sequence
  Synthetic oligonucleotide
aaagtattgatacatttgactcgtaggttc

SEQ ID NO: 451400 - DNA, 30 bp, Artificial Sequence
  Synthetic oligonucleotide
caacaagactagcgttgcgcgcaacggttc

SEQ ID NO: 451401 - DNA, 30 bp, Artificial Sequence
  Synthetic oligonucleotide
aatttatgtgaatctcaaccggaacggttc

SEQ ID NO: 451402 - DNA, 30 bp, Artificial Sequence
  Synthetic oligonucleotide
tcgctgtgcttcgttaggacggcacggttc

SEQ ID NO: 451403 - DNA, 30 bp, Artificial Sequence
  Synthetic oligonucleotide
aattgcgtattgaattacgtttgacggttc

SEQ ID NO: 451404 - DNA, 30 bp, Artificial Sequence
  Synthetic oligonucleotide
ctgtaggtgtaagcctcgataagccggttc

SEQ ID NO: 451405 - DNA, 30 bp, Artificial Sequence
  Synthetic oligonucleotide
ggatatgtggttgactgtactacgcggttc

SEQ ID NO: 451406 - DNA, 30 bp, Artificial Sequence
  Synthetic oligonucleotide
ttaagcaatacagttccgtagtatcggttc

SEQ ID NO: 451407 - DNA, 30 bp, Artificial Sequence
  Synthetic oligonucleotide
cgaatataggctgattgactctctcggttc

SEQ ID NO: 451408 - DNA, 30 bp, Artificial Sequence
  Synthetic oligonucleotide
ccttggcgcagatactatcagggtcggttc

SEQ ID NO: 451409 - DNA, 30 bp, Artificial Sequence
  Synthetic oligonucleotide
tcatgatgtccagacaccagcgttcggttc

SEQ ID NO: 451410 - DNA, 30 bp, Artificial Sequence
  Synthetic oligonucleotide
tttgtcctcctgtgtcggactctagggttc

SEQ ID NO: 451411 - DNA, 30 bp, Artificial Sequence
  Synthetic oligonucleotide
ttatagaatagtcactatgggtacgggttc

SEQ ID NO: 451412 - DNA, 30 bp, Artificial Sequence
  Synthetic oligonucleotide
ctggtacgatcatgctccatccgcgggttc

SEQ ID NO: 451413 - DNA, 30 bp, Artificial Sequence
  Synthetic oligonucleotide
gcagcattggccagcccgtgaggcgggttc

SEQ ID NO: 451414 - DNA, 30 bp, Artificial Sequence
  Synthetic oligonucleotide
gagttccgctttggttttgggtgcgggttc

SEQ ID NO: 451415 - DNA, 30 bp, Artificial Sequence
  Synthetic oligonucleotide
actcacagtccaaccgacaatgtcgggttc

SEQ ID NO: 451416 - DNA, 30 bp, Artificial Sequence
  Synthetic oligonucleotide
tgttcgactcatcaactactagaggggttc

SEQ ID NO: 451417 - DNA, 30 bp, Artificial Sequence
  Synthetic oligonucleotide
tgttaggaacgtaacccaacgggggggttc

SEQ ID NO: 451418 - DNA, 30 bp, Artificial Sequence
  Synthetic oligonucleotide
agaatacatggccccccgttccatgggttc

SEQ ID NO: 451419 - DNA, 30 bp, Artificial Sequence
  Synthetic oligonucleotide
tagtgttcatgacggcgccgtgatgggttc

SEQ ID NO: 451420 - DNA, 30 bp, Artificial Sequence
  Synthetic oligonucleotide
aaacactggcatcagccgtagtctgggttc

SEQ ID NO: 451421 - DNA, 30 bp, Artificial Sequence
  Synthetic oligonucleotide
gttcaagtatcaaagtcgcgttgtgggttc

SEQ ID NO: 451422 - DNA, 30 bp, Artificial Sequence
  Synthetic oligonucleotide
agagtgatatagccttgtataacatggttc

SEQ ID NO: 451423 - DNA, 30 bp, Artificial Sequence
  Synthetic oligonucleotide
catttataccatatatgggcaggatggttc

SEQ ID NO: 451424 - DNA, 30 bp, Artificial Sequence
  Synthetic oligonucleotide
cccgtcacattacttaaggtttcctggttc

SEQ ID NO: 451425 - DNA, 30 bp, Artificial Sequence
  Synthetic oligonucleotide
aagtactagtgcttgggcgggtattggttc

SEQ ID NO: 451426 - DNA, 30 bp, Artificial Sequence
  Synthetic oligonucleotide
aaagaggctgttatggaggtagcttggttc

SEQ ID NO: 451427 - DNA, 30 bp, Artificial Sequence
  Synthetic oligonucleotide
cgaatattacaggctcctatattttggttc

SEQ ID NO: 451428 - DNA, 30 bp, Artificial Sequence
  Synthetic oligonucleotide
agcggcatatgctattagacgaatatgttc

SEQ ID NO: 451429 - DNA, 30 bp, Artificial Sequence
  Synthetic oligonucleotide
acatatcataggaacatctcaactatgttc

SEQ ID NO: 451430 - DNA, 30 bp, Artificial Sequence
  Synthetic oligonucleotide
tataaactgtttacgcataactgtatgttc

SEQ ID NO: 451431 - DNA, 30 bp, Artificial Sequence
  Synthetic oligonucleotide
ttacgagcttgaagtatgggaattatgttc

SEQ ID NO: 451432 - DNA, 30 bp, Artificial Sequence
  Synthetic oligonucleotide
cccacggtgcgaaggtgttaaaaactgttc

SEQ ID NO: 451433 - DNA, 30 bp, Artificial Sequence
  Synthetic oligonucleotide
cccttgcgactaatgtacgtaaaactgttc

SEQ ID NO: 451434 - DNA, 30 bp, Artificial Sequence
  Synthetic oligonucleotide
agatctgcggtttgaatcactcaactgttc

SEQ ID NO: 451435 - DNA, 30 bp, Artificial Sequence
  Synthetic oligonucleotide
gtacactggataccgcgtagtatcctgttc

SEQ ID NO: 451436 - DNA, 30 bp, Artificial Sequence
  Synthetic oligonucleotide
atcaccattagccgcgcgggtgggctgttc

SEQ ID NO: 451437 - DNA, 30 bp, Artificial Sequence
  Synthetic oligonucleotide
aaatggaaaatcacgagtttcgaagtgttc

SEQ ID NO: 451438 - DNA, 30 bp, Artificial Sequence
  Synthetic oligonucleotide
ggaagatttgttgaacaatagatcgtgttc

SEQ ID NO: 451439 - DNA, 30 bp, Artificial Sequence
  Synthetic oligonucleotide
gtgtagttgtggggcttcacgtcggtgttc

SEQ ID NO: 451440 - DNA, 30 bp, Artificial Sequence
  Synthetic oligonucleotide
ggcaacacccaacatgccctgagggtgttc

SEQ ID NO: 451441 - DNA, 30 bp, Artificial Sequence
  Synthetic oligonucleotide
gaaagcttgaggcactgtaacaatgtgttc

SEQ ID NO: 451442 - DNA, 30 bp, Artificial Sequence
  Synthetic oligonucleotide
tcgctgtccactgtgaagtgacatgtgttc

SEQ ID NO: 451443 - DNA, 30 bp, Artificial Sequence
  Synthetic oligonucleotide
gaaccaatatgcgggcatcggcaattgttc

SEQ ID NO: 451444 - DNA, 30 bp, Artificial Sequence
  Synthetic oligonucleotide
tctctcgcagggttgccgccggaattgttc

SEQ ID NO: 451445 - DNA, 30 bp, Artificial Sequence
  Synthetic oligonucleotide
ggaggagacaaatttttccgatcattgttc

SEQ ID NO: 451446 - DNA, 30 bp, Artificial Sequence
  Synthetic oligonucleotide
caccttcctggtaccgatggatgcttgttc

SEQ ID NO: 451447 - DNA, 30 bp, Artificial Sequence
  Synthetic oligonucleotide
agatagaaaccgccacggcgattcttgttc

SEQ ID NO: 451448 - DNA, 30 bp, Artificial Sequence
  Synthetic oligonucleotide
tcaattccagcacacgctccgcagttgttc

SEQ ID NO: 451449 - DNA, 30 bp, Artificial Sequence
  Synthetic oligonucleotide
actgttcggttttcttggtcgcggttgttc

SEQ ID NO: 451450 - DNA, 30 bp, Artificial Sequence
  Synthetic oligonucleotide
ttagtcggaaaacaccgaaacattttgttc

SEQ ID NO: 451451 - DNA, 30 bp, Artificial Sequence
  Synthetic oligonucleotide
caaataaatgaaacgtggcacgccaatttc

SEQ ID NO: 451452 - DNA, 30 bp, Artificial Sequence
  Synthetic oligonucleotide
acaaaaatttgttgcgtagtcggcaatttc

SEQ ID NO: 451453 - DNA, 30 bp, Artificial Sequence
  Synthetic oligonucleotide
gccagtcttatcacacgacctgtgaatttc

SEQ ID NO: 451454 - DNA, 30 bp, Artificial Sequence
  Synthetic oligonucleotide
gaggggttacgactctagcaggctaatttc

SEQ ID NO: 451455 - DNA, 30 bp, Artificial Sequence
  Synthetic oligonucleotide
cgcgcatttggaagctcaatagcacatttc

SEQ ID NO: 451456 - DNA, 30 bp, Artificial Sequence
  Synthetic oligonucleotide
gaattggctaaactgtgtttagttcatttc

SEQ ID NO: 451457 - DNA, 30 bp, Artificial Sequence
  Synthetic oligonucleotide
tgttttttgctccttcgaaccgccgatttc

SEQ ID NO: 451458 - DNA, 30 bp, Artificial Sequence
  Synthetic oligonucleotide
tctccgttctcccttatggggtatgatttc

SEQ ID NO: 451459 - DNA, 30 bp, Artificial Sequence
  Synthetic oligonucleotide
ggcctacgcccccgtaaatattcatatttc

SEQ ID NO: 451460 - DNA, 30 bp, Artificial Sequence
  Synthetic oligonucleotide
tcaaagctagagattatgatagtatatttc

SEQ ID NO: 451461 - DNA, 30 bp, Artificial Sequence
  Synthetic oligonucleotide
gatggcttttcataaatggatttatatttc

SEQ ID NO: 451462 - DNA, 30 bp, Artificial Sequence
  Synthetic oligonucleotide
tctattgtacaggattctccgacctatttc

SEQ ID NO: 451463 - DNA, 30 bp, Artificial Sequence
  Synthetic oligonucleotide
acccccgggtcgaatggagctggctatttc

SEQ ID NO: 451464 - DNA, 30 bp, Artificial Sequence
  Synthetic oligonucleotide
gacaggaagaacgtgtgtaaatagtatttc

SEQ ID NO: 451465 - DNA, 30 bp, Artificial Sequence
  Synthetic oligonucleotide
gggagacggacattgttatggccgtatttc

SEQ ID NO: 451466 - DNA, 30 bp, Artificial Sequence
  Synthetic oligonucleotide
taggaaagccttagtgtgtcttcgtatttc

SEQ ID NO: 451467 - DNA, 30 bp, Artificial Sequence
  Synthetic oligonucleotide
catttaccagaaataatggccaggtatttc

SEQ ID NO: 451468 - DNA, 30 bp, Artificial Sequence
  Synthetic oligonucleotide
caactccattgaaccgcgatcctgtatttc

SEQ ID NO: 451469 - DNA, 30 bp, Artificial Sequence
  Synthetic oligonucleotide
agcgcacatgcacgtacgcatctgtatttc

SEQ ID NO: 451470 - DNA, 30 bp, Artificial Sequence
  Synthetic oligonucleotide
aagcacgaatcctcgaggcgcagaactttc

SEQ ID NO: 451471 - DNA, 30 bp, Artificial Sequence
  Synthetic oligonucleotide
gacggaaagatttataccacgtgtactttc

SEQ ID NO: 451472 - DNA, 30 bp, Artificial Sequence
  Synthetic oligonucleotide
agattgaacctatctggcgaataacctttc

SEQ ID NO: 451473 - DNA, 30 bp, Artificial Sequence
  Synthetic oligonucleotide
gtaacacgccacatcacgagaaaccctttc

SEQ ID NO: 451474 - DNA, 30 bp, Artificial Sequence
  Synthetic oligonucleotide
gggtgtactcagtttaacaaatgccctttc

SEQ ID NO: 451475 - DNA, 30 bp, Artificial Sequence
  Synthetic oligonucleotide
ttcctcagtgtatcttgatagatccctttc

SEQ ID NO: 451476 - DNA, 30 bp, Artificial Sequence
  Synthetic oligonucleotide
acctacataatgggtgggcccacgcctttc

SEQ ID NO: 451477 - DNA, 30 bp, Artificial Sequence
  Synthetic oligonucleotide
cgacttgaagctcatcatccttcgcctttc

SEQ ID NO: 451478 - DNA, 30 bp, Artificial Sequence
  Synthetic oligonucleotide
aacattagggttataaccttaagcgctttc

SEQ ID NO: 451479 - DNA, 30 bp, Artificial Sequence
  Synthetic oligonucleotide
tacttcaggttccagaaatggaaggctttc

SEQ ID NO: 451480 - DNA, 30 bp, Artificial Sequence
  Synthetic oligonucleotide
taatgcaccgtgtgatacacgaaatctttc

SEQ ID NO: 451481 - DNA, 30 bp, Artificial Sequence
  Synthetic oligonucleotide
tgtgtaagaaggaatcctccgcaatctttc

SEQ ID NO: 451482 - DNA, 30 bp, Artificial Sequence
  Synthetic oligonucleotide
accgcatcgccatctaagtatagatctttc

SEQ ID NO: 451483 - DNA, 30 bp, Artificial Sequence
  Synthetic oligonucleotide
acgggttcctgcctgtgcacccgctctttc

SEQ ID NO: 451484 - DNA, 30 bp, Artificial Sequence
  Synthetic oligonucleotide
gtgtcgttgatgaataggtctctgtctttc

SEQ ID NO: 451485 - DNA, 30 bp, Artificial Sequence
  Synthetic oligonucleotide
tagagactaagtaagttacatgtgtctttc

SEQ ID NO: 451486 - DNA, 30 bp, Artificial Sequence
  Synthetic oligonucleotide
ataaactgacgcgatagtcgagcttctttc

SEQ ID NO: 451487 - DNA, 30 bp, Artificial Sequence
  Synthetic oligonucleotide
caccaactgctttcgccgaaaatttctttc

SEQ ID NO: 451488 - DNA, 30 bp, Artificial Sequence
  Synthetic oligonucleotide
actgctcgtggaccaggtggtacaagtttc

SEQ ID NO: 451489 - DNA, 30 bp, Artificial Sequence
  Synthetic oligonucleotide
tccagtggatggccgtactcgcgaagtttc

SEQ ID NO: 451490 - DNA, 30 bp, Artificial Sequence
  Synthetic oligonucleotide
gagaacctccttgggcaacatgtaagtttc

SEQ ID NO: 451491 - DNA, 30 bp, Artificial Sequence
  Synthetic oligonucleotide
gcgatggactggatacgcacgggcagtttc

SEQ ID NO: 451492 - DNA, 30 bp, Artificial Sequence
  Synthetic oligonucleotide
ctttagcattccgggtggaaacagagtttc

SEQ ID NO: 451493 - DNA, 30 bp, Artificial Sequence
  Synthetic oligonucleotide
atcgatggaggacacttgtttgagagtttc

SEQ ID NO: 451494 - DNA, 30 bp, Artificial Sequence
  Synthetic oligonucleotide
atatagactcgggacccccgtgcgagtttc

SEQ ID NO: 451495 - DNA, 30 bp, Artificial Sequence
  Synthetic oligonucleotide
cggtcgatggcatacttacacgtgagtttc

SEQ ID NO: 451496 - DNA, 30 bp, Artificial Sequence
  Synthetic oligonucleotide
actcgcggtgacttaggttgccctagtttc

SEQ ID NO: 451497 - DNA, 30 bp, Artificial Sequence
  Synthetic oligonucleotide
taaggccgagatattgggtctctacgtttc

SEQ ID NO: 451498 - DNA, 30 bp, Artificial Sequence
  Synthetic oligonucleotide
ctccttaatcattcggggtatgaccgtttc

SEQ ID NO: 451499 - DNA, 30 bp, Artificial Sequence
  Synthetic oligonucleotide
tactatcactttcaagtgcgagtccgtttc

SEQ ID NO: 451500 - DNA, 30 bp, Artificial Sequence
  Synthetic oligonucleotide
accccagtttacagcgtctccgggcgtttc

SEQ ID NO: 451501 - DNA, 30 bp, Artificial Sequence
  Synthetic oligonucleotide
attcgatgtatttttatggacactcgtttc

SEQ ID NO: 451502 - DNA, 30 bp, Artificial Sequence
  Synthetic oligonucleotide
atcccccgcgggtgattatcaattcgtttc

SEQ ID NO: 451503 - DNA, 30 bp, Artificial Sequence
  Synthetic oligonucleotide
gcgcgtgtggaaacctgtttaacaggtttc

SEQ ID NO: 451504 - DNA, 30 bp, Artificial Sequence
  Synthetic oligonucleotide
gtgttcacggtcagggtaagttgaggtttc

SEQ ID NO: 451505 - DNA, 30 bp, Artificial Sequence
  Synthetic oligonucleotide
cgggtaaaccgtcgtcgagaggacggtttc

SEQ ID NO: 451506 - DNA, 30 bp, Artificial Sequence
  Synthetic oligonucleotide
gaaaattcactccgttagctggggggtttc

SEQ ID NO: 451507 - DNA, 30 bp, Artificial Sequence
  Synthetic oligonucleotide
tcggccgcatgtattaggtggtcatgtttc

SEQ ID NO: 451508 - DNA, 30 bp, Artificial Sequence
  Synthetic oligonucleotide
gctgaaacaccacaacaatatgagtgtttc

SEQ ID NO: 451509 - DNA, 30 bp, Artificial Sequence
  Synthetic oligonucleotide
ggcctggcttatatgtggcgcatgtgtttc

SEQ ID NO: 451510 - DNA, 30 bp, Artificial Sequence
  Synthetic oligonucleotide
gtgcacgtttggtccgatacagcaattttc

SEQ ID NO: 451511 - DNA, 30 bp, Artificial Sequence
  Synthetic oligonucleotide
gttgttgggcgctggcgaagccgaattttc

SEQ ID NO: 451512 - DNA, 30 bp, Artificial Sequence
  Synthetic oligonucleotide
ctccacggtatgaaaatttgacccattttc

SEQ ID NO: 451513 - DNA, 30 bp, Artificial Sequence
  Synthetic oligonucleotide
ggcagagtccttcggggccttgcgattttc

SEQ ID NO: 451514 - DNA, 30 bp, Artificial Sequence
  Synthetic oligonucleotide
aaatggggaccccctacagtggtgattttc

SEQ ID NO: 451515 - DNA, 30 bp, Artificial Sequence
  Synthetic oligonucleotide
ttaaaccctccgtatattgcgtatattttc

SEQ ID NO: 451516 - DNA, 30 bp, Artificial Sequence
  Synthetic oligonucleotide
tcgccgccctgtggtccgtttcaacttttc

SEQ ID NO: 451517 - DNA, 30 bp, Artificial Sequence
  Synthetic oligonucleotide
gtatgctttctgacgctactttgacttttc

SEQ ID NO: 451518 - DNA, 30 bp, Artificial Sequence
  Synthetic oligonucleotide
gattctattggtccttccgctaagcttttc

SEQ ID NO: 451519 - DNA, 30 bp, Artificial Sequence
  Synthetic oligonucleotide
cgtataagcttcgttattacagcgcttttc

SEQ ID NO: 451520 - DNA, 30 bp, Artificial Sequence
  Synthetic oligonucleotide
cttcgagcttaacatactggacctcttttc

SEQ ID NO: 451521 - DNA, 30 bp, Artificial Sequence
  Synthetic oligonucleotide
agcaatttcaatctttcgctttctcttttc

SEQ ID NO: 451522 - DNA, 30 bp, Artificial Sequence
  Synthetic oligonucleotide
acaagagggacttgggacccgcttcttttc

SEQ ID NO: 451523 - DNA, 30 bp, Artificial Sequence
  Synthetic oligonucleotide
ggcgctccacgtttgtttgcttttcttttc

SEQ ID NO: 451524 - DNA, 30 bp, Artificial Sequence
  Synthetic oligonucleotide
aattagagaacctaaagagagaaagttttc

SEQ ID NO: 451525 - DNA, 30 bp, Artificial Sequence
  Synthetic oligonucleotide
gggaagtagctattagactagtcagttttc

SEQ ID NO: 451526 - DNA, 30 bp, Artificial Sequence
  Synthetic oligonucleotide
tacgtcgtaggccaacagaaaaacgttttc

SEQ ID NO: 451527 - DNA, 30 bp, Artificial Sequence
  Synthetic oligonucleotide
gcttacaacctcaaaggctatgaggttttc

SEQ ID NO: 451528 - DNA, 30 bp, Artificial Sequence
  Synthetic oligonucleotide
taggctcgtacctactcagcttaggttttc

SEQ ID NO: 451529 - DNA, 30 bp, Artificial Sequence
  Synthetic oligonucleotide
tatgagcgtggaaacgtatgcatggttttc

SEQ ID NO: 451530 - DNA, 30 bp, Artificial Sequence
  Synthetic oligonucleotide
tatggtcgcttgtcgacatgaattgttttc

SEQ ID NO: 451531 - DNA, 30 bp, Artificial Sequence
  Synthetic oligonucleotide
gcagtaactaccaatggaaacaaatttttc

SEQ ID NO: 451532 - DNA, 30 bp, Artificial Sequence
  Synthetic oligonucleotide
atatttatttgaccgaatcctcaatttttc

SEQ ID NO: 451533 - DNA, 30 bp, Artificial Sequence
  Synthetic oligonucleotide
gaagtcttagatctaaagtgtgtatttttc

SEQ ID NO: 451534 - DNA, 30 bp, Artificial Sequence
  Synthetic oligonucleotide
acaggcttatttggaatcggaacctttttc

SEQ ID NO: 451535 - DNA, 30 bp, Artificial Sequence
  Synthetic oligonucleotide
caagcaggtctaaccgagcagcagtttttc

SEQ ID NO: 451536 - DNA, 30 bp, Artificial Sequence
  Synthetic oligonucleotide
tctcttgccaacaaactttgactttttttc

SEQ ID NO: 451537 - DNA, 30 bp, Artificial Sequence
  Synthetic oligonucleotide
aactgtcaacgctaccatggcctttttttc

SEQ ID NO: 451538 - DNA, 30 bp, Artificial Sequence
  Synthetic oligonucleotide
ttcgaatcgagaacgtttttaaaaaaaaag

SEQ ID NO: 451539 - DNA, 30 bp, Artificial Sequence
  Synthetic oligonucleotide
cagttcttcactttgttgaaacaaaaaaag

SEQ ID NO: 451540 - DNA, 30 bp, Artificial Sequence
  Synthetic oligonucleotide
tcctgtgacggagggctatgtatcaaaaag

SEQ ID NO: 451541 - DNA, 30 bp, Artificial Sequence
  Synthetic oligonucleotide
ttcgttttgaagatacggccacggaaaaag

SEQ ID NO: 451542 - DNA, 30 bp, Artificial Sequence
  Synthetic oligonucleotide
cccgatacgagcggtccgaaaattaaaaag

SEQ ID NO: 451543 - DNA, 30 bp, Artificial Sequence
  Synthetic oligonucleotide
cctctaataatattcgcatcgcgacaaaag

SEQ ID NO: 451544 - DNA, 30 bp, Artificial Sequence
  Synthetic oligonucleotide
aagcattgctgctaaaggagttagcaaaag

SEQ ID NO: 451545 - DNA, 30 bp, Artificial Sequence
  Synthetic oligonucleotide
aaatgtgttcgggccccgtaagggcaaaag

SEQ ID NO: 451546 - DNA, 30 bp, Artificial Sequence
  Synthetic oligonucleotide
gtgtacgtttttgaaccgttagatcaaaag

SEQ ID NO: 451547 - DNA, 30 bp, Artificial Sequence
  Synthetic oligonucleotide
aagattgtagcctctaacaggcaagaaaag

SEQ ID NO: 451548 - DNA, 30 bp, Artificial Sequence
  Synthetic oligonucleotide
tatattattcgcgccgacctcggagaaaag

SEQ ID NO: 451549 - DNA, 30 bp, Artificial Sequence
  Synthetic oligonucleotide
gtcatggccgacgtaggtcggaccgaaaag

SEQ ID NO: 451550 - DNA, 30 bp, Artificial Sequence
  Synthetic oligonucleotide
gtattacacttgggttatataaaggaaaag

SEQ ID NO: 451551 - DNA, 30 bp, Artificial Sequence
  Synthetic oligonucleotide
ggattcgctttgggctgttgcccggaaaag

SEQ ID NO: 451552 - DNA, 30 bp, Artificial Sequence
  Synthetic oligonucleotide
aattgatagttatttcgtgttgatgaaaag

SEQ ID NO: 451553 - DNA, 30 bp, Artificial Sequence
  Synthetic oligonucleotide
atgactcaacggccgcgtgtacttgaaaag

SEQ ID NO: 451554 - DNA, 30 bp, Artificial Sequence
  Synthetic oligonucleotide
ggagcgccctacaatcacggctaataaaag

SEQ ID NO: 451555 - DNA, 30 bp, Artificial Sequence
  Synthetic oligonucleotide
atacactgcacgcaggggtattcataaaag

SEQ ID NO: 451556 - DNA, 30 bp, Artificial Sequence
  Synthetic oligonucleotide
attttaaagccaatttcctggagataaaag

SEQ ID NO: 451557 - DNA, 30 bp, Artificial Sequence
  Synthetic oligonucleotide
tcgcggaggtggggatacaagggataaaag

SEQ ID NO: 451558 - DNA, 30 bp, Artificial Sequence
  Synthetic oligonucleotide
taagtccttttcaggggcttctgataaaag

SEQ ID NO: 451559 - DNA, 30 bp, Artificial Sequence
  Synthetic oligonucleotide
cgccaatcgccgtgagggtcatactaaaag

SEQ ID NO: 451560 - DNA, 30 bp, Artificial Sequence
  Synthetic oligonucleotide
tatgaggaggcttccactgaacgctaaaag

SEQ ID NO: 451561 - DNA, 30 bp, Artificial Sequence
  Synthetic oligonucleotide
gatgcctcccacttaactgccgtctaaaag

SEQ ID NO: 451562 - DNA, 30 bp, Artificial Sequence
  Synthetic oligonucleotide
aaatgggtggtgtttttttctgggtaaaag

SEQ ID NO: 451563 - DNA, 30 bp, Artificial Sequence
  Synthetic oligonucleotide
tccagagactaatgacaggacttttaaaag

SEQ ID NO: 451564 - DNA, 30 bp, Artificial Sequence
  Synthetic oligonucleotide
ctggtaacagatgtcgcattgtgaacaaag

SEQ ID NO: 451565 - DNA, 30 bp, Artificial Sequence
  Synthetic oligonucleotide
caatgtatcacgtgtggttaatccacaaag

SEQ ID NO: 451566 - DNA, 30 bp, Artificial Sequence
  Synthetic oligonucleotide
tattataggtcctaggatcaacgcacaaag

SEQ ID NO: 451567 - DNA, 30 bp, Artificial Sequence
  Synthetic oligonucleotide
atccatgccttccgtaggaactgcacaaag

SEQ ID NO: 451568 - DNA, 30 bp, Artificial Sequence
  Synthetic oligonucleotide
tctattatatactaggtggcttttacaaag

SEQ ID NO: 451569 - DNA, 30 bp, Artificial Sequence
  Synthetic oligonucleotide
caccgcgtggaatgcagccgtagaccaaag

SEQ ID NO: 451570 - DNA, 30 bp, Artificial Sequence
  Synthetic oligonucleotide
gccgttctaatctgcgcaaatttaccaaag

SEQ ID NO: 451571 - DNA, 30 bp, Artificial Sequence
  Synthetic oligonucleotide
ataattgatctgatgaagcgttcgccaaag

SEQ ID NO: 451572 - DNA, 30 bp, Artificial Sequence
  Synthetic oligonucleotide
gagaaatgccgtggggatctggttccaaag

SEQ ID NO: 451573 - DNA, 30 bp, Artificial Sequence
  Synthetic oligonucleotide
ggtgggggaaagttttagccggcagcaaag

SEQ ID NO: 451574 - DNA, 30 bp, Artificial Sequence
  Synthetic oligonucleotide
gccctagtattagcacaatgctaggcaaag

SEQ ID NO: 451575 - DNA, 30 bp, Artificial Sequence
  Synthetic oligonucleotide
ttctttatacattaatcgggagcggcaaag

SEQ ID NO: 451576 - DNA, 30 bp, Artificial Sequence
  Synthetic oligonucleotide
tgatgcttcatggagcttttcgcggcaaag

SEQ ID NO: 451577 - DNA, 30 bp, Artificial Sequence
  Synthetic oligonucleotide
gacaatagcccagcctttcgccgggcaaag

SEQ ID NO: 451578 - DNA, 30 bp, Artificial Sequence
  Synthetic oligonucleotide
ctgtgcgttcccaaagcgttggaatcaaag

SEQ ID NO: 451579 - DNA, 30 bp, Artificial Sequence
  Synthetic oligonucleotide
gacaattgatgacgaagacaaccatcaaag

SEQ ID NO: 451580 - DNA, 30 bp, Artificial Sequence
  Synthetic oligonucleotide
actcttgatttagtatcgagagtatcaaag

SEQ ID NO: 451581 - DNA, 30 bp, Artificial Sequence
  Synthetic oligonucleotide
cccactttacatttattcatagcctcaaag

SEQ ID NO: 451582 - DNA, 30 bp, Artificial Sequence
  Synthetic oligonucleotide
ctgccaggccccttcgaaattttctcaaag

SEQ ID NO: 451583 - DNA, 30 bp, Artificial Sequence
  Synthetic oligonucleotide
gcccggtgtccggaatcatgcaggtcaaag

SEQ ID NO: 451584 - DNA, 30 bp, Artificial Sequence
  Synthetic oligonucleotide
ttagcgacggagtaccgctaggattcaaag

SEQ ID NO: 451585 - DNA, 30 bp, Artificial Sequence
  Synthetic oligonucleotide
aaaaattggaggtaaaagctccgaagaaag

SEQ ID NO: 451586 - DNA, 30 bp, Artificial Sequence
  Synthetic oligonucleotide
gtgttcgttctacgaagcattcccagaaag

SEQ ID NO: 451587 - DNA, 30 bp, Artificial Sequence
  Synthetic oligonucleotide
tcttcatctgtacgtgcgcgtgtcagaaag

SEQ ID NO: 451588 - DNA, 30 bp, Artificial Sequence
  Synthetic oligonucleotide
tgtgatcggatagactgaggggagagaaag

SEQ ID NO: 451589 - DNA, 30 bp, Artificial Sequence
  Synthetic oligonucleotide
acgtaagaagtatcgtgtagctggagaaag

SEQ ID NO: 451590 - DNA, 30 bp, Artificial Sequence
  Synthetic oligonucleotide
gttcatcagcttcttcaaatacaacgaaag

SEQ ID NO: 451591 - DNA, 30 bp, Artificial Sequence
  Synthetic oligonucleotide
tcagattgccctggtaaccctttacgaaag

SEQ ID NO: 451592 - DNA, 30 bp, Artificial Sequence
  Synthetic oligonucleotide
attctttacgtatcactgttatttcgaaag

SEQ ID NO: 451593 - DNA, 30 bp, Artificial Sequence
  Synthetic oligonucleotide
aacttgtattcagttataaaactaggaaag

SEQ ID NO: 451594 - DNA, 30 bp, Artificial Sequence
  Synthetic oligonucleotide
atgcgggaccctgggccaattggcggaaag

SEQ ID NO: 451595 - DNA, 30 bp, Artificial Sequence
  Synthetic oligonucleotide
tcttatttgcgtgaaaactaagtcggaaag

SEQ ID NO: 451596 - DNA, 30 bp, Artificial Sequence
  Synthetic oligonucleotide
aagtaggtgtgcaagtctcctttgggaaag

SEQ ID NO: 451597 - DNA, 30 bp, Artificial Sequence
  Synthetic oligonucleotide
aattctaaccgtaaacctaggcactgaaag

SEQ ID NO: 451598 - DNA, 30 bp, Artificial Sequence
  Synthetic oligonucleotide
acttgacgagatcgtcattggtcctgaaag

SEQ ID NO: 451599 - DNA, 30 bp, Artificial Sequence
  Synthetic oligonucleotide
caagtatcacttccggacgtcctctgaaag

SEQ ID NO: 451600 - DNA, 30 bp, Artificial Sequence
  Synthetic oligonucleotide
tggacacagcacgcggcccataagtgaaag

SEQ ID NO: 451601 - DNA, 30 bp, Artificial Sequence
  Synthetic oligonucleotide
cctcaaggggtcataacgggcgggtgaaag

SEQ ID NO: 451602 - DNA, 30 bp, Artificial Sequence
  Synthetic oligonucleotide
atccgtctctgccactcaggctggtgaaag

SEQ ID NO: 451603 - DNA, 30 bp, Artificial Sequence
  Synthetic oligonucleotide
gcccttaaggtctttttagcacgttgaaag

SEQ ID NO: 451604 - DNA, 30 bp, Artificial Sequence
  Synthetic oligonucleotide
acgctgcactgagtgtttttgcccataaag

SEQ ID NO: 451605 - DNA, 30 bp, Artificial Sequence
  Synthetic oligonucleotide
atagtaactttgttacactgggccataaag

SEQ ID NO: 451606 - DNA, 30 bp, Artificial Sequence
  Synthetic oligonucleotide
aagctggttttgggaactcaaagcataaag

SEQ ID NO: 451607 - DNA, 30 bp, Artificial Sequence
  Synthetic oligonucleotide
tttaagtggcatcttgatgctacgataaag

SEQ ID NO: 451608 - DNA, 30 bp, Artificial Sequence
  Synthetic oligonucleotide
tcggttttaaccgaggaggatattataaag

SEQ ID NO: 451609 - DNA, 29 bp, Artificial Sequence
  Synthetic oligonucleotide
acatgaggtttgatgtagtctttataaag

SEQ ID NO: 451610 - DNA, 30 bp, Artificial Sequence
  Synthetic oligonucleotide
gtcattacaatgggcccttcgtaactaaag

SEQ ID NO: 451611 - DNA, 30 bp, Artificial Sequence
  Synthetic oligonucleotide
tctctgtaggtgcgtgctctactactaaag

SEQ ID NO: 451612 - DNA, 30 bp, Artificial Sequence
  Synthetic oligonucleotide
gtgatctgtatggtccctcactccctaaag

SEQ ID NO: 451613 - DNA, 30 bp, Artificial Sequence
  Synthetic oligonucleotide
cctcccacgatgttaaccacggatctaaag

SEQ ID NO: 451614 - DNA, 30 bp, Artificial Sequence
  Synthetic oligonucleotide
catgtacccgcgcactcagtgacagtaaag

SEQ ID NO: 451615 - DNA, 30 bp, Artificial Sequence
  Synthetic oligonucleotide
ttgtgagtagaagggacatacagagtaaag

SEQ ID NO: 451616 - DNA, 30 bp, Artificial Sequence
  Synthetic oligonucleotide
tttggctgcatttgggcgtcccccgtaaag

SEQ ID NO: 451617 - DNA, 30 bp, Artificial Sequence
  Synthetic oligonucleotide
cgtatacaacgctggattacagccgtaaag

SEQ ID NO: 451618 - DNA, 30 bp, Artificial Sequence
  Synthetic oligonucleotide
tagcggcacggatattgctacgtcgtaaag

SEQ ID NO: 451619 - DNA, 30 bp, Artificial Sequence
  Synthetic oligonucleotide
ctagttattaacgttatgatcttggtaaag

SEQ ID NO: 451620 - DNA, 30 bp, Artificial Sequence
  Synthetic oligonucleotide
tccgtctgggaattcgaacttaatgtaaag

SEQ ID NO: 451621 - DNA, 30 bp, Artificial Sequence
  Synthetic oligonucleotide
cccatgctgaagatctctttgggtgtaaag

SEQ ID NO: 451622 - DNA, 30 bp, Artificial Sequence
  Synthetic oligonucleotide
cgcatatgctaagagcacttcacattaaag

SEQ ID NO: 451623 - DNA, 30 bp, Artificial Sequence
  Synthetic oligonucleotide
atgtactacatgtcacagcgtacattaaag

SEQ ID NO: 451624 - DNA, 30 bp, Artificial Sequence
  Synthetic oligonucleotide
agagggacggcagcgaacagtatattaaag

SEQ ID NO: 451625 - DNA, 30 bp, Artificial Sequence
  Synthetic oligonucleotide
accacccttgcttcaactacctacttaaag

SEQ ID NO: 451626 - DNA, 30 bp, Artificial Sequence
  Synthetic oligonucleotide
tgatcgatgccatgcactcatcccttaaag

SEQ ID NO: 451627 - DNA, 30 bp, Artificial Sequence
  Synthetic oligonucleotide
aactgttgacgagaacccctagagttaaag

SEQ ID NO: 451628 - DNA, 30 bp, Artificial Sequence
  Synthetic oligonucleotide
ttgcgatgtataatgatatatttgttaaag

SEQ ID NO: 451629 - DNA, 30 bp, Artificial Sequence
  Synthetic oligonucleotide
gacgtgcgttttttaaacgcacctttaaag

SEQ ID NO: 451630 - DNA, 30 bp, Artificial Sequence
  Synthetic oligonucleotide
ccgcgcgtgaattaatatactcttttaaag

SEQ ID NO: 451631 - DNA, 30 bp, Artificial Sequence
  Synthetic oligonucleotide
tctatctagaataaggggacggttttaaag

SEQ ID NO: 451632 - DNA, 30 bp, Artificial Sequence
  Synthetic oligonucleotide
gtacttaataattaagctggcataaacaag

SEQ ID NO: 451633 - DNA, 30 bp, Artificial Sequence
  Synthetic oligonucleotide
gtctctaatatttccgtctggatcaacaag

SEQ ID NO: 451634 - DNA, 30 bp, Artificial Sequence
  Synthetic oligonucleotide
ccggtctcgacgcctgggtatctcaacaag

SEQ ID NO: 451635 - DNA, 30 bp, Artificial Sequence
  Synthetic oligonucleotide
ttccgcccgcaagggggatgggtcaacaag

SEQ ID NO: 451636 - DNA, 30 bp, Artificial Sequence
  Synthetic oligonucleotide
gttatcccgggcgcagacgaaatgaacaag

SEQ ID NO: 451637 - DNA, 30 bp, Artificial Sequence
  Synthetic oligonucleotide
gccttgggtaatgatgatatgacacacaag

SEQ ID NO: 451638 - DNA, 30 bp, Artificial Sequence
  Synthetic oligonucleotide
gctttttgtgcgttcccgtatgcacacaag

SEQ ID NO: 451639 - DNA, 30 bp, Artificial Sequence
  Synthetic oligonucleotide
cggccccgtctagtcggagcgcaccacaag

SEQ ID NO: 451640 - DNA, 30 bp, Artificial Sequence
  Synthetic oligonucleotide
aaccgagtgaactagagagagacccacaag

SEQ ID NO: 451641 - DNA, 30 bp, Artificial Sequence
  Synthetic oligonucleotide
attgctagatgggtgataaatattcacaag

SEQ ID NO: 451642 - DNA, 30 bp, Artificial Sequence
  Synthetic oligonucleotide
gggtagtagcggggaccgctgggcgacaag

SEQ ID NO: 451643 - DNA, 30 bp, Artificial Sequence
  Synthetic oligonucleotide
cagtacaccgcaggcctctggctctacaag

SEQ ID NO: 451644 - DNA, 30 bp, Artificial Sequence
  Synthetic oligonucleotide
gccaggacatagggcgctcttttctacaag

SEQ ID NO: 451645 - DNA, 30 bp, Artificial Sequence
  Synthetic oligonucleotide
aaaaacgcattttacgagaagacgtacaag

SEQ ID NO: 451646 - DNA, 30 bp, Artificial Sequence
  Synthetic oligonucleotide
atactaaactctcggtacgccatgtacaag

SEQ ID NO: 451647 - DNA, 30 bp, Artificial Sequence
  Synthetic oligonucleotide
ttgctagttggtgttgagactgtgtacaag

SEQ ID NO: 451648 - DNA, 30 bp, Artificial Sequence
  Synthetic oligonucleotide
attgtatctctaaactcggtacgttacaag

SEQ ID NO: 451649 - DNA, 30 bp, Artificial Sequence
  Synthetic oligonucleotide
tatcttccatgttgtattcaccctaccaag

SEQ ID NO: 451650 - DNA, 30 bp, Artificial Sequence
  Synthetic oligonucleotide
ggaggtactgcggccttgaatgctaccaag

SEQ ID NO: 451651 - DNA, 30 bp, Artificial Sequence
  Synthetic oligonucleotide
tagatgttaaaaagcagtggctgacccaag

SEQ ID NO: 451652 - DNA, 30 bp, Artificial Sequence
  Synthetic oligonucleotide
tgccgccgcttctcctctttttagcccaag

SEQ ID NO: 451653 - DNA, 30 bp, Artificial Sequence
  Synthetic oligonucleotide
agcggcgagtaagtgtttaggattcccaag

SEQ ID NO: 451654 - DNA, 30 bp, Artificial Sequence
  Synthetic oligonucleotide
actaacactgggggtgaggaggcagccaag

SEQ ID NO: 451655 - DNA, 30 bp, Artificial Sequence
  Synthetic oligonucleotide
ggttaggcgctaatatataggtacgccaag

SEQ ID NO: 451656 - DNA, 30 bp, Artificial Sequence
  Synthetic oligonucleotide
gaaatactacatatccgggatacggccaag

SEQ ID NO: 451657 - DNA, 30 bp, Artificial Sequence
  Synthetic oligonucleotide
cagcggaatggcgtgacaagaccggccaag

SEQ ID NO: 451658 - DNA, 30 bp, Artificial Sequence
  Synthetic oligonucleotide
gtagatggcggctgttttggtcctgccaag

SEQ ID NO: 451659 - DNA, 30 bp, Artificial Sequence
  Synthetic oligonucleotide
gcacaggtgcaaaccaagggggttgccaag

SEQ ID NO: 451660 - DNA, 30 bp, Artificial Sequence
  Synthetic oligonucleotide
ctgcgggggcttgattatccaaaatccaag

SEQ ID NO: 451661 - DNA, 30 bp, Artificial Sequence
  Synthetic oligonucleotide
ggttcaggatgtttaatcagtaaatccaag

SEQ ID NO: 451662 - DNA, 30 bp, Artificial Sequence
  Synthetic oligonucleotide
taactcagaggcccgaccaaggtctccaag

SEQ ID NO: 451663 - DNA, 30 bp, Artificial Sequence
  Synthetic oligonucleotide
tcttagttgtgaatgatctgatattccaag

SEQ ID NO: 451664 - DNA, 30 bp, Artificial Sequence
  Synthetic oligonucleotide
ccagccctagcttaatgcagtctttccaag

SEQ ID NO: 451665 - DNA, 30 bp, Artificial Sequence
  Synthetic oligonucleotide
tggcacgtttttttagtacaaaaaagcaag

SEQ ID NO: 451666 - DNA, 30 bp, Artificial Sequence
  Synthetic oligonucleotide
tacccctgtaggagtcagggcgcaagcaag

SEQ ID NO: 451667 - DNA, 30 bp, Artificial Sequence
  Synthetic oligonucleotide
cagccgtttgggcttgtccgacgaagcaag

SEQ ID NO: 451668 - DNA, 30 bp, Artificial Sequence
  Synthetic oligonucleotide
gcgcttagctgcacggctgccgagagcaag

SEQ ID NO: 451669 - DNA, 30 bp, Artificial Sequence
  Synthetic oligonucleotide
atagcacaaaccatgtcaaggacgagcaag

SEQ ID NO: 451670 - DNA, 30 bp, Artificial Sequence
  Synthetic oligonucleotide
cagtatttcaacttgctttttgggagcaag

SEQ ID NO: 451671 - DNA, 30 bp, Artificial Sequence
  Synthetic oligonucleotide
tagattatcggcggcacatccaatagcaag

SEQ ID NO: 451672 - DNA, 30 bp, Artificial Sequence
  Synthetic oligonucleotide
agagcctgggtagatttactctctagcaag

SEQ ID NO: 451673 - DNA, 30 bp, Artificial Sequence
  Synthetic oligonucleotide
acaatgagaatggggttgtctatccgcaag

SEQ ID NO: 451674 - DNA, 30 bp, Artificial Sequence
  Synthetic oligonucleotide
taattccaataggtgagtataacgcgcaag

SEQ ID NO: 451675 - DNA, 30 bp, Artificial Sequence
  Synthetic oligonucleotide
tttggtatataccggtttatctatcgcaag

SEQ ID NO: 451676 - DNA, 30 bp, Artificial Sequence
  Synthetic oligonucleotide
tagtctatatttactggggttcttcgcaag

SEQ ID NO: 451677 - DNA, 30 bp, Artificial Sequence
  Synthetic oligonucleotide
atgcctccaagaccttagcactgaggcaag

SEQ ID NO: 451678 - DNA, 30 bp, Artificial Sequence
  Synthetic oligonucleotide
atgccatagacggacgtggcatccggcaag

SEQ ID NO: 451679 - DNA, 30 bp, Artificial Sequence
  Synthetic oligonucleotide
ggtgcagaggagacgccctggggcggcaag

SEQ ID NO: 451680 - DNA, 30 bp, Artificial Sequence
  Synthetic oligonucleotide
gagaagccttggaagcacccagatggcaag

SEQ ID NO: 451681 - DNA, 30 bp, Artificial Sequence
  Synthetic oligonucleotide
gcgtggtttttaaaccgttagtatggcaag

SEQ ID NO: 451682 - DNA, 30 bp, Artificial Sequence
  Synthetic oligonucleotide
gcatttcagtattttacgtaagaatgcaag

SEQ ID NO: 451683 - DNA, 30 bp, Artificial Sequence
  Synthetic oligonucleotide
gtattatttgctcacgcaatagtatgcaag

SEQ ID NO: 451684 - DNA, 30 bp, Artificial Sequence
  Synthetic oligonucleotide
aataacggtgtgttattatgtacctgcaag

SEQ ID NO: 451685 - DNA, 30 bp, Artificial Sequence
  Synthetic oligonucleotide
acctatactaacttccgagactgctgcaag

SEQ ID NO: 451686 - DNA, 30 bp, Artificial Sequence
  Synthetic oligonucleotide
ccctgtgaccgcttttgagtgagttgcaag

SEQ ID NO: 451687 - DNA, 30 bp, Artificial Sequence
  Synthetic oligonucleotide
accggctagggccggattgaaggaatcaag

SEQ ID NO: 451688 - DNA, 30 bp, Artificial Sequence
  Synthetic oligonucleotide
gtttgatggttggcacctccaggaatcaag

SEQ ID NO: 451689 - DNA, 30 bp, Artificial Sequence
  Synthetic oligonucleotide
gatgagatgccactgtgcgctaccatcaag

SEQ ID NO: 451690 - DNA, 30 bp, Artificial Sequence
  Synthetic oligonucleotide
ccccccccggtaaactccgatccgatcaag

SEQ ID NO: 451691 - DNA, 30 bp, Artificial Sequence
  Synthetic oligonucleotide
gttattaatgtatatatgtcggggatcaag

SEQ ID NO: 451692 - DNA, 30 bp, Artificial Sequence
  Synthetic oligonucleotide
aagtccagttatactttaaccatgatcaag

SEQ ID NO: 451693 - DNA, 30 bp, Artificial Sequence
  Synthetic oligonucleotide
gcatgttgtgtatttccgcggatgatcaag

SEQ ID NO: 451694 - DNA, 30 bp, Artificial Sequence
  Synthetic oligonucleotide
gggtactagttggttcaatggatgatcaag

SEQ ID NO: 451695 - DNA, 30 bp, Artificial Sequence
  Synthetic oligonucleotide
cggtagaggctgcgctgactttgtatcaag

SEQ ID NO: 451696 - DNA, 30 bp, Artificial Sequence
  Synthetic oligonucleotide
atcaggacaacgcagctttaagggctcaag

SEQ ID NO: 451697 - DNA, 30 bp, Artificial Sequence
  Synthetic oligonucleotide
agtggtgttataaattgtcttagcgtcaag

SEQ ID NO: 451698 - DNA, 30 bp, Artificial Sequence
  Synthetic oligonucleotide
aacaccctgtgtgggtagggctatgtcaag

SEQ ID NO: 451699 - DNA, 30 bp, Artificial Sequence
  Synthetic oligonucleotide
tactgatgttgcgtgacacaccgtgtcaag

SEQ ID NO: 451700 - DNA, 30 bp, Artificial Sequence
  Synthetic oligonucleotide
aagtgcggctatagccgtattgaattcaag

SEQ ID NO: 451701 - DNA, 30 bp, Artificial Sequence
  Synthetic oligonucleotide
acgggagccttgagcaggggagcattcaag

SEQ ID NO: 451702 - DNA, 30 bp, Artificial Sequence
  Synthetic oligonucleotide
agttatttatagagctccgggtgattcaag

SEQ ID NO: 451703 - DNA, 30 bp, Artificial Sequence
  Synthetic oligonucleotide
aatgtggtccgcatcccacgactattcaag

SEQ ID NO: 451704 - DNA, 30 bp, Artificial Sequence
  Synthetic oligonucleotide
aagcttgtagttcatcccctgtaaaagaag

SEQ ID NO: 451705 - DNA, 30 bp, Artificial Sequence
  Synthetic oligonucleotide
gttgagactgggttcgtatccataaagaag

SEQ ID NO: 451706 - DNA, 30 bp, Artificial Sequence
  Synthetic oligonucleotide
attttgtcaagcaaaatcgttaacaagaag

SEQ ID NO: 451707 - DNA, 30 bp, Artificial Sequence
  Synthetic oligonucleotide
gctgtatgaatactgagacgtctgaagaag

SEQ ID NO: 451708 - DNA, 30 bp, Artificial Sequence
  Synthetic oligonucleotide
ggatcctgcacgcgggggcgctgacagaag

SEQ ID NO: 451709 - DNA, 30 bp, Artificial Sequence
  Synthetic oligonucleotide
ttagtgcgggggtgatcgttctctcagaag

SEQ ID NO: 451710 - DNA, 30 bp, Artificial Sequence
  Synthetic oligonucleotide
aaccgctaagcggcgtaggactgtcagaag

SEQ ID NO: 451711 - DNA, 30 bp, Artificial Sequence
  Synthetic oligonucleotide
tatatcccaactacagttgggattgagaag

SEQ ID NO: 451712 - DNA, 30 bp, Artificial Sequence
  Synthetic oligonucleotide
agtatgtagcaagtcatccgataatagaag

SEQ ID NO: 451713 - DNA, 30 bp, Artificial Sequence
  Synthetic oligonucleotide
gtccagggttctcatcgcgtatactagaag

SEQ ID NO: 451714 - DNA, 30 bp, Artificial Sequence
  Synthetic oligonucleotide
agattttctggtcagttcataccctagaag

SEQ ID NO: 451715 - DNA, 30 bp, Artificial Sequence
  Synthetic oligonucleotide
ccgtgtaaaatgtaaatggcgtggtagaag

SEQ ID NO: 451716 - DNA, 30 bp, Artificial Sequence
  Synthetic oligonucleotide
ctcggagttcgtaggactaccatgtagaag

SEQ ID NO: 451717 - DNA, 31 bp, Artificial Sequence
  Synthetic oligonucleotide
agggtttctgataccagagtttaagacgaag

SEQ ID NO: 451718 - DNA, 31 bp, Artificial Sequence
  Synthetic oligonucleotide
gttttgcaccaccataggaataaaaccgaag

SEQ ID NO: 451719 - DNA, 30 bp, Artificial Sequence
  Synthetic oligonucleotide
cacccggaacttacaacttctctaccgaag

SEQ ID NO: 451720 - DNA, 30 bp, Artificial Sequence
  Synthetic oligonucleotide
ctcacagttcggagcacctatagcccgaag

SEQ ID NO: 451721 - DNA, 30 bp, Artificial Sequence
  Synthetic oligonucleotide
gtgcttttattgggacccgaactgccgaag

SEQ ID NO: 451722 - DNA, 30 bp, Artificial Sequence
  Synthetic oligonucleotide
tataatgttattcacgggctacatccgaag

SEQ ID NO: 451723 - DNA, 30 bp, Artificial Sequence
  Synthetic oligonucleotide
aggcgtggcttccgccagcggggcgcgaag

SEQ ID NO: 451724 - DNA, 30 bp, Artificial Sequence
  Synthetic oligonucleotide
ttctcaggtcccttatgcaggccggcgaag

SEQ ID NO: 451725 - DNA, 30 bp, Artificial Sequence
  Synthetic oligonucleotide
cggtccgtggatatgtcatcggtggcgaag

SEQ ID NO: 451726 - DNA, 30 bp, Artificial Sequence
  Synthetic oligonucleotide
tctgtatacttagctataaaggctgcgaag

SEQ ID NO: 451727 - DNA, 30 bp, Artificial Sequence
  Synthetic oligonucleotide
taagaccagcatcttctaattaaatcgaag

SEQ ID NO: 451728 - DNA, 30 bp, Artificial Sequence
  Synthetic oligonucleotide
taccccccgggagcagacaaccaatcgaag

SEQ ID NO: 451729 - DNA, 30 bp, Artificial Sequence
  Synthetic oligonucleotide
gaaaagctcatgtactcacgtgcatcgaag

SEQ ID NO: 451730 - DNA, 30 bp, Artificial Sequence
  Synthetic oligonucleotide
atagacgcaagcgaaaggaccaactcgaag

SEQ ID NO: 451731 - DNA, 30 bp, Artificial Sequence
  Synthetic oligonucleotide
gcggtgacggcgagggtttagccctcgaag

SEQ ID NO: 451732 - DNA, 30 bp, Artificial Sequence
  Synthetic oligonucleotide
cccattccgctccacccccttatctcgaag

SEQ ID NO: 451733 - DNA, 30 bp, Artificial Sequence
  Synthetic oligonucleotide
gatgctgatggtcagttgagagggtcgaag

SEQ ID NO: 451734 - DNA, 30 bp, Artificial Sequence
  Synthetic oligonucleotide
tcccgggtcggtgaactaagcctaaggaag

SEQ ID NO: 451735 - DNA, 30 bp, Artificial Sequence
  Synthetic oligonucleotide
tttcctatcggcttagtgtacgccaggaag

SEQ ID NO: 451736 - DNA, 31 bp, Artificial Sequence
  Synthetic oligonucleotide
gataaaacgcttcgatagacgagtgaggaag

SEQ ID NO: 451737 - DNA, 30 bp, Artificial Sequence
  Synthetic oligonucleotide
ccccatatcacgacgcaaccaatacggaag

SEQ ID NO: 451738 - DNA, 30 bp, Artificial Sequence
  Synthetic oligonucleotide
atatacactagccgctaggtctaccggaag

SEQ ID NO: 451739 - DNA, 30 bp, Artificial Sequence
  Synthetic oligonucleotide
attttttacaccaaaaatgcatagcggaag

SEQ ID NO: 451740 - DNA, 30 bp, Artificial Sequence
  Synthetic oligonucleotide
taagtacatgagcagtacctccctcggaag

SEQ ID NO: 451741 - DNA, 30 bp, Artificial Sequence
  Synthetic oligonucleotide
aaatattgccctctggtaaactaagggaag

SEQ ID NO: 451742 - DNA, 30 bp, Artificial Sequence
  Synthetic oligonucleotide
tcagtaaggccggctcctggctccgggaag

SEQ ID NO: 451743 - DNA, 30 bp, Artificial Sequence
  Synthetic oligonucleotide
gcacagagcggagcttttgactgcgggaag

SEQ ID NO: 451744 - DNA, 30 bp, Artificial Sequence
  Synthetic oligonucleotide
cttccagtctccaactatgtccaggggaag

SEQ ID NO: 451745 - DNA, 30 bp, Artificial Sequence
  Synthetic oligonucleotide
tttccatgttgcatgttcagaggtgggaag

SEQ ID NO: 451746 - DNA, 30 bp, Artificial Sequence
  Synthetic oligonucleotide
cctgtcttggcctacttactttgtgggaag

SEQ ID NO: 451747 - DNA, 30 bp, Artificial Sequence
  Synthetic oligonucleotide
tttcgtggagcaattatatattcatggaag

SEQ ID NO: 451748 - DNA, 30 bp, Artificial Sequence
  Synthetic oligonucleotide
ctttaaggttgactgcttctttcctggaag

SEQ ID NO: 451749 - DNA, 30 bp, Artificial Sequence
  Synthetic oligonucleotide
ttgttacagtgtctagtactattctggaag

SEQ ID NO: 451750 - DNA, 30 bp, Artificial Sequence
  Synthetic oligonucleotide
cctaatcctgtttgtgaggtgacgatgaag

SEQ ID NO: 451751 - DNA, 30 bp, Artificial Sequence
  Synthetic oligonucleotide
cctaatcctttttgtgaggtgacgatgaag

SEQ ID NO: 451752 - DNA, 30 bp, Artificial Sequence
  Synthetic oligonucleotide
aggcgcatttcatttcgcacagtgatgaag

SEQ ID NO: 451753 - DNA, 30 bp, Artificial Sequence
  Synthetic oligonucleotide
tgggggggaatttatcgcaggtttatgaag

SEQ ID NO: 451754 - DNA, 30 bp, Artificial Sequence
  Synthetic oligonucleotide
ggcgggacccaagttaccgatctcctgaag

SEQ ID NO: 451755 - DNA, 30 bp, Artificial Sequence
  Synthetic oligonucleotide
agagcacttcaaccctcgtagcgtctgaag

SEQ ID NO: 451756 - DNA, 30 bp, Artificial Sequence
  Synthetic oligonucleotide
ataggcctaactacttgcggcggagtgaag

SEQ ID NO: 451757 - DNA, 30 bp, Artificial Sequence
  Synthetic oligonucleotide
aaaatggtgctgatacgcacggatgtgaag

SEQ ID NO: 451758 - DNA, 30 bp, Artificial Sequence
  Synthetic oligonucleotide
ggattgcttaaatttgacatttgtgtgaag

SEQ ID NO: 451759 - DNA, 30 bp, Artificial Sequence
  Synthetic oligonucleotide
ctgggggacgtgtgtggcattgaattgaag

SEQ ID NO: 451760 - DNA, 30 bp, Artificial Sequence
  Synthetic oligonucleotide
ttggaagggtaagtactcttgggattgaag

SEQ ID NO: 451761 - DNA, 30 bp, Artificial Sequence
  Synthetic oligonucleotide
tcaaactaaggtcattatgaccccttgaag

SEQ ID NO: 451762 - DNA, 30 bp, Artificial Sequence
  Synthetic oligonucleotide
tatatgcgctatcaggattttgtcttgaag

SEQ ID NO: 451763 - DNA, 30 bp, Artificial Sequence
  Synthetic oligonucleotide
tgctctagggaacgtggttaaaagttgaag

SEQ ID NO: 451764 - DNA, 30 bp, Artificial Sequence
  Synthetic oligonucleotide
gattgcgtagctaccgatcggtagttgaag

SEQ ID NO: 451765 - DNA, 30 bp, Artificial Sequence
  Synthetic oligonucleotide
gaagataactgacgcaggatccctttgaag

SEQ ID NO: 451766 - DNA, 30 bp, Artificial Sequence
  Synthetic oligonucleotide
tataagctttgatagtgccagcctttgaag

SEQ ID NO: 451767 - DNA, 30 bp, Artificial Sequence
  Synthetic oligonucleotide
ttggccacattgcagctatgggaaaataag

SEQ ID NO: 451768 - DNA, 30 bp, Artificial Sequence
  Synthetic oligonucleotide
ctctgtgtctattctcggggacgcaataag

SEQ ID NO: 451769 - DNA, 30 bp, Artificial Sequence
  Synthetic oligonucleotide
tataccaacctggcccaaaaccggaataag

SEQ ID NO: 451770 - DNA, 30 bp, Artificial Sequence
  Synthetic oligonucleotide
agtcttcatcttgcaataatgactaataag

SEQ ID NO: 451771 - DNA, 30 bp, Artificial Sequence
  Synthetic oligonucleotide
gtgacagtaagcagtgcgaaactacataag

SEQ ID NO: 451772 - DNA, 30 bp, Artificial Sequence
  Synthetic oligonucleotide
attacctattttatcgtatgcaaccataag

SEQ ID NO: 451773 - DNA, 30 bp, Artificial Sequence
  Synthetic oligonucleotide
ataactagtttatattcatgccaccataag

SEQ ID NO: 451774 - DNA, 30 bp, Artificial Sequence
  Synthetic oligonucleotide
gtgaaatatgtaaaccagtgttgccataag

SEQ ID NO: 451775 - DNA, 30 bp, Artificial Sequence
  Synthetic oligonucleotide
tcttatctaacggggcgatgcccagataag

SEQ ID NO: 451776 - DNA, 30 bp, Artificial Sequence
  Synthetic oligonucleotide
cgtaccatagccgtaacgagtgccgataag

SEQ ID NO: 451777 - DNA, 30 bp, Artificial Sequence
  Synthetic oligonucleotide
atgaacaaggcatgattggctgcatataag

SEQ ID NO: 451778 - DNA, 30 bp, Artificial Sequence
  Synthetic oligonucleotide
gctccagaatcgtttcgccttcgctataag

SEQ ID NO: 451779 - DNA, 30 bp, Artificial Sequence
  Synthetic oligonucleotide
gcttgagccgggattgcgcgcttgtataag

SEQ ID NO: 451780 - DNA, 30 bp, Artificial Sequence
  Synthetic oligonucleotide
gaaagagcttaaagggtctgtacttataag

SEQ ID NO: 451781 - DNA, 30 bp, Artificial Sequence
  Synthetic oligonucleotide
ggcatcgagcgcgagcctggcccttataag

SEQ ID NO: 451782 - DNA, 30 bp, Artificial Sequence
  Synthetic oligonucleotide
actcttagcacgacatgtagtagttataag

SEQ ID NO: 451783 - DNA, 30 bp, Artificial Sequence
  Synthetic oligonucleotide
gatttgaagccgaaggctccattaactaag

SEQ ID NO: 451784 - DNA, 30 bp, Artificial Sequence
  Synthetic oligonucleotide
aacaataacgcccccattgacggcactaag

SEQ ID NO: 451785 - DNA, 31 bp, Artificial Sequence
  Synthetic oligonucleotide
caccttagtcggtagtctgccactgactaag

SEQ ID NO: 451786 - DNA, 30 bp, Artificial Sequence
  Synthetic oligonucleotide
gcgctcaggtagggcggaacatttactaag

SEQ ID NO: 451787 - DNA, 30 bp, Artificial Sequence
  Synthetic oligonucleotide
ctacccgatgtcctggcatgctcgcctaag

SEQ ID NO: 451788 - DNA, 30 bp, Artificial Sequence
  Synthetic oligonucleotide
agacccggcagcgtatcattaattcctaag

SEQ ID NO: 451789 - DNA, 30 bp, Artificial Sequence
  Synthetic oligonucleotide
atatacacctatggtgttgattgagctaag

SEQ ID NO: 451790 - DNA, 30 bp, Artificial Sequence
  Synthetic oligonucleotide
ctggccattaagcagcgataactagctaag

SEQ ID NO: 451791 - DNA, 30 bp, Artificial Sequence
  Synthetic oligonucleotide
agtttcatgttgtagtccactcacgctaag

SEQ ID NO: 451792 - DNA, 30 bp, Artificial Sequence
  Synthetic oligonucleotide
aacgaacgcccagcacgcgtcgccgctaag

SEQ ID NO: 451793 - DNA, 30 bp, Artificial Sequence
  Synthetic oligonucleotide
cgccgtcagttgcataataccaatgctaag

SEQ ID NO: 451794 - DNA, 30 bp, Artificial Sequence
  Synthetic oligonucleotide
gcaattagactgagctggggcggtgctaag

SEQ ID NO: 451795 - DNA, 30 bp, Artificial Sequence
  Synthetic oligonucleotide
gatttggtcttcccaaagtcccttgctaag

SEQ ID NO: 451796 - DNA, 30 bp, Artificial Sequence
  Synthetic oligonucleotide
tggccgtggtgtagcgatcgcagatctaag

SEQ ID NO: 451797 - DNA, 30 bp, Artificial Sequence
  Synthetic oligonucleotide
tgtgtaggattaaatatatgggtatctaag

SEQ ID NO: 451798 - DNA, 30 bp, Artificial Sequence
  Synthetic oligonucleotide
attgcggccagaatctagcgctgctctaag

SEQ ID NO: 451799 - DNA, 30 bp, Artificial Sequence
  Synthetic oligonucleotide
cagcgttttggattttggcaaatgtctaag

SEQ ID NO: 451800 - DNA, 30 bp, Artificial Sequence
  Synthetic oligonucleotide
gcactcctcacacaagctgtattgtctaag

SEQ ID NO: 451801 - DNA, 30 bp, Artificial Sequence
  Synthetic oligonucleotide
tcgcattaaggaacgctactgggttctaag

SEQ ID NO: 451802 - DNA, 30 bp, Artificial Sequence
  Synthetic oligonucleotide
tccctgccacttctcctggtacacagtaag

SEQ ID NO: 451803 - DNA, 30 bp, Artificial Sequence
  Synthetic oligonucleotide
tggtgccggtatgttacggtgcgcagtaag

SEQ ID NO: 451804 - DNA, 30 bp, Artificial Sequence
  Synthetic oligonucleotide
tttaaataggtgcccccggtcatcagtaag

SEQ ID NO: 451805 - DNA, 30 bp, Artificial Sequence
  Synthetic oligonucleotide
tgaagtcgcaagcttaatcgatcgagtaag

SEQ ID NO: 451806 - DNA, 30 bp, Artificial Sequence
  Synthetic oligonucleotide
tcattatttgaagagactggggggagtaag

SEQ ID NO: 451807 - DNA, 30 bp, Artificial Sequence
  Synthetic oligonucleotide
gcctctgactggggtcagtagtgtagtaag

SEQ ID NO: 451808 - DNA, 30 bp, Artificial Sequence
  Synthetic oligonucleotide
gtccctcaagttcaacaactttaacgtaag

SEQ ID NO: 451809 - DNA, 30 bp, Artificial Sequence
  Synthetic oligonucleotide
gtcaaggcttgctgcaatgctcagcgtaag

SEQ ID NO: 451810 - DNA, 30 bp, Artificial Sequence
  Synthetic oligonucleotide
agctattctagtttaagaaggccgcgtaag

SEQ ID NO: 451811 - DNA, 30 bp, Artificial Sequence
  Synthetic oligonucleotide
aacctttacacgtaacccgtttcgcgtaag

SEQ ID NO: 451812 - DNA, 30 bp, Artificial Sequence
  Synthetic oligonucleotide
ttcgcaccgtcgaccgcgcgaacaggtaag

SEQ ID NO: 451813 - DNA, 30 bp, Artificial Sequence
  Synthetic oligonucleotide
catgcattcattaaaaatcaagcaggtaag

SEQ ID NO: 451814 - DNA, 30 bp, Artificial Sequence
  Synthetic oligonucleotide
aattttggtagaaaggtgaggagaggtaag

SEQ ID NO: 451815 - DNA, 30 bp, Artificial Sequence
  Synthetic oligonucleotide
gaatcgatctcgcggtactttggaggtaag

SEQ ID NO: 451816 - DNA, 30 bp, Artificial Sequence
  Synthetic oligonucleotide
ttactgtgttaatcgggcgaggtaggtaag

SEQ ID NO: 451817 - DNA, 30 bp, Artificial Sequence
  Synthetic oligonucleotide
acccagatgtgctcactaacggcgggtaag

SEQ ID NO: 451818 - DNA, 30 bp, Artificial Sequence
  Synthetic oligonucleotide
accttttgatcggggttgcgcaggggtaag

SEQ ID NO: 451819 - DNA, 30 bp, Artificial Sequence
  Synthetic oligonucleotide
gcatgcgctcctcagggaggcgggggtaag

SEQ ID NO: 451820 - DNA, 30 bp, Artificial Sequence
  Synthetic oligonucleotide
tcgggttattttttattgggggggggtaag

SEQ ID NO: 451821 - DNA, 30 bp, Artificial Sequence
  Synthetic oligonucleotide
aaaagtctcctgcccagtgtcctctgtaag

SEQ ID NO: 451822 - DNA, 30 bp, Artificial Sequence
  Synthetic oligonucleotide
atttttcagaagtgttttccaaattgtaag

SEQ ID NO: 451823 - DNA, 30 bp, Artificial Sequence
  Synthetic oligonucleotide
ctttcagtctgggtcgcgcgtcattgtaag

SEQ ID NO: 451824 - DNA, 30 bp, Artificial Sequence
  Synthetic oligonucleotide
taattggggataaagaaattatcttgtaag

SEQ ID NO: 451825 - DNA, 30 bp, Artificial Sequence
  Synthetic oligonucleotide
tcaatctatgggaatttttatgtttgtaag

SEQ ID NO: 451826 - DNA, 30 bp, Artificial Sequence
  Synthetic oligonucleotide
attaaccaaacgcgcagtgtttgaattaag

SEQ ID NO: 451827 - DNA, 30 bp, Artificial Sequence
  Synthetic oligonucleotide
gctgtgtataaatgttagcgccgcattaag

SEQ ID NO: 451828 - DNA, 30 bp, Artificial Sequence
  Synthetic oligonucleotide
tatttctgaggcgagtccaagaatattaag

SEQ ID NO: 451829 - DNA, 30 bp, Artificial Sequence
  Synthetic oligonucleotide
tactattacctgtcgcggtatattattaag

SEQ ID NO: 451830 - DNA, 30 bp, Artificial Sequence
  Synthetic oligonucleotide
agtatcaagtagctgtgttacatacttaag

SEQ ID NO: 451831 - DNA, 30 bp, Artificial Sequence
  Synthetic oligonucleotide
attcaagaaatttgggcgtggcaccttaag

SEQ ID NO: 451832 - DNA, 26 bp, Artificial Sequence
  Synthetic oligonucleotide
acccgcccgttatagcacgtcttaag

SEQ ID NO: 451833 - DNA, 30 bp, Artificial Sequence
  Synthetic oligonucleotide
agtctagtctaggcacggggcacagttaag

SEQ ID NO: 451834 - DNA, 30 bp, Artificial Sequence
  Synthetic oligonucleotide
gtggatatgtatgaattaaagggagttaag

SEQ ID NO: 451835 - DNA, 30 bp, Artificial Sequence
  Synthetic oligonucleotide
tttctggaagtcccccacattagcgttaag

SEQ ID NO: 451836 - DNA, 30 bp, Artificial Sequence
  Synthetic oligonucleotide
aaatgttttctgcacgcctagaaggttaag

SEQ ID NO: 451837 - DNA, 30 bp, Artificial Sequence
  Synthetic oligonucleotide
tgacggggcacaatagccagatgatttaag

SEQ ID NO: 451838 - DNA, 30 bp, Artificial Sequence
  Synthetic oligonucleotide
gcgggcccagagtaatatatcagctttaag

SEQ ID NO: 451839 - DNA, 30 bp, Artificial Sequence
  Synthetic oligonucleotide
agttaccgcttgggcacgtctatgtttaag

SEQ ID NO: 451840 - DNA, 30 bp, Artificial Sequence
  Synthetic oligonucleotide
gtgtacacacaatacgaacaattgtttaag

SEQ ID NO: 451841 - DNA, 30 bp, Artificial Sequence
  Synthetic oligonucleotide
gtactactcagggcgggggcagcttttaag

SEQ ID NO: 451842 - DNA, 30 bp, Artificial Sequence
  Synthetic oligonucleotide
ttgctaggctagccttcgttttgttttaag

SEQ ID NO: 451843 - DNA, 30 bp, Artificial Sequence
  Synthetic oligonucleotide
ggttttctgggacatcccagtttttttaag

SEQ ID NO: 451844 - DNA, 30 bp, Artificial Sequence
  Synthetic oligonucleotide
gacatgcagcagtcgcccgggttaaaacag

SEQ ID NO: 451845 - DNA, 30 bp, Artificial Sequence
  Synthetic oligonucleotide
cgggtgcaatctgcgacattgatcaaacag

SEQ ID NO: 451846 - DNA, 30 bp, Artificial Sequence
  Synthetic oligonucleotide
attcattcagtagaattagacgtgaaacag

SEQ ID NO: 451847 - DNA, 31 bp, Artificial Sequence
  Synthetic oligonucleotide
cgacgcagtctattgtgcatcaaagcaacag

SEQ ID NO: 451848 - DNA, 30 bp, Artificial Sequence
  Synthetic oligonucleotide
cttgtccaatatgaaatccgtaaagaacag

SEQ ID NO: 451849 - DNA, 30 bp, Artificial Sequence
  Synthetic oligonucleotide
aattgtttgtttaaatctagtccagaacag

SEQ ID NO: 451850 - DNA, 30 bp, Artificial Sequence
  Synthetic oligonucleotide
agaaacttcggcactgaccaaactgaacag

SEQ ID NO: 451851 - DNA, 30 bp, Artificial Sequence
  Synthetic oligonucleotide
agtctgatgctcttcgatgcgcctgaacag

SEQ ID NO: 451852 - DNA, 30 bp, Artificial Sequence
  Synthetic oligonucleotide
aaatacccgccgaatgtatagtgtgaacag

SEQ ID NO: 451853 - DNA, 30 bp, Artificial Sequence
  Synthetic oligonucleotide
taggccttgggttggtgggaatttgaacag

SEQ ID NO: 451854 - DNA, 30 bp, Artificial Sequence
  Synthetic oligonucleotide
agtaatacgttttgtacttcttttgaacag

SEQ ID NO: 451855 - DNA, 30 bp, Artificial Sequence
  Synthetic oligonucleotide
gctactgcttcgtctcaagtacactaacag

SEQ ID NO: 451856 - DNA, 30 bp, Artificial Sequence
  Synthetic oligonucleotide
tatactccaggatctgacaatagttaacag

SEQ ID NO: 451857 - DNA, 30 bp, Artificial Sequence
  Synthetic oligonucleotide
tacttacgcgaggctagtgcgtgttaacag

SEQ ID NO: 451858 - DNA, 30 bp, Artificial Sequence
  Synthetic oligonucleotide
tcgggtcaatcggcacagtagctttaacag

SEQ ID NO: 451859 - DNA, 30 bp, Artificial Sequence
  Synthetic oligonucleotide
gtaattacgacgtttggtacggtttaacag

SEQ ID NO: 451860 - DNA, 30 bp, Artificial Sequence
  Synthetic oligonucleotide
agaattattgtaagatttaattcaacacag

SEQ ID NO: 451861 - DNA, 30 bp, Artificial Sequence
  Synthetic oligonucleotide
ttttagggcttacgttagctgtacacacag

SEQ ID NO: 451862 - DNA, 30 bp, Artificial Sequence
  Synthetic oligonucleotide
ttccgacttgttaatgatgaaacgacacag

SEQ ID NO: 451863 - DNA, 30 bp, Artificial Sequence
  Synthetic oligonucleotide
aatatcgtactacaagtgccaagtacacag

SEQ ID NO: 451864 - DNA, 30 bp, Artificial Sequence
  Synthetic oligonucleotide
gtaccatttaacgcccacggtaaaccacag

SEQ ID NO: 451865 - DNA, 30 bp, Artificial Sequence
  Synthetic oligonucleotide
atatgtccgccaacattgctcccaccacag

SEQ ID NO: 451866 - DNA, 30 bp, Artificial Sequence
  Synthetic oligonucleotide
gtaggcgtcaagtatgtgaagataccacag

SEQ ID NO: 451867 - DNA, 30 bp, Artificial Sequence
  Synthetic oligonucleotide
tttatatcgaggcggatgctggatccacag

SEQ ID NO: 451868 - DNA, 30 bp, Artificial Sequence
  Synthetic oligonucleotide
actggatgctgttcttggccccttccacag

SEQ ID NO: 451869 - DNA, 30 bp, Artificial Sequence
  Synthetic oligonucleotide
gtgtgccccgcccatgggccggaagcacag

SEQ ID NO: 451870 - DNA, 30 bp, Artificial Sequence
  Synthetic oligonucleotide
tatttgcttgtagttgacagcagagcacag

SEQ ID NO: 451871 - DNA, 30 bp, Artificial Sequence
  Synthetic oligonucleotide
gtaccggcgtcagcatatggtggagcacag

SEQ ID NO: 451872 - DNA, 30 bp, Artificial Sequence
  Synthetic oligonucleotide
gagggctagacgcgggcatcccacgcacag

SEQ ID NO: 451873 - DNA, 30 bp, Artificial Sequence
  Synthetic oligonucleotide
tatcttaccccaggacatgatgcggcacag

SEQ ID NO: 451874 - DNA, 30 bp, Artificial Sequence
  Synthetic oligonucleotide
aatgagtgcacagaagtttttgatgcacag

SEQ ID NO: 451875 - DNA, 30 bp, Artificial Sequence
  Synthetic oligonucleotide
tccctcttctcatagcactccaaatcacag

SEQ ID NO: 451876 - DNA, 30 bp, Artificial Sequence
  Synthetic oligonucleotide
gaaagtgtcttctttcaggcaaactcacag

SEQ ID NO: 451877 - DNA, 30 bp, Artificial Sequence
  Synthetic oligonucleotide
aacagagaatttctcttgtagctctcacag

SEQ ID NO: 451878 - DNA, 30 bp, Artificial Sequence
  Synthetic oligonucleotide
gcccagagttcgacgcatatgctctcacag

SEQ ID NO: 451879 - DNA, 30 bp, Artificial Sequence
  Synthetic oligonucleotide
cgaaatcccctggggcgtctgacgtcacag

SEQ ID NO: 451880 - DNA, 30 bp, Artificial Sequence
  Synthetic oligonucleotide
cagatctttatgcctccgcataggtcacag

SEQ ID NO: 451881 - DNA, 30 bp, Artificial Sequence
  Synthetic oligonucleotide
taggtcctaagcactgctgaccccagacag

SEQ ID NO: 451882 - DNA, 30 bp, Artificial Sequence
  Synthetic oligonucleotide
aaatcatggtaaggaccagccaggagacag

SEQ ID NO: 451883 - DNA, 30 bp, Artificial Sequence
  Synthetic oligonucleotide
aagccccgttttataatttgcattagacag

SEQ ID NO: 451884 - DNA, 30 bp, Artificial Sequence
  Synthetic oligonucleotide
aaataatgtaccagttcccgtggacgacag

SEQ ID NO: 451885 - DNA, 30 bp, Artificial Sequence
  Synthetic oligonucleotide
gatgaagcattgaatcgcaacgcccgacag

SEQ ID NO: 451886 - DNA, 30 bp, Artificial Sequence
  Synthetic oligonucleotide
gtgttattactcaacgggtaagtccgacag

SEQ ID NO: 451887 - DNA, 30 bp, Artificial Sequence
  Synthetic oligonucleotide
aaatcttttcgacaatttaccaagcgacag

SEQ ID NO: 451888 - DNA, 30 bp, Artificial Sequence
  Synthetic oligonucleotide
ttctaccggctggggttcttgaagcgacag

SEQ ID NO: 451889 - DNA, 30 bp, Artificial Sequence
  Synthetic oligonucleotide
tgcacaaacctagcagaaggctagcgacag

SEQ ID NO: 451890 - DNA, 30 bp, Artificial Sequence
  Synthetic oligonucleotide
tgctcgattggttgtctagggtttcgacag

SEQ ID NO: 451891 - DNA, 30 bp, Artificial Sequence
  Synthetic oligonucleotide
ttgacgagcagagggccttagggaggacag

SEQ ID NO: 451892 - DNA, 30 bp, Artificial Sequence
  Synthetic oligonucleotide
atttccgtagtatcggacgtgaacggacag

SEQ ID NO: 451893 - DNA, 30 bp, Artificial Sequence
  Synthetic oligonucleotide
agcaccagggctagtcctcaacccggacag

SEQ ID NO: 451894 - DNA, 30 bp, Artificial Sequence
  Synthetic oligonucleotide
attcttagtgattgccatacattcggacag

SEQ ID NO: 451895 - DNA, 30 bp, Artificial Sequence
  Synthetic oligonucleotide
taaatcatgaagcaccttagtccgggacag

SEQ ID NO: 451896 - DNA, 30 bp, Artificial Sequence
  Synthetic oligonucleotide
aacgtcaccgtacgcatagcctatggacag

SEQ ID NO: 451897 - DNA, 30 bp, Artificial Sequence
  Synthetic oligonucleotide
cttgaggtttcctcatgcgtcatatgacag

SEQ ID NO: 451898 - DNA, 30 bp, Artificial Sequence
  Synthetic oligonucleotide
atcgtttcgcggggatattttgagtgacag

SEQ ID NO: 451899 - DNA, 30 bp, Artificial Sequence
  Synthetic oligonucleotide
tgctggcccactttcggcacttagtgacag

SEQ ID NO: 451900 - DNA, 30 bp, Artificial Sequence
  Synthetic oligonucleotide
tgtcagtagatatccgtaacgcattgacag

SEQ ID NO: 451901 - DNA, 30 bp, Artificial Sequence
  Synthetic oligonucleotide
tcaaaaagaggcagcgcgaatagtatacag

SEQ ID NO: 451902 - DNA, 30 bp, Artificial Sequence
  Synthetic oligonucleotide
cgtacttttactcgtacatattttatacag

SEQ ID NO: 451903 - DNA, 30 bp, Artificial Sequence
  Synthetic oligonucleotide
aacggttgtggatggcagtcagcactacag

SEQ ID NO: 451904 - DNA, 30 bp, Artificial Sequence
  Synthetic oligonucleotide
acaggcactctagttgcccttgcactacag

SEQ ID NO: 451905 - DNA, 30 bp, Artificial Sequence
  Synthetic oligonucleotide
tatagctgtcgctagacactcctactacag

SEQ ID NO: 451906 - DNA, 30 bp, Artificial Sequence
  Synthetic oligonucleotide
atctgattctacaccgttcgaaccctacag

SEQ ID NO: 451907 - DNA, 30 bp, Artificial Sequence
  Synthetic oligonucleotide
cttgcctgcgaaagcggccacttcctacag

SEQ ID NO: 451908 - DNA, 30 bp, Artificial Sequence
  Synthetic oligonucleotide
tagctactttctgaattgtacacgctacag

SEQ ID NO: 451909 - DNA, 30 bp, Artificial Sequence
  Synthetic oligonucleotide
gatgacgtagatctcgctgtatttctacag

SEQ ID NO: 451910 - DNA, 30 bp, Artificial Sequence
  Synthetic oligonucleotide
tgatggtcaatcttagacgtgatagtacag

SEQ ID NO: 451911 - DNA, 30 bp, Artificial Sequence
  Synthetic oligonucleotide
ggtaagaggaagaccggtgttgagttacag

SEQ ID NO: 451912 - DNA, 30 bp, Artificial Sequence
  Synthetic oligonucleotide
cgagccgtaagttaaggaatttagttacag

SEQ ID NO: 451913 - DNA, 30 bp, Artificial Sequence
  Synthetic oligonucleotide
tagcaaagataatagtgcccccatttacag

SEQ ID NO: 451914 - DNA, 30 bp, Artificial Sequence
  Synthetic oligonucleotide
accgcgccagagtagtgcgttcatttacag

SEQ ID NO: 451915 - DNA, 30 bp, Artificial Sequence
  Synthetic oligonucleotide
ttttgggtccgagggatcgcatgtttacag

SEQ ID NO: 451916 - DNA, 30 bp, Artificial Sequence
  Synthetic oligonucleotide
gtcacttgttcctgaacatatccaaaccag

SEQ ID NO: 451917 - DNA, 30 bp, Artificial Sequence
  Synthetic oligonucleotide
cattcgctagaagtcacttcgtccaaccag

SEQ ID NO: 451918 - DNA, 30 bp, Artificial Sequence
  Synthetic oligonucleotide
ttagatttcgcggccaaggattagaaccag

SEQ ID NO: 451919 - DNA, 30 bp, Artificial Sequence
  Synthetic oligonucleotide
aaaaatatctctaaatcgcccctacaccag

SEQ ID NO: 451920 - DNA, 30 bp, Artificial Sequence
  Synthetic oligonucleotide
gaagaaaaatacacgttatctcaccaccag

SEQ ID NO: 451921 - DNA, 30 bp, Artificial Sequence
  Synthetic oligonucleotide
atcagcattggattctgatttacagaccag

SEQ ID NO: 451922 - DNA, 30 bp, Artificial Sequence
  Synthetic oligonucleotide
atgactgtagactggaataccggagaccag

SEQ ID NO: 451923 - DNA, 30 bp, Artificial Sequence
  Synthetic oligonucleotide
atgtttttgaggcctgtatattccgaccag

SEQ ID NO: 451924 - DNA, 30 bp, Artificial Sequence
  Synthetic oligonucleotide
gtttaggggctcacccgttcgtaggaccag

SEQ ID NO: 451925 - DNA, 30 bp, Artificial Sequence
  Synthetic oligonucleotide
tgaagtcaatttactggccccacggaccag

SEQ ID NO: 451926 - DNA, 30 bp, Artificial Sequence
  Synthetic oligonucleotide
tctcccgagctcctgtcccacagggaccag

SEQ ID NO: 451927 - DNA, 30 bp, Artificial Sequence
  Synthetic oligonucleotide
tcgatatgatgtataagcccaatataccag

SEQ ID NO: 451928 - DNA, 30 bp, Artificial Sequence
  Synthetic oligonucleotide
cggcatatgcttcgtcatcgagactaccag

SEQ ID NO: 451929 - DNA, 30 bp, Artificial Sequence
  Synthetic oligonucleotide
tcgggctttataggtttgttggtctaccag

SEQ ID NO: 451930 - DNA, 30 bp, Artificial Sequence
  Synthetic oligonucleotide
atacggggcttcgctatgccattctaccag

SEQ ID NO: 451931 - DNA, 30 bp, Artificial Sequence
  Synthetic oligonucleotide
acgactactaaagagtgcgtcttctaccag

SEQ ID NO: 451932 - DNA, 30 bp, Artificial Sequence
  Synthetic oligonucleotide
atcaagcctctgtgataccgtacgtaccag

SEQ ID NO: 451933 - DNA, 29 bp, Artificial Sequence
  Synthetic oligonucleotide
gtgtgtaagcgcgatcctcgcgttaccag

SEQ ID NO: 451934 - DNA, 30 bp, Artificial Sequence
  Synthetic oligonucleotide
ttcttaagcttattgattaatataacccag

SEQ ID NO: 451935 - DNA, 30 bp, Artificial Sequence
  Synthetic oligonucleotide
agtaataatgtgcacggagtagctacccag

SEQ ID NO: 451936 - DNA, 30 bp, Artificial Sequence
  Synthetic oligonucleotide
ctgatgtatactgcctatacatctacccag

SEQ ID NO: 451937 - DNA, 30 bp, Artificial Sequence
  Synthetic oligonucleotide
ttttcttttgttgagtgcacccgtacccag

SEQ ID NO: 451938 - DNA, 30 bp, Artificial Sequence
  Synthetic oligonucleotide
ggatcatccgttgaaaaccgcaagccccag

SEQ ID NO: 451939 - DNA, 30 bp, Artificial Sequence
  Synthetic oligonucleotide
ggcgggcaccatggccgacttttgccccag

SEQ ID NO: 451940 - DNA, 30 bp, Artificial Sequence
  Synthetic oligonucleotide
agaataatgctccagggggtctgcgcccag

SEQ ID NO: 451941 - DNA, 30 bp, Artificial Sequence
  Synthetic oligonucleotide
gagacgcaatcggtcgtccggttcgcccag

SEQ ID NO: 451942 - DNA, 30 bp, Artificial Sequence
  Synthetic oligonucleotide
atttgatacagtcgccaggctttcgcccag

SEQ ID NO: 451943 - DNA, 30 bp, Artificial Sequence
  Synthetic oligonucleotide
tttccttgtgggtcgttggtccatgcccag

SEQ ID NO: 451944 - DNA, 30 bp, Artificial Sequence
  Synthetic oligonucleotide
gcaagtcacggcatgggtaaccctgcccag

SEQ ID NO: 451945 - DNA, 30 bp, Artificial Sequence
  Synthetic oligonucleotide
gctcagttaaaggcctcagcaatatcccag

SEQ ID NO: 451946 - DNA, 30 bp, Artificial Sequence
  Synthetic oligonucleotide
tttcttgcaagccgtttgttgctgtcccag

SEQ ID NO: 451947 - DNA, 30 bp, Artificial Sequence
  Synthetic oligonucleotide
gtcgtttatatttgtgcagttgattcccag

SEQ ID NO: 451948 - DNA, 30 bp, Artificial Sequence
  Synthetic oligonucleotide
cacaacaagattagtggttcatagagccag

SEQ ID NO: 451949 - DNA, 30 bp, Artificial Sequence
  Synthetic oligonucleotide
ttgtattttgagcctgtatcccgtagccag

SEQ ID NO: 451950 - DNA, 30 bp, Artificial Sequence
  Synthetic oligonucleotide
gtcacttgaagccgtgcagggcgacgccag

SEQ ID NO: 451951 - DNA, 30 bp, Artificial Sequence
  Synthetic oligonucleotide
ctattttccacctcgaaaattggacgccag

SEQ ID NO: 451952 - DNA, 30 bp, Artificial Sequence
  Synthetic oligonucleotide
tttgaggtccgcacgtagtggacccgccag

SEQ ID NO: 451953 - DNA, 30 bp, Artificial Sequence
  Synthetic oligonucleotide
gttcggcccgtccgctccgggccaggccag

SEQ ID NO: 451954 - DNA, 30 bp, Artificial Sequence
  Synthetic oligonucleotide
cgcagttacgggattcagaaagagggccag

SEQ ID NO: 451955 - DNA, 30 bp, Artificial Sequence
  Synthetic oligonucleotide
tatcggtgatggatgctgggggatggccag

SEQ ID NO: 451956 - DNA, 30 bp, Artificial Sequence
  Synthetic oligonucleotide
ttttaacgttcctgtacatggctatgccag

SEQ ID NO: 451957 - DNA, 30 bp, Artificial Sequence
  Synthetic oligonucleotide
atctactggtgccttcacggggtatgccag

SEQ ID NO: 451958 - DNA, 30 bp, Artificial Sequence
  Synthetic oligonucleotide
ctcttttcttatgagttataaagactccag

SEQ ID NO: 451959 - DNA, 30 bp, Artificial Sequence
  Synthetic oligonucleotide
tgtgctgaccctggttatggtttactccag

SEQ ID NO: 451960 - DNA, 30 bp, Artificial Sequence
  Synthetic oligonucleotide
gtcttctcacaaccgctagcgcgcctccag

SEQ ID NO: 451961 - DNA, 30 bp, Artificial Sequence
  Synthetic oligonucleotide
gatacaacagaaatactagccacagtccag

SEQ ID NO: 451962 - DNA, 30 bp, Artificial Sequence
  Synthetic oligonucleotide
attcaagaaccgtgttctagtcgagtccag

SEQ ID NO: 451963 - DNA, 30 bp, Artificial Sequence
  Synthetic oligonucleotide
acctgctggtatttcaagggacgggtccag

SEQ ID NO: 451964 - DNA, 30 bp, Artificial Sequence
  Synthetic oligonucleotide
aattaactctatacctgtgtgttattccag

SEQ ID NO: 451965 - DNA, 30 bp, Artificial Sequence
  Synthetic oligonucleotide
actacaacgactgccgttttacgcttccag

SEQ ID NO: 451966 - DNA, 30 bp, Artificial Sequence
  Synthetic oligonucleotide
gaataattgtttattttgtgaagtttccag

SEQ ID NO: 451967 - DNA, 30 bp, Artificial Sequence
  Synthetic oligonucleotide
agtgacttcgcagtcttcaatagtttccag

SEQ ID NO: 451968 - DNA, 30 bp, Artificial Sequence
  Synthetic oligonucleotide
ctgtcatcccgtccatcgcagggtttccag

SEQ ID NO: 451969 - DNA, 30 bp, Artificial Sequence
  Synthetic oligonucleotide
aattgatattggtgtcggaattacaagcag

SEQ ID NO: 451970 - DNA, 30 bp, Artificial Sequence
  Synthetic oligonucleotide
gaattcttgttgcttacgaatgccaagcag

SEQ ID NO: 451971 - DNA, 30 bp, Artificial Sequence
  Synthetic oligonucleotide
gtccgagttggtttctgactattcaagcag

SEQ ID NO: 451972 - DNA, 30 bp, Artificial Sequence
  Synthetic oligonucleotide
gtctgtattagcatgctgtacgtgaagcag

SEQ ID NO: 451973 - DNA, 30 bp, Artificial Sequence
  Synthetic oligonucleotide
tcccggaagtgcgttgatgcagttaagcag

SEQ ID NO: 451974 - DNA, 30 bp, Artificial Sequence
  Synthetic oligonucleotide
tttttaagtcaagtaagtaaatttaagcag

SEQ ID NO: 451975 - DNA, 30 bp, Artificial Sequence
  Synthetic oligonucleotide
attacgcttcgctacgacgatcaacagcag

SEQ ID NO: 451976 - DNA, 30 bp, Artificial Sequence
  Synthetic oligonucleotide
taggggtggcgcaccggaaaattccagcag

SEQ ID NO: 451977 - DNA, 30 bp, Artificial Sequence
  Synthetic oligonucleotide
aattcaccaacaggcgaaatcactcagcag

SEQ ID NO: 451978 - DNA, 30 bp, Artificial Sequence
  Synthetic oligonucleotide
gcgatttccgggttacgaaatcgtcagcag

SEQ ID NO: 451979 - DNA, 30 bp, Artificial Sequence
  Synthetic oligonucleotide
tttgggcgcagacatcacacctgagagcag

SEQ ID NO: 451980 - DNA, 30 bp, Artificial Sequence
  Synthetic oligonucleotide
tttcgttcggtgcgagtgtataactagcag

SEQ ID NO: 451981 - DNA, 30 bp, Artificial Sequence
  Synthetic oligonucleotide
tccaaagtttgatccttctaagtctagcag

SEQ ID NO: 451982 - DNA, 30 bp, Artificial Sequence
  Synthetic oligonucleotide
cccgagtttaatagctatccgaggtagcag

SEQ ID NO: 451983 - DNA, 30 bp, Artificial Sequence
  Synthetic oligonucleotide
cggctagtccttattgccattaggtagcag

SEQ ID NO: 451984 - DNA, 30 bp, Artificial Sequence
  Synthetic oligonucleotide
ctatcaggtggacctactcagtcttagcag

SEQ ID NO: 451985 - DNA, 30 bp, Artificial Sequence
  Synthetic oligonucleotide
gcaagtgcacatattaggtacggcacgcag

SEQ ID NO: 451986 - DNA, 30 bp, Artificial Sequence
  Synthetic oligonucleotide
tgggctgcttattatattaagtgcacgcag

SEQ ID NO: 451987 - DNA, 30 bp, Artificial Sequence
  Synthetic oligonucleotide
aaagcgcacattcagtgggttaagacgcag

SEQ ID NO: 451988 - DNA, 30 bp, Artificial Sequence
  Synthetic oligonucleotide
tgcagatcgtctaatcgtttcccgacgcag

SEQ ID NO: 451989 - DNA, 30 bp, Artificial Sequence
  Synthetic oligonucleotide
cttagtgtatagccaatgtatcatacgcag

SEQ ID NO: 451990 - DNA, 30 bp, Artificial Sequence
  Synthetic oligonucleotide
taatggatgtggggtaaatagctcccgcag

SEQ ID NO: 451991 - DNA, 30 bp, Artificial Sequence
  Synthetic oligonucleotide
cggaaagccgactggtcgcccatcgcgcag

SEQ ID NO: 451992 - DNA, 30 bp, Artificial Sequence
  Synthetic oligonucleotide
cgttagtggaggccacttgtgtaggcgcag

SEQ ID NO: 451993 - DNA, 30 bp, Artificial Sequence
  Synthetic oligonucleotide
gagtgaggtaagtgcaggtattcatcgcag

SEQ ID NO: 451994 - DNA, 30 bp, Artificial Sequence
  Synthetic oligonucleotide
aaaacgccattacaagctgtaggctcgcag

SEQ ID NO: 451995 - DNA, 30 bp, Artificial Sequence
  Synthetic oligonucleotide
ctatttgatttgcacggtcagtcttcgcag

SEQ ID NO: 451996 - DNA, 30 bp, Artificial Sequence
  Synthetic oligonucleotide
acgtcattgccttgtcagtatgcaaggcag

SEQ ID NO: 451997 - DNA, 30 bp, Artificial Sequence
  Synthetic oligonucleotide
aaagcaccatccctgaaggatcgcaggcag

SEQ ID NO: 451998 - DNA, 30 bp, Artificial Sequence
  Synthetic oligonucleotide
ttgcggtatgtgtaacttcgcctcaggcag

SEQ ID NO: 451999 - DNA, 30 bp, Artificial Sequence
  Synthetic oligonucleotide
aataccatggtttagattttattgaggcag

SEQ ID NO: 452000 - DNA, 30 bp, Artificial Sequence
  Synthetic oligonucleotide
ctcctggcttcaagtgaaagtttgaggcag

SEQ ID NO: 452001 - DNA, 30 bp, Artificial Sequence
  Synthetic oligonucleotide
agcactgatgcattatcgttgattaggcag

SEQ ID NO: 452002 - DNA, 30 bp, Artificial Sequence
  Synthetic oligonucleotide
ggccaatggtgtggggacatgggacggcag

SEQ ID NO: 452003 - DNA, 30 bp, Artificial Sequence
  Synthetic oligonucleotide
ggcagacaagcctaacggcagatacggcag

SEQ ID NO: 452004 - DNA, 30 bp, Artificial Sequence
  Synthetic oligonucleotide
gtgtcctgtcagctattcatgacccggcag

SEQ ID NO: 452005 - DNA, 30 bp, Artificial Sequence
  Synthetic oligonucleotide
atgctgataactgtggtaacgctgcggcag

SEQ ID NO: 452006 - DNA, 30 bp, Artificial Sequence
  Synthetic oligonucleotide
gaggcatgccgtgtcgggggaagtcggcag

SEQ ID NO: 452007 - DNA, 30 bp, Artificial Sequence
  Synthetic oligonucleotide
gtatatattatcctgttctccgacgggcag

SEQ ID NO: 452008 - DNA, 30 bp, Artificial Sequence
  Synthetic oligonucleotide
aatgtcgggattcggcagctctccgggcag

SEQ ID NO: 452009 - DNA, 30 bp, Artificial Sequence
  Synthetic oligonucleotide
cccaggctctatgatggtcggttggggcag

SEQ ID NO: 452010 - DNA, 30 bp, Artificial Sequence
  Synthetic oligonucleotide
ccctaattgaggtggtcacgctttgggcag

SEQ ID NO: 452011 - DNA, 30 bp, Artificial Sequence
  Synthetic oligonucleotide
acgtcggcacaatatgcccttcactggcag

SEQ ID NO: 452012 - DNA, 30 bp, Artificial Sequence
  Synthetic oligonucleotide
aggatacaacgtaagatgttggtctggcag

SEQ ID NO: 452013 - DNA, 30 bp, Artificial Sequence
  Synthetic oligonucleotide
tcagtgaatttggaacatttaccttggcag

SEQ ID NO: 452014 - DNA, 30 bp, Artificial Sequence
  Synthetic oligonucleotide
actgccatcaagcgtttatttgaaatgcag

SEQ ID NO: 452015 - DNA, 30 bp, Artificial Sequence
  Synthetic oligonucleotide
agcgtgataaaatacgtacacgtaatgcag

SEQ ID NO: 452016 - DNA, 30 bp, Artificial Sequence
  Synthetic oligonucleotide
tgttaacagagtgtctgcttctagatgcag

SEQ ID NO: 452017 - DNA, 30 bp, Artificial Sequence
  Synthetic oligonucleotide
tctttatacaatctgaacggttcgatgcag

SEQ ID NO: 452018 - DNA, 30 bp, Artificial Sequence
  Synthetic oligonucleotide
cactctaactattcatgcatatatatgcag

SEQ ID NO: 452019 - DNA, 30 bp, Artificial Sequence
  Synthetic oligonucleotide
atttactctattaacgcttacggtatgcag

SEQ ID NO: 452020 - DNA, 30 bp, Artificial Sequence
  Synthetic oligonucleotide
tatactctatgtgactatagcgcactgcag

SEQ ID NO: 452021 - DNA, 30 bp, Artificial Sequence
  Synthetic oligonucleotide
gtgccacgccactccaccgttgccctgcag

SEQ ID NO: 452022 - DNA, 30 bp, Artificial Sequence
  Synthetic oligonucleotide
ttaaatcggacgtcgaaattcggcctgcag

SEQ ID NO: 452023 - DNA, 30 bp, Artificial Sequence
  Synthetic oligonucleotide
ttagctggttgtcttggagctggagtgcag

SEQ ID NO: 452024 - DNA, 30 bp, Artificial Sequence
  Synthetic oligonucleotide
ttgtctaggttgctattttgtacggtgcag

SEQ ID NO: 452025 - DNA, 30 bp, Artificial Sequence
  Synthetic oligonucleotide
cgatcatgcaaaacttcaattatggtgcag

SEQ ID NO: 452026 - DNA, 30 bp, Artificial Sequence
  Synthetic oligonucleotide
tttacacatttcaagtagctgactgtgcag

SEQ ID NO: 452027 - DNA, 30 bp, Artificial Sequence
  Synthetic oligonucleotide
tttgttaaatctcttataccccttgtgcag

SEQ ID NO: 452028 - DNA, 30 bp, Artificial Sequence
  Synthetic oligonucleotide
gatgttcagagctatgctcggatattgcag

SEQ ID NO: 452029 - DNA, 30 bp, Artificial Sequence
  Synthetic oligonucleotide
ctgagttaggacatagcgcaacgcttgcag

SEQ ID NO: 452030 - DNA, 30 bp, Artificial Sequence
  Synthetic oligonucleotide
taaaaaaggcgagggtcaacggaaaatcag

SEQ ID NO: 452031 - DNA, 30 bp, Artificial Sequence
  Synthetic oligonucleotide
acgactgttggggaggttgcggtcaatcag

SEQ ID NO: 452032 - DNA, 30 bp, Artificial Sequence
  Synthetic oligonucleotide
gaagtctagtagatctttgcctataatcag

SEQ ID NO: 452033 - DNA, 30 bp, Artificial Sequence
  Synthetic oligonucleotide
aattgtacatatagtggcggacgtaatcag

SEQ ID NO: 452034 - DNA, 30 bp, Artificial Sequence
  Synthetic oligonucleotide
attaactttgtgttacggacatcacatcag

SEQ ID NO: 452035 - DNA, 30 bp, Artificial Sequence
  Synthetic oligonucleotide
gcacatgcactatgcggaggaacccatcag

SEQ ID NO: 452036 - DNA, 30 bp, Artificial Sequence
  Synthetic oligonucleotide
agtatcttattcctcgaaaggacccatcag

SEQ ID NO: 452037 - DNA, 30 bp, Artificial Sequence
  Synthetic oligonucleotide
atacaactaggaatcattgggccccatcag

SEQ ID NO: 452038 - DNA, 30 bp, Artificial Sequence
  Synthetic oligonucleotide
aactttcacgtatttattagcaggcatcag

SEQ ID NO: 452039 - DNA, 30 bp, Artificial Sequence
  Synthetic oligonucleotide
aagccaatcttgacgcacgcggttcatcag

SEQ ID NO: 452040 - DNA, 30 bp, Artificial Sequence
  Synthetic oligonucleotide
gggtccctttccgcctataccttagatcag

SEQ ID NO: 452041 - DNA, 30 bp, Artificial Sequence
  Synthetic oligonucleotide
ctaacgcacgatcctttggatgcggatcag

SEQ ID NO: 452042 - DNA, 30 bp, Artificial Sequence
  Synthetic oligonucleotide
aatgtctccaccgacgcttaacatgatcag

SEQ ID NO: 452043 - DNA, 30 bp, Artificial Sequence
  Synthetic oligonucleotide
cttattttaagagacggcaaaagatatcag

SEQ ID NO: 452044 - DNA, 30 bp, Artificial Sequence
  Synthetic oligonucleotide
acggctgaaacgcagggtgcctgatatcag

SEQ ID NO: 452045 - DNA, 30 bp, Artificial Sequence
  Synthetic oligonucleotide
agcatacagctatattcaggaatatatcag

SEQ ID NO: 452046 - DNA, 30 bp, Artificial Sequence
  Synthetic oligonucleotide
atattgggcgcaatacttcacatgtatcag

SEQ ID NO: 452047 - DNA, 30 bp, Artificial Sequence
  Synthetic oligonucleotide
attgttaagacaagcgtggatacttatcag

SEQ ID NO: 452048 - DNA, 30 bp, Artificial Sequence
  Synthetic oligonucleotide
gcgtttgcagtatgttacgacagttatcag

SEQ ID NO: 452049 - DNA, 30 bp, Artificial Sequence
  Synthetic oligonucleotide
gtcgcttttggttcgcggaaatgttatcag

SEQ ID NO: 452050 - DNA, 30 bp, Artificial Sequence
  Synthetic oligonucleotide
catcgcccgcttgggaggcagttttatcag

SEQ ID NO: 452051 - DNA, 30 bp, Artificial Sequence
  Synthetic oligonucleotide
tcttgccgagcattacggttcgtaactcag

SEQ ID NO: 452052 - DNA, 30 bp, Artificial Sequence
  Synthetic oligonucleotide
ttccgaaaatatcctgtagtaatcactcag

SEQ ID NO: 452053 - DNA, 30 bp, Artificial Sequence
  Synthetic oligonucleotide
gagagtgacggccagattaatatcactcag

SEQ ID NO: 452054 - DNA, 30 bp, Artificial Sequence
  Synthetic oligonucleotide
acccgcaacacctgcgaaccgtatactcag

SEQ ID NO: 452055 - DNA, 30 bp, Artificial Sequence
  Synthetic oligonucleotide
gctttgaggctggtgcttgtcaatcctcag

SEQ ID NO: 452056 - DNA, 30 bp, Artificial Sequence
  Synthetic oligonucleotide
ttttaggcaagggtcctagggtatcctcag

SEQ ID NO: 452057 - DNA, 30 bp, Artificial Sequence
  Synthetic oligonucleotide
catctagtcatgtgttgcactgcagctcag

SEQ ID NO: 452058 - DNA, 30 bp, Artificial Sequence
  Synthetic oligonucleotide
gaagtccctatgcgcacgtggggagctcag

SEQ ID NO: 452059 - DNA, 30 bp, Artificial Sequence
  Synthetic oligonucleotide
cagcaattttccatttggtgtagcgctcag

SEQ ID NO: 452060 - DNA, 30 bp, Artificial Sequence
  Synthetic oligonucleotide
acacccgcaaaagccttactcttggctcag

SEQ ID NO: 452061 - DNA, 30 bp, Artificial Sequence
  Synthetic oligonucleotide
ggtttctttttgtgatctgcgcatgctcag

SEQ ID NO: 452062 - DNA, 30 bp, Artificial Sequence
  Synthetic oligonucleotide
ctgctaacgcggtggttttatacatctcag

SEQ ID NO: 452063 - DNA, 30 bp, Artificial Sequence
  Synthetic oligonucleotide
atcttctgatctaactgaaaaatatctcag

SEQ ID NO: 452064 - DNA, 30 bp, Artificial Sequence
  Synthetic oligonucleotide
tgggtgatgccagccgattcaatatctcag

SEQ ID NO: 452065 - DNA, 30 bp, Artificial Sequence
  Synthetic oligonucleotide
tggagagttttgtgacagattttgtctcag

SEQ ID NO: 452066 - DNA, 30 bp, Artificial Sequence
  Synthetic oligonucleotide
tgtgtcgacgtgatattgagggattctcag

SEQ ID NO: 452067 - DNA, 30 bp, Artificial Sequence
  Synthetic oligonucleotide
tttcggtttctacaattaagaccttctcag

SEQ ID NO: 452068 - DNA, 30 bp, Artificial Sequence
  Synthetic oligonucleotide
agatcgaaagggtaaatttttctttctcag

SEQ ID NO: 452069 - DNA, 30 bp, Artificial Sequence
  Synthetic oligonucleotide
gtgcggacgctcagccgtgattcaagtcag

SEQ ID NO: 452070 - DNA, 30 bp, Artificial Sequence
  Synthetic oligonucleotide
aaattgcgttagtatcatggccgcagtcag

SEQ ID NO: 452071 - DNA, 30 bp, Artificial Sequence
  Synthetic oligonucleotide
ccacacaaccaatgacgcttttgcagtcag

SEQ ID NO: 452072 - DNA, 30 bp, Artificial Sequence
  Synthetic oligonucleotide
ttgactgcccgatcgcattgagggagtcag

SEQ ID NO: 452073 - DNA, 30 bp, Artificial Sequence
  Synthetic oligonucleotide
aggcatgaactgtgcgtgccaggtagtcag

SEQ ID NO: 452074 - DNA, 30 bp, Artificial Sequence
  Synthetic oligonucleotide
aaacccagaggggtctatagcggtagtcag

SEQ ID NO: 452075 - DNA, 30 bp, Artificial Sequence
  Synthetic oligonucleotide
tgtttcttctcaagagactaaattagtcag

SEQ ID NO: 452076 - DNA, 30 bp, Artificial Sequence
  Synthetic oligonucleotide
gagtcggacattttattagttaaacgtcag

SEQ ID NO: 452077 - DNA, 30 bp, Artificial Sequence
  Synthetic oligonucleotide
cacatggtacctcataactaacgacgtcag

SEQ ID NO: 452078 - DNA, 30 bp, Artificial Sequence
  Synthetic oligonucleotide
tcgcgttaagcgacatacatagtacgtcag

SEQ ID NO: 452079 - DNA, 30 bp, Artificial Sequence
  Synthetic oligonucleotide
aggacttagggcagttatcgggggcgtcag

SEQ ID NO: 452080 - DNA, 30 bp, Artificial Sequence
  Synthetic oligonucleotide
cttgagactcacgctcctggcggtcgtcag

SEQ ID NO: 452081 - DNA, 30 bp, Artificial Sequence
  Synthetic oligonucleotide
tcggtatatagttgttacggtatcggtcag

SEQ ID NO: 452082 - DNA, 30 bp, Artificial Sequence
  Synthetic oligonucleotide
gttgttatttacggcagaaagatgggtcag

SEQ ID NO: 452083 - DNA, 30 bp, Artificial Sequence
  Synthetic oligonucleotide
agcgcgccatgcacatttgaccatggtcag

SEQ ID NO: 452084 - DNA, 30 bp, Artificial Sequence
  Synthetic oligonucleotide
cgccaagaaattttcattatccttggtcag

SEQ ID NO: 452085 - DNA, 30 bp, Artificial Sequence
  Synthetic oligonucleotide
gctgattaacttcagttcggaacatgtcag

SEQ ID NO: 452086 - DNA, 30 bp, Artificial Sequence
  Synthetic oligonucleotide
atgaggcagtatgccacgccgcactgtcag

SEQ ID NO: 452087 - DNA, 30 bp, Artificial Sequence
  Synthetic oligonucleotide
tttgatttaagatgccactcatcctgtcag

SEQ ID NO: 452088 - DNA, 30 bp, Artificial Sequence
  Synthetic oligonucleotide
tttggagacttaatcgtcggtaggtgtcag

SEQ ID NO: 452089 - DNA, 30 bp, Artificial Sequence
  Synthetic oligonucleotide
gtactagagtggccggtgatatattgtcag

SEQ ID NO: 452090 - DNA, 30 bp, Artificial Sequence
  Synthetic oligonucleotide
aatgacgttcttctttagttgataattcag

SEQ ID NO: 452091 - DNA, 30 bp, Artificial Sequence
  Synthetic oligonucleotide
atcttctgtttaagagtatgtttaattcag

SEQ ID NO: 452092 - DNA, 30 bp, Artificial Sequence
  Synthetic oligonucleotide
tgtagttacctttacccttatctcattcag

SEQ ID NO: 452093 - DNA, 30 bp, Artificial Sequence
  Synthetic oligonucleotide
tggctgtttagtttgcagtctgagattcag

SEQ ID NO: 452094 - DNA, 30 bp, Artificial Sequence
  Synthetic oligonucleotide
gatcaatggtgtaggggcttcccgattcag

SEQ ID NO: 452095 - DNA, 30 bp, Artificial Sequence
  Synthetic oligonucleotide
gtatggcacggggctatcgttcctattcag

SEQ ID NO: 452096 - DNA, 30 bp, Artificial Sequence
  Synthetic oligonucleotide
tcgtggaggaagcgttaaaggacccttcag

SEQ ID NO: 452097 - DNA, 30 bp, Artificial Sequence
  Synthetic oligonucleotide
acatctgaaaggtcaggcagaatgcttcag

SEQ ID NO: 452098 - DNA, 29 bp, Artificial Sequence
  Synthetic oligonucleotide
gacaacgatccattcaatgaccagttcag

SEQ ID NO: 452099 - DNA, 30 bp, Artificial Sequence
  Synthetic oligonucleotide
tggcaggtgattctatgctcacgagttcag

SEQ ID NO: 452100 - DNA, 30 bp, Artificial Sequence
  Synthetic oligonucleotide
ttttcagaattccggtatgatttagttcag

SEQ ID NO: 452101 - DNA, 30 bp, Artificial Sequence
  Synthetic oligonucleotide
acgcggtttgccttaaactaagacgttcag

SEQ ID NO: 452102 - DNA, 30 bp, Artificial Sequence
  Synthetic oligonucleotide
gacatagtcctggaagcgttccaggttcag

SEQ ID NO: 452103 - DNA, 30 bp, Artificial Sequence
  Synthetic oligonucleotide
gtggggattgactgcatacgataggttcag

SEQ ID NO: 452104 - DNA, 30 bp, Artificial Sequence
  Synthetic oligonucleotide
gtcgctttagtaagttaccaagcggttcag

SEQ ID NO: 452105 - DNA, 30 bp, Artificial Sequence
  Synthetic oligonucleotide
ccggttttaatccgggcgattcgggttcag

SEQ ID NO: 452106 - DNA, 30 bp, Artificial Sequence
  Synthetic oligonucleotide
ggaataagcgttttttgaattaaatttcag

SEQ ID NO: 452107 - DNA, 30 bp, Artificial Sequence
  Synthetic oligonucleotide
tccagatgacgtgcacagtatgaatttcag

SEQ ID NO: 452108 - DNA, 28 bp, Artificial Sequence
  Synthetic oligonucleotide
cttgaccgactacaaagcaccctttcag

SEQ ID NO: 452109 - DNA, 30 bp, Artificial Sequence
  Synthetic oligonucleotide
ccatagcactatctcgtcagttgctttcag

SEQ ID NO: 452110 - DNA, 30 bp, Artificial Sequence
  Synthetic oligonucleotide
cttgcgctatgtgagttcgaacagtttcag

SEQ ID NO: 452111 - DNA, 30 bp, Artificial Sequence
  Synthetic oligonucleotide
gtgggactttcactatgaaataattttcag

SEQ ID NO: 452112 - DNA, 30 bp, Artificial Sequence
  Synthetic oligonucleotide
taaggtacggccctggcgcaacgttttcag

SEQ ID NO: 452113 - DNA, 30 bp, Artificial Sequence
  Synthetic oligonucleotide
gaatgatttcgtattagaatacccaaagag

SEQ ID NO: 452114 - DNA, 30 bp, Artificial Sequence
  Synthetic oligonucleotide
ggtggtggtagtcggtttagggccaaagag

SEQ ID NO: 452115 - DNA, 30 bp, Artificial Sequence
  Synthetic oligonucleotide
caggcgtttttgctcagtttattgaaagag

SEQ ID NO: 452116 - DNA, 30 bp, Artificial Sequence
  Synthetic oligonucleotide
ggcggctagcctagatcaaccgtccaagag

SEQ ID NO: 452117 - DNA, 30 bp, Artificial Sequence
  Synthetic oligonucleotide
ttcaccggtttaaacgtggctaagcaagag

SEQ ID NO: 452118 - DNA, 31 bp, Artificial Sequence
  Synthetic oligonucleotide
tttgttatagatctggggcgtggctcaagag

SEQ ID NO: 452119 - DNA, 30 bp, Artificial Sequence
  Synthetic oligonucleotide
cggattttcttaatcctgtacgcggaagag

SEQ ID NO: 452120 - DNA, 30 bp, Artificial Sequence
  Synthetic oligonucleotide
agaaaacgcggcacccctatagatgaagag

SEQ ID NO: 452121 - DNA, 30 bp, Artificial Sequence
  Synthetic oligonucleotide
ccggggctttctactggggccattgaagag

SEQ ID NO: 452122 - DNA, 30 bp, Artificial Sequence
  Synthetic oligonucleotide
tgattcttcttggaaactgagtaataagag

SEQ ID NO: 452123 - DNA, 29 bp, Artificial Sequence
  Synthetic oligonucleotide
agtaagtcgtttcttttaacacgtaagag

SEQ ID NO: 452124 - DNA, 30 bp, Artificial Sequence
  Synthetic oligonucleotide
tctcccctaatagagttgcataattaagag

SEQ ID NO: 452125 - DNA, 30 bp, Artificial Sequence
  Synthetic oligonucleotide
taagttggtacttacgtattatacacagag

SEQ ID NO: 452126 - DNA, 30 bp, Artificial Sequence
  Synthetic oligonucleotide
taattacgtgggggcagacacccgacagag

SEQ ID NO: 452127 - DNA, 30 bp, Artificial Sequence
  Synthetic oligonucleotide
gaagggtccgatatgaataacaccccagag

SEQ ID NO: 452128 - DNA, 30 bp, Artificial Sequence
  Synthetic oligonucleotide
gagtagttctcggcccttgtacaagcagag

SEQ ID NO: 452129 - DNA, 30 bp, Artificial Sequence
  Synthetic oligonucleotide
ttctcgaggcaggagacgacggtagcagag

SEQ ID NO: 452130 - DNA, 30 bp, Artificial Sequence
  Synthetic oligonucleotide
tggctttagtatacaatactcgccgcagag

SEQ ID NO: 452131 - DNA, 30 bp, Artificial Sequence
  Synthetic oligonucleotide
atctagcgtccgttcgatttcagcgcagag

SEQ ID NO: 452132 - DNA, 30 bp, Artificial Sequence
  Synthetic oligonucleotide
gacagtgcatctttgctcggctgcgcagag

SEQ ID NO: 452133 - DNA, 30 bp, Artificial Sequence
  Synthetic oligonucleotide
tgtttggtatcgggcggagtcgcggcagag

SEQ ID NO: 452134 - DNA, 30 bp, Artificial Sequence
  Synthetic oligonucleotide
tccagcaaaactgatggttttgcggcagag

SEQ ID NO: 452135 - DNA, 30 bp, Artificial Sequence
  Synthetic oligonucleotide
attattataggggtgtggaccagggcagag

SEQ ID NO: 452136 - DNA, 30 bp, Artificial Sequence
  Synthetic oligonucleotide
tctgcaactataaacagtgccatggcagag

SEQ ID NO: 452137 - DNA, 30 bp, Artificial Sequence
  Synthetic oligonucleotide
ccaaagaccggatggggtggccggtcagag

SEQ ID NO: 452138 - DNA, 30 bp, Artificial Sequence
  Synthetic oligonucleotide
tcctttgacagggaaggcccctattcagag

SEQ ID NO: 452139 - DNA, 30 bp, Artificial Sequence
  Synthetic oligonucleotide
ttctgtaagggggtgatgtaaggttcagag

SEQ ID NO: 452140 - DNA, 30 bp, Artificial Sequence
  Synthetic oligonucleotide
gatactggacaggtgattggctagagagag

SEQ ID NO: 452141 - DNA, 30 bp, Artificial Sequence
  Synthetic oligonucleotide
ttgctagtgcgttgttagcaagctagagag

SEQ ID NO: 452142 - DNA, 30 bp, Artificial Sequence
  Synthetic oligonucleotide
actcgtaggaccgctccgatattcggagag

SEQ ID NO: 452143 - DNA, 30 bp, Artificial Sequence
  Synthetic oligonucleotide
ttgtcatacagttcccgagtctagggagag

SEQ ID NO: 452144 - DNA, 30 bp, Artificial Sequence
  Synthetic oligonucleotide
taccccttgaggatggtatgcacgggagag

SEQ ID NO: 452145 - DNA, 30 bp, Artificial Sequence
  Synthetic oligonucleotide
tatgtttagattaagctgtagttgggagag

SEQ ID NO: 452146 - DNA, 30 bp, Artificial Sequence
  Synthetic oligonucleotide
tacattatccaggctgttgctactggagag

SEQ ID NO: 452147 - DNA, 30 bp, Artificial Sequence
  Synthetic oligonucleotide
aagtccccggatttctgccgaagtggagag

SEQ ID NO: 452148 - DNA, 30 bp, Artificial Sequence
  Synthetic oligonucleotide
cttggcaggattagttgattgacctgagag

SEQ ID NO: 452149 - DNA, 30 bp, Artificial Sequence
  Synthetic oligonucleotide
gaatggttggtcaaggcaaagacaatagag

SEQ ID NO: 452150 - DNA, 30 bp, Artificial Sequence
  Synthetic oligonucleotide
aaagatagccattaattctcaataatagag

SEQ ID NO: 452151 - DNA, 30 bp, Artificial Sequence
  Synthetic oligonucleotide
accgtatctagaagttttttcaaactagag

SEQ ID NO: 452152 - DNA, 30 bp, Artificial Sequence
  Synthetic oligonucleotide
atgttctaaccgcaggaaccaaagctagag

SEQ ID NO: 452153 - DNA, 30 bp, Artificial Sequence
  Synthetic oligonucleotide
agccgccctcgtatgcgcactgcgctagag

SEQ ID NO: 452154 - DNA, 30 bp, Artificial Sequence
  Synthetic oligonucleotide
aactgttatagttgcactatgagtctagag

SEQ ID NO: 452155 - DNA, 30 bp, Artificial Sequence
  Synthetic oligonucleotide
tatgtttaatcgctctttcttcgtctagag

SEQ ID NO: 452156 - DNA, 30 bp, Artificial Sequence
  Synthetic oligonucleotide
gatgtctgagcaatcccgacatcagtagag

SEQ ID NO: 452157 - DNA, 30 bp, Artificial Sequence
  Synthetic oligonucleotide
ttttgttagccggcggccccacccgtagag

SEQ ID NO: 452158 - DNA, 30 bp, Artificial Sequence
  Synthetic oligonucleotide
gattggtatgggcgctgctcgttcgtagag

SEQ ID NO: 452159 - DNA, 30 bp, Artificial Sequence
  Synthetic oligonucleotide
tgttatatatggactacgtccaaggtagag

SEQ ID NO: 452160 - DNA, 30 bp, Artificial Sequence
  Synthetic oligonucleotide
cgaaattgagtgagtaccagccatgtagag

SEQ ID NO: 452161 - DNA, 30 bp, Artificial Sequence
  Synthetic oligonucleotide
catctggtaggaggagctcatggattagag

SEQ ID NO: 452162 - DNA, 30 bp, Artificial Sequence
  Synthetic oligonucleotide
aagtttttaattttgcctgcggcgttagag

SEQ ID NO: 452163 - DNA, 30 bp, Artificial Sequence
  Synthetic oligonucleotide
tacgtatgcgcgggatctggaaggttagag

SEQ ID NO: 452164 - DNA, 30 bp, Artificial Sequence
  Synthetic oligonucleotide
ctcacgacccctgggtggcaacggttagag

SEQ ID NO: 452165 - DNA, 30 bp, Artificial Sequence
  Synthetic oligonucleotide
cgatcgccccaaacgcctgtcaatttagag

SEQ ID NO: 452166 - DNA, 30 bp, Artificial Sequence
  Synthetic oligonucleotide
tcatttcccgacgtttaagtcttgaacgag

SEQ ID NO: 452167 - DNA, 30 bp, Artificial Sequence
  Synthetic oligonucleotide
cgaatgagaggtcttacgggcatacacgag

SEQ ID NO: 452168 - DNA, 30 bp, Artificial Sequence
  Synthetic oligonucleotide
ttcaccgtgccaaggcctggttagcacgag

SEQ ID NO: 452169 - DNA, 30 bp, Artificial Sequence
  Synthetic oligonucleotide
aatctgataccggagaaggccactcacgag

SEQ ID NO: 452170 - DNA, 30 bp, Artificial Sequence
  Synthetic oligonucleotide
cataacctaaatgccacgcagacagacgag

SEQ ID NO: 452171 - DNA, 30 bp, Artificial Sequence
  Synthetic oligonucleotide
aagggattatttgctctgcagggggacgag

SEQ ID NO: 452172 - DNA, 30 bp, Artificial Sequence
  Synthetic oligonucleotide
tgtattgtcaagttcgtatagaaatacgag

SEQ ID NO: 452173 - DNA, 30 bp, Artificial Sequence
  Synthetic oligonucleotide
gacccatgggggggagcgaggagctacgag

SEQ ID NO: 452174 - DNA, 30 bp, Artificial Sequence
  Synthetic oligonucleotide
ccaattctgggtcggaccgatggctacgag

SEQ ID NO: 452175 - DNA, 30 bp, Artificial Sequence
  Synthetic oligonucleotide
ttaaaagaccggtaggcatcctgctacgag

SEQ ID NO: 452176 - DNA, 30 bp, Artificial Sequence
  Synthetic oligonucleotide
ctgtcgtgagaactctgtgtgatctacgag

SEQ ID NO: 452177 - DNA, 30 bp, Artificial Sequence
  Synthetic oligonucleotide
cttggaaagtgtgttaagtgcgtgtacgag

SEQ ID NO: 452178 - DNA, 30 bp, Artificial Sequence
  Synthetic oligonucleotide
aaaactaccgcgaatggcacggacaccgag

SEQ ID NO: 452179 - DNA, 30 bp, Artificial Sequence
  Synthetic oligonucleotide
aattggaccttcacaatttttcggaccgag

SEQ ID NO: 452180 - DNA, 30 bp, Artificial Sequence
  Synthetic oligonucleotide
gcaatgaaatgtgtcgcggacggtaccgag

SEQ ID NO: 452181 - DNA, 30 bp, Artificial Sequence
  Synthetic oligonucleotide
tgcaaggaccaggtttggtctttacccgag

SEQ ID NO: 452182 - DNA, 30 bp, Artificial Sequence
  Synthetic oligonucleotide
ggacggcagttcgggaaggggttgcccgag

SEQ ID NO: 452183 - DNA, 30 bp, Artificial Sequence
  Synthetic oligonucleotide
cttgtaggagcctcgtcggctcccgccgag

SEQ ID NO: 452184 - DNA, 30 bp, Artificial Sequence
  Synthetic oligonucleotide
gacggctggcactcagcacgctgggccgag

SEQ ID NO: 452185 - DNA, 30 bp, Artificial Sequence
  Synthetic oligonucleotide
atgtatgacacgggtcagccggtggccgag

SEQ ID NO: 452186 - DNA, 30 bp, Artificial Sequence
  Synthetic oligonucleotide
tccaggctgttaagcaatcgagctgccgag

SEQ ID NO: 452187 - DNA, 30 bp, Artificial Sequence
  Synthetic oligonucleotide
gggtaatgggcagctctgtgactctccgag

SEQ ID NO: 452188 - DNA, 30 bp, Artificial Sequence
  Synthetic oligonucleotide
tatctagaacttgcgtgatagtagtccgag

SEQ ID NO: 452189 - DNA, 40 bp, Artificial Sequence
  Synthetic oligonucleotide
ccattggacagatgagaggatgatggcgtcacaaagcgag

SEQ ID NO: 452190 - DNA, 30 bp, Artificial Sequence
  Synthetic oligonucleotide
tcgaatgtatagcgaattcctacgagcgag

SEQ ID NO: 452191 - DNA, 30 bp, Artificial Sequence
  Synthetic oligonucleotide
ggacggtcgtagtcatgtatacggagcgag

SEQ ID NO: 452192 - DNA, 30 bp, Artificial Sequence
  Synthetic oligonucleotide
tttctaaattacgtgtagtcagtgagcgag

SEQ ID NO: 452193 - DNA, 30 bp, Artificial Sequence
  Synthetic oligonucleotide
gactgctgacacccttgccactctagcgag

SEQ ID NO: 452194 - DNA, 30 bp, Artificial Sequence
  Synthetic oligonucleotide
gcaccgtgtccagatcccaatagacgcgag

SEQ ID NO: 452195 - DNA, 30 bp, Artificial Sequence
  Synthetic oligonucleotide
catcggtcgggaaattaggtcctacgcgag

SEQ ID NO: 452196 - DNA, 30 bp, Artificial Sequence
  Synthetic oligonucleotide
ggggtcattgcaggctctctcttacgcgag

SEQ ID NO: 452197 - DNA, 30 bp, Artificial Sequence
  Synthetic oligonucleotide
tcctattggaactcgcaagatgcaggcgag

SEQ ID NO: 452198 - DNA, 30 bp, Artificial Sequence
  Synthetic oligonucleotide
gttcgatagcagcctacgccgagcggcgag

SEQ ID NO: 452199 - DNA, 30 bp, Artificial Sequence
  Synthetic oligonucleotide
ttcccggatagagctcttatggagggcgag

SEQ ID NO: 452200 - DNA, 30 bp, Artificial Sequence
  Synthetic oligonucleotide
agagatttgatctccgacaaatagggcgag

SEQ ID NO: 452201 - DNA, 30 bp, Artificial Sequence
  Synthetic oligonucleotide
cttccgttggtgactctaattcggtgcgag

SEQ ID NO: 452202 - DNA, 30 bp, Artificial Sequence
  Synthetic oligonucleotide
ttgggaacagtaggttgtcggaccatcgag

SEQ ID NO: 452203 - DNA, 30 bp, Artificial Sequence
  Synthetic oligonucleotide
ttggcaatcacgcggtaactgtatctcgag

SEQ ID NO: 452204 - DNA, 30 bp, Artificial Sequence
  Synthetic oligonucleotide
aaagttcactgaaacagacgtgaggtcgag

SEQ ID NO: 452205 - DNA, 30 bp, Artificial Sequence
  Synthetic oligonucleotide
aaaaaatttattaatcggaatgcggtcgag

SEQ ID NO: 452206 - DNA, 30 bp, Artificial Sequence
  Synthetic oligonucleotide
atcagactcctctagcctttttgggtcgag

SEQ ID NO: 452207 - DNA, 30 bp, Artificial Sequence
  Synthetic oligonucleotide
tattcttttgattaatacatcagtgtcgag

SEQ ID NO: 452208 - DNA, 30 bp, Artificial Sequence
  Synthetic oligonucleotide
ccattatgaggtccgaggtagagattcgag

SEQ ID NO: 452209 - DNA, 30 bp, Artificial Sequence
  Synthetic oligonucleotide
tggtgttatccatatctacacttattcgag

SEQ ID NO: 452210 - DNA, 30 bp, Artificial Sequence
  Synthetic oligonucleotide
gtacactggaagcagtatctctacttcgag

SEQ ID NO: 452211 - DNA, 30 bp, Artificial Sequence
  Synthetic oligonucleotide
acttttaccaggacaagccctggcttcgag

SEQ ID NO: 452212 - DNA, 30 bp, Artificial Sequence
  Synthetic oligonucleotide
tctagacctgttgttctcgcaaatttcgag

SEQ ID NO: 452213 - DNA, 30 bp, Artificial Sequence
  Synthetic oligonucleotide
gtaaacaaactacgtgagatttgtttcgag

SEQ ID NO: 452214 - DNA, 30 bp, Artificial Sequence
  Synthetic oligonucleotide
tcatagacgaagactgatgttcttttcgag

SEQ ID NO: 452215 - DNA, 30 bp, Artificial Sequence
  Synthetic oligonucleotide
tttgctattacggccctatcatcaaaggag

SEQ ID NO: 452216 - DNA, 30 bp, Artificial Sequence
  Synthetic oligonucleotide
tatgttcgacattacggacatttgaaggag

SEQ ID NO: 452217 - DNA, 31 bp, Artificial Sequence
  Synthetic oligonucleotide
atattcatacgactaaagactgcagcaggag

SEQ ID NO: 452218 - DNA, 30 bp, Artificial Sequence
  Synthetic oligonucleotide
ttaatctgattgtaaacggatgagcaggag

SEQ ID NO: 452219 - DNA, 30 bp, Artificial Sequence
  Synthetic oligonucleotide
gattcctgccgaagaagctaagggcaggag

SEQ ID NO: 452220 - DNA, 30 bp, Artificial Sequence
  Synthetic oligonucleotide
gtagaactcgggatagcgggttccgaggag

SEQ ID NO: 452221 - DNA, 30 bp, Artificial Sequence
  Synthetic oligonucleotide
ccacgttatgcagtaggggatcgcgaggag

SEQ ID NO: 452222 - DNA, 30 bp, Artificial Sequence
  Synthetic oligonucleotide
ttggaaggaccggtgcaaccaatcgaggag

SEQ ID NO: 452223 - DNA, 30 bp, Artificial Sequence
  Synthetic oligonucleotide
cttgtagaatctcaatatggccaggaggag

SEQ ID NO: 452224 - DNA, 30 bp, Artificial Sequence
  Synthetic oligonucleotide
ttatacgcagttacgaatgcctcggaggag

SEQ ID NO: 452225 - DNA, 30 bp, Artificial Sequence
  Synthetic oligonucleotide
acggatatgtctgttgccagaccataggag

SEQ ID NO: 452226 - DNA, 30 bp, Artificial Sequence
  Synthetic oligonucleotide
taattcaccttaatatgtctggactaggag

SEQ ID NO: 452227 - DNA, 30 bp, Artificial Sequence
  Synthetic oligonucleotide
ttatggctgcttacggaatatcggtaggag

SEQ ID NO: 452228 - DNA, 30 bp, Artificial Sequence
  Synthetic oligonucleotide
caagccaaggcacagactgaagggtaggag

SEQ ID NO: 452229 - DNA, 30 bp, Artificial Sequence
  Synthetic oligonucleotide
aaggtcttgatttctgtgcaatattaggag

SEQ ID NO: 452230 - DNA, 30 bp, Artificial Sequence
  Synthetic oligonucleotide
tacagcgctcttttggcgctgcacacggag

SEQ ID NO: 452231 - DNA, 30 bp, Artificial Sequence
  Synthetic oligonucleotide
gacaccactctgacgtgcgaaacgacggag

SEQ ID NO: 452232 - DNA, 30 bp, Artificial Sequence
  Synthetic oligonucleotide
gtagttaatttactgatcgtggcgacggag

SEQ ID NO: 452233 - DNA, 30 bp, Artificial Sequence
  Synthetic oligonucleotide
ttgaaacgatagatcggcgtagcaccggag

SEQ ID NO: 452234 - DNA, 30 bp, Artificial Sequence
  Synthetic oligonucleotide
cgcgcacgtttggtatgcacggtaccggag

SEQ ID NO: 452235 - DNA, 30 bp, Artificial Sequence
  Synthetic oligonucleotide
tcctttgtctgatggtttcgcaatccggag

SEQ ID NO: 452236 - DNA, 30 bp, Artificial Sequence
  Synthetic oligonucleotide
cggtgcctaaagtgttaacagctagcggag

SEQ ID NO: 452237 - DNA, 30 bp, Artificial Sequence
  Synthetic oligonucleotide
gaacgactttcatacggtctggacgcggag

SEQ ID NO: 452238 - DNA, 30 bp, Artificial Sequence
  Synthetic oligonucleotide
tgcgaaatgtctctagactatttcgcggag

SEQ ID NO: 452239 - DNA, 30 bp, Artificial Sequence
  Synthetic oligonucleotide
atttgagttttatagagataagaggcggag

SEQ ID NO: 452240 - DNA, 30 bp, Artificial Sequence
  Synthetic oligonucleotide
aggtatcccatgcttttattgtcggcggag

SEQ ID NO: 452241 - DNA, 30 bp, Artificial Sequence
  Synthetic oligonucleotide
ctccgcctaatgcatggtaacgtggcggag

SEQ ID NO: 452242 - DNA, 30 bp, Artificial Sequence
  Synthetic oligonucleotide
ataaatgtgctataagtacatatatcggag

SEQ ID NO: 452243 - DNA, 30 bp, Artificial Sequence
  Synthetic oligonucleotide
tattgggggatgtgtctcgcagtatcggag

SEQ ID NO: 452244 - DNA, 30 bp, Artificial Sequence
  Synthetic oligonucleotide
tttgagcgttttcgtgttcttacttcggag

SEQ ID NO: 452245 - DNA, 30 bp, Artificial Sequence
  Synthetic oligonucleotide
aacaagagttgcaccgctttgtcttcggag

SEQ ID NO: 452246 - DNA, 30 bp, Artificial Sequence
  Synthetic oligonucleotide
taccaatatttgagctggattatcagggag

SEQ ID NO: 452247 - DNA, 30 bp, Artificial Sequence
  Synthetic oligonucleotide
gtctggggcacctagtaggggatgagggag

SEQ ID NO: 452248 - DNA, 30 bp, Artificial Sequence
  Synthetic oligonucleotide
gccaaccggttgccgagggatcatagggag

SEQ ID NO: 452249 - DNA, 30 bp, Artificial Sequence
  Synthetic oligonucleotide
ttgatacattttgctatggtaagaggggag

SEQ ID NO: 452250 - DNA, 30 bp, Artificial Sequence
  Synthetic oligonucleotide
aatatataattggaagagccctgcggggag

SEQ ID NO: 452251 - DNA, 30 bp, Artificial Sequence
  Synthetic oligonucleotide
atagttgactctcctccttacctcggggag

SEQ ID NO: 452252 - DNA, 30 bp, Artificial Sequence
  Synthetic oligonucleotide
ctactgtcatttggtaaagaatcgggggag

SEQ ID NO: 452253 - DNA, 30 bp, Artificial Sequence
  Synthetic oligonucleotide
cctcagcactgcagtactcgggtgggggag

SEQ ID NO: 452254 - DNA, 30 bp, Artificial Sequence
  Synthetic oligonucleotide
tatgctgttgtataagggacacctggggag

SEQ ID NO: 452255 - DNA, 30 bp, Artificial Sequence
  Synthetic oligonucleotide
accaacgaagtttgagcgattagatgggag

SEQ ID NO: 452256 - DNA, 30 bp, Artificial Sequence
  Synthetic oligonucleotide
gcctctcaaattgtgccattcttgtgggag

SEQ ID NO: 452257 - DNA, 30 bp, Artificial Sequence
  Synthetic oligonucleotide
aaggcacgtagggtgaagcggcattgggag

SEQ ID NO: 452258 - DNA, 30 bp, Artificial Sequence
  Synthetic oligonucleotide
gaaaatgaggagtggggtgggtagatggag

SEQ ID NO: 452259 - DNA, 30 bp, Artificial Sequence
  Synthetic oligonucleotide
taagctgcgtggccatataaccttatggag

SEQ ID NO: 452260 - DNA, 30 bp, Artificial Sequence
  Synthetic oligonucleotide
tggataaaatcatccggagagatactggag

SEQ ID NO: 452261 - DNA, 30 bp, Artificial Sequence
  Synthetic oligonucleotide
aatcaagcataaattatgtttatcctggag

SEQ ID NO: 452262 - DNA, 30 bp, Artificial Sequence
  Synthetic oligonucleotide
gagtttttagagctccagacaatgctggag

SEQ ID NO: 452263 - DNA, 30 bp, Artificial Sequence
  Synthetic oligonucleotide
agtgaacacgggtctcgccagcttctggag

SEQ ID NO: 452264 - DNA, 30 bp, Artificial Sequence
  Synthetic oligonucleotide
cttaagcccctggggctatttgtagtggag

SEQ ID NO: 452265 - DNA, 30 bp, Artificial Sequence
  Synthetic oligonucleotide
caagcttgaggtgctttggactccgtggag

SEQ ID NO: 452266 - DNA, 30 bp, Artificial Sequence
  Synthetic oligonucleotide
gctttttcctactccaagtccggggtggag

SEQ ID NO: 452267 - DNA, 30 bp, Artificial Sequence
  Synthetic oligonucleotide
ttccttcttgtacattaatattgggtggag

SEQ ID NO: 452268 - DNA, 30 bp, Artificial Sequence
  Synthetic oligonucleotide
agatatagaaatcagaattatactgtggag

SEQ ID NO: 452269 - DNA, 30 bp, Artificial Sequence
  Synthetic oligonucleotide
ttcggtagacggtccttaccggacttggag

SEQ ID NO: 452270 - DNA, 30 bp, Artificial Sequence
  Synthetic oligonucleotide
taaagtgcgagtgccacatttgagttggag

SEQ ID NO: 452271 - DNA, 30 bp, Artificial Sequence
  Synthetic oligonucleotide
atgaagtttaggaaccggccctccaatgag

SEQ ID NO: 452272 - DNA, 30 bp, Artificial Sequence
  Synthetic oligonucleotide
ttatgtgtaaccaggatcttgttcaatgag

SEQ ID NO: 452273 - DNA, 30 bp, Artificial Sequence
  Synthetic oligonucleotide
accttatgttttctttcttcggagaatgag

SEQ ID NO: 452274 - DNA, 30 bp, Artificial Sequence
  Synthetic oligonucleotide
ggagagaccgacgatcaatatgataatgag

SEQ ID NO: 452275 - DNA, 30 bp, Artificial Sequence
  Synthetic oligonucleotide
ctgcctttccaccttacatgtgataatgag

SEQ ID NO: 452276 - DNA, 30 bp, Artificial Sequence
  Synthetic oligonucleotide
catactcgtgatactgctctcggtaatgag

SEQ ID NO: 452277 - DNA, 30 bp, Artificial Sequence
  Synthetic oligonucleotide
gattatcggcgcttcggtggtaaacatgag

SEQ ID NO: 452278 - DNA, 30 bp, Artificial Sequence
  Synthetic oligonucleotide
gttataaggtatacggcggcgtagcatgag

SEQ ID NO: 452279 - DNA, 30 bp, Artificial Sequence
  Synthetic oligonucleotide
ttaatttctatccgacacatttcgcatgag

SEQ ID NO: 452280 - DNA, 30 bp, Artificial Sequence
  Synthetic oligonucleotide
tttatctcatctgacaaagacaggcatgag

SEQ ID NO: 452281 - DNA, 30 bp, Artificial Sequence
  Synthetic oligonucleotide
ttacatctagcgggccattcgcatcatgag

SEQ ID NO: 452282 - DNA, 30 bp, Artificial Sequence
  Synthetic oligonucleotide
ccccaattcaatgtttgataggggtatgag

SEQ ID NO: 452283 - DNA, 30 bp, Artificial Sequence
  Synthetic oligonucleotide
gttatgcggtggcgaacgtaacccactgag

SEQ ID NO: 452284 - DNA, 30 bp, Artificial Sequence
  Synthetic oligonucleotide
aaggcaatctaccttggcggcacgactgag

SEQ ID NO: 452285 - DNA, 30 bp, Artificial Sequence
  Synthetic oligonucleotide
catatttgtcgccacgggcgttttactgag

SEQ ID NO: 452286 - DNA, 30 bp, Artificial Sequence
  Synthetic oligonucleotide
agcctcctcccctggttggctcaacctgag

SEQ ID NO: 452287 - DNA, 30 bp, Artificial Sequence
  Synthetic oligonucleotide
gacagccatgcatatgagccccatcctgag

SEQ ID NO: 452288 - DNA, 30 bp, Artificial Sequence
  Synthetic oligonucleotide
ctatgctgattcgcttatacgacagctgag

SEQ ID NO: 452289 - DNA, 30 bp, Artificial Sequence
  Synthetic oligonucleotide
gaccggcattagcatcgagaatgagctgag

SEQ ID NO: 452290 - DNA, 30 bp, Artificial Sequence
  Synthetic oligonucleotide
aggggactgatgattcaaggacgcgctgag

SEQ ID NO: 452291 - DNA, 30 bp, Artificial Sequence
  Synthetic oligonucleotide
aaccagcgcaggaaaggtaatcgcgctgag

SEQ ID NO: 452292 - DNA, 30 bp, Artificial Sequence
  Synthetic oligonucleotide
ggcttttcagacctgcagacgcaatctgag

SEQ ID NO: 452293 - DNA, 30 bp, Artificial Sequence
  Synthetic oligonucleotide
ataactgcgagctagcgcttgttatctgag

SEQ ID NO: 452294 - DNA, 30 bp, Artificial Sequence
  Synthetic oligonucleotide
cgtccatcgcatagccgcaacatctctgag

SEQ ID NO: 452295 - DNA, 30 bp, Artificial Sequence
  Synthetic oligonucleotide
ggtgactgcaatctgactgtgaagtctgag

SEQ ID NO: 452296 - DNA, 30 bp, Artificial Sequence
  Synthetic oligonucleotide
agtagcgcagactccacattaaggtctgag

SEQ ID NO: 452297 - DNA, 30 bp, Artificial Sequence
  Synthetic oligonucleotide
attttccgtacgccagtccgtaggtctgag

SEQ ID NO: 452298 - DNA, 30 bp, Artificial Sequence
  Synthetic oligonucleotide
aagtcacacttagggtaaaattcttctgag

SEQ ID NO: 452299 - DNA, 30 bp, Artificial Sequence
  Synthetic oligonucleotide
aatgctcagtcggcaggctcacaaagtgag

SEQ ID NO: 452300 - DNA, 30 bp, Artificial Sequence
  Synthetic oligonucleotide
ttgataagttgagcgggtgtatcaagtgag

SEQ ID NO: 452301 - DNA, 30 bp, Artificial Sequence
  Synthetic oligonucleotide
cttcgcagcgaacgcagcctgaacagtgag

SEQ ID NO: 452302 - DNA, 30 bp, Artificial Sequence
  Synthetic oligonucleotide
atgtctggcaaaggtggggggtagagtgag

SEQ ID NO: 452303 - DNA, 30 bp, Artificial Sequence
  Synthetic oligonucleotide
attcattgaaaagttgcctcgactagtgag

SEQ ID NO: 452304 - DNA, 30 bp, Artificial Sequence
  Synthetic oligonucleotide
tcatgttaaaacacttggcatgcacgtgag

SEQ ID NO: 452305 - DNA, 30 bp, Artificial Sequence
  Synthetic oligonucleotide
ttgttaatctctctacagttaacccgtgag

SEQ ID NO: 452306 - DNA, 30 bp, Artificial Sequence
  Synthetic oligonucleotide
ttgtactcacggtaaatttaccacggtgag

SEQ ID NO: 452307 - DNA, 30 bp, Artificial Sequence
  Synthetic oligonucleotide
tacttttattcaagacttagtttgggtgag

SEQ ID NO: 452308 - DNA, 30 bp, Artificial Sequence
  Synthetic oligonucleotide
cggggggtgtgcagatacttagatggtgag

SEQ ID NO: 452309 - DNA, 30 bp, Artificial Sequence
  Synthetic oligonucleotide
tacatgacaaggcacctctaaagtggtgag

SEQ ID NO: 452310 - DNA, 30 bp, Artificial Sequence
  Synthetic oligonucleotide
ggttcacgtggtaccggtaggcgatgtgag

SEQ ID NO: 452311 - DNA, 30 bp, Artificial Sequence
  Synthetic oligonucleotide
ggaccgcctaatcgtccgcggtgatgtgag

SEQ ID NO: 452312 - DNA, 30 bp, Artificial Sequence
  Synthetic oligonucleotide
agttttcctaaaggcagaggggtctgtgag

SEQ ID NO: 452313 - DNA, 30 bp, Artificial Sequence
  Synthetic oligonucleotide
cggcacccattcgggaactgtcgttgtgag

SEQ ID NO: 452314 - DNA, 29 bp, Artificial Sequence
  Synthetic oligonucleotide
ctcgcatttctaaccgcatttacattgag

SEQ ID NO: 452315 - DNA, 30 bp, Artificial Sequence
  Synthetic oligonucleotide
ggctttatgattaaatcgacggtcattgag

SEQ ID NO: 452316 - DNA, 30 bp, Artificial Sequence
  Synthetic oligonucleotide
gggggttttgatttgtcgtatttgattgag

SEQ ID NO: 452317 - DNA, 30 bp, Artificial Sequence
  Synthetic oligonucleotide
cagtttccaattagatgtctaactcttgag

SEQ ID NO: 452318 - DNA, 30 bp, Artificial Sequence
  Synthetic oligonucleotide
aacttggggggtatcgatatatgtcttgag

SEQ ID NO: 452319 - DNA, 30 bp, Artificial Sequence
  Synthetic oligonucleotide
accccgatggagtgccctaattgtcttgag

SEQ ID NO: 452320 - DNA, 30 bp, Artificial Sequence
  Synthetic oligonucleotide
cttcaaacacggaaacttgtgtaagttgag

SEQ ID NO: 452321 - DNA, 30 bp, Artificial Sequence
  Synthetic oligonucleotide
atagggcaagtgctcacccaaagagttgag

SEQ ID NO: 452322 - DNA, 30 bp, Artificial Sequence
  Synthetic oligonucleotide
ccctaatccgaaatcctttacaccgttgag

SEQ ID NO: 452323 - DNA, 30 bp, Artificial Sequence
  Synthetic oligonucleotide
ccttcgtccagcctcctgtcgatggttgag

SEQ ID NO: 452324 - DNA, 30 bp, Artificial Sequence
  Synthetic oligonucleotide
tctggtacgtgttgcggtcgtggatttgag

SEQ ID NO: 452325 - DNA, 30 bp, Artificial Sequence
  Synthetic oligonucleotide
gaataagataagcggggcgtagactttgag

SEQ ID NO: 452326 - DNA, 30 bp, Artificial Sequence
  Synthetic oligonucleotide
attaacgttcccatcgcgcctacctttgag

SEQ ID NO: 452327 - DNA, 30 bp, Artificial Sequence
  Synthetic oligonucleotide
ttgcaagtgtacctcggtttgcggtttgag

SEQ ID NO: 452328 - DNA, 30 bp, Artificial Sequence
  Synthetic oligonucleotide
ttcactctaattaaatccccctattttgag

SEQ ID NO: 452329 - DNA, 30 bp, Artificial Sequence
  Synthetic oligonucleotide
gataagctgtatactaagttgacttttgag

SEQ ID NO: 452330 - DNA, 30 bp, Artificial Sequence
  Synthetic oligonucleotide
tattaaatttgcgtacactggtcttttgag

SEQ ID NO: 452331 - DNA, 30 bp, Artificial Sequence
  Synthetic oligonucleotide
gtatatttccattttaggtaattaaaatag

SEQ ID NO: 452332 - DNA, 30 bp, Artificial Sequence
  Synthetic oligonucleotide
tttcgaggtgtactagaaattagcaaatag

SEQ ID NO: 452333 - DNA, 30 bp, Artificial Sequence
  Synthetic oligonucleotide
cccgatttaactttgatatgtacgaaatag

SEQ ID NO: 452334 - DNA, 30 bp, Artificial Sequence
  Synthetic oligonucleotide
ctggccggtagtcctcacactaataaatag

SEQ ID NO: 452335 - DNA, 30 bp, Artificial Sequence
  Synthetic oligonucleotide
tttgggggactttgctatgacggtaaatag

SEQ ID NO: 452336 - DNA, 30 bp, Artificial Sequence
  Synthetic oligonucleotide
aaaaacttggctcagtggaatcaacaatag

SEQ ID NO: 452337 - DNA, 30 bp, Artificial Sequence
  Synthetic oligonucleotide
gaaagctttcgagcatcgaggtgacaatag

SEQ ID NO: 452338 - DNA, 30 bp, Artificial Sequence
  Synthetic oligonucleotide
gtgtgggagtaaggtgcatatatacaatag

SEQ ID NO: 452339 - DNA, 30 bp, Artificial Sequence
  Synthetic oligonucleotide
gtaatactggtaaggcgtgcctgccaatag

SEQ ID NO: 452340 - DNA, 30 bp, Artificial Sequence
  Synthetic oligonucleotide
ggtaggatagtttataacgtgacgcaatag

SEQ ID NO: 452341 - DNA, 30 bp, Artificial Sequence
  Synthetic oligonucleotide
cttcggggaccgctcatagcggtgcaatag

SEQ ID NO: 452342 - DNA, 30 bp, Artificial Sequence
  Synthetic oligonucleotide
atgaggacatctatgcattctggtcaatag

SEQ ID NO: 452343 - DNA, 30 bp, Artificial Sequence
  Synthetic oligonucleotide
actacatagaaccgcggcataacagaatag

SEQ ID NO: 452344 - DNA, 30 bp, Artificial Sequence
  Synthetic oligonucleotide
catcgataggtggcttttaggacagaatag

SEQ ID NO: 452345 - DNA, 30 bp, Artificial Sequence
  Synthetic oligonucleotide
tcactacgtgtgtcaagggggcaggaatag

SEQ ID NO: 452346 - DNA, 30 bp, Artificial Sequence
  Synthetic oligonucleotide
gacagcaatcagcccatgatgtgggaatag

SEQ ID NO: 452347 - DNA, 30 bp, Artificial Sequence
  Synthetic oligonucleotide
acgggcatttaattgggcttttatgaatag

SEQ ID NO: 452348 - DNA, 30 bp, Artificial Sequence
  Synthetic oligonucleotide
actaacgctatcctataccgcgttgaatag

SEQ ID NO: 452349 - DNA, 30 bp, Artificial Sequence
  Synthetic oligonucleotide
tccattaattgtcacttagtgtgataatag

SEQ ID NO: 452350 - DNA, 30 bp, Artificial Sequence
  Synthetic oligonucleotide
gagggtcgacgttgcctatatgtataatag

SEQ ID NO: 452351 - DNA, 29 bp, Artificial Sequence
  Synthetic oligonucleotide
atcgagggacatgtgagggcagctaatag

SEQ ID NO: 452352 - DNA, 30 bp, Artificial Sequence
  Synthetic oligonucleotide
gtctcaaaggctccgggggatttgtaatag

SEQ ID NO: 452353 - DNA, 30 bp, Artificial Sequence
  Synthetic oligonucleotide
tgtccctacgattaatcattatcttaatag

SEQ ID NO: 452354 - DNA, 30 bp, Artificial Sequence
  Synthetic oligonucleotide
gtcgaatttctcgtctttttttgttaatag

SEQ ID NO: 452355 - DNA, 30 bp, Artificial Sequence
  Synthetic oligonucleotide
ttggctacacatgcgctcaatgtttaatag

SEQ ID NO: 452356 - DNA, 30 bp, Artificial Sequence
  Synthetic oligonucleotide
agactttaacgcagtaatgagctcacatag

SEQ ID NO: 452357 - DNA, 30 bp, Artificial Sequence
  Synthetic oligonucleotide
ggtgacatattacccttgtacggtacatag

SEQ ID NO: 452358 - DNA, 30 bp, Artificial Sequence
  Synthetic oligonucleotide
tcacgcagtgagttatggtcagagccatag

SEQ ID NO: 452359 - DNA, 30 bp, Artificial Sequence
  Synthetic oligonucleotide
tttgacgggaagttgggatccatgccatag

SEQ ID NO: 452360 - DNA, 30 bp, Artificial Sequence
  Synthetic oligonucleotide
ataccgggtttcgtaattaaagaagcatag

SEQ ID NO: 452361 - DNA, 30 bp, Artificial Sequence
  Synthetic oligonucleotide
gtggagctaaccgacctatggacagcatag

SEQ ID NO: 452362 - DNA, 30 bp, Artificial Sequence
  Synthetic oligonucleotide
attaatcctattcacttctacgatgcatag

SEQ ID NO: 452363 - DNA, 30 bp, Artificial Sequence
  Synthetic oligonucleotide
attcttcggcactagccggcgtttgcatag

SEQ ID NO: 452364 - DNA, 30 bp, Artificial Sequence
  Synthetic oligonucleotide
gaccgaagaaggtgctaaattcaatcatag

SEQ ID NO: 452365 - DNA, 30 bp, Artificial Sequence
  Synthetic oligonucleotide
tcttgcaatattcaacattagagatcatag

SEQ ID NO: 452366 - DNA, 30 bp, Artificial Sequence
  Synthetic oligonucleotide
gcaaccttggtcggttgtccatggtcatag

SEQ ID NO: 452367 - DNA, 30 bp, Artificial Sequence
  Synthetic oligonucleotide
aggtattcctgacaggtgcagttttcatag

SEQ ID NO: 452368 - DNA, 30 bp, Artificial Sequence
  Synthetic oligonucleotide
aatggtgggcacttgcgaaagcaaagatag

SEQ ID NO: 452369 - DNA, 30 bp, Artificial Sequence
  Synthetic oligonucleotide
tttacttttatttgcgaaggataaagatag

SEQ ID NO: 452370 - DNA, 30 bp, Artificial Sequence
  Synthetic oligonucleotide
atcagtcatcaagctcaagagtaaagatag

SEQ ID NO: 452371 - DNA, 30 bp, Artificial Sequence
  Synthetic oligonucleotide
agcccgccgtagtagtacgctagcagatag

SEQ ID NO: 452372 - DNA, 30 bp, Artificial Sequence
  Synthetic oligonucleotide
gctccagactagcatcgttgctagagatag

SEQ ID NO: 452373 - DNA, 30 bp, Artificial Sequence
  Synthetic oligonucleotide
tcactaccgcgtgggattactcatagatag

SEQ ID NO: 452374 - DNA, 30 bp, Artificial Sequence
  Synthetic oligonucleotide
gcttttgactgcctccgcctatatagatag

SEQ ID NO: 452375 - DNA, 30 bp, Artificial Sequence
  Synthetic oligonucleotide
gccctgttctacctgggccttgttagatag

SEQ ID NO: 452376 - DNA, 30 bp, Artificial Sequence
  Synthetic oligonucleotide
tctgcaccgaaccgttcgaaatcacgatag

SEQ ID NO: 452377 - DNA, 30 bp, Artificial Sequence
  Synthetic oligonucleotide
ttgaccgatcggggtgatcattcacgatag

SEQ ID NO: 452378 - DNA, 30 bp, Artificial Sequence
  Synthetic oligonucleotide
gatctttcagcaaaggaacttttccgatag

SEQ ID NO: 452379 - DNA, 30 bp, Artificial Sequence
  Synthetic oligonucleotide
atattttcgattgcaaggacaatgcgatag

SEQ ID NO: 452380 - DNA, 30 bp, Artificial Sequence
  Synthetic oligonucleotide
atctccaatggagttgtgcgattgcgatag

SEQ ID NO: 452381 - DNA, 30 bp, Artificial Sequence
  Synthetic oligonucleotide
ccatgagtatgtagagatagaactcgatag

SEQ ID NO: 452382 - DNA, 30 bp, Artificial Sequence
  Synthetic oligonucleotide
ttccgtttaacacaggcagttggaggatag

SEQ ID NO: 452383 - DNA, 30 bp, Artificial Sequence
  Synthetic oligonucleotide
gactcggtgtagctctaagtactaggatag

SEQ ID NO: 452384 - DNA, 30 bp, Artificial Sequence
  Synthetic oligonucleotide
tatttccatatatatcgagcatcgggatag

SEQ ID NO: 452385 - DNA, 30 bp, Artificial Sequence
  Synthetic oligonucleotide
aatttgtggcgggtttggcaatgtggatag

SEQ ID NO: 452386 - DNA, 30 bp, Artificial Sequence
  Synthetic oligonucleotide
atttcattcggaattgaccagtaatgatag

SEQ ID NO: 452387 - DNA, 30 bp, Artificial Sequence
  Synthetic oligonucleotide
cgcactgtcatagctttattcggatgatag

SEQ ID NO: 452388 - DNA, 30 bp, Artificial Sequence
  Synthetic oligonucleotide
gataaggcaattgggtgcccatgatgatag

SEQ ID NO: 452389 - DNA, 30 bp, Artificial Sequence
  Synthetic oligonucleotide
ataacttgggtatacatgtgagtatgatag

SEQ ID NO: 452390 - DNA, 30 bp, Artificial Sequence
  Synthetic oligonucleotide
ttaaggttccgttatcatcaaagctgatag

SEQ ID NO: 452391 - DNA, 30 bp, Artificial Sequence
  Synthetic oligonucleotide
ccttatttaagtgtgttacacacgtgatag

SEQ ID NO: 452392 - DNA, 30 bp, Artificial Sequence
  Synthetic oligonucleotide
cctggacgctgaggcaacatcatttgatag

SEQ ID NO: 452393 - DNA, 30 bp, Artificial Sequence
  Synthetic oligonucleotide
ggacggctagttaagagcaactgaatatag

SEQ ID NO: 452394 - DNA, 30 bp, Artificial Sequence
  Synthetic oligonucleotide
tgcggggtcttaacataaactttaatatag

SEQ ID NO: 452395 - DNA, 30 bp, Artificial Sequence
  Synthetic oligonucleotide
tgcagtcatctattcgtagcccacatatag

SEQ ID NO: 452396 - DNA, 30 bp, Artificial Sequence
  Synthetic oligonucleotide
attttttatcagtggtcggtagtcatatag

SEQ ID NO: 452397 - DNA, 30 bp, Artificial Sequence
  Synthetic oligonucleotide
ctgttcctatgaaacccttcactgatatag

SEQ ID NO: 452398 - DNA, 30 bp, Artificial Sequence
  Synthetic oligonucleotide
ggaacttgcaatcgtactttgaatatatag

SEQ ID NO: 452399 - DNA, 30 bp, Artificial Sequence
  Synthetic oligonucleotide
cggcctataacctgtatacgacgtatatag

SEQ ID NO: 452400 - DNA, 30 bp, Artificial Sequence
  Synthetic oligonucleotide
ctctgctcaaatgagcggtgttcactatag

SEQ ID NO: 452401 - DNA, 30 bp, Artificial Sequence
  Synthetic oligonucleotide
aaggagcccaagcccggtaagggcctatag

SEQ ID NO: 452402 - DNA, 30 bp, Artificial Sequence
  Synthetic oligonucleotide
cggtctctaagcgcacgggtcaagctatag

SEQ ID NO: 452403 - DNA, 30 bp, Artificial Sequence
  Synthetic oligonucleotide
aaaggtcaatatgttgccggtcagctatag

SEQ ID NO: 452404 - DNA, 30 bp, Artificial Sequence
  Synthetic oligonucleotide
tcacaattctaaattcgcggagcgctatag

SEQ ID NO: 452405 - DNA, 30 bp, Artificial Sequence
  Synthetic oligonucleotide
cgactgctggcggacgctgcgtcgctatag

SEQ ID NO: 452406 - DNA, 30 bp, Artificial Sequence
  Synthetic oligonucleotide
atagcctattgttagggactagatctatag

SEQ ID NO: 452407 - DNA, 30 bp, Artificial Sequence
  Synthetic oligonucleotide
acagaagggaccggtcgcatacgagtatag

SEQ ID NO: 452408 - DNA, 30 bp, Artificial Sequence
  Synthetic oligonucleotide
ccgcgcatcatatctccgtaaggagtatag

SEQ ID NO: 452409 - DNA, 30 bp, Artificial Sequence
  Synthetic oligonucleotide
ggattcttaccgatacttagttacgtatag

SEQ ID NO: 452410 - DNA, 30 bp, Artificial Sequence
  Synthetic oligonucleotide
ggattgcaattctcttctcctggtgtatag

SEQ ID NO: 452411 - DNA, 30 bp, Artificial Sequence
  Synthetic oligonucleotide
tatggacagtgcctttagggtggtgtatag

SEQ ID NO: 452412 - DNA, 30 bp, Artificial Sequence
  Synthetic oligonucleotide
tgtgcccaatgacgcacggtggtcttatag

SEQ ID NO: 452413 - DNA, 30 bp, Artificial Sequence
  Synthetic oligonucleotide
aaattgtgaggggagatcaggactttatag

SEQ ID NO: 452414 - DNA, 30 bp, Artificial Sequence
  Synthetic oligonucleotide
tacgggaaaactccaggacgtgttttatag

SEQ ID NO: 452415 - DNA, 30 bp, Artificial Sequence
  Synthetic oligonucleotide
gaaacaattttgacgatgtcacaaaactag

SEQ ID NO: 452416 - DNA, 30 bp, Artificial Sequence
  Synthetic oligonucleotide
cccactccccgacgagtggtgtccaactag

SEQ ID NO: 452417 - DNA, 30 bp, Artificial Sequence
  Synthetic oligonucleotide
actctaatgatggcttcgcggtagaactag

SEQ ID NO: 452418 - DNA, 30 bp, Artificial Sequence
  Synthetic oligonucleotide
ggacttttaggttgattttgttagaactag

SEQ ID NO: 452419 - DNA, 30 bp, Artificial Sequence
  Synthetic oligonucleotide
aattctgccgagtattaattgtggaactag

SEQ ID NO: 452420 - DNA, 30 bp, Artificial Sequence
  Synthetic oligonucleotide
gcattaacttgtgcggcacccactaactag

SEQ ID NO: 452421 - DNA, 31 bp, Artificial Sequence
  Synthetic oligonucleotide
tcttctctcatgcaagacagatgctaactag

SEQ ID NO: 452422 - DNA, 30 bp, Artificial Sequence
  Synthetic oligonucleotide
gggggtcgcgcaaagcacagttaacactag

SEQ ID NO: 452423 - DNA, 30 bp, Artificial Sequence
  Synthetic oligonucleotide
attcacagggccagcaaatttggccactag

SEQ ID NO: 452424 - DNA, 30 bp, Artificial Sequence
  Synthetic oligonucleotide
ttgctacacctacattcgggtacgcactag

SEQ ID NO: 452425 - DNA, 30 bp, Artificial Sequence
  Synthetic oligonucleotide
atgtatgagggattttttgatgttcactag

SEQ ID NO: 452426 - DNA, 30 bp, Artificial Sequence
  Synthetic oligonucleotide
gcgtctagtagtcggggactacgagactag

SEQ ID NO: 452427 - DNA, 30 bp, Artificial Sequence
  Synthetic oligonucleotide
ttctatgatcacctcgtgttgtaatactag

SEQ ID NO: 452428 - DNA, 30 bp, Artificial Sequence
  Synthetic oligonucleotide
gaaattagagtctatgggaaggtatactag

SEQ ID NO: 452429 - DNA, 30 bp, Artificial Sequence
  Synthetic oligonucleotide
atatgaatccgctggcagaagcactactag

SEQ ID NO: 452430 - DNA, 30 bp, Artificial Sequence
  Synthetic oligonucleotide
aagtttattttaagcgtctttctctactag

SEQ ID NO: 452431 - DNA, 30 bp, Artificial Sequence
  Synthetic oligonucleotide
accccggcccgcaggcaacggacgtactag

SEQ ID NO: 452432 - DNA, 30 bp, Artificial Sequence
  Synthetic oligonucleotide
cagaagtatgtggtcttatatgcgtactag

SEQ ID NO: 452433 - DNA, 30 bp, Artificial Sequence
  Synthetic oligonucleotide
tcagtggtcaatcaatattaggggacctag

SEQ ID NO: 452434 - DNA, 30 bp, Artificial Sequence
  Synthetic oligonucleotide
tcctgttttgtctaggcgacaggtacctag

SEQ ID NO: 452435 - DNA, 30 bp, Artificial Sequence
  Synthetic oligonucleotide
tccacagttttgtacgaggccacgccctag

SEQ ID NO: 452436 - DNA, 30 bp, Artificial Sequence
  Synthetic oligonucleotide
atgttacctgtattgggacagacgccctag

SEQ ID NO: 452437 - DNA, 30 bp, Artificial Sequence
  Synthetic oligonucleotide
gtgtaataatcaagtttttgggtgccctag

SEQ ID NO: 452438 - DNA, 30 bp, Artificial Sequence
  Synthetic oligonucleotide
gctagcaatatcagagggaattgtccctag

SEQ ID NO: 452439 - DNA, 30 bp, Artificial Sequence
  Synthetic oligonucleotide
ttgacgaaggaaacatggtgtcaagcctag

SEQ ID NO: 452440 - DNA, 30 bp, Artificial Sequence
  Synthetic oligonucleotide
agttctactactccctagacagaagcctag

SEQ ID NO: 452441 - DNA, 30 bp, Artificial Sequence
  Synthetic oligonucleotide
cccgggtgagctaatctaataccagcctag

SEQ ID NO: 452442 - DNA, 30 bp, Artificial Sequence
  Synthetic oligonucleotide
atctcgtcagccagacggaatagcgcctag

SEQ ID NO: 452443 - DNA, 30 bp, Artificial Sequence
  Synthetic oligonucleotide
agaagcatcttggagtcgtttgtggcctag

SEQ ID NO: 452444 - DNA, 30 bp, Artificial Sequence
  Synthetic oligonucleotide
cttttgatttaaccagtaggcaactcctag

SEQ ID NO: 452445 - DNA, 30 bp, Artificial Sequence
  Synthetic oligonucleotide
ggcagattcctgggacttgattagtcctag

SEQ ID NO: 452446 - DNA, 30 bp, Artificial Sequence
  Synthetic oligonucleotide
cgtctatatcggataatagcaagttcctag

SEQ ID NO: 452447 - DNA, 30 bp, Artificial Sequence
  Synthetic oligonucleotide
ggccgcctggaacgctgccgtacaagctag

SEQ ID NO: 452448 - DNA, 30 bp, Artificial Sequence
  Synthetic oligonucleotide
tcgcgctttccgagtatatgtcgaagctag

SEQ ID NO: 452449 - DNA, 30 bp, Artificial Sequence
  Synthetic oligonucleotide
gtgcaacaggtgggcttgtattcgagctag

SEQ ID NO: 452450 - DNA, 30 bp, Artificial Sequence
  Synthetic oligonucleotide
tcaccggagaaaagctctgcctggagctag

SEQ ID NO: 452451 - DNA, 30 bp, Artificial Sequence
  Synthetic oligonucleotide
ccaaataggactcggggacggtcacgctag

SEQ ID NO: 452452 - DNA, 30 bp, Artificial Sequence
  Synthetic oligonucleotide
attcctcataaggctatgcctcgacgctag

SEQ ID NO: 452453 - DNA, 30 bp, Artificial Sequence
  Synthetic oligonucleotide
aacggggcctttccatcggacgcccgctag

SEQ ID NO: 452454 - DNA, 30 bp, Artificial Sequence
  Synthetic oligonucleotide
aatggcgaccgccgataccggtagcgctag

SEQ ID NO: 452455 - DNA, 30 bp, Artificial Sequence
  Synthetic oligonucleotide
cggcatctttcaggcaaggcagggcgctag

SEQ ID NO: 452456 - DNA, 30 bp, Artificial Sequence
  Synthetic oligonucleotide
ttaatcgttgaggaggcagccgggcgctag

SEQ ID NO: 452457 - DNA, 30 bp, Artificial Sequence
  Synthetic oligonucleotide
tcagaaagcgtaggcatgactaaaggctag

SEQ ID NO: 452458 - DNA, 30 bp, Artificial Sequence
  Synthetic oligonucleotide
aacgacgttgaaacatggaaatgaggctag

SEQ ID NO: 452459 - DNA, 30 bp, Artificial Sequence
  Synthetic oligonucleotide
tgccaggtgcctgagctatcaggcggctag

SEQ ID NO: 452460 - DNA, 30 bp, Artificial Sequence
  Synthetic oligonucleotide
tttgattgaggttatttagaattcggctag

SEQ ID NO: 452461 - DNA, 30 bp, Artificial Sequence
  Synthetic oligonucleotide
ggccgttgatgagtaaatgaggcgggctag

SEQ ID NO: 452462 - DNA, 30 bp, Artificial Sequence
  Synthetic oligonucleotide
cccagatatacatcgttttagcggggctag

SEQ ID NO: 452463 - DNA, 30 bp, Artificial Sequence
  Synthetic oligonucleotide
cagcggctcattggataatgaggtggctag

SEQ ID NO: 452464 - DNA, 30 bp, Artificial Sequence
  Synthetic oligonucleotide
aaaaagaggagagcagactgtaaatgctag

SEQ ID NO: 452465 - DNA, 30 bp, Artificial Sequence
  Synthetic oligonucleotide
aagattgttaacgggggcataacatgctag

SEQ ID NO: 452466 - DNA, 30 bp, Artificial Sequence
  Synthetic oligonucleotide
aaaatagccggctatacgcttgcctgctag

SEQ ID NO: 452467 - DNA, 30 bp, Artificial Sequence
  Synthetic oligonucleotide
ttagttttactagggatagtccgctgctag

SEQ ID NO: 452468 - DNA, 31 bp, Artificial Sequence
  Synthetic oligonucleotide
gacagcggaaacgatctttcgagtctgctag

SEQ ID NO: 452469 - DNA, 30 bp, Artificial Sequence
  Synthetic oligonucleotide
atttgcagcaccgctggtgtcaagtgctag

SEQ ID NO: 452470 - DNA, 30 bp, Artificial Sequence
  Synthetic oligonucleotide
ggacgacggacgcgtgcatggcaaatctag

SEQ ID NO: 452471 - DNA, 30 bp, Artificial Sequence
  Synthetic oligonucleotide
acccatttgttacttgcgtatagaatctag

SEQ ID NO: 452472 - DNA, 30 bp, Artificial Sequence
  Synthetic oligonucleotide
tagttcatactatctaacaagataatctag

SEQ ID NO: 452473 - DNA, 30 bp, Artificial Sequence
  Synthetic oligonucleotide
tcaattcggcagtcccagattaccatctag

SEQ ID NO: 452474 - DNA, 30 bp, Artificial Sequence
  Synthetic oligonucleotide
gcactagccacatctagcgattgcatctag

SEQ ID NO: 452475 - DNA, 30 bp, Artificial Sequence
  Synthetic oligonucleotide
agatctgctcccatgtattgtacgatctag

SEQ ID NO: 452476 - DNA, 30 bp, Artificial Sequence
  Synthetic oligonucleotide
aaggcgcctcactggctctgatctatctag

SEQ ID NO: 452477 - DNA, 30 bp, Artificial Sequence
  Synthetic oligonucleotide
aggaacctacaatgtttccttgtcctctag

SEQ ID NO: 452478 - DNA, 30 bp, Artificial Sequence
  Synthetic oligonucleotide
gagggaagaacattgctatcgcagctctag

SEQ ID NO: 452479 - DNA, 30 bp, Artificial Sequence
  Synthetic oligonucleotide
cgcttttgtcacgtaggccttagtctctag

SEQ ID NO: 452480 - DNA, 30 bp, Artificial Sequence
  Synthetic oligonucleotide
agcatctctggtaattttatgcccgtctag

SEQ ID NO: 452481 - DNA, 30 bp, Artificial Sequence
  Synthetic oligonucleotide
caattatcgggtgtattaggaactgtctag

SEQ ID NO: 452482 - DNA, 30 bp, Artificial Sequence
  Synthetic oligonucleotide
agataatagtattcaggagtgtgtgtctag

SEQ ID NO: 452483 - DNA, 30 bp, Artificial Sequence
  Synthetic oligonucleotide
gccactatatatcctgatgctccgttctag

SEQ ID NO: 452484 - DNA, 30 bp, Artificial Sequence
  Synthetic oligonucleotide
gtgccttttggctacccagaatggttctag

SEQ ID NO: 452485 - DNA, 30 bp, Artificial Sequence
  Synthetic oligonucleotide
tacgaagggtgggatcgtcgtaatttctag

SEQ ID NO: 452486 - DNA, 30 bp, Artificial Sequence
  Synthetic oligonucleotide
tcggtggcctaaagtctataagggaagtag

SEQ ID NO: 452487 - DNA, 30 bp, Artificial Sequence
  Synthetic oligonucleotide
atattaatgggcaggcggcttgctaagtag

SEQ ID NO: 452488 - DNA, 30 bp, Artificial Sequence
  Synthetic oligonucleotide
atccgtaatattgctccaggtggtaagtag

SEQ ID NO: 452489 - DNA, 31 bp, Artificial Sequence
  Synthetic oligonucleotide
tatgtgagctagagtcggcttgtgtaagtag

SEQ ID NO: 452490 - DNA, 30 bp, Artificial Sequence
  Synthetic oligonucleotide
taaaggtatatagggttcggcatacagtag

SEQ ID NO: 452491 - DNA, 30 bp, Artificial Sequence
  Synthetic oligonucleotide
cttttacactggtccaggagactacagtag

SEQ ID NO: 452492 - DNA, 30 bp, Artificial Sequence
  Synthetic oligonucleotide
tttattaatgaaacactgatggtacagtag

SEQ ID NO: 452493 - DNA, 30 bp, Artificial Sequence
  Synthetic oligonucleotide
aaccttgtgtgtgttataatcgtccagtag

SEQ ID NO: 452494 - DNA, 30 bp, Artificial Sequence
  Synthetic oligonucleotide
cttttgttgggaaggtgcgtatagcagtag

SEQ ID NO: 452495 - DNA, 30 bp, Artificial Sequence
  Synthetic oligonucleotide
aggtagcatacctacgtggaggatcagtag

SEQ ID NO: 452496 - DNA, 30 bp, Artificial Sequence
  Synthetic oligonucleotide
aaaactacgtccgctcgcctgggtcagtag

SEQ ID NO: 452497 - DNA, 30 bp, Artificial Sequence
  Synthetic oligonucleotide
actctgtcaagtaccggcaaggtggagtag

SEQ ID NO: 452498 - DNA, 30 bp, Artificial Sequence
  Synthetic oligonucleotide
ttcccgcaaatgcgggtcagtttggagtag

SEQ ID NO: 452499 - DNA, 30 bp, Artificial Sequence
  Synthetic oligonucleotide
ccacgaatctacttaggaacgcatgagtag

SEQ ID NO: 452500 - DNA, 30 bp, Artificial Sequence
  Synthetic oligonucleotide
gaagttccggtggatagtagaggtgagtag

SEQ ID NO: 452501 - DNA, 30 bp, Artificial Sequence
  Synthetic oligonucleotide
ggctggcgctacgatcgttctggtgagtag

SEQ ID NO: 452502 - DNA, 30 bp, Artificial Sequence
  Synthetic oligonucleotide
ttggtccacagcactataatccttgagtag

SEQ ID NO: 452503 - DNA, 30 bp, Artificial Sequence
  Synthetic oligonucleotide
gccgcggcactgttcacatgctaatagtag

SEQ ID NO: 452504 - DNA, 30 bp, Artificial Sequence
  Synthetic oligonucleotide
agctcactgtgatagacacgctgaacgtag

SEQ ID NO: 452505 - DNA, 30 bp, Artificial Sequence
  Synthetic oligonucleotide
atgtcttcatgggtgctcgttgtcacgtag

SEQ ID NO: 452506 - DNA, 30 bp, Artificial Sequence
  Synthetic oligonucleotide
tacgtgaaatggtcctagagtccgacgtag

SEQ ID NO: 452507 - DNA, 30 bp, Artificial Sequence
  Synthetic oligonucleotide
cacgcacaggatgcagccagccggacgtag

SEQ ID NO: 452508 - DNA, 30 bp, Artificial Sequence
  Synthetic oligonucleotide
gagaatttacgattggttagtgtgacgtag

SEQ ID NO: 452509 - DNA, 30 bp, Artificial Sequence
  Synthetic oligonucleotide
taatcggcgcgggcttctgttcgtacgtag

SEQ ID NO: 452510 - DNA, 30 bp, Artificial Sequence
  Synthetic oligonucleotide
gtacaccttgacccttctgtctaaccgtag

SEQ ID NO: 452511 - DNA, 30 bp, Artificial Sequence
  Synthetic oligonucleotide
ccccttcgagcgctacgatctgtaccgtag

SEQ ID NO: 452512 - DNA, 30 bp, Artificial Sequence
  Synthetic oligonucleotide
cattagtcgcccgcagttgatcatccgtag

SEQ ID NO: 452513 - DNA, 30 bp, Artificial Sequence
  Synthetic oligonucleotide
gactagtcctagtgttatactggtccgtag

SEQ ID NO: 452514 - DNA, 30 bp, Artificial Sequence
  Synthetic oligonucleotide
aatgcagggcgacgggtacgttttccgtag

SEQ ID NO: 452515 - DNA, 30 bp, Artificial Sequence
  Synthetic oligonucleotide
taactctaggggatcgtggcatcagcgtag

SEQ ID NO: 452516 - DNA, 30 bp, Artificial Sequence
  Synthetic oligonucleotide
ttataggggcttcggtgcatttcagcgtag

SEQ ID NO: 452517 - DNA, 30 bp, Artificial Sequence
  Synthetic oligonucleotide
atccttttgttgtgagattcagacgcgtag

SEQ ID NO: 452518 - DNA, 30 bp, Artificial Sequence
  Synthetic oligonucleotide
ggcgttccctttcagcccacttctgcgtag

SEQ ID NO: 452519 - DNA, 30 bp, Artificial Sequence
  Synthetic oligonucleotide
ggtccagtctcaccacgcttacgtgcgtag

SEQ ID NO: 452520 - DNA, 30 bp, Artificial Sequence
  Synthetic oligonucleotide
gcctagcgccggactacgatcgttgcgtag

SEQ ID NO: 452521 - DNA, 30 bp, Artificial Sequence
  Synthetic oligonucleotide
aattaaggccagagcctgttgtactcgtag

SEQ ID NO: 452522 - DNA, 30 bp, Artificial Sequence
  Synthetic oligonucleotide
gtgtataaatttcaggtgggatcgtcgtag

SEQ ID NO: 452523 - DNA, 30 bp, Artificial Sequence
  Synthetic oligonucleotide
gactgatcactacctaaggagcgcaggtag

SEQ ID NO: 452524 - DNA, 30 bp, Artificial Sequence
  Synthetic oligonucleotide
cacgagtgaatcaagtgggggacgaggtag

SEQ ID NO: 452525 - DNA, 30 bp, Artificial Sequence
  Synthetic oligonucleotide
ttcggtaggtatcacaaactcggtaggtag

SEQ ID NO: 452526 - DNA, 30 bp, Artificial Sequence
  Synthetic oligonucleotide
aattcagacttgatccgtatttcacggtag

SEQ ID NO: 452527 - DNA, 30 bp, Artificial Sequence
  Synthetic oligonucleotide
aacccctgatctgtcgaagtaatcgggtag

SEQ ID NO: 452528 - DNA, 30 bp, Artificial Sequence
  Synthetic oligonucleotide
ctgtaacgcctgctgacccaaatggggtag

SEQ ID NO: 452529 - DNA, 30 bp, Artificial Sequence
  Synthetic oligonucleotide
ctccaacctagtgtgaacgtcacatggtag

SEQ ID NO: 452530 - DNA, 30 bp, Artificial Sequence
  Synthetic oligonucleotide
acacgtttaaatatttttacgtgctggtag

SEQ ID NO: 452531 - DNA, 30 bp, Artificial Sequence
  Synthetic oligonucleotide
caatttactcgcgtcaataagctctggtag

SEQ ID NO: 452532 - DNA, 30 bp, Artificial Sequence
  Synthetic oligonucleotide
tctacggatctggggcaggaaaagtggtag

SEQ ID NO: 452533 - DNA, 30 bp, Artificial Sequence
  Synthetic oligonucleotide
ggggttctgggtgcggtagacgcgtggtag

SEQ ID NO: 452534 - DNA, 30 bp, Artificial Sequence
  Synthetic oligonucleotide
ggagtgagtggtaaaaatctaatgtggtag

SEQ ID NO: 452535 - DNA, 30 bp, Artificial Sequence
  Synthetic oligonucleotide
tggttatatcatgcgcttactgcttggtag

SEQ ID NO: 452536 - DNA, 30 bp, Artificial Sequence
  Synthetic oligonucleotide
gtcgcacacatcaacctacgattaatgtag

SEQ ID NO: 452537 - DNA, 30 bp, Artificial Sequence
  Synthetic oligonucleotide
ggtcggatcggacgcgacaatttaatgtag

SEQ ID NO: 452538 - DNA, 30 bp, Artificial Sequence
  Synthetic oligonucleotide
tccagatcgctgtctgcatgatacatgtag

SEQ ID NO: 452539 - DNA, 30 bp, Artificial Sequence
  Synthetic oligonucleotide
tgcttgagtcgtacgggtattaccatgtag

SEQ ID NO: 452540 - DNA, 30 bp, Artificial Sequence
  Synthetic oligonucleotide
ggacttctatcgggtacctttacactgtag

SEQ ID NO: 452541 - DNA, 30 bp, Artificial Sequence
  Synthetic oligonucleotide
ttaacttttgaagctttaaacaccctgtag

SEQ ID NO: 452542 - DNA, 30 bp, Artificial Sequence
  Synthetic oligonucleotide
caagtactacgggttatgaccgccctgtag

SEQ ID NO: 452543 - DNA, 30 bp, Artificial Sequence
  Synthetic oligonucleotide
aaataggaaatgaagacattgacgctgtag

SEQ ID NO: 452544 - DNA, 30 bp, Artificial Sequence
  Synthetic oligonucleotide
gggtatttcggatcgacattggcagtgtag

SEQ ID NO: 452545 - DNA, 30 bp, Artificial Sequence
  Synthetic oligonucleotide
atttcaataagttcgatcatttgcgtgtag

SEQ ID NO: 452546 - DNA, 30 bp, Artificial Sequence
  Synthetic oligonucleotide
taattatgcacgacttacgcgtatgtgtag

SEQ ID NO: 452547 - DNA, 30 bp, Artificial Sequence
  Synthetic oligonucleotide
gatattaaatggttaatcgaatgtgtgtag

SEQ ID NO: 452548 - DNA, 30 bp, Artificial Sequence
  Synthetic oligonucleotide
ggatgtctgatgaattcgctgttattgtag

SEQ ID NO: 452549 - DNA, 30 bp, Artificial Sequence
  Synthetic oligonucleotide
tgttcagataaggtgtacctctgcttgtag

SEQ ID NO: 452550 - DNA, 30 bp, Artificial Sequence
  Synthetic oligonucleotide
gaaacccgttcaaggtcgatgactttgtag

SEQ ID NO: 452551 - DNA, 30 bp, Artificial Sequence
  Synthetic oligonucleotide
ctttatgcttaatccgatatcacaaattag

SEQ ID NO: 452552 - DNA, 30 bp, Artificial Sequence
  Synthetic oligonucleotide
agaccccttgggggccatcttgacaattag

SEQ ID NO: 452553 - DNA, 29 bp, Artificial Sequence
  Synthetic oligonucleotide
gagactctcactggctttgtctcaattag

SEQ ID NO: 452554 - DNA, 30 bp, Artificial Sequence
  Synthetic oligonucleotide
tgggtttctcagcccagggatacgaattag

SEQ ID NO: 452555 - DNA, 30 bp, Artificial Sequence
  Synthetic oligonucleotide
ccacagaaacttcgatggcgcgctaattag

SEQ ID NO: 452556 - DNA, 30 bp, Artificial Sequence
  Synthetic oligonucleotide
tcaggattagcatcaagatgaagtaattag

SEQ ID NO: 452557 - DNA, 30 bp, Artificial Sequence
  Synthetic oligonucleotide
aaacaatttagattccatgacgcacattag

SEQ ID NO: 452558 - DNA, 30 bp, Artificial Sequence
  Synthetic oligonucleotide
ctaaagacagtcccggcgttggcacattag

SEQ ID NO: 452559 - DNA, 30 bp, Artificial Sequence
  Synthetic oligonucleotide
taatgactcttcttcagaggagcccattag

SEQ ID NO: 452560 - DNA, 30 bp, Artificial Sequence
  Synthetic oligonucleotide
gaaaaagtcgctcgtgcagacgcgcattag

SEQ ID NO: 452561 - DNA, 30 bp, Artificial Sequence
  Synthetic oligonucleotide
cttcgccccaggaagatacaggcagattag

SEQ ID NO: 452562 - DNA, 30 bp, Artificial Sequence
  Synthetic oligonucleotide
tgtctatgggttagtgcactcctagattag

SEQ ID NO: 452563 - DNA, 30 bp, Artificial Sequence
  Synthetic oligonucleotide
gtactgattagcgtaggatatctatattag

SEQ ID NO: 452564 - DNA, 30 bp, Artificial Sequence
  Synthetic oligonucleotide
aggccaaagcggtgtaaaggtctatattag

SEQ ID NO: 452565 - DNA, 30 bp, Artificial Sequence
  Synthetic oligonucleotide
gaatcttttgagtgaagcaaagtctattag

SEQ ID NO: 452566 - DNA, 30 bp, Artificial Sequence
  Synthetic oligonucleotide
gagcgtttatttaaggaatattcgtattag

SEQ ID NO: 452567 - DNA, 30 bp, Artificial Sequence
  Synthetic oligonucleotide
atttaggttgtggtcggacagcggtattag

SEQ ID NO: 452568 - DNA, 30 bp, Artificial Sequence
  Synthetic oligonucleotide
tagtcacgccctgatgggtacggttattag

SEQ ID NO: 452569 - DNA, 30 bp, Artificial Sequence
  Synthetic oligonucleotide
cacattaagtgtcggatgcggtgttattag

SEQ ID NO: 452570 - DNA, 30 bp, Artificial Sequence
  Synthetic oligonucleotide
actccgtgtgggataaatgggtaaacttag

SEQ ID NO: 452571 - DNA, 30 bp, Artificial Sequence
  Synthetic oligonucleotide
tacataactagaaggagaaacataacttag

SEQ ID NO: 452572 - DNA, 30 bp, Artificial Sequence
  Synthetic oligonucleotide
gttaaaaatgttcggccagcaggcacttag

SEQ ID NO: 452573 - DNA, 30 bp, Artificial Sequence
  Synthetic oligonucleotide
caaatccgattgtatttgtcgattacttag

SEQ ID NO: 452574 - DNA, 30 bp, Artificial Sequence
  Synthetic oligonucleotide
ttgaacgcctttacatcgactgtaccttag

SEQ ID NO: 452575 - DNA, 30 bp, Artificial Sequence
  Synthetic oligonucleotide
caagcattgtcaggcgaccagacgccttag

SEQ ID NO: 452576 - DNA, 30 bp, Artificial Sequence
  Synthetic oligonucleotide
ccatatcggtaactcttacacctgccttag

SEQ ID NO: 452577 - DNA, 30 bp, Artificial Sequence
  Synthetic oligonucleotide
agctgaggcgtctgggtcggggtgccttag

SEQ ID NO: 452578 - DNA, 30 bp, Artificial Sequence
  Synthetic oligonucleotide
atctaagggctaatttactactatccttag

SEQ ID NO: 452579 - DNA, 30 bp, Artificial Sequence
  Synthetic oligonucleotide
cgcaacattttagcggggacacacgcttag

SEQ ID NO: 452580 - DNA, 30 bp, Artificial Sequence
  Synthetic oligonucleotide
gacaatcacttcggcggcagccacgcttag

SEQ ID NO: 452581 - DNA, 30 bp, Artificial Sequence
  Synthetic oligonucleotide
atcatgtccttgcggctctcgcacgcttag

SEQ ID NO: 452582 - DNA, 30 bp, Artificial Sequence
  Synthetic oligonucleotide
gggctcgagcccgaccggtgaaccgcttag

SEQ ID NO: 452583 - DNA, 30 bp, Artificial Sequence
  Synthetic oligonucleotide
gtatcgggggttctgcatatcactgcttag

SEQ ID NO: 452584 - DNA, 30 bp, Artificial Sequence
  Synthetic oligonucleotide
gtgaatctagaccaaacagtgttatcttag

SEQ ID NO: 452585 - DNA, 30 bp, Artificial Sequence
  Synthetic oligonucleotide
gcatttaaggggaaggccaccttgtcttag

SEQ ID NO: 452586 - DNA, 30 bp, Artificial Sequence
  Synthetic oligonucleotide
gatgcctctatagcacgcatgttttcttag

SEQ ID NO: 452587 - DNA, 30 bp, Artificial Sequence
  Synthetic oligonucleotide
atctgcttagccctgtggagtcgacgttag

SEQ ID NO: 452588 - DNA, 30 bp, Artificial Sequence
  Synthetic oligonucleotide
ttggccaagcaccccgtttcatcccgttag

SEQ ID NO: 452589 - DNA, 30 bp, Artificial Sequence
  Synthetic oligonucleotide
cgttaaaggtcattgacggacagccgttag

SEQ ID NO: 452590 - DNA, 30 bp, Artificial Sequence
  Synthetic oligonucleotide
agttatgtccgtaaccggggattccgttag

SEQ ID NO: 452591 - DNA, 30 bp, Artificial Sequence
  Synthetic oligonucleotide
catgaactttttgtctagtttacgcgttag

SEQ ID NO: 452592 - DNA, 30 bp, Artificial Sequence
  Synthetic oligonucleotide
aaccatactatatttttatataggcgttag

SEQ ID NO: 452593 - DNA, 30 bp, Artificial Sequence
  Synthetic oligonucleotide
cttggaaatgcagggccgcatatgcgttag

SEQ ID NO: 452594 - DNA, 30 bp, Artificial Sequence
  Synthetic oligonucleotide
gggtatttggcatacacgtagactcgttag

SEQ ID NO: 452595 - DNA, 30 bp, Artificial Sequence
  Synthetic oligonucleotide
gtcctacaaactcggctgctatttcgttag

SEQ ID NO: 452596 - DNA, 30 bp, Artificial Sequence
  Synthetic oligonucleotide
tatattcaatcgatatagagagacggttag

SEQ ID NO: 452597 - DNA, 30 bp, Artificial Sequence
  Synthetic oligonucleotide
gcttctagcacacagcttctgtccggttag

SEQ ID NO: 452598 - DNA, 30 bp, Artificial Sequence
  Synthetic oligonucleotide
gagatgttacttacccgattttcgggttag

SEQ ID NO: 452599 - DNA, 30 bp, Artificial Sequence
  Synthetic oligonucleotide
gtctggacttttcgacgccaaactggttag

SEQ ID NO: 452600 - DNA, 30 bp, Artificial Sequence
  Synthetic oligonucleotide
aaattcaccatctgcataactacctgttag

SEQ ID NO: 452601 - DNA, 30 bp, Artificial Sequence
  Synthetic oligonucleotide
tagttctctggtagtcaggctatctgttag

SEQ ID NO: 452602 - DNA, 30 bp, Artificial Sequence
  Synthetic oligonucleotide
ccggcacggcacgacacaggtccgtgttag

SEQ ID NO: 452603 - DNA, 30 bp, Artificial Sequence
  Synthetic oligonucleotide
agtctggcagagaggaaatctctgtgttag

SEQ ID NO: 452604 - DNA, 30 bp, Artificial Sequence
  Synthetic oligonucleotide
gtctgcacacgcacaattcattattgttag

SEQ ID NO: 452605 - DNA, 30 bp, Artificial Sequence
  Synthetic oligonucleotide
acttacggggattagtagagttattgttag

SEQ ID NO: 452606 - DNA, 30 bp, Artificial Sequence
  Synthetic oligonucleotide
ggttctttgatctggtgtgtgaaaatttag

SEQ ID NO: 452607 - DNA, 30 bp, Artificial Sequence
  Synthetic oligonucleotide
tccctcacaaacgcaattgccacaatttag

SEQ ID NO: 452608 - DNA, 30 bp, Artificial Sequence
  Synthetic oligonucleotide
tatctatagaaggatggatgatcaatttag

SEQ ID NO: 452609 - DNA, 30 bp, Artificial Sequence
  Synthetic oligonucleotide
ctcacgccgggttcatcaacgagaatttag

SEQ ID NO: 452610 - DNA, 30 bp, Artificial Sequence
  Synthetic oligonucleotide
gtttaataatatcgatgttttacgatttag

SEQ ID NO: 452611 - DNA, 30 bp, Artificial Sequence
  Synthetic oligonucleotide
aattgactacggcgagcaaactgtatttag

SEQ ID NO: 452612 - DNA, 30 bp, Artificial Sequence
  Synthetic oligonucleotide
cgaggactaccctgtcataggggactttag

SEQ ID NO: 452613 - DNA, 30 bp, Artificial Sequence
  Synthetic oligonucleotide
accgcagtccaagcgctatgtaacctttag

SEQ ID NO: 452614 - DNA, 30 bp, Artificial Sequence
  Synthetic oligonucleotide
ctccgacttacctcggatggttccctttag

SEQ ID NO: 452615 - DNA, 30 bp, Artificial Sequence
  Synthetic oligonucleotide
cgacgtacctgctgattgctgagcctttag

SEQ ID NO: 452616 - DNA, 30 bp, Artificial Sequence
  Synthetic oligonucleotide
ctccgatactatgcaggctgaaagctttag

SEQ ID NO: 452617 - DNA, 30 bp, Artificial Sequence
  Synthetic oligonucleotide
taagtatattactactgtttatagctttag

SEQ ID NO: 452618 - DNA, 30 bp, Artificial Sequence
  Synthetic oligonucleotide
attgccaatacccgacgtacatggctttag

SEQ ID NO: 452619 - DNA, 30 bp, Artificial Sequence
  Synthetic oligonucleotide
tcccgttactctagcacggggaatctttag

SEQ ID NO: 452620 - DNA, 30 bp, Artificial Sequence
  Synthetic oligonucleotide
gttggtttccaaagaacgtgtaacgtttag

SEQ ID NO: 452621 - DNA, 30 bp, Artificial Sequence
  Synthetic oligonucleotide
gggtgctacaccagatccttattcgtttag

SEQ ID NO: 452622 - DNA, 30 bp, Artificial Sequence
  Synthetic oligonucleotide
ccaatttttgcacggtaatcggaggtttag

SEQ ID NO: 452623 - DNA, 30 bp, Artificial Sequence
  Synthetic oligonucleotide
tccagaacacccgctcgcacaggtgtttag

SEQ ID NO: 452624 - DNA, 30 bp, Artificial Sequence
  Synthetic oligonucleotide
gtatgatctttcgcggtggatgaattttag

SEQ ID NO: 452625 - DNA, 30 bp, Artificial Sequence
  Synthetic oligonucleotide
tcgtttcattgccgtgggtagtaattttag

SEQ ID NO: 452626 - DNA, 30 bp, Artificial Sequence
  Synthetic oligonucleotide
tattacaaagtgtcacctcgaggattttag

SEQ ID NO: 452627 - DNA, 30 bp, Artificial Sequence
  Synthetic oligonucleotide
ccaaaggttttcatccgcatctgattttag

SEQ ID NO: 452628 - DNA, 30 bp, Artificial Sequence
  Synthetic oligonucleotide
gccgtctgatcgccgccaaggagcttttag

SEQ ID NO: 452629 - DNA, 30 bp, Artificial Sequence
  Synthetic oligonucleotide
ctttggacatctctaatatgggtcttttag

SEQ ID NO: 452630 - DNA, 30 bp, Artificial Sequence
  Synthetic oligonucleotide
tttgcactaacgtaagcggggtagttttag

SEQ ID NO: 452631 - DNA, 30 bp, Artificial Sequence
  Synthetic oligonucleotide
cggcctctgggcttcagtagcctgttttag

SEQ ID NO: 452632 - DNA, 30 bp, Artificial Sequence
  Synthetic oligonucleotide
gattaaaccgaaaaaaccggtcatttttag

SEQ ID NO: 452633 - DNA, 30 bp, Artificial Sequence
  Synthetic oligonucleotide
tatcatgggctacattgacaggttttttag

SEQ ID NO: 452634 - DNA, 30 bp, Artificial Sequence
  Synthetic oligonucleotide
attcggggagcgtttagttgcactaaaacg

SEQ ID NO: 452635 - DNA, 30 bp, Artificial Sequence
  Synthetic oligonucleotide
aaaatcagtctcagggccgcatcgcaaacg

SEQ ID NO: 452636 - DNA, 30 bp, Artificial Sequence
  Synthetic oligonucleotide
tcagacgtcattcgtttaacaaggcaaacg

SEQ ID NO: 452637 - DNA, 30 bp, Artificial Sequence
  Synthetic oligonucleotide
aaacgcgaaaaagaagcctgtggtcaaacg

SEQ ID NO: 452638 - DNA, 30 bp, Artificial Sequence
  Synthetic oligonucleotide
atcgcaacatcttttatattttttcaaacg

SEQ ID NO: 452639 - DNA, 30 bp, Artificial Sequence
  Synthetic oligonucleotide
gcgcgtgtacggtaaatatttcccgaaacg

SEQ ID NO: 452640 - DNA, 30 bp, Artificial Sequence
  Synthetic oligonucleotide
cttaaggataggcgtgggatgggcgaaacg

SEQ ID NO: 452641 - DNA, 30 bp, Artificial Sequence
  Synthetic oligonucleotide
ccccggctagtcgacgggagcaaggaaacg

SEQ ID NO: 452642 - DNA, 30 bp, Artificial Sequence
  Synthetic oligonucleotide
tattggatttaccacgtaggctaggaaacg

SEQ ID NO: 452643 - DNA, 30 bp, Artificial Sequence
  Synthetic oligonucleotide
ccgcgtgaacgttcgaaacgcacggaaacg

SEQ ID NO: 452644 - DNA, 30 bp, Artificial Sequence
  Synthetic oligonucleotide
ggtctttgtaagacgccatccctggaaacg

SEQ ID NO: 452645 - DNA, 30 bp, Artificial Sequence
  Synthetic oligonucleotide
aaacttcggtctgcgtgtcgcagtgaaacg

SEQ ID NO: 452646 - DNA, 30 bp, Artificial Sequence
  Synthetic oligonucleotide
cattgtccttactgttcctgtagataaacg

SEQ ID NO: 452647 - DNA, 30 bp, Artificial Sequence
  Synthetic oligonucleotide
gcgtaaaggtccgcaaatgaaaagtaaacg

SEQ ID NO: 452648 - DNA, 30 bp, Artificial Sequence
  Synthetic oligonucleotide
gagttaccccaggagaatggtaggtaaacg

SEQ ID NO: 452649 - DNA, 30 bp, Artificial Sequence
  Synthetic oligonucleotide
aacaaagcgccacgcaaaggagtgtaaacg

SEQ ID NO: 452650 - DNA, 30 bp, Artificial Sequence
  Synthetic oligonucleotide
gaaaaaaatattccttgtatagaaacaacg

SEQ ID NO: 452651 - DNA, 30 bp, Artificial Sequence
  Synthetic oligonucleotide
caatcaatagtacgagtctacgtaacaacg

SEQ ID NO: 452652 - DNA, 30 bp, Artificial Sequence
  Synthetic oligonucleotide
aattaaaaccgatcagtcacagacacaacg

SEQ ID NO: 452653 - DNA, 30 bp, Artificial Sequence
  Synthetic oligonucleotide
ttatatatgaaagttaacgtatacacaacg

SEQ ID NO: 452654 - DNA, 30 bp, Artificial Sequence
  Synthetic oligonucleotide
atttagcagagtaggtgagtgtgcacaacg

SEQ ID NO: 452655 - DNA, 30 bp, Artificial Sequence
  Synthetic oligonucleotide
gttagtagtaatagttcatatgagacaacg

SEQ ID NO: 452656 - DNA, 30 bp, Artificial Sequence
  Synthetic oligonucleotide
agcttagctcgtattctccctgggacaacg

SEQ ID NO: 452657 - DNA, 30 bp, Artificial Sequence
  Synthetic oligonucleotide
gagccatgtcggcagccatccaaaccaacg

SEQ ID NO: 452658 - DNA, 30 bp, Artificial Sequence
  Synthetic oligonucleotide
atttgcagcctttaggctgcgggaccaacg

SEQ ID NO: 452659 - DNA, 31 bp, Artificial Sequence
  Synthetic oligonucleotide
ttaggtgttactcgcgtcacgttacccaacg

SEQ ID NO: 452660 - DNA, 30 bp, Artificial Sequence
  Synthetic oligonucleotide
catactatatgctgtatacactagccaacg

SEQ ID NO: 452661 - DNA, 30 bp, Artificial Sequence
  Synthetic oligonucleotide
agtactcacataataaccgcattgccaacg

SEQ ID NO: 452662 - DNA, 30 bp, Artificial Sequence
  Synthetic oligonucleotide
cagtacaaaatctttgttaaggctccaacg

SEQ ID NO: 452663 - DNA, 30 bp, Artificial Sequence
  Synthetic oligonucleotide
aacctatgatgtggccgattgaaagcaacg

SEQ ID NO: 452664 - DNA, 30 bp, Artificial Sequence
  Synthetic oligonucleotide
gtatttggagactgcttgtaagcagcaacg

SEQ ID NO: 452665 - DNA, 30 bp, Artificial Sequence
  Synthetic oligonucleotide
ccatggcgtaggatagcgatggcagcaacg

SEQ ID NO: 452666 - DNA, 30 bp, Artificial Sequence
  Synthetic oligonucleotide
tatttattgacatgaagagcgcaggcaacg

SEQ ID NO: 452667 - DNA, 30 bp, Artificial Sequence
  Synthetic oligonucleotide
gggctctcagggccgaaccattgggcaacg

SEQ ID NO: 452668 - DNA, 30 bp, Artificial Sequence
  Synthetic oligonucleotide
gccattgtcgggctaccttcaatggcaacg

SEQ ID NO: 452669 - DNA, 30 bp, Artificial Sequence
  Synthetic oligonucleotide
cgcaaaggcgttggtagcgtgagatcaacg

SEQ ID NO: 452670 - DNA, 30 bp, Artificial Sequence
  Synthetic oligonucleotide
gcgaagttatacgcggccgtctgatcaacg

SEQ ID NO: 452671 - DNA, 30 bp, Artificial Sequence
  Synthetic oligonucleotide
gagggtatttcgacgtttcacatatcaacg

SEQ ID NO: 452672 - DNA, 30 bp, Artificial Sequence
  Synthetic oligonucleotide
ccggcctaaatagtcaatttaacgtcaacg

SEQ ID NO: 452673 - DNA, 30 bp, Artificial Sequence
  Synthetic oligonucleotide
gtagtgaagtggggatccttgatgtcaacg

SEQ ID NO: 452674 - DNA, 30 bp, Artificial Sequence
  Synthetic oligonucleotide
atatgtatgaaatttcaggtggattcaacg

SEQ ID NO: 452675 - DNA, 30 bp, Artificial Sequence
  Synthetic oligonucleotide
tgtagtaacgaggccggcatttacagaacg

SEQ ID NO: 452676 - DNA, 30 bp, Artificial Sequence
  Synthetic oligonucleotide
agtagtcgccctcaggcgttctagagaacg

SEQ ID NO: 452677 - DNA, 30 bp, Artificial Sequence
  Synthetic oligonucleotide
cgttctaaagaggctcaccagccgagaacg

SEQ ID NO: 452678 - DNA, 30 bp, Artificial Sequence
  Synthetic oligonucleotide
gacttaagctggggcttggtcatgagaacg

SEQ ID NO: 452679 - DNA, 30 bp, Artificial Sequence
  Synthetic oligonucleotide
gtagtaattcagttcagtttccatagaacg

SEQ ID NO: 452680 - DNA, 30 bp, Artificial Sequence
  Synthetic oligonucleotide
gttgatcgacttattgattaggatagaacg

SEQ ID NO: 452681 - DNA, 30 bp, Artificial Sequence
  Synthetic oligonucleotide
aacttccgggtgtggcgtgagtgtagaacg

SEQ ID NO: 452682 - DNA, 30 bp, Artificial Sequence
  Synthetic oligonucleotide
tcgaaaggatcataacgttcataacgaacg

SEQ ID NO: 452683 - DNA, 30 bp, Artificial Sequence
  Synthetic oligonucleotide
gtgcacgctgtgccgtgcatgttacgaacg

SEQ ID NO: 452684 - DNA, 30 bp, Artificial Sequence
  Synthetic oligonucleotide
cgtcgagtgggcagcactctgcgccgaacg

SEQ ID NO: 452685 - DNA, 30 bp, Artificial Sequence
  Synthetic oligonucleotide
catgtaaatacctccggcttttatcgaacg

SEQ ID NO: 452686 - DNA, 30 bp, Artificial Sequence
  Synthetic oligonucleotide
gcctagtcaggttttcctgcaactcgaacg

SEQ ID NO: 452687 - DNA, 29 bp, Artificial Sequence
  Synthetic oligonucleotide
gtgaatgtgcagtgcgtagaattcgaacg

SEQ ID NO: 452688 - DNA, 30 bp, Artificial Sequence
  Synthetic oligonucleotide
tgcacatggaggagaagcgctcaaggaacg

SEQ ID NO: 452689 - DNA, 30 bp, Artificial Sequence
  Synthetic oligonucleotide
acttgcccgcgtggccacgacaacggaacg

SEQ ID NO: 452690 - DNA, 30 bp, Artificial Sequence
  Synthetic oligonucleotide
taattcgttatatagtgacaggggggaacg

SEQ ID NO: 452691 - DNA, 30 bp, Artificial Sequence
  Synthetic oligonucleotide
atcaggctcgttacgggtgcctttggaacg

SEQ ID NO: 452692 - DNA, 30 bp, Artificial Sequence
  Synthetic oligonucleotide
tgaatagaatatcgtgatttacattgaacg

SEQ ID NO: 452693 - DNA, 30 bp, Artificial Sequence
  Synthetic oligonucleotide
ggaacgttctcgggatcctttggttgaacg

SEQ ID NO: 452694 - DNA, 30 bp, Artificial Sequence
  Synthetic oligonucleotide
ggtatctatacgagcgttgcaccaataacg

SEQ ID NO: 452695 - DNA, 30 bp, Artificial Sequence
  Synthetic oligonucleotide
aaaacttcagaaagttttgcggccataacg

SEQ ID NO: 452696 - DNA, 30 bp, Artificial Sequence
  Synthetic oligonucleotide
aatttaacttcttagcgaacctccataacg

SEQ ID NO: 452697 - DNA, 30 bp, Artificial Sequence
  Synthetic oligonucleotide
ggtagtataggtcgtcaggttatcataacg

SEQ ID NO: 452698 - DNA, 30 bp, Artificial Sequence
  Synthetic oligonucleotide
ggaccatatggatttgggtcgcagataacg

SEQ ID NO: 452699 - DNA, 30 bp, Artificial Sequence
  Synthetic oligonucleotide
ggttttggttttgatagtcaggcgataacg

SEQ ID NO: 452700 - DNA, 30 bp, Artificial Sequence
  Synthetic oligonucleotide
acgctacctgtttacctgatttggataacg

SEQ ID NO: 452701 - DNA, 30 bp, Artificial Sequence
  Synthetic oligonucleotide
gttaaagccaatatgaggctattgataacg

SEQ ID NO: 452702 - DNA, 30 bp, Artificial Sequence
  Synthetic oligonucleotide
catcacgtttttgcgcgttgagatataacg

SEQ ID NO: 452703 - DNA, 30 bp, Artificial Sequence
  Synthetic oligonucleotide
gctttgtcggccagcccgaactctataacg

SEQ ID NO: 452704 - DNA, 30 bp, Artificial Sequence
  Synthetic oligonucleotide
atcaatcaaattagtattagcgttataacg

SEQ ID NO: 452705 - DNA, 30 bp, Artificial Sequence
  Synthetic oligonucleotide
caaagtaaatggccaagcgtttcactaacg

SEQ ID NO: 452706 - DNA, 30 bp, Artificial Sequence
  Synthetic oligonucleotide
ctctttccccataacgataccaatctaacg

SEQ ID NO: 452707 - DNA, 30 bp, Artificial Sequence
  Synthetic oligonucleotide
atctgatacgattttggaggggctctaacg

SEQ ID NO: 452708 - DNA, 30 bp, Artificial Sequence
  Synthetic oligonucleotide
acttttgaacccacagttacttaggtaacg

SEQ ID NO: 452709 - DNA, 30 bp, Artificial Sequence
  Synthetic oligonucleotide
gcacgccgggttgaaatggtcctggtaacg

SEQ ID NO: 452710 - DNA, 30 bp, Artificial Sequence
  Synthetic oligonucleotide
ttatactttaaggtacgaacacctgtaacg

SEQ ID NO: 452711 - DNA, 30 bp, Artificial Sequence
  Synthetic oligonucleotide
cacccgaactgcgagatcctgagtgtaacg

SEQ ID NO: 452712 - DNA, 30 bp, Artificial Sequence
  Synthetic oligonucleotide
agaagtccgagccagtagcacgaattaacg

SEQ ID NO: 452713 - DNA, 30 bp, Artificial Sequence
  Synthetic oligonucleotide
ggagatcttcaggcgcaatcacgattaacg

SEQ ID NO: 452714 - DNA, 30 bp, Artificial Sequence
  Synthetic oligonucleotide
gtacgccagtggcgccgtatacacttaacg

SEQ ID NO: 452715 - DNA, 30 bp, Artificial Sequence
  Synthetic oligonucleotide
ttcggtgactcagctgtgtgctgcttaacg

SEQ ID NO: 452716 - DNA, 30 bp, Artificial Sequence
  Synthetic oligonucleotide
tgactgtgggaatcatacaacctcttaacg

SEQ ID NO: 452717 - DNA, 30 bp, Artificial Sequence
  Synthetic oligonucleotide
gcgcccccagtttcctacgttaagttaacg

SEQ ID NO: 452718 - DNA, 30 bp, Artificial Sequence
  Synthetic oligonucleotide
gtgcttatgcgcacccgcaatctgttaacg

SEQ ID NO: 452719 - DNA, 30 bp, Artificial Sequence
  Synthetic oligonucleotide
attctacgccgtgttggtcttcctttaacg

SEQ ID NO: 452720 - DNA, 30 bp, Artificial Sequence
  Synthetic oligonucleotide
aatagcgacatctgagtacctcgaaacacg

SEQ ID NO: 452721 - DNA, 30 bp, Artificial Sequence
  Synthetic oligonucleotide
aatgtctctgcatagaccttctccaacacg

SEQ ID NO: 452722 - DNA, 30 bp, Artificial Sequence
  Synthetic oligonucleotide
gtcggaaacggctttccggtccgcaacacg

SEQ ID NO: 452723 - DNA, 30 bp, Artificial Sequence
  Synthetic oligonucleotide
caaaacgtaagcttccctgagcgcaacacg

SEQ ID NO: 452724 - DNA, 30 bp, Artificial Sequence
  Synthetic oligonucleotide
tgtacacagtccgtgataaacgtcaacacg

SEQ ID NO: 452725 - DNA, 30 bp, Artificial Sequence
  Synthetic oligonucleotide
ccaccctccatctggtattgggggaacacg

SEQ ID NO: 452726 - DNA, 30 bp, Artificial Sequence
  Synthetic oligonucleotide
acccgaggggtcttcccaataatgaacacg

SEQ ID NO: 452727 - DNA, 30 bp, Artificial Sequence
  Synthetic oligonucleotide
aaataacatagaattaaggatattaacacg

SEQ ID NO: 452728 - DNA, 30 bp, Artificial Sequence
  Synthetic oligonucleotide
gaggaccaagtcaacaatggaacacacacg

SEQ ID NO: 452729 - DNA, 29 bp, Artificial Sequence
  Synthetic oligonucleotide
gccagtctaatcttccggacttccacacg

SEQ ID NO: 452730 - DNA, 30 bp, Artificial Sequence
  Synthetic oligonucleotide
cccccgaaagaattgacgggaggtcacacg

SEQ ID NO: 452731 - DNA, 30 bp, Artificial Sequence
  Synthetic oligonucleotide
tgaaaccgagtagcgctaggtattcacacg

SEQ ID NO: 452732 - DNA, 30 bp, Artificial Sequence
  Synthetic oligonucleotide
gaccagaacgattcgggctcagcagacacg

SEQ ID NO: 452733 - DNA, 31 bp, Artificial Sequence
  Synthetic oligonucleotide
tcaggcaagaggtgtcttcctggtagacacg

SEQ ID NO: 452734 - DNA, 30 bp, Artificial Sequence
  Synthetic oligonucleotide
tatcgcgataacgtcgcagtaccggacacg

SEQ ID NO: 452735 - DNA, 30 bp, Artificial Sequence
  Synthetic oligonucleotide
caggttatctactgcttgaccgcggacacg

SEQ ID NO: 452736 - DNA, 30 bp, Artificial Sequence
  Synthetic oligonucleotide
cataagtcaattggcacgtagtatgacacg

SEQ ID NO: 452737 - DNA, 30 bp, Artificial Sequence
  Synthetic oligonucleotide
ggagtccgacagcgcacctgtacatacacg

SEQ ID NO: 452738 - DNA, 30 bp, Artificial Sequence
  Synthetic oligonucleotide
tccggaactcagtcgcggcgtttctacacg

SEQ ID NO: 452739 - DNA, 30 bp, Artificial Sequence
  Synthetic oligonucleotide
gtcggattcgccccctaagttaggtacacg

SEQ ID NO: 452740 - DNA, 30 bp, Artificial Sequence
  Synthetic oligonucleotide
atgacttcagctcggtgttaaggaaccacg

SEQ ID NO: 452741 - DNA, 30 bp, Artificial Sequence
  Synthetic oligonucleotide
cttgcttcatctgagccatgcgacaccacg

SEQ ID NO: 452742 - DNA, 30 bp, Artificial Sequence
  Synthetic oligonucleotide
cgccatgtgaatcgtacacccacgaccacg

SEQ ID NO: 452743 - DNA, 30 bp, Artificial Sequence
  Synthetic oligonucleotide
ctcgcaggaagggggcacacgacgaccacg

SEQ ID NO: 452744 - DNA, 30 bp, Artificial Sequence
  Synthetic oligonucleotide
ctagttttaagtggacaagtttataccacg

SEQ ID NO: 452745 - DNA, 30 bp, Artificial Sequence
  Synthetic oligonucleotide
tgaactccgcctggacacgggcgtaccacg

SEQ ID NO: 452746 - DNA, 30 bp, Artificial Sequence
  Synthetic oligonucleotide
cgacggagcaaccctgagttgtcccccacg

SEQ ID NO: 452747 - DNA, 30 bp, Artificial Sequence
  Synthetic oligonucleotide
agtaatgatgccattggaacgtagcccacg

SEQ ID NO: 452748 - DNA, 30 bp, Artificial Sequence
  Synthetic oligonucleotide
ctatatacaatggatgctaaagcagccacg

SEQ ID NO: 452749 - DNA, 30 bp, Artificial Sequence
  Synthetic oligonucleotide
aagacacacgggcaacggactcaggccacg

SEQ ID NO: 452750 - DNA, 30 bp, Artificial Sequence
  Synthetic oligonucleotide
gtgttcattatatggtgctagtcggccacg

SEQ ID NO: 452751 - DNA, 31 bp, Artificial Sequence
  Synthetic oligonucleotide
tagatacaggatcggggggagcagggccacg

SEQ ID NO: 452752 - DNA, 30 bp, Artificial Sequence
  Synthetic oligonucleotide
aaaagcttcacaggacgtgagtatgccacg

SEQ ID NO: 452753 - DNA, 30 bp, Artificial Sequence
  Synthetic oligonucleotide
attttagtcacaaagcaatttgctgccacg

SEQ ID NO: 452754 - DNA, 30 bp, Artificial Sequence
  Synthetic oligonucleotide
aaaaccgcctcgacgcgagggcactccacg

SEQ ID NO: 452755 - DNA, 31 bp, Artificial Sequence
  Synthetic oligonucleotide
agacgacagtgctggtagcaggccgtccacg

SEQ ID NO: 452756 - DNA, 30 bp, Artificial Sequence
  Synthetic oligonucleotide
agacgcgttgaatttcaagacgcgtccacg

SEQ ID NO: 452757 - DNA, 30 bp, Artificial Sequence
  Synthetic oligonucleotide
taccaataagaccaaactgtgacaagcacg

SEQ ID NO: 452758 - DNA, 30 bp, Artificial Sequence
  Synthetic oligonucleotide
acctgtccaggtttggactcgctaagcacg

SEQ ID NO: 452759 - DNA, 30 bp, Artificial Sequence
  Synthetic oligonucleotide
aatgcctactagagccagaggtgcagcacg

SEQ ID NO: 452760 - DNA, 30 bp, Artificial Sequence
  Synthetic oligonucleotide
catttatgcggctggcaatcggttagcacg

SEQ ID NO: 452761 - DNA, 30 bp, Artificial Sequence
  Synthetic oligonucleotide
gggtctgctttcagtaacatgtcacgcacg

SEQ ID NO: 452762 - DNA, 30 bp, Artificial Sequence
  Synthetic oligonucleotide
ggccgagcgtattaacattaaatacgcacg

SEQ ID NO: 452763 - DNA, 30 bp, Artificial Sequence
  Synthetic oligonucleotide
acggactgcctacttgtagaggtacgcacg

SEQ ID NO: 452764 - DNA, 30 bp, Artificial Sequence
  Synthetic oligonucleotide
agctccaaatatcctcggaggcagcgcacg

SEQ ID NO: 452765 - DNA, 30 bp, Artificial Sequence
  Synthetic oligonucleotide
attaaaggggggcgggtatcccggcgcacg

SEQ ID NO: 452766 - DNA, 30 bp, Artificial Sequence
  Synthetic oligonucleotide
cgcactcctttggaagtaaagggtcgcacg

SEQ ID NO: 452767 - DNA, 30 bp, Artificial Sequence
  Synthetic oligonucleotide
cccaacccgcgttgttgctacgtcggcacg

SEQ ID NO: 452768 - DNA, 30 bp, Artificial Sequence
  Synthetic oligonucleotide
ttacctagacgcaaaattgttgagggcacg

SEQ ID NO: 452769 - DNA, 30 bp, Artificial Sequence
  Synthetic oligonucleotide
ggttgatacgcctacaaaaggctgggcacg

SEQ ID NO: 452770 - DNA, 30 bp, Artificial Sequence
  Synthetic oligonucleotide
cacagactcgcatatgtgaaatatggcacg

SEQ ID NO: 452771 - DNA, 30 bp, Artificial Sequence
  Synthetic oligonucleotide
cggactacattcccgcagaacacgtgcacg

SEQ ID NO: 452772 - DNA, 30 bp, Artificial Sequence
  Synthetic oligonucleotide
gaatgggtttttagtcctttctgttgcacg

SEQ ID NO: 452773 - DNA, 30 bp, Artificial Sequence
  Synthetic oligonucleotide
ttcgcgtagcgcaggatttgtacaatcacg

SEQ ID NO: 452774 - DNA, 30 bp, Artificial Sequence
  Synthetic oligonucleotide
acggcaacagaacgggacacgttaatcacg

SEQ ID NO: 452775 - DNA, 30 bp, Artificial Sequence
  Synthetic oligonucleotide
aggattcttattccaacgctgcagatcacg

SEQ ID NO: 452776 - DNA, 30 bp, Artificial Sequence
  Synthetic oligonucleotide
ttccggcggaacgcttacgtagcgatcacg

SEQ ID NO: 452777 - DNA, 30 bp, Artificial Sequence
  Synthetic oligonucleotide
gttttccgttcgatgaaaatcgggatcacg

SEQ ID NO: 452778 - DNA, 30 bp, Artificial Sequence
  Synthetic oligonucleotide
ctggtaagcgcctggctagtttgtatcacg

SEQ ID NO: 452779 - DNA, 30 bp, Artificial Sequence
  Synthetic oligonucleotide
gtacggcgcagatgttgcgaaatgctcacg

SEQ ID NO: 452780 - DNA, 30 bp, Artificial Sequence
  Synthetic oligonucleotide
ctggggccggggggccgtttcttagtcacg

SEQ ID NO: 452781 - DNA, 30 bp, Artificial Sequence
  Synthetic oligonucleotide
aggcgcaggacgcgttagaaaaacgtcacg

SEQ ID NO: 452782 - DNA, 30 bp, Artificial Sequence
  Synthetic oligonucleotide
actccgcttactgttcgatagaacgtcacg

SEQ ID NO: 452783 - DNA, 30 bp, Artificial Sequence
  Synthetic oligonucleotide
gtactatgggtagttatcgcccacgtcacg

SEQ ID NO: 452784 - DNA, 30 bp, Artificial Sequence
  Synthetic oligonucleotide
catatctgtcaacagacgtcaagcgtcacg

SEQ ID NO: 452785 - DNA, 30 bp, Artificial Sequence
  Synthetic oligonucleotide
attccatattggtccttatgcagattcacg

SEQ ID NO: 452786 - DNA, 30 bp, Artificial Sequence
  Synthetic oligonucleotide
aagagtcaaatcttcatcatattattcacg

SEQ ID NO: 452787 - DNA, 30 bp, Artificial Sequence
  Synthetic oligonucleotide
accctttgagtaatgggccgcatcttcacg

SEQ ID NO: 452788 - DNA, 30 bp, Artificial Sequence
  Synthetic oligonucleotide
ggtctctcgattatattatgggcaaagacg

SEQ ID NO: 452789 - DNA, 30 bp, Artificial Sequence
  Synthetic oligonucleotide
tagggcgcaggttccgccgaggtaaagacg

SEQ ID NO: 452790 - DNA, 30 bp, Artificial Sequence
  Synthetic oligonucleotide
tgttttaccgagattaggtccgacaagacg

SEQ ID NO: 452791 - DNA, 30 bp, Artificial Sequence
  Synthetic oligonucleotide
gtttgacatttcgtggacatcgtcaagacg

SEQ ID NO: 452792 - DNA, 30 bp, Artificial Sequence
  Synthetic oligonucleotide
ctggatagtggagaggttctgttcaagacg

SEQ ID NO: 452793 - DNA, 30 bp, Artificial Sequence
  Synthetic oligonucleotide
aatatggctcaagtcaacgtgtagaagacg

SEQ ID NO: 452794 - DNA, 30 bp, Artificial Sequence
  Synthetic oligonucleotide
ccagcatttggcctgacagttcggaagacg

SEQ ID NO: 452795 - DNA, 30 bp, Artificial Sequence
  Synthetic oligonucleotide
atagtgcgcaggaacttgctactgaagacg

SEQ ID NO: 452796 - DNA, 30 bp, Artificial Sequence
  Synthetic oligonucleotide
ggtacgttctcattgacgatatataagacg

SEQ ID NO: 452797 - DNA, 30 bp, Artificial Sequence
  Synthetic oligonucleotide
cttcccagcacgacagtctcttgtaagacg

SEQ ID NO: 452798 - DNA, 30 bp, Artificial Sequence
  Synthetic oligonucleotide
gcttctattcaaggcaaatggcttaagacg

SEQ ID NO: 452799 - DNA, 30 bp, Artificial Sequence
  Synthetic oligonucleotide
gggggaattccatgtttgcttttccagacg

SEQ ID NO: 452800 - DNA, 30 bp, Artificial Sequence
  Synthetic oligonucleotide
gactcaactccaacacgatgcacgcagacg

SEQ ID NO: 452801 - DNA, 30 bp, Artificial Sequence
  Synthetic oligonucleotide
gaccgtcacagcgtcccgtcaatgcagacg

SEQ ID NO: 452802 - DNA, 30 bp, Artificial Sequence
  Synthetic oligonucleotide
ctatctttttgcccagtggacagagagacg

SEQ ID NO: 452803 - DNA, 30 bp, Artificial Sequence
  Synthetic oligonucleotide
gactgtccttttcagactcggcgagagacg

SEQ ID NO: 452804 - DNA, 30 bp, Artificial Sequence
  Synthetic oligonucleotide
tctaagatccggtcgaactcctgagagacg

SEQ ID NO: 452805 - DNA, 30 bp, Artificial Sequence
  Synthetic oligonucleotide
cggtgtcccaggatccggattatagagacg

SEQ ID NO: 452806 - DNA, 30 bp, Artificial Sequence
  Synthetic oligonucleotide
ttggtttcctggatgataatcttagagacg

SEQ ID NO: 452807 - DNA, 30 bp, Artificial Sequence
  Synthetic oligonucleotide
gtgcagtcgtacggttgatttttagagacg

SEQ ID NO: 452808 - DNA, 30 bp, Artificial Sequence
  Synthetic oligonucleotide
aattgacttaaatgctggctacgcgagacg

SEQ ID NO: 452809 - DNA, 30 bp, Artificial Sequence
  Synthetic oligonucleotide
ttgactctatctacacccggttgcgagacg

SEQ ID NO: 452810 - DNA, 30 bp, Artificial Sequence
  Synthetic oligonucleotide
tcgcaaaggcatgagcgttcgttcgagacg

SEQ ID NO: 452811 - DNA, 30 bp, Artificial Sequence
  Synthetic oligonucleotide
cattattaacccattatctccggtgagacg

SEQ ID NO: 452812 - DNA, 30 bp, Artificial Sequence
  Synthetic oligonucleotide
gctgaagtccgcgtcgattatgtatagacg

SEQ ID NO: 452813 - DNA, 30 bp, Artificial Sequence
  Synthetic oligonucleotide
tagtgaaattgttatctgttgagctagacg

SEQ ID NO: 452814 - DNA, 30 bp, Artificial Sequence
  Synthetic oligonucleotide
ctaggcagtaattggcttttccagtagacg

SEQ ID NO: 452815 - DNA, 30 bp, Artificial Sequence
  Synthetic oligonucleotide
tcctgacttaagtcttcttggcagtagacg

SEQ ID NO: 452816 - DNA, 30 bp, Artificial Sequence
  Synthetic oligonucleotide
acaggtcacgtcgcacagctggagtagacg

SEQ ID NO: 452817 - DNA, 30 bp, Artificial Sequence
  Synthetic oligonucleotide
tcaaggagattcagaataaaagtgtagacg

SEQ ID NO: 452818 - DNA, 30 bp, Artificial Sequence
  Synthetic oligonucleotide
gtgccctattaaattatttacctttagacg

SEQ ID NO: 452819 - DNA, 30 bp, Artificial Sequence
  Synthetic oligonucleotide
gaatctgcatcgggaaatctcttttagacg

SEQ ID NO: 452820 - DNA, 30 bp, Artificial Sequence
  Synthetic oligonucleotide
tcagacctgtttacagtatatgtaacgacg

SEQ ID NO: 452821 - DNA, 30 bp, Artificial Sequence
  Synthetic oligonucleotide
ctctataaaataatattatacttaacgacg

SEQ ID NO: 452822 - DNA, 30 bp, Artificial Sequence
  Synthetic oligonucleotide
gatgcagagagacatttaccgttaacgacg

SEQ ID NO: 452823 - DNA, 30 bp, Artificial Sequence
  Synthetic oligonucleotide
taagccttaagtcggattgatcccacgacg

SEQ ID NO: 452824 - DNA, 30 bp, Artificial Sequence
  Synthetic oligonucleotide
atctattggcgctagaccgctcccacgacg

SEQ ID NO: 452825 - DNA, 30 bp, Artificial Sequence
  Synthetic oligonucleotide
gcggtttcgttagtataaactccgacgacg

SEQ ID NO: 452826 - DNA, 30 bp, Artificial Sequence
  Synthetic oligonucleotide
gatagcggtagtttttccaattcgacgacg

SEQ ID NO: 452827 - DNA, 30 bp, Artificial Sequence
  Synthetic oligonucleotide
gtaagtaccgctttcataagatagccgacg

SEQ ID NO: 452828 - DNA, 30 bp, Artificial Sequence
  Synthetic oligonucleotide
acataggtcgaccgttggtgaggtccgacg

SEQ ID NO: 452829 - DNA, 30 bp, Artificial Sequence
  Synthetic oligonucleotide
aaggcgcaggtacgaaggcctcttccgacg

SEQ ID NO: 452830 - DNA, 30 bp, Artificial Sequence
  Synthetic oligonucleotide
ggatgtgcggtatgcgcgccctaagcgacg

SEQ ID NO: 452831 - DNA, 30 bp, Artificial Sequence
  Synthetic oligonucleotide
gaaaggacgccgttttgccctacagcgacg

SEQ ID NO: 452832 - DNA, 30 bp, Artificial Sequence
  Synthetic oligonucleotide
agacctctaatatatctggacctagcgacg

SEQ ID NO: 452833 - DNA, 30 bp, Artificial Sequence
  Synthetic oligonucleotide
aggcgcccgtactaactcagtcacgcgacg

SEQ ID NO: 452834 - DNA, 30 bp, Artificial Sequence
  Synthetic oligonucleotide
ggcacgtgtaaggcagcggcttacgcgacg

SEQ ID NO: 452835 - DNA, 30 bp, Artificial Sequence
  Synthetic oligonucleotide
atagcactcagtttcctgtcgactgcgacg

SEQ ID NO: 452836 - DNA, 30 bp, Artificial Sequence
  Synthetic oligonucleotide
tacggcgagagggccttgtgatctgcgacg

SEQ ID NO: 452837 - DNA, 30 bp, Artificial Sequence
  Synthetic oligonucleotide
aataagtgtgtacaaccttcgtgtgcgacg

SEQ ID NO: 452838 - DNA, 30 bp, Artificial Sequence
  Synthetic oligonucleotide
tcaaaagacctctacacgtccattgcgacg

SEQ ID NO: 452839 - DNA, 30 bp, Artificial Sequence
  Synthetic oligonucleotide
ctaccgggattctcagaagtctcatcgacg

SEQ ID NO: 452840 - DNA, 30 bp, Artificial Sequence
  Synthetic oligonucleotide
ttatgcgacgaacggtccataggatcgacg

SEQ ID NO: 452841 - DNA, 30 bp, Artificial Sequence
  Synthetic oligonucleotide
tctccggcctcttctcgggtatggtcgacg

SEQ ID NO: 452842 - DNA, 30 bp, Artificial Sequence
  Synthetic oligonucleotide
attagctcgccggcggagattttgtcgacg

SEQ ID NO: 452843 - DNA, 30 bp, Artificial Sequence
  Synthetic oligonucleotide
gtgttgcgttcaactcgaatccattcgacg

SEQ ID NO: 452844 - DNA, 30 bp, Artificial Sequence
  Synthetic oligonucleotide
aagcaatcaaaactcgaggcatattcgacg

SEQ ID NO: 452845 - DNA, 30 bp, Artificial Sequence
  Synthetic oligonucleotide
ccaagttatggtagagcggttggttcgacg

SEQ ID NO: 452846 - DNA, 30 bp, Artificial Sequence
  Synthetic oligonucleotide
attagttcttgcgtgctgtcccaaaggacg

SEQ ID NO: 452847 - DNA, 30 bp, Artificial Sequence
  Synthetic oligonucleotide
tgtcgtacggagtcatgtacgcgaaggacg

SEQ ID NO: 452848 - DNA, 30 bp, Artificial Sequence
  Synthetic oligonucleotide
tgctccattgggacacagtgtcgcaggacg

SEQ ID NO: 452849 - DNA, 30 bp, Artificial Sequence
  Synthetic oligonucleotide
tcaaaattttcagatgaccgacgtaggacg

SEQ ID NO: 452850 - DNA, 30 bp, Artificial Sequence
  Synthetic oligonucleotide
aaatcctcggcatagaattatacacggacg

SEQ ID NO: 452851 - DNA, 30 bp, Artificial Sequence
  Synthetic oligonucleotide
ctttttaattcatagcgtgcaagccggacg

SEQ ID NO: 452852 - DNA, 30 bp, Artificial Sequence
  Synthetic oligonucleotide
gttcaagtgtgtgtagtcatctagcggacg

SEQ ID NO: 452853 - DNA, 30 bp, Artificial Sequence
  Synthetic oligonucleotide
gtgtgtctttcacccctcggttcgcggacg

SEQ ID NO: 452854 - DNA, 30 bp, Artificial Sequence
  Synthetic oligonucleotide
tttatcaccgggaggaccaccatgcggacg

SEQ ID NO: 452855 - DNA, 30 bp, Artificial Sequence
  Synthetic oligonucleotide
aataaatgggcgaagcttctggcagggacg

SEQ ID NO: 452856 - DNA, 30 bp, Artificial Sequence
  Synthetic oligonucleotide
aatatcaactgaaaatttgtttccgggacg

SEQ ID NO: 452857 - DNA, 30 bp, Artificial Sequence
  Synthetic oligonucleotide
aacgtataatccgcggtggcattcgggacg

SEQ ID NO: 452858 - DNA, 30 bp, Artificial Sequence
  Synthetic oligonucleotide
cagaggacccgtaactactgtcctgggacg

SEQ ID NO: 452859 - DNA, 30 bp, Artificial Sequence
  Synthetic oligonucleotide
cttgcaagcaatgacgtccaaaaatggacg

SEQ ID NO: 452860 - DNA, 30 bp, Artificial Sequence
  Synthetic oligonucleotide
tccgagtccaagtacttgggtaaatggacg

SEQ ID NO: 452861 - DNA, 30 bp, Artificial Sequence
  Synthetic oligonucleotide
tgtttgaactttaatgtaaaacaatggacg

SEQ ID NO: 452862 - DNA, 30 bp, Artificial Sequence
  Synthetic oligonucleotide
cccacacttggcacgacccttgcatggacg

SEQ ID NO: 452863 - DNA, 30 bp, Artificial Sequence
  Synthetic oligonucleotide
gcgaagctataccgaagggctcgatggacg

SEQ ID NO: 452864 - DNA, 30 bp, Artificial Sequence
  Synthetic oligonucleotide
ggtgcgcgggtgagtatatacttatggacg

SEQ ID NO: 452865 - DNA, 30 bp, Artificial Sequence
  Synthetic oligonucleotide
tcattatgtgaatacaatcctcactggacg

SEQ ID NO: 452866 - DNA, 30 bp, Artificial Sequence
  Synthetic oligonucleotide
agcacagcttcttagacctacacctggacg

SEQ ID NO: 452867 - DNA, 30 bp, Artificial Sequence
  Synthetic oligonucleotide
tagactgaaaggtaacggtcagtctggacg

SEQ ID NO: 452868 - DNA, 30 bp, Artificial Sequence
  Synthetic oligonucleotide
gcgtctatgcagcgcctctgtacttggacg

SEQ ID NO: 452869 - DNA, 30 bp, Artificial Sequence
  Synthetic oligonucleotide
atggaaaatttggtagtgtacaaaatgacg

SEQ ID NO: 452870 - DNA, 30 bp, Artificial Sequence
  Synthetic oligonucleotide
ttccccgggttacgaatcgccgcaatgacg

SEQ ID NO: 452871 - DNA, 30 bp, Artificial Sequence
  Synthetic oligonucleotide
ttacactttgcccagtttgtgaacatgacg

SEQ ID NO: 452872 - DNA, 30 bp, Artificial Sequence
  Synthetic oligonucleotide
catcctcgctagaaagtattcagcatgacg

SEQ ID NO: 452873 - DNA, 30 bp, Artificial Sequence
  Synthetic oligonucleotide
ggtgatcgccggaactccacctgcatgacg

SEQ ID NO: 452874 - DNA, 30 bp, Artificial Sequence
  Synthetic oligonucleotide
catctgtccaatccctcattcgcgatgacg

SEQ ID NO: 452875 - DNA, 30 bp, Artificial Sequence
  Synthetic oligonucleotide
ggtattccaggtgttgattttgtgatgacg

SEQ ID NO: 452876 - DNA, 30 bp, Artificial Sequence
  Synthetic oligonucleotide
acgtcgaactaatgtcgtgaccatatgacg

SEQ ID NO: 452877 - DNA, 30 bp, Artificial Sequence
  Synthetic oligonucleotide
atagccgtcgtttgcacttatcctatgacg

SEQ ID NO: 452878 - DNA, 30 bp, Artificial Sequence
  Synthetic oligonucleotide
gtcccgccctgggacgcttctggcctgacg

SEQ ID NO: 452879 - DNA, 30 bp, Artificial Sequence
  Synthetic oligonucleotide
tccaaacccgcgccctaagggtcgctgacg

SEQ ID NO: 452880 - DNA, 30 bp, Artificial Sequence
  Synthetic oligonucleotide
tcccgtatggttgcgcgttaagtgctgacg

SEQ ID NO: 452881 - DNA, 30 bp, Artificial Sequence
  Synthetic oligonucleotide
atcgaatttgacgcgagcatgcatctgacg

SEQ ID NO: 452882 - DNA, 30 bp, Artificial Sequence
  Synthetic oligonucleotide
gcagtcatgcggactatggtcgctctgacg

SEQ ID NO: 452883 - DNA, 30 bp, Artificial Sequence
  Synthetic oligonucleotide
gcaggtcaaacggttaagtctggtctgacg

SEQ ID NO: 452884 - DNA, 30 bp, Artificial Sequence
  Synthetic oligonucleotide
tccgtttcgttggctacagaatttctgacg

SEQ ID NO: 452885 - DNA, 30 bp, Artificial Sequence
  Synthetic oligonucleotide
tgcgggttttagtaaagaacgtttctgacg

SEQ ID NO: 452886 - DNA, 30 bp, Artificial Sequence
  Synthetic oligonucleotide
attagttactagtattcacaccaagtgacg

SEQ ID NO: 452887 - DNA, 30 bp, Artificial Sequence
  Synthetic oligonucleotide
atgtggtaaatgtggacaggctaagtgacg

SEQ ID NO: 452888 - DNA, 30 bp, Artificial Sequence
  Synthetic oligonucleotide
ccccgtgcggcagaggtaagggtagtgacg

SEQ ID NO: 452889 - DNA, 30 bp, Artificial Sequence
  Synthetic oligonucleotide
gtccggatttgcgttagactgggtgtgacg

SEQ ID NO: 452890 - DNA, 30 bp, Artificial Sequence
  Synthetic oligonucleotide
agagccgtacacacgcacaattgtgtgacg

SEQ ID NO: 452891 - DNA, 30 bp, Artificial Sequence
  Synthetic oligonucleotide
aaagccctatagtggtctcagcacttgacg

SEQ ID NO: 452892 - DNA, 30 bp, Artificial Sequence
  Synthetic oligonucleotide
tggcagcgactcgaaactgcccagttgacg

SEQ ID NO: 452893 - DNA, 30 bp, Artificial Sequence
  Synthetic oligonucleotide
taagctgcgtccgctaaggagcagttgacg

SEQ ID NO: 452894 - DNA, 30 bp, Artificial Sequence
  Synthetic oligonucleotide
gtcactatttggagtcagcgttagttgacg

SEQ ID NO: 452895 - DNA, 30 bp, Artificial Sequence
  Synthetic oligonucleotide
accgaacggaaatgttcttataggttgacg

SEQ ID NO: 452896 - DNA, 30 bp, Artificial Sequence
  Synthetic oligonucleotide
ttacatagtgatcatagatgctggttgacg

SEQ ID NO: 452897 - DNA, 30 bp, Artificial Sequence
  Synthetic oligonucleotide
ctcgcctgcatcagtaagtagtggttgacg

SEQ ID NO: 452898 - DNA, 30 bp, Artificial Sequence
  Synthetic oligonucleotide
aataccatccaaaaaggacccatgttgacg

SEQ ID NO: 452899 - DNA, 30 bp, Artificial Sequence
  Synthetic oligonucleotide
ataaccctgcgatgcctgaaacaaaatacg

SEQ ID NO: 452900 - DNA, 30 bp, Artificial Sequence
  Synthetic oligonucleotide
aacataatgaattccgggcattacaatacg

SEQ ID NO: 452901 - DNA, 30 bp, Artificial Sequence
  Synthetic oligonucleotide
aatgctactgccgcaccggcatgcaatacg

SEQ ID NO: 452902 - DNA, 29 bp, Artificial Sequence
  Synthetic oligonucleotide
atggcattgtttcgcgaggttgcaatacg

SEQ ID NO: 452903 - DNA, 30 bp, Artificial Sequence
  Synthetic oligonucleotide
tggggaccggcaaggacaagaatcaatacg

SEQ ID NO: 452904 - DNA, 30 bp, Artificial Sequence
  Synthetic oligonucleotide
ggttatgcgacgagtcgtctggtcaatacg

SEQ ID NO: 452905 - DNA, 30 bp, Artificial Sequence
  Synthetic oligonucleotide
gaatgaatttccctcgggaaattcaatacg

SEQ ID NO: 452906 - DNA, 30 bp, Artificial Sequence
  Synthetic oligonucleotide
ctctaaagacgcatacagttaccgaatacg

SEQ ID NO: 452907 - DNA, 30 bp, Artificial Sequence
  Synthetic oligonucleotide
gcaggcacaagcggttttcctgaacatacg

SEQ ID NO: 452908 - DNA, 30 bp, Artificial Sequence
  Synthetic oligonucleotide
tgccgtagggtctcatactatttacatacg

SEQ ID NO: 452909 - DNA, 30 bp, Artificial Sequence
  Synthetic oligonucleotide
aaagaagaaaggcgctaagcttggcatacg

SEQ ID NO: 452910 - DNA, 30 bp, Artificial Sequence
  Synthetic oligonucleotide
aggtcataccattgggatctacaagatacg

SEQ ID NO: 452911 - DNA, 30 bp, Artificial Sequence
  Synthetic oligonucleotide
aggtggttagatcgccgtccgctagatacg

SEQ ID NO: 452912 - DNA, 30 bp, Artificial Sequence
  Synthetic oligonucleotide
acgagctgaagctcaggagagggcgatacg

SEQ ID NO: 452913 - DNA, 30 bp, Artificial Sequence
  Synthetic oligonucleotide
gtttacagcaaatgtattctactggatacg

SEQ ID NO: 452914 - DNA, 30 bp, Artificial Sequence
  Synthetic oligonucleotide
cttttgaccatgggatcgacttatgatacg

SEQ ID NO: 452915 - DNA, 30 bp, Artificial Sequence
  Synthetic oligonucleotide
ataggcagaagtaagtgagccattgatacg

SEQ ID NO: 452916 - DNA, 30 bp, Artificial Sequence
  Synthetic oligonucleotide
tcgtcaatatagtgcaggacgtttgatacg

SEQ ID NO: 452917 - DNA, 30 bp, Artificial Sequence
  Synthetic oligonucleotide
aatgatcccgtggtcggggccagatatacg

SEQ ID NO: 452918 - DNA, 30 bp, Artificial Sequence
  Synthetic oligonucleotide
ataggctctccccagacacccgcctatacg

SEQ ID NO: 452919 - DNA, 30 bp, Artificial Sequence
  Synthetic oligonucleotide
tggctgctctggtcgtagtggttctatacg

SEQ ID NO: 452920 - DNA, 30 bp, Artificial Sequence
  Synthetic oligonucleotide
accagaatacggaattgaattttgtatacg

SEQ ID NO: 452921 - DNA, 30 bp, Artificial Sequence
  Synthetic oligonucleotide
atcatgatattagtgggtggtcattatacg

SEQ ID NO: 452922 - DNA, 30 bp, Artificial Sequence
  Synthetic oligonucleotide
ccaagacaagtcatcgcacgtacttatacg

SEQ ID NO: 452923 - DNA, 30 bp, Artificial Sequence
  Synthetic oligonucleotide
ttgcggacgtcaggtggctagctcactacg

SEQ ID NO: 452924 - DNA, 30 bp, Artificial Sequence
  Synthetic oligonucleotide
actttggtttcgctctgcgagaagactacg

SEQ ID NO: 452925 - DNA, 30 bp, Artificial Sequence
  Synthetic oligonucleotide
gtttctgcaccacggtttcgggcacctacg

SEQ ID NO: 452926 - DNA, 30 bp, Artificial Sequence
  Synthetic oligonucleotide
attaagggtaatggagctcttaaccctacg

SEQ ID NO: 452927 - DNA, 30 bp, Artificial Sequence
  Synthetic oligonucleotide
cgtcggcgggggtaggcttttgagcctacg

SEQ ID NO: 452928 - DNA, 30 bp, Artificial Sequence
  Synthetic oligonucleotide
catcggcgacagtttcaaatgtcgcctacg

SEQ ID NO: 452929 - DNA, 31 bp, Artificial Sequence
  Synthetic oligonucleotide
aacgtctctagtatttagaatactagctacg

SEQ ID NO: 452930 - DNA, 30 bp, Artificial Sequence
  Synthetic oligonucleotide
ttcgatccccgggtttgcagcggggctacg

SEQ ID NO: 452931 - DNA, 30 bp, Artificial Sequence
  Synthetic oligonucleotide
gggtcagcatcttgtcccacgtgtgctacg

SEQ ID NO: 452932 - DNA, 27 bp, Artificial Sequence
  Synthetic oligonucleotide
ggtgtatatctctgttggcactctacg

SEQ ID NO: 452933 - DNA, 30 bp, Artificial Sequence
  Synthetic oligonucleotide
agggtgaggacaacctgtagtctttctacg

SEQ ID NO: 452934 - DNA, 30 bp, Artificial Sequence
  Synthetic oligonucleotide
ttatcggcggtgatcaacgatgggagtacg

SEQ ID NO: 452935 - DNA, 30 bp, Artificial Sequence
  Synthetic oligonucleotide
ttagcccccataaacgctgtcttgagtacg

SEQ ID NO: 452936 - DNA, 30 bp, Artificial Sequence
  Synthetic oligonucleotide
tctagaaggttaatcctcaccattagtacg

SEQ ID NO: 452937 - DNA, 30 bp, Artificial Sequence
  Synthetic oligonucleotide
gcctggttatctagccggggggttagtacg

SEQ ID NO: 452938 - DNA, 30 bp, Artificial Sequence
  Synthetic oligonucleotide
attacgaggtgccggccctcgccacgtacg

SEQ ID NO: 452939 - DNA, 30 bp, Artificial Sequence
  Synthetic oligonucleotide
ttatgtcgttaaaacggcaggctacgtacg

SEQ ID NO: 452940 - DNA, 30 bp, Artificial Sequence
  Synthetic oligonucleotide
ccgatcacgttgcgttcgcaacaccgtacg

SEQ ID NO: 452941 - DNA, 30 bp, Artificial Sequence
  Synthetic oligonucleotide
ataacggtgcatgtacgggctgatcgtacg

SEQ ID NO: 452942 - DNA, 30 bp, Artificial Sequence
  Synthetic oligonucleotide
gatatatataccttagaacttgctcgtacg

SEQ ID NO: 452943 - DNA, 30 bp, Artificial Sequence
  Synthetic oligonucleotide
agaagcaccgccaccttgttctgtcgtacg

SEQ ID NO: 452944 - DNA, 30 bp, Artificial Sequence
  Synthetic oligonucleotide
gtatagtgatgttcactcggtgttcgtacg

SEQ ID NO: 452945 - DNA, 30 bp, Artificial Sequence
  Synthetic oligonucleotide
tgaggttaaatatggtatcttgtaggtacg

SEQ ID NO: 452946 - DNA, 30 bp, Artificial Sequence
  Synthetic oligonucleotide
ccctgttccccttacagaggtcccggtacg

SEQ ID NO: 452947 - DNA, 30 bp, Artificial Sequence
  Synthetic oligonucleotide
gggaccggatagaaataggcatcgggtacg

SEQ ID NO: 452948 - DNA, 30 bp, Artificial Sequence
  Synthetic oligonucleotide
aaagtacagttatgggtgagttcgggtacg

SEQ ID NO: 452949 - DNA, 30 bp, Artificial Sequence
  Synthetic oligonucleotide
ccaatatgcgataataactatgggggtacg

SEQ ID NO: 452950 - DNA, 30 bp, Artificial Sequence
  Synthetic oligonucleotide
cgtgaggatctcccctgatttcttggtacg

SEQ ID NO: 452951 - DNA, 30 bp, Artificial Sequence
  Synthetic oligonucleotide
agtatcctaaataccgtacctaaatgtacg

SEQ ID NO: 452952 - DNA, 30 bp, Artificial Sequence
  Synthetic oligonucleotide
aagatacgcacatctgatgatggatgtacg

SEQ ID NO: 452953 - DNA, 30 bp, Artificial Sequence
  Synthetic oligonucleotide
gctaccccaatatgctgctctctgtgtacg

SEQ ID NO: 452954 - DNA, 30 bp, Artificial Sequence
  Synthetic oligonucleotide
cctaaataactgggaccccgatattgtacg

SEQ ID NO: 452955 - DNA, 30 bp, Artificial Sequence
  Synthetic oligonucleotide
gtcagtaagttggcgtgccagatttgtacg

SEQ ID NO: 452956 - DNA, 30 bp, Artificial Sequence
  Synthetic oligonucleotide
gtacctatcagtctacacgcatgaattacg

SEQ ID NO: 452957 - DNA, 30 bp, Artificial Sequence
  Synthetic oligonucleotide
ttcgttgatcacaggttttataatattacg

SEQ ID NO: 452958 - DNA, 30 bp, Artificial Sequence
  Synthetic oligonucleotide
aagatggtcggcagtgggattggtattacg

SEQ ID NO: 452959 - DNA, 30 bp, Artificial Sequence
  Synthetic oligonucleotide
ggtagtgtcttacgggtgctgtgtattacg

SEQ ID NO: 452960 - DNA, 30 bp, Artificial Sequence
  Synthetic oligonucleotide
taatccattcaatttggttatgttattacg

SEQ ID NO: 452961 - DNA, 30 bp, Artificial Sequence
  Synthetic oligonucleotide
ccgctatggactttgttccccggccttacg

SEQ ID NO: 452962 - DNA, 30 bp, Artificial Sequence
  Synthetic oligonucleotide
ataaactaagcatactgatacgtgcttacg

SEQ ID NO: 452963 - DNA, 30 bp, Artificial Sequence
  Synthetic oligonucleotide
cttaaaaagggcccttcaattgttcttacg

SEQ ID NO: 452964 - DNA, 30 bp, Artificial Sequence
  Synthetic oligonucleotide
tcggcgtctcggagagctatttcagttacg

SEQ ID NO: 452965 - DNA, 30 bp, Artificial Sequence
  Synthetic oligonucleotide
ggctatcaatgagaacgctctgccgttacg

SEQ ID NO: 452966 - DNA, 30 bp, Artificial Sequence
  Synthetic oligonucleotide
acgccattttatcatgtaaatctcgttacg

SEQ ID NO: 452967 - DNA, 30 bp, Artificial Sequence
  Synthetic oligonucleotide
tgttctgtgctgcatcctcccgcggttacg

SEQ ID NO: 452968 - DNA, 30 bp, Artificial Sequence
  Synthetic oligonucleotide
gctaatggaaacgcgcgcacctgggttacg

SEQ ID NO: 452969 - DNA, 30 bp, Artificial Sequence
  Synthetic oligonucleotide
agatcgtaagcaagcctgctagtggttacg

SEQ ID NO: 452970 - DNA, 30 bp, Artificial Sequence
  Synthetic oligonucleotide
agctgatccctgagcaacaggtaatttacg

SEQ ID NO: 452971 - DNA, 30 bp, Artificial Sequence
  Synthetic oligonucleotide
attttacatcgtagtttagcgtcctttacg

SEQ ID NO: 452972 - DNA, 30 bp, Artificial Sequence
  Synthetic oligonucleotide
tttctagcttccagaggtaaaagctttacg

SEQ ID NO: 452973 - DNA, 30 bp, Artificial Sequence
  Synthetic oligonucleotide
ggcagatgcaggatatccgtattctttacg

SEQ ID NO: 452974 - DNA, 30 bp, Artificial Sequence
  Synthetic oligonucleotide
gaggcttgtattggacgcttggagtttacg

SEQ ID NO: 452975 - DNA, 30 bp, Artificial Sequence
  Synthetic oligonucleotide
ggacacgtacttatctgtgattagtttacg

SEQ ID NO: 452976 - DNA, 30 bp, Artificial Sequence
  Synthetic oligonucleotide
cgcgcatcgagcctatttcactcgtttacg

SEQ ID NO: 452977 - DNA, 30 bp, Artificial Sequence
  Synthetic oligonucleotide
gcctcgggggggccattacgaatgtttacg

SEQ ID NO: 452978 - DNA, 30 bp, Artificial Sequence
  Synthetic oligonucleotide
ggggtatagattaatcctgcggcttttacg

SEQ ID NO: 452979 - DNA, 30 bp, Artificial Sequence
  Synthetic oligonucleotide
cctttctggacgcccgggcgctcttttacg

SEQ ID NO: 452980 - DNA, 30 bp, Artificial Sequence
  Synthetic oligonucleotide
gctttctcgaccggaactatttaaaaaccg

SEQ ID NO: 452981 - DNA, 30 bp, Artificial Sequence
  Synthetic oligonucleotide
gtcagtcctcacgcttccggagcaaaaccg

SEQ ID NO: 452982 - DNA, 30 bp, Artificial Sequence
  Synthetic oligonucleotide
gtcggctggtttcggtggcggctaaaaccg

SEQ ID NO: 452983 - DNA, 30 bp, Artificial Sequence
  Synthetic oligonucleotide
gtacccgttaagtgcgcagaggtaaaaccg

SEQ ID NO: 452984 - DNA, 30 bp, Artificial Sequence
  Synthetic oligonucleotide
tattggcttccgtattgacgggacaaaccg

SEQ ID NO: 452985 - DNA, 30 bp, Artificial Sequence
  Synthetic oligonucleotide
tgtagcatcgacgtccccgttgttaaaccg

SEQ ID NO: 452986 - DNA, 30 bp, Artificial Sequence
  Synthetic oligonucleotide
cttcttcgaactcaccaacgtcaacaaccg

SEQ ID NO: 452987 - DNA, 30 bp, Artificial Sequence
  Synthetic oligonucleotide
ctggcagaggcagcctaagcggtacaaccg

SEQ ID NO: 452988 - DNA, 30 bp, Artificial Sequence
  Synthetic oligonucleotide
aactggtttgctattttaacgaaagaaccg

SEQ ID NO: 452989 - DNA, 30 bp, Artificial Sequence
  Synthetic oligonucleotide
gacagccatccgttaacttacggagaaccg

SEQ ID NO: 452990 - DNA, 30 bp, Artificial Sequence
  Synthetic oligonucleotide
tgcggtacggtagcaatttgcggcgaaccg

SEQ ID NO: 452991 - DNA, 30 bp, Artificial Sequence
  Synthetic oligonucleotide
atatattatgttagtccagaaaatgaaccg

SEQ ID NO: 452992 - DNA, 30 bp, Artificial Sequence
  Synthetic oligonucleotide
cccactaccacgaccctgtgttgtgaaccg

SEQ ID NO: 452993 - DNA, 30 bp, Artificial Sequence
  Synthetic oligonucleotide
cgtgggcttgaaaggttttaccttgaaccg

SEQ ID NO: 452994 - DNA, 30 bp, Artificial Sequence
  Synthetic oligonucleotide
aaatcctgaatgaaagagctcggataaccg

SEQ ID NO: 452995 - DNA, 30 bp, Artificial Sequence
  Synthetic oligonucleotide
gaagtcaaattagaacgtcgtatgtaaccg

SEQ ID NO: 452996 - DNA, 30 bp, Artificial Sequence
  Synthetic oligonucleotide
gggacccaataggccagttttacttaaccg

SEQ ID NO: 452997 - DNA, 30 bp, Artificial Sequence
  Synthetic oligonucleotide
ttcctgtcaagaaaaggacctgacacaccg

SEQ ID NO: 452998 - DNA, 30 bp, Artificial Sequence
  Synthetic oligonucleotide
agcagcaggtgagtaagaagttaaccaccg

SEQ ID NO: 452999 - DNA, 30 bp, Artificial Sequence
  Synthetic oligonucleotide
ctttccctcttacggactgtatgaccaccg

SEQ ID NO: 453000 - DNA, 30 bp, Artificial Sequence
  Synthetic oligonucleotide
tgcactgtcgaccaatggttcgacccaccg

SEQ ID NO: 453001 - DNA, 30 bp, Artificial Sequence
  Synthetic oligonucleotide
ctcatggtggtgtttcgaggaatcccaccg

SEQ ID NO: 453002 - DNA, 30 bp, Artificial Sequence
  Synthetic oligonucleotide
acgtaggcgccttcagtttaagggccaccg

SEQ ID NO: 453003 - DNA, 30 bp, Artificial Sequence
  Synthetic oligonucleotide
tgaactccttcgccacatgccaacgcaccg

SEQ ID NO: 453004 - DNA, 30 bp, Artificial Sequence
  Synthetic oligonucleotide
atctctagcggatgtccagggggggcaccg

SEQ ID NO: 453005 - DNA, 30 bp, Artificial Sequence
  Synthetic oligonucleotide
tttccagctggacccacctattgggcaccg

SEQ ID NO: 453006 - DNA, 30 bp, Artificial Sequence
  Synthetic oligonucleotide
cgcatagagtgaaaaggtctgaaatcaccg

SEQ ID NO: 453007 - DNA, 30 bp, Artificial Sequence
  Synthetic oligonucleotide
acgcagtgtgtcgtgcctgcgcgatcaccg

SEQ ID NO: 453008 - DNA, 30 bp, Artificial Sequence
  Synthetic oligonucleotide
gagcgtctacgcgaagagagtgtatcaccg

SEQ ID NO: 453009 - DNA, 30 bp, Artificial Sequence
  Synthetic oligonucleotide
ggtaattgaaattgatggagacagtcaccg

SEQ ID NO: 453010 - DNA, 30 bp, Artificial Sequence
  Synthetic oligonucleotide
ctcttagcggcagtggttacattaagaccg

SEQ ID NO: 453011 - DNA, 30 bp, Artificial Sequence
  Synthetic oligonucleotide
aactgatatcccatactgattgtcagaccg

SEQ ID NO: 453012 - DNA, 30 bp, Artificial Sequence
  Synthetic oligonucleotide
atttgcgctttgatcaatatgttcagaccg

SEQ ID NO: 453013 - DNA, 30 bp, Artificial Sequence
  Synthetic oligonucleotide
gtggtgctcctacacgacgtcgagagaccg

SEQ ID NO: 453014 - DNA, 30 bp, Artificial Sequence
  Synthetic oligonucleotide
caaatttaaggcggcttcggtttgagaccg

SEQ ID NO: 453015 - DNA, 30 bp, Artificial Sequence
  Synthetic oligonucleotide
ggttcctgcactattagctggcctagaccg

SEQ ID NO: 453016 - DNA, 30 bp, Artificial Sequence
  Synthetic oligonucleotide
aactgcacgcatcaagagttatctagaccg

SEQ ID NO: 453017 - DNA, 30 bp, Artificial Sequence
  Synthetic oligonucleotide
ttactctgtgttcctagagctcttagaccg

SEQ ID NO: 453018 - DNA, 30 bp, Artificial Sequence
  Synthetic oligonucleotide
tgataatgcgtgtgggacgtgcgacgaccg

SEQ ID NO: 453019 - DNA, 30 bp, Artificial Sequence
  Synthetic oligonucleotide
gttagatcacgagtccacctgggacgaccg

SEQ ID NO: 453020 - DNA, 30 bp, Artificial Sequence
  Synthetic oligonucleotide
aatgcccgaattgggattgttggacgaccg

SEQ ID NO: 453021 - DNA, 30 bp, Artificial Sequence
  Synthetic oligonucleotide
tcctcccggtagcgcctgatagaaggaccg

SEQ ID NO: 453022 - DNA, 30 bp, Artificial Sequence
  Synthetic oligonucleotide
tgaagcagtaagcggtaatgataaggaccg

SEQ ID NO: 453023 - DNA, 30 bp, Artificial Sequence
  Synthetic oligonucleotide
taacaccgcgcatccttgtgccacggaccg

SEQ ID NO: 453024 - DNA, 30 bp, Artificial Sequence
  Synthetic oligonucleotide
aataccctttgtgctgggaaggccggaccg

SEQ ID NO: 453025 - DNA, 30 bp, Artificial Sequence
  Synthetic oligonucleotide
ggttggggtaccatggctaaatccggaccg

SEQ ID NO: 453026 - DNA, 30 bp, Artificial Sequence
  Synthetic oligonucleotide
tgaccatcgaccgacacgtgtcgcggaccg

SEQ ID NO: 453027 - DNA, 30 bp, Artificial Sequence
  Synthetic oligonucleotide
gaacatctttatcggcgttccgtcggaccg

SEQ ID NO: 453028 - DNA, 30 bp, Artificial Sequence
  Synthetic oligonucleotide
gggtcccgcgcgggaggtgttccgggaccg

SEQ ID NO: 453029 - DNA, 30 bp, Artificial Sequence
  Synthetic oligonucleotide
gccttttcgcagtaacgtccaaggggaccg

SEQ ID NO: 453030 - DNA, 30 bp, Artificial Sequence
  Synthetic oligonucleotide
aggtatatttgtctccgcattcggggaccg

SEQ ID NO: 453031 - DNA, 30 bp, Artificial Sequence
  Synthetic oligonucleotide
ctcggtataacagttcccggtctgggaccg

SEQ ID NO: 453032 - DNA, 30 bp, Artificial Sequence
  Synthetic oligonucleotide
tgggtatacacggggtcccttaatggaccg

SEQ ID NO: 453033 - DNA, 30 bp, Artificial Sequence
  Synthetic oligonucleotide
agtgttgtaatctaatgctacattggaccg

SEQ ID NO: 453034 - DNA, 30 bp, Artificial Sequence
  Synthetic oligonucleotide
accaaatgtgtccgggaaaggtttggaccg

SEQ ID NO: 453035 - DNA, 30 bp, Artificial Sequence
  Synthetic oligonucleotide
aaccagaacacttgaattgtatgatgaccg

SEQ ID NO: 453036 - DNA, 30 bp, Artificial Sequence
  Synthetic oligonucleotide
caccaacgatcgtatgacataatatgaccg

SEQ ID NO: 453037 - DNA, 30 bp, Artificial Sequence
  Synthetic oligonucleotide
gcatagttaagggtattaaaacggtgaccg

SEQ ID NO: 453038 - DNA, 30 bp, Artificial Sequence
  Synthetic oligonucleotide
ttgcagcgtgagtacatggacacttgaccg

SEQ ID NO: 453039 - DNA, 30 bp, Artificial Sequence
  Synthetic oligonucleotide
ggtggcgtggcagacgtgtcagcttgaccg

SEQ ID NO: 453040 - DNA, 30 bp, Artificial Sequence
  Synthetic oligonucleotide
ctcagcttaatggttgctgcttcttgaccg

SEQ ID NO: 453041 - DNA, 30 bp, Artificial Sequence
  Synthetic oligonucleotide
ttaaccagaagttgagagtacctttgaccg

SEQ ID NO: 453042 - DNA, 30 bp, Artificial Sequence
  Synthetic oligonucleotide
acacgggtactgactaaatagttttgaccg

SEQ ID NO: 453043 - DNA, 30 bp, Artificial Sequence
  Synthetic oligonucleotide
gctactgcctcgataaagagtccaataccg

SEQ ID NO: 453044 - DNA, 30 bp, Artificial Sequence
  Synthetic oligonucleotide
ctatgttagggctgtacccgagtcataccg

SEQ ID NO: 453045 - DNA, 30 bp, Artificial Sequence
  Synthetic oligonucleotide
cagcagcggataatcccaaaagggataccg

SEQ ID NO: 453046 - DNA, 30 bp, Artificial Sequence
  Synthetic oligonucleotide
agttcctgggtgtccacggcggtgataccg

SEQ ID NO: 453047 - DNA, 30 bp, Artificial Sequence
  Synthetic oligonucleotide
ggttccttaggtgtgccgcggacactaccg

SEQ ID NO: 453048 - DNA, 30 bp, Artificial Sequence
  Synthetic oligonucleotide
attcgaagcgtggtagactctcgactaccg

SEQ ID NO: 453049 - DNA, 30 bp, Artificial Sequence
  Synthetic oligonucleotide
aacctttccgacgtaagggaatacctaccg

SEQ ID NO: 453050 - DNA, 30 bp, Artificial Sequence
  Synthetic oligonucleotide
agcggcgctgcaattgacggttatctaccg

SEQ ID NO: 453051 - DNA, 30 bp, Artificial Sequence
  Synthetic oligonucleotide
agggagttccgtataaaacggaacgtaccg

SEQ ID NO: 453052 - DNA, 30 bp, Artificial Sequence
  Synthetic oligonucleotide
ttttacatacgagtgctctctaaggtaccg

SEQ ID NO: 453053 - DNA, 30 bp, Artificial Sequence
  Synthetic oligonucleotide
ttcctcacaaagatagaagacacattaccg

SEQ ID NO: 453054 - DNA, 30 bp, Artificial Sequence
  Synthetic oligonucleotide
cgctaccggtgtgaaaagccttcattaccg

SEQ ID NO: 453055 - DNA, 30 bp, Artificial Sequence
  Synthetic oligonucleotide
gggtatgagaactgtataccaagcttaccg

SEQ ID NO: 453056 - DNA, 30 bp, Artificial Sequence
  Synthetic oligonucleotide
ttcactgtgggttttaagcgatgcttaccg

SEQ ID NO: 453057 - DNA, 30 bp, Artificial Sequence
  Synthetic oligonucleotide
gtgaatatgtgagtgagggaaggtttaccg

SEQ ID NO: 453058 - DNA, 30 bp, Artificial Sequence
  Synthetic oligonucleotide
gcatgtcagacctacatattgggcaacccg

SEQ ID NO: 453059 - DNA, 30 bp, Artificial Sequence
  Synthetic oligonucleotide
atacactcgatacacttcactaagaacccg

SEQ ID NO: 453060 - DNA, 30 bp, Artificial Sequence
  Synthetic oligonucleotide
cacttcggctttggcatttcattgaacccg

SEQ ID NO: 453061 - DNA, 30 bp, Artificial Sequence
  Synthetic oligonucleotide
ggaattgtgctccgggttataagtaacccg

SEQ ID NO: 453062 - DNA, 30 bp, Artificial Sequence
  Synthetic oligonucleotide
agcccgtgttctgacgtcattggtaacccg

SEQ ID NO: 453063 - DNA, 30 bp, Artificial Sequence
  Synthetic oligonucleotide
cttatctgaggccgacggggtacacacccg

SEQ ID NO: 453064 - DNA, 30 bp, Artificial Sequence
  Synthetic oligonucleotide
gtaatgacacatcctgactaagaccacccg

SEQ ID NO: 453065 - DNA, 30 bp, Artificial Sequence
  Synthetic oligonucleotide
caatgtggggtggccatctgccgccacccg

SEQ ID NO: 453066 - DNA, 30 bp, Artificial Sequence
  Synthetic oligonucleotide
tgaaagtggtaccagtgcagactgcacccg

SEQ ID NO: 453067 - DNA, 30 bp, Artificial Sequence
  Synthetic oligonucleotide
cgcgtgctcttaactccttcggatcacccg

SEQ ID NO: 453068 - DNA, 30 bp, Artificial Sequence
  Synthetic oligonucleotide
gtatgcacacaagggcgcagctatcacccg

SEQ ID NO: 453069 - DNA, 30 bp, Artificial Sequence
  Synthetic oligonucleotide
gtgtcggcgcgctagattacttgtcacccg

SEQ ID NO: 453070 - DNA, 30 bp, Artificial Sequence
  Synthetic oligonucleotide
atttgttgaacctctaccccgtttcacccg

SEQ ID NO: 453071 - DNA, 30 bp, Artificial Sequence
  Synthetic oligonucleotide
gctcgtgacaacggtgggtgcaacgacccg

SEQ ID NO: 453072 - DNA, 30 bp, Artificial Sequence
  Synthetic oligonucleotide
gtactaccccgatgtcggtatcaggacccg

SEQ ID NO: 453073 - DNA, 30 bp, Artificial Sequence
  Synthetic oligonucleotide
ggacgttcgtacggcgaagccggggacccg

SEQ ID NO: 453074 - DNA, 30 bp, Artificial Sequence
  Synthetic oligonucleotide
gctttggcccaggcatagccccatgacccg

SEQ ID NO: 453075 - DNA, 30 bp, Artificial Sequence
  Synthetic oligonucleotide
tctgtccgccgagcgcggactattgacccg

SEQ ID NO: 453076 - DNA, 30 bp, Artificial Sequence
  Synthetic oligonucleotide
agaacagcccaaccgttccgagttgacccg

SEQ ID NO: 453077 - DNA, 30 bp, Artificial Sequence
  Synthetic oligonucleotide
gactctatcggtgggaagctcgcctacccg

SEQ ID NO: 453078 - DNA, 30 bp, Artificial Sequence
  Synthetic oligonucleotide
gcgcacgtacgcgtattctacttctacccg

SEQ ID NO: 453079 - DNA, 30 bp, Artificial Sequence
  Synthetic oligonucleotide
gtgtgggtaaggcaacgcctttagtacccg

SEQ ID NO: 453080 - DNA, 30 bp, Artificial Sequence
  Synthetic oligonucleotide
actaggtttgaatgcgggtgccattacccg

SEQ ID NO: 453081 - DNA, 30 bp, Artificial Sequence
  Synthetic oligonucleotide
tgctccaggctctcgtggattatttacccg

SEQ ID NO: 453082 - DNA, 30 bp, Artificial Sequence
  Synthetic oligonucleotide
ttccccatacgcaaatcgtaaatcaccccg

SEQ ID NO: 453083 - DNA, 30 bp, Artificial Sequence
  Synthetic oligonucleotide
ttggaccaacggggacacagttggaccccg

SEQ ID NO: 453084 - DNA, 30 bp, Artificial Sequence
  Synthetic oligonucleotide
tatgtggggatacaatagggctataccccg

SEQ ID NO: 453085 - DNA, 30 bp, Artificial Sequence
  Synthetic oligonucleotide
agagatcgaacgcctaaacagccacccccg

SEQ ID NO: 453086 - DNA, 30 bp, Artificial Sequence
  Synthetic oligonucleotide
gacagggggaagatattagtatctcccccg

SEQ ID NO: 453087 - DNA, 30 bp, Artificial Sequence
  Synthetic oligonucleotide
gattattgatgacgaccaaaaaaggccccg

SEQ ID NO: 453088 - DNA, 30 bp, Artificial Sequence
  Synthetic oligonucleotide
caacggcgattaaggtataaaaaggccccg

SEQ ID NO: 453089 - DNA, 30 bp, Artificial Sequence
  Synthetic oligonucleotide
tgtccttcaggtaagtcccgcattgccccg

SEQ ID NO: 453090 - DNA, 30 bp, Artificial Sequence
  Synthetic oligonucleotide
ctcgaccagtcatctcagttatggtccccg

SEQ ID NO: 453091 - DNA, 30 bp, Artificial Sequence
  Synthetic oligonucleotide
aatccacaaacgaggggaaccagttccccg

SEQ ID NO: 453092 - DNA, 30 bp, Artificial Sequence
  Synthetic oligonucleotide
ggtacaccgaggcgacagcattcaagcccg

SEQ ID NO: 453093 - DNA, 30 bp, Artificial Sequence
  Synthetic oligonucleotide
ccgccgggccgcatcttacgaggaagcccg

SEQ ID NO: 453094 - DNA, 30 bp, Artificial Sequence
  Synthetic oligonucleotide
caaccagctttccggagaaatgagagcccg

SEQ ID NO: 453095 - DNA, 30 bp, Artificial Sequence
  Synthetic oligonucleotide
aagtacttcgtgacgtgttacgtgagcccg

SEQ ID NO: 453096 - DNA, 30 bp, Artificial Sequence
  Synthetic oligonucleotide
gccatcaaggtagacggtggctgtagcccg

SEQ ID NO: 453097 - DNA, 30 bp, Artificial Sequence
  Synthetic oligonucleotide
ttggtacacaacatatttcggtgacgcccg

SEQ ID NO: 453098 - DNA, 30 bp, Artificial Sequence
  Synthetic oligonucleotide
gttaaaccctcttaacttcgggcgcgcccg

SEQ ID NO: 453099 - DNA, 30 bp, Artificial Sequence
  Synthetic oligonucleotide
tcacttagagcggcaacgggaaatcgcccg

SEQ ID NO: 453100 - DNA, 30 bp, Artificial Sequence
  Synthetic oligonucleotide
ggcaaattcagacatatccaatatcgcccg

SEQ ID NO: 453101 - DNA, 30 bp, Artificial Sequence
  Synthetic oligonucleotide
gcggactggttttctcgattgccaggcccg

SEQ ID NO: 453102 - DNA, 30 bp, Artificial Sequence
  Synthetic oligonucleotide
ctgcaaaagtacccttgcttgggaggcccg

SEQ ID NO: 453103 - DNA, 30 bp, Artificial Sequence
  Synthetic oligonucleotide
aggttatgatgaagggggaaaaatggcccg

SEQ ID NO: 453104 - DNA, 30 bp, Artificial Sequence
  Synthetic oligonucleotide
aaaacaacagtatcggggatattatgcccg

SEQ ID NO: 453105 - DNA, 30 bp, Artificial Sequence
  Synthetic oligonucleotide
ttatcgttaaaatccgccccaaagtgcccg

SEQ ID NO: 453106 - DNA, 30 bp, Artificial Sequence
  Synthetic oligonucleotide
cgagtcggtggacgactcgaagtgtgcccg

SEQ ID NO: 453107 - DNA, 30 bp, Artificial Sequence
  Synthetic oligonucleotide
cccctctcgctttctattcctttgtgcccg

SEQ ID NO: 453108 - DNA, 30 bp, Artificial Sequence
  Synthetic oligonucleotide
tgctcaacagttgtgatgtgtatttgcccg

SEQ ID NO: 453109 - DNA, 30 bp, Artificial Sequence
  Synthetic oligonucleotide
ggtttgccatcgttcttcataaggatcccg

SEQ ID NO: 453110 - DNA, 30 bp, Artificial Sequence
  Synthetic oligonucleotide
atacggttagtacctatcattaggatcccg

SEQ ID NO: 453111 - DNA, 30 bp, Artificial Sequence
  Synthetic oligonucleotide
ttttaggacgtgaggaattgatggatcccg

SEQ ID NO: 453112 - DNA, 30 bp, Artificial Sequence
  Synthetic oligonucleotide
taatagcggtcgtttcacttagtgatcccg

SEQ ID NO: 453113 - DNA, 30 bp, Artificial Sequence
  Synthetic oligonucleotide
ggctttatttataaatggattgtgatcccg

SEQ ID NO: 453114 - DNA, 30 bp, Artificial Sequence
  Synthetic oligonucleotide
ttcgggcccgcttaccgaatgtttatcccg

SEQ ID NO: 453115 - DNA, 30 bp, Artificial Sequence
  Synthetic oligonucleotide
ggacttcgttggaggcaattatgcctcccg

SEQ ID NO: 453116 - DNA, 30 bp, Artificial Sequence
  Synthetic oligonucleotide
ctcaaagggcctatgtcctgccagctcccg

SEQ ID NO: 453117 - DNA, 30 bp, Artificial Sequence
  Synthetic oligonucleotide
gagggcctaggctcgcacagcgagctcccg

SEQ ID NO: 453118 - DNA, 30 bp, Artificial Sequence
  Synthetic oligonucleotide
cttagttcgtattccacgggggctctcccg

SEQ ID NO: 453119 - DNA, 30 bp, Artificial Sequence
  Synthetic oligonucleotide
ctcagaaaacgtcaagggcccagtctcccg

SEQ ID NO: 453120 - DNA, 30 bp, Artificial Sequence
  Synthetic oligonucleotide
ctggacctcctcggtgtcgccatagtcccg

SEQ ID NO: 453121 - DNA, 30 bp, Artificial Sequence
  Synthetic oligonucleotide
cgggcctgagttagtcacgtagtcgtcccg

SEQ ID NO: 453122 - DNA, 30 bp, Artificial Sequence
  Synthetic oligonucleotide
gaatcggcctctcaagtcttaggggtcccg

SEQ ID NO: 453123 - DNA, 30 bp, Artificial Sequence
  Synthetic oligonucleotide
gcacgtggtatgccgtccttgctattcccg

SEQ ID NO: 453124 - DNA, 30 bp, Artificial Sequence
  Synthetic oligonucleotide
ctagcgagacaaggtgagagacatttcccg

SEQ ID NO: 453125 - DNA, 30 bp, Artificial Sequence
  Synthetic oligonucleotide
ggtctacgcagtactgttgatactttcccg

SEQ ID NO: 453126 - DNA, 30 bp, Artificial Sequence
  Synthetic oligonucleotide
cctggaagcttgatgcaatttgccaagccg

SEQ ID NO: 453127 - DNA, 30 bp, Artificial Sequence
  Synthetic oligonucleotide
agtgttttctcgtaatgcagtgagaagccg

SEQ ID NO: 453128 - DNA, 30 bp, Artificial Sequence
  Synthetic oligonucleotide
gctcgctaaatagacgaacgcaataagccg

SEQ ID NO: 453129 - DNA, 30 bp, Artificial Sequence
  Synthetic oligonucleotide
atctcaaatcagtcgaatgcgcaacagccg

SEQ ID NO: 453130 - DNA, 30 bp, Artificial Sequence
  Synthetic oligonucleotide
ctcgactactggtatacgcctgaccagccg

SEQ ID NO: 453131 - DNA, 30 bp, Artificial Sequence
  Synthetic oligonucleotide
ctccgagtcacgttacgacgagcgcagccg

SEQ ID NO: 453132 - DNA, 30 bp, Artificial Sequence
  Synthetic oligonucleotide
ctccgtgtttggttcgtcagccatcagccg

SEQ ID NO: 453133 - DNA, 30 bp, Artificial Sequence
  Synthetic oligonucleotide
cacggctgttcgtcgcacttccgtgagccg

SEQ ID NO: 453134 - DNA, 30 bp, Artificial Sequence
  Synthetic oligonucleotide
gccgccaaaaaagacggcgtttttgagccg

SEQ ID NO: 453135 - DNA, 30 bp, Artificial Sequence
  Synthetic oligonucleotide
tgagtgtcgggcgaagtgaatatatagccg

SEQ ID NO: 453136 - DNA, 30 bp, Artificial Sequence
  Synthetic oligonucleotide
cgtaagtacaggatgctcataaggtagccg

SEQ ID NO: 453137 - DNA, 30 bp, Artificial Sequence
  Synthetic oligonucleotide
gtagaaaacggtgagattgactcttagccg

SEQ ID NO: 453138 - DNA, 30 bp, Artificial Sequence
  Synthetic oligonucleotide
ttcgtcggagaatgtagacgtaacacgccg

SEQ ID NO: 453139 - DNA, 30 bp, Artificial Sequence
  Synthetic oligonucleotide
gagtagtgaaattcggcactctagacgccg

SEQ ID NO: 453140 - DNA, 30 bp, Artificial Sequence
  Synthetic oligonucleotide
tctatacaaatataggtagggtctacgccg

SEQ ID NO: 453141 - DNA, 30 bp, Artificial Sequence
  Synthetic oligonucleotide
tcgaaaacggctctatggcacgaaccgccg

SEQ ID NO: 453142 - DNA, 30 bp, Artificial Sequence
  Synthetic oligonucleotide
aagtttcatgggacccgatgaagcccgccg

SEQ ID NO: 453143 - DNA, 30 bp, Artificial Sequence
  Synthetic oligonucleotide
atcatcaagagtatggcgcaaccgccgccg

SEQ ID NO: 453144 - DNA, 30 bp, Artificial Sequence
  Synthetic oligonucleotide
ggcggcccgcagttttacactagtccgccg

SEQ ID NO: 453145 - DNA, 30 bp, Artificial Sequence
  Synthetic oligonucleotide
gtaattttgtatgcaatggggtgtccgccg

SEQ ID NO: 453146 - DNA, 30 bp, Artificial Sequence
  Synthetic oligonucleotide
tcatctcaacttcctctggcgtaagcgccg

SEQ ID NO: 453147 - DNA, 30 bp, Artificial Sequence
  Synthetic oligonucleotide
ggtaacttgagttaaatgggtacagcgccg

SEQ ID NO: 453148 - DNA, 30 bp, Artificial Sequence
  Synthetic oligonucleotide
tcgtatcagtaatagagttggagcgcgccg

SEQ ID NO: 453149 - DNA, 30 bp, Artificial Sequence
  Synthetic oligonucleotide
tcgagttaagtttgggggggacctgcgccg

SEQ ID NO: 453150 - DNA, 30 bp, Artificial Sequence
  Synthetic oligonucleotide
aaagtcgcgattgcaaacctgaagtcgccg

SEQ ID NO: 453151 - DNA, 30 bp, Artificial Sequence
  Synthetic oligonucleotide
gtagcgagtaccttcgacgctcagtcgccg

SEQ ID NO: 453152 - DNA, 30 bp, Artificial Sequence
  Synthetic oligonucleotide
gtggttctcggccttgaaggccattcgccg

SEQ ID NO: 453153 - DNA, 30 bp, Artificial Sequence
  Synthetic oligonucleotide
aagttatcctggatgttcatggtttcgccg

SEQ ID NO: 453154 - DNA, 30 bp, Artificial Sequence
  Synthetic oligonucleotide
agggcacaaccccgcgtatgattttcgccg

SEQ ID NO: 453155 - DNA, 30 bp, Artificial Sequence
  Synthetic oligonucleotide
tcctcaggattttgggattactaaaggccg

SEQ ID NO: 453156 - DNA, 30 bp, Artificial Sequence
  Synthetic oligonucleotide
actctcttcagcgatgaatgacacaggccg

SEQ ID NO: 453157 - DNA, 30 bp, Artificial Sequence
  Synthetic oligonucleotide
aagagtccttaccggccaggcagcaggccg

SEQ ID NO: 453158 - DNA, 30 bp, Artificial Sequence
  Synthetic oligonucleotide
ttcgggtgcactttcgtgacattcaggccg

SEQ ID NO: 453159 - DNA, 30 bp, Artificial Sequence
  Synthetic oligonucleotide
ttgattgtagcatcaacggttactaggccg

SEQ ID NO: 453160 - DNA, 30 bp, Artificial Sequence
  Synthetic oligonucleotide
gtatggccaaggtgacatctggcccggccg

SEQ ID NO: 453161 - DNA, 30 bp, Artificial Sequence
  Synthetic oligonucleotide
gatcctgcaagatgtggtgatgcccggccg

SEQ ID NO: 453162 - DNA, 30 bp, Artificial Sequence
  Synthetic oligonucleotide
gtttaggcattcgtattagttcggcggccg

SEQ ID NO: 453163 - DNA, 30 bp, Artificial Sequence
  Synthetic oligonucleotide
tatcccctgctataggcagtaattcggccg

SEQ ID NO: 453164 - DNA, 30 bp, Artificial Sequence
  Synthetic oligonucleotide
ttaaaagatgaacaccgagcgattcggccg

SEQ ID NO: 453165 - DNA, 30 bp, Artificial Sequence
  Synthetic oligonucleotide
atgcagaaatcggcgggctcccaagggccg

SEQ ID NO: 453166 - DNA, 30 bp, Artificial Sequence
  Synthetic oligonucleotide
ttggccacgttgcgtatcagcagagggccg

SEQ ID NO: 453167 - DNA, 30 bp, Artificial Sequence
  Synthetic oligonucleotide
tctttggatgcacaagggtcccgcgggccg

SEQ ID NO: 453168 - DNA, 30 bp, Artificial Sequence
  Synthetic oligonucleotide
gagaacctcactccacgtgtggtcgggccg

SEQ ID NO: 453169 - DNA, 30 bp, Artificial Sequence
  Synthetic oligonucleotide
aggttttaatctacagctgcacgggggccg

SEQ ID NO: 453170 - DNA, 30 bp, Artificial Sequence
  Synthetic oligonucleotide
cagtttttcccgaagcttaaaaaatggccg

SEQ ID NO: 453171 - DNA, 30 bp, Artificial Sequence
  Synthetic oligonucleotide
gacaccattctaaattgaagtgaatggccg

SEQ ID NO: 453172 - DNA, 30 bp, Artificial Sequence
  Synthetic oligonucleotide
atgggcgcctccgctggttttcattggccg

SEQ ID NO: 453173 - DNA, 30 bp, Artificial Sequence
  Synthetic oligonucleotide
taataggcgtacgattgtgcaagttggccg

SEQ ID NO: 453174 - DNA, 30 bp, Artificial Sequence
  Synthetic oligonucleotide
aattatatagtgcgcatcaggcaaatgccg

SEQ ID NO: 453175 - DNA, 30 bp, Artificial Sequence
  Synthetic oligonucleotide
taaattgacgctgggcagtgtcgcatgccg

SEQ ID NO: 453176 - DNA, 30 bp, Artificial Sequence
  Synthetic oligonucleotide
cagcctagtggcaccgcagggggcatgccg

SEQ ID NO: 453177 - DNA, 30 bp, Artificial Sequence
  Synthetic oligonucleotide
gctgttgggtcaatgagccgtgtgatgccg

SEQ ID NO: 453178 - DNA, 30 bp, Artificial Sequence
  Synthetic oligonucleotide
ttggtctggtggcgttggtggctactgccg

SEQ ID NO: 453179 - DNA, 30 bp, Artificial Sequence
  Synthetic oligonucleotide
tagaacttttaagagctaattatgctgccg

SEQ ID NO: 453180 - DNA, 30 bp, Artificial Sequence
  Synthetic oligonucleotide
aacggagaggtgcggccattggatctgccg

SEQ ID NO: 453181 - DNA, 30 bp, Artificial Sequence
  Synthetic oligonucleotide
ggcaagcgagttggaaggtatgttctgccg

SEQ ID NO: 453182 - DNA, 30 bp, Artificial Sequence
  Synthetic oligonucleotide
atgctggatgcaccccggcataccgtgccg

SEQ ID NO: 453183 - DNA, 30 bp, Artificial Sequence
  Synthetic oligonucleotide
catacttctgtatacccctagggtttgccg

SEQ ID NO: 453184 - DNA, 30 bp, Artificial Sequence
  Synthetic oligonucleotide
tttagaaggtgtagccttactcttttgccg

SEQ ID NO: 453185 - DNA, 30 bp, Artificial Sequence
  Synthetic oligonucleotide
cctttgaccatgtatcgaggcacaaatccg

SEQ ID NO: 453186 - DNA, 30 bp, Artificial Sequence
  Synthetic oligonucleotide
ttcgtgagtcaagaacggagttccaatccg

SEQ ID NO: 453187 - DNA, 30 bp, Artificial Sequence
  Synthetic oligonucleotide
cgcggaaggtacaatagaagggtcaatccg

SEQ ID NO: 453188 - DNA, 30 bp, Artificial Sequence
  Synthetic oligonucleotide
gcacaagaaacgttagcggaacagaatccg

SEQ ID NO: 453189 - DNA, 30 bp, Artificial Sequence
  Synthetic oligonucleotide
ggttagtagtggtaatagtcgctgaatccg

SEQ ID NO: 453190 - DNA, 30 bp, Artificial Sequence
  Synthetic oligonucleotide
cattatcaagagatttttatggttaatccg

SEQ ID NO: 453191 - DNA, 30 bp, Artificial Sequence
  Synthetic oligonucleotide
aagttcaacccctctattacctgtcatccg

SEQ ID NO: 453192 - DNA, 30 bp, Artificial Sequence
  Synthetic oligonucleotide
tccactgcgacaacggtacaaaaagatccg

SEQ ID NO: 453193 - DNA, 30 bp, Artificial Sequence
  Synthetic oligonucleotide
ctagtgtgccatcacgcttttccagatccg

SEQ ID NO: 453194 - DNA, 30 bp, Artificial Sequence
  Synthetic oligonucleotide
attgtcttgatagctggcataatagatccg

SEQ ID NO: 453195 - DNA, 30 bp, Artificial Sequence
  Synthetic oligonucleotide
gcgtaggatacgttttttaacatcgatccg

SEQ ID NO: 453196 - DNA, 30 bp, Artificial Sequence
  Synthetic oligonucleotide
gaccaggtcaggtcgccaaagtctgatccg

SEQ ID NO: 453197 - DNA, 30 bp, Artificial Sequence
  Synthetic oligonucleotide
caaatttgctgatgtcaatagtctgatccg

SEQ ID NO: 453198 - DNA, 30 bp, Artificial Sequence
  Synthetic oligonucleotide
catctaatatggcgggttcacgttgatccg

SEQ ID NO: 453199 - DNA, 30 bp, Artificial Sequence
  Synthetic oligonucleotide
aagaattcgcgcaggtagggtatgtatccg

SEQ ID NO: 453200 - DNA, 30 bp, Artificial Sequence
  Synthetic oligonucleotide
tacttactgccactcaggggaaattatccg

SEQ ID NO: 453201 - DNA, 30 bp, Artificial Sequence
  Synthetic oligonucleotide
gtcatcccaatggcgcatggattttatccg

SEQ ID NO: 453202 - DNA, 30 bp, Artificial Sequence
  Synthetic oligonucleotide
tagtcgtcagaatggcttcttgcaactccg

SEQ ID NO: 453203 - DNA, 30 bp, Artificial Sequence
  Synthetic oligonucleotide
attcttttttcccacagtagcggcactccg

SEQ ID NO: 453204 - DNA, 30 bp, Artificial Sequence
  Synthetic oligonucleotide
ccagggcacgacttgattaaccctactccg

SEQ ID NO: 453205 - DNA, 30 bp, Artificial Sequence
  Synthetic oligonucleotide
atcaattttgttatgcgtgttgctactccg

SEQ ID NO: 453206 - DNA, 30 bp, Artificial Sequence
  Synthetic oligonucleotide
gttgtagttaatgtgacctagagacctccg

SEQ ID NO: 453207 - DNA, 30 bp, Artificial Sequence
  Synthetic oligonucleotide
cttgtgcaaaattctttattgtcgcctccg

SEQ ID NO: 453208 - DNA, 30 bp, Artificial Sequence
  Synthetic oligonucleotide
cgagcggcagtggagctatccagtcctccg

SEQ ID NO: 453209 - DNA, 30 bp, Artificial Sequence
  Synthetic oligonucleotide
caggctgtgcacctgcgggcgcttcctccg

SEQ ID NO: 453210 - DNA, 30 bp, Artificial Sequence
  Synthetic oligonucleotide
agaattttgtgggaacttctaccagctccg

SEQ ID NO: 453211 - DNA, 30 bp, Artificial Sequence
  Synthetic oligonucleotide
gaacggactctctatggatggcgagctccg

SEQ ID NO: 453212 - DNA, 30 bp, Artificial Sequence
  Synthetic oligonucleotide
ctaccagagaaacctgtctgtccggctccg

SEQ ID NO: 453213 - DNA, 30 bp, Artificial Sequence
  Synthetic oligonucleotide
catgatgtgaggcacacgtagatctctccg

SEQ ID NO: 453214 - DNA, 30 bp, Artificial Sequence
  Synthetic oligonucleotide
gcgattggggtgactgaccccttctctccg

SEQ ID NO: 453215 - DNA, 30 bp, Artificial Sequence
  Synthetic oligonucleotide
tacgagtaacaccctttgctgtaaagtccg

SEQ ID NO: 453216 - DNA, 30 bp, Artificial Sequence
  Synthetic oligonucleotide
agggtcagtgcttactcatccataagtccg

SEQ ID NO: 453217 - DNA, 30 bp, Artificial Sequence
  Synthetic oligonucleotide
gatggtaataacctagtatatacgagtccg

SEQ ID NO: 453218 - DNA, 30 bp, Artificial Sequence
  Synthetic oligonucleotide
ttattaagtttcgaggtccgtgtgagtccg

SEQ ID NO: 453219 - DNA, 30 bp, Artificial Sequence
  Synthetic oligonucleotide
ttcgtatccccctgcgctctgtgacgtccg

SEQ ID NO: 453220 - DNA, 30 bp, Artificial Sequence
  Synthetic oligonucleotide
aatatggatataaccaattgcgaccgtccg

SEQ ID NO: 453221 - DNA, 30 bp, Artificial Sequence
  Synthetic oligonucleotide
tgtctaagcaggggactttgaagtcgtccg

SEQ ID NO: 453222 - DNA, 30 bp, Artificial Sequence
  Synthetic oligonucleotide
aaacggcggcgcagctggtgcgaaggtccg

SEQ ID NO: 453223 - DNA, 30 bp, Artificial Sequence
  Synthetic oligonucleotide
aagcactaggcgtagtttttaataggtccg

SEQ ID NO: 453224 - DNA, 30 bp, Artificial Sequence
  Synthetic oligonucleotide
gcgttcccacgacgcatctatagcggtccg

SEQ ID NO: 453225 - DNA, 30 bp, Artificial Sequence
  Synthetic oligonucleotide
ccgcatcttgtttgtgagtacgtcggtccg

SEQ ID NO: 453226 - DNA, 30 bp, Artificial Sequence
  Synthetic oligonucleotide
tttaaaccgtcaccaacggtaagtggtccg

SEQ ID NO: 453227 - DNA, 30 bp, Artificial Sequence
  Synthetic oligonucleotide
gccttacatataagggttcacaaatgtccg

SEQ ID NO: 453228 - DNA, 30 bp, Artificial Sequence
  Synthetic oligonucleotide
gggcaaggattacctataatcgggtgtccg

SEQ ID NO: 453229 - DNA, 30 bp, Artificial Sequence
  Synthetic oligonucleotide
gcgcataactggaaagatatagaaattccg

SEQ ID NO: 453230 - DNA, 30 bp, Artificial Sequence
  Synthetic oligonucleotide
tcacattatgatatattgtattgaattccg

SEQ ID NO: 453231 - DNA, 30 bp, Artificial Sequence
  Synthetic oligonucleotide
gccagtcatccttgtaccgcgtccattccg

SEQ ID NO: 453232 - DNA, 30 bp, Artificial Sequence
  Synthetic oligonucleotide
aggtgtttagtaaaactcttcgtgattccg

SEQ ID NO: 453233 - DNA, 30 bp, Artificial Sequence
  Synthetic oligonucleotide
atctgttgtggatctaacataagtattccg

SEQ ID NO: 453234 - DNA, 30 bp, Artificial Sequence
  Synthetic oligonucleotide
atgactgggactcacatcgatattattccg

SEQ ID NO: 453235 - DNA, 30 bp, Artificial Sequence
  Synthetic oligonucleotide
ttccaggaatgacacagcctgggacttccg

SEQ ID NO: 453236 - DNA, 30 bp, Artificial Sequence
  Synthetic oligonucleotide
ggcctcggatggggtatcagaagccttccg

SEQ ID NO: 453237 - DNA, 30 bp, Artificial Sequence
  Synthetic oligonucleotide
gcttttgcttctgcggacggcccagttccg

SEQ ID NO: 453238 - DNA, 30 bp, Artificial Sequence
  Synthetic oligonucleotide
aacccgggtgataattgctgtttagttccg

SEQ ID NO: 453239 - DNA, 30 bp, Artificial Sequence
  Synthetic oligonucleotide
tgtacgtagccagtaaattttgaggttccg

SEQ ID NO: 453240 - DNA, 30 bp, Artificial Sequence
  Synthetic oligonucleotide
caagccgtgggtcacgtgcagggggttccg

SEQ ID NO: 453241 - DNA, 30 bp, Artificial Sequence
  Synthetic oligonucleotide
gagttatccttggtcttttataatgttccg

SEQ ID NO: 453242 - DNA, 30 bp, Artificial Sequence
  Synthetic oligonucleotide
ttctcatggttgttagcagcatctgttccg

SEQ ID NO: 453243 - DNA, 30 bp, Artificial Sequence
  Synthetic oligonucleotide
gctaaaaataccaccagtggggtatttccg

SEQ ID NO: 453244 - DNA, 30 bp, Artificial Sequence
  Synthetic oligonucleotide
aaatagactactgtcgttatattatttccg

SEQ ID NO: 453245 - DNA, 30 bp, Artificial Sequence
  Synthetic oligonucleotide
aaacattgccaaatcatggttcactttccg

SEQ ID NO: 453246 - DNA, 30 bp, Artificial Sequence
  Synthetic oligonucleotide
cgctaacggcgtatcaatactgcctttccg

SEQ ID NO: 453247 - DNA, 30 bp, Artificial Sequence
  Synthetic oligonucleotide
cagcccgggcggtcgtgatataagtttccg

SEQ ID NO: 453248 - DNA, 30 bp, Artificial Sequence
  Synthetic oligonucleotide
ctcggtgaaagcaattaggggagttttccg

SEQ ID NO: 453249 - DNA, 30 bp, Artificial Sequence
  Synthetic oligonucleotide
aaagtcgtgcaacggattgcggcaaaagcg

SEQ ID NO: 453250 - DNA, 30 bp, Artificial Sequence
  Synthetic oligonucleotide
atttcgtcttttgaaagcggggggaaagcg

SEQ ID NO: 453251 - DNA, 30 bp, Artificial Sequence
  Synthetic oligonucleotide
aatcttggccgtgggacacaagcacaagcg

SEQ ID NO: 453252 - DNA, 30 bp, Artificial Sequence
  Synthetic oligonucleotide
atagacaaatcaccacgcagcaggcaagcg

SEQ ID NO: 453253 - DNA, 30 bp, Artificial Sequence
  Synthetic oligonucleotide
gcccccctcaggcctagaaattggcaagcg

SEQ ID NO: 453254 - DNA, 30 bp, Artificial Sequence
  Synthetic oligonucleotide
agaattatgaacttataatttaaagaagcg

SEQ ID NO: 453255 - DNA, 30 bp, Artificial Sequence
  Synthetic oligonucleotide
gcagatacgccttttagaccgcaagaagcg

SEQ ID NO: 453256 - DNA, 30 bp, Artificial Sequence
  Synthetic oligonucleotide
aaataactgaggccgtgtatgtaagaagcg

SEQ ID NO: 453257 - DNA, 30 bp, Artificial Sequence
  Synthetic oligonucleotide
tccaatggacaagcgtttgtgacagaagcg

SEQ ID NO: 453258 - DNA, 30 bp, Artificial Sequence
  Synthetic oligonucleotide
cttggatgcaagccttcggcgtcagaagcg

SEQ ID NO: 453259 - DNA, 30 bp, Artificial Sequence
  Synthetic oligonucleotide
gtacatttcccatgggtccccagcgaagcg

SEQ ID NO: 453260 - DNA, 30 bp, Artificial Sequence
  Synthetic oligonucleotide
agttttaaatgtctgttccctagggaagcg

SEQ ID NO: 453261 - DNA, 30 bp, Artificial Sequence
  Synthetic oligonucleotide
ggaattgatacttatcttcaatgggaagcg

SEQ ID NO: 453262 - DNA, 30 bp, Artificial Sequence
  Synthetic oligonucleotide
attctgatattcgtcttggctaactaagcg

SEQ ID NO: 453263 - DNA, 30 bp, Artificial Sequence
  Synthetic oligonucleotide
gattcctcaagggctttcgcagggtaagcg

SEQ ID NO: 453264 - DNA, 30 bp, Artificial Sequence
  Synthetic oligonucleotide
accagcctatccttacgttcgtggtaagcg

SEQ ID NO: 453265 - DNA, 30 bp, Artificial Sequence
  Synthetic oligonucleotide
tactgtcacgctacgccccagcgttaagcg

SEQ ID NO: 453266 - DNA, 30 bp, Artificial Sequence
  Synthetic oligonucleotide
gtgagtctggtatccgctacggagacagcg

SEQ ID NO: 453267 - DNA, 30 bp, Artificial Sequence
  Synthetic oligonucleotide
aaatcattccatgtgtagaggcatacagcg

SEQ ID NO: 453268 - DNA, 30 bp, Artificial Sequence
  Synthetic oligonucleotide
gaaaacgtgctgaaaagagcagctacagcg

SEQ ID NO: 453269 - DNA, 30 bp, Artificial Sequence
  Synthetic oligonucleotide
tcatttctgaatgttggagctgctacagcg

SEQ ID NO: 453270 - DNA, 30 bp, Artificial Sequence
  Synthetic oligonucleotide
taagccggtaataatagtgtagttacagcg

SEQ ID NO: 453271 - DNA, 30 bp, Artificial Sequence
  Synthetic oligonucleotide
ctatacgttttacctattagttgcccagcg

SEQ ID NO: 453272 - DNA, 30 bp, Artificial Sequence
  Synthetic oligonucleotide
gaggattcagagatgcctgcaagagcagcg

SEQ ID NO: 453273 - DNA, 35 bp, Artificial Sequence
  Synthetic oligonucleotide
cggcttccttgtcgtattattgggtaatcgcagcg

SEQ ID NO: 453274 - DNA, 30 bp, Artificial Sequence
  Synthetic oligonucleotide
caaacatttttgatcatcgaataggcagcg

SEQ ID NO: 453275 - DNA, 30 bp, Artificial Sequence
  Synthetic oligonucleotide
accggcccctgcaagcacgggcatgcagcg

SEQ ID NO: 453276 - DNA, 30 bp, Artificial Sequence
  Synthetic oligonucleotide
aaactgcacatggaacgctcttatgcagcg

SEQ ID NO: 453277 - DNA, 30 bp, Artificial Sequence
  Synthetic oligonucleotide
acttgagatgagcgccggacagctgcagcg

SEQ ID NO: 453278 - DNA, 30 bp, Artificial Sequence
  Synthetic oligonucleotide
ctactagattaaatttttagcctatcagcg

SEQ ID NO: 453279 - DNA, 30 bp, Artificial Sequence
  Synthetic oligonucleotide
cggcggtctcttttgtaggggaactcagcg

SEQ ID NO: 453280 - DNA, 30 bp, Artificial Sequence
  Synthetic oligonucleotide
gcctactgatgtactctagaatactcagcg

SEQ ID NO: 453281 - DNA, 30 bp, Artificial Sequence
  Synthetic oligonucleotide
gtttcttcccattcagacatgctctcagcg

SEQ ID NO: 453282 - DNA, 30 bp, Artificial Sequence
  Synthetic oligonucleotide
gtatatccctgggcaagctgtggaagagcg

SEQ ID NO: 453283 - DNA, 30 bp, Artificial Sequence
  Synthetic oligonucleotide
cgaagcggtggccagcatagctgtagagcg

SEQ ID NO: 453284 - DNA, 30 bp, Artificial Sequence
  Synthetic oligonucleotide
catacggaaggttagtttgtattacgagcg

SEQ ID NO: 453285 - DNA, 30 bp, Artificial Sequence
  Synthetic oligonucleotide
aatggttattcaatttccttacaccgagcg

SEQ ID NO: 453286 - DNA, 30 bp, Artificial Sequence
  Synthetic oligonucleotide
cggacttgatgcggcgaactagtccgagcg

SEQ ID NO: 453287 - DNA, 30 bp, Artificial Sequence
  Synthetic oligonucleotide
tttttagtttgagtctgtatagggcgagcg

SEQ ID NO: 453288 - DNA, 31 bp, Artificial Sequence
  Synthetic oligonucleotide
accgagatttgaccataccaagtggcgagcg

SEQ ID NO: 453289 - DNA, 30 bp, Artificial Sequence
  Synthetic oligonucleotide
gcacattccctcgggtatagtattcgagcg

SEQ ID NO: 453290 - DNA, 30 bp, Artificial Sequence
  Synthetic oligonucleotide
ataggaaggactttcgttgcgttaggagcg

SEQ ID NO: 453291 - DNA, 30 bp, Artificial Sequence
  Synthetic oligonucleotide
atgcggcgctcagcacgtcaatcatgagcg

SEQ ID NO: 453292 - DNA, 30 bp, Artificial Sequence
  Synthetic oligonucleotide
caatacgtaacgcgggcgataatatgagcg

SEQ ID NO: 453293 - DNA, 30 bp, Artificial Sequence
  Synthetic oligonucleotide
acggtgtgctccacagagcgcatatgagcg

SEQ ID NO: 453294 - DNA, 30 bp, Artificial Sequence
  Synthetic oligonucleotide
tagacgatgtgcgggccccctcagtgagcg

SEQ ID NO: 453295 - DNA, 30 bp, Artificial Sequence
  Synthetic oligonucleotide
agtctgacacatgcatactgtatgtgagcg

SEQ ID NO: 453296 - DNA, 30 bp, Artificial Sequence
  Synthetic oligonucleotide
attgtgaacgatttaactgtgtgaatagcg

SEQ ID NO: 453297 - DNA, 30 bp, Artificial Sequence
  Synthetic oligonucleotide
agggtatgtctaaggactcatgatatagcg

SEQ ID NO: 453298 - DNA, 30 bp, Artificial Sequence
  Synthetic oligonucleotide
acccacgcgctatgtaggacgagtatagcg

SEQ ID NO: 453299 - DNA, 30 bp, Artificial Sequence
  Synthetic oligonucleotide
gagaagaaacatcggtagtgggttatagcg

SEQ ID NO: 453300 - DNA, 30 bp, Artificial Sequence
  Synthetic oligonucleotide
aactcctggggtgagatcatcaacctagcg

SEQ ID NO: 453301 - DNA, 30 bp, Artificial Sequence
  Synthetic oligonucleotide
acatgatcgcctcagctcgtctccctagcg

SEQ ID NO: 453302 - DNA, 30 bp, Artificial Sequence
  Synthetic oligonucleotide
tgccaaccattcacaccagggacgctagcg

SEQ ID NO: 453303 - DNA, 30 bp, Artificial Sequence
  Synthetic oligonucleotide
atctaatgatgcacacgggtctaagtagcg

SEQ ID NO: 453304 - DNA, 30 bp, Artificial Sequence
  Synthetic oligonucleotide
gcgagcgtactagactcaagtcacgtagcg

SEQ ID NO: 453305 - DNA, 30 bp, Artificial Sequence
  Synthetic oligonucleotide
agttgatttgttcaagaaggggccgtagcg

SEQ ID NO: 453306 - DNA, 30 bp, Artificial Sequence
  Synthetic oligonucleotide
aattagtattcacaggaggtcgtcgtagcg

SEQ ID NO: 453307 - DNA, 30 bp, Artificial Sequence
  Synthetic oligonucleotide
gaaccacgaaagccgctccgtttggtagcg

SEQ ID NO: 453308 - DNA, 30 bp, Artificial Sequence
  Synthetic oligonucleotide
gtgctccggtgaagcgctaatcaattagcg

SEQ ID NO: 453309 - DNA, 30 bp, Artificial Sequence
  Synthetic oligonucleotide
gctttctaatcgtcccaattggcattagcg

SEQ ID NO: 453310 - DNA, 30 bp, Artificial Sequence
  Synthetic oligonucleotide
ggattttcaaatgatcacccgtcattagcg

SEQ ID NO: 453311 - DNA, 30 bp, Artificial Sequence
  Synthetic oligonucleotide
atgttttaatgatgtgggcttacgttagcg

SEQ ID NO: 453312 - DNA, 30 bp, Artificial Sequence
  Synthetic oligonucleotide
ccaccccgggggtctaatgccgcgttagcg

SEQ ID NO: 453313 - DNA, 30 bp, Artificial Sequence
  Synthetic oligonucleotide
ttagaaatccggctaggttgcgcgttagcg

SEQ ID NO: 453314 - DNA, 30 bp, Artificial Sequence
  Synthetic oligonucleotide
ccgcacggtcatcgctaaaacgtgttagcg

SEQ ID NO: 453315 - DNA, 30 bp, Artificial Sequence
  Synthetic oligonucleotide
taaagtattaattggtagaggtatttagcg

SEQ ID NO: 453316 - DNA, 30 bp, Artificial Sequence
  Synthetic oligonucleotide
ctcgtagcataaaagtcggtgactttagcg

SEQ ID NO: 453317 - DNA, 30 bp, Artificial Sequence
  Synthetic oligonucleotide
aaacactctagtagggtaaatagtttagcg

SEQ ID NO: 453318 - DNA, 30 bp, Artificial Sequence
  Synthetic oligonucleotide
cctgatatgctcgttattacgattttagcg

SEQ ID NO: 453319 - DNA, 30 bp, Artificial Sequence
  Synthetic oligonucleotide
cggtggtgggcagtattgtagaaaaacgcg

SEQ ID NO: 453320 - DNA, 30 bp, Artificial Sequence
  Synthetic oligonucleotide
gaaagccgtatcgatagccatcgcaacgcg

SEQ ID NO: 453321 - DNA, 30 bp, Artificial Sequence
  Synthetic oligonucleotide
ccaagttcttcatttcaagtcggcaacgcg

SEQ ID NO: 453322 - DNA, 30 bp, Artificial Sequence
  Synthetic oligonucleotide
gttcgtgcgataatcgtaggtccgaacgcg

SEQ ID NO: 453323 - DNA, 30 bp, Artificial Sequence
  Synthetic oligonucleotide
tccgtggactttatatttaatatgaacgcg

SEQ ID NO: 453324 - DNA, 30 bp, Artificial Sequence
  Synthetic oligonucleotide
gctatcgattgaacgctagactctaacgcg

SEQ ID NO: 453325 - DNA, 30 bp, Artificial Sequence
  Synthetic oligonucleotide
gggagtcgcgcgatttattggccacacgcg

SEQ ID NO: 453326 - DNA, 30 bp, Artificial Sequence
  Synthetic oligonucleotide
tttaaaggatgctacatacaagtacacgcg

SEQ ID NO: 453327 - DNA, 30 bp, Artificial Sequence
  Synthetic oligonucleotide
gggcgttatcggaacgatcctgtacacgcg

SEQ ID NO: 453328 - DNA, 30 bp, Artificial Sequence
  Synthetic oligonucleotide
tccatactgtattcctttaaggagcacgcg

SEQ ID NO: 453329 - DNA, 30 bp, Artificial Sequence
  Synthetic oligonucleotide
ctgtcatctaaataaacggcaatgcacgcg

SEQ ID NO: 453330 - DNA, 30 bp, Artificial Sequence
  Synthetic oligonucleotide
aatgttataatgattatggaaattcacgcg

SEQ ID NO: 453331 - DNA, 30 bp, Artificial Sequence
  Synthetic oligonucleotide
aacgagtcgggccatgatctccgagacgcg

SEQ ID NO: 453332 - DNA, 30 bp, Artificial Sequence
  Synthetic oligonucleotide
acgtactggattagtcataattacgacgcg

SEQ ID NO: 453333 - DNA, 30 bp, Artificial Sequence
  Synthetic oligonucleotide
agttctttctcgggggtaacttacgacgcg

SEQ ID NO: 453334 - DNA, 30 bp, Artificial Sequence
  Synthetic oligonucleotide
accccctcaagtctgccaacgtccgacgcg

SEQ ID NO: 453335 - DNA, 30 bp, Artificial Sequence
  Synthetic oligonucleotide
accgttattaaaaggcgctttagcgacgcg

SEQ ID NO: 453336 - DNA, 30 bp, Artificial Sequence
  Synthetic oligonucleotide
ctcgcctgtaaaggtcaatcctgggacgcg

SEQ ID NO: 453337 - DNA, 30 bp, Artificial Sequence
  Synthetic oligonucleotide
cccgagtcttcgggcggaaacaatgacgcg

SEQ ID NO: 453338 - DNA, 30 bp, Artificial Sequence
  Synthetic oligonucleotide
ttaattaggcctcgaaagccgattgacgcg

SEQ ID NO: 453339 - DNA, 29 bp, Artificial Sequence
  Synthetic oligonucleotide
tgaacatggtagggatatttaaatacgcg

SEQ ID NO: 453340 - DNA, 30 bp, Artificial Sequence
  Synthetic oligonucleotide
tttacttgttgtaccagtgagcgatacgcg

SEQ ID NO: 453341 - DNA, 30 bp, Artificial Sequence
  Synthetic oligonucleotide
ctcgggtggtaatagatcgtcgactacgcg

SEQ ID NO: 453342 - DNA, 30 bp, Artificial Sequence
  Synthetic oligonucleotide
accgcattaaatctgggcgtgtagtacgcg

SEQ ID NO: 453343 - DNA, 30 bp, Artificial Sequence
  Synthetic oligonucleotide
tggcattgtgcatcctttgcacggtacgcg

SEQ ID NO: 453344 - DNA, 30 bp, Artificial Sequence
  Synthetic oligonucleotide
tacagtaacgcttagaatcgcatgtacgcg

SEQ ID NO: 453345 - DNA, 30 bp, Artificial Sequence
  Synthetic oligonucleotide
gtgaagaggggcttttataaactgtacgcg

SEQ ID NO: 453346 - DNA, 30 bp, Artificial Sequence
  Synthetic oligonucleotide
tattaacgtttgagcgggatgctgtacgcg

SEQ ID NO: 453347 - DNA, 30 bp, Artificial Sequence
  Synthetic oligonucleotide
ggcgttgcgtcccccgtcgtagattacgcg

SEQ ID NO: 453348 - DNA, 30 bp, Artificial Sequence
  Synthetic oligonucleotide
aaactggcaggcaagcgcggcccttacgcg

SEQ ID NO: 453349 - DNA, 30 bp, Artificial Sequence
  Synthetic oligonucleotide
caccaccgtaagctgtcatacggttacgcg

SEQ ID NO: 453350 - DNA, 30 bp, Artificial Sequence
  Synthetic oligonucleotide
tttcccttaccgttacctcgcggttacgcg

SEQ ID NO: 453351 - DNA, 30 bp, Artificial Sequence
  Synthetic oligonucleotide
atcaacgtcccgctctgccataaaaccgcg

SEQ ID NO: 453352 - DNA, 30 bp, Artificial Sequence
  Synthetic oligonucleotide
cagttggttttgtcggctgagtaaaccgcg

SEQ ID NO: 453353 - DNA, 30 bp, Artificial Sequence
  Synthetic oligonucleotide
gggcccgtttagggctgcacacagaccgcg

SEQ ID NO: 453354 - DNA, 30 bp, Artificial Sequence
  Synthetic oligonucleotide
ggggctaggggattcgtgcggattaccgcg

SEQ ID NO: 453355 - DNA, 30 bp, Artificial Sequence
  Synthetic oligonucleotide
gtcttggtcattaaaccaggtgttaccgcg

SEQ ID NO: 453356 - DNA, 30 bp, Artificial Sequence
  Synthetic oligonucleotide
gctgtatttgttaagactcacgaccccgcg

SEQ ID NO: 453357 - DNA, 30 bp, Artificial Sequence
  Synthetic oligonucleotide
ttccgcgataatggggcttccctgcccgcg

SEQ ID NO: 453358 - DNA, 30 bp, Artificial Sequence
  Synthetic oligonucleotide
tagagtagctcaatttgctcggtgcccgcg

SEQ ID NO: 453359 - DNA, 30 bp, Artificial Sequence
  Synthetic oligonucleotide
gacctactgcgcgccactgtccgcgccgcg

SEQ ID NO: 453360 - DNA, 30 bp, Artificial Sequence
  Synthetic oligonucleotide
gaaggtagctttgcacgccgctcggccgcg

SEQ ID NO: 453361 - DNA, 30 bp, Artificial Sequence
  Synthetic oligonucleotide
gcttcgcgtccactaaacaaaagtgccgcg

SEQ ID NO: 453362 - DNA, 30 bp, Artificial Sequence
  Synthetic oligonucleotide
ttatccaaatgtatcccagcgtttgccgcg

SEQ ID NO: 453363 - DNA, 30 bp, Artificial Sequence
  Synthetic oligonucleotide
aggtcaccgcggacatgtcttgcctccgcg

SEQ ID NO: 453364 - DNA, 30 bp, Artificial Sequence
  Synthetic oligonucleotide
cagacatgactgttcggtcggctctccgcg

SEQ ID NO: 453365 - DNA, 30 bp, Artificial Sequence
  Synthetic oligonucleotide
aggatatcatgggaacaaccaaagtccgcg

SEQ ID NO: 453366 - DNA, 30 bp, Artificial Sequence
  Synthetic oligonucleotide
atttagaaaacttcggggaggctgtccgcg

SEQ ID NO: 453367 - DNA, 30 bp, Artificial Sequence
  Synthetic oligonucleotide
gtcgcacggtgtcataggagtgtgtccgcg

SEQ ID NO: 453368 - DNA, 30 bp, Artificial Sequence
  Synthetic oligonucleotide
gttctcgacgtgctctgatttacttccgcg

SEQ ID NO: 453369 - DNA, 30 bp, Artificial Sequence
  Synthetic oligonucleotide
cttcaatggcaaagcccggtggtttccgcg

SEQ ID NO: 453370 - DNA, 30 bp, Artificial Sequence
  Synthetic oligonucleotide
acccttatccagttttgattggtttccgcg

SEQ ID NO: 453371 - DNA, 30 bp, Artificial Sequence
  Synthetic oligonucleotide
cgctatgcatacgctaagctgccaagcgcg

SEQ ID NO: 453372 - DNA, 30 bp, Artificial Sequence
  Synthetic oligonucleotide
gtctaacgcgctacctcaagtctaagcgcg

SEQ ID NO: 453373 - DNA, 30 bp, Artificial Sequence
  Synthetic oligonucleotide
cggttgatatggtgcccgttgaggagcgcg

SEQ ID NO: 453374 - DNA, 30 bp, Artificial Sequence
  Synthetic oligonucleotide
gagagggcgatccgctatctaaatagcgcg

SEQ ID NO: 453375 - DNA, 30 bp, Artificial Sequence
  Synthetic oligonucleotide
cggttacgcacgcagactttacaacgcgcg

SEQ ID NO: 453376 - DNA, 30 bp, Artificial Sequence
  Synthetic oligonucleotide
gaatatctgctatcacaacttagacgcgcg

SEQ ID NO: 453377 - DNA, 30 bp, Artificial Sequence
  Synthetic oligonucleotide
agtgttccaacctctagggtgctacgcgcg

SEQ ID NO: 453378 - DNA, 30 bp, Artificial Sequence
  Synthetic oligonucleotide
tcatgcttcgctcatcttgagagccgcgcg

SEQ ID NO: 453379 - DNA, 30 bp, Artificial Sequence
  Synthetic oligonucleotide
ggtcttcgcggtactccagtaatccgcgcg

SEQ ID NO: 453380 - DNA, 30 bp, Artificial Sequence
  Synthetic oligonucleotide
ataaaacatcttaggggcggtgcgcgcgcg

SEQ ID NO: 453381 - DNA, 30 bp, Artificial Sequence
  Synthetic oligonucleotide
agccgactgtagtctgctgaagtgcgcgcg

SEQ ID NO: 453382 - DNA, 30 bp, Artificial Sequence
  Synthetic oligonucleotide
tagttattgctgtcgtacatagatcgcgcg

SEQ ID NO: 453383 - DNA, 30 bp, Artificial Sequence
  Synthetic oligonucleotide
ttcgctattaagccatctttagatcgcgcg

SEQ ID NO: 453384 - DNA, 30 bp, Artificial Sequence
  Synthetic oligonucleotide
cgatggccgggacggatcgggccaggcgcg

SEQ ID NO: 453385 - DNA, 30 bp, Artificial Sequence
  Synthetic oligonucleotide
aagtacaggtagggtgactgtgacggcgcg

SEQ ID NO: 453386 - DNA, 30 bp, Artificial Sequence
  Synthetic oligonucleotide
ctgccagatagcgcgatcgagtacggcgcg

SEQ ID NO: 453387 - DNA, 30 bp, Artificial Sequence
  Synthetic oligonucleotide
atcagcggttccccgcgtctccgcggcgcg

SEQ ID NO: 453388 - DNA, 30 bp, Artificial Sequence
  Synthetic oligonucleotide
tgttgagacaagatgctaatctagggcgcg

SEQ ID NO: 453389 - DNA, 30 bp, Artificial Sequence
  Synthetic oligonucleotide
tcacttgatgatctctagccaaatggcgcg

SEQ ID NO: 453390 - DNA, 30 bp, Artificial Sequence
  Synthetic oligonucleotide
ctatccaccaggttagctcggggtggcgcg

SEQ ID NO: 453391 - DNA, 30 bp, Artificial Sequence
  Synthetic oligonucleotide
ttttcagcaatcaattagctataatgcgcg

SEQ ID NO: 453392 - DNA, 30 bp, Artificial Sequence
  Synthetic oligonucleotide
gcagcagaaaggtccacgcggtcttgcgcg

SEQ ID NO: 453393 - DNA, 30 bp, Artificial Sequence
  Synthetic oligonucleotide
ctcaacgagcaccaccagagtggttgcgcg

SEQ ID NO: 453394 - DNA, 30 bp, Artificial Sequence
  Synthetic oligonucleotide
tccaagggaatcctgccttggctttgcgcg

SEQ ID NO: 453395 - DNA, 30 bp, Artificial Sequence
  Synthetic oligonucleotide
ctttccccgatccgatcccatgtaatcgcg

SEQ ID NO: 453396 - DNA, 30 bp, Artificial Sequence
  Synthetic oligonucleotide
tgggaatctagggactttcaacggatcgcg

SEQ ID NO: 453397 - DNA, 30 bp, Artificial Sequence
  Synthetic oligonucleotide
caacttagacaaacattccgccgtatcgcg

SEQ ID NO: 453398 - DNA, 30 bp, Artificial Sequence
  Synthetic oligonucleotide
gtgactggttatgggaacgccgttatcgcg

SEQ ID NO: 453399 - DNA, 30 bp, Artificial Sequence
  Synthetic oligonucleotide
ctggcagtatattccggttgacagctcgcg

SEQ ID NO: 453400 - DNA, 30 bp, Artificial Sequence
  Synthetic oligonucleotide
tataagggcttgtcggctcttcagctcgcg

SEQ ID NO: 453401 - DNA, 30 bp, Artificial Sequence
  Synthetic oligonucleotide
gacgtcgtccccgacttagcattgctcgcg

SEQ ID NO: 453402 - DNA, 30 bp, Artificial Sequence
  Synthetic oligonucleotide
tatataagacggacaggcctggctctcgcg

SEQ ID NO: 453403 - DNA, 30 bp, Artificial Sequence
  Synthetic oligonucleotide
aatcttagcgatggcgaaccacgtctcgcg

SEQ ID NO: 453404 - DNA, 30 bp, Artificial Sequence
  Synthetic oligonucleotide
atcattaagtattctccaggattagtcgcg

SEQ ID NO: 453405 - DNA, 30 bp, Artificial Sequence
  Synthetic oligonucleotide
gctaattgtggctaaaactttaaggtcgcg

SEQ ID NO: 453406 - DNA, 30 bp, Artificial Sequence
  Synthetic oligonucleotide
aagcctcatttgagttgtgttatattcgcg

SEQ ID NO: 453407 - DNA, 30 bp, Artificial Sequence
  Synthetic oligonucleotide
aatcccggacacctcaggttcggcttcgcg

SEQ ID NO: 453408 - DNA, 30 bp, Artificial Sequence
  Synthetic oligonucleotide
cttttactaaaagtgatcagaataaaggcg

SEQ ID NO: 453409 - DNA, 30 bp, Artificial Sequence
  Synthetic oligonucleotide
ccctatctcgcttggagcaacctaaaggcg

SEQ ID NO: 453410 - DNA, 30 bp, Artificial Sequence
  Synthetic oligonucleotide
ttcgtccttggatttattaatctaaaggcg

SEQ ID NO: 453411 - DNA, 30 bp, Artificial Sequence
  Synthetic oligonucleotide
ctgtgctcgacatctttagcaaagaaggcg

SEQ ID NO: 453412 - DNA, 30 bp, Artificial Sequence
  Synthetic oligonucleotide
cgggtccgtctaccggggccagggaaggcg

SEQ ID NO: 453413 - DNA, 30 bp, Artificial Sequence
  Synthetic oligonucleotide
gctacggaggcaatggccccacaacaggcg

SEQ ID NO: 453414 - DNA, 30 bp, Artificial Sequence
  Synthetic oligonucleotide
tttcgacgcgctatatcactttgacaggcg

SEQ ID NO: 453415 - DNA, 30 bp, Artificial Sequence
  Synthetic oligonucleotide
cactatccttactcaagcaccctacaggcg

SEQ ID NO: 453416 - DNA, 30 bp, Artificial Sequence
  Synthetic oligonucleotide
tcacttcgtgtgggtcgttttggccaggcg

SEQ ID NO: 453417 - DNA, 30 bp, Artificial Sequence
  Synthetic oligonucleotide
ttcagcgtacaggacgctcactgccaggcg

SEQ ID NO: 453418 - DNA, 30 bp, Artificial Sequence
  Synthetic oligonucleotide
gtcagacacggataaattttgatgcaggcg

SEQ ID NO: 453419 - DNA, 30 bp, Artificial Sequence
  Synthetic oligonucleotide
ctttgaggggtattagtacgattgcaggcg

SEQ ID NO: 453420 - DNA, 30 bp, Artificial Sequence
  Synthetic oligonucleotide
acagagtcggcgggataagtagatcaggcg

SEQ ID NO: 453421 - DNA, 30 bp, Artificial Sequence
  Synthetic oligonucleotide
tataggcaaaatttatgacaggatcaggcg

SEQ ID NO: 453422 - DNA, 30 bp, Artificial Sequence
  Synthetic oligonucleotide
catctactctggagacgaagtatagaggcg

SEQ ID NO: 453423 - DNA, 30 bp, Artificial Sequence
  Synthetic oligonucleotide
gaattccgtgggttcgttagtctagaggcg

SEQ ID NO: 453424 - DNA, 30 bp, Artificial Sequence
  Synthetic oligonucleotide
tattcggggaggcgaccgcgtcatgaggcg

SEQ ID NO: 453425 - DNA, 30 bp, Artificial Sequence
  Synthetic oligonucleotide
ggtttggtatctatggaatttttataggcg

SEQ ID NO: 453426 - DNA, 30 bp, Artificial Sequence
  Synthetic oligonucleotide
tttccccatgcagggtcaaaaccctaggcg

SEQ ID NO: 453427 - DNA, 30 bp, Artificial Sequence
  Synthetic oligonucleotide
ggtagggaatttctgaagagcttctaggcg

SEQ ID NO: 453428 - DNA, 30 bp, Artificial Sequence
  Synthetic oligonucleotide
caccgatccaacggccgagagagttaggcg

SEQ ID NO: 453429 - DNA, 30 bp, Artificial Sequence
  Synthetic oligonucleotide
attcagaggctcactgaattctgaacggcg

SEQ ID NO: 453430 - DNA, 30 bp, Artificial Sequence
  Synthetic oligonucleotide
gttagcccacccgggacctgcctcacggcg

SEQ ID NO: 453431 - DNA, 30 bp, Artificial Sequence
  Synthetic oligonucleotide
gagctcggaaataagtttgtagagacggcg

SEQ ID NO: 453432 - DNA, 30 bp, Artificial Sequence
  Synthetic oligonucleotide
tactgggccgaggcagggtgcacaccggcg

SEQ ID NO: 453433 - DNA, 30 bp, Artificial Sequence
  Synthetic oligonucleotide
tattttgtggaacaaagcatatccccggcg

SEQ ID NO: 453434 - DNA, 30 bp, Artificial Sequence
  Synthetic oligonucleotide
ggggcgggcagggaccattaggggccggcg

SEQ ID NO: 453435 - DNA, 30 bp, Artificial Sequence
  Synthetic oligonucleotide
gatctattatgtataagtgtggctccggcg

SEQ ID NO: 453436 - DNA, 30 bp, Artificial Sequence
  Synthetic oligonucleotide
caggtgcctctattaaactgaccagcggcg

SEQ ID NO: 453437 - DNA, 30 bp, Artificial Sequence
  Synthetic oligonucleotide
gatgctttggctaaagttttctcagcggcg

SEQ ID NO: 453438 - DNA, 30 bp, Artificial Sequence
  Synthetic oligonucleotide
cagactagtcttgctcttagcctagcggcg

SEQ ID NO: 453439 - DNA, 30 bp, Artificial Sequence
  Synthetic oligonucleotide
gactctgaggaatagatttggcgggcggcg

SEQ ID NO: 453440 - DNA, 30 bp, Artificial Sequence
  Synthetic oligonucleotide
gttagctcttacgcgttacccggctcggcg

SEQ ID NO: 453441 - DNA, 30 bp, Artificial Sequence
  Synthetic oligonucleotide
ttatagatatttcgtccgggtttctcggcg

SEQ ID NO: 453442 - DNA, 30 bp, Artificial Sequence
  Synthetic oligonucleotide
ggcgcagacgaatttctattcaattcggcg

SEQ ID NO: 453443 - DNA, 30 bp, Artificial Sequence
  Synthetic oligonucleotide
taccgaacccttggttgtgttaattcggcg

SEQ ID NO: 453444 - DNA, 30 bp, Artificial Sequence
  Synthetic oligonucleotide
cggccttatgtgtctgatgccgcaagggcg

SEQ ID NO: 453445 - DNA, 30 bp, Artificial Sequence
  Synthetic oligonucleotide
acatgcaaagaatcgcagtctgccagggcg

SEQ ID NO: 453446 - DNA, 30 bp, Artificial Sequence
  Synthetic oligonucleotide
aggctagccctggtcggccatactagggcg

SEQ ID NO: 453447 - DNA, 30 bp, Artificial Sequence
  Synthetic oligonucleotide
tgaggttggtagatgaccagcggtagggcg

SEQ ID NO: 453448 - DNA, 30 bp, Artificial Sequence
  Synthetic oligonucleotide
atatgtgtatctgtgccctaatgtagggcg

SEQ ID NO: 453449 - DNA, 30 bp, Artificial Sequence
  Synthetic oligonucleotide
caatcatctacatgggctgcgattagggcg

SEQ ID NO: 453450 - DNA, 30 bp, Artificial Sequence
  Synthetic oligonucleotide
aaatgcgattaatacttatactcacgggcg

SEQ ID NO: 453451 - DNA, 30 bp, Artificial Sequence
  Synthetic oligonucleotide
tagcttaggttctgcgctgttccccgggcg

SEQ ID NO: 453452 - DNA, 30 bp, Artificial Sequence
  Synthetic oligonucleotide
agagctcgcatcacaagatttttccgggcg

SEQ ID NO: 453453 - DNA, 30 bp, Artificial Sequence
  Synthetic oligonucleotide
gtgcacgcaaaggaatgccccaagcgggcg

SEQ ID NO: 453454 - DNA, 30 bp, Artificial Sequence
  Synthetic oligonucleotide
attaggcttgtcgtttaggcgccgcgggcg

SEQ ID NO: 453455 - DNA, 30 bp, Artificial Sequence
  Synthetic oligonucleotide
ctttctactcagcactctactgtaggggcg

SEQ ID NO: 453456 - DNA, 30 bp, Artificial Sequence
  Synthetic oligonucleotide
aaccatccctctgggtaacgacacggggcg

SEQ ID NO: 453457 - DNA, 30 bp, Artificial Sequence
  Synthetic oligonucleotide
ttaagtatacaccggcccagtcacggggcg

SEQ ID NO: 453458 - DNA, 30 bp, Artificial Sequence
  Synthetic oligonucleotide
taactacaaggttcaccccctggcggggcg

SEQ ID NO: 453459 - DNA, 30 bp, Artificial Sequence
  Synthetic oligonucleotide
gtatcccggctatttcagttgtgcggggcg

SEQ ID NO: 453460 - DNA, 30 bp, Artificial Sequence
  Synthetic oligonucleotide
gggcgaattatattattttagttcggggcg

SEQ ID NO: 453461 - DNA, 31 bp, Artificial Sequence
  Synthetic oligonucleotide
gcagacgagccataccgtggtacggggggcg

SEQ ID NO: 453462 - DNA, 30 bp, Artificial Sequence
  Synthetic oligonucleotide
gaatgttcgagtcagcgtacgcggggggcg

SEQ ID NO: 453463 - DNA, 30 bp, Artificial Sequence
  Synthetic oligonucleotide
tagattgatcgcacaaaagtacgatgggcg

SEQ ID NO: 453464 - DNA, 30 bp, Artificial Sequence
  Synthetic oligonucleotide
ttttatatggaccggacgtcagtctgggcg

SEQ ID NO: 453465 - DNA, 30 bp, Artificial Sequence
  Synthetic oligonucleotide
gcatctatgtactggcttgaatagtgggcg

SEQ ID NO: 453466 - DNA, 30 bp, Artificial Sequence
  Synthetic oligonucleotide
acgcaaatcggccgcagtagctggtgggcg

SEQ ID NO: 453467 - DNA, 30 bp, Artificial Sequence
  Synthetic oligonucleotide
tgtcacacattaataatataccgttgggcg

SEQ ID NO: 453468 - DNA, 30 bp, Artificial Sequence
  Synthetic oligonucleotide
cggcttgggttaataagataaatttgggcg

SEQ ID NO: 453469 - DNA, 30 bp, Artificial Sequence
  Synthetic oligonucleotide
tcaatcgcagcaacacaacgcttttgggcg

SEQ ID NO: 453470 - DNA, 30 bp, Artificial Sequence
  Synthetic oligonucleotide
catagccgaaaagtatctttaataatggcg

SEQ ID NO: 453471 - DNA, 30 bp, Artificial Sequence
  Synthetic oligonucleotide
gtagacgtattccggcgcccgttaatggcg

SEQ ID NO: 453472 - DNA, 30 bp, Artificial Sequence
  Synthetic oligonucleotide
accgcgcggtttctgaacttcgggatggcg

SEQ ID NO: 453473 - DNA, 30 bp, Artificial Sequence
  Synthetic oligonucleotide
ttaccatcttttggtgtaccgcaactggcg

SEQ ID NO: 453474 - DNA, 30 bp, Artificial Sequence
  Synthetic oligonucleotide
tccttggacgacatgtattgggaactggcg

SEQ ID NO: 453475 - DNA, 30 bp, Artificial Sequence
  Synthetic oligonucleotide
cttcacgttcaatgcaaggggagcctggcg

SEQ ID NO: 453476 - DNA, 30 bp, Artificial Sequence
  Synthetic oligonucleotide
tttacattgctcaattcttttccgctggcg

SEQ ID NO: 453477 - DNA, 30 bp, Artificial Sequence
  Synthetic oligonucleotide
gcacgtcggcaggcctctatctgcgtggcg

SEQ ID NO: 453478 - DNA, 30 bp, Artificial Sequence
  Synthetic oligonucleotide
gcacctatgtaatgtctggcgccggtggcg

SEQ ID NO: 453479 - DNA, 30 bp, Artificial Sequence
  Synthetic oligonucleotide
tgttggggacttggacgttggagggtggcg

SEQ ID NO: 453480 - DNA, 30 bp, Artificial Sequence
  Synthetic oligonucleotide
aaaaccataggtttactttttagggtggcg

SEQ ID NO: 453481 - DNA, 30 bp, Artificial Sequence
  Synthetic oligonucleotide
tagtattctatacatcacgacatggtggcg

SEQ ID NO: 453482 - DNA, 30 bp, Artificial Sequence
  Synthetic oligonucleotide
gttaactgattctgtaaggtattggtggcg

SEQ ID NO: 453483 - DNA, 30 bp, Artificial Sequence
  Synthetic oligonucleotide
attagtaccgttagtccatgtagtgtggcg

SEQ ID NO: 453484 - DNA, 30 bp, Artificial Sequence
  Synthetic oligonucleotide
taacggaactaggggagagggaaattggcg

SEQ ID NO: 453485 - DNA, 30 bp, Artificial Sequence
  Synthetic oligonucleotide
ataaaaggatcgacttaagtggccttggcg

SEQ ID NO: 453486 - DNA, 30 bp, Artificial Sequence
  Synthetic oligonucleotide
gtgaatagtcattcggctatctttttggcg

SEQ ID NO: 453487 - DNA, 30 bp, Artificial Sequence
  Synthetic oligonucleotide
aagtctccatatagtctaccagaaaatgcg

SEQ ID NO: 453488 - DNA, 30 bp, Artificial Sequence
  Synthetic oligonucleotide
gtatgtctgtatcgcaaggtttcaaatgcg

SEQ ID NO: 453489 - DNA, 30 bp, Artificial Sequence
  Synthetic oligonucleotide
gaggggtctgtgaaccgcccgcacaatgcg

SEQ ID NO: 453490 - DNA, 30 bp, Artificial Sequence
  Synthetic oligonucleotide
aacaaagttgggagttttgcacgcaatgcg

SEQ ID NO: 453491 - DNA, 30 bp, Artificial Sequence
  Synthetic oligonucleotide
aagtcagaaagatcgcacacaggcaatgcg

SEQ ID NO: 453492 - DNA, 30 bp, Artificial Sequence
  Synthetic oligonucleotide
gaatatcgcattatcataattgtcaatgcg

SEQ ID NO: 453493 - DNA, 30 bp, Artificial Sequence
  Synthetic oligonucleotide
ctggaccttcaagtctacgacgagaatgcg

SEQ ID NO: 453494 - DNA, 30 bp, Artificial Sequence
  Synthetic oligonucleotide
gaaaagcagaggaacaactcccggaatgcg

SEQ ID NO: 453495 - DNA, 30 bp, Artificial Sequence
  Synthetic oligonucleotide
gggcagtagttttatcggagctataatgcg

SEQ ID NO: 453496 - DNA, 30 bp, Artificial Sequence
  Synthetic oligonucleotide
aggatgtgcttcgcagttgcgcttaatgcg

SEQ ID NO: 453497 - DNA, 30 bp, Artificial Sequence
  Synthetic oligonucleotide
attcgagcacgtagtcggccaagccatgcg

SEQ ID NO: 453498 - DNA, 30 bp, Artificial Sequence
  Synthetic oligonucleotide
tccatttactcgaggttagtaacgcatgcg

SEQ ID NO: 453499 - DNA, 30 bp, Artificial Sequence
  Synthetic oligonucleotide
ttaccacattcattcaatttatggcatgcg

SEQ ID NO: 453500 - DNA, 30 bp, Artificial Sequence
  Synthetic oligonucleotide
cccccccccctcgcttcgactattcatgcg

SEQ ID NO: 453501 - DNA, 30 bp, Artificial Sequence
  Synthetic oligonucleotide
ggcaggggctgaaggttacaacttcatgcg

SEQ ID NO: 453502 - DNA, 30 bp, Artificial Sequence
  Synthetic oligonucleotide
aattttcatgagcgccagagccaagatgcg

SEQ ID NO: 453503 - DNA, 31 bp, Artificial Sequence
  Synthetic oligonucleotide
caggttttgcgtacaaggtttgttagatgcg

SEQ ID NO: 453504 - DNA, 30 bp, Artificial Sequence
  Synthetic oligonucleotide
aatcagcaaatagcaacaagaaatgatgcg

SEQ ID NO: 453505 - DNA, 30 bp, Artificial Sequence
  Synthetic oligonucleotide
cagcagtagcgattagcatagtatgatgcg

SEQ ID NO: 453506 - DNA, 30 bp, Artificial Sequence
  Synthetic oligonucleotide
gaaggggccacttacgttaagagtgatgcg

SEQ ID NO: 453507 - DNA, 30 bp, Artificial Sequence
  Synthetic oligonucleotide
cggtccttgcggagaggtcgaggtgatgcg

SEQ ID NO: 453508 - DNA, 30 bp, Artificial Sequence
  Synthetic oligonucleotide
tgcaacacaaacgcggagcaatcatatgcg

SEQ ID NO: 453509 - DNA, 30 bp, Artificial Sequence
  Synthetic oligonucleotide
gacatcccacgctaacctatagactatgcg

SEQ ID NO: 453510 - DNA, 30 bp, Artificial Sequence
  Synthetic oligonucleotide
gccatctggacacctaccggcagctatgcg

SEQ ID NO: 453511 - DNA, 30 bp, Artificial Sequence
  Synthetic oligonucleotide
agtgactcgccattttttatagtgtatgcg

SEQ ID NO: 453512 - DNA, 30 bp, Artificial Sequence
  Synthetic oligonucleotide
tggttttcataaaagctttacttgtatgcg

SEQ ID NO: 453513 - DNA, 30 bp, Artificial Sequence
  Synthetic oligonucleotide
gcgaccgtcgttgggtcgtataattatgcg

SEQ ID NO: 453514 - DNA, 30 bp, Artificial Sequence
  Synthetic oligonucleotide
gtaccgcctactacggtaggtaacactgcg

SEQ ID NO: 453515 - DNA, 30 bp, Artificial Sequence
  Synthetic oligonucleotide
aactggcgttgcttacggaaccccactgcg

SEQ ID NO: 453516 - DNA, 30 bp, Artificial Sequence
  Synthetic oligonucleotide
aattatcccatgcgaaaagttggcactgcg

SEQ ID NO: 453517 - DNA, 30 bp, Artificial Sequence
  Synthetic oligonucleotide
ccagtatgacttggcacctgaccgactgcg

SEQ ID NO: 453518 - DNA, 30 bp, Artificial Sequence
  Synthetic oligonucleotide
ttaagaatgcaactcttatatttgactgcg

SEQ ID NO: 453519 - DNA, 30 bp, Artificial Sequence
  Synthetic oligonucleotide
ctgggcgtttagacggcgcttgctcctgcg

SEQ ID NO: 453520 - DNA, 30 bp, Artificial Sequence
  Synthetic oligonucleotide
gccggcataccagatgcggacggtcctgcg

SEQ ID NO: 453521 - DNA, 30 bp, Artificial Sequence
  Synthetic oligonucleotide
ctcacgaaaagcgctgcatacaacgctgcg

SEQ ID NO: 453522 - DNA, 30 bp, Artificial Sequence
  Synthetic oligonucleotide
gctgatatgctatcctgtagacacgctgcg

SEQ ID NO: 453523 - DNA, 30 bp, Artificial Sequence
  Synthetic oligonucleotide
gatataagccaaacaattggaacatctgcg

SEQ ID NO: 453524 - DNA, 30 bp, Artificial Sequence
  Synthetic oligonucleotide
taagtttggtacgtcatacactcaagtgcg

SEQ ID NO: 453525 - DNA, 30 bp, Artificial Sequence
  Synthetic oligonucleotide
acctatttcgcttaccaacgtagcagtgcg

SEQ ID NO: 453526 - DNA, 30 bp, Artificial Sequence
  Synthetic oligonucleotide
ggggcgcccccctgttacctgcgcagtgcg

SEQ ID NO: 453527 - DNA, 30 bp, Artificial Sequence
  Synthetic oligonucleotide
tcggtcaacaaaagggtattcatcagtgcg

SEQ ID NO: 453528 - DNA, 30 bp, Artificial Sequence
  Synthetic oligonucleotide
atgcctagttcttcatatcagcttagtgcg

SEQ ID NO: 453529 - DNA, 30 bp, Artificial Sequence
  Synthetic oligonucleotide
tgaaaatgcttaataagtcttaaacgtgcg

SEQ ID NO: 453530 - DNA, 30 bp, Artificial Sequence
  Synthetic oligonucleotide
aaacggacagttagaccgggaggacgtgcg

SEQ ID NO: 453531 - DNA, 30 bp, Artificial Sequence
  Synthetic oligonucleotide
aacacctctgttgaggtctttggacgtgcg

SEQ ID NO: 453532 - DNA, 30 bp, Artificial Sequence
  Synthetic oligonucleotide
taccaccaagacggtcctagccggcgtgcg

SEQ ID NO: 453533 - DNA, 30 bp, Artificial Sequence
  Synthetic oligonucleotide
aagttacattggcgaatccgctggcgtgcg

SEQ ID NO: 453534 - DNA, 30 bp, Artificial Sequence
  Synthetic oligonucleotide
cacggggacagtccggcttggtccggtgcg

SEQ ID NO: 453535 - DNA, 30 bp, Artificial Sequence
  Synthetic oligonucleotide
tgtacagtcgctttgcgtttggggggtgcg

SEQ ID NO: 453536 - DNA, 30 bp, Artificial Sequence
  Synthetic oligonucleotide
gcaattaggtttaagggggctgtgggtgcg

SEQ ID NO: 453537 - DNA, 30 bp, Artificial Sequence
  Synthetic oligonucleotide
aaccctgcagtaatgcaatagcctggtgcg

SEQ ID NO: 453538 - DNA, 40 bp, Artificial Sequence
  Synthetic oligonucleotide
gcagtggtaggccggggggtcccgccccggttctggtgcg

SEQ ID NO: 453539 - DNA, 30 bp, Artificial Sequence
  Synthetic oligonucleotide
gtggcacgtgcagggtagttgcgtggtgcg

SEQ ID NO: 453540 - DNA, 30 bp, Artificial Sequence
  Synthetic oligonucleotide
ggggccggcactcgtcggggaaaatgtgcg

SEQ ID NO: 453541 - DNA, 30 bp, Artificial Sequence
  Synthetic oligonucleotide
ggccattataaaataattatctcgtgtgcg

SEQ ID NO: 453542 - DNA, 30 bp, Artificial Sequence
  Synthetic oligonucleotide
gttgcccgtgggaagaaaatcagttgtgcg

SEQ ID NO: 453543 - DNA, 30 bp, Artificial Sequence
  Synthetic oligonucleotide
ggtgatcgcaagcaccatatcgtaattgcg

SEQ ID NO: 453544 - DNA, 30 bp, Artificial Sequence
  Synthetic oligonucleotide
attgtctaagagctattgtccttaattgcg

SEQ ID NO: 453545 - DNA, 30 bp, Artificial Sequence
  Synthetic oligonucleotide
tattgccgttaatacgcctgtaggattgcg

SEQ ID NO: 453546 - DNA, 30 bp, Artificial Sequence
  Synthetic oligonucleotide
ccatgtaacccgccaccatgttttattgcg

SEQ ID NO: 453547 - DNA, 30 bp, Artificial Sequence
  Synthetic oligonucleotide
gtccagtgcagtgctcagtccctacttgcg

SEQ ID NO: 453548 - DNA, 30 bp, Artificial Sequence
  Synthetic oligonucleotide
tgatgtgtatgtttactcctctaccttgcg

SEQ ID NO: 453549 - DNA, 30 bp, Artificial Sequence
  Synthetic oligonucleotide
tcagacactgggctctagctcggccttgcg

SEQ ID NO: 453550 - DNA, 30 bp, Artificial Sequence
  Synthetic oligonucleotide
tataggaggtatacagtgaagcagcttgcg

SEQ ID NO: 453551 - DNA, 30 bp, Artificial Sequence
  Synthetic oligonucleotide
tgtaatcatctaggggttccattgcttgcg

SEQ ID NO: 453552 - DNA, 30 bp, Artificial Sequence
  Synthetic oligonucleotide
cagccgatccggggatgggattatcttgcg

SEQ ID NO: 453553 - DNA, 30 bp, Artificial Sequence
  Synthetic oligonucleotide
tgtattgggcagccagcaccaaaagttgcg

SEQ ID NO: 453554 - DNA, 30 bp, Artificial Sequence
  Synthetic oligonucleotide
tccaagagctctgttcaatgagaagttgcg

SEQ ID NO: 453555 - DNA, 30 bp, Artificial Sequence
  Synthetic oligonucleotide
gacagttcgatgcaaaagcatctcgttgcg

SEQ ID NO: 453556 - DNA, 30 bp, Artificial Sequence
  Synthetic oligonucleotide
gattcaacgtataccaggtcagtcgttgcg

SEQ ID NO: 453557 - DNA, 30 bp, Artificial Sequence
  Synthetic oligonucleotide
ctatacgggcagcgggacaccggggttgcg

SEQ ID NO: 453558 - DNA, 30 bp, Artificial Sequence
  Synthetic oligonucleotide
aagtaattgagcggcgttgatgctgttgcg

SEQ ID NO: 453559 - DNA, 30 bp, Artificial Sequence
  Synthetic oligonucleotide
ggtgccaaaaaggcgcatctttttgttgcg

SEQ ID NO: 453560 - DNA, 30 bp, Artificial Sequence
  Synthetic oligonucleotide
atcgtatccaaagcggcgccggcatttgcg

SEQ ID NO: 453561 - DNA, 30 bp, Artificial Sequence
  Synthetic oligonucleotide
cgaagtgcaattctagttgcgctatttgcg

SEQ ID NO: 453562 - DNA, 30 bp, Artificial Sequence
  Synthetic oligonucleotide
gaatcataggatcttctctgctactttgcg

SEQ ID NO: 453563 - DNA, 30 bp, Artificial Sequence
  Synthetic oligonucleotide
ggaactattacctactgtatatcgtttgcg

SEQ ID NO: 453564 - DNA, 30 bp, Artificial Sequence
  Synthetic oligonucleotide
gtttgcaggtagaacctgaatatttttgcg

SEQ ID NO: 453565 - DNA, 30 bp, Artificial Sequence
  Synthetic oligonucleotide
gaatttggcaaaatcatacgttaaaaatcg

SEQ ID NO: 453566 - DNA, 30 bp, Artificial Sequence
  Synthetic oligonucleotide
cttccctgcgtgtaatcaacacacaaatcg

SEQ ID NO: 453567 - DNA, 30 bp, Artificial Sequence
  Synthetic oligonucleotide
aaccaattctcattttgtgggtgcaaatcg

SEQ ID NO: 453568 - DNA, 30 bp, Artificial Sequence
  Synthetic oligonucleotide
cctgtcgtacaccatgcacgatagaaatcg

SEQ ID NO: 453569 - DNA, 30 bp, Artificial Sequence
  Synthetic oligonucleotide
ctatcaggtagttgtttcggtttgaaatcg

SEQ ID NO: 453570 - DNA, 30 bp, Artificial Sequence
  Synthetic oligonucleotide
cacgaactccatcggaaggagtcacaatcg

SEQ ID NO: 453571 - DNA, 30 bp, Artificial Sequence
  Synthetic oligonucleotide
tttcgtcgaaaagcctaggataagcaatcg

SEQ ID NO: 453572 - DNA, 30 bp, Artificial Sequence
  Synthetic oligonucleotide
ctcgcccgattgaagaaagcttgtcaatcg

SEQ ID NO: 453573 - DNA, 30 bp, Artificial Sequence
  Synthetic oligonucleotide
cccttaacagccaaaactacttttcaatcg

SEQ ID NO: 453574 - DNA, 30 bp, Artificial Sequence
  Synthetic oligonucleotide
aatgctggtctgcggccaggcatagaatcg

SEQ ID NO: 453575 - DNA, 30 bp, Artificial Sequence
  Synthetic oligonucleotide
taacattggacgctgtagtttttcgaatcg

SEQ ID NO: 453576 - DNA, 30 bp, Artificial Sequence
  Synthetic oligonucleotide
agggtagtcgtaaatcaaaaatcggaatcg

SEQ ID NO: 453577 - DNA, 30 bp, Artificial Sequence
  Synthetic oligonucleotide
tttcacggacgcaacagttaacctgaatcg

SEQ ID NO: 453578 - DNA, 30 bp, Artificial Sequence
  Synthetic oligonucleotide
cacgcccattatttctacaacgctgaatcg

SEQ ID NO: 453579 - DNA, 30 bp, Artificial Sequence
  Synthetic oligonucleotide
ggtagcagctcgtaaacatatattgaatcg

SEQ ID NO: 453580 - DNA, 30 bp, Artificial Sequence
  Synthetic oligonucleotide
gtgctcatgcggcgcaatccgcgataatcg

SEQ ID NO: 453581 - DNA, 27 bp, Artificial Sequence
  Synthetic oligonucleotide
ttttgggtggtgagtcgtgtataatcg

SEQ ID NO: 453582 - DNA, 30 bp, Artificial Sequence
  Synthetic oligonucleotide
aatacttagcatactctgtggacctaatcg

SEQ ID NO: 453583 - DNA, 30 bp, Artificial Sequence
  Synthetic oligonucleotide
ctccaaattttgtcttgtctgatgtaatcg

SEQ ID NO: 453584 - DNA, 30 bp, Artificial Sequence
  Synthetic oligonucleotide
aattgcaatcgcgcggtaacagacacatcg

SEQ ID NO: 453585 - DNA, 30 bp, Artificial Sequence
  Synthetic oligonucleotide
ataaacaccgattttattaattgcacatcg

SEQ ID NO: 453586 - DNA, 30 bp, Artificial Sequence
  Synthetic oligonucleotide
caaaatttttctcgggacccggggacatcg

SEQ ID NO: 453587 - DNA, 30 bp, Artificial Sequence
  Synthetic oligonucleotide
acggcagcggtgggattagttcatacatcg

SEQ ID NO: 453588 - DNA, 30 bp, Artificial Sequence
  Synthetic oligonucleotide
atctgtgtcctgttgaggtagtttacatcg

SEQ ID NO: 453589 - DNA, 30 bp, Artificial Sequence
  Synthetic oligonucleotide
gaccaagcacgattctgatcctcaccatcg

SEQ ID NO: 453590 - DNA, 30 bp, Artificial Sequence
  Synthetic oligonucleotide
atatttcatgtggtgcttttgactccatcg

SEQ ID NO: 453591 - DNA, 30 bp, Artificial Sequence
  Synthetic oligonucleotide
caacataaattcatcaaaaggcgtccatcg

SEQ ID NO: 453592 - DNA, 30 bp, Artificial Sequence
  Synthetic oligonucleotide
agaatccactctagggggtaccacgcatcg

SEQ ID NO: 453593 - DNA, 30 bp, Artificial Sequence
  Synthetic oligonucleotide
ttaggaaagtgtgaggatctaaccgcatcg

SEQ ID NO: 453594 - DNA, 30 bp, Artificial Sequence
  Synthetic oligonucleotide
agtccaatgtcatggttgagtacggcatcg

SEQ ID NO: 453595 - DNA, 30 bp, Artificial Sequence
  Synthetic oligonucleotide
actccacgaagtggaaggtattatgcatcg

SEQ ID NO: 453596 - DNA, 30 bp, Artificial Sequence
  Synthetic oligonucleotide
gaacaagtacgataccctggatgtgcatcg

SEQ ID NO: 453597 - DNA, 30 bp, Artificial Sequence
  Synthetic oligonucleotide
catgcgcgcaattggtgttacaaatcatcg

SEQ ID NO: 453598 - DNA, 30 bp, Artificial Sequence
  Synthetic oligonucleotide
cgcatccgcccgacgaagtatcgatcatcg

SEQ ID NO: 453599 - DNA, 30 bp, Artificial Sequence
  Synthetic oligonucleotide
ttcgtttagtagggagtacgggactcatcg

SEQ ID NO: 453600 - DNA, 30 bp, Artificial Sequence
  Synthetic oligonucleotide
ctttcctctcacattaatacatattcatcg

SEQ ID NO: 453601 - DNA, 30 bp, Artificial Sequence
  Synthetic oligonucleotide
gcttctcctacgttataccggacaagatcg

SEQ ID NO: 453602 - DNA, 30 bp, Artificial Sequence
  Synthetic oligonucleotide
aaacaattcatcgcttgatttggaagatcg

SEQ ID NO: 453603 - DNA, 30 bp, Artificial Sequence
  Synthetic oligonucleotide
tgcaagtatctttcggggtgggtaagatcg

SEQ ID NO: 453604 - DNA, 30 bp, Artificial Sequence
  Synthetic oligonucleotide
gaccacataggcattggacgcaccagatcg

SEQ ID NO: 453605 - DNA, 30 bp, Artificial Sequence
  Synthetic oligonucleotide
taccaacttccggccacaggcctcagatcg

SEQ ID NO: 453606 - DNA, 30 bp, Artificial Sequence
  Synthetic oligonucleotide
aaggttttctctaaatttcgggtcagatcg

SEQ ID NO: 453607 - DNA, 30 bp, Artificial Sequence
  Synthetic oligonucleotide
gacgcattaccgtacttacataagagatcg

SEQ ID NO: 453608 - DNA, 30 bp, Artificial Sequence
  Synthetic oligonucleotide
gaccgcattgacgctcaacccctgagatcg

SEQ ID NO: 453609 - DNA, 30 bp, Artificial Sequence
  Synthetic oligonucleotide
gtttcggcccgataagagaggaaacgatcg

SEQ ID NO: 453610 - DNA, 30 bp, Artificial Sequence
  Synthetic oligonucleotide
gtatccgacctacgtattgacgtacgatcg

SEQ ID NO: 453611 - DNA, 30 bp, Artificial Sequence
  Synthetic oligonucleotide
cgacaggcagggcttatgtgcacccgatcg

SEQ ID NO: 453612 - DNA, 30 bp, Artificial Sequence
  Synthetic oligonucleotide
cttcgcacttcttctaaccctgcgcgatcg

SEQ ID NO: 453613 - DNA, 30 bp, Artificial Sequence
  Synthetic oligonucleotide
ttttgccgtacgaggatggtaatgcgatcg

SEQ ID NO: 453614 - DNA, 31 bp, Artificial Sequence
  Synthetic oligonucleotide
tccacgatgcaagcggtggcaactaggatcg

SEQ ID NO: 453615 - DNA, 30 bp, Artificial Sequence
  Synthetic oligonucleotide
ttctagtcttaacacagcgttggcggatcg

SEQ ID NO: 453616 - DNA, 30 bp, Artificial Sequence
  Synthetic oligonucleotide
aaatcaaatggtaccccgagatgcggatcg

SEQ ID NO: 453617 - DNA, 30 bp, Artificial Sequence
  Synthetic oligonucleotide
ttttccgaatggttcaactgcctgggatcg

SEQ ID NO: 453618 - DNA, 30 bp, Artificial Sequence
  Synthetic oligonucleotide
acagttcgattggagtcaagtttgggatcg

SEQ ID NO: 453619 - DNA, 30 bp, Artificial Sequence
  Synthetic oligonucleotide
tcaaacatctgggtggaagaccatggatcg

SEQ ID NO: 453620 - DNA, 30 bp, Artificial Sequence
  Synthetic oligonucleotide
gcgcagatccgagccgaagactgtggatcg

SEQ ID NO: 453621 - DNA, 30 bp, Artificial Sequence
  Synthetic oligonucleotide
tcattaagatcggttgacggcattggatcg

SEQ ID NO: 453622 - DNA, 30 bp, Artificial Sequence
  Synthetic oligonucleotide
ttgtaggctacgattccatcatttggatcg

SEQ ID NO: 453623 - DNA, 30 bp, Artificial Sequence
  Synthetic oligonucleotide
tattagacagcgtaaactgtgtgatgatcg

SEQ ID NO: 453624 - DNA, 30 bp, Artificial Sequence
  Synthetic oligonucleotide
catagtctggtgacaggctgtggctgatcg

SEQ ID NO: 453625 - DNA, 30 bp, Artificial Sequence
  Synthetic oligonucleotide
aagctggttttttggaacgctaagtgatcg

SEQ ID NO: 453626 - DNA, 30 bp, Artificial Sequence
  Synthetic oligonucleotide
taaggaccactggtaaaatgggagtgatcg

SEQ ID NO: 453627 - DNA, 30 bp, Artificial Sequence
  Synthetic oligonucleotide
ctcattctttgtggcgaccgtggcatatcg

SEQ ID NO: 453628 - DNA, 30 bp, Artificial Sequence
  Synthetic oligonucleotide
ggctagttgcgcattgacgaaatcatatcg

SEQ ID NO: 453629 - DNA, 30 bp, Artificial Sequence
  Synthetic oligonucleotide
ccgtttgcaagcacatggctatatatatcg

SEQ ID NO: 453630 - DNA, 30 bp, Artificial Sequence
  Synthetic oligonucleotide
aaccgcccacaccgcatttaatgtatatcg

SEQ ID NO: 453631 - DNA, 30 bp, Artificial Sequence
  Synthetic oligonucleotide
tcggcttgaaaccgaaagatctcgctatcg

SEQ ID NO: 453632 - DNA, 30 bp, Artificial Sequence
  Synthetic oligonucleotide
ggattgacccgggaaaaccggctgctatcg

SEQ ID NO: 453633 - DNA, 30 bp, Artificial Sequence
  Synthetic oligonucleotide
gcacgtacctctcaattgaggagagtatcg

SEQ ID NO: 453634 - DNA, 30 bp, Artificial Sequence
  Synthetic oligonucleotide
actctgaaaactccttaagggttagtatcg

SEQ ID NO: 453635 - DNA, 30 bp, Artificial Sequence
  Synthetic oligonucleotide
ggcacactcgcagggtctttcgacgtatcg

SEQ ID NO: 453636 - DNA, 30 bp, Artificial Sequence
  Synthetic oligonucleotide
gcgtcagtctaacttgcacggaccgtatcg

SEQ ID NO: 453637 - DNA, 30 bp, Artificial Sequence
  Synthetic oligonucleotide
cggcgtctattgatttaggtcagggtatcg

SEQ ID NO: 453638 - DNA, 30 bp, Artificial Sequence
  Synthetic oligonucleotide
tattattatccagggtccgggggggtatcg

SEQ ID NO: 453639 - DNA, 30 bp, Artificial Sequence
  Synthetic oligonucleotide
cggaagcggtaggctagttatcgattatcg

SEQ ID NO: 453640 - DNA, 30 bp, Artificial Sequence
  Synthetic oligonucleotide
agctacgtcataaattagaacggattatcg

SEQ ID NO: 453641 - DNA, 30 bp, Artificial Sequence
  Synthetic oligonucleotide
cgggaccctcgatagtcacctcagttatcg

SEQ ID NO: 453642 - DNA, 30 bp, Artificial Sequence
  Synthetic oligonucleotide
tttacagtagtattagagtttctgttatcg

SEQ ID NO: 453643 - DNA, 30 bp, Artificial Sequence
  Synthetic oligonucleotide
gaaaatcgattcccgcagaaatatttatcg

SEQ ID NO: 453644 - DNA, 30 bp, Artificial Sequence
  Synthetic oligonucleotide
aacttgtaatgtcgagcatctactttatcg

SEQ ID NO: 453645 - DNA, 30 bp, Artificial Sequence
  Synthetic oligonucleotide
gaaagagattgtcatgtcgctcgaaactcg

SEQ ID NO: 453646 - DNA, 30 bp, Artificial Sequence
  Synthetic oligonucleotide
gctaacggcaggcccatgcaggctaactcg

SEQ ID NO: 453647 - DNA, 30 bp, Artificial Sequence
  Synthetic oligonucleotide
gcgaggaattgcatcgtcccagtccactcg

SEQ ID NO: 453648 - DNA, 30 bp, Artificial Sequence
  Synthetic oligonucleotide
tcgcatcgccctttggcctagcctcactcg

SEQ ID NO: 453649 - DNA, 30 bp, Artificial Sequence
  Synthetic oligonucleotide
tcagcgtcgttctgttgccgggctcactcg

SEQ ID NO: 453650 - DNA, 30 bp, Artificial Sequence
  Synthetic oligonucleotide
acacacagctttgttgtaaagggagactcg

SEQ ID NO: 453651 - DNA, 30 bp, Artificial Sequence
  Synthetic oligonucleotide
gaaattttcactcgtgggacactagactcg

SEQ ID NO: 453652 - DNA, 30 bp, Artificial Sequence
  Synthetic oligonucleotide
ccggttcctaaaggattgttggacgactcg

SEQ ID NO: 453653 - DNA, 30 bp, Artificial Sequence
  Synthetic oligonucleotide
tgatgatatagagcgcgtggtgccgactcg

SEQ ID NO: 453654 - DNA, 30 bp, Artificial Sequence
  Synthetic oligonucleotide
cgcccgtaaaccgagtggataaaggactcg

SEQ ID NO: 453655 - DNA, 30 bp, Artificial Sequence
  Synthetic oligonucleotide
gcaactccaatagtaggccagggggactcg

SEQ ID NO: 453656 - DNA, 30 bp, Artificial Sequence
  Synthetic oligonucleotide
ctggccaaattagtcatccaactggactcg

SEQ ID NO: 453657 - DNA, 30 bp, Artificial Sequence
  Synthetic oligonucleotide
aaaaatgcagatgtagatagatttgactcg

SEQ ID NO: 453658 - DNA, 30 bp, Artificial Sequence
  Synthetic oligonucleotide
ggcagctatcctatcgtcacaggatactcg

SEQ ID NO: 453659 - DNA, 30 bp, Artificial Sequence
  Synthetic oligonucleotide
actgcgccagattcctgtagcgcctactcg

SEQ ID NO: 453660 - DNA, 30 bp, Artificial Sequence
  Synthetic oligonucleotide
ctccagttgagaaaaatagggatctactcg

SEQ ID NO: 453661 - DNA, 30 bp, Artificial Sequence
  Synthetic oligonucleotide
gagtggttagtctaaggtcgagaaacctcg

SEQ ID NO: 453662 - DNA, 30 bp, Artificial Sequence
  Synthetic oligonucleotide
aaccttaggctaccggtattattaacctcg

SEQ ID NO: 453663 - DNA, 30 bp, Artificial Sequence
  Synthetic oligonucleotide
gacaggatttttgaagttaacgccacctcg

SEQ ID NO: 453664 - DNA, 30 bp, Artificial Sequence
  Synthetic oligonucleotide
ggggggtttatgggacgggttagtacctcg

SEQ ID NO: 453665 - DNA, 30 bp, Artificial Sequence
  Synthetic oligonucleotide
gaagtcctcatttctcggaccattacctcg

SEQ ID NO: 453666 - DNA, 30 bp, Artificial Sequence
  Synthetic oligonucleotide
gttagcgcagttggccaggctgtcccctcg

SEQ ID NO: 453667 - DNA, 30 bp, Artificial Sequence
  Synthetic oligonucleotide
tatttttgtccgattttagatcagccctcg

SEQ ID NO: 453668 - DNA, 30 bp, Artificial Sequence
  Synthetic oligonucleotide
ccatccgatgaggcttcaggccgtccctcg

SEQ ID NO: 453669 - DNA, 30 bp, Artificial Sequence
  Synthetic oligonucleotide
cagataccgctggccgagccagcagcctcg

SEQ ID NO: 453670 - DNA, 30 bp, Artificial Sequence
  Synthetic oligonucleotide
ggatgaggtatcggtccgcgcggagcctcg

SEQ ID NO: 453671 - DNA, 30 bp, Artificial Sequence
  Synthetic oligonucleotide
aaattaggcgacgactgatatggagcctcg

SEQ ID NO: 453672 - DNA, 30 bp, Artificial Sequence
  Synthetic oligonucleotide
cttgatttggaggcgcaagcacccgcctcg

SEQ ID NO: 453673 - DNA, 30 bp, Artificial Sequence
  Synthetic oligonucleotide
ttcggagtaggttgcctcggccaggcctcg

SEQ ID NO: 453674 - DNA, 30 bp, Artificial Sequence
  Synthetic oligonucleotide
gacctcgtttcgccagtacgtgagtcctcg

SEQ ID NO: 453675 - DNA, 30 bp, Artificial Sequence
  Synthetic oligonucleotide
gtatacacagtgtctttatagatgtcctcg

SEQ ID NO: 453676 - DNA, 30 bp, Artificial Sequence
  Synthetic oligonucleotide
gcccgtaacttacaggcaaagcacagctcg

SEQ ID NO: 453677 - DNA, 30 bp, Artificial Sequence
  Synthetic oligonucleotide
tctacaagctgatagttaatttacagctcg

SEQ ID NO: 453678 - DNA, 30 bp, Artificial Sequence
  Synthetic oligonucleotide
atggcaattggtttgacgccttgcagctcg

SEQ ID NO: 453679 - DNA, 30 bp, Artificial Sequence
  Synthetic oligonucleotide
ttattgcgagatatgaaggaactcagctcg

SEQ ID NO: 453680 - DNA, 30 bp, Artificial Sequence
  Synthetic oligonucleotide
tgtacgcaccacctaagttcactcagctcg

SEQ ID NO: 453681 - DNA, 30 bp, Artificial Sequence
  Synthetic oligonucleotide
atgcgattctgcaaacgtaagattagctcg

SEQ ID NO: 453682 - DNA, 30 bp, Artificial Sequence
  Synthetic oligonucleotide
ttagtaactgagcgctacttcaaacgctcg

SEQ ID NO: 453683 - DNA, 30 bp, Artificial Sequence
  Synthetic oligonucleotide
tccgtatgagggggcagattgtgccgctcg

SEQ ID NO: 453684 - DNA, 30 bp, Artificial Sequence
  Synthetic oligonucleotide
tcaagtgtgcttccggcacctatgcgctcg

SEQ ID NO: 453685 - DNA, 30 bp, Artificial Sequence
  Synthetic oligonucleotide
ccagaacacagttgacgcccagtgcgctcg

SEQ ID NO: 453686 - DNA, 30 bp, Artificial Sequence
  Synthetic oligonucleotide
tacgcggtttgcggcagctataatcgctcg

SEQ ID NO: 453687 - DNA, 30 bp, Artificial Sequence
  Synthetic oligonucleotide
tattcaaggaaggacgcgcatataggctcg

SEQ ID NO: 453688 - DNA, 30 bp, Artificial Sequence
  Synthetic oligonucleotide
tcgtaaatgataatggatctacccggctcg

SEQ ID NO: 453689 - DNA, 30 bp, Artificial Sequence
  Synthetic oligonucleotide
gggagcataataaatgtgacacgcggctcg

SEQ ID NO: 453690 - DNA, 30 bp, Artificial Sequence
  Synthetic oligonucleotide
tttactgttttactcggccgattcggctcg

SEQ ID NO: 453691 - DNA, 30 bp, Artificial Sequence
  Synthetic oligonucleotide
gagtacgaagatctgccctattagggctcg

SEQ ID NO: 453692 - DNA, 30 bp, Artificial Sequence
  Synthetic oligonucleotide
acttatggggggctacgttaggcgggctcg

SEQ ID NO: 453693 - DNA, 30 bp, Artificial Sequence
  Synthetic oligonucleotide
gtgataaccgttccggaccagcggggctcg

SEQ ID NO: 453694 - DNA, 30 bp, Artificial Sequence
  Synthetic oligonucleotide
gaaaatgtgacgtagttcgggtgatgctcg

SEQ ID NO: 453695 - DNA, 30 bp, Artificial Sequence
  Synthetic oligonucleotide
tgacgaaattttttcccacgcatatgctcg

SEQ ID NO: 453696 - DNA, 30 bp, Artificial Sequence
  Synthetic oligonucleotide
atttccttaccggcatagccgacttgctcg

SEQ ID NO: 453697 - DNA, 30 bp, Artificial Sequence
  Synthetic oligonucleotide
acataattagttgatgatacacgaatctcg

SEQ ID NO: 453698 - DNA, 30 bp, Artificial Sequence
  Synthetic oligonucleotide
cccgagacgtgatgatttctgttcatctcg

SEQ ID NO: 453699 - DNA, 30 bp, Artificial Sequence
  Synthetic oligonucleotide
tctaggcagacgagcagccacgcgatctcg

SEQ ID NO: 453700 - DNA, 30 bp, Artificial Sequence
  Synthetic oligonucleotide
tgagctagtcagctcgtaagatagctctcg

SEQ ID NO: 453701 - DNA, 30 bp, Artificial Sequence
  Synthetic oligonucleotide
ccagaacacagttgacgcccagtgctctcg

SEQ ID NO: 453702 - DNA, 30 bp, Artificial Sequence
  Synthetic oligonucleotide
tgagctctgcgcagcgagctaaaagtctcg

SEQ ID NO: 453703 - DNA, 30 bp, Artificial Sequence
  Synthetic oligonucleotide
ccagcacgtgtttctgggaggccggtctcg

SEQ ID NO: 453704 - DNA, 30 bp, Artificial Sequence
  Synthetic oligonucleotide
tgccacggttattcagcattctgtgtctcg

SEQ ID NO: 453705 - DNA, 29 bp, Artificial Sequence
  Synthetic oligonucleotide
aaaacttgacgtggattatcgaattctcg

SEQ ID NO: 453706 - DNA, 30 bp, Artificial Sequence
  Synthetic oligonucleotide
tctctagttgcatatattggggcgttctcg

SEQ ID NO: 453707 - DNA, 30 bp, Artificial Sequence
  Synthetic oligonucleotide
gcacgataaaagtatcattctgttttctcg

SEQ ID NO: 453708 - DNA, 30 bp, Artificial Sequence
  Synthetic oligonucleotide
gaaacgactgtttctgtggttgaaaagtcg

SEQ ID NO: 453709 - DNA, 30 bp, Artificial Sequence
  Synthetic oligonucleotide
gcactaaagttccaacgcgtgcgaaagtcg

SEQ ID NO: 453710 - DNA, 30 bp, Artificial Sequence
  Synthetic oligonucleotide
atatgggtccgtcagtggtggcaacagtcg

SEQ ID NO: 453711 - DNA, 30 bp, Artificial Sequence
  Synthetic oligonucleotide
gcagcatcgttctcagacattgcgcagtcg

SEQ ID NO: 453712 - DNA, 30 bp, Artificial Sequence
  Synthetic oligonucleotide
gtcctgcatctatactgtatgtggcagtcg

SEQ ID NO: 453713 - DNA, 30 bp, Artificial Sequence
  Synthetic oligonucleotide
gctcacagtaatgaacttctgggagagtcg

SEQ ID NO: 453714 - DNA, 30 bp, Artificial Sequence
  Synthetic oligonucleotide
ggtgcccccggaagctcgttatgcgagtcg

SEQ ID NO: 453715 - DNA, 30 bp, Artificial Sequence
  Synthetic oligonucleotide
gcgcgacttgtaggccagaaaatcgagtcg

SEQ ID NO: 453716 - DNA, 30 bp, Artificial Sequence
  Synthetic oligonucleotide
tagctccatgaccggatacaattcgagtcg

SEQ ID NO: 453717 - DNA, 30 bp, Artificial Sequence
  Synthetic oligonucleotide
atggatccttcgacagctcaggatgagtcg

SEQ ID NO: 453718 - DNA, 30 bp, Artificial Sequence
  Synthetic oligonucleotide
gagtctcatgtcacttttggaaagtagtcg

SEQ ID NO: 453719 - DNA, 30 bp, Artificial Sequence
  Synthetic oligonucleotide
attttgttacgaagtggttcagaaacgtcg

SEQ ID NO: 453720 - DNA, 30 bp, Artificial Sequence
  Synthetic oligonucleotide
actccggcagagcatcgcacgtaaacgtcg

SEQ ID NO: 453721 - DNA, 30 bp, Artificial Sequence
  Synthetic oligonucleotide
cacgggacttactctgacaaagggacgtcg

SEQ ID NO: 453722 - DNA, 31 bp, Artificial Sequence
  Synthetic oligonucleotide
gagcgggccagctaccaggttttatacgtcg

SEQ ID NO: 453723 - DNA, 30 bp, Artificial Sequence
  Synthetic oligonucleotide
attttttggcagaaggcagctggaccgtcg

SEQ ID NO: 453724 - DNA, 30 bp, Artificial Sequence
  Synthetic oligonucleotide
ggcacgtcttgcggcacccatgtcccgtcg

SEQ ID NO: 453725 - DNA, 30 bp, Artificial Sequence
  Synthetic oligonucleotide
tacaagctgcgctaaccattgccagcgtcg

SEQ ID NO: 453726 - DNA, 30 bp, Artificial Sequence
  Synthetic oligonucleotide
gactatctgttcgaggcagaagtctcgtcg

SEQ ID NO: 453727 - DNA, 30 bp, Artificial Sequence
  Synthetic oligonucleotide
atacatcccatgatcggagtttaaaggtcg

SEQ ID NO: 453728 - DNA, 30 bp, Artificial Sequence
  Synthetic oligonucleotide
ttcctacccgtagagtatacgctaaggtcg

SEQ ID NO: 453729 - DNA, 30 bp, Artificial Sequence
  Synthetic oligonucleotide
ggcccgcatacgataccaacatgtaggtcg

SEQ ID NO: 453730 - DNA, 30 bp, Artificial Sequence
  Synthetic oligonucleotide
atatacctgacggcgaaacttattaggtcg

SEQ ID NO: 453731 - DNA, 30 bp, Artificial Sequence
  Synthetic oligonucleotide
gcacagatccacgccctgggcatacggtcg

SEQ ID NO: 453732 - DNA, 30 bp, Artificial Sequence
  Synthetic oligonucleotide
agcctggatcgattctacagggaagggtcg

SEQ ID NO: 453733 - DNA, 30 bp, Artificial Sequence
  Synthetic oligonucleotide
tcaaaaggcagcggtgtacagtatgggtcg

SEQ ID NO: 453734 - DNA, 30 bp, Artificial Sequence
  Synthetic oligonucleotide
ggttcctgcatggtggaggattctgggtcg

SEQ ID NO: 453735 - DNA, 30 bp, Artificial Sequence
  Synthetic oligonucleotide
tgccgacgacccaggtgtatataatggtcg

SEQ ID NO: 453736 - DNA, 30 bp, Artificial Sequence
  Synthetic oligonucleotide
ttaccagtagggtcagcttttaactggtcg

SEQ ID NO: 453737 - DNA, 30 bp, Artificial Sequence
  Synthetic oligonucleotide
gtatgtgtatcacgaacactttagtggtcg

SEQ ID NO: 453738 - DNA, 30 bp, Artificial Sequence
  Synthetic oligonucleotide
aatggacatttagtggcggacgcaatgtcg

SEQ ID NO: 453739 - DNA, 30 bp, Artificial Sequence
  Synthetic oligonucleotide
ctatttcacgtcatattgtagttactgtcg

SEQ ID NO: 453740 - DNA, 30 bp, Artificial Sequence
  Synthetic oligonucleotide
ttgtcgaagggcacgcgacgtcaagtgtcg

SEQ ID NO: 453741 - DNA, 30 bp, Artificial Sequence
  Synthetic oligonucleotide
tagcctgcagtcacctcacatacggtgtcg

SEQ ID NO: 453742 - DNA, 30 bp, Artificial Sequence
  Synthetic oligonucleotide
agcatgtgcagcaggactgcgatggtgtcg

SEQ ID NO: 453743 - DNA, 30 bp, Artificial Sequence
  Synthetic oligonucleotide
agacccccatcggtggtctagtgtgtgtcg

SEQ ID NO: 453744 - DNA, 30 bp, Artificial Sequence
  Synthetic oligonucleotide
caacggttcacgctgctgatgattgtgtcg

SEQ ID NO: 453745 - DNA, 30 bp, Artificial Sequence
  Synthetic oligonucleotide
tttcgagggaagtctaccactctattgtcg

SEQ ID NO: 453746 - DNA, 30 bp, Artificial Sequence
  Synthetic oligonucleotide
taaaataatgaaggactttttttcttgtcg

SEQ ID NO: 453747 - DNA, 30 bp, Artificial Sequence
  Synthetic oligonucleotide
tatgcctaggcaaggagtatggctttgtcg

SEQ ID NO: 453748 - DNA, 30 bp, Artificial Sequence
  Synthetic oligonucleotide
attaacttatgggccccgtcaataaattcg

SEQ ID NO: 453749 - DNA, 30 bp, Artificial Sequence
  Synthetic oligonucleotide
attcacgggacaaatcttcttttaaattcg

SEQ ID NO: 453750 - DNA, 30 bp, Artificial Sequence
  Synthetic oligonucleotide
tgtcagctttccggacaaactgccaattcg

SEQ ID NO: 453751 - DNA, 30 bp, Artificial Sequence
  Synthetic oligonucleotide
cagttcgagcgtagcttcgaagtcaattcg

SEQ ID NO: 453752 - DNA, 30 bp, Artificial Sequence
  Synthetic oligonucleotide
gactgacgaccccgtgtccgcttcaattcg

SEQ ID NO: 453753 - DNA, 30 bp, Artificial Sequence
  Synthetic oligonucleotide
cctcacacaaggttctggtcgaggaattcg

SEQ ID NO: 453754 - DNA, 30 bp, Artificial Sequence
  Synthetic oligonucleotide
tccacatgttcttaaaaggcagtgaattcg

SEQ ID NO: 453755 - DNA, 31 bp, Artificial Sequence
  Synthetic oligonucleotide
gctttgtctgagtgttgcttgtgtgaattcg

SEQ ID NO: 453756 - DNA, 30 bp, Artificial Sequence
  Synthetic oligonucleotide
gctctgtccattattttcaatggtaattcg

SEQ ID NO: 453757 - DNA, 30 bp, Artificial Sequence
  Synthetic oligonucleotide
tgaatgtgcgcagtcgagagctcacattcg

SEQ ID NO: 453758 - DNA, 30 bp, Artificial Sequence
  Synthetic oligonucleotide
cgcgtgtttggagcgaattatacccattcg

SEQ ID NO: 453759 - DNA, 30 bp, Artificial Sequence
  Synthetic oligonucleotide
gcagacctgtatatttggcacggccattcg

SEQ ID NO: 453760 - DNA, 30 bp, Artificial Sequence
  Synthetic oligonucleotide
tatttcattaatccagttttccgagattcg

SEQ ID NO: 453761 - DNA, 30 bp, Artificial Sequence
  Synthetic oligonucleotide
gtaatccttccgttcgggccacacgattcg

SEQ ID NO: 453762 - DNA, 30 bp, Artificial Sequence
  Synthetic oligonucleotide
tttaatcctcccaggaggaaggacgattcg

SEQ ID NO: 453763 - DNA, 30 bp, Artificial Sequence
  Synthetic oligonucleotide
attgtgatcggaggtatagacgaggattcg

SEQ ID NO: 453764 - DNA, 30 bp, Artificial Sequence
  Synthetic oligonucleotide
catgcgaaagaccgatacgtagtatattcg

SEQ ID NO: 453765 - DNA, 30 bp, Artificial Sequence
  Synthetic oligonucleotide
ccaccggagcaccgaaagaccccctattcg

SEQ ID NO: 453766 - DNA, 30 bp, Artificial Sequence
  Synthetic oligonucleotide
gtcgccgcgttgtctagctagaagtattcg

SEQ ID NO: 453767 - DNA, 30 bp, Artificial Sequence
  Synthetic oligonucleotide
cggtttaatatacgctccaaaccgtattcg

SEQ ID NO: 453768 - DNA, 30 bp, Artificial Sequence
  Synthetic oligonucleotide
ccctgcagtgacgcctatatatcgtattcg

SEQ ID NO: 453769 - DNA, 30 bp, Artificial Sequence
  Synthetic oligonucleotide
taaatggttcaggtgcctattttgtattcg

SEQ ID NO: 453770 - DNA, 30 bp, Artificial Sequence
  Synthetic oligonucleotide
ttaagcgcactctcgcacactggttattcg

SEQ ID NO: 453771 - DNA, 30 bp, Artificial Sequence
  Synthetic oligonucleotide
ttttgctagacaaagacgggtcgaacttcg

SEQ ID NO: 453772 - DNA, 30 bp, Artificial Sequence
  Synthetic oligonucleotide
tatataaagacccacaccaaagacacttcg

SEQ ID NO: 453773 - DNA, 30 bp, Artificial Sequence
  Synthetic oligonucleotide
gagtgcaggaagtaaacggagaacccttcg

SEQ ID NO: 453774 - DNA, 30 bp, Artificial Sequence
  Synthetic oligonucleotide
tagtcgaggtctcacgaaggcgccccttcg

SEQ ID NO: 453775 - DNA, 30 bp, Artificial Sequence
  Synthetic oligonucleotide
ttcagacactgcgggggcgtgggcccttcg

SEQ ID NO: 453776 - DNA, 30 bp, Artificial Sequence
  Synthetic oligonucleotide
tcagtcggttaggcatataaaaatccttcg

SEQ ID NO: 453777 - DNA, 30 bp, Artificial Sequence
  Synthetic oligonucleotide
taaatcttatggcttctacagactccttcg

SEQ ID NO: 453778 - DNA, 30 bp, Artificial Sequence
  Synthetic oligonucleotide
tacgacgacggcaaatgaagaggtccttcg

SEQ ID NO: 453779 - DNA, 30 bp, Artificial Sequence
  Synthetic oligonucleotide
aacttgatccaaaaatcagagggtccttcg

SEQ ID NO: 453780 - DNA, 31 bp, Artificial Sequence
  Synthetic oligonucleotide
aaactccaccattagtagtagaacagcttcg

SEQ ID NO: 453781 - DNA, 30 bp, Artificial Sequence
  Synthetic oligonucleotide
atcataatgatgacaggacgagaggcttcg

SEQ ID NO: 453782 - DNA, 30 bp, Artificial Sequence
  Synthetic oligonucleotide
aagcttttactcagttagacataggcttcg

SEQ ID NO: 453783 - DNA, 30 bp, Artificial Sequence
  Synthetic oligonucleotide
atttcgtacaggatggcaaggcgggcttcg

SEQ ID NO: 453784 - DNA, 30 bp, Artificial Sequence
  Synthetic oligonucleotide
cggtgggcatagccacgcgatcaatcttcg

SEQ ID NO: 453785 - DNA, 30 bp, Artificial Sequence
  Synthetic oligonucleotide
cagaaaagattcgcatacgaaagctcttcg

SEQ ID NO: 453786 - DNA, 30 bp, Artificial Sequence
  Synthetic oligonucleotide
ctatcgcccgcactagggttgaattcttcg

SEQ ID NO: 453787 - DNA, 30 bp, Artificial Sequence
  Synthetic oligonucleotide
tgcgtgtatacatgggccgttgattcttcg

SEQ ID NO: 453788 - DNA, 29 bp, Artificial Sequence
  Synthetic oligonucleotide
agcatgaggcaaggagtcgaacttcttcg

SEQ ID NO: 453789 - DNA, 30 bp, Artificial Sequence
  Synthetic oligonucleotide
cgcgaaattaccgaaataggactaagttcg

SEQ ID NO: 453790 - DNA, 30 bp, Artificial Sequence
  Synthetic oligonucleotide
gaaaagcgtatgtctgattccgccagttcg

SEQ ID NO: 453791 - DNA, 30 bp, Artificial Sequence
  Synthetic oligonucleotide
ctctggacgcgtcacataaatttccgttcg

SEQ ID NO: 453792 - DNA, 30 bp, Artificial Sequence
  Synthetic oligonucleotide
gtcgatgcgcatatatttaagaagcgttcg

SEQ ID NO: 453793 - DNA, 30 bp, Artificial Sequence
  Synthetic oligonucleotide
gggctttcatgggacgatcggaggcgttcg

SEQ ID NO: 453794 - DNA, 30 bp, Artificial Sequence
  Synthetic oligonucleotide
attaaaatctctcgagatgtagggcgttcg

SEQ ID NO: 453795 - DNA, 30 bp, Artificial Sequence
  Synthetic oligonucleotide
aacgcatgcagatttcctggttaaggttcg

SEQ ID NO: 453796 - DNA, 30 bp, Artificial Sequence
  Synthetic oligonucleotide
cccggtaccccctgacatgcgtcaggttcg

SEQ ID NO: 453797 - DNA, 30 bp, Artificial Sequence
  Synthetic oligonucleotide
tcaaagaactaggatagttgggtaggttcg

SEQ ID NO: 453798 - DNA, 30 bp, Artificial Sequence
  Synthetic oligonucleotide
cgatgagcatactgctaataaagcggttcg

SEQ ID NO: 453799 - DNA, 30 bp, Artificial Sequence
  Synthetic oligonucleotide
ttcagcaacctcctttgtagtcagggttcg

SEQ ID NO: 453800 - DNA, 30 bp, Artificial Sequence
  Synthetic oligonucleotide
gaggtagggtgcccgatgcccattggttcg

SEQ ID NO: 453801 - DNA, 30 bp, Artificial Sequence
  Synthetic oligonucleotide
atttaatggagtcaaatttgtgaatgttcg

SEQ ID NO: 453802 - DNA, 30 bp, Artificial Sequence
  Synthetic oligonucleotide
aattgctgccattaggcgaaggcatgttcg

SEQ ID NO: 453803 - DNA, 30 bp, Artificial Sequence
  Synthetic oligonucleotide
tcgaacacacagctcgaaggtatatgttcg

SEQ ID NO: 453804 - DNA, 30 bp, Artificial Sequence
  Synthetic oligonucleotide
agaattcatgagtaaatcagtttatgttcg

SEQ ID NO: 453805 - DNA, 30 bp, Artificial Sequence
  Synthetic oligonucleotide
tttcctctcaggcccgacgtatactgttcg

SEQ ID NO: 453806 - DNA, 30 bp, Artificial Sequence
  Synthetic oligonucleotide
atcgagcatgaacaccaccgtccgtgttcg

SEQ ID NO: 453807 - DNA, 30 bp, Artificial Sequence
  Synthetic oligonucleotide
gtcaagctagtgtgaattatagaaatttcg

SEQ ID NO: 453808 - DNA, 30 bp, Artificial Sequence
  Synthetic oligonucleotide
aggcggggcacctggtgccatctaatttcg

SEQ ID NO: 453809 - DNA, 30 bp, Artificial Sequence
  Synthetic oligonucleotide
gtaggttcggggtaagcgcacttaatttcg

SEQ ID NO: 453810 - DNA, 30 bp, Artificial Sequence
  Synthetic oligonucleotide
atgatgtaactcgaaaacccgggcatttcg

SEQ ID NO: 453811 - DNA, 30 bp, Artificial Sequence
  Synthetic oligonucleotide
aaattagtggagctctaattgtggatttcg

SEQ ID NO: 453812 - DNA, 30 bp, Artificial Sequence
  Synthetic oligonucleotide
agctggctttcatgtgagattttactttcg

SEQ ID NO: 453813 - DNA, 30 bp, Artificial Sequence
  Synthetic oligonucleotide
cctgctccgaatgtgtgttatcacctttcg

SEQ ID NO: 453814 - DNA, 30 bp, Artificial Sequence
  Synthetic oligonucleotide
tgaagcgtcagaaggtctcgctacctttcg

SEQ ID NO: 453815 - DNA, 32 bp, Artificial Sequence
  Synthetic oligonucleotide
tttgttgtgtaggtttactcctctacctttcg

SEQ ID NO: 453816 - DNA, 30 bp, Artificial Sequence
  Synthetic oligonucleotide
ttctagcaagccgaattcaggccgctttcg

SEQ ID NO: 453817 - DNA, 30 bp, Artificial Sequence
  Synthetic oligonucleotide
aatattacttgcgtcatgccggtgctttcg

SEQ ID NO: 453818 - DNA, 30 bp, Artificial Sequence
  Synthetic oligonucleotide
cgccgcctctgccagatgcagtgtctttcg

SEQ ID NO: 453819 - DNA, 30 bp, Artificial Sequence
  Synthetic oligonucleotide
gtgtaaaacgcggcttcgatagaagtttcg

SEQ ID NO: 453820 - DNA, 30 bp, Artificial Sequence
  Synthetic oligonucleotide
atagatggttcattccgtataccagtttcg

SEQ ID NO: 453821 - DNA, 30 bp, Artificial Sequence
  Synthetic oligonucleotide
ctaattaacaattgatagtggttagtttcg

SEQ ID NO: 453822 - DNA, 30 bp, Artificial Sequence
  Synthetic oligonucleotide
tgcggaaacacgccctgctcacgcgtttcg

SEQ ID NO: 453823 - DNA, 30 bp, Artificial Sequence
  Synthetic oligonucleotide
ctatgtcttgaatatagtttcaaattttcg

SEQ ID NO: 453824 - DNA, 30 bp, Artificial Sequence
  Synthetic oligonucleotide
ctggtttgccttcaatacttcagcttttcg

SEQ ID NO: 453825 - DNA, 30 bp, Artificial Sequence
  Synthetic oligonucleotide
gtagctagacgtaggctatacttcttttcg

SEQ ID NO: 453826 - DNA, 30 bp, Artificial Sequence
  Synthetic oligonucleotide
cccgcgtacccacataggttttcgttttcg

SEQ ID NO: 453827 - DNA, 30 bp, Artificial Sequence
  Synthetic oligonucleotide
cagaatgttcatgccctagcaatgttttcg

SEQ ID NO: 453828 - DNA, 30 bp, Artificial Sequence
  Synthetic oligonucleotide
ggtgacttgacagcgcttcgtaatttttcg

SEQ ID NO: 453829 - DNA, 30 bp, Artificial Sequence
  Synthetic oligonucleotide
atttaacaggtggactcgaccggtttttcg

SEQ ID NO: 453830 - DNA, 30 bp, Artificial Sequence
  Synthetic oligonucleotide
atgactgggggcaccaaacctattttttcg

SEQ ID NO: 453831 - DNA, 30 bp, Artificial Sequence
  Synthetic oligonucleotide
ttgtttacggtgtaaaccggccttttttcg

SEQ ID NO: 453832 - DNA, 30 bp, Artificial Sequence
  Synthetic oligonucleotide
cgttctggtgttatattgacctttttttcg

SEQ ID NO: 453833 - DNA, 30 bp, Artificial Sequence
  Synthetic oligonucleotide
actatgtgcgtgttgtatccgtacaaaagg

SEQ ID NO: 453834 - DNA, 30 bp, Artificial Sequence
  Synthetic oligonucleotide
atccttgagaagtactttagtctgaaaagg

SEQ ID NO: 453835 - DNA, 30 bp, Artificial Sequence
  Synthetic oligonucleotide
atcgcttaaagctagtaataggtgaaaagg

SEQ ID NO: 453836 - DNA, 30 bp, Artificial Sequence
  Synthetic oligonucleotide
ttcggtagtgtgtaccggctatataaaagg

SEQ ID NO: 453837 - DNA, 30 bp, Artificial Sequence
  Synthetic oligonucleotide
tgtgtgcttgggtttataggatttaaaagg

SEQ ID NO: 453838 - DNA, 30 bp, Artificial Sequence
  Synthetic oligonucleotide
tacggattacaccatcaaatttttaaaagg

SEQ ID NO: 453839 - DNA, 30 bp, Artificial Sequence
  Synthetic oligonucleotide
tccacgttatcgcggatctagtcacaaagg

SEQ ID NO: 453840 - DNA, 30 bp, Artificial Sequence
  Synthetic oligonucleotide
ggatcggcataccgctaggagggacaaagg

SEQ ID NO: 453841 - DNA, 30 bp, Artificial Sequence
  Synthetic oligonucleotide
tattccgatttctaggcgtactaccaaagg

SEQ ID NO: 453842 - DNA, 30 bp, Artificial Sequence
  Synthetic oligonucleotide
ccgggagtcttgcaccaagcctaccaaagg

SEQ ID NO: 453843 - DNA, 30 bp, Artificial Sequence
  Synthetic oligonucleotide
tactagcgatgttgagcgcgggtccaaagg

SEQ ID NO: 453844 - DNA, 30 bp, Artificial Sequence
  Synthetic oligonucleotide
ggtacggtaccctcttgttacgagcaaagg

SEQ ID NO: 453845 - DNA, 30 bp, Artificial Sequence
  Synthetic oligonucleotide
cacccctcctcagtgttattgtagcaaagg

SEQ ID NO: 453846 - DNA, 30 bp, Artificial Sequence
  Synthetic oligonucleotide
gctgacggtttatggctaaaccggcaaagg

SEQ ID NO: 453847 - DNA, 30 bp, Artificial Sequence
  Synthetic oligonucleotide
gggatttgtcagcttaataggcctcaaagg

SEQ ID NO: 453848 - DNA, 30 bp, Artificial Sequence
  Synthetic oligonucleotide
ggcgacgagcgcttcgagatagtagaaagg

SEQ ID NO: 453849 - DNA, 30 bp, Artificial Sequence
  Synthetic oligonucleotide
agtggtttgctgtgtatctacactgaaagg

SEQ ID NO: 453850 - DNA, 30 bp, Artificial Sequence
  Synthetic oligonucleotide
catgcgcgagccaattcgatttgtgaaagg

SEQ ID NO: 453851 - DNA, 30 bp, Artificial Sequence
  Synthetic oligonucleotide
tctgttttgtccatcgcattggcataaagg

SEQ ID NO: 453852 - DNA, 30 bp, Artificial Sequence
  Synthetic oligonucleotide
attaaaagtgaccggttccacgtataaagg

SEQ ID NO: 453853 - DNA, 30 bp, Artificial Sequence
  Synthetic oligonucleotide
taatggcatgatcagcggacaatctaaagg

SEQ ID NO: 453854 - DNA, 30 bp, Artificial Sequence
  Synthetic oligonucleotide
cattaaaccttcaggacgttgctgtaaagg

SEQ ID NO: 453855 - DNA, 30 bp, Artificial Sequence
  Synthetic oligonucleotide
agttagagatgattccaaaacccttaaagg

SEQ ID NO: 453856 - DNA, 30 bp, Artificial Sequence
  Synthetic oligonucleotide
ttcatggtaacggtaaaccttgtttaaagg

SEQ ID NO: 453857 - DNA, 30 bp, Artificial Sequence
  Synthetic oligonucleotide
atcttcttatttagagtagcattttaaagg

SEQ ID NO: 453858 - DNA, 26 bp, Artificial Sequence
  Synthetic oligonucleotide
gatttaatgtttgacacctaacaagg

SEQ ID NO: 453859 - DNA, 30 bp, Artificial Sequence
  Synthetic oligonucleotide
gctcatcgtactaattacgtactcacaagg

SEQ ID NO: 453860 - DNA, 30 bp, Artificial Sequence
  Synthetic oligonucleotide
tttatcttattcgaatagatttcgacaagg

SEQ ID NO: 453861 - DNA, 30 bp, Artificial Sequence
  Synthetic oligonucleotide
aatttataagaccgcaggtggatgacaagg

SEQ ID NO: 453862 - DNA, 30 bp, Artificial Sequence
  Synthetic oligonucleotide
acaagccattagcacacggcagctacaagg

SEQ ID NO: 453863 - DNA, 30 bp, Artificial Sequence
  Synthetic oligonucleotide
gattaaattccatctgggttccgaccaagg

SEQ ID NO: 453864 - DNA, 30 bp, Artificial Sequence
  Synthetic oligonucleotide
tgcttctgacgcttcgcggtgtgaccaagg

SEQ ID NO: 453865 - DNA, 30 bp, Artificial Sequence
  Synthetic oligonucleotide
aattcgtcccaccaccattataccccaagg

SEQ ID NO: 453866 - DNA, 30 bp, Artificial Sequence
  Synthetic oligonucleotide
ggatactggaagacggtggtaacgccaagg

SEQ ID NO: 453867 - DNA, 30 bp, Artificial Sequence
  Synthetic oligonucleotide
gggacggccgtttgattagcatcagcaagg

SEQ ID NO: 453868 - DNA, 30 bp, Artificial Sequence
  Synthetic oligonucleotide
tgtctgggggattaaggacggtcagcaagg

SEQ ID NO: 453869 - DNA, 30 bp, Artificial Sequence
  Synthetic oligonucleotide
ttttctttgtggatatgattccgagcaagg

SEQ ID NO: 453870 - DNA, 30 bp, Artificial Sequence
  Synthetic oligonucleotide
cgcactgtaatctcgctacgcgtagcaagg

SEQ ID NO: 453871 - DNA, 30 bp, Artificial Sequence
  Synthetic oligonucleotide
agtgtttcatatctaatatcggtagcaagg

SEQ ID NO: 453872 - DNA, 30 bp, Artificial Sequence
  Synthetic oligonucleotide
gttcgatccgggcactagcaatccgcaagg

SEQ ID NO: 453873 - DNA, 30 bp, Artificial Sequence
  Synthetic oligonucleotide
ccgttcaaggatccggtcactggcgcaagg

SEQ ID NO: 453874 - DNA, 30 bp, Artificial Sequence
  Synthetic oligonucleotide
cgggaccttgtgtcatagaacttcgcaagg

SEQ ID NO: 453875 - DNA, 30 bp, Artificial Sequence
  Synthetic oligonucleotide
accgtgtgcatattgggcgaggcggcaagg

SEQ ID NO: 453876 - DNA, 30 bp, Artificial Sequence
  Synthetic oligonucleotide
aaagttatttcgacaagacaaaatgcaagg

SEQ ID NO: 453877 - DNA, 30 bp, Artificial Sequence
  Synthetic oligonucleotide
ctacgatagccaaccctcattaatgcaagg

SEQ ID NO: 453878 - DNA, 30 bp, Artificial Sequence
  Synthetic oligonucleotide
gcgagccacaaggactccagtgatgcaagg

SEQ ID NO: 453879 - DNA, 30 bp, Artificial Sequence
  Synthetic oligonucleotide
cccaccgtcgcgcgcggacaggcctcaagg

SEQ ID NO: 453880 - DNA, 30 bp, Artificial Sequence
  Synthetic oligonucleotide
cacgggtagattatgtttgcctgctcaagg

SEQ ID NO: 453881 - DNA, 30 bp, Artificial Sequence
  Synthetic oligonucleotide
caaagtctaagctacgacctagtctcaagg

SEQ ID NO: 453882 - DNA, 30 bp, Artificial Sequence
  Synthetic oligonucleotide
tgtctccaatggagacatatccggtcaagg

SEQ ID NO: 453883 - DNA, 30 bp, Artificial Sequence
  Synthetic oligonucleotide
gcgcgatataactatgtgatatcttcaagg

SEQ ID NO: 453884 - DNA, 30 bp, Artificial Sequence
  Synthetic oligonucleotide
cgtccctctggctaaactgcagccagaagg

SEQ ID NO: 453885 - DNA, 30 bp, Artificial Sequence
  Synthetic oligonucleotide
tcatagataattgctcttccgaggagaagg

SEQ ID NO: 453886 - DNA, 30 bp, Artificial Sequence
  Synthetic oligonucleotide
accctcctggtgccttgtccacggagaagg

SEQ ID NO: 453887 - DNA, 30 bp, Artificial Sequence
  Synthetic oligonucleotide
cggcttttaggccggtacgccgatagaagg

SEQ ID NO: 453888 - DNA, 30 bp, Artificial Sequence
  Synthetic oligonucleotide
atatcaacacctgagggcgttgttagaagg

SEQ ID NO: 453889 - DNA, 30 bp, Artificial Sequence
  Synthetic oligonucleotide
attatatgtactatgaatcgttttagaagg

SEQ ID NO: 453890 - DNA, 30 bp, Artificial Sequence
  Synthetic oligonucleotide
gctcctaaatatgatttggagcgccgaagg

SEQ ID NO: 453891 - DNA, 30 bp, Artificial Sequence
  Synthetic oligonucleotide
ctgtccggggctcgtttaatgacgcgaagg

SEQ ID NO: 453892 - DNA, 30 bp, Artificial Sequence
  Synthetic oligonucleotide
gggtaggtagtaccgtgttacgtgcgaagg

SEQ ID NO: 453893 - DNA, 30 bp, Artificial Sequence
  Synthetic oligonucleotide
gccatagaccttgttatccaaagcggaagg

SEQ ID NO: 453894 - DNA, 30 bp, Artificial Sequence
  Synthetic oligonucleotide
tatatctgggtctcactgtgcttcggaagg

SEQ ID NO: 453895 - DNA, 30 bp, Artificial Sequence
  Synthetic oligonucleotide
aacaagcgatttttatcgaagtttggaagg

SEQ ID NO: 453896 - DNA, 30 bp, Artificial Sequence
  Synthetic oligonucleotide
gtgtggcacgtggtatcactcacctgaagg

SEQ ID NO: 453897 - DNA, 30 bp, Artificial Sequence
  Synthetic oligonucleotide
tcctgagtggcgcttctgttgccctgaagg

SEQ ID NO: 453898 - DNA, 30 bp, Artificial Sequence
  Synthetic oligonucleotide
gaatcgcttcctgggttacccacgtgaagg

SEQ ID NO: 453899 - DNA, 30 bp, Artificial Sequence
  Synthetic oligonucleotide
ccaggtgaccagtctatcttcgggtgaagg

SEQ ID NO: 453900 - DNA, 30 bp, Artificial Sequence
  Synthetic oligonucleotide
ggatagatattcaggacaggggggtgaagg

SEQ ID NO: 453901 - DNA, 30 bp, Artificial Sequence
  Synthetic oligonucleotide
ggctgttttgccgtcatgcattggtgaagg

SEQ ID NO: 453902 - DNA, 30 bp, Artificial Sequence
  Synthetic oligonucleotide
gattcacctgactacttgagtagttgaagg

SEQ ID NO: 453903 - DNA, 30 bp, Artificial Sequence
  Synthetic oligonucleotide
ttataattattgaggatagccatttgaagg

SEQ ID NO: 453904 - DNA, 30 bp, Artificial Sequence
  Synthetic oligonucleotide
tcataatattcttacttcttaaaaataagg

SEQ ID NO: 453905 - DNA, 30 bp, Artificial Sequence
  Synthetic oligonucleotide
agggtatatgactgctggatacgaataagg

SEQ ID NO: 453906 - DNA, 30 bp, Artificial Sequence
  Synthetic oligonucleotide
ggatgttgcataaaactgtcgttcataagg

SEQ ID NO: 453907 - DNA, 30 bp, Artificial Sequence
  Synthetic oligonucleotide
agtgcaccgtccgagtaaaaagggataagg

SEQ ID NO: 453908 - DNA, 30 bp, Artificial Sequence
  Synthetic oligonucleotide
ctttacatgtgtactctaataatgataagg

SEQ ID NO: 453909 - DNA, 30 bp, Artificial Sequence
  Synthetic oligonucleotide
tatgattgccgttgcaatgctactataagg

SEQ ID NO: 453910 - DNA, 30 bp, Artificial Sequence
  Synthetic oligonucleotide
gttatataaacccctgaggtatctataagg

SEQ ID NO: 453911 - DNA, 30 bp, Artificial Sequence
  Synthetic oligonucleotide
gatatcgatgtaacacttacctctataagg

SEQ ID NO: 453912 - DNA, 30 bp, Artificial Sequence
  Synthetic oligonucleotide
taggtccgaacgctgctcccaaatctaagg

SEQ ID NO: 453913 - DNA, 30 bp, Artificial Sequence
  Synthetic oligonucleotide
gaggtccgaggccacctacgcgaagtaagg

SEQ ID NO: 453914 - DNA, 30 bp, Artificial Sequence
  Synthetic oligonucleotide
gcgggtagtagcaacttgcattaagtaagg

SEQ ID NO: 453915 - DNA, 30 bp, Artificial Sequence
  Synthetic oligonucleotide
ggtgaatcataggcttgcgttcaggtaagg

SEQ ID NO: 453916 - DNA, 30 bp, Artificial Sequence
  Synthetic oligonucleotide
tcaaattcgtgttatattttggcggtaagg

SEQ ID NO: 453917 - DNA, 30 bp, Artificial Sequence
  Synthetic oligonucleotide
gcacctggtaataaggtctcactggtaagg

SEQ ID NO: 453918 - DNA, 30 bp, Artificial Sequence
  Synthetic oligonucleotide
attaccacctgaagcgctggcctggtaagg

SEQ ID NO: 453919 - DNA, 30 bp, Artificial Sequence
  Synthetic oligonucleotide
gactttgaccgtgacatgcgttgtgtaagg

SEQ ID NO: 453920 - DNA, 30 bp, Artificial Sequence
  Synthetic oligonucleotide
gatgtcttaagttacttttggcttgtaagg

SEQ ID NO: 453921 - DNA, 30 bp, Artificial Sequence
  Synthetic oligonucleotide
cgaaggggctcgttgcttaaatttgtaagg

SEQ ID NO: 453922 - DNA, 30 bp, Artificial Sequence
  Synthetic oligonucleotide
tatttaggaggactatccctttccttaagg

SEQ ID NO: 453923 - DNA, 31 bp, Artificial Sequence
  Synthetic oligonucleotide
caagggtgttcaaccttagtctgcgttaagg

SEQ ID NO: 453924 - DNA, 30 bp, Artificial Sequence
  Synthetic oligonucleotide
gcaatagtgagtatgcatctcactttaagg

SEQ ID NO: 453925 - DNA, 30 bp, Artificial Sequence
  Synthetic oligonucleotide
ttataacgatcgtgcggcggctccaacagg

SEQ ID NO: 453926 - DNA, 30 bp, Artificial Sequence
  Synthetic oligonucleotide
gaatcataggtcctctgtgccagcaacagg

SEQ ID NO: 453927 - DNA, 30 bp, Artificial Sequence
  Synthetic oligonucleotide
ttaagattgagtggctcttatttcaacagg

SEQ ID NO: 453928 - DNA, 30 bp, Artificial Sequence
  Synthetic oligonucleotide
gaaatgtggtacgatttctatgggaacagg

SEQ ID NO: 453929 - DNA, 30 bp, Artificial Sequence
  Synthetic oligonucleotide
tggtgtgtattaaatcttggttctaacagg

SEQ ID NO: 453930 - DNA, 30 bp, Artificial Sequence
  Synthetic oligonucleotide
ctctgatatgttgatactgtggtccacagg

SEQ ID NO: 453931 - DNA, 30 bp, Artificial Sequence
  Synthetic oligonucleotide
atcggtaagcgtttctcctgtaggcacagg

SEQ ID NO: 453932 - DNA, 30 bp, Artificial Sequence
  Synthetic oligonucleotide
gctcacacctgtctaacgggacatcacagg

SEQ ID NO: 453933 - DNA, 30 bp, Artificial Sequence
  Synthetic oligonucleotide
aaccgacacagcatcggccgtgatcacagg

SEQ ID NO: 453934 - DNA, 30 bp, Artificial Sequence
  Synthetic oligonucleotide
atagcgaagagtcagtggtcgtcagacagg

SEQ ID NO: 453935 - DNA, 30 bp, Artificial Sequence
  Synthetic oligonucleotide
gttgcgctgcgttgctttatgggcgacagg

SEQ ID NO: 453936 - DNA, 30 bp, Artificial Sequence
  Synthetic oligonucleotide
gagtggcccgtggcaagaaaaatcgacagg

SEQ ID NO: 453937 - DNA, 30 bp, Artificial Sequence
  Synthetic oligonucleotide
gcacgtcagtgcatcaaccgctcggacagg

SEQ ID NO: 453938 - DNA, 30 bp, Artificial Sequence
  Synthetic oligonucleotide
agggtcttcctcttgcgcctgagtgacagg

SEQ ID NO: 453939 - DNA, 30 bp, Artificial Sequence
  Synthetic oligonucleotide
agaggactgctgccctcttcgacatacagg

SEQ ID NO: 453940 - DNA, 30 bp, Artificial Sequence
  Synthetic oligonucleotide
gactggatatgggcagttccaacctacagg

SEQ ID NO: 453941 - DNA, 30 bp, Artificial Sequence
  Synthetic oligonucleotide
tcaacctaaccagtttgcgcgggttacagg

SEQ ID NO: 453942 - DNA, 30 bp, Artificial Sequence
  Synthetic oligonucleotide
ggggggtcttagaccagatctagacccagg

SEQ ID NO: 453943 - DNA, 30 bp, Artificial Sequence
  Synthetic oligonucleotide
tactttaactagcttaacgcaccccccagg

SEQ ID NO: 453944 - DNA, 30 bp, Artificial Sequence
  Synthetic oligonucleotide
aattcattttgaaacagtcatagccccagg

SEQ ID NO: 453945 - DNA, 30 bp, Artificial Sequence
  Synthetic oligonucleotide
gggccttaactacagcggtatcatcccagg

SEQ ID NO: 453946 - DNA, 30 bp, Artificial Sequence
  Synthetic oligonucleotide
agccggaaatcgttaaacggggcagccagg

SEQ ID NO: 453947 - DNA, 30 bp, Artificial Sequence
  Synthetic oligonucleotide
ggcgctcgccggcccaagcgaagcgccagg

SEQ ID NO: 453948 - DNA, 30 bp, Artificial Sequence
  Synthetic oligonucleotide
ggcggtagggtgtcgccttcgtgggccagg

SEQ ID NO: 453949 - DNA, 30 bp, Artificial Sequence
  Synthetic oligonucleotide
tccggcctacgtgggacactgctggccagg

SEQ ID NO: 453950 - DNA, 30 bp, Artificial Sequence
  Synthetic oligonucleotide
tttataagcttagtattgtgtgatgccagg

SEQ ID NO: 453951 - DNA, 30 bp, Artificial Sequence
  Synthetic oligonucleotide
aaaattctccatttcgacaaagtatccagg

SEQ ID NO: 453952 - DNA, 30 bp, Artificial Sequence
  Synthetic oligonucleotide
aaagcgccaggcgcttacacggtaagcagg

SEQ ID NO: 453953 - DNA, 30 bp, Artificial Sequence
  Synthetic oligonucleotide
gactggctagggcacaatgcgaacagcagg

SEQ ID NO: 453954 - DNA, 30 bp, Artificial Sequence
  Synthetic oligonucleotide
attagttcccgtttctagaaagtcagcagg

SEQ ID NO: 453955 - DNA, 30 bp, Artificial Sequence
  Synthetic oligonucleotide
attgagaaggacaacgtacgaaagagcagg

SEQ ID NO: 453956 - DNA, 30 bp, Artificial Sequence
  Synthetic oligonucleotide
tgggttccgttcggacatcgctggagcagg

SEQ ID NO: 453957 - DNA, 30 bp, Artificial Sequence
  Synthetic oligonucleotide
actctttttacatgtcaggtgatgagcagg

SEQ ID NO: 453958 - DNA, 30 bp, Artificial Sequence
  Synthetic oligonucleotide
acttcgaggggatctactcattaacgcagg

SEQ ID NO: 453959 - DNA, 30 bp, Artificial Sequence
  Synthetic oligonucleotide
cattttagtttaaatgttataggacgcagg

SEQ ID NO: 453960 - DNA, 30 bp, Artificial Sequence
  Synthetic oligonucleotide
cctattattcgggagcaatagaaccgcagg

SEQ ID NO: 453961 - DNA, 30 bp, Artificial Sequence
  Synthetic oligonucleotide
gccccaacagaaaagccgccggcccgcagg

SEQ ID NO: 453962 - DNA, 30 bp, Artificial Sequence
  Synthetic oligonucleotide
gcaaccaacagtaccctcaacgagcgcagg

SEQ ID NO: 453963 - DNA, 30 bp, Artificial Sequence
  Synthetic oligonucleotide
catacggggacctagcacccagcgcgcagg

SEQ ID NO: 453964 - DNA, 30 bp, Artificial Sequence
  Synthetic oligonucleotide
gggtctagtctctctaataaatcgcgcagg

SEQ ID NO: 453965 - DNA, 30 bp, Artificial Sequence
  Synthetic oligonucleotide
gtgggagacaatcgaatctatgtgcgcagg

SEQ ID NO: 453966 - DNA, 30 bp, Artificial Sequence
  Synthetic oligonucleotide
atctatttctcatcggtcgggtttcgcagg

SEQ ID NO: 453967 - DNA, 30 bp, Artificial Sequence
  Synthetic oligonucleotide
aagggccttcttacagcgaaccagggcagg

SEQ ID NO: 453968 - DNA, 30 bp, Artificial Sequence
  Synthetic oligonucleotide
ggaagaggcagtattgtacgcaggggcagg

SEQ ID NO: 453969 - DNA, 30 bp, Artificial Sequence
  Synthetic oligonucleotide
gtggcgagcggcgtcgggctttggggcagg

SEQ ID NO: 453970 - DNA, 30 bp, Artificial Sequence
  Synthetic oligonucleotide
gaagacgccaaggggcacgtacgtggcagg

SEQ ID NO: 453971 - DNA, 30 bp, Artificial Sequence
  Synthetic oligonucleotide
ggccctaacacggatttagttatatgcagg

SEQ ID NO: 453972 - DNA, 30 bp, Artificial Sequence
  Synthetic oligonucleotide
ataccaatcggtggttagatgcggtgcagg

SEQ ID NO: 453973 - DNA, 30 bp, Artificial Sequence
  Synthetic oligonucleotide
atccggggtctcttgatgatagggtgcagg

SEQ ID NO: 453974 - DNA, 30 bp, Artificial Sequence
  Synthetic oligonucleotide
agcgtaggctggcgtttgcggctgtgcagg

SEQ ID NO: 453975 - DNA, 30 bp, Artificial Sequence
  Synthetic oligonucleotide
aaaatcaacgggtaccgttacttttgcagg

SEQ ID NO: 453976 - DNA, 30 bp, Artificial Sequence
  Synthetic oligonucleotide
atggttgtatgagtcggctgacgaatcagg

SEQ ID NO: 453977 - DNA, 30 bp, Artificial Sequence
  Synthetic oligonucleotide
tcaattatttccttttcctcggatatcagg

SEQ ID NO: 453978 - DNA, 30 bp, Artificial Sequence
  Synthetic oligonucleotide
ccgaggcagcaacacagtcaatatatcagg

SEQ ID NO: 453979 - DNA, 30 bp, Artificial Sequence
  Synthetic oligonucleotide
gccgatttctttagattacgcactatcagg

SEQ ID NO: 453980 - DNA, 30 bp, Artificial Sequence
  Synthetic oligonucleotide
aatcttcgtatttgcagtgtatgtatcagg

SEQ ID NO: 453981 - DNA, 30 bp, Artificial Sequence
  Synthetic oligonucleotide
tttagcacttcccaaagcaactccctcagg

SEQ ID NO: 453982 - DNA, 30 bp, Artificial Sequence
  Synthetic oligonucleotide
tgtggtattattttaaattcctgcctcagg

SEQ ID NO: 453983 - DNA, 30 bp, Artificial Sequence
  Synthetic oligonucleotide
gaatagaaaatacgttagtcggtcctcagg

SEQ ID NO: 453984 - DNA, 30 bp, Artificial Sequence
  Synthetic oligonucleotide
gaatatcaacttccaaaagcgcagctcagg

SEQ ID NO: 453985 - DNA, 30 bp, Artificial Sequence
  Synthetic oligonucleotide
gaatagttcgcctggtagaacacgctcagg

SEQ ID NO: 453986 - DNA, 30 bp, Artificial Sequence
  Synthetic oligonucleotide
gagaggtctcctgtggttccggggctcagg

SEQ ID NO: 453987 - DNA, 30 bp, Artificial Sequence
  Synthetic oligonucleotide
ttaatcatcactgccctgtcattgctcagg

SEQ ID NO: 453988 - DNA, 30 bp, Artificial Sequence
  Synthetic oligonucleotide
tcgaataacgcagtcactattacagtcagg

SEQ ID NO: 453989 - DNA, 30 bp, Artificial Sequence
  Synthetic oligonucleotide
atagtacattgtggacacttatacgtcagg

SEQ ID NO: 453990 - DNA, 30 bp, Artificial Sequence
  Synthetic oligonucleotide
tccagggcataggctcttacagaggtcagg

SEQ ID NO: 453991 - DNA, 30 bp, Artificial Sequence
  Synthetic oligonucleotide
gcgaattttatggagttttcactggtcagg

SEQ ID NO: 453992 - DNA, 30 bp, Artificial Sequence
  Synthetic oligonucleotide
aatataagtcgagctcgcgaaccattcagg

SEQ ID NO: 453993 - DNA, 30 bp, Artificial Sequence
  Synthetic oligonucleotide
ttgcatttaaaaagggtaagcatattcagg

SEQ ID NO: 453994 - DNA, 30 bp, Artificial Sequence
  Synthetic oligonucleotide
cgtcgctggaacttgttcaacacgttcagg

SEQ ID NO: 453995 - DNA, 30 bp, Artificial Sequence
  Synthetic oligonucleotide
gatttggagcgagttaggtgatggttcagg

SEQ ID NO: 453996 - DNA, 30 bp, Artificial Sequence
  Synthetic oligonucleotide
cgcagcttagggaatggaagccatttcagg

SEQ ID NO: 453997 - DNA, 30 bp, Artificial Sequence
  Synthetic oligonucleotide
gatcgtactcatcgtacgatccatttcagg

SEQ ID NO: 453998 - DNA, 30 bp, Artificial Sequence
  Synthetic oligonucleotide
tacgcctgccgcgtggcggactctttcagg

SEQ ID NO: 453999 - DNA, 30 bp, Artificial Sequence
  Synthetic oligonucleotide
tacgctaagcacattgtttcgattttcagg

SEQ ID NO: 454000 - DNA, 30 bp, Artificial Sequence
  Synthetic oligonucleotide
aaatattagccggcttaaggcaggaagagg

SEQ ID NO: 454001 - DNA, 30 bp, Artificial Sequence
  Synthetic oligonucleotide
cccctggcactttctgacatccgtaagagg

SEQ ID NO: 454002 - DNA, 30 bp, Artificial Sequence
  Synthetic oligonucleotide
taactacatgggatctgtcccccacagagg

SEQ ID NO: 454003 - DNA, 30 bp, Artificial Sequence
  Synthetic oligonucleotide
gcaagggcacctcggtggcgtgacgagagg

SEQ ID NO: 454004 - DNA, 30 bp, Artificial Sequence
  Synthetic oligonucleotide
attatgacgaaaattgcattcctctagagg

SEQ ID NO: 454005 - DNA, 30 bp, Artificial Sequence
  Synthetic oligonucleotide
gcaataagtgcgagcccttagaagtagagg

SEQ ID NO: 454006 - DNA, 30 bp, Artificial Sequence
  Synthetic oligonucleotide
ttaagtcacggagtgggcgtatcgtagagg

SEQ ID NO: 454007 - DNA, 30 bp, Artificial Sequence
  Synthetic oligonucleotide
atgcggtccccgataatgaacgattagagg

SEQ ID NO: 454008 - DNA, 30 bp, Artificial Sequence
  Synthetic oligonucleotide
cggcgtgttatgttatataacccttagagg

SEQ ID NO: 454009 - DNA, 30 bp, Artificial Sequence
  Synthetic oligonucleotide
ccccaggtttggtttaggtggccttagagg

SEQ ID NO: 454010 - DNA, 30 bp, Artificial Sequence
  Synthetic oligonucleotide
ccccattcggttccccttgagatttagagg

SEQ ID NO: 454011 - DNA, 30 bp, Artificial Sequence
  Synthetic oligonucleotide
taaagttgggcattgatgagaaaaacgagg

SEQ ID NO: 454012 - DNA, 30 bp, Artificial Sequence
  Synthetic oligonucleotide
cacttgttagacacagcgttgtgaacgagg

SEQ ID NO: 454013 - DNA, 30 bp, Artificial Sequence
  Synthetic oligonucleotide
gatatgcggacgcgctattctcgcacgagg

SEQ ID NO: 454014 - DNA, 30 bp, Artificial Sequence
  Synthetic oligonucleotide
gcgtgacacatttctaaggcgtcgacgagg

SEQ ID NO: 454015 - DNA, 30 bp, Artificial Sequence
  Synthetic oligonucleotide
tttttgttagtctcagatattactacgagg

SEQ ID NO: 454016 - DNA, 30 bp, Artificial Sequence
  Synthetic oligonucleotide
cctcaacaaggctggtcctcgcgtacgagg

SEQ ID NO: 454017 - DNA, 30 bp, Artificial Sequence
  Synthetic oligonucleotide
gctacctgtacggctacagcatcaccgagg

SEQ ID NO: 454018 - DNA, 30 bp, Artificial Sequence
  Synthetic oligonucleotide
atcgaagcaggcggcttacgccgaccgagg

SEQ ID NO: 454019 - DNA, 30 bp, Artificial Sequence
  Synthetic oligonucleotide
gttaacttcactgttcagtgaacagcgagg

SEQ ID NO: 454020 - DNA, 30 bp, Artificial Sequence
  Synthetic oligonucleotide
cacggtggggattgatagcgtcgcgcgagg

SEQ ID NO: 454021 - DNA, 30 bp, Artificial Sequence
  Synthetic oligonucleotide
gcggtcggtgtctgtgagccggcggcgagg

SEQ ID NO: 454022 - DNA, 30 bp, Artificial Sequence
  Synthetic oligonucleotide
tcgcagacgcgccatttaaccgtatcgagg

SEQ ID NO: 454023 - DNA, 30 bp, Artificial Sequence
  Synthetic oligonucleotide
gattagtagggtacaagtgcgtattcgagg

SEQ ID NO: 454024 - DNA, 30 bp, Artificial Sequence
  Synthetic oligonucleotide
aatcggtaacaacgcagacgtgcttcgagg

SEQ ID NO: 454025 - DNA, 30 bp, Artificial Sequence
  Synthetic oligonucleotide
gccgtgggcgtttttgatcagtcttcgagg

SEQ ID NO: 454026 - DNA, 30 bp, Artificial Sequence
  Synthetic oligonucleotide
catagctatgctagacatagttagaggagg

SEQ ID NO: 454027 - DNA, 30 bp, Artificial Sequence
  Synthetic oligonucleotide
tttatctctgtgtacattttatgtaggagg

SEQ ID NO: 454028 - DNA, 30 bp, Artificial Sequence
  Synthetic oligonucleotide
aagcaggaccgaaggtccaacgttaggagg

SEQ ID NO: 454029 - DNA, 30 bp, Artificial Sequence
  Synthetic oligonucleotide
acaccagtgagatatggttacctacggagg

SEQ ID NO: 454030 - DNA, 30 bp, Artificial Sequence
  Synthetic oligonucleotide
cgggccgtaatcggagcacggctacggagg

SEQ ID NO: 454031 - DNA, 30 bp, Artificial Sequence
  Synthetic oligonucleotide
ctcctagcgggctctaccccgtatcggagg

SEQ ID NO: 454032 - DNA, 30 bp, Artificial Sequence
  Synthetic oligonucleotide
gtcgttcataaggattttgttcacgggagg

SEQ ID NO: 454033 - DNA, 30 bp, Artificial Sequence
  Synthetic oligonucleotide
agagcggtgaggcggcgcgtacgggggagg

SEQ ID NO: 454034 - DNA, 30 bp, Artificial Sequence
  Synthetic oligonucleotide
gctattttttcgcggctggtacgggggagg

SEQ ID NO: 454035 - DNA, 30 bp, Artificial Sequence
  Synthetic oligonucleotide
cggttattagtttcatttgtgcttgggagg

SEQ ID NO: 454036 - DNA, 30 bp, Artificial Sequence
  Synthetic oligonucleotide
attggaaccggaatgattttcgcatggagg

SEQ ID NO: 454037 - DNA, 30 bp, Artificial Sequence
  Synthetic oligonucleotide
attaccctgtttcaaagttaatcatggagg

SEQ ID NO: 454038 - DNA, 30 bp, Artificial Sequence
  Synthetic oligonucleotide
gtcttggatctacctcacggtgactggagg

SEQ ID NO: 454039 - DNA, 30 bp, Artificial Sequence
  Synthetic oligonucleotide
tacgatttttagtgttttgttcgctggagg

SEQ ID NO: 454040 - DNA, 30 bp, Artificial Sequence
  Synthetic oligonucleotide
gaattccgcggaagtaaaggcgagtggagg

SEQ ID NO: 454041 - DNA, 30 bp, Artificial Sequence
  Synthetic oligonucleotide
ccccagtctttataaaggaagaggtggagg

SEQ ID NO: 454042 - DNA, 30 bp, Artificial Sequence
  Synthetic oligonucleotide
tttcacccgcagtccattgtaatttggagg

SEQ ID NO: 454043 - DNA, 30 bp, Artificial Sequence
  Synthetic oligonucleotide
ttctcaggaaccgagcctttcctcatgagg

SEQ ID NO: 454044 - DNA, 30 bp, Artificial Sequence
  Synthetic oligonucleotide
tcgtatctatccgaagttgccgcgatgagg

SEQ ID NO: 454045 - DNA, 30 bp, Artificial Sequence
  Synthetic oligonucleotide
aaagtacgagcactttctgaatcgatgagg

SEQ ID NO: 454046 - DNA, 30 bp, Artificial Sequence
  Synthetic oligonucleotide
ggctcttgacccatacagatttatatgagg

SEQ ID NO: 454047 - DNA, 30 bp, Artificial Sequence
  Synthetic oligonucleotide
aaccaggcgaaccgctaaccacctatgagg

SEQ ID NO: 454048 - DNA, 30 bp, Artificial Sequence
  Synthetic oligonucleotide
gcgggtctgcactgcagtccttgtatgagg

SEQ ID NO: 454049 - DNA, 30 bp, Artificial Sequence
  Synthetic oligonucleotide
aaaaaagcgaagagcccttctgaactgagg

SEQ ID NO: 454050 - DNA, 30 bp, Artificial Sequence
  Synthetic oligonucleotide
ggcgtgcagtggtcgtttaattcactgagg

SEQ ID NO: 454051 - DNA, 30 bp, Artificial Sequence
  Synthetic oligonucleotide
ccggtgggaatgccatccagcaccctgagg

SEQ ID NO: 454052 - DNA, 30 bp, Artificial Sequence
  Synthetic oligonucleotide
gctcttaggccttgactataatccctgagg

SEQ ID NO: 454053 - DNA, 30 bp, Artificial Sequence
  Synthetic oligonucleotide
tgccctatgcgatttcggataaatctgagg

SEQ ID NO: 454054 - DNA, 30 bp, Artificial Sequence
  Synthetic oligonucleotide
attagttaaataaaacttgtttttctgagg

SEQ ID NO: 454055 - DNA, 30 bp, Artificial Sequence
  Synthetic oligonucleotide
ctgcaattcattcccgtcagggcagtgagg

SEQ ID NO: 454056 - DNA, 30 bp, Artificial Sequence
  Synthetic oligonucleotide
gtctctcggatccttcaaattctagtgagg

SEQ ID NO: 454057 - DNA, 30 bp, Artificial Sequence
  Synthetic oligonucleotide
taataatgcatggcgcgtaaaagcgtgagg

SEQ ID NO: 454058 - DNA, 30 bp, Artificial Sequence
  Synthetic oligonucleotide
tacaaccgtacggcgtatggccgcgtgagg

SEQ ID NO: 454059 - DNA, 30 bp, Artificial Sequence
  Synthetic oligonucleotide
tatctagctcaagctgtttggacggtgagg

SEQ ID NO: 454060 - DNA, 30 bp, Artificial Sequence
  Synthetic oligonucleotide
gtacccatgctgttatgctctccggtgagg

SEQ ID NO: 454061 - DNA, 30 bp, Artificial Sequence
  Synthetic oligonucleotide
cgtagagccgttagtcacgacgcggtgagg

SEQ ID NO: 454062 - DNA, 30 bp, Artificial Sequence
  Synthetic oligonucleotide
tacagcgtacgatcgagagcccctgtgagg

SEQ ID NO: 454063 - DNA, 30 bp, Artificial Sequence
  Synthetic oligonucleotide
tattgacatgcagtgtcctgacttgtgagg

SEQ ID NO: 454064 - DNA, 30 bp, Artificial Sequence
  Synthetic oligonucleotide
attttcctagaacaatcatcgctattgagg

SEQ ID NO: 454065 - DNA, 30 bp, Artificial Sequence
  Synthetic oligonucleotide
aaggtttgacagtctgtgcagaacttgagg

SEQ ID NO: 454066 - DNA, 30 bp, Artificial Sequence
  Synthetic oligonucleotide
gaatctggcccttcaccgatacgtttgagg

SEQ ID NO: 454067 - DNA, 30 bp, Artificial Sequence
  Synthetic oligonucleotide
ggcgggcttcgccattgtcttggtttgagg

SEQ ID NO: 454068 - DNA, 30 bp, Artificial Sequence
  Synthetic oligonucleotide
ttgcagcagtcaatattcaattgtttgagg

SEQ ID NO: 454069 - DNA, 30 bp, Artificial Sequence
  Synthetic oligonucleotide
aagactcagaggcttcaaaaaacaaatagg

SEQ ID NO: 454070 - DNA, 30 bp, Artificial Sequence
  Synthetic oligonucleotide
atgaccttggtatagatattcaccaatagg

SEQ ID NO: 454071 - DNA, 30 bp, Artificial Sequence
  Synthetic oligonucleotide
cccattccttccacgtatattactaatagg

SEQ ID NO: 454072 - DNA, 30 bp, Artificial Sequence
  Synthetic oligonucleotide
ttgaccttctagtctggcctacttaatagg

SEQ ID NO: 454073 - DNA, 30 bp, Artificial Sequence
  Synthetic oligonucleotide
gactagatgtacaagaccgtcaaccatagg

SEQ ID NO: 454074 - DNA, 30 bp, Artificial Sequence
  Synthetic oligonucleotide
tgcgtatgtcattaatgacaacgccatagg

SEQ ID NO: 454075 - DNA, 30 bp, Artificial Sequence
  Synthetic oligonucleotide
ttgaatcagtttcatccccaactccatagg

SEQ ID NO: 454076 - DNA, 30 bp, Artificial Sequence
  Synthetic oligonucleotide
gtaaagcccgacctctgggtcctgcatagg

SEQ ID NO: 454077 - DNA, 30 bp, Artificial Sequence
  Synthetic oligonucleotide
gcggcttttccgagacgttagtctcatagg

SEQ ID NO: 454078 - DNA, 30 bp, Artificial Sequence
  Synthetic oligonucleotide
ttttaggcccacaagcaacatggtcatagg

SEQ ID NO: 454079 - DNA, 30 bp, Artificial Sequence
  Synthetic oligonucleotide
atggtattaatactccttggaatagatagg

SEQ ID NO: 454080 - DNA, 30 bp, Artificial Sequence
  Synthetic oligonucleotide
accgcggggaaactcgtgggcttagatagg

SEQ ID NO: 454081 - DNA, 30 bp, Artificial Sequence
  Synthetic oligonucleotide
cataatgcctccaataagtattgcgatagg

SEQ ID NO: 454082 - DNA, 30 bp, Artificial Sequence
  Synthetic oligonucleotide
tactcaatgcacagctagcggatggatagg

SEQ ID NO: 454083 - DNA, 30 bp, Artificial Sequence
  Synthetic oligonucleotide
gacccggacaggatcttttaatctgatagg

SEQ ID NO: 454084 - DNA, 30 bp, Artificial Sequence
  Synthetic oligonucleotide
aaccaagatagaacttgatttggtgatagg

SEQ ID NO: 454085 - DNA, 30 bp, Artificial Sequence
  Synthetic oligonucleotide
gaactcatatatgcgtatcctgttgatagg

SEQ ID NO: 454086 - DNA, 30 bp, Artificial Sequence
  Synthetic oligonucleotide
tgacttgtctaggtcttaggtaaatatagg

SEQ ID NO: 454087 - DNA, 30 bp, Artificial Sequence
  Synthetic oligonucleotide
tcatcggaattattggatgtcgaatatagg

SEQ ID NO: 454088 - DNA, 30 bp, Artificial Sequence
  Synthetic oligonucleotide
attagcggcgtgtgtagagtggaatatagg

SEQ ID NO: 454089 - DNA, 30 bp, Artificial Sequence
  Synthetic oligonucleotide
ctcacggtcacggagctgcctccatatagg

SEQ ID NO: 454090 - DNA, 30 bp, Artificial Sequence
  Synthetic oligonucleotide
tgccctggtatggcgcaatcatactatagg

SEQ ID NO: 454091 - DNA, 30 bp, Artificial Sequence
  Synthetic oligonucleotide
aatgttctgaatgtaaataaccggtatagg

SEQ ID NO: 454092 - DNA, 30 bp, Artificial Sequence
  Synthetic oligonucleotide
tggacaactaccatgcaatagcggtatagg

SEQ ID NO: 454093 - DNA, 30 bp, Artificial Sequence
  Synthetic oligonucleotide
cacttgatttaccaggtgtataattatagg

SEQ ID NO: 454094 - DNA, 30 bp, Artificial Sequence
  Synthetic oligonucleotide
tatagcataaataaccactacctttatagg

SEQ ID NO: 454095 - DNA, 30 bp, Artificial Sequence
  Synthetic oligonucleotide
gagttccagtgaactagtagggtttatagg

SEQ ID NO: 454096 - DNA, 30 bp, Artificial Sequence
  Synthetic oligonucleotide
tgcaaccatagcgttttactacaaactagg

SEQ ID NO: 454097 - DNA, 30 bp, Artificial Sequence
  Synthetic oligonucleotide
gacgtcgcgtacttacgcccgttaactagg

SEQ ID NO: 454098 - DNA, 30 bp, Artificial Sequence
  Synthetic oligonucleotide
gtaacccctataagcgtaggaagcactagg

SEQ ID NO: 454099 - DNA, 30 bp, Artificial Sequence
  Synthetic oligonucleotide
gaaattggcgggacggataaactgactagg

SEQ ID NO: 454100 - DNA, 30 bp, Artificial Sequence
  Synthetic oligonucleotide
aaaagcctggtccgtatggtcaaacctagg

SEQ ID NO: 454101 - DNA, 30 bp, Artificial Sequence
  Synthetic oligonucleotide
gacggcaaggatctttacgcggaacctagg

SEQ ID NO: 454102 - DNA, 31 bp, Artificial Sequence
  Synthetic oligonucleotide
agccaaaaatgtaaatagtgcttaacctagg

SEQ ID NO: 454103 - DNA, 30 bp, Artificial Sequence
  Synthetic oligonucleotide
ccagctgaatttccggggaaaagccctagg

SEQ ID NO: 454104 - DNA, 30 bp, Artificial Sequence
  Synthetic oligonucleotide
gagaaccccgcactggggattctgcctagg

SEQ ID NO: 454105 - DNA, 30 bp, Artificial Sequence
  Synthetic oligonucleotide
ctcccggggttgacagctatagctcctagg

SEQ ID NO: 454106 - DNA, 30 bp, Artificial Sequence
  Synthetic oligonucleotide
ctgtatattacaggactatcgtaggctagg

SEQ ID NO: 454107 - DNA, 30 bp, Artificial Sequence
  Synthetic oligonucleotide
actttctacgtagtggtcaggtcggctagg

SEQ ID NO: 454108 - DNA, 30 bp, Artificial Sequence
  Synthetic oligonucleotide
tattctggtcagtccatgttagtggctagg

SEQ ID NO: 454109 - DNA, 30 bp, Artificial Sequence
  Synthetic oligonucleotide
gctcaaaggggactgttgggcttggctagg

SEQ ID NO: 454110 - DNA, 30 bp, Artificial Sequence
  Synthetic oligonucleotide
gactgagcagagagagcatactctgctagg

SEQ ID NO: 454111 - DNA, 30 bp, Artificial Sequence
  Synthetic oligonucleotide
cccggagaagcctactagataggatctagg

SEQ ID NO: 454112 - DNA, 30 bp, Artificial Sequence
  Synthetic oligonucleotide
caaccacttatccacggttcgatatctagg

SEQ ID NO: 454113 - DNA, 30 bp, Artificial Sequence
  Synthetic oligonucleotide
gctgtggagtctcctgggagtacttctagg

SEQ ID NO: 454114 - DNA, 30 bp, Artificial Sequence
  Synthetic oligonucleotide
tacggcatcgagctctttcttatttctagg

SEQ ID NO: 454115 - DNA, 30 bp, Artificial Sequence
  Synthetic oligonucleotide
caccctaaggcccggcgcactttaagtagg

SEQ ID NO: 454116 - DNA, 30 bp, Artificial Sequence
  Synthetic oligonucleotide
tatcctgctctaccctgtcaaactagtagg

SEQ ID NO: 454117 - DNA, 30 bp, Artificial Sequence
  Synthetic oligonucleotide
ttgctggctaccatttgaattagtagtagg

SEQ ID NO: 454118 - DNA, 30 bp, Artificial Sequence
  Synthetic oligonucleotide
ttaccgtcagttctcagcggagaacgtagg

SEQ ID NO: 454119 - DNA, 29 bp, Artificial Sequence
  Synthetic oligonucleotide
gtggcgttcataggggcctgctccgtagg

SEQ ID NO: 454120 - DNA, 30 bp, Artificial Sequence
  Synthetic oligonucleotide
atttccaattgatagatactaccgcgtagg

SEQ ID NO: 454121 - DNA, 30 bp, Artificial Sequence
  Synthetic oligonucleotide
gctaaggctcaccttaatgacgttcgtagg

SEQ ID NO: 454122 - DNA, 30 bp, Artificial Sequence
  Synthetic oligonucleotide
taaggataattgatttacgcacacggtagg

SEQ ID NO: 454123 - DNA, 30 bp, Artificial Sequence
  Synthetic oligonucleotide
agtggtgtagtacggccagcacgcggtagg

SEQ ID NO: 454124 - DNA, 30 bp, Artificial Sequence
  Synthetic oligonucleotide
cgccgtatggaagagtaggaatgcggtagg

SEQ ID NO: 454125 - DNA, 30 bp, Artificial Sequence
  Synthetic oligonucleotide
gttttatacgctgaaaccggagcgggtagg

SEQ ID NO: 454126 - DNA, 30 bp, Artificial Sequence
  Synthetic oligonucleotide
ctcgctggtagttcgcggagacttggtagg

SEQ ID NO: 454127 - DNA, 30 bp, Artificial Sequence
  Synthetic oligonucleotide
atcgagctttatctcggctcggtatgtagg

SEQ ID NO: 454128 - DNA, 30 bp, Artificial Sequence
  Synthetic oligonucleotide
gctgcttaggtatctaggcccttttgtagg

SEQ ID NO: 454129 - DNA, 30 bp, Artificial Sequence
  Synthetic oligonucleotide
ggtccgggtttgctgcaacaaagcattagg

SEQ ID NO: 454130 - DNA, 30 bp, Artificial Sequence
  Synthetic oligonucleotide
gcccggaagttctcaaatatcaagattagg

SEQ ID NO: 454131 - DNA, 30 bp, Artificial Sequence
  Synthetic oligonucleotide
tggtttatgttaagttaaaactggattagg

SEQ ID NO: 454132 - DNA, 30 bp, Artificial Sequence
  Synthetic oligonucleotide
gatgaatgaaatttgcagcgtggacttagg

SEQ ID NO: 454133 - DNA, 30 bp, Artificial Sequence
  Synthetic oligonucleotide
aaaccaccaatgactatatctgtacttagg

SEQ ID NO: 454134 - DNA, 30 bp, Artificial Sequence
  Synthetic oligonucleotide
tgcaattttagggttcggggtggccttagg

SEQ ID NO: 454135 - DNA, 30 bp, Artificial Sequence
  Synthetic oligonucleotide
ttagtgggtctattagctccctgccttagg

SEQ ID NO: 454136 - DNA, 30 bp, Artificial Sequence
  Synthetic oligonucleotide
cagattagaacttgtttttaatgtcttagg

SEQ ID NO: 454137 - DNA, 30 bp, Artificial Sequence
  Synthetic oligonucleotide
caaaaactaggccgagtgggatgtcttagg

SEQ ID NO: 454138 - DNA, 30 bp, Artificial Sequence
  Synthetic oligonucleotide
tagccctccggatgagggcatcttcttagg

SEQ ID NO: 454139 - DNA, 30 bp, Artificial Sequence
  Synthetic oligonucleotide
acagacttttaacaatggctctcagttagg

SEQ ID NO: 454140 - DNA, 30 bp, Artificial Sequence
  Synthetic oligonucleotide
aattcccctgactcacgacatccggttagg

SEQ ID NO: 454141 - DNA, 30 bp, Artificial Sequence
  Synthetic oligonucleotide
cttgacgatggcgggatgcttgtggttagg

SEQ ID NO: 454142 - DNA, 30 bp, Artificial Sequence
  Synthetic oligonucleotide
aactcctacgtctaagtatagttggttagg

SEQ ID NO: 454143 - DNA, 30 bp, Artificial Sequence
  Synthetic oligonucleotide
tatggtctcccttgcgaagtgcctgttagg

SEQ ID NO: 454144 - DNA, 30 bp, Artificial Sequence
  Synthetic oligonucleotide
acgtttttggcgtctctatcattatttagg

SEQ ID NO: 454145 - DNA, 30 bp, Artificial Sequence
  Synthetic oligonucleotide
attgccaatggattatagcctttatttagg

SEQ ID NO: 454146 - DNA, 30 bp, Artificial Sequence
  Synthetic oligonucleotide
tctgttcgtttaatggtttttaggtttagg

SEQ ID NO: 454147 - DNA, 30 bp, Artificial Sequence
  Synthetic oligonucleotide
tctctctctcttgtggactggcattttagg

SEQ ID NO: 454148 - DNA, 30 bp, Artificial Sequence
  Synthetic oligonucleotide
atctccccactgagtagatgatattttagg

SEQ ID NO: 454149 - DNA, 30 bp, Artificial Sequence
  Synthetic oligonucleotide
cgtacaatgtctgcagcaaggatttttagg

SEQ ID NO: 454150 - DNA, 30 bp, Artificial Sequence
  Synthetic oligonucleotide
ataacggattctccgacccagcaaaaacgg

SEQ ID NO: 454151 - DNA, 30 bp, Artificial Sequence
  Synthetic oligonucleotide
tctttccagtggatatttacttcaaaacgg

SEQ ID NO: 454152 - DNA, 27 bp, Artificial Sequence
  Synthetic oligonucleotide
ctatgattagctggtccctacaaacgg

SEQ ID NO: 454153 - DNA, 30 bp, Artificial Sequence
  Synthetic oligonucleotide
aaatttcggccagaaggactgcccaaacgg

SEQ ID NO: 454154 - DNA, 30 bp, Artificial Sequence
  Synthetic oligonucleotide
ctactttatagattaaatcattgcaaacgg

SEQ ID NO: 454155 - DNA, 30 bp, Artificial Sequence
  Synthetic oligonucleotide
atctcttaagacttgaacagatagaaacgg

SEQ ID NO: 454156 - DNA, 30 bp, Artificial Sequence
  Synthetic oligonucleotide
gatttcaagtccatcaaaatacctaaacgg

SEQ ID NO: 454157 - DNA, 30 bp, Artificial Sequence
  Synthetic oligonucleotide
caagctaggactttaagttggtctaaacgg

SEQ ID NO: 454158 - DNA, 30 bp, Artificial Sequence
  Synthetic oligonucleotide
atcgcccactggcgccacagaggtaaacgg

SEQ ID NO: 454159 - DNA, 30 bp, Artificial Sequence
  Synthetic oligonucleotide
aagattgcgatttctttcaggagacaacgg

SEQ ID NO: 454160 - DNA, 30 bp, Artificial Sequence
  Synthetic oligonucleotide
acgaggcttttttgtacgagaggacaacgg

SEQ ID NO: 454161 - DNA, 30 bp, Artificial Sequence
  Synthetic oligonucleotide
ttttcgcttatgttatcaacgggacaacgg

SEQ ID NO: 454162 - DNA, 30 bp, Artificial Sequence
  Synthetic oligonucleotide
ctctccagtaacacaaggcgcatacaacgg

SEQ ID NO: 454163 - DNA, 30 bp, Artificial Sequence
  Synthetic oligonucleotide
atagaacctggccacgtaagcttacaacgg

SEQ ID NO: 454164 - DNA, 30 bp, Artificial Sequence
  Synthetic oligonucleotide
agcacagttggttttgggttttaccaacgg

SEQ ID NO: 454165 - DNA, 30 bp, Artificial Sequence
  Synthetic oligonucleotide
cttccgagtaagtatcgcctccgccaacgg

SEQ ID NO: 454166 - DNA, 30 bp, Artificial Sequence
  Synthetic oligonucleotide
taagttccgttatgtgcaaacctccaacgg

SEQ ID NO: 454167 - DNA, 30 bp, Artificial Sequence
  Synthetic oligonucleotide
cgtagtggctgagccctaggcttccaacgg

SEQ ID NO: 454168 - DNA, 30 bp, Artificial Sequence
  Synthetic oligonucleotide
gaaacaggttcgttcccacaggggcaacgg

SEQ ID NO: 454169 - DNA, 30 bp, Artificial Sequence
  Synthetic oligonucleotide
tcggagtcttctatgtgaatgtggcaacgg

SEQ ID NO: 454170 - DNA, 30 bp, Artificial Sequence
  Synthetic oligonucleotide
caatgctacgccacgcctaggtttcaacgg

SEQ ID NO: 454171 - DNA, 30 bp, Artificial Sequence
  Synthetic oligonucleotide
cgttgatcggtccaagcccgttttcaacgg

SEQ ID NO: 454172 - DNA, 30 bp, Artificial Sequence
  Synthetic oligonucleotide
tgaggtcgccgattcgctggagaagaacgg

SEQ ID NO: 454173 - DNA, 30 bp, Artificial Sequence
  Synthetic oligonucleotide
gcagaccccacgactcaggagctagaacgg

SEQ ID NO: 454174 - DNA, 30 bp, Artificial Sequence
  Synthetic oligonucleotide
tttattatgccgcgatattaatccgaacgg

SEQ ID NO: 454175 - DNA, 30 bp, Artificial Sequence
  Synthetic oligonucleotide
agcggcgccgtagacagagatagcgaacgg

SEQ ID NO: 454176 - DNA, 30 bp, Artificial Sequence
  Synthetic oligonucleotide
gccccgatatgggctcaccacaaggaacgg

SEQ ID NO: 454177 - DNA, 30 bp, Artificial Sequence
  Synthetic oligonucleotide
cgggtggttattcgtgacccccaggaacgg

SEQ ID NO: 454178 - DNA, 30 bp, Artificial Sequence
  Synthetic oligonucleotide
tgatgaccgttacgcaattagcaggaacgg

SEQ ID NO: 454179 - DNA, 30 bp, Artificial Sequence
  Synthetic oligonucleotide
ctatcaggaaggcccttgggaccggaacgg

SEQ ID NO: 454180 - DNA, 30 bp, Artificial Sequence
  Synthetic oligonucleotide
atatggcggcttgggcacaacccggaacgg

SEQ ID NO: 454181 - DNA, 30 bp, Artificial Sequence
  Synthetic oligonucleotide
aaaattataggcttaagatggggtgaacgg

SEQ ID NO: 454182 - DNA, 30 bp, Artificial Sequence
  Synthetic oligonucleotide
ctgtggatgttgcgcttttcggttgaacgg

SEQ ID NO: 454183 - DNA, 30 bp, Artificial Sequence
  Synthetic oligonucleotide
cttattcttgttaaactctagaaataacgg

SEQ ID NO: 454184 - DNA, 30 bp, Artificial Sequence
  Synthetic oligonucleotide
ccgagcggttaagacactgcgcgataacgg

SEQ ID NO: 454185 - DNA, 30 bp, Artificial Sequence
  Synthetic oligonucleotide
gtacactggggccctaaatagatataacgg

SEQ ID NO: 454186 - DNA, 30 bp, Artificial Sequence
  Synthetic oligonucleotide
cgtaatggtaacccgcagtatgtataacgg

SEQ ID NO: 454187 - DNA, 30 bp, Artificial Sequence
  Synthetic oligonucleotide
ttcgggccgccaagtaggccgttataacgg

SEQ ID NO: 454188 - DNA, 30 bp, Artificial Sequence
  Synthetic oligonucleotide
gtattaattctcgttgtccgaacctaacgg

SEQ ID NO: 454189 - DNA, 30 bp, Artificial Sequence
  Synthetic oligonucleotide
ttcgggacgtaaaaggtttaagtctaacgg

SEQ ID NO: 454190 - DNA, 30 bp, Artificial Sequence
  Synthetic oligonucleotide
cgcctaaagcctgcggcaatgttctaacgg

SEQ ID NO: 454191 - DNA, 30 bp, Artificial Sequence
  Synthetic oligonucleotide
cgttaacaaacggttgtcgtggagtaacgg

SEQ ID NO: 454192 - DNA, 29 bp, Artificial Sequence
  Synthetic oligonucleotide
tgtggcttagcaatgcgcaggggtaacgg

SEQ ID NO: 454193 - DNA, 30 bp, Artificial Sequence
  Synthetic oligonucleotide
aactgactgatgcaacacgtgatgtaacgg

SEQ ID NO: 454194 - DNA, 30 bp, Artificial Sequence
  Synthetic oligonucleotide
gcagtaattacactcttttttaattaacgg

SEQ ID NO: 454195 - DNA, 30 bp, Artificial Sequence
  Synthetic oligonucleotide
atttgcgaaacatgatgtgcgtcttaacgg

SEQ ID NO: 454196 - DNA, 30 bp, Artificial Sequence
  Synthetic oligonucleotide
aatactattaatagactctcccgttaacgg

SEQ ID NO: 454197 - DNA, 30 bp, Artificial Sequence
  Synthetic oligonucleotide
attagcccgcgagcctggtttttttaacgg

SEQ ID NO: 454198 - DNA, 30 bp, Artificial Sequence
  Synthetic oligonucleotide
actaatttcacgagccgcatggaaacacgg

SEQ ID NO: 454199 - DNA, 30 bp, Artificial Sequence
  Synthetic oligonucleotide
gctaactgccggagacaaggcagaacacgg

SEQ ID NO: 454200 - DNA, 30 bp, Artificial Sequence
  Synthetic oligonucleotide
ttaacgttaaacgcggctatcagaacacgg

SEQ ID NO: 454201 - DNA, 30 bp, Artificial Sequence
  Synthetic oligonucleotide
gtctcttccggtgcttttctcttaacacgg

SEQ ID NO: 454202 - DNA, 30 bp, Artificial Sequence
  Synthetic oligonucleotide
ggctccttcggtcgcaccacacgcacacgg

SEQ ID NO: 454203 - DNA, 30 bp, Artificial Sequence
  Synthetic oligonucleotide
ggagacgaaatcaagtttggactcacacgg

SEQ ID NO: 454204 - DNA, 30 bp, Artificial Sequence
  Synthetic oligonucleotide
aatctaaggcaccccaaccaagagacacgg

SEQ ID NO: 454205 - DNA, 30 bp, Artificial Sequence
  Synthetic oligonucleotide
atgagctctaggaactgggatgagacacgg

SEQ ID NO: 454206 - DNA, 30 bp, Artificial Sequence
  Synthetic oligonucleotide
tagagcatcagtaaggacggtcggacacgg

SEQ ID NO: 454207 - DNA, 30 bp, Artificial Sequence
  Synthetic oligonucleotide
gatagctctgggggtctatcccgtacacgg

SEQ ID NO: 454208 - DNA, 30 bp, Artificial Sequence
  Synthetic oligonucleotide
ttgtagccaagcggaccttgattaccacgg

SEQ ID NO: 454209 - DNA, 30 bp, Artificial Sequence
  Synthetic oligonucleotide
aataggggcttacggacaagcccgccacgg

SEQ ID NO: 454210 - DNA, 30 bp, Artificial Sequence
  Synthetic oligonucleotide
taccggagagacctagcggccaggccacgg

SEQ ID NO: 454211 - DNA, 30 bp, Artificial Sequence
  Synthetic oligonucleotide
taaccacgaagaaattggggtgggccacgg

SEQ ID NO: 454212 - DNA, 30 bp, Artificial Sequence
  Synthetic oligonucleotide
gctctattgatcatcattaattatccacgg

SEQ ID NO: 454213 - DNA, 30 bp, Artificial Sequence
  Synthetic oligonucleotide
ccactgacgtaccggcatcctagagcacgg

SEQ ID NO: 454214 - DNA, 30 bp, Artificial Sequence
  Synthetic oligonucleotide
caattaactacgcctggcgcgaccgcacgg

SEQ ID NO: 454215 - DNA, 30 bp, Artificial Sequence
  Synthetic oligonucleotide
tgaatcgttgttaaggctatcgccgcacgg

SEQ ID NO: 454216 - DNA, 30 bp, Artificial Sequence
  Synthetic oligonucleotide
catattagtcgattcctatatatggcacgg

SEQ ID NO: 454217 - DNA, 30 bp, Artificial Sequence
  Synthetic oligonucleotide
gagtgctaaatacgctagccatatgcacgg

SEQ ID NO: 454218 - DNA, 30 bp, Artificial Sequence
  Synthetic oligonucleotide
cttgggaaggtttgtggtgtttgtgcacgg

SEQ ID NO: 454219 - DNA, 30 bp, Artificial Sequence
  Synthetic oligonucleotide
gtaattaatgctccccccgggaaatcacgg

SEQ ID NO: 454220 - DNA, 30 bp, Artificial Sequence
  Synthetic oligonucleotide
ggttcgttgatgaaaaccgctagatcacgg

SEQ ID NO: 454221 - DNA, 30 bp, Artificial Sequence
  Synthetic oligonucleotide
taaactaacttgttcatacataactcacgg

SEQ ID NO: 454222 - DNA, 29 bp, Artificial Sequence
  Synthetic oligonucleotide
cgcgatctaggcgccatgcgacgtcacgg

SEQ ID NO: 454223 - DNA, 30 bp, Artificial Sequence
  Synthetic oligonucleotide
tttaatgttagatccggtggagcgtcacgg

SEQ ID NO: 454224 - DNA, 30 bp, Artificial Sequence
  Synthetic oligonucleotide
taagatattttcgaatgtgagaattcacgg

SEQ ID NO: 454225 - DNA, 30 bp, Artificial Sequence
  Synthetic oligonucleotide
atgtaacaatttgctacctctacttcacgg

SEQ ID NO: 454226 - DNA, 30 bp, Artificial Sequence
  Synthetic oligonucleotide
actcttctttcgatggaccccccttcacgg

SEQ ID NO: 454227 - DNA, 30 bp, Artificial Sequence
  Synthetic oligonucleotide
tgctcattaattatgatcgagccttcacgg

SEQ ID NO: 454228 - DNA, 30 bp, Artificial Sequence
  Synthetic oligonucleotide
ggaattcattgaatgggattgtgaagacgg

SEQ ID NO: 454229 - DNA, 30 bp, Artificial Sequence
  Synthetic oligonucleotide
tgccggcatttgtctggatcatgcagacgg

SEQ ID NO: 454230 - DNA, 30 bp, Artificial Sequence
  Synthetic oligonucleotide
aattaacaataccttgttgatgtgagacgg

SEQ ID NO: 454231 - DNA, 30 bp, Artificial Sequence
  Synthetic oligonucleotide
ggctccgggcggattgtgccgtgtagacgg

SEQ ID NO: 454232 - DNA, 30 bp, Artificial Sequence
  Synthetic oligonucleotide
acgggtgtcaccctgcaagtttgtagacgg

SEQ ID NO: 454233 - DNA, 29 bp, Artificial Sequence
  Synthetic oligonucleotide
tctaagcgacaactctatcagttagacgg

SEQ ID NO: 454234 - DNA, 30 bp, Artificial Sequence
  Synthetic oligonucleotide
ttatcttgtagacgccggacctaacgacgg

SEQ ID NO: 454235 - DNA, 30 bp, Artificial Sequence
  Synthetic oligonucleotide
caagttgttaattgcgccgcgacacgacgg

SEQ ID NO: 454236 - DNA, 30 bp, Artificial Sequence
  Synthetic oligonucleotide
gaagatttatccgctaactatctacgacgg

SEQ ID NO: 454237 - DNA, 30 bp, Artificial Sequence
  Synthetic oligonucleotide
aataggcggcccattacggcaatccgacgg

SEQ ID NO: 454238 - DNA, 30 bp, Artificial Sequence
  Synthetic oligonucleotide
caaagttaaaatcctttccgtcagcgacgg

SEQ ID NO: 454239 - DNA, 30 bp, Artificial Sequence
  Synthetic oligonucleotide
cggaacgggagattgccacacgggcgacgg

SEQ ID NO: 454240 - DNA, 30 bp, Artificial Sequence
  Synthetic oligonucleotide
gcccactacgcgatactctaattgcgacgg

SEQ ID NO: 454241 - DNA, 30 bp, Artificial Sequence
  Synthetic oligonucleotide
ttaatggcagttcatattacaagtcgacgg

SEQ ID NO: 454242 - DNA, 30 bp, Artificial Sequence
  Synthetic oligonucleotide
gatgggtacttttcgtctcgagttcgacgg

SEQ ID NO: 454243 - DNA, 30 bp, Artificial Sequence
  Synthetic oligonucleotide
tccttctactttcacgcattttttcgacgg

SEQ ID NO: 454244 - DNA, 30 bp, Artificial Sequence
  Synthetic oligonucleotide
ttgggctgttcatggtaatgacaaggacgg

SEQ ID NO: 454245 - DNA, 30 bp, Artificial Sequence
  Synthetic oligonucleotide
agtcgcccaggtccagtggctgcgggacgg

SEQ ID NO: 454246 - DNA, 30 bp, Artificial Sequence
  Synthetic oligonucleotide
gacaaactgttacgagcgttaaatggacgg

SEQ ID NO: 454247 - DNA, 30 bp, Artificial Sequence
  Synthetic oligonucleotide
acttatgagaatttgacttcaattggacgg

SEQ ID NO: 454248 - DNA, 30 bp, Artificial Sequence
  Synthetic oligonucleotide
gggtcaggcataggaataaagtcatgacgg

SEQ ID NO: 454249 - DNA, 30 bp, Artificial Sequence
  Synthetic oligonucleotide
tgccaagatgtgaattcgctaccctgacgg

SEQ ID NO: 454250 - DNA, 30 bp, Artificial Sequence
  Synthetic oligonucleotide
cttttcatgaaacgcgtataggtctgacgg

SEQ ID NO: 454251 - DNA, 30 bp, Artificial Sequence
  Synthetic oligonucleotide
gtaaactggattcgatatattaggtgacgg

SEQ ID NO: 454252 - DNA, 30 bp, Artificial Sequence
  Synthetic oligonucleotide
tctatatagtctttgcattatgattgacgg

SEQ ID NO: 454253 - DNA, 30 bp, Artificial Sequence
  Synthetic oligonucleotide
cctcagtggccctcaactctgtattgacgg

SEQ ID NO: 454254 - DNA, 30 bp, Artificial Sequence
  Synthetic oligonucleotide
ttgactagtaagcaggaccttccaatacgg

SEQ ID NO: 454255 - DNA, 30 bp, Artificial Sequence
  Synthetic oligonucleotide
acgggatctatgatctcgtaggcaatacgg

SEQ ID NO: 454256 - DNA, 30 bp, Artificial Sequence
  Synthetic oligonucleotide
attttctcattcccccggaatcgaatacgg

SEQ ID NO: 454257 - DNA, 30 bp, Artificial Sequence
  Synthetic oligonucleotide
acgttggcgcacttagtgtacgccatacgg

SEQ ID NO: 454258 - DNA, 30 bp, Artificial Sequence
  Synthetic oligonucleotide
aaccggtgtcgggcccgatgtctcatacgg

SEQ ID NO: 454259 - DNA, 30 bp, Artificial Sequence
  Synthetic oligonucleotide
gggttcatctactatcaatcggtcatacgg

SEQ ID NO: 454260 - DNA, 30 bp, Artificial Sequence
  Synthetic oligonucleotide
tttggcctattgactctggaatcgatacgg

SEQ ID NO: 454261 - DNA, 30 bp, Artificial Sequence
  Synthetic oligonucleotide
acaaacgtctcgagcatcagatcgatacgg

SEQ ID NO: 454262 - DNA, 30 bp, Artificial Sequence
  Synthetic oligonucleotide
agtctaacccgtaattaccctaggatacgg

SEQ ID NO: 454263 - DNA, 30 bp, Artificial Sequence
  Synthetic oligonucleotide
ttgtagggcatctgttaaatttgtatacgg

SEQ ID NO: 454264 - DNA, 30 bp, Artificial Sequence
  Synthetic oligonucleotide
aagccggcgtacggccgacatagactacgg

SEQ ID NO: 454265 - DNA, 30 bp, Artificial Sequence
  Synthetic oligonucleotide
cacgtccttaaggggaccgaagacctacgg

SEQ ID NO: 454266 - DNA, 30 bp, Artificial Sequence
  Synthetic oligonucleotide
agtattaaggatggattgcccttgctacgg

SEQ ID NO: 454267 - DNA, 30 bp, Artificial Sequence
  Synthetic oligonucleotide
gtcctaagacatctctcagggcatctacgg

SEQ ID NO: 454268 - DNA, 30 bp, Artificial Sequence
  Synthetic oligonucleotide
gcggtctaatttaccctacgcacagtacgg

SEQ ID NO: 454269 - DNA, 30 bp, Artificial Sequence
  Synthetic oligonucleotide
gtatgtgacgagcctctatcagcagtacgg

SEQ ID NO: 454270 - DNA, 30 bp, Artificial Sequence
  Synthetic oligonucleotide
ccgcctccctagagtctaaccgtagtacgg

SEQ ID NO: 454271 - DNA, 30 bp, Artificial Sequence
  Synthetic oligonucleotide
gcaccactgaagaatagttcttacgtacgg

SEQ ID NO: 454272 - DNA, 30 bp, Artificial Sequence
  Synthetic oligonucleotide
ggcaatatttcaccatttgaagtcgtacgg

SEQ ID NO: 454273 - DNA, 30 bp, Artificial Sequence
  Synthetic oligonucleotide
ttgccggtccctcgtggcaccaaggtacgg

SEQ ID NO: 454274 - DNA, 30 bp, Artificial Sequence
  Synthetic oligonucleotide
gaacttcgcatagtgttcgggtaggtacgg

SEQ ID NO: 454275 - DNA, 30 bp, Artificial Sequence
  Synthetic oligonucleotide
cattagtggacgactcggggtccggtacgg

SEQ ID NO: 454276 - DNA, 30 bp, Artificial Sequence
  Synthetic oligonucleotide
ttaaaccgaggtcacacggccgtggtacgg

SEQ ID NO: 454277 - DNA, 30 bp, Artificial Sequence
  Synthetic oligonucleotide
gaaccagctagatccgcacctgtggtacgg

SEQ ID NO: 454278 - DNA, 29 bp, Artificial Sequence
  Synthetic oligonucleotide
agaccgctaaaggagacggttctgtacgg

SEQ ID NO: 454279 - DNA, 30 bp, Artificial Sequence
  Synthetic oligonucleotide
cttctccacaaatttctggtgattgtacgg

SEQ ID NO: 454280 - DNA, 30 bp, Artificial Sequence
  Synthetic oligonucleotide
attcttcagatgctgtcatagaaattacgg

SEQ ID NO: 454281 - DNA, 30 bp, Artificial Sequence
  Synthetic oligonucleotide
cagctacggggtcacagctgacacttacgg

SEQ ID NO: 454282 - DNA, 30 bp, Artificial Sequence
  Synthetic oligonucleotide
accagtttttgataacagtcgtgcttacgg

SEQ ID NO: 454283 - DNA, 30 bp, Artificial Sequence
  Synthetic oligonucleotide
tttgtggagaggaagtttgtcgtgttacgg

SEQ ID NO: 454284 - DNA, 30 bp, Artificial Sequence
  Synthetic oligonucleotide
ggtcgttaatacgtagcttgttgtttacgg

SEQ ID NO: 454285 - DNA, 30 bp, Artificial Sequence
  Synthetic oligonucleotide
tgccttactataagcctccaatttttacgg

SEQ ID NO: 454286 - DNA, 30 bp, Artificial Sequence
  Synthetic oligonucleotide
ttcagacctcaattttaccccacaaaccgg

SEQ ID NO: 454287 - DNA, 30 bp, Artificial Sequence
  Synthetic oligonucleotide
gggcgtcggactcgacgaggctgcaaccgg

SEQ ID NO: 454288 - DNA, 30 bp, Artificial Sequence
  Synthetic oligonucleotide
accataactggccgagtctatatgaaccgg

SEQ ID NO: 454289 - DNA, 30 bp, Artificial Sequence
  Synthetic oligonucleotide
ttggccatggcgaatatatctttgaaccgg

SEQ ID NO: 454290 - DNA, 30 bp, Artificial Sequence
  Synthetic oligonucleotide
taagcctcgcttacaagcagacctaaccgg

SEQ ID NO: 454291 - DNA, 30 bp, Artificial Sequence
  Synthetic oligonucleotide
atgcaatggcagatattatgggaacaccgg

SEQ ID NO: 454292 - DNA, 30 bp, Artificial Sequence
  Synthetic oligonucleotide
gttcttcctctgaagtttcgattgcaccgg

SEQ ID NO: 454293 - DNA, 30 bp, Artificial Sequence
  Synthetic oligonucleotide
aaaaatctgttcagcataggatcagaccgg

SEQ ID NO: 454294 - DNA, 30 bp, Artificial Sequence
  Synthetic oligonucleotide
gggttgtggcttctagggattatagaccgg

SEQ ID NO: 454295 - DNA, 30 bp, Artificial Sequence
  Synthetic oligonucleotide
aaccggcatgccgcaagcaattcggaccgg

SEQ ID NO: 454296 - DNA, 30 bp, Artificial Sequence
  Synthetic oligonucleotide
agcttccaatatttatggagaagggaccgg

SEQ ID NO: 454297 - DNA, 30 bp, Artificial Sequence
  Synthetic oligonucleotide
ttaggccactaacacaccaggtgggaccgg

SEQ ID NO: 454298 - DNA, 30 bp, Artificial Sequence
  Synthetic oligonucleotide
caaggcgagtcttcttattgtcatgaccgg

SEQ ID NO: 454299 - DNA, 30 bp, Artificial Sequence
  Synthetic oligonucleotide
aggtagtgaatatcctaccgaactgaccgg

SEQ ID NO: 454300 - DNA, 30 bp, Artificial Sequence
  Synthetic oligonucleotide
ggaaagtcgagggtatggccgggtgaccgg

SEQ ID NO: 454301 - DNA, 30 bp, Artificial Sequence
  Synthetic oligonucleotide
atatgtggattttataaatttgttgaccgg

SEQ ID NO: 454302 - DNA, 30 bp, Artificial Sequence
  Synthetic oligonucleotide
ctaggtcattttctgttggtctttgaccgg

SEQ ID NO: 454303 - DNA, 30 bp, Artificial Sequence
  Synthetic oligonucleotide
aacgctaatgtgctgggtgcgcaataccgg

SEQ ID NO: 454304 - DNA, 30 bp, Artificial Sequence
  Synthetic oligonucleotide
aagtatgagggtgccccttggggctaccgg

SEQ ID NO: 454305 - DNA, 30 bp, Artificial Sequence
  Synthetic oligonucleotide
tgtttgccgctcgtgtttctagtctaccgg

SEQ ID NO: 454306 - DNA, 30 bp, Artificial Sequence
  Synthetic oligonucleotide
atatcggttgaaaacgtttggatgtaccgg

SEQ ID NO: 454307 - DNA, 30 bp, Artificial Sequence
  Synthetic oligonucleotide
gaccgtttgccattcgaaagccattaccgg

SEQ ID NO: 454308 - DNA, 30 bp, Artificial Sequence
  Synthetic oligonucleotide
atgtaggtgggtagcatttgggattaccgg

SEQ ID NO: 454309 - DNA, 30 bp, Artificial Sequence
  Synthetic oligonucleotide
ctggaattgccgagtacacgtctcacccgg

SEQ ID NO: 454310 - DNA, 30 bp, Artificial Sequence
  Synthetic oligonucleotide
cggttacccccggtgggactgaagacccgg

SEQ ID NO: 454311 - DNA, 30 bp, Artificial Sequence
  Synthetic oligonucleotide
ttcaggtgatctctgaagctttggacccgg

SEQ ID NO: 454312 - DNA, 30 bp, Artificial Sequence
  Synthetic oligonucleotide
ctttatcctaactactccccgattacccgg

SEQ ID NO: 454313 - DNA, 30 bp, Artificial Sequence
  Synthetic oligonucleotide
gagggccacgggttgttgacaacaccccgg

SEQ ID NO: 454314 - DNA, 30 bp, Artificial Sequence
  Synthetic oligonucleotide
gaggacgccaagtatgaatatttaccccgg

SEQ ID NO: 454315 - DNA, 30 bp, Artificial Sequence
  Synthetic oligonucleotide
gttccgttccgggcacctgccaacccccgg

SEQ ID NO: 454316 - DNA, 29 bp, Artificial Sequence
  Synthetic oligonucleotide
catttttagaccgcctcaagaacccccgg

SEQ ID NO: 454317 - DNA, 30 bp, Artificial Sequence
  Synthetic oligonucleotide
attgcatcattagctacgggcagcccccgg

SEQ ID NO: 454318 - DNA, 27 bp, Artificial Sequence
  Synthetic oligonucleotide
cagcaatgggtccagcaggcgccccgg

SEQ ID NO: 454319 - DNA, 30 bp, Artificial Sequence
  Synthetic oligonucleotide
ctaggctcagcacttgcatcacaagcccgg

SEQ ID NO: 454320 - DNA, 30 bp, Artificial Sequence
  Synthetic oligonucleotide
gtttgatgatcgaacctggtgatagcccgg

SEQ ID NO: 454321 - DNA, 30 bp, Artificial Sequence
  Synthetic oligonucleotide
ccggtttgtagctgtaggtgggcggcccgg

SEQ ID NO: 454322 - DNA, 30 bp, Artificial Sequence
  Synthetic oligonucleotide
tgtgaatatttttggtctctcatggcccgg

SEQ ID NO: 454323 - DNA, 30 bp, Artificial Sequence
  Synthetic oligonucleotide
cgtgccctttgaacgcaaacagcatcccgg

SEQ ID NO: 454324 - DNA, 30 bp, Artificial Sequence
  Synthetic oligonucleotide
agttcaaaatcccaaccctttgcctcccgg

SEQ ID NO: 454325 - DNA, 30 bp, Artificial Sequence
  Synthetic oligonucleotide
tacattgatagagtatttgctggctcccgg

SEQ ID NO: 454326 - DNA, 30 bp, Artificial Sequence
  Synthetic oligonucleotide
gccgtgcattcgggccgcagaatctcccgg

SEQ ID NO: 454327 - DNA, 30 bp, Artificial Sequence
  Synthetic oligonucleotide
aaattgcggtcgccagtgatcgtctcccgg

SEQ ID NO: 454328 - DNA, 30 bp, Artificial Sequence
  Synthetic oligonucleotide
ttctctcatggaaaacatgtccgaagccgg

SEQ ID NO: 454329 - DNA, 30 bp, Artificial Sequence
  Synthetic oligonucleotide
gagcacagcgactcacttcagtctagccgg

SEQ ID NO: 454330 - DNA, 30 bp, Artificial Sequence
  Synthetic oligonucleotide
aatgtgtgacgattaaaggtgtctagccgg

SEQ ID NO: 454331 - DNA, 30 bp, Artificial Sequence
  Synthetic oligonucleotide
ctttttgacgtaactcgggcgcttagccgg

SEQ ID NO: 454332 - DNA, 30 bp, Artificial Sequence
  Synthetic oligonucleotide
aaccagggcgcgggtggtggaagtcgccgg

SEQ ID NO: 454333 - DNA, 30 bp, Artificial Sequence
  Synthetic oligonucleotide
acggctttcgtttttgatcgccgtcgccgg

SEQ ID NO: 454334 - DNA, 30 bp, Artificial Sequence
  Synthetic oligonucleotide
gcgttgccgcgggtgagcggcggtcgccgg

SEQ ID NO: 454335 - DNA, 30 bp, Artificial Sequence
  Synthetic oligonucleotide
gaagtgaaacatttggtcacatacggccgg

SEQ ID NO: 454336 - DNA, 30 bp, Artificial Sequence
  Synthetic oligonucleotide
gtagagattgataggggacggcccggccgg

SEQ ID NO: 454337 - DNA, 30 bp, Artificial Sequence
  Synthetic oligonucleotide
ataacagctattttttaatggctcggccgg

SEQ ID NO: 454338 - DNA, 30 bp, Artificial Sequence
  Synthetic oligonucleotide
gcggtgcggttcatagaaggttagggccgg

SEQ ID NO: 454339 - DNA, 30 bp, Artificial Sequence
  Synthetic oligonucleotide
cccatagatcggttgtttacgaggggccgg

SEQ ID NO: 454340 - DNA, 30 bp, Artificial Sequence
  Synthetic oligonucleotide
atccgtcggttggtttggatgtggggccgg

SEQ ID NO: 454341 - DNA, 30 bp, Artificial Sequence
  Synthetic oligonucleotide
ctattattctatacaagcgagtttggccgg

SEQ ID NO: 454342 - DNA, 30 bp, Artificial Sequence
  Synthetic oligonucleotide
aaatccgcccggattccaacttttggccgg

SEQ ID NO: 454343 - DNA, 30 bp, Artificial Sequence
  Synthetic oligonucleotide
cacctggtctggtggactagcggctgccgg

SEQ ID NO: 454344 - DNA, 30 bp, Artificial Sequence
  Synthetic oligonucleotide
cgccgagcccccagatggtgtgagtgccgg

SEQ ID NO: 454345 - DNA, 30 bp, Artificial Sequence
  Synthetic oligonucleotide
tgcaccggcggcatcaaccctaggtgccgg

SEQ ID NO: 454346 - DNA, 30 bp, Artificial Sequence
  Synthetic oligonucleotide
aaaccactattagacgtcctagggtgccgg

SEQ ID NO: 454347 - DNA, 30 bp, Artificial Sequence
  Synthetic oligonucleotide
taggatacccccagtcaatctgggtgccgg

SEQ ID NO: 454348 - DNA, 30 bp, Artificial Sequence
  Synthetic oligonucleotide
aaacattggtttctcatcggcgattgccgg

SEQ ID NO: 454349 - DNA, 30 bp, Artificial Sequence
  Synthetic oligonucleotide
gcgtcggccaatcctggatccatttgccgg

SEQ ID NO: 454350 - DNA, 30 bp, Artificial Sequence
  Synthetic oligonucleotide
ctggtcaggttgcgtgacgtcataatccgg

SEQ ID NO: 454351 - DNA, 30 bp, Artificial Sequence
  Synthetic oligonucleotide
cagatacttgcgcagagacacatcatccgg

SEQ ID NO: 454352 - DNA, 30 bp, Artificial Sequence
  Synthetic oligonucleotide
aacccgaacgatttcttaaaagcgatccgg

SEQ ID NO: 454353 - DNA, 30 bp, Artificial Sequence
  Synthetic oligonucleotide
gcagcggcacctagtttaataagagtccgg

SEQ ID NO: 454354 - DNA, 30 bp, Artificial Sequence
  Synthetic oligonucleotide
aacgcgcgagactgcgcgttactattccgg

SEQ ID NO: 454355 - DNA, 30 bp, Artificial Sequence
  Synthetic oligonucleotide
tacccaaagaatgattttagacccttccgg

SEQ ID NO: 454356 - DNA, 30 bp, Artificial Sequence
  Synthetic oligonucleotide
agccacaagtggcttactaccctgttccgg

SEQ ID NO: 454357 - DNA, 30 bp, Artificial Sequence
  Synthetic oligonucleotide
atgtgcagtctagaacctcaaggtttccgg

SEQ ID NO: 454358 - DNA, 30 bp, Artificial Sequence
  Synthetic oligonucleotide
gtatcctccgttgctccaaaaccaaagcgg

SEQ ID NO: 454359 - DNA, 30 bp, Artificial Sequence
  Synthetic oligonucleotide
aaaactattaggcttgtactaggaaagcgg

SEQ ID NO: 454360 - DNA, 30 bp, Artificial Sequence
  Synthetic oligonucleotide
ccgctatgtcaaaaatttggctgaaagcgg

SEQ ID NO: 454361 - DNA, 30 bp, Artificial Sequence
  Synthetic oligonucleotide
gctgttatgaaacatccaccacacaagcgg

SEQ ID NO: 454362 - DNA, 30 bp, Artificial Sequence
  Synthetic oligonucleotide
caacaaaacaagaaccccgcggacaagcgg

SEQ ID NO: 454363 - DNA, 30 bp, Artificial Sequence
  Synthetic oligonucleotide
tacttataggaattacatgacgttaagcgg

SEQ ID NO: 454364 - DNA, 30 bp, Artificial Sequence
  Synthetic oligonucleotide
cctccctgctgattccagtggtttaagcgg

SEQ ID NO: 454365 - DNA, 30 bp, Artificial Sequence
  Synthetic oligonucleotide
agcggtggatcacaaatccaggaccagcgg

SEQ ID NO: 454366 - DNA, 30 bp, Artificial Sequence
  Synthetic oligonucleotide
atcacgatcgttacaatacttcttcagcgg

SEQ ID NO: 454367 - DNA, 30 bp, Artificial Sequence
  Synthetic oligonucleotide
tttgcgaatgggccgctgaaagttcagcgg

SEQ ID NO: 454368 - DNA, 30 bp, Artificial Sequence
  Synthetic oligonucleotide
atcatagagcaatattccgtctttcagcgg

SEQ ID NO: 454369 - DNA, 30 bp, Artificial Sequence
  Synthetic oligonucleotide
ctctcaggtgttgactagcactacgagcgg

SEQ ID NO: 454370 - DNA, 30 bp, Artificial Sequence
  Synthetic oligonucleotide
gttgagcacagcttatgactccgcgagcgg

SEQ ID NO: 454371 - DNA, 30 bp, Artificial Sequence
  Synthetic oligonucleotide
gtttacttaaagcagttgggaggcgagcgg

SEQ ID NO: 454372 - DNA, 30 bp, Artificial Sequence
  Synthetic oligonucleotide
catcacctccgcgtgttcaatttcgagcgg

SEQ ID NO: 454373 - DNA, 30 bp, Artificial Sequence
  Synthetic oligonucleotide
gtgttatttatcgaacaggtcagggagcgg

SEQ ID NO: 454374 - DNA, 30 bp, Artificial Sequence
  Synthetic oligonucleotide
cataaacacccgtaatcggggcatgagcgg

SEQ ID NO: 454375 - DNA, 31 bp, Artificial Sequence
  Synthetic oligonucleotide
cctcatcgggtggttgagcagccctgagcgg

SEQ ID NO: 454376 - DNA, 30 bp, Artificial Sequence
  Synthetic oligonucleotide
ccatcgtccggctcactaataagtgagcgg

SEQ ID NO: 454377 - DNA, 30 bp, Artificial Sequence
  Synthetic oligonucleotide
agcgtacgtacaaaccgcctctgtgagcgg

SEQ ID NO: 454378 - DNA, 30 bp, Artificial Sequence
  Synthetic oligonucleotide
caccctaccagtcagagggagtgctagcgg

SEQ ID NO: 454379 - DNA, 30 bp, Artificial Sequence
  Synthetic oligonucleotide
atacaactagtctatcaacttttgtagcgg

SEQ ID NO: 454380 - DNA, 30 bp, Artificial Sequence
  Synthetic oligonucleotide
aatcgaggccacttccctttggcaacgcgg

SEQ ID NO: 454381 - DNA, 30 bp, Artificial Sequence
  Synthetic oligonucleotide
atttcctatggaagttaagtaagaacgcgg

SEQ ID NO: 454382 - DNA, 30 bp, Artificial Sequence
  Synthetic oligonucleotide
ccttccatgtgtggtattgctcacacgcgg

SEQ ID NO: 454383 - DNA, 30 bp, Artificial Sequence
  Synthetic oligonucleotide
aaagtgggccctatcgcgtactccacgcgg

SEQ ID NO: 454384 - DNA, 29 bp, Artificial Sequence
  Synthetic oligonucleotide
tatctttcttgttagtttcatgcacgcgg

SEQ ID NO: 454385 - DNA, 30 bp, Artificial Sequence
  Synthetic oligonucleotide
actagattatccgggctactcgagacgcgg

SEQ ID NO: 454386 - DNA, 30 bp, Artificial Sequence
  Synthetic oligonucleotide
tattgctcatgtataaacaaggggacgcgg

SEQ ID NO: 454387 - DNA, 30 bp, Artificial Sequence
  Synthetic oligonucleotide
aatgacctaaggattgcgaaggggacgcgg

SEQ ID NO: 454388 - DNA, 30 bp, Artificial Sequence
  Synthetic oligonucleotide
gctccagcggacgtaatacatgctacgcgg

SEQ ID NO: 454389 - DNA, 30 bp, Artificial Sequence
  Synthetic oligonucleotide
ctagtactcagacccaattatattacgcgg

SEQ ID NO: 454390 - DNA, 30 bp, Artificial Sequence
  Synthetic oligonucleotide
agtctatggtaggcatgcaagaccccgcgg

SEQ ID NO: 454391 - DNA, 30 bp, Artificial Sequence
  Synthetic oligonucleotide
gcttcgacataaacggtcgcgtaagcgcgg

SEQ ID NO: 454392 - DNA, 30 bp, Artificial Sequence
  Synthetic oligonucleotide
ctataacagcttatctaactcgacgcgcgg

SEQ ID NO: 454393 - DNA, 30 bp, Artificial Sequence
  Synthetic oligonucleotide
cattttggaaagtatccggcatttgcgcgg

SEQ ID NO: 454394 - DNA, 30 bp, Artificial Sequence
  Synthetic oligonucleotide
gagaagacgtatccatgaacgttatcgcgg

SEQ ID NO: 454395 - DNA, 30 bp, Artificial Sequence
  Synthetic oligonucleotide
tttagcccgcgaatcaatctaaactcgcgg

SEQ ID NO: 454396 - DNA, 30 bp, Artificial Sequence
  Synthetic oligonucleotide
tgcgtcgaagatgcggcgacgctctcgcgg

SEQ ID NO: 454397 - DNA, 30 bp, Artificial Sequence
  Synthetic oligonucleotide
cccgcgtggagtcaccttcggtggtcgcgg

SEQ ID NO: 454398 - DNA, 30 bp, Artificial Sequence
  Synthetic oligonucleotide
tttgtgttgcacgaggtggaactgtcgcgg

SEQ ID NO: 454399 - DNA, 30 bp, Artificial Sequence
  Synthetic oligonucleotide
ttcaggtatggtcgataggtaataaggcgg

SEQ ID NO: 454400 - DNA, 30 bp, Artificial Sequence
  Synthetic oligonucleotide
ctggaggtatgggtgttggacgtaaggcgg

SEQ ID NO: 454401 - DNA, 30 bp, Artificial Sequence
  Synthetic oligonucleotide
tttctatgtagctcgtaatgtggcaggcgg

SEQ ID NO: 454402 - DNA, 30 bp, Artificial Sequence
  Synthetic oligonucleotide
gaaaagctggtcggacgagcccataggcgg

SEQ ID NO: 454403 - DNA, 30 bp, Artificial Sequence
  Synthetic oligonucleotide
accgcctgaaaatttcgaagtgataggcgg

SEQ ID NO: 454404 - DNA, 30 bp, Artificial Sequence
  Synthetic oligonucleotide
aacgcacttcgactatacaacggtaggcgg

SEQ ID NO: 454405 - DNA, 30 bp, Artificial Sequence
  Synthetic oligonucleotide
tttcctccggcactgctgtgctaccggcgg

SEQ ID NO: 454406 - DNA, 30 bp, Artificial Sequence
  Synthetic oligonucleotide
acaagccggggccaacccccttgccggcgg

SEQ ID NO: 454407 - DNA, 30 bp, Artificial Sequence
  Synthetic oligonucleotide
gccaggttggcctagacgcttcggcggcgg

SEQ ID NO: 454408 - DNA, 30 bp, Artificial Sequence
  Synthetic oligonucleotide
aaagcgttgacgtgggtaaaacctcggcgg

SEQ ID NO: 454409 - DNA, 30 bp, Artificial Sequence
  Synthetic oligonucleotide
tcttacggatgtcagtgaccgcctcggcgg

SEQ ID NO: 454410 - DNA, 30 bp, Artificial Sequence
  Synthetic oligonucleotide
agcggatttgttcggtctatatacgggcgg

SEQ ID NO: 454411 - DNA, 30 bp, Artificial Sequence
  Synthetic oligonucleotide
gacctatttgttaactagtgaccggggcgg

SEQ ID NO: 454412 - DNA, 30 bp, Artificial Sequence
  Synthetic oligonucleotide
ccttttagaccagaggccgattatgggcgg

SEQ ID NO: 454413 - DNA, 30 bp, Artificial Sequence
  Synthetic oligonucleotide
gcaaacgcgcctctaactctgttatggcgg

SEQ ID NO: 454414 - DNA, 30 bp, Artificial Sequence
  Synthetic oligonucleotide
tgccacagtttacattattacacctggcgg

SEQ ID NO: 454415 - DNA, 30 bp, Artificial Sequence
  Synthetic oligonucleotide
cagccaatttcttgaatccgcacctggcgg

SEQ ID NO: 454416 - DNA, 30 bp, Artificial Sequence
  Synthetic oligonucleotide
caccgccgcttgacaacaccttgctggcgg

SEQ ID NO: 454417 - DNA, 30 bp, Artificial Sequence
  Synthetic oligonucleotide
tcttgcaaaaatatggacattatgtggcgg

SEQ ID NO: 454418 - DNA, 30 bp, Artificial Sequence
  Synthetic oligonucleotide
gcactgtcatgcttgacaccccgttggcgg

SEQ ID NO: 454419 - DNA, 30 bp, Artificial Sequence
  Synthetic oligonucleotide
acaccgctaactcacatataagtttggcgg

SEQ ID NO: 454420 - DNA, 30 bp, Artificial Sequence
  Synthetic oligonucleotide
ggggtatgtagtccacgaacccaaatgcgg

SEQ ID NO: 454421 - DNA, 30 bp, Artificial Sequence
  Synthetic oligonucleotide
cgagttgtaaaaccacagtaggcgatgcgg

SEQ ID NO: 454422 - DNA, 30 bp, Artificial Sequence
  Synthetic oligonucleotide
ttttgtcacctccacagatttgggatgcgg

SEQ ID NO: 454423 - DNA, 30 bp, Artificial Sequence
  Synthetic oligonucleotide
tgagacgacgcgcatctatcattgatgcgg

SEQ ID NO: 454424 - DNA, 30 bp, Artificial Sequence
  Synthetic oligonucleotide
ctaaacgtaaaggtgcaaccaattatgcgg

SEQ ID NO: 454425 - DNA, 30 bp, Artificial Sequence
  Synthetic oligonucleotide
attatgcaagctccagccagtattatgcgg

SEQ ID NO: 454426 - DNA, 30 bp, Artificial Sequence
  Synthetic oligonucleotide
cgtagcattattcatttgtctagactgcgg

SEQ ID NO: 454427 - DNA, 30 bp, Artificial Sequence
  Synthetic oligonucleotide
tcataaagggcgcgtcagatactcctgcgg

SEQ ID NO: 454428 - DNA, 30 bp, Artificial Sequence
  Synthetic oligonucleotide
atttcaacataattaattccctggctgcgg

SEQ ID NO: 454429 - DNA, 30 bp, Artificial Sequence
  Synthetic oligonucleotide
ctagtatccaagttctgctccatgctgcgg

SEQ ID NO: 454430 - DNA, 30 bp, Artificial Sequence
  Synthetic oligonucleotide
cggtgctcgaaagtttctcacgtgctgcgg

SEQ ID NO: 454431 - DNA, 30 bp, Artificial Sequence
  Synthetic oligonucleotide
gtagtagtagcataccgtaattatctgcgg

SEQ ID NO: 454432 - DNA, 30 bp, Artificial Sequence
  Synthetic oligonucleotide
atggctcctgcggtatgtccgcttctgcgg

SEQ ID NO: 454433 - DNA, 30 bp, Artificial Sequence
  Synthetic oligonucleotide
atgcttcgcccgtactttgaataagtgcgg

SEQ ID NO: 454434 - DNA, 30 bp, Artificial Sequence
  Synthetic oligonucleotide
cccctagctgcttggacgcgctcagtgcgg

SEQ ID NO: 454435 - DNA, 30 bp, Artificial Sequence
  Synthetic oligonucleotide
gtttgaataaggggtgtgggggaggtgcgg

SEQ ID NO: 454436 - DNA, 30 bp, Artificial Sequence
  Synthetic oligonucleotide
acggccgaaaccacggtggagactgtgcgg

SEQ ID NO: 454437 - DNA, 30 bp, Artificial Sequence
  Synthetic oligonucleotide
aacccctaacccttgatgcggggtgtgcgg

SEQ ID NO: 454438 - DNA, 30 bp, Artificial Sequence
  Synthetic oligonucleotide
caaacagatcgcatttcaacgcaattgcgg

SEQ ID NO: 454439 - DNA, 30 bp, Artificial Sequence
  Synthetic oligonucleotide
gccccttcgctcgccagatcactattgcgg

SEQ ID NO: 454440 - DNA, 30 bp, Artificial Sequence
  Synthetic oligonucleotide
caaccgacaggcgagcacccagcgttgcgg

SEQ ID NO: 454441 - DNA, 30 bp, Artificial Sequence
  Synthetic oligonucleotide
tcggttccgggcacggtgagactgttgcgg

SEQ ID NO: 454442 - DNA, 30 bp, Artificial Sequence
  Synthetic oligonucleotide
ggcactctaagtaattatgcagtgttgcgg

SEQ ID NO: 454443 - DNA, 30 bp, Artificial Sequence
  Synthetic oligonucleotide
gataaaactctaggggggttcttgttgcgg

SEQ ID NO: 454444 - DNA, 30 bp, Artificial Sequence
  Synthetic oligonucleotide
gcccccggataccgtggtaggtatttgcgg

SEQ ID NO: 454445 - DNA, 30 bp, Artificial Sequence
  Synthetic oligonucleotide
gcgtttcatgggagatggcagcgtttgcgg

SEQ ID NO: 454446 - DNA, 30 bp, Artificial Sequence
  Synthetic oligonucleotide
tattgccaaaatagccaggtctcaaatcgg

SEQ ID NO: 454447 - DNA, 30 bp, Artificial Sequence
  Synthetic oligonucleotide
aatctggagagcgttacaatcgtaaatcgg

SEQ ID NO: 454448 - DNA, 30 bp, Artificial Sequence
  Synthetic oligonucleotide
acccggcctcaaagactttacttaaatcgg

SEQ ID NO: 454449 - DNA, 30 bp, Artificial Sequence
  Synthetic oligonucleotide
gatgtgttggttataaacgccgggaatcgg

SEQ ID NO: 454450 - DNA, 30 bp, Artificial Sequence
  Synthetic oligonucleotide
ctgatagaggcgggtactggcactaatcgg

SEQ ID NO: 454451 - DNA, 30 bp, Artificial Sequence
  Synthetic oligonucleotide
gcatatacgccgataattcgtggtaatcgg

SEQ ID NO: 454452 - DNA, 30 bp, Artificial Sequence
  Synthetic oligonucleotide
cgcgcggatggggtgtgctgtcttaatcgg

SEQ ID NO: 454453 - DNA, 28 bp, Artificial Sequence
  Synthetic oligonucleotide
gagcccagcatttggtggcaaacatcgg

SEQ ID NO: 454454 - DNA, 30 bp, Artificial Sequence
  Synthetic oligonucleotide
tatgtcaccgttcctacggtagaacatcgg

SEQ ID NO: 454455 - DNA, 30 bp, Artificial Sequence
  Synthetic oligonucleotide
agatctatttccataattgcgggacatcgg

SEQ ID NO: 454456 - DNA, 30 bp, Artificial Sequence
  Synthetic oligonucleotide
aggtgagcgaaaccgatactgagagatcgg

SEQ ID NO: 454457 - DNA, 30 bp, Artificial Sequence
  Synthetic oligonucleotide
caatatccgcccagcaatgaccacgatcgg

SEQ ID NO: 454458 - DNA, 30 bp, Artificial Sequence
  Synthetic oligonucleotide
cactcagaatggtgggacctcgaggatcgg

SEQ ID NO: 454459 - DNA, 30 bp, Artificial Sequence
  Synthetic oligonucleotide
taatctgggcgcactggcgacagggatcgg

SEQ ID NO: 454460 - DNA, 30 bp, Artificial Sequence
  Synthetic oligonucleotide
cttaaaccttgctcacagtagtttgatcgg

SEQ ID NO: 454461 - DNA, 30 bp, Artificial Sequence
  Synthetic oligonucleotide
aaaatcagaatcgccattctgggatatcgg

SEQ ID NO: 454462 - DNA, 30 bp, Artificial Sequence
  Synthetic oligonucleotide
aatcttgtgaactcgtaggtgggctatcgg

SEQ ID NO: 454463 - DNA, 30 bp, Artificial Sequence
  Synthetic oligonucleotide
aacttagaaatatttattgggccgtatcgg

SEQ ID NO: 454464 - DNA, 30 bp, Artificial Sequence
  Synthetic oligonucleotide
cgtacgctgacgctgaaaattgcttatcgg

SEQ ID NO: 454465 - DNA, 30 bp, Artificial Sequence
  Synthetic oligonucleotide
gttgaacatttttgaaaccctggttatcgg

SEQ ID NO: 454466 - DNA, 30 bp, Artificial Sequence
  Synthetic oligonucleotide
gtccatatcacacccggggacgtaactcgg

SEQ ID NO: 454467 - DNA, 30 bp, Artificial Sequence
  Synthetic oligonucleotide
tcattacaaaatgcatgtcgagcgactcgg

SEQ ID NO: 454468 - DNA, 30 bp, Artificial Sequence
  Synthetic oligonucleotide
ccttcggcatgccagtgacaggatactcgg

SEQ ID NO: 454469 - DNA, 30 bp, Artificial Sequence
  Synthetic oligonucleotide
ggggtttcgactcacgataaccgtactcgg

SEQ ID NO: 454470 - DNA, 30 bp, Artificial Sequence
  Synthetic oligonucleotide
gtggtgtcgccatagctcacggggcctcgg

SEQ ID NO: 454471 - DNA, 30 bp, Artificial Sequence
  Synthetic oligonucleotide
cggggtccgagtaagcatcttattcctcgg

SEQ ID NO: 454472 - DNA, 30 bp, Artificial Sequence
  Synthetic oligonucleotide
ctgggatttatggggcgaaatcttcctcgg

SEQ ID NO: 454473 - DNA, 30 bp, Artificial Sequence
  Synthetic oligonucleotide
ttcattgcatgtgtcggtgacccagctcgg

SEQ ID NO: 454474 - DNA, 30 bp, Artificial Sequence
  Synthetic oligonucleotide
gctcgagaatacgttgaattagacgctcgg

SEQ ID NO: 454475 - DNA, 30 bp, Artificial Sequence
  Synthetic oligonucleotide
tcatgtcagtgctaataggggtacgctcgg

SEQ ID NO: 454476 - DNA, 30 bp, Artificial Sequence
  Synthetic oligonucleotide
tgcggattgctgtgcagagccgccgctcgg

SEQ ID NO: 454477 - DNA, 30 bp, Artificial Sequence
  Synthetic oligonucleotide
gcaacaccgctttagaactagcgggctcgg

SEQ ID NO: 454478 - DNA, 30 bp, Artificial Sequence
  Synthetic oligonucleotide
taacctctgataaacaaccctatggctcgg

SEQ ID NO: 454479 - DNA, 30 bp, Artificial Sequence
  Synthetic oligonucleotide
atatttgtctgaaagtcctgatatgctcgg

SEQ ID NO: 454480 - DNA, 30 bp, Artificial Sequence
  Synthetic oligonucleotide
ccggccgacccggtcagggctcaatctcgg

SEQ ID NO: 454481 - DNA, 30 bp, Artificial Sequence
  Synthetic oligonucleotide
accaatggtctccggctaattttgtctcgg

SEQ ID NO: 454482 - DNA, 30 bp, Artificial Sequence
  Synthetic oligonucleotide
cccctcgtccatacgccgaaatattctcgg

SEQ ID NO: 454483 - DNA, 30 bp, Artificial Sequence
  Synthetic oligonucleotide
actaaggcctcccggctggagtattctcgg

SEQ ID NO: 454484 - DNA, 30 bp, Artificial Sequence
  Synthetic oligonucleotide
gaggagctcacgaggctagaagaaagtcgg

SEQ ID NO: 454485 - DNA, 30 bp, Artificial Sequence
  Synthetic oligonucleotide
acaacgggtatggccccttatcgaagtcgg

SEQ ID NO: 454486 - DNA, 30 bp, Artificial Sequence
  Synthetic oligonucleotide
aaaatactttccgggggaatattaagtcgg

SEQ ID NO: 454487 - DNA, 30 bp, Artificial Sequence
  Synthetic oligonucleotide
aatccgcctgtagtgtggtatgacagtcgg

SEQ ID NO: 454488 - DNA, 30 bp, Artificial Sequence
  Synthetic oligonucleotide
aggaaacgcattatgctagataagagtcgg

SEQ ID NO: 454489 - DNA, 30 bp, Artificial Sequence
  Synthetic oligonucleotide
ggcctagttgccccgacaaccccgagtcgg

SEQ ID NO: 454490 - DNA, 30 bp, Artificial Sequence
  Synthetic oligonucleotide
atatgtcttcgttacagggcggcacgtcgg

SEQ ID NO: 454491 - DNA, 30 bp, Artificial Sequence
  Synthetic oligonucleotide
aaaatacacactatcagttattgacgtcgg

SEQ ID NO: 454492 - DNA, 30 bp, Artificial Sequence
  Synthetic oligonucleotide
cactgagcgttcgtcatccgaatacgtcgg

SEQ ID NO: 454493 - DNA, 30 bp, Artificial Sequence
  Synthetic oligonucleotide
ccgcaaggtcactagaccacaagcggtcgg

SEQ ID NO: 454494 - DNA, 30 bp, Artificial Sequence
  Synthetic oligonucleotide
aagccgagcgcctgccatgaattcggtcgg

SEQ ID NO: 454495 - DNA, 30 bp, Artificial Sequence
  Synthetic oligonucleotide
tagaccagtgttgttttactgagtggtcgg

SEQ ID NO: 454496 - DNA, 30 bp, Artificial Sequence
  Synthetic oligonucleotide
gtcagcatcaggaccattgtgattggtcgg

SEQ ID NO: 454497 - DNA, 30 bp, Artificial Sequence
  Synthetic oligonucleotide
agaaccccgaagggttgctttaaatgtcgg

SEQ ID NO: 454498 - DNA, 30 bp, Artificial Sequence
  Synthetic oligonucleotide
gagtattattccaattagggaacatgtcgg

SEQ ID NO: 454499 - DNA, 30 bp, Artificial Sequence
  Synthetic oligonucleotide
ggcagacaatcgttgcagcgtccatgtcgg

SEQ ID NO: 454500 - DNA, 30 bp, Artificial Sequence
  Synthetic oligonucleotide
actcgcgtggcaattccacgctactgtcgg

SEQ ID NO: 454501 - DNA, 30 bp, Artificial Sequence
  Synthetic oligonucleotide
gattatgatacggcgtgttaccgctgtcgg

SEQ ID NO: 454502 - DNA, 30 bp, Artificial Sequence
  Synthetic oligonucleotide
ggtttaactgtaagctttatagggtgtcgg

SEQ ID NO: 454503 - DNA, 30 bp, Artificial Sequence
  Synthetic oligonucleotide
ataatttaataggagtatcgggtgtgtcgg

SEQ ID NO: 454504 - DNA, 30 bp, Artificial Sequence
  Synthetic oligonucleotide
ctggaagcccatgtagggctaccaattcgg

SEQ ID NO: 454505 - DNA, 30 bp, Artificial Sequence
  Synthetic oligonucleotide
acactttggtgaatttggaaaaagattcgg

SEQ ID NO: 454506 - DNA, 25 bp, Artificial Sequence
  Synthetic oligonucleotide
ggcaggcaccgccacagagattcgg

SEQ ID NO: 454507 - DNA, 30 bp, Artificial Sequence
  Synthetic oligonucleotide
tatcacccgtccaagaccttctagattcgg

SEQ ID NO: 454508 - DNA, 30 bp, Artificial Sequence
  Synthetic oligonucleotide
gtacgaatccgtccaccgtgagctattcgg

SEQ ID NO: 454509 - DNA, 30 bp, Artificial Sequence
  Synthetic oligonucleotide
ctaggaccctatgggtgacgtcaacttcgg

SEQ ID NO: 454510 - DNA, 30 bp, Artificial Sequence
  Synthetic oligonucleotide
tttgcattagctctgctagcggaacttcgg

SEQ ID NO: 454511 - DNA, 30 bp, Artificial Sequence
  Synthetic oligonucleotide
cccctgtattccatctctcggcaccttcgg

SEQ ID NO: 454512 - DNA, 30 bp, Artificial Sequence
  Synthetic oligonucleotide
ctccatcgtcataagaagttcaggcttcgg

SEQ ID NO: 454513 - DNA, 30 bp, Artificial Sequence
  Synthetic oligonucleotide
ttagggggaaactcctgggcatctcttcgg

SEQ ID NO: 454514 - DNA, 30 bp, Artificial Sequence
  Synthetic oligonucleotide
cgctaaacccccccaatatctcgtcttcgg

SEQ ID NO: 454515 - DNA, 30 bp, Artificial Sequence
  Synthetic oligonucleotide
gtgtaagggctttttattcatggtcttcgg

SEQ ID NO: 454516 - DNA, 31 bp, Artificial Sequence
  Synthetic oligonucleotide
aatcaccgggtcgttagctgctcttcttcgg

SEQ ID NO: 454517 - DNA, 30 bp, Artificial Sequence
  Synthetic oligonucleotide
gaaactcgaaaccgagagtcggcagttcgg

SEQ ID NO: 454518 - DNA, 30 bp, Artificial Sequence
  Synthetic oligonucleotide
cattggaggtcatcgggtctccccgttcgg

SEQ ID NO: 454519 - DNA, 30 bp, Artificial Sequence
  Synthetic oligonucleotide
agcgaaaataaacttgtcacgggcgttcgg

SEQ ID NO: 454520 - DNA, 30 bp, Artificial Sequence
  Synthetic oligonucleotide
tacaggcctacgcagtggatgggcgttcgg

SEQ ID NO: 454521 - DNA, 30 bp, Artificial Sequence
  Synthetic oligonucleotide
cggcatggacacaaaacgatcatcgttcgg

SEQ ID NO: 454522 - DNA, 30 bp, Artificial Sequence
  Synthetic oligonucleotide
tcttgtaagtagcggagaaaactcgttcgg

SEQ ID NO: 454523 - DNA, 30 bp, Artificial Sequence
  Synthetic oligonucleotide
aaatgtgtgactgtagtagcgacggttcgg

SEQ ID NO: 454524 - DNA, 30 bp, Artificial Sequence
  Synthetic oligonucleotide
ccactcggtgggctcgatgttactgttcgg

SEQ ID NO: 454525 - DNA, 30 bp, Artificial Sequence
  Synthetic oligonucleotide
gctagaacggccgacaggatctctgttcgg

SEQ ID NO: 454526 - DNA, 30 bp, Artificial Sequence
  Synthetic oligonucleotide
tggtgctcgcgctttcgatgttgtgttcgg

SEQ ID NO: 454527 - DNA, 29 bp, Artificial Sequence
  Synthetic oligonucleotide
tactgttgaacgaggccgaagaatttcgg

SEQ ID NO: 454528 - DNA, 30 bp, Artificial Sequence
  Synthetic oligonucleotide
cgcagcaaatagtgaagaaactaatttcgg

SEQ ID NO: 454529 - DNA, 30 bp, Artificial Sequence
  Synthetic oligonucleotide
caaagtggaaaactcaccgcagcatttcgg

SEQ ID NO: 454530 - DNA, 30 bp, Artificial Sequence
  Synthetic oligonucleotide
aacggtctgatttgtaagatatcatttcgg

SEQ ID NO: 454531 - DNA, 30 bp, Artificial Sequence
  Synthetic oligonucleotide
catctactctcagtggatctttcatttcgg

SEQ ID NO: 454532 - DNA, 30 bp, Artificial Sequence
  Synthetic oligonucleotide
cgtgtgttttcgcagctaaatcggtttcgg

SEQ ID NO: 454533 - DNA, 30 bp, Artificial Sequence
  Synthetic oligonucleotide
cgattgtttaaatgcatgtaagtgtttcgg

SEQ ID NO: 454534 - DNA, 30 bp, Artificial Sequence
  Synthetic oligonucleotide
ggatcgggctaggtatacaacggttttcgg

SEQ ID NO: 454535 - DNA, 30 bp, Artificial Sequence
  Synthetic oligonucleotide
atactgatttgggaataaagcttttttcgg

SEQ ID NO: 454536 - DNA, 30 bp, Artificial Sequence
  Synthetic oligonucleotide
ggactgtccatgattctggaacaaaaaggg

SEQ ID NO: 454537 - DNA, 30 bp, Artificial Sequence
  Synthetic oligonucleotide
cgcccaggtttcagttggttttcaaaaggg

SEQ ID NO: 454538 - DNA, 30 bp, Artificial Sequence
  Synthetic oligonucleotide
gaccctgtgtgccgtcatctgcacaaaggg

SEQ ID NO: 454539 - DNA, 30 bp, Artificial Sequence
  Synthetic oligonucleotide
ggattactttcccttttcatatacaaaggg

SEQ ID NO: 454540 - DNA, 30 bp, Artificial Sequence
  Synthetic oligonucleotide
agcacgcgggcagcactgcaccgcaaaggg

SEQ ID NO: 454541 - DNA, 30 bp, Artificial Sequence
  Synthetic oligonucleotide
taaaactcaaggtgacgaaaccataaaggg

SEQ ID NO: 454542 - DNA, 30 bp, Artificial Sequence
  Synthetic oligonucleotide
gtgaatgatatgttggccatgactaaaggg

SEQ ID NO: 454543 - DNA, 30 bp, Artificial Sequence
  Synthetic oligonucleotide
ggaattggtgtggagcgggatggtaaaggg

SEQ ID NO: 454544 - DNA, 30 bp, Artificial Sequence
  Synthetic oligonucleotide
accctgataaacatgaaggtaattaaaggg

SEQ ID NO: 454545 - DNA, 30 bp, Artificial Sequence
  Synthetic oligonucleotide
ctagggatttttctcacgtacattaaaggg

SEQ ID NO: 454546 - DNA, 30 bp, Artificial Sequence
  Synthetic oligonucleotide
aagccgatggtcagacactcctgccaaggg

SEQ ID NO: 454547 - DNA, 30 bp, Artificial Sequence
  Synthetic oligonucleotide
cctatatgacttaatggtctatcgcaaggg

SEQ ID NO: 454548 - DNA, 30 bp, Artificial Sequence
  Synthetic oligonucleotide
accgtggagtcccgtaagtgttgcgaaggg

SEQ ID NO: 454549 - DNA, 30 bp, Artificial Sequence
  Synthetic oligonucleotide
ggaccattacttagtaaattaaggtaaggg

SEQ ID NO: 454550 - DNA, 30 bp, Artificial Sequence
  Synthetic oligonucleotide
tttttctcgggtgcttgacgggggtaaggg

SEQ ID NO: 454551 - DNA, 30 bp, Artificial Sequence
  Synthetic oligonucleotide
cttcaacggagctctacggattggtaaggg

SEQ ID NO: 454552 - DNA, 30 bp, Artificial Sequence
  Synthetic oligonucleotide
tcgttcaccgcgtggctggtataaacaggg

SEQ ID NO: 454553 - DNA, 30 bp, Artificial Sequence
  Synthetic oligonucleotide
tacactgtgtctgcctgagttcagacaggg

SEQ ID NO: 454554 - DNA, 30 bp, Artificial Sequence
  Synthetic oligonucleotide
cgttgggcggggaggtgcttggcaccaggg

SEQ ID NO: 454555 - DNA, 30 bp, Artificial Sequence
  Synthetic oligonucleotide
cctttgtcatcccggatcggttcaccaggg

SEQ ID NO: 454556 - DNA, 30 bp, Artificial Sequence
  Synthetic oligonucleotide
ttcgttgcgtatcttatgggtaccccaggg

SEQ ID NO: 454557 - DNA, 30 bp, Artificial Sequence
  Synthetic oligonucleotide
agcgtgttttgtgcgcagtcgctcccaggg

SEQ ID NO: 454558 - DNA, 30 bp, Artificial Sequence
  Synthetic oligonucleotide
gaccgcacccgcctgttgaccttcccaggg

SEQ ID NO: 454559 - DNA, 30 bp, Artificial Sequence
  Synthetic oligonucleotide
caaagcacttctagctcaccacgtccaggg

SEQ ID NO: 454560 - DNA, 30 bp, Artificial Sequence
  Synthetic oligonucleotide
tgttcctgggggtccttgactaacgcaggg

SEQ ID NO: 454561 - DNA, 30 bp, Artificial Sequence
  Synthetic oligonucleotide
gctttatcaagtggtcaaacgatcgcaggg

SEQ ID NO: 454562 - DNA, 30 bp, Artificial Sequence
  Synthetic oligonucleotide
aaattagcatatccgctatcgtctgcaggg

SEQ ID NO: 454563 - DNA, 30 bp, Artificial Sequence
  Synthetic oligonucleotide
tttcggggaagcacaatgcacccatcaggg

SEQ ID NO: 454564 - DNA, 30 bp, Artificial Sequence
  Synthetic oligonucleotide
agtaattggcgaaacttagggtagtcaggg

SEQ ID NO: 454565 - DNA, 30 bp, Artificial Sequence
  Synthetic oligonucleotide
aactctacccttcaaatcagttcttcaggg

SEQ ID NO: 454566 - DNA, 30 bp, Artificial Sequence
  Synthetic oligonucleotide
gcctccaaaccgcttgctcagtaaagaggg

SEQ ID NO: 454567 - DNA, 30 bp, Artificial Sequence
  Synthetic oligonucleotide
gataatttgctaagtttcaaccgcagaggg

SEQ ID NO: 454568 - DNA, 30 bp, Artificial Sequence
  Synthetic oligonucleotide
tcttatgcgattgacacggcaggtagaggg

SEQ ID NO: 454569 - DNA, 30 bp, Artificial Sequence
  Synthetic oligonucleotide
aaaaaatgagagtggatttactaacgaggg

SEQ ID NO: 454570 - DNA, 30 bp, Artificial Sequence
  Synthetic oligonucleotide
gattttgttcacaacgctactttacgaggg

SEQ ID NO: 454571 - DNA, 30 bp, Artificial Sequence
  Synthetic oligonucleotide
tttgtctaaaatcgtgtatcatcccgaggg

SEQ ID NO: 454572 - DNA, 30 bp, Artificial Sequence
  Synthetic oligonucleotide
tccgtatgaacggaaggcgcctcccgaggg

SEQ ID NO: 454573 - DNA, 30 bp, Artificial Sequence
  Synthetic oligonucleotide
gcgtttctccctcgtagtactgggcgaggg

SEQ ID NO: 454574 - DNA, 30 bp, Artificial Sequence
  Synthetic oligonucleotide
attagcatcgatttttactcgttgcgaggg

SEQ ID NO: 454575 - DNA, 30 bp, Artificial Sequence
  Synthetic oligonucleotide
actttatacgtcggtgcttctcgtcgaggg

SEQ ID NO: 454576 - DNA, 30 bp, Artificial Sequence
  Synthetic oligonucleotide
taaaggcttcgcatgtgtatagacggaggg

SEQ ID NO: 454577 - DNA, 30 bp, Artificial Sequence
  Synthetic oligonucleotide
ggttactgtgccccggattaccagggaggg

SEQ ID NO: 454578 - DNA, 30 bp, Artificial Sequence
  Synthetic oligonucleotide
tttaacctttcagggccaacgtcgggaggg

SEQ ID NO: 454579 - DNA, 30 bp, Artificial Sequence
  Synthetic oligonucleotide
agttgatctaagaatggggtttttggaggg

SEQ ID NO: 454580 - DNA, 30 bp, Artificial Sequence
  Synthetic oligonucleotide
ctcgcttctgtatggtcgagtgtatgaggg

SEQ ID NO: 454581 - DNA, 30 bp, Artificial Sequence
  Synthetic oligonucleotide
gtaattccaagcagggggctagtctgaggg

SEQ ID NO: 454582 - DNA, 30 bp, Artificial Sequence
  Synthetic oligonucleotide
agtaggtccttgcggtccccacattgaggg

SEQ ID NO: 454583 - DNA, 30 bp, Artificial Sequence
  Synthetic oligonucleotide
gagtgtaattgatagtgggtaaacctaggg

SEQ ID NO: 454584 - DNA, 30 bp, Artificial Sequence
  Synthetic oligonucleotide
aatgtgggaatcggacaattttggctaggg

SEQ ID NO: 454585 - DNA, 30 bp, Artificial Sequence
  Synthetic oligonucleotide
cccaatttgtgatcctattctcatctaggg

SEQ ID NO: 454586 - DNA, 30 bp, Artificial Sequence
  Synthetic oligonucleotide
gttttggtacggaagcttcaggttctaggg

SEQ ID NO: 454587 - DNA, 30 bp, Artificial Sequence
  Synthetic oligonucleotide
tttgagtttgcagcgcattataaagtaggg

SEQ ID NO: 454588 - DNA, 30 bp, Artificial Sequence
  Synthetic oligonucleotide
tcctgaaaacggcccactatagaagtaggg

SEQ ID NO: 454589 - DNA, 30 bp, Artificial Sequence
  Synthetic oligonucleotide
ttgagtctcgcgtaattaactagcgtaggg

SEQ ID NO: 454590 - DNA, 30 bp, Artificial Sequence
  Synthetic oligonucleotide
cttgcaccatcccgcttcgtaggcgtaggg

SEQ ID NO: 454591 - DNA, 30 bp, Artificial Sequence
  Synthetic oligonucleotide
actctcccttgaagcacaggtccggtaggg

SEQ ID NO: 454592 - DNA, 30 bp, Artificial Sequence
  Synthetic oligonucleotide
ataggataggtccagttccggttggtaggg

SEQ ID NO: 454593 - DNA, 30 bp, Artificial Sequence
  Synthetic oligonucleotide
taggattactcttgcggaagttttgtaggg

SEQ ID NO: 454594 - DNA, 30 bp, Artificial Sequence
  Synthetic oligonucleotide
cgcaggtccctacacaggtgcaaattaggg

SEQ ID NO: 454595 - DNA, 30 bp, Artificial Sequence
  Synthetic oligonucleotide
atcaccaagtgaccgctatagtaattaggg

SEQ ID NO: 454596 - DNA, 30 bp, Artificial Sequence
  Synthetic oligonucleotide
aaatttcaaataccgtttataaccttaggg

SEQ ID NO: 454597 - DNA, 30 bp, Artificial Sequence
  Synthetic oligonucleotide
cacgtaccataaggataagatcgcttaggg

SEQ ID NO: 454598 - DNA, 30 bp, Artificial Sequence
  Synthetic oligonucleotide
tttacttgtaccaggccctacatcttaggg

SEQ ID NO: 454599 - DNA, 30 bp, Artificial Sequence
  Synthetic oligonucleotide
aatcctgatcttcttgggacgccgttaggg

SEQ ID NO: 454600 - DNA, 30 bp, Artificial Sequence
  Synthetic oligonucleotide
cacacacataaccggggtacccggttaggg

SEQ ID NO: 454601 - DNA, 30 bp, Artificial Sequence
  Synthetic oligonucleotide
gctaagtgtgtatttaagactatgttaggg

SEQ ID NO: 454602 - DNA, 30 bp, Artificial Sequence
  Synthetic oligonucleotide
gattcagcataaccttttgacactttaggg

SEQ ID NO: 454603 - DNA, 30 bp, Artificial Sequence
  Synthetic oligonucleotide
aaatgtctaaccaaatatgtaggtttaggg

SEQ ID NO: 454604 - DNA, 30 bp, Artificial Sequence
  Synthetic oligonucleotide
tagttcagatccgtggcacctccaaacggg

SEQ ID NO: 454605 - DNA, 30 bp, Artificial Sequence
  Synthetic oligonucleotide
aaggggtaaaaggcgcggctgagaaacggg

SEQ ID NO: 454606 - DNA, 30 bp, Artificial Sequence
  Synthetic oligonucleotide
cgtcaggtacccttatgacgtaccaacggg

SEQ ID NO: 454607 - DNA, 30 bp, Artificial Sequence
  Synthetic oligonucleotide
atagttgtcgtccggtcgtcatccaacggg

SEQ ID NO: 454608 - DNA, 30 bp, Artificial Sequence
  Synthetic oligonucleotide
ttgattgattcgaccgccactagcaacggg

SEQ ID NO: 454609 - DNA, 30 bp, Artificial Sequence
  Synthetic oligonucleotide
tccacttacccatactatcggctgaacggg

SEQ ID NO: 454610 - DNA, 30 bp, Artificial Sequence
  Synthetic oligonucleotide
cccagcacccacgattaacgaactaacggg

SEQ ID NO: 454611 - DNA, 30 bp, Artificial Sequence
  Synthetic oligonucleotide
gcacgttatactaatcgtgttcaacacggg

SEQ ID NO: 454612 - DNA, 30 bp, Artificial Sequence
  Synthetic oligonucleotide
gcgttgtaagtttttctagatggacacggg

SEQ ID NO: 454613 - DNA, 30 bp, Artificial Sequence
  Synthetic oligonucleotide
gctatgccctacgttggccgtgcccacggg

SEQ ID NO: 454614 - DNA, 30 bp, Artificial Sequence
  Synthetic oligonucleotide
gtaatatgcatgcaaacgtccccgcacggg

SEQ ID NO: 454615 - DNA, 30 bp, Artificial Sequence
  Synthetic oligonucleotide
agttttagtggcatacgggagggtcacggg

SEQ ID NO: 454616 - DNA, 30 bp, Artificial Sequence
  Synthetic oligonucleotide
tttatatcttgttagtctcaagttcacggg

SEQ ID NO: 454617 - DNA, 30 bp, Artificial Sequence
  Synthetic oligonucleotide
agaggttatgctcgaggctgtacagacggg

SEQ ID NO: 454618 - DNA, 30 bp, Artificial Sequence
  Synthetic oligonucleotide
tttccggcagtaaacttgaaggcagacggg

SEQ ID NO: 454619 - DNA, 30 bp, Artificial Sequence
  Synthetic oligonucleotide
gttaattttaaaattagtacaaccgacggg

SEQ ID NO: 454620 - DNA, 30 bp, Artificial Sequence
  Synthetic oligonucleotide
agcccaggtcagggcgggacgatggacggg

SEQ ID NO: 454621 - DNA, 30 bp, Artificial Sequence
  Synthetic oligonucleotide
cctccaggccatcggaatcggtatgacggg

SEQ ID NO: 454622 - DNA, 30 bp, Artificial Sequence
  Synthetic oligonucleotide
agtggagggcgggtcacggctcctgacggg

SEQ ID NO: 454623 - DNA, 30 bp, Artificial Sequence
  Synthetic oligonucleotide
ggacatgatatgttaatttaacttgacggg

SEQ ID NO: 454624 - DNA, 30 bp, Artificial Sequence
  Synthetic oligonucleotide
taaattgtgttgacatttataaaatacggg

SEQ ID NO: 454625 - DNA, 30 bp, Artificial Sequence
  Synthetic oligonucleotide
cgatgcagcgtatcagttcgtaaatacggg

SEQ ID NO: 454626 - DNA, 30 bp, Artificial Sequence
  Synthetic oligonucleotide
tgcgtcgatcctccggaaccccaatacggg

SEQ ID NO: 454627 - DNA, 30 bp, Artificial Sequence
  Synthetic oligonucleotide
cgcgagtcgcggtttactcagccatacggg

SEQ ID NO: 454628 - DNA, 30 bp, Artificial Sequence
  Synthetic oligonucleotide
gcccgacgtacagccgattacggatacggg

SEQ ID NO: 454629 - DNA, 30 bp, Artificial Sequence
  Synthetic oligonucleotide
ggaccacgggccgtagggttcagctacggg

SEQ ID NO: 454630 - DNA, 30 bp, Artificial Sequence
  Synthetic oligonucleotide
tttccgactctaaacgtcgctatgtacggg

SEQ ID NO: 454631 - DNA, 30 bp, Artificial Sequence
  Synthetic oligonucleotide
tgcgggcgcctccatggtatgttaaccggg

SEQ ID NO: 454632 - DNA, 30 bp, Artificial Sequence
  Synthetic oligonucleotide
ctcgcagactagccgccaagaaccaccggg

SEQ ID NO: 454633 - DNA, 30 bp, Artificial Sequence
  Synthetic oligonucleotide
taagggtacttacctgataccgccaccggg

SEQ ID NO: 454634 - DNA, 30 bp, Artificial Sequence
  Synthetic oligonucleotide
atatagcgcgaccgtagtcaggttaccggg

SEQ ID NO: 454635 - DNA, 30 bp, Artificial Sequence
  Synthetic oligonucleotide
ggccaagactgaacagcgtgtcgacccggg

SEQ ID NO: 454636 - DNA, 30 bp, Artificial Sequence
  Synthetic oligonucleotide
actgaagctttaagatctgcgcagcccggg

SEQ ID NO: 454637 - DNA, 30 bp, Artificial Sequence
  Synthetic oligonucleotide
taaatgtataaagattagatattgcccggg

SEQ ID NO: 454638 - DNA, 30 bp, Artificial Sequence
  Synthetic oligonucleotide
agggcgactaaacgtacatgcgcagccggg

SEQ ID NO: 454639 - DNA, 29 bp, Artificial Sequence
  Synthetic oligonucleotide
caagctcggtcgacggagaaaaggccggg

SEQ ID NO: 454640 - DNA, 30 bp, Artificial Sequence
  Synthetic oligonucleotide
gtgacacactgctgacggctgggggccggg

SEQ ID NO: 454641 - DNA, 30 bp, Artificial Sequence
  Synthetic oligonucleotide
tcgcagctgccgggaaacagaccatccggg

SEQ ID NO: 454642 - DNA, 30 bp, Artificial Sequence
  Synthetic oligonucleotide
ggggttcaatagttctgaatttgatccggg

SEQ ID NO: 454643 - DNA, 30 bp, Artificial Sequence
  Synthetic oligonucleotide
gagtcgttacccgagcagccaatatccggg

SEQ ID NO: 454644 - DNA, 30 bp, Artificial Sequence
  Synthetic oligonucleotide
ccaaatttttacggcgatatgcgctccggg

SEQ ID NO: 454645 - DNA, 30 bp, Artificial Sequence
  Synthetic oligonucleotide
gcggagcagcgtcggctggaaaggtccggg

SEQ ID NO: 454646 - DNA, 30 bp, Artificial Sequence
  Synthetic oligonucleotide
ccactcccggtctgggggggcatgtccggg

SEQ ID NO: 454647 - DNA, 30 bp, Artificial Sequence
  Synthetic oligonucleotide
tacgttctacgacatctagcaccaagcggg

SEQ ID NO: 454648 - DNA, 30 bp, Artificial Sequence
  Synthetic oligonucleotide
gtaattgttattataattttcgccagcggg

SEQ ID NO: 454649 - DNA, 30 bp, Artificial Sequence
  Synthetic oligonucleotide
aattgggagagccttggcaaggcgagcggg

SEQ ID NO: 454650 - DNA, 30 bp, Artificial Sequence
  Synthetic oligonucleotide
ggaatattctctcgaatggagtctagcggg

SEQ ID NO: 454651 - DNA, 30 bp, Artificial Sequence
  Synthetic oligonucleotide
tcgacccttatatagtgggctcgtagcggg

SEQ ID NO: 454652 - DNA, 30 bp, Artificial Sequence
  Synthetic oligonucleotide
cttctgaaagcaaaaacaaactgacgcggg

SEQ ID NO: 454653 - DNA, 30 bp, Artificial Sequence
  Synthetic oligonucleotide
tcaagaatctgtttccgaggttgacgcggg

SEQ ID NO: 454654 - DNA, 30 bp, Artificial Sequence
  Synthetic oligonucleotide
tgcttaggctctgttcctggcctacgcggg

SEQ ID NO: 454655 - DNA, 30 bp, Artificial Sequence
  Synthetic oligonucleotide
atagtgcatttccgcgttaccttacgcggg

SEQ ID NO: 454656 - DNA, 30 bp, Artificial Sequence
  Synthetic oligonucleotide
taagtgtaactggatgtaccgacgcgcggg

SEQ ID NO: 454657 - DNA, 30 bp, Artificial Sequence
  Synthetic oligonucleotide
tgtgttacatttttgttgtgttttcgcggg

SEQ ID NO: 454658 - DNA, 30 bp, Artificial Sequence
  Synthetic oligonucleotide
ggactcagtgcgcgggtaatcgcaggcggg

SEQ ID NO: 454659 - DNA, 30 bp, Artificial Sequence
  Synthetic oligonucleotide
ccagaccccgttgcgggccacctaggcggg

SEQ ID NO: 454660 - DNA, 30 bp, Artificial Sequence
  Synthetic oligonucleotide
gttagtattctgcctatggaggtgggcggg

SEQ ID NO: 454661 - DNA, 30 bp, Artificial Sequence
  Synthetic oligonucleotide
atctgggttttcaattggggccctggcggg

SEQ ID NO: 454662 - DNA, 30 bp, Artificial Sequence
  Synthetic oligonucleotide
tccaggaagctgtttggagaagcctgcggg

SEQ ID NO: 454663 - DNA, 30 bp, Artificial Sequence
  Synthetic oligonucleotide
gttaattcctatcccatcttcgattgcggg

SEQ ID NO: 454664 - DNA, 30 bp, Artificial Sequence
  Synthetic oligonucleotide
atgaaccgatttttttgatggtgttgcggg

SEQ ID NO: 454665 - DNA, 30 bp, Artificial Sequence
  Synthetic oligonucleotide
tgttctgtagatcgaacggggctaatcggg

SEQ ID NO: 454666 - DNA, 30 bp, Artificial Sequence
  Synthetic oligonucleotide
cgaggaagccaagccgcacggggcatcggg

SEQ ID NO: 454667 - DNA, 30 bp, Artificial Sequence
  Synthetic oligonucleotide
attaagcaaacgccgagctctgggatcggg

SEQ ID NO: 454668 - DNA, 30 bp, Artificial Sequence
  Synthetic oligonucleotide
aacaatttttcatttaagtatgaactcggg

SEQ ID NO: 454669 - DNA, 30 bp, Artificial Sequence
  Synthetic oligonucleotide
cccggacgacgcgtcttgtgctcactcggg

SEQ ID NO: 454670 - DNA, 30 bp, Artificial Sequence
  Synthetic oligonucleotide
acggctcgaggcagctactcgcatctcggg

SEQ ID NO: 454671 - DNA, 30 bp, Artificial Sequence
  Synthetic oligonucleotide
cgactgcctattcggtcgctatatctcggg

SEQ ID NO: 454672 - DNA, 30 bp, Artificial Sequence
  Synthetic oligonucleotide
aactcggcaccatagagccatcttgtcggg

SEQ ID NO: 454673 - DNA, 30 bp, Artificial Sequence
  Synthetic oligonucleotide
tatcgcagtagaccatgaatgtgattcggg

SEQ ID NO: 454674 - DNA, 30 bp, Artificial Sequence
  Synthetic oligonucleotide
caagagatcacggtggaatcaaacttcggg

SEQ ID NO: 454675 - DNA, 30 bp, Artificial Sequence
  Synthetic oligonucleotide
gctttaccgtttacgttttaaggcttcggg

SEQ ID NO: 454676 - DNA, 30 bp, Artificial Sequence
  Synthetic oligonucleotide
taggaggtgtttaagacgcacaggttcggg

SEQ ID NO: 454677 - DNA, 30 bp, Artificial Sequence
  Synthetic oligonucleotide
gccactagaagagcgtatcgcctgttcggg

SEQ ID NO: 454678 - DNA, 30 bp, Artificial Sequence
  Synthetic oligonucleotide
cccacatgtcccccgacattggtgttcggg

SEQ ID NO: 454679 - DNA, 30 bp, Artificial Sequence
  Synthetic oligonucleotide
gaactcacgattatcgttaagtatttcggg

SEQ ID NO: 454680 - DNA, 30 bp, Artificial Sequence
  Synthetic oligonucleotide
tcctgcttagatgcaggttggatcaagggg

SEQ ID NO: 454681 - DNA, 30 bp, Artificial Sequence
  Synthetic oligonucleotide
cacagcatccccaggtgaagtttcaagggg

SEQ ID NO: 454682 - DNA, 30 bp, Artificial Sequence
  Synthetic oligonucleotide
ttctagaatggaccaatcaagcagaagggg

SEQ ID NO: 454683 - DNA, 30 bp, Artificial Sequence
  Synthetic oligonucleotide
gtgccctgtagcagtcccaatggacagggg

SEQ ID NO: 454684 - DNA, 30 bp, Artificial Sequence
  Synthetic oligonucleotide
gccactggtgggtgccaccataagcagggg

SEQ ID NO: 454685 - DNA, 30 bp, Artificial Sequence
  Synthetic oligonucleotide
gaatttgcaacaaattttggtgagcagggg

SEQ ID NO: 454686 - DNA, 30 bp, Artificial Sequence
  Synthetic oligonucleotide
gcccaggagaaatctattgtccatcagggg

SEQ ID NO: 454687 - DNA, 30 bp, Artificial Sequence
  Synthetic oligonucleotide
acttttttagagacgcatcggtccgagggg

SEQ ID NO: 454688 - DNA, 30 bp, Artificial Sequence
  Synthetic oligonucleotide
ttaggtgtcaaagcggcatagtgggagggg

SEQ ID NO: 454689 - DNA, 30 bp, Artificial Sequence
  Synthetic oligonucleotide
tcaggatccacccagacaatgctggagggg

SEQ ID NO: 454690 - DNA, 30 bp, Artificial Sequence
  Synthetic oligonucleotide
gttcgggctattgcggctctggtggagggg

SEQ ID NO: 454691 - DNA, 30 bp, Artificial Sequence
  Synthetic oligonucleotide
tatgatgatagttcaggcccgggatagggg

SEQ ID NO: 454692 - DNA, 30 bp, Artificial Sequence
  Synthetic oligonucleotide
atccgttgtttagcgttgtaagtatagggg

SEQ ID NO: 454693 - DNA, 30 bp, Artificial Sequence
  Synthetic oligonucleotide
aacggactaagtaccaccttctactagggg

SEQ ID NO: 454694 - DNA, 30 bp, Artificial Sequence
  Synthetic oligonucleotide
accgtttagaagtcgttttctgtctagggg

SEQ ID NO: 454695 - DNA, 30 bp, Artificial Sequence
  Synthetic oligonucleotide
atatttggttatggcaataatgtgtagggg

SEQ ID NO: 454696 - DNA, 30 bp, Artificial Sequence
  Synthetic oligonucleotide
tggagttccccctgaggcataggttagggg

SEQ ID NO: 454697 - DNA, 30 bp, Artificial Sequence
  Synthetic oligonucleotide
taaattgtattggtaccggctaaaacgggg

SEQ ID NO: 454698 - DNA, 30 bp, Artificial Sequence
  Synthetic oligonucleotide
tggctaagtcacgcaaggcctacaacgggg

SEQ ID NO: 454699 - DNA, 30 bp, Artificial Sequence
  Synthetic oligonucleotide
ctatagggtatcggtggcaatcgaacgggg

SEQ ID NO: 454700 - DNA, 30 bp, Artificial Sequence
  Synthetic oligonucleotide
gtatctggattacagtggtctcacacgggg

SEQ ID NO: 454701 - DNA, 28 bp, Artificial Sequence
  Synthetic oligonucleotide
caaatctcagccggactcaaccacgggg

SEQ ID NO: 454702 - DNA, 30 bp, Artificial Sequence
  Synthetic oligonucleotide
atgtcaactccgcttattgaattgacgggg

SEQ ID NO: 454703 - DNA, 30 bp, Artificial Sequence
  Synthetic oligonucleotide
cttgtcaccccggaacccctgtatacgggg

SEQ ID NO: 454704 - DNA, 30 bp, Artificial Sequence
  Synthetic oligonucleotide
tggaattttttacaagtgggatgtacgggg

SEQ ID NO: 454705 - DNA, 30 bp, Artificial Sequence
  Synthetic oligonucleotide
tggcagttgaggtaccgccaagcgccgggg

SEQ ID NO: 454706 - DNA, 30 bp, Artificial Sequence
  Synthetic oligonucleotide
gcattcccggagtattaatagatgccgggg

SEQ ID NO: 454707 - DNA, 30 bp, Artificial Sequence
  Synthetic oligonucleotide
tccgtactcaaccttaagttgagtccgggg

SEQ ID NO: 454708 - DNA, 30 bp, Artificial Sequence
  Synthetic oligonucleotide
aaaaggtccacagctgattggtttccgggg

SEQ ID NO: 454709 - DNA, 30 bp, Artificial Sequence
  Synthetic oligonucleotide
taaccgtctttaacgcgccagcccgcgggg

SEQ ID NO: 454710 - DNA, 30 bp, Artificial Sequence
  Synthetic oligonucleotide
accttctgtcttaagacccgacgcgcgggg

SEQ ID NO: 454711 - DNA, 30 bp, Artificial Sequence
  Synthetic oligonucleotide
tcgcgttcatgatagagttttccggcgggg

SEQ ID NO: 454712 - DNA, 30 bp, Artificial Sequence
  Synthetic oligonucleotide
cagttaggaaacgcatgcgaggctgcgggg

SEQ ID NO: 454713 - DNA, 30 bp, Artificial Sequence
  Synthetic oligonucleotide
tcagggtccccttcacccagctctgcgggg

SEQ ID NO: 454714 - DNA, 30 bp, Artificial Sequence
  Synthetic oligonucleotide
ttggcgattctgggtgcatatggtgcgggg

SEQ ID NO: 454715 - DNA, 30 bp, Artificial Sequence
  Synthetic oligonucleotide
gttaatcagcgatacgactgacggtcgggg

SEQ ID NO: 454716 - DNA, 30 bp, Artificial Sequence
  Synthetic oligonucleotide
gtccgtagttcaattgcgactttgtcgggg

SEQ ID NO: 454717 - DNA, 30 bp, Artificial Sequence
  Synthetic oligonucleotide
atcaggaacaagacacggggagattcgggg

SEQ ID NO: 454718 - DNA, 30 bp, Artificial Sequence
  Synthetic oligonucleotide
tatttccctagaaatcgccgcgattcgggg

SEQ ID NO: 454719 - DNA, 30 bp, Artificial Sequence
  Synthetic oligonucleotide
tgctaatgaccggcgcaaaccttttcgggg

SEQ ID NO: 454720 - DNA, 30 bp, Artificial Sequence
  Synthetic oligonucleotide
accatttgtggaaacacaaggcaaaggggg

SEQ ID NO: 454721 - DNA, 30 bp, Artificial Sequence
  Synthetic oligonucleotide
cggacatgggtgtggcggactgcaaggggg

SEQ ID NO: 454722 - DNA, 30 bp, Artificial Sequence
  Synthetic oligonucleotide
attcgacgtcagggcccaaaccccaggggg

SEQ ID NO: 454723 - DNA, 30 bp, Artificial Sequence
  Synthetic oligonucleotide
tacgctgcaaaaggcccagtagccaggggg

SEQ ID NO: 454724 - DNA, 30 bp, Artificial Sequence
  Synthetic oligonucleotide
atggccacaatcggcccgtttttgaggggg

SEQ ID NO: 454725 - DNA, 30 bp, Artificial Sequence
  Synthetic oligonucleotide
acctgtagcctagttggttctcgtaggggg

SEQ ID NO: 454726 - DNA, 30 bp, Artificial Sequence
  Synthetic oligonucleotide
gaccttccccaacttgcatcaagacggggg

SEQ ID NO: 454727 - DNA, 30 bp, Artificial Sequence
  Synthetic oligonucleotide
aagtgggtatagctcattacatgacggggg

SEQ ID NO: 454728 - DNA, 30 bp, Artificial Sequence
  Synthetic oligonucleotide
tggaatgatatgcctctggcaatacggggg

SEQ ID NO: 454729 - DNA, 30 bp, Artificial Sequence
  Synthetic oligonucleotide
ggcgttgggacgggggacgacgaccggggg

SEQ ID NO: 454730 - DNA, 30 bp, Artificial Sequence
  Synthetic oligonucleotide
ttttgttggttgacttttattaagcggggg

SEQ ID NO: 454731 - DNA, 30 bp, Artificial Sequence
  Synthetic oligonucleotide
tagggttttgggcctggatctggtcggggg

SEQ ID NO: 454732 - DNA, 30 bp, Artificial Sequence
  Synthetic oligonucleotide
tgtggtccgggtaggactctccaagggggg

SEQ ID NO: 454733 - DNA, 30 bp, Artificial Sequence
  Synthetic oligonucleotide
ccttggggggaatagccttaataagggggg

SEQ ID NO: 454734 - DNA, 30 bp, Artificial Sequence
  Synthetic oligonucleotide
gtgaggaagtggcacaggagcccagggggg

SEQ ID NO: 454735 - DNA, 30 bp, Artificial Sequence
  Synthetic oligonucleotide
gggcgctacagcctcctgcgatcagggggg

SEQ ID NO: 454736 - DNA, 30 bp, Artificial Sequence
  Synthetic oligonucleotide
accaaggcctggggtgcggtgggagggggg

SEQ ID NO: 454737 - DNA, 30 bp, Artificial Sequence
  Synthetic oligonucleotide
agtagtatgtgtgtctctagactagggggg

SEQ ID NO: 454738 - DNA, 30 bp, Artificial Sequence
  Synthetic oligonucleotide
gctgactaactacttaacggtggggggggg

SEQ ID NO: 454739 - DNA, 30 bp, Artificial Sequence
  Synthetic oligonucleotide
gtttcaacccccatatgtaaattggggggg

SEQ ID NO: 454740 - DNA, 30 bp, Artificial Sequence
  Synthetic oligonucleotide
gggggtcctgcagccatcatgtgtgggggg

SEQ ID NO: 454741 - DNA, 30 bp, Artificial Sequence
  Synthetic oligonucleotide
cagcgcccacgggcgcgctgttcatggggg

SEQ ID NO: 454742 - DNA, 30 bp, Artificial Sequence
  Synthetic oligonucleotide
ttggccgttccagcgcggagcacgtggggg

SEQ ID NO: 454743 - DNA, 30 bp, Artificial Sequence
  Synthetic oligonucleotide
ttgcgatttacgggcgaattccgttggggg

SEQ ID NO: 454744 - DNA, 30 bp, Artificial Sequence
  Synthetic oligonucleotide
ttaacgtcctcttgtgtttggacaatgggg

SEQ ID NO: 454745 - DNA, 30 bp, Artificial Sequence
  Synthetic oligonucleotide
tgtgttcaacggtggacgtatgcaatgggg

SEQ ID NO: 454746 - DNA, 30 bp, Artificial Sequence
  Synthetic oligonucleotide
atattctgattgttaacgaaaatcatgggg

SEQ ID NO: 454747 - DNA, 30 bp, Artificial Sequence
  Synthetic oligonucleotide
gccctagtgtcgccattttcgctgatgggg

SEQ ID NO: 454748 - DNA, 30 bp, Artificial Sequence
  Synthetic oligonucleotide
cacctaagagcaaacatgggcaaactgggg

SEQ ID NO: 454749 - DNA, 30 bp, Artificial Sequence
  Synthetic oligonucleotide
gcacccaagtgtaatcgacgcgcgctgggg

SEQ ID NO: 454750 - DNA, 30 bp, Artificial Sequence
  Synthetic oligonucleotide
gaatttaggaataaatacttgttgctgggg

SEQ ID NO: 454751 - DNA, 30 bp, Artificial Sequence
  Synthetic oligonucleotide
ccggagcgccgattttcgcaagaagtgggg

SEQ ID NO: 454752 - DNA, 30 bp, Artificial Sequence
  Synthetic oligonucleotide
acttccttttagtgatattccagcttgggg

SEQ ID NO: 454753 - DNA, 30 bp, Artificial Sequence
  Synthetic oligonucleotide
gcaaccctattgggtgattatcgcttgggg

SEQ ID NO: 454754 - DNA, 30 bp, Artificial Sequence
  Synthetic oligonucleotide
ccggtgcgacggcaggcctaggcgttgggg

SEQ ID NO: 454755 - DNA, 30 bp, Artificial Sequence
  Synthetic oligonucleotide
tgatcgagccctgaatccgcggggttgggg

SEQ ID NO: 454756 - DNA, 30 bp, Artificial Sequence
  Synthetic oligonucleotide
tcgtagtcgattcatgaacgagtgttgggg

SEQ ID NO: 454757 - DNA, 30 bp, Artificial Sequence
  Synthetic oligonucleotide
aataaatatatcatgtggcgatatttgggg

SEQ ID NO: 454758 - DNA, 30 bp, Artificial Sequence
  Synthetic oligonucleotide
attccgcgaagccacctgcgagctttgggg

SEQ ID NO: 454759 - DNA, 30 bp, Artificial Sequence
  Synthetic oligonucleotide
attagtgatgatgcagggaagggtttgggg

SEQ ID NO: 454760 - DNA, 30 bp, Artificial Sequence
  Synthetic oligonucleotide
agaaaaggacgcacacaccgacgaaatggg

SEQ ID NO: 454761 - DNA, 30 bp, Artificial Sequence
  Synthetic oligonucleotide
gttagctaaagtcgaacggcacccaatggg

SEQ ID NO: 454762 - DNA, 30 bp, Artificial Sequence
  Synthetic oligonucleotide
gcaccatggcctaaatgaatagccaatggg

SEQ ID NO: 454763 - DNA, 30 bp, Artificial Sequence
  Synthetic oligonucleotide
gacccttggaaggtcggggtctccaatggg

SEQ ID NO: 454764 - DNA, 30 bp, Artificial Sequence
  Synthetic oligonucleotide
ggagatctgggggcagtagggtccaatggg

SEQ ID NO: 454765 - DNA, 30 bp, Artificial Sequence
  Synthetic oligonucleotide
gagatgtgaccgcgacgcccaatgaatggg

SEQ ID NO: 454766 - DNA, 30 bp, Artificial Sequence
  Synthetic oligonucleotide
ggtaagatttgaattgcatctatgaatggg

SEQ ID NO: 454767 - DNA, 30 bp, Artificial Sequence
  Synthetic oligonucleotide
gagtttcttctgctcctaggctgtaatggg

SEQ ID NO: 454768 - DNA, 30 bp, Artificial Sequence
  Synthetic oligonucleotide
attttgtgggatcggtaggttagacatggg

SEQ ID NO: 454769 - DNA, 30 bp, Artificial Sequence
  Synthetic oligonucleotide
gataccctacgtatgcacggtcaccatggg

SEQ ID NO: 454770 - DNA, 30 bp, Artificial Sequence
  Synthetic oligonucleotide
gcctgtaagtcgggtccattggaccatggg

SEQ ID NO: 454771 - DNA, 30 bp, Artificial Sequence
  Synthetic oligonucleotide
ctcttcgtcgctccgtcagtcgagcatggg

SEQ ID NO: 454772 - DNA, 30 bp, Artificial Sequence
  Synthetic oligonucleotide
tttatcagtgagccaggataaccgcatggg

SEQ ID NO: 454773 - DNA, 29 bp, Artificial Sequence
  Synthetic oligonucleotide
gttgggtacggacagcctcccaagatggg

SEQ ID NO: 454774 - DNA, 30 bp, Artificial Sequence
  Synthetic oligonucleotide
ttatgaagatgatcctctattagcgatggg

SEQ ID NO: 454775 - DNA, 30 bp, Artificial Sequence
  Synthetic oligonucleotide
cgcatcatccggatacggaagtgcgatggg

SEQ ID NO: 454776 - DNA, 30 bp, Artificial Sequence
  Synthetic oligonucleotide
ggaagtcctttgttaggataaaattatggg

SEQ ID NO: 454777 - DNA, 30 bp, Artificial Sequence
  Synthetic oligonucleotide
ttcatattgggtgagtgaggcaattatggg

SEQ ID NO: 454778 - DNA, 31 bp, Artificial Sequence
  Synthetic oligonucleotide
cgtagcccccgaatacgtccaattttatggg

SEQ ID NO: 454779 - DNA, 30 bp, Artificial Sequence
  Synthetic oligonucleotide
accggacacgccgtgacccgtgaaactggg

SEQ ID NO: 454780 - DNA, 30 bp, Artificial Sequence
  Synthetic oligonucleotide
agcacccggatgatatgagatcacactggg

SEQ ID NO: 454781 - DNA, 30 bp, Artificial Sequence
  Synthetic oligonucleotide
tacgacgcttgcacagggctaaggactggg

SEQ ID NO: 454782 - DNA, 30 bp, Artificial Sequence
  Synthetic oligonucleotide
cagaggacctcgaggtcactggggactggg

SEQ ID NO: 454783 - DNA, 30 bp, Artificial Sequence
  Synthetic oligonucleotide
cctcaatatggggttaatttggtgactggg

SEQ ID NO: 454784 - DNA, 30 bp, Artificial Sequence
  Synthetic oligonucleotide
cgccagtctaccagtaatgtggatactggg

SEQ ID NO: 454785 - DNA, 30 bp, Artificial Sequence
  Synthetic oligonucleotide
cgtatatcggatttaggccgatatactggg

SEQ ID NO: 454786 - DNA, 30 bp, Artificial Sequence
  Synthetic oligonucleotide
tttgagcccgtaccttccgggtctactggg

SEQ ID NO: 454787 - DNA, 30 bp, Artificial Sequence
  Synthetic oligonucleotide
tacgttttctcgacaacgatgttacctggg

SEQ ID NO: 454788 - DNA, 30 bp, Artificial Sequence
  Synthetic oligonucleotide
aaaaagcagctatttgtcccgccgcctggg

SEQ ID NO: 454789 - DNA, 30 bp, Artificial Sequence
  Synthetic oligonucleotide
gaatcttaataaaatagtaattctcctggg

SEQ ID NO: 454790 - DNA, 30 bp, Artificial Sequence
  Synthetic oligonucleotide
taattgggacattagttatagtcagctggg

SEQ ID NO: 454791 - DNA, 30 bp, Artificial Sequence
  Synthetic oligonucleotide
gcggcgcaactaaacggcccgttggctggg

SEQ ID NO: 454792 - DNA, 30 bp, Artificial Sequence
  Synthetic oligonucleotide
gtgtaggccagcccccgatctcaatctggg

SEQ ID NO: 454793 - DNA, 30 bp, Artificial Sequence
  Synthetic oligonucleotide
aggacattggcctatagttttgcgtctggg

SEQ ID NO: 454794 - DNA, 30 bp, Artificial Sequence
  Synthetic oligonucleotide
agttagttcatatctgcggtagattctggg

SEQ ID NO: 454795 - DNA, 28 bp, Artificial Sequence
  Synthetic oligonucleotide
cattgcgttgaatggagaggattctggg

SEQ ID NO: 454796 - DNA, 30 bp, Artificial Sequence
  Synthetic oligonucleotide
tgggcgccagcaatcttaggtgattctggg

SEQ ID NO: 454797 - DNA, 30 bp, Artificial Sequence
  Synthetic oligonucleotide
acaagttaaggtattaaaatctattctggg

SEQ ID NO: 454798 - DNA, 30 bp, Artificial Sequence
  Synthetic oligonucleotide
ctaccgcaggaggtcggtcctctaagtggg

SEQ ID NO: 454799 - DNA, 30 bp, Artificial Sequence
  Synthetic oligonucleotide
gtattcctgcacatcttagtaaagagtggg

SEQ ID NO: 454800 - DNA, 30 bp, Artificial Sequence
  Synthetic oligonucleotide
attgtcctgttcctttatttggtgagtggg

SEQ ID NO: 454801 - DNA, 30 bp, Artificial Sequence
  Synthetic oligonucleotide
agtttgatttttaagccctgtagtagtggg

SEQ ID NO: 454802 - DNA, 30 bp, Artificial Sequence
  Synthetic oligonucleotide
gaggtaaggtgtgcaagcggttgtagtggg

SEQ ID NO: 454803 - DNA, 30 bp, Artificial Sequence
  Synthetic oligonucleotide
cggcccagaggtctccttaggagccgtggg

SEQ ID NO: 454804 - DNA, 30 bp, Artificial Sequence
  Synthetic oligonucleotide
ggggctatcttggggctcttttgccgtggg

SEQ ID NO: 454805 - DNA, 30 bp, Artificial Sequence
  Synthetic oligonucleotide
tccttactttgtaaggtcatagatcgtggg

SEQ ID NO: 454806 - DNA, 30 bp, Artificial Sequence
  Synthetic oligonucleotide
catggacagaaagcttctctgtaaggtggg

SEQ ID NO: 454807 - DNA, 30 bp, Artificial Sequence
  Synthetic oligonucleotide
gtcggcggctgagtttataccacaggtggg

SEQ ID NO: 454808 - DNA, 30 bp, Artificial Sequence
  Synthetic oligonucleotide
tacacgcatactcgctgctttacaggtggg

SEQ ID NO: 454809 - DNA, 30 bp, Artificial Sequence
  Synthetic oligonucleotide
gctttcccttagtggatgtggaccggtggg

SEQ ID NO: 454810 - DNA, 30 bp, Artificial Sequence
  Synthetic oligonucleotide
gtttattcgtctgagggcgggggcggtggg

SEQ ID NO: 454811 - DNA, 30 bp, Artificial Sequence
  Synthetic oligonucleotide
atcttaggcagttatgggccaatcggtggg

SEQ ID NO: 454812 - DNA, 30 bp, Artificial Sequence
  Synthetic oligonucleotide
ggatagcaaagctcacgagttgcgggtggg

SEQ ID NO: 454813 - DNA, 30 bp, Artificial Sequence
  Synthetic oligonucleotide
cgggcgcctgtgggcgactaggctggtggg

SEQ ID NO: 454814 - DNA, 30 bp, Artificial Sequence
  Synthetic oligonucleotide
aagtccagcccacttggacattgtggtggg

SEQ ID NO: 454815 - DNA, 30 bp, Artificial Sequence
  Synthetic oligonucleotide
tttgtttattttctagcagagattggtggg

SEQ ID NO: 454816 - DNA, 30 bp, Artificial Sequence
  Synthetic oligonucleotide
atctgctgagcataattggtttaatgtggg

SEQ ID NO: 454817 - DNA, 30 bp, Artificial Sequence
  Synthetic oligonucleotide
cactgccgttaacaaacggctgcatgtggg

SEQ ID NO: 454818 - DNA, 30 bp, Artificial Sequence
  Synthetic oligonucleotide
tattccgcaatgctaaagcgtgtatgtggg

SEQ ID NO: 454819 - DNA, 30 bp, Artificial Sequence
  Synthetic oligonucleotide
caccatgtggggtacgcacaatgctgtggg

SEQ ID NO: 454820 - DNA, 30 bp, Artificial Sequence
  Synthetic oligonucleotide
tccgaactccctggtgttagacattgtggg

SEQ ID NO: 454821 - DNA, 30 bp, Artificial Sequence
  Synthetic oligonucleotide
attctaattgccttcgccagaccttgtggg

SEQ ID NO: 454822 - DNA, 30 bp, Artificial Sequence
  Synthetic oligonucleotide
cctatcagtcgcacagcactcgaaattggg

SEQ ID NO: 454823 - DNA, 30 bp, Artificial Sequence
  Synthetic oligonucleotide
tatctttggggggatagcagtccaattggg

SEQ ID NO: 454824 - DNA, 30 bp, Artificial Sequence
  Synthetic oligonucleotide
tagttacggggtcattcttggtttattggg

SEQ ID NO: 454825 - DNA, 30 bp, Artificial Sequence
  Synthetic oligonucleotide
attactatttacgttacgagtgagcttggg

SEQ ID NO: 454826 - DNA, 30 bp, Artificial Sequence
  Synthetic oligonucleotide
agtgtatgcgctcgtcgattagctcttggg

SEQ ID NO: 454827 - DNA, 30 bp, Artificial Sequence
  Synthetic oligonucleotide
ttaaacggcctccatgtcggttttcttggg

SEQ ID NO: 454828 - DNA, 30 bp, Artificial Sequence
  Synthetic oligonucleotide
acgctgcctcacttgtttttctaagttggg

SEQ ID NO: 454829 - DNA, 30 bp, Artificial Sequence
  Synthetic oligonucleotide
gttccccttccagcctaattatgtgttggg

SEQ ID NO: 454830 - DNA, 30 bp, Artificial Sequence
  Synthetic oligonucleotide
tatttatgttcgaccaaatgctgtgttggg

SEQ ID NO: 454831 - DNA, 30 bp, Artificial Sequence
  Synthetic oligonucleotide
ccgcaccccattgattacacaccatttggg

SEQ ID NO: 454832 - DNA, 30 bp, Artificial Sequence
  Synthetic oligonucleotide
cggcctcacccgatgccgcacggatttggg

SEQ ID NO: 454833 - DNA, 30 bp, Artificial Sequence
  Synthetic oligonucleotide
ctgccatgatgcgaccccgctcactttggg

SEQ ID NO: 454834 - DNA, 30 bp, Artificial Sequence
  Synthetic oligonucleotide
gtttcacatttaaggagcataaagtttggg

SEQ ID NO: 454835 - DNA, 30 bp, Artificial Sequence
  Synthetic oligonucleotide
gaaggtctaattctcgtaagcaggtttggg

SEQ ID NO: 454836 - DNA, 30 bp, Artificial Sequence
  Synthetic oligonucleotide
tcggatctacgacggtgcgcgccttttggg

SEQ ID NO: 454837 - DNA, 30 bp, Artificial Sequence
  Synthetic oligonucleotide
gtgccatcatagacgagaggtccttttggg

SEQ ID NO: 454838 - DNA, 30 bp, Artificial Sequence
  Synthetic oligonucleotide
gctttatcagcgcccccatcgcgttttggg

SEQ ID NO: 454839 - DNA, 30 bp, Artificial Sequence
  Synthetic oligonucleotide
tttgaagcgatagcccgtgacccaaaatgg

SEQ ID NO: 454840 - DNA, 30 bp, Artificial Sequence
  Synthetic oligonucleotide
gaagggactttgcctgtggacgcaaaatgg

SEQ ID NO: 454841 - DNA, 30 bp, Artificial Sequence
  Synthetic oligonucleotide
ttttacggtgtgcgctagtgattaaaatgg

SEQ ID NO: 454842 - DNA, 30 bp, Artificial Sequence
  Synthetic oligonucleotide
cttcgagtcaggcatggcggtcggaaatgg

SEQ ID NO: 454843 - DNA, 30 bp, Artificial Sequence
  Synthetic oligonucleotide
tggcaatttcattcggttactatgaaatgg

SEQ ID NO: 454844 - DNA, 30 bp, Artificial Sequence
  Synthetic oligonucleotide
agttgctgcattatttgaacagttaaatgg

SEQ ID NO: 454845 - DNA, 30 bp, Artificial Sequence
  Synthetic oligonucleotide
ttctctccaagttaagtctcataccaatgg

SEQ ID NO: 454846 - DNA, 30 bp, Artificial Sequence
  Synthetic oligonucleotide
taaaaccattgttctgcctgcaagcaatgg

SEQ ID NO: 454847 - DNA, 30 bp, Artificial Sequence
  Synthetic oligonucleotide
tttctaaacttcctaaatatgcatcaatgg

SEQ ID NO: 454848 - DNA, 30 bp, Artificial Sequence
  Synthetic oligonucleotide
ttaacgccgaccaattactatcatcaatgg

SEQ ID NO: 454849 - DNA, 30 bp, Artificial Sequence
  Synthetic oligonucleotide
ttataagactgagggatccaacctcaatgg

SEQ ID NO: 454850 - DNA, 30 bp, Artificial Sequence
  Synthetic oligonucleotide
atctgcaggcggtgttcattgtttcaatgg

SEQ ID NO: 454851 - DNA, 30 bp, Artificial Sequence
  Synthetic oligonucleotide
cgccagtcgcacaaaatagttaaagaatgg

SEQ ID NO: 454852 - DNA, 30 bp, Artificial Sequence
  Synthetic oligonucleotide
taatagagggtctcgatggcgaaggaatgg

SEQ ID NO: 454853 - DNA, 30 bp, Artificial Sequence
  Synthetic oligonucleotide
aactttactacatcgctctttctataatgg

SEQ ID NO: 454854 - DNA, 30 bp, Artificial Sequence
  Synthetic oligonucleotide
ctggtgcaatttcaaaacacaggctaatgg

SEQ ID NO: 454855 - DNA, 30 bp, Artificial Sequence
  Synthetic oligonucleotide
aaaggcgcaggcaattgatgtatctaatgg

SEQ ID NO: 454856 - DNA, 30 bp, Artificial Sequence
  Synthetic oligonucleotide
cgagtctgcatacaaagatgtaggtaatgg

SEQ ID NO: 454857 - DNA, 30 bp, Artificial Sequence
  Synthetic oligonucleotide
ttaaatttgaacatagaactattgtaatgg

SEQ ID NO: 454858 - DNA, 30 bp, Artificial Sequence
  Synthetic oligonucleotide
aagggcaaaaggttttatggggtttaatgg

SEQ ID NO: 454859 - DNA, 30 bp, Artificial Sequence
  Synthetic oligonucleotide
aggagaattctcagcgcatgcacaacatgg

SEQ ID NO: 454860 - DNA, 30 bp, Artificial Sequence
  Synthetic oligonucleotide
tcagccgacgcatcgacatgtgcgacatgg

SEQ ID NO: 454861 - DNA, 30 bp, Artificial Sequence
  Synthetic oligonucleotide
ggggaacattcccctttgggggcaccatgg

SEQ ID NO: 454862 - DNA, 30 bp, Artificial Sequence
  Synthetic oligonucleotide
ggagggtatttgattccgccaagcccatgg

SEQ ID NO: 454863 - DNA, 30 bp, Artificial Sequence
  Synthetic oligonucleotide
gctaatattaagaagcgtagactcccatgg

SEQ ID NO: 454864 - DNA, 30 bp, Artificial Sequence
  Synthetic oligonucleotide
tatagttcgaccattggtcatggtccatgg

SEQ ID NO: 454865 - DNA, 30 bp, Artificial Sequence
  Synthetic oligonucleotide
caggtcttactactgcaacgatttccatgg

SEQ ID NO: 454866 - DNA, 30 bp, Artificial Sequence
  Synthetic oligonucleotide
tacgctgggaatggaatgctcggagcatgg

SEQ ID NO: 454867 - DNA, 30 bp, Artificial Sequence
  Synthetic oligonucleotide
gtccgtagacgtcgatcggcgtgagcatgg

SEQ ID NO: 454868 - DNA, 30 bp, Artificial Sequence
  Synthetic oligonucleotide
tattagtctttggtcgactagttagcatgg

SEQ ID NO: 454869 - DNA, 30 bp, Artificial Sequence
  Synthetic oligonucleotide
tttaaaggagcagctcccgtaatcgcatgg

SEQ ID NO: 454870 - DNA, 30 bp, Artificial Sequence
  Synthetic oligonucleotide
agattttcgttgagtacgggccctgcatgg

SEQ ID NO: 454871 - DNA, 30 bp, Artificial Sequence
  Synthetic oligonucleotide
accgctggcccggcacgacatgcatcatgg

SEQ ID NO: 454872 - DNA, 30 bp, Artificial Sequence
  Synthetic oligonucleotide
ttcttttgtatacatataatcggatcatgg

SEQ ID NO: 454873 - DNA, 30 bp, Artificial Sequence
  Synthetic oligonucleotide
agggtcccttaggtgccgtgggactcatgg

SEQ ID NO: 454874 - DNA, 30 bp, Artificial Sequence
  Synthetic oligonucleotide
cacggtgggagggctcttgcctcctcatgg

SEQ ID NO: 454875 - DNA, 30 bp, Artificial Sequence
  Synthetic oligonucleotide
tatatgaccagttatgcctctgggtcatgg

SEQ ID NO: 454876 - DNA, 30 bp, Artificial Sequence
  Synthetic oligonucleotide
tactggtggcatagcagccggttgtcatgg

SEQ ID NO: 454877 - DNA, 30 bp, Artificial Sequence
  Synthetic oligonucleotide
gcacgtatactcagcattgccgcttcatgg

SEQ ID NO: 454878 - DNA, 30 bp, Artificial Sequence
  Synthetic oligonucleotide
tttcttaaattacacgtaaggctttcatgg

SEQ ID NO: 454879 - DNA, 30 bp, Artificial Sequence
  Synthetic oligonucleotide
gaacggagcagtgatgcatatacaagatgg

SEQ ID NO: 454880 - DNA, 30 bp, Artificial Sequence
  Synthetic oligonucleotide
cgacgctactccattaaggtttcaagatgg

SEQ ID NO: 454881 - DNA, 30 bp, Artificial Sequence
  Synthetic oligonucleotide
cctacgttagaatttgttagctagagatgg

SEQ ID NO: 454882 - DNA, 30 bp, Artificial Sequence
  Synthetic oligonucleotide
aaagcaggttcttatggatgcaatagatgg

SEQ ID NO: 454883 - DNA, 30 bp, Artificial Sequence
  Synthetic oligonucleotide
tccgcattgaaaggtcaataccttagatgg

SEQ ID NO: 454884 - DNA, 28 bp, Artificial Sequence
  Synthetic oligonucleotide
acgggtgaccgtaggtcgcaaccgatgg

SEQ ID NO: 454885 - DNA, 30 bp, Artificial Sequence
  Synthetic oligonucleotide
aattgaggctattcctcaaaggaccgatgg

SEQ ID NO: 454886 - DNA, 30 bp, Artificial Sequence
  Synthetic oligonucleotide
agatttatgcaaatctatcggacccgatgg

SEQ ID NO: 454887 - DNA, 30 bp, Artificial Sequence
  Synthetic oligonucleotide
ctgctcgcgcaaggatctgctaagcgatgg

SEQ ID NO: 454888 - DNA, 30 bp, Artificial Sequence
  Synthetic oligonucleotide
attgaaaggagtcgtcaatgcaatcgatgg

SEQ ID NO: 454889 - DNA, 30 bp, Artificial Sequence
  Synthetic oligonucleotide
aagtttcggcgtagcaatcggtttcgatgg

SEQ ID NO: 454890 - DNA, 30 bp, Artificial Sequence
  Synthetic oligonucleotide
tttgtggataggtggtaagatgaaggatgg

SEQ ID NO: 454891 - DNA, 30 bp, Artificial Sequence
  Synthetic oligonucleotide
gaagtgacctttagcaagtggtcaggatgg

SEQ ID NO: 454892 - DNA, 30 bp, Artificial Sequence
  Synthetic oligonucleotide
tttcatctgtgttgatggaaactgggatgg

SEQ ID NO: 454893 - DNA, 30 bp, Artificial Sequence
  Synthetic oligonucleotide
aaaactgttattgtgacccatctatgatgg

SEQ ID NO: 454894 - DNA, 30 bp, Artificial Sequence
  Synthetic oligonucleotide
tgtattacccgtaagtaggttaactgatgg

SEQ ID NO: 454895 - DNA, 30 bp, Artificial Sequence
  Synthetic oligonucleotide
tatggtatgacggccattcgtgtgtgatgg

SEQ ID NO: 454896 - DNA, 30 bp, Artificial Sequence
  Synthetic oligonucleotide
gatttggcaactcaggttctcacttgatgg

SEQ ID NO: 454897 - DNA, 30 bp, Artificial Sequence
  Synthetic oligonucleotide
caagctcccatagcggaatacgtttgatgg

SEQ ID NO: 454898 - DNA, 30 bp, Artificial Sequence
  Synthetic oligonucleotide
ttaacggcgtaggagcatgcaccaatatgg

SEQ ID NO: 454899 - DNA, 30 bp, Artificial Sequence
  Synthetic oligonucleotide
gcacccaaaataaaatgtaagttcatatgg

SEQ ID NO: 454900 - DNA, 30 bp, Artificial Sequence
  Synthetic oligonucleotide
tattttccactcacctacgcgtagatatgg

SEQ ID NO: 454901 - DNA, 30 bp, Artificial Sequence
  Synthetic oligonucleotide
gtcatatcaagccttcatgtcgatatatgg

SEQ ID NO: 454902 - DNA, 30 bp, Artificial Sequence
  Synthetic oligonucleotide
gtggcgttatctcttagcttgtatatatgg

SEQ ID NO: 454903 - DNA, 30 bp, Artificial Sequence
  Synthetic oligonucleotide
aactcgggacagcggagcagatctatatgg

SEQ ID NO: 454904 - DNA, 30 bp, Artificial Sequence
  Synthetic oligonucleotide
aatgaaggtttgaatttgtcctttatatgg

SEQ ID NO: 454905 - DNA, 30 bp, Artificial Sequence
  Synthetic oligonucleotide
ggggttttgtctttttgggtcagactatgg

SEQ ID NO: 454906 - DNA, 30 bp, Artificial Sequence
  Synthetic oligonucleotide
aaaatagtgccaccagtttgtcgactatgg

SEQ ID NO: 454907 - DNA, 30 bp, Artificial Sequence
  Synthetic oligonucleotide
caagaatgtagagccatggctaggctatgg

SEQ ID NO: 454908 - DNA, 30 bp, Artificial Sequence
  Synthetic oligonucleotide
ctcttgtaatatagacattgggggctatgg

SEQ ID NO: 454909 - DNA, 30 bp, Artificial Sequence
  Synthetic oligonucleotide
taatctactctgttgcagaggtggctatgg

SEQ ID NO: 454910 - DNA, 30 bp, Artificial Sequence
  Synthetic oligonucleotide
acgccaagaggccttactgaacaagtatgg

SEQ ID NO: 454911 - DNA, 30 bp, Artificial Sequence
  Synthetic oligonucleotide
ccccgcaaatgtttgttcgggtaggtatgg

SEQ ID NO: 454912 - DNA, 30 bp, Artificial Sequence
  Synthetic oligonucleotide
actgggcgttaatcaccaaccagggtatgg

SEQ ID NO: 454913 - DNA, 30 bp, Artificial Sequence
  Synthetic oligonucleotide
ctagttgctcttcaactacgtggggtatgg

SEQ ID NO: 454914 - DNA, 30 bp, Artificial Sequence
  Synthetic oligonucleotide
gcatgtagggaatttggtgaataattatgg

SEQ ID NO: 454915 - DNA, 30 bp, Artificial Sequence
  Synthetic oligonucleotide
taggttaaatagcggcttgcgccattatgg

SEQ ID NO: 454916 - DNA, 30 bp, Artificial Sequence
  Synthetic oligonucleotide
aggaatacttgccgtcggaccatattatgg

SEQ ID NO: 454917 - DNA, 30 bp, Artificial Sequence
  Synthetic oligonucleotide
gttattgcactgcgggggaattagttatgg

SEQ ID NO: 454918 - DNA, 30 bp, Artificial Sequence
  Synthetic oligonucleotide
gagacaactattcagtactgcccgttatgg

SEQ ID NO: 454919 - DNA, 30 bp, Artificial Sequence
  Synthetic oligonucleotide
gttgcacatatgccgccatatcttttatgg

SEQ ID NO: 454920 - DNA, 30 bp, Artificial Sequence
  Synthetic oligonucleotide
gttacacttatctattagagtcgtaactgg

SEQ ID NO: 454921 - DNA, 29 bp, Artificial Sequence
  Synthetic oligonucleotide
aaacggtgattgttcggcttgttaactgg

SEQ ID NO: 454922 - DNA, 30 bp, Artificial Sequence
  Synthetic oligonucleotide
atctgacagatgaagacatcagtacactgg

SEQ ID NO: 454923 - DNA, 30 bp, Artificial Sequence
  Synthetic oligonucleotide
gatccctgtgggcctttgaccacccactgg

SEQ ID NO: 454924 - DNA, 30 bp, Artificial Sequence
  Synthetic oligonucleotide
aattcactcctgaatggcacgagccactgg

SEQ ID NO: 454925 - DNA, 30 bp, Artificial Sequence
  Synthetic oligonucleotide
agatagatactcatgacgtgtattcactgg

SEQ ID NO: 454926 - DNA, 30 bp, Artificial Sequence
  Synthetic oligonucleotide
acacgtcagcatcacagtgcggctgactgg

SEQ ID NO: 454927 - DNA, 30 bp, Artificial Sequence
  Synthetic oligonucleotide
atcgcggtagtattaaataactttgactgg

SEQ ID NO: 454928 - DNA, 30 bp, Artificial Sequence
  Synthetic oligonucleotide
ggcattggtccgctattataatactactgg

SEQ ID NO: 454929 - DNA, 30 bp, Artificial Sequence
  Synthetic oligonucleotide
tacaacttcatgttcactatcttctactgg

SEQ ID NO: 454930 - DNA, 30 bp, Artificial Sequence
  Synthetic oligonucleotide
atgtatttacctttggggccagagtactgg

SEQ ID NO: 454931 - DNA, 30 bp, Artificial Sequence
  Synthetic oligonucleotide
ttagctttccttgaggaatttcggtactgg

SEQ ID NO: 454932 - DNA, 30 bp, Artificial Sequence
  Synthetic oligonucleotide
gacgtcccgcgacccaacatagggtactgg

SEQ ID NO: 454933 - DNA, 30 bp, Artificial Sequence
  Synthetic oligonucleotide
gaacgctgcgttctctcaggcgtaacctgg

SEQ ID NO: 454934 - DNA, 30 bp, Artificial Sequence
  Synthetic oligonucleotide
ggaagaggcggggcgttttatcacccctgg

SEQ ID NO: 454935 - DNA, 30 bp, Artificial Sequence
  Synthetic oligonucleotide
ttcgcttatgtgaattggtaatcgccctgg

SEQ ID NO: 454936 - DNA, 30 bp, Artificial Sequence
  Synthetic oligonucleotide
gaaaccgtgtgcactctgcacactccctgg

SEQ ID NO: 454937 - DNA, 30 bp, Artificial Sequence
  Synthetic oligonucleotide
ggtcttcaggggatacacgggtctccctgg

SEQ ID NO: 454938 - DNA, 30 bp, Artificial Sequence
  Synthetic oligonucleotide
gtttcacttgggggccactgccgtccctgg

SEQ ID NO: 454939 - DNA, 30 bp, Artificial Sequence
  Synthetic oligonucleotide
ttcatgtgtcagtagcacattcaggcctgg

SEQ ID NO: 454940 - DNA, 30 bp, Artificial Sequence
  Synthetic oligonucleotide
taagcccagttgggtacgagctatgcctgg

SEQ ID NO: 454941 - DNA, 30 bp, Artificial Sequence
  Synthetic oligonucleotide
cagaccccagcataccggcttccatcctgg

SEQ ID NO: 454942 - DNA, 30 bp, Artificial Sequence
  Synthetic oligonucleotide
gaaaccttcctcgcagatacccagtcctgg

SEQ ID NO: 454943 - DNA, 30 bp, Artificial Sequence
  Synthetic oligonucleotide
tgacaatgctgtgtggccctaaggtcctgg

SEQ ID NO: 454944 - DNA, 30 bp, Artificial Sequence
  Synthetic oligonucleotide
acaatatcttaaacacggtaacgaagctgg

SEQ ID NO: 454945 - DNA, 30 bp, Artificial Sequence
  Synthetic oligonucleotide
gcgcaccccaggcatatcctgcgcagctgg

SEQ ID NO: 454946 - DNA, 30 bp, Artificial Sequence
  Synthetic oligonucleotide
ttaattttgcgggggacactatggagctgg

SEQ ID NO: 454947 - DNA, 30 bp, Artificial Sequence
  Synthetic oligonucleotide
ccttggaacccgattttcctgcgacgctgg

SEQ ID NO: 454948 - DNA, 30 bp, Artificial Sequence
  Synthetic oligonucleotide
gcgcgaccatggacgatgagcggacgctgg

SEQ ID NO: 454949 - DNA, 30 bp, Artificial Sequence
  Synthetic oligonucleotide
gccgttataaacaccatgtacttacgctgg

SEQ ID NO: 454950 - DNA, 30 bp, Artificial Sequence
  Synthetic oligonucleotide
cgagatcaccagagtccgcaggaccgctgg

SEQ ID NO: 454951 - DNA, 30 bp, Artificial Sequence
  Synthetic oligonucleotide
tttagatacattcccccttttcggcgctgg

SEQ ID NO: 454952 - DNA, 30 bp, Artificial Sequence
  Synthetic oligonucleotide
acctgcgcttcacggatatgatggcgctgg

SEQ ID NO: 454953 - DNA, 30 bp, Artificial Sequence
  Synthetic oligonucleotide
tggcaggataaaggtcagctttggcgctgg

SEQ ID NO: 454954 - DNA, 30 bp, Artificial Sequence
  Synthetic oligonucleotide
ccgcgtgagaatattatatgcctgcgctgg

SEQ ID NO: 454955 - DNA, 30 bp, Artificial Sequence
  Synthetic oligonucleotide
ccagaccctcgcaagcaaattcgaggctgg

SEQ ID NO: 454956 - DNA, 30 bp, Artificial Sequence
  Synthetic oligonucleotide
gagagcgtttggattgtcggtggaggctgg

SEQ ID NO: 454957 - DNA, 30 bp, Artificial Sequence
  Synthetic oligonucleotide
gcgccgggatggcaatcttttttaggctgg

SEQ ID NO: 454958 - DNA, 30 bp, Artificial Sequence
  Synthetic oligonucleotide
gttcctgcaacacagacctgggacggctgg

SEQ ID NO: 454959 - DNA, 30 bp, Artificial Sequence
  Synthetic oligonucleotide
cgagtgtcctgcccgtcgcactacggctgg

SEQ ID NO: 454960 - DNA, 30 bp, Artificial Sequence
  Synthetic oligonucleotide
ggttctgggtcgacggctgggtagggctgg

SEQ ID NO: 454961 - DNA, 30 bp, Artificial Sequence
  Synthetic oligonucleotide
tggttaatatccgggggttggatgggctgg

SEQ ID NO: 454962 - DNA, 30 bp, Artificial Sequence
  Synthetic oligonucleotide
tttcgttttccggctggtaaagatggctgg

SEQ ID NO: 454963 - DNA, 30 bp, Artificial Sequence
  Synthetic oligonucleotide
gacagaagtttggttagagtccaatgctgg

SEQ ID NO: 454964 - DNA, 30 bp, Artificial Sequence
  Synthetic oligonucleotide
gtcggtgtctaggcgagaaaccggtgctgg

SEQ ID NO: 454965 - DNA, 30 bp, Artificial Sequence
  Synthetic oligonucleotide
gctattactcaagcatcgactaattgctgg

SEQ ID NO: 454966 - DNA, 30 bp, Artificial Sequence
  Synthetic oligonucleotide
ctctttacagatcacccgatcacaatctgg

SEQ ID NO: 454967 - DNA, 30 bp, Artificial Sequence
  Synthetic oligonucleotide
cttcacacggcgtgagcatgccccatctgg

SEQ ID NO: 454968 - DNA, 30 bp, Artificial Sequence
  Synthetic oligonucleotide
attaattaagcgtataatgaccgcatctgg

SEQ ID NO: 454969 - DNA, 30 bp, Artificial Sequence
  Synthetic oligonucleotide
ttgtcgaaattaaacgaccaaggcatctgg

SEQ ID NO: 454970 - DNA, 30 bp, Artificial Sequence
  Synthetic oligonucleotide
cccacattgtcgctgatgaacgtgatctgg

SEQ ID NO: 454971 - DNA, 30 bp, Artificial Sequence
  Synthetic oligonucleotide
gtttactcaggaagtcgctctggcctctgg

SEQ ID NO: 454972 - DNA, 30 bp, Artificial Sequence
  Synthetic oligonucleotide
atttgcagaccgcctccttgcaatctctgg

SEQ ID NO: 454973 - DNA, 30 bp, Artificial Sequence
  Synthetic oligonucleotide
tattacacctcaaacgatctgtaagtctgg

SEQ ID NO: 454974 - DNA, 30 bp, Artificial Sequence
  Synthetic oligonucleotide
tatgtacagttatacctgagctcagtctgg

SEQ ID NO: 454975 - DNA, 30 bp, Artificial Sequence
  Synthetic oligonucleotide
cttcttgctctttcaaatacagtagtctgg

SEQ ID NO: 454976 - DNA, 30 bp, Artificial Sequence
  Synthetic oligonucleotide
tgatacgggcctcaatgcgttttagtctgg

SEQ ID NO: 454977 - DNA, 30 bp, Artificial Sequence
  Synthetic oligonucleotide
cgatgtaagccagttccacactgtgtctgg

SEQ ID NO: 454978 - DNA, 30 bp, Artificial Sequence
  Synthetic oligonucleotide
aagtggaccaggggcttctatgtattctgg

SEQ ID NO: 454979 - DNA, 30 bp, Artificial Sequence
  Synthetic oligonucleotide
tcaaacttgttgtatgccatcaggttctgg

SEQ ID NO: 454980 - DNA, 31 bp, Artificial Sequence
  Synthetic oligonucleotide
aaagggccctattaatgggggtgggttctgg

SEQ ID NO: 454981 - DNA, 25 bp, Artificial Sequence
  Synthetic oligonucleotide
cgccggaatttattttgaaaagtgg

SEQ ID NO: 454982 - DNA, 30 bp, Artificial Sequence
  Synthetic oligonucleotide
aggactaagtaaccgctattctgaaagtgg

SEQ ID NO: 454983 - DNA, 30 bp, Artificial Sequence
  Synthetic oligonucleotide
ctcactcttaattgacttgcaataaagtgg

SEQ ID NO: 454984 - DNA, 30 bp, Artificial Sequence
  Synthetic oligonucleotide
cagtttcttattacaatcagcttaaagtgg

SEQ ID NO: 454985 - DNA, 30 bp, Artificial Sequence
  Synthetic oligonucleotide
ggaagaatgttgcacaggcgcaggaagtgg

SEQ ID NO: 454986 - DNA, 30 bp, Artificial Sequence
  Synthetic oligonucleotide
taagacaaacgggtcctttcgtttaagtgg

SEQ ID NO: 454987 - DNA, 30 bp, Artificial Sequence
  Synthetic oligonucleotide
gaagtacgtaggcagctttcaacacagtgg

SEQ ID NO: 454988 - DNA, 30 bp, Artificial Sequence
  Synthetic oligonucleotide
gcagcccaacggaagggttgggagcagtgg

SEQ ID NO: 454989 - DNA, 30 bp, Artificial Sequence
  Synthetic oligonucleotide
ctttagtggtgggaccgtggggatcagtgg

SEQ ID NO: 454990 - DNA, 30 bp, Artificial Sequence
  Synthetic oligonucleotide
gttgattggacgcacgtgtaccctcagtgg

SEQ ID NO: 454991 - DNA, 30 bp, Artificial Sequence
  Synthetic oligonucleotide
aattgtcaagtcatcggatttcctcagtgg

SEQ ID NO: 454992 - DNA, 30 bp, Artificial Sequence
  Synthetic oligonucleotide
agggcgggccaagtcacaggtgcagagtgg

SEQ ID NO: 454993 - DNA, 30 bp, Artificial Sequence
  Synthetic oligonucleotide
aagactgctttgcgatgctcgtcagagtgg

SEQ ID NO: 454994 - DNA, 30 bp, Artificial Sequence
  Synthetic oligonucleotide
gccggcgtatccgctgtgcgcagagagtgg

SEQ ID NO: 454995 - DNA, 30 bp, Artificial Sequence
  Synthetic oligonucleotide
atgcaccgatgtagggctactcgcgagtgg

SEQ ID NO: 454996 - DNA, 30 bp, Artificial Sequence
  Synthetic oligonucleotide
agctagtaaggattggggaatcaggagtgg

SEQ ID NO: 454997 - DNA, 30 bp, Artificial Sequence
  Synthetic oligonucleotide
gctacagctcgaataatggtctaggagtgg

SEQ ID NO: 454998 - DNA, 30 bp, Artificial Sequence
  Synthetic oligonucleotide
gtcccatcatggcgtatatcgacggagtgg

SEQ ID NO: 454999 - DNA, 30 bp, Artificial Sequence
  Synthetic oligonucleotide
tcactagcagacgcaaagcatgcggagtgg

SEQ ID NO: 455000 - DNA, 30 bp, Artificial Sequence
  Synthetic oligonucleotide
actagcctttgccaaggcagtcgggagtgg

SEQ ID NO: 455001 - DNA, 30 bp, Artificial Sequence
  Synthetic oligonucleotide
ttgcacttttcccggcaaagtgatgagtgg

SEQ ID NO: 455002 - DNA, 30 bp, Artificial Sequence
  Synthetic oligonucleotide
taggccggccatcctctgctctctgagtgg

SEQ ID NO: 455003 - DNA, 30 bp, Artificial Sequence
  Synthetic oligonucleotide
gtgtcagggcagctcgcaacgagatagtgg

SEQ ID NO: 455004 - DNA, 30 bp, Artificial Sequence
  Synthetic oligonucleotide
gcacgtccaaaaatgacatgatgatagtgg

SEQ ID NO: 455005 - DNA, 30 bp, Artificial Sequence
  Synthetic oligonucleotide
ttacggtggttttgtggagacgtctagtgg

SEQ ID NO: 455006 - DNA, 30 bp, Artificial Sequence
  Synthetic oligonucleotide
tattaacaaccgacgacatcccggtagtgg

SEQ ID NO: 455007 - DNA, 30 bp, Artificial Sequence
  Synthetic oligonucleotide
tttttggacataactcgggcttcttagtgg

SEQ ID NO: 455008 - DNA, 30 bp, Artificial Sequence
  Synthetic oligonucleotide
tctaagaagacagggccacccggttagtgg

SEQ ID NO: 455009 - DNA, 30 bp, Artificial Sequence
  Synthetic oligonucleotide
ctagtttgaggtgcgtgtgaaaacacgtgg

SEQ ID NO: 455010 - DNA, 30 bp, Artificial Sequence
  Synthetic oligonucleotide
taagcggcagagtgacacccagacacgtgg

SEQ ID NO: 455011 - DNA, 30 bp, Artificial Sequence
  Synthetic oligonucleotide
tacctccgagggaccggattcaagacgtgg

SEQ ID NO: 455012 - DNA, 30 bp, Artificial Sequence
  Synthetic oligonucleotide
gggattttaccttgagtattctagacgtgg

SEQ ID NO: 455013 - DNA, 30 bp, Artificial Sequence
  Synthetic oligonucleotide
taaatgatggtcatatttttaacgacgtgg

SEQ ID NO: 455014 - DNA, 30 bp, Artificial Sequence
  Synthetic oligonucleotide
cgccggttagctacagtggaaccgacgtgg

SEQ ID NO: 455015 - DNA, 30 bp, Artificial Sequence
  Synthetic oligonucleotide
ttttaagccatttacacataagcgacgtgg

SEQ ID NO: 455016 - DNA, 30 bp, Artificial Sequence
  Synthetic oligonucleotide
cgtccctttgtaaacacaccaaggacgtgg

SEQ ID NO: 455017 - DNA, 30 bp, Artificial Sequence
  Synthetic oligonucleotide
tatttatggtactggatactggtgacgtgg

SEQ ID NO: 455018 - DNA, 30 bp, Artificial Sequence
  Synthetic oligonucleotide
gaccgttgtcaacatgatcacttgacgtgg

SEQ ID NO: 455019 - DNA, 30 bp, Artificial Sequence
  Synthetic oligonucleotide
atgtgttttgctgggaaaggatctacgtgg

SEQ ID NO: 455020 - DNA, 30 bp, Artificial Sequence
  Synthetic oligonucleotide
tgttcgatgtccattgttagctcaccgtgg

SEQ ID NO: 455021 - DNA, 30 bp, Artificial Sequence
  Synthetic oligonucleotide
actataacttgaaagggtcttagaccgtgg

SEQ ID NO: 455022 - DNA, 30 bp, Artificial Sequence
  Synthetic oligonucleotide
agtggctacgcgccacgtggaggaccgtgg

SEQ ID NO: 455023 - DNA, 30 bp, Artificial Sequence
  Synthetic oligonucleotide
ggtctcgtagggacaggggcctatccgtgg

SEQ ID NO: 455024 - DNA, 30 bp, Artificial Sequence
  Synthetic oligonucleotide
aaggtatgttattatctatggaacgcgtgg

SEQ ID NO: 455025 - DNA, 30 bp, Artificial Sequence
  Synthetic oligonucleotide
tctggtcgctattaacggacctaatcgtgg

SEQ ID NO: 455026 - DNA, 30 bp, Artificial Sequence
  Synthetic oligonucleotide
cagcatttgcctttataaggctactcgtgg

SEQ ID NO: 455027 - DNA, 30 bp, Artificial Sequence
  Synthetic oligonucleotide
gttcccactccggaccatagtacctcgtgg

SEQ ID NO: 455028 - DNA, 30 bp, Artificial Sequence
  Synthetic oligonucleotide
taattcatcatggggtgctccatctcgtgg

SEQ ID NO: 455029 - DNA, 30 bp, Artificial Sequence
  Synthetic oligonucleotide
tttatcagagaacttagacctcaaaggtgg

SEQ ID NO: 455030 - DNA, 30 bp, Artificial Sequence
  Synthetic oligonucleotide
cgcacggtcccctattacggggacaggtgg

SEQ ID NO: 455031 - DNA, 30 bp, Artificial Sequence
  Synthetic oligonucleotide
aaaagcagtctagtgatttgcaggaggtgg

SEQ ID NO: 455032 - DNA, 30 bp, Artificial Sequence
  Synthetic oligonucleotide
aaatttttcgggagcagttcgcaacggtgg

SEQ ID NO: 455033 - DNA, 30 bp, Artificial Sequence
  Synthetic oligonucleotide
aaatgcgagtcactcgcagctttccggtgg

SEQ ID NO: 455034 - DNA, 30 bp, Artificial Sequence
  Synthetic oligonucleotide
gtgagcatgggtcatttacacaagcggtgg

SEQ ID NO: 455035 - DNA, 30 bp, Artificial Sequence
  Synthetic oligonucleotide
ttaactactaaggatggcagcaagcggtgg

SEQ ID NO: 455036 - DNA, 30 bp, Artificial Sequence
  Synthetic oligonucleotide
agggttcctttgtttggtttggagcggtgg

SEQ ID NO: 455037 - DNA, 30 bp, Artificial Sequence
  Synthetic oligonucleotide
acccgctaaccgcgagtgtgttgtcggtgg

SEQ ID NO: 455038 - DNA, 30 bp, Artificial Sequence
  Synthetic oligonucleotide
gcatgcgtgaccgcttacaatgcagggtgg

SEQ ID NO: 455039 - DNA, 30 bp, Artificial Sequence
  Synthetic oligonucleotide
acaaacggtgggcactacggtcgagggtgg

SEQ ID NO: 455040 - DNA, 30 bp, Artificial Sequence
  Synthetic oligonucleotide
tcacctttcagactattattttgagggtgg

SEQ ID NO: 455041 - DNA, 30 bp, Artificial Sequence
  Synthetic oligonucleotide
gtctctcgtcccaagctgagtttagggtgg

SEQ ID NO: 455042 - DNA, 30 bp, Artificial Sequence
  Synthetic oligonucleotide
gatccttggtccgtaattaagaatgggtgg

SEQ ID NO: 455043 - DNA, 30 bp, Artificial Sequence
  Synthetic oligonucleotide
tttacaataatggtcgtaggaggtgggtgg

SEQ ID NO: 455044 - DNA, 30 bp, Artificial Sequence
  Synthetic oligonucleotide
tattaaacaagttattctcgtacatggtgg

SEQ ID NO: 455045 - DNA, 30 bp, Artificial Sequence
  Synthetic oligonucleotide
ctctagacaacatgacatgccccatggtgg

SEQ ID NO: 455046 - DNA, 30 bp, Artificial Sequence
  Synthetic oligonucleotide
cgctctatgactgcgttatcacactggtgg

SEQ ID NO: 455047 - DNA, 30 bp, Artificial Sequence
  Synthetic oligonucleotide
aatgcataagttatttggatcacctggtgg

SEQ ID NO: 455048 - DNA, 25 bp, Artificial Sequence
  Synthetic oligonucleotide
tgggttggggtggcggggctggtgg

SEQ ID NO: 455049 - DNA, 30 bp, Artificial Sequence
  Synthetic oligonucleotide
ggacttagacctccgcaagcagtctggtgg

SEQ ID NO: 455050 - DNA, 34 bp, Artificial Sequence
  Synthetic oligonucleotide
aactactaagtaactagcagtaggcgggtggtgg

SEQ ID NO: 455051 - DNA, 30 bp, Artificial Sequence
  Synthetic oligonucleotide
ataaagcggcggttattatcggtgtggtgg

SEQ ID NO: 455052 - DNA, 30 bp, Artificial Sequence
  Synthetic oligonucleotide
acccactggttgtagcagcagccttggtgg

SEQ ID NO: 455053 - DNA, 30 bp, Artificial Sequence
  Synthetic oligonucleotide
attttgagctccattaactgaacaatgtgg

SEQ ID NO: 455054 - DNA, 30 bp, Artificial Sequence
  Synthetic oligonucleotide
tacgcccacgtaacgcatttcacaatgtgg

SEQ ID NO: 455055 - DNA, 30 bp, Artificial Sequence
  Synthetic oligonucleotide
gggccgtagcacgtcctcttaataatgtgg

SEQ ID NO: 455056 - DNA, 30 bp, Artificial Sequence
  Synthetic oligonucleotide
cgttctaattccaggtggcaccacatgtgg

SEQ ID NO: 455057 - DNA, 30 bp, Artificial Sequence
  Synthetic oligonucleotide
catacgggacctgtcagcccagccatgtgg

SEQ ID NO: 455058 - DNA, 30 bp, Artificial Sequence
  Synthetic oligonucleotide
tccaataccggctgggacgaggggatgtgg

SEQ ID NO: 455059 - DNA, 30 bp, Artificial Sequence
  Synthetic oligonucleotide
ggatacgtaatcacccaggtgcgactgtgg

SEQ ID NO: 455060 - DNA, 29 bp, Artificial Sequence
  Synthetic oligonucleotide
tgttggaatgttttcaccttctactgtgg

SEQ ID NO: 455061 - DNA, 30 bp, Artificial Sequence
  Synthetic oligonucleotide
gcttttacctgtgtacatagagacctgtgg

SEQ ID NO: 455062 - DNA, 30 bp, Artificial Sequence
  Synthetic oligonucleotide
gccatttcccgagacgaagtggacctgtgg

SEQ ID NO: 455063 - DNA, 30 bp, Artificial Sequence
  Synthetic oligonucleotide
cgcttcatatgcgtggtgtccctcctgtgg

SEQ ID NO: 455064 - DNA, 30 bp, Artificial Sequence
  Synthetic oligonucleotide
gactacggttattgagtctttcagctgtgg

SEQ ID NO: 455065 - DNA, 31 bp, Artificial Sequence
  Synthetic oligonucleotide
gggacacccaacaatttcggtaacgctgtgg

SEQ ID NO: 455066 - DNA, 30 bp, Artificial Sequence
  Synthetic oligonucleotide
atgttcaggtagcttaattttaggctgtgg

SEQ ID NO: 455067 - DNA, 30 bp, Artificial Sequence
  Synthetic oligonucleotide
atgtccctctatttgtcccgtttgctgtgg

SEQ ID NO: 455068 - DNA, 30 bp, Artificial Sequence
  Synthetic oligonucleotide
ggaggaaagggagaatgaggctttctgtgg

SEQ ID NO: 455069 - DNA, 30 bp, Artificial Sequence
  Synthetic oligonucleotide
gagaaaccctgttctatttgacaagtgtgg

SEQ ID NO: 455070 - DNA, 30 bp, Artificial Sequence
  Synthetic oligonucleotide
cagcaatggcggggaacgacgttagtgtgg

SEQ ID NO: 455071 - DNA, 30 bp, Artificial Sequence
  Synthetic oligonucleotide
tatgtgactcgcgaatgccacaacgtgtgg

SEQ ID NO: 455072 - DNA, 30 bp, Artificial Sequence
  Synthetic oligonucleotide
ttctttaagaagtacccgaagaaggtgtgg

SEQ ID NO: 455073 - DNA, 30 bp, Artificial Sequence
  Synthetic oligonucleotide
caattattgcgtcacggccccactgtgtgg

SEQ ID NO: 455074 - DNA, 30 bp, Artificial Sequence
  Synthetic oligonucleotide
cgtcattcttgttcaaaacgcaaattgtgg

SEQ ID NO: 455075 - DNA, 30 bp, Artificial Sequence
  Synthetic oligonucleotide
tcttcggctctcccggccgggcgattgtgg

SEQ ID NO: 455076 - DNA, 30 bp, Artificial Sequence
  Synthetic oligonucleotide
tagcggcgtccgagaataaacgtcttgtgg

SEQ ID NO: 455077 - DNA, 30 bp, Artificial Sequence
  Synthetic oligonucleotide
tattggaacattcggtgttaacatttgtgg

SEQ ID NO: 455078 - DNA, 30 bp, Artificial Sequence
  Synthetic oligonucleotide
taactatccctctacttaccggctttgtgg

SEQ ID NO: 455079 - DNA, 30 bp, Artificial Sequence
  Synthetic oligonucleotide
actgaaggaaccggcggcgtttgtttgtgg

SEQ ID NO: 455080 - DNA, 30 bp, Artificial Sequence
  Synthetic oligonucleotide
agaaatttttccggggccgattagaattgg

SEQ ID NO: 455081 - DNA, 30 bp, Artificial Sequence
  Synthetic oligonucleotide
cttccctatctacaagagacgtcgaattgg

SEQ ID NO: 455082 - DNA, 30 bp, Artificial Sequence
  Synthetic oligonucleotide
ggtccttgaacacgggccctcaggaattgg

SEQ ID NO: 455083 - DNA, 29 bp, Artificial Sequence
  Synthetic oligonucleotide
tagtccaaatctaatcgagtaggaattgg

SEQ ID NO: 455084 - DNA, 30 bp, Artificial Sequence
  Synthetic oligonucleotide
gtcggtacacgcgggcatcaagaacattgg

SEQ ID NO: 455085 - DNA, 30 bp, Artificial Sequence
  Synthetic oligonucleotide
atccttgtgccgtgaacatcggtacattgg

SEQ ID NO: 455086 - DNA, 30 bp, Artificial Sequence
  Synthetic oligonucleotide
ggatcggcagcgcagtccggtcgccattgg

SEQ ID NO: 455087 - DNA, 29 bp, Artificial Sequence
  Synthetic oligonucleotide
aagttctacccattgatgattagcattgg

SEQ ID NO: 455088 - DNA, 30 bp, Artificial Sequence
  Synthetic oligonucleotide
cccggccagcctgaaattttcatgcattgg

SEQ ID NO: 455089 - DNA, 30 bp, Artificial Sequence
  Synthetic oligonucleotide
aacggatgagttcggatatgtgtgcattgg

SEQ ID NO: 455090 - DNA, 30 bp, Artificial Sequence
  Synthetic oligonucleotide
atttgttccatcaggttttatcgtcattgg

SEQ ID NO: 455091 - DNA, 30 bp, Artificial Sequence
  Synthetic oligonucleotide
ctgggataaccccagagagacacagattgg

SEQ ID NO: 455092 - DNA, 30 bp, Artificial Sequence
  Synthetic oligonucleotide
tgtttgacccatattctttttgtagattgg

SEQ ID NO: 455093 - DNA, 30 bp, Artificial Sequence
  Synthetic oligonucleotide
tatgactcgctccgcggtacttacgattgg

SEQ ID NO: 455094 - DNA, 30 bp, Artificial Sequence
  Synthetic oligonucleotide
gtccctagtaggctttaataaactgattgg

SEQ ID NO: 455095 - DNA, 30 bp, Artificial Sequence
  Synthetic oligonucleotide
cactcagatcagaagaactggtgtgattgg

SEQ ID NO: 455096 - DNA, 30 bp, Artificial Sequence
  Synthetic oligonucleotide
agtatcaacatttttagatggtaatattgg

SEQ ID NO: 455097 - DNA, 30 bp, Artificial Sequence
  Synthetic oligonucleotide
acgaagcatgactcaacccgttgatattgg

SEQ ID NO: 455098 - DNA, 30 bp, Artificial Sequence
  Synthetic oligonucleotide
gcgttccattttcactgctcagggtattgg

SEQ ID NO: 455099 - DNA, 29 bp, Artificial Sequence
  Synthetic oligonucleotide
taacgagggacgaagaccgggggtattgg

SEQ ID NO: 455100 - DNA, 30 bp, Artificial Sequence
  Synthetic oligonucleotide
tatacgggcactcgcctgacatagacttgg

SEQ ID NO: 455101 - DNA, 30 bp, Artificial Sequence
  Synthetic oligonucleotide
caggataaagagagcccgctctcgacttgg

SEQ ID NO: 455102 - DNA, 30 bp, Artificial Sequence
  Synthetic oligonucleotide
aaaccttgttacgaacgcgttcctacttgg

SEQ ID NO: 455103 - DNA, 30 bp, Artificial Sequence
  Synthetic oligonucleotide
cgttagacgggcagctagtgtagtacttgg

SEQ ID NO: 455104 - DNA, 30 bp, Artificial Sequence
  Synthetic oligonucleotide
agtacgggcaacaccaataagcttacttgg

SEQ ID NO: 455105 - DNA, 30 bp, Artificial Sequence
  Synthetic oligonucleotide
cgacgctttaagtgcaaggacaggccttgg

SEQ ID NO: 455106 - DNA, 30 bp, Artificial Sequence
  Synthetic oligonucleotide
caccgggaacgtcagcgtccaaatccttgg

SEQ ID NO: 455107 - DNA, 30 bp, Artificial Sequence
  Synthetic oligonucleotide
gaaccacggacatgcttttgcctagcttgg

SEQ ID NO: 455108 - DNA, 30 bp, Artificial Sequence
  Synthetic oligonucleotide
agagccgaatgcagtagtttgagcgcttgg

SEQ ID NO: 455109 - DNA, 30 bp, Artificial Sequence
  Synthetic oligonucleotide
gagggtctatttgtttattgccaggcttgg

SEQ ID NO: 455110 - DNA, 30 bp, Artificial Sequence
  Synthetic oligonucleotide
acaaccatataagttcctgcggatgcttgg

SEQ ID NO: 455111 - DNA, 30 bp, Artificial Sequence
  Synthetic oligonucleotide
atttcatgctcacgtgcagaccctgcttgg

SEQ ID NO: 455112 - DNA, 30 bp, Artificial Sequence
  Synthetic oligonucleotide
ataggacatgaaccggtgctttgctcttgg

SEQ ID NO: 455113 - DNA, 30 bp, Artificial Sequence
  Synthetic oligonucleotide
ggggacacggaaccataaaagttctcttgg

SEQ ID NO: 455114 - DNA, 30 bp, Artificial Sequence
  Synthetic oligonucleotide
aatacggggggcaggtgccgtgggtcttgg

SEQ ID NO: 455115 - DNA, 30 bp, Artificial Sequence
  Synthetic oligonucleotide
gaaaacccgcgggcactgctcgtttcttgg

SEQ ID NO: 455116 - DNA, 30 bp, Artificial Sequence
  Synthetic oligonucleotide
gcggacgtatttatcacaaaattttcttgg

SEQ ID NO: 455117 - DNA, 30 bp, Artificial Sequence
  Synthetic oligonucleotide
atcttagagcaactcgactgcgaaagttgg

SEQ ID NO: 455118 - DNA, 30 bp, Artificial Sequence
  Synthetic oligonucleotide
ctccgtccctgaggtcaagtattaagttgg

SEQ ID NO: 455119 - DNA, 30 bp, Artificial Sequence
  Synthetic oligonucleotide
ttctaaaaggttaatagacgacatagttgg

SEQ ID NO: 455120 - DNA, 30 bp, Artificial Sequence
  Synthetic oligonucleotide
cgcgagttttgaactgtacctaaccgttgg

SEQ ID NO: 455121 - DNA, 30 bp, Artificial Sequence
  Synthetic oligonucleotide
gtggcactgcattttgggtattagcgttgg

SEQ ID NO: 455122 - DNA, 30 bp, Artificial Sequence
  Synthetic oligonucleotide
agattagccttaattataaataggcgttgg

SEQ ID NO: 455123 - DNA, 30 bp, Artificial Sequence
  Synthetic oligonucleotide
ggggggtgaaattttagaaatttgcgttgg

SEQ ID NO: 455124 - DNA, 30 bp, Artificial Sequence
  Synthetic oligonucleotide
gatttgttccttatctcacaatgtcgttgg

SEQ ID NO: 455125 - DNA, 30 bp, Artificial Sequence
  Synthetic oligonucleotide
tctgcgtcagtaagttatcaaacaggttgg

SEQ ID NO: 455126 - DNA, 30 bp, Artificial Sequence
  Synthetic oligonucleotide
gggaatgccggataaaccgctggaggttgg

SEQ ID NO: 455127 - DNA, 30 bp, Artificial Sequence
  Synthetic oligonucleotide
aacctcccagaagccacgtcacgcggttgg

SEQ ID NO: 455128 - DNA, 30 bp, Artificial Sequence
  Synthetic oligonucleotide
aggactcggatcacaggagtatggggttgg

SEQ ID NO: 455129 - DNA, 30 bp, Artificial Sequence
  Synthetic oligonucleotide
tcggcgtggtttcttctaggggcctgttgg

SEQ ID NO: 455130 - DNA, 30 bp, Artificial Sequence
  Synthetic oligonucleotide
catctccaccgcttctcctataagtgttgg

SEQ ID NO: 455131 - DNA, 30 bp, Artificial Sequence
  Synthetic oligonucleotide
ttcccaaattttagagggataacgtgttgg

SEQ ID NO: 455132 - DNA, 30 bp, Artificial Sequence
  Synthetic oligonucleotide
tgacgtagttatgtcatttggccgtgttgg

SEQ ID NO: 455133 - DNA, 30 bp, Artificial Sequence
  Synthetic oligonucleotide
ctaaattgatacagcacggccgtttgttgg

SEQ ID NO: 455134 - DNA, 30 bp, Artificial Sequence
  Synthetic oligonucleotide
gtcggtgtatcattgtagttccaaatttgg

SEQ ID NO: 455135 - DNA, 30 bp, Artificial Sequence
  Synthetic oligonucleotide
tacttgactactaacgggtagccaatttgg

SEQ ID NO: 455136 - DNA, 30 bp, Artificial Sequence
  Synthetic oligonucleotide
aatacggagctgtataagttggcaatttgg

SEQ ID NO: 455137 - DNA, 30 bp, Artificial Sequence
  Synthetic oligonucleotide
ttagttcatggaggcgcatttggaatttgg

SEQ ID NO: 455138 - DNA, 30 bp, Artificial Sequence
  Synthetic oligonucleotide
cgccccttcaacgcttccgttataatttgg

SEQ ID NO: 455139 - DNA, 30 bp, Artificial Sequence
  Synthetic oligonucleotide
gacggcaggacaaatgcggggctaatttgg

SEQ ID NO: 455140 - DNA, 30 bp, Artificial Sequence
  Synthetic oligonucleotide
gaacttcacaccttcaccagtttaatttgg

SEQ ID NO: 455141 - DNA, 30 bp, Artificial Sequence
  Synthetic oligonucleotide
gggttaaggtatagtaattgcgacatttgg

SEQ ID NO: 455142 - DNA, 30 bp, Artificial Sequence
  Synthetic oligonucleotide
agtccgtgcgatttcctatagagcatttgg

SEQ ID NO: 455143 - DNA, 30 bp, Artificial Sequence
  Synthetic oligonucleotide
tgccagctttatccaagggtattcatttgg

SEQ ID NO: 455144 - DNA, 30 bp, Artificial Sequence
  Synthetic oligonucleotide
attattaggggcctatgtgaaaagatttgg

SEQ ID NO: 455145 - DNA, 30 bp, Artificial Sequence
  Synthetic oligonucleotide
tggtgttttagggaatctacgtcgatttgg

SEQ ID NO: 455146 - DNA, 30 bp, Artificial Sequence
  Synthetic oligonucleotide
gggtattgagtacagaatgtttggatttgg

SEQ ID NO: 455147 - DNA, 30 bp, Artificial Sequence
  Synthetic oligonucleotide
ctacatcgacgaatgaatcagcttatttgg

SEQ ID NO: 455148 - DNA, 30 bp, Artificial Sequence
  Synthetic oligonucleotide
tcgaactacagcgtactcgttttactttgg

SEQ ID NO: 455149 - DNA, 30 bp, Artificial Sequence
  Synthetic oligonucleotide
gctaattccttcatgaggggtcgcctttgg

SEQ ID NO: 455150 - DNA, 30 bp, Artificial Sequence
  Synthetic oligonucleotide
tgatagcctacgcgtttgtaactcctttgg

SEQ ID NO: 455151 - DNA, 30 bp, Artificial Sequence
  Synthetic oligonucleotide
tacaccaccccgaagatttcggagctttgg

SEQ ID NO: 455152 - DNA, 30 bp, Artificial Sequence
  Synthetic oligonucleotide
ctcttatctatgatatactggaggctttgg

SEQ ID NO: 455153 - DNA, 30 bp, Artificial Sequence
  Synthetic oligonucleotide
acactcccatggtatgagtccaatctttgg

SEQ ID NO: 455154 - DNA, 29 bp, Artificial Sequence
  Synthetic oligonucleotide
agtggtcataatcgcttccagatctttgg

SEQ ID NO: 455155 - DNA, 30 bp, Artificial Sequence
  Synthetic oligonucleotide
gatctacccacctgagatgtctatctttgg

SEQ ID NO: 455156 - DNA, 30 bp, Artificial Sequence
  Synthetic oligonucleotide
ggccctggctgactaatttgtagtctttgg

SEQ ID NO: 455157 - DNA, 30 bp, Artificial Sequence
  Synthetic oligonucleotide
gacactacccccggttgtacacttctttgg

SEQ ID NO: 455158 - DNA, 30 bp, Artificial Sequence
  Synthetic oligonucleotide
cggggacacatgtattaccggcaagtttgg

SEQ ID NO: 455159 - DNA, 30 bp, Artificial Sequence
  Synthetic oligonucleotide
gctgggttacttaatctctttgcagtttgg

SEQ ID NO: 455160 - DNA, 30 bp, Artificial Sequence
  Synthetic oligonucleotide
tactcggtttgtttgttattacatgtttgg

SEQ ID NO: 455161 - DNA, 30 bp, Artificial Sequence
  Synthetic oligonucleotide
gggataaaatgaccttggggcagattttgg

SEQ ID NO: 455162 - DNA, 30 bp, Artificial Sequence
  Synthetic oligonucleotide
ttttcagagttgtaactgttgggattttgg

SEQ ID NO: 455163 - DNA, 30 bp, Artificial Sequence
  Synthetic oligonucleotide
tgaatcctctgtgtttctgaattgttttgg

SEQ ID NO: 455164 - DNA, 30 bp, Artificial Sequence
  Synthetic oligonucleotide
agtaccaaggctagtctctctgttttttgg

SEQ ID NO: 455165 - DNA, 30 bp, Artificial Sequence
  Synthetic oligonucleotide
aatttgaactgctcatgaaggacaaaaatg

SEQ ID NO: 455166 - DNA, 30 bp, Artificial Sequence
  Synthetic oligonucleotide
aaattggatgtcctccattctgcaaaaatg

SEQ ID NO: 455167 - DNA, 30 bp, Artificial Sequence
  Synthetic oligonucleotide
gtttggtatgcgtggactcacggaaaaatg

SEQ ID NO: 455168 - DNA, 30 bp, Artificial Sequence
  Synthetic oligonucleotide
agaacggggtgccgatgtgactgaaaaatg

SEQ ID NO: 455169 - DNA, 30 bp, Artificial Sequence
  Synthetic oligonucleotide
gtcatttgtgaaacatctatgtgaaaaatg

SEQ ID NO: 455170 - DNA, 31 bp, Artificial Sequence
  Synthetic oligonucleotide
ttgttagcgtgcgatgcgtcagttcaaaatg

SEQ ID NO: 455171 - DNA, 30 bp, Artificial Sequence
  Synthetic oligonucleotide
gtatatatatcctatgtatttgggaaaatg

SEQ ID NO: 455172 - DNA, 30 bp, Artificial Sequence
  Synthetic oligonucleotide
gtccgataatctatgtgtgaggataaaatg

SEQ ID NO: 455173 - DNA, 30 bp, Artificial Sequence
  Synthetic oligonucleotide
ggttaataagcaacggagctctctaaaatg

SEQ ID NO: 455174 - DNA, 30 bp, Artificial Sequence
  Synthetic oligonucleotide
gttaggatcagcacgctgcccagccaaatg

SEQ ID NO: 455175 - DNA, 30 bp, Artificial Sequence
  Synthetic oligonucleotide
tcgtatacgtagatcatacatttccaaatg

SEQ ID NO: 455176 - DNA, 30 bp, Artificial Sequence
  Synthetic oligonucleotide
ttgtgttaggaggtgaagaagacgcaaatg

SEQ ID NO: 455177 - DNA, 30 bp, Artificial Sequence
  Synthetic oligonucleotide
gtggtcttcttttcattttggaggcaaatg

SEQ ID NO: 455178 - DNA, 30 bp, Artificial Sequence
  Synthetic oligonucleotide
atctcgcctgtgtttctgggtatgcaaatg

SEQ ID NO: 455179 - DNA, 30 bp, Artificial Sequence
  Synthetic oligonucleotide
aattagggggtcatcagatcccctcaaatg

SEQ ID NO: 455180 - DNA, 30 bp, Artificial Sequence
  Synthetic oligonucleotide
tcctctacacttgccacgccaaaagaaatg

SEQ ID NO: 455181 - DNA, 30 bp, Artificial Sequence
  Synthetic oligonucleotide
ggctgcgcattacatgccacgatagaaatg

SEQ ID NO: 455182 - DNA, 30 bp, Artificial Sequence
  Synthetic oligonucleotide
ctttgattagatccacagcttatcgaaatg

SEQ ID NO: 455183 - DNA, 30 bp, Artificial Sequence
  Synthetic oligonucleotide
aggctcggagcgcatttacaagtggaaatg

SEQ ID NO: 455184 - DNA, 30 bp, Artificial Sequence
  Synthetic oligonucleotide
aactccgcgagcccttacatattggaaatg

SEQ ID NO: 455185 - DNA, 30 bp, Artificial Sequence
  Synthetic oligonucleotide
gtgcattaggccctagcttcagatgaaatg

SEQ ID NO: 455186 - DNA, 30 bp, Artificial Sequence
  Synthetic oligonucleotide
agaattcatctggacggtgttggtgaaatg

SEQ ID NO: 455187 - DNA, 30 bp, Artificial Sequence
  Synthetic oligonucleotide
gcaccctgccggtatatttgcagataaatg

SEQ ID NO: 455188 - DNA, 30 bp, Artificial Sequence
  Synthetic oligonucleotide
tagcttccgaatacggctctattataaatg

SEQ ID NO: 455189 - DNA, 30 bp, Artificial Sequence
  Synthetic oligonucleotide
gctttagagaacttacttagctgctaaatg

SEQ ID NO: 455190 - DNA, 30 bp, Artificial Sequence
  Synthetic oligonucleotide
gatagtgagatcaaatcaaagaggtaaatg

SEQ ID NO: 455191 - DNA, 30 bp, Artificial Sequence
  Synthetic oligonucleotide
tctccagtgatctcgcgcgtaatgtaaatg

SEQ ID NO: 455192 - DNA, 30 bp, Artificial Sequence
  Synthetic oligonucleotide
cttgttctaaatacgccagcgacttaaatg

SEQ ID NO: 455193 - DNA, 30 bp, Artificial Sequence
  Synthetic oligonucleotide
tctatcgtgcgcataaaatcatacacaatg

SEQ ID NO: 455194 - DNA, 30 bp, Artificial Sequence
  Synthetic oligonucleotide
tagcaagtgacaccgtcgtgccagacaatg

SEQ ID NO: 455195 - DNA, 30 bp, Artificial Sequence
  Synthetic oligonucleotide
agtgagatctccagttacgtgcctacaatg

SEQ ID NO: 455196 - DNA, 30 bp, Artificial Sequence
  Synthetic oligonucleotide
ttctcgctattttgcactgtcagtacaatg

SEQ ID NO: 455197 - DNA, 30 bp, Artificial Sequence
  Synthetic oligonucleotide
gccgattggtcattcagtacgaaaccaatg

SEQ ID NO: 455198 - DNA, 30 bp, Artificial Sequence
  Synthetic oligonucleotide
ctcatacaagagtttccgatgccaccaatg

SEQ ID NO: 455199 - DNA, 30 bp, Artificial Sequence
  Synthetic oligonucleotide
gctccctggtggctctcacggttcccaatg

SEQ ID NO: 455200 - DNA, 30 bp, Artificial Sequence
  Synthetic oligonucleotide
tttctgggtccgatactgttggagccaatg

SEQ ID NO: 455201 - DNA, 30 bp, Artificial Sequence
  Synthetic oligonucleotide
atttatcaacgccttactcggaaagcaatg

SEQ ID NO: 455202 - DNA, 30 bp, Artificial Sequence
  Synthetic oligonucleotide
ttttaggcttacttaaattctatatcaatg

SEQ ID NO: 455203 - DNA, 30 bp, Artificial Sequence
  Synthetic oligonucleotide
tcacactctccgggctgacccgtatcaatg

SEQ ID NO: 455204 - DNA, 30 bp, Artificial Sequence
  Synthetic oligonucleotide
tgtgtttgttgagtattatagaactcaatg

SEQ ID NO: 455205 - DNA, 30 bp, Artificial Sequence
  Synthetic oligonucleotide
taactggatttggaaactattgtctcaatg

SEQ ID NO: 455206 - DNA, 30 bp, Artificial Sequence
  Synthetic oligonucleotide
ttgtagccagacgggcacctgacgtcaatg

SEQ ID NO: 455207 - DNA, 30 bp, Artificial Sequence
  Synthetic oligonucleotide
gattcctcgctactgtcgccattgtcaatg

SEQ ID NO: 455208 - DNA, 30 bp, Artificial Sequence
  Synthetic oligonucleotide
tcggcaagtagtagctagagggattcaatg

SEQ ID NO: 455209 - DNA, 30 bp, Artificial Sequence
  Synthetic oligonucleotide
ctaaattcctttgctcaattctggagaatg

SEQ ID NO: 455210 - DNA, 30 bp, Artificial Sequence
  Synthetic oligonucleotide
tatggtaaatagaattgctctattagaatg

SEQ ID NO: 455211 - DNA, 30 bp, Artificial Sequence
  Synthetic oligonucleotide
tctaacttcgatcagtgaggttgacgaatg

SEQ ID NO: 455212 - DNA, 30 bp, Artificial Sequence
  Synthetic oligonucleotide
cagatgtggttctccacatccacaggaatg

SEQ ID NO: 455213 - DNA, 30 bp, Artificial Sequence
  Synthetic oligonucleotide
attataaggatcggtcaagtacacggaatg

SEQ ID NO: 455214 - DNA, 30 bp, Artificial Sequence
  Synthetic oligonucleotide
ggtttttctgcattgcgacttggcggaatg

SEQ ID NO: 455215 - DNA, 30 bp, Artificial Sequence
  Synthetic oligonucleotide
ttcccggtccgggcacctgagcagggaatg

SEQ ID NO: 455216 - DNA, 30 bp, Artificial Sequence
  Synthetic oligonucleotide
atacttctaaacggcagatgccctggaatg

SEQ ID NO: 455217 - DNA, 30 bp, Artificial Sequence
  Synthetic oligonucleotide
gtaggttacgggcactttcagtaatgaatg

SEQ ID NO: 455218 - DNA, 30 bp, Artificial Sequence
  Synthetic oligonucleotide
atcggccgcatcgttctagtgccgtgaatg

SEQ ID NO: 455219 - DNA, 30 bp, Artificial Sequence
  Synthetic oligonucleotide
tgtcttggtggctatcgaggtgaaataatg

SEQ ID NO: 455220 - DNA, 30 bp, Artificial Sequence
  Synthetic oligonucleotide
ttattagctctcgtcaggaaaggaataatg

SEQ ID NO: 455221 - DNA, 30 bp, Artificial Sequence
  Synthetic oligonucleotide
acaactacccctaagggttttggaataatg

SEQ ID NO: 455222 - DNA, 29 bp, Artificial Sequence
  Synthetic oligonucleotide
attactgcgcagtgtaacggtgaataatg

SEQ ID NO: 455223 - DNA, 30 bp, Artificial Sequence
  Synthetic oligonucleotide
gcaccgctttaggtagtggtcctaataatg

SEQ ID NO: 455224 - DNA, 30 bp, Artificial Sequence
  Synthetic oligonucleotide
actaccgggtgagaccggttcgggataatg

SEQ ID NO: 455225 - DNA, 30 bp, Artificial Sequence
  Synthetic oligonucleotide
tccactaggggtccagggagcacactaatg

SEQ ID NO: 455226 - DNA, 30 bp, Artificial Sequence
  Synthetic oligonucleotide
gaggatctacaaccattgttagcgctaatg

SEQ ID NO: 455227 - DNA, 30 bp, Artificial Sequence
  Synthetic oligonucleotide
gaaggtcgcatcttacactaccgtctaatg

SEQ ID NO: 455228 - DNA, 30 bp, Artificial Sequence
  Synthetic oligonucleotide
gatctatctcagtttgtaggcgacgtaatg

SEQ ID NO: 455229 - DNA, 30 bp, Artificial Sequence
  Synthetic oligonucleotide
gcctacaacttgatcaacctagaggtaatg

SEQ ID NO: 455230 - DNA, 30 bp, Artificial Sequence
  Synthetic oligonucleotide
gagacactaagcattacgacttaggtaatg

SEQ ID NO: 455231 - DNA, 30 bp, Artificial Sequence
  Synthetic oligonucleotide
taccggaccctagctgatccgcgggtaatg

SEQ ID NO: 455232 - DNA, 30 bp, Artificial Sequence
  Synthetic oligonucleotide
gaggggggtttccttagcattcgggtaatg

SEQ ID NO: 455233 - DNA, 30 bp, Artificial Sequence
  Synthetic oligonucleotide
gttctatcttctggtatttacgatgtaatg

SEQ ID NO: 455234 - DNA, 30 bp, Artificial Sequence
  Synthetic oligonucleotide
ctgcggtttatgccctgccataaattaatg

SEQ ID NO: 455235 - DNA, 30 bp, Artificial Sequence
  Synthetic oligonucleotide
ttcggttctttttgaagagcacagttaatg

SEQ ID NO: 455236 - DNA, 30 bp, Artificial Sequence
  Synthetic oligonucleotide
taaatcagggtggccaatgaggagttaatg

SEQ ID NO: 455237 - DNA, 30 bp, Artificial Sequence
  Synthetic oligonucleotide
catacaggaagcaataaactagcgttaatg

SEQ ID NO: 455238 - DNA, 30 bp, Artificial Sequence
  Synthetic oligonucleotide
actttgtcgcatagtctcggcaggttaatg

SEQ ID NO: 455239 - DNA, 30 bp, Artificial Sequence
  Synthetic oligonucleotide
atttgtcgtctatttatttgcgggttaatg

SEQ ID NO: 455240 - DNA, 30 bp, Artificial Sequence
  Synthetic oligonucleotide
tttctcgaaatggtaggtgtctatttaatg

SEQ ID NO: 455241 - DNA, 30 bp, Artificial Sequence
  Synthetic oligonucleotide
gatgccgcagctttggtcagaataaacatg

SEQ ID NO: 455242 - DNA, 30 bp, Artificial Sequence
  Synthetic oligonucleotide
gccatgtgtaagtccaagggcgtcaacatg

SEQ ID NO: 455243 - DNA, 30 bp, Artificial Sequence
  Synthetic oligonucleotide
accgcggtacacgcactctgaacgaacatg

SEQ ID NO: 455244 - DNA, 30 bp, Artificial Sequence
  Synthetic oligonucleotide
agcatccggaggctgtgacatgaacacatg

SEQ ID NO: 455245 - DNA, 30 bp, Artificial Sequence
  Synthetic oligonucleotide
tctctaaggggcacatgccagacacacatg

SEQ ID NO: 455246 - DNA, 30 bp, Artificial Sequence
  Synthetic oligonucleotide
aaaagcacattagttgatcggacacacatg

SEQ ID NO: 455247 - DNA, 30 bp, Artificial Sequence
  Synthetic oligonucleotide
gatattcgcctaagggctatttcccacatg

SEQ ID NO: 455248 - DNA, 30 bp, Artificial Sequence
  Synthetic oligonucleotide
gcgggctgttagtgagatactccgcacatg

SEQ ID NO: 455249 - DNA, 30 bp, Artificial Sequence
  Synthetic oligonucleotide
actctacggcctgcacgttgcttgcacatg

SEQ ID NO: 455250 - DNA, 30 bp, Artificial Sequence
  Synthetic oligonucleotide
tagcaatgggtggttaccgtaagtcacatg

SEQ ID NO: 455251 - DNA, 30 bp, Artificial Sequence
  Synthetic oligonucleotide
tcttccttaggtttagtggcggcggacatg

SEQ ID NO: 455252 - DNA, 30 bp, Artificial Sequence
  Synthetic oligonucleotide
cgttctcagttgtcttccgtatcggacatg

SEQ ID NO: 455253 - DNA, 30 bp, Artificial Sequence
  Synthetic oligonucleotide
cacttacctatagtgtatatcggatacatg

SEQ ID NO: 455254 - DNA, 30 bp, Artificial Sequence
  Synthetic oligonucleotide
cccgacgaaattggtaatgcgcggtacatg

SEQ ID NO: 455255 - DNA, 30 bp, Artificial Sequence
  Synthetic oligonucleotide
aataatgcaaaaggtagtatttattacatg

SEQ ID NO: 455256 - DNA, 30 bp, Artificial Sequence
  Synthetic oligonucleotide
ctgtgcgacgccacgttacccacttacatg

SEQ ID NO: 455257 - DNA, 30 bp, Artificial Sequence
  Synthetic oligonucleotide
gaaatagcatgttggagtcgcttttacatg

SEQ ID NO: 455258 - DNA, 30 bp, Artificial Sequence
  Synthetic oligonucleotide
gaacatatctgggcgtttaggggaaccatg

SEQ ID NO: 455259 - DNA, 30 bp, Artificial Sequence
  Synthetic oligonucleotide
tttcacggttgggacccttagctaaccatg

SEQ ID NO: 455260 - DNA, 30 bp, Artificial Sequence
  Synthetic oligonucleotide
ttacatatcaagcagagctctgtcaccatg

SEQ ID NO: 455261 - DNA, 30 bp, Artificial Sequence
  Synthetic oligonucleotide
tgcttctggcacttggtcagcccgaccatg

SEQ ID NO: 455262 - DNA, 30 bp, Artificial Sequence
  Synthetic oligonucleotide
tggagcggcgccgtattcaatcggaccatg

SEQ ID NO: 455263 - DNA, 30 bp, Artificial Sequence
  Synthetic oligonucleotide
agaccttcggccccccaaatataacccatg

SEQ ID NO: 455264 - DNA, 30 bp, Artificial Sequence
  Synthetic oligonucleotide
ggatcaaatagtgtcccgcccggccccatg

SEQ ID NO: 455265 - DNA, 30 bp, Artificial Sequence
  Synthetic oligonucleotide
gttcggggtcattttaattcgatccccatg

SEQ ID NO: 455266 - DNA, 30 bp, Artificial Sequence
  Synthetic oligonucleotide
tttaaacgcggtttccattttctgcccatg

SEQ ID NO: 455267 - DNA, 30 bp, Artificial Sequence
  Synthetic oligonucleotide
ggcaccggccctcagggaggggatcccatg

SEQ ID NO: 455268 - DNA, 30 bp, Artificial Sequence
  Synthetic oligonucleotide
cctcccatgcattataatcgtgatcccatg

SEQ ID NO: 455269 - DNA, 30 bp, Artificial Sequence
  Synthetic oligonucleotide
cttaaaatgctgaccgagacgccagccatg

SEQ ID NO: 455270 - DNA, 30 bp, Artificial Sequence
  Synthetic oligonucleotide
ttttcctttgtatgtggaggatgggccatg

SEQ ID NO: 455271 - DNA, 30 bp, Artificial Sequence
  Synthetic oligonucleotide
ctcgtacttggccactgggccttggccatg

SEQ ID NO: 455272 - DNA, 30 bp, Artificial Sequence
  Synthetic oligonucleotide
attaattcctaatcatctacccatgccatg

SEQ ID NO: 455273 - DNA, 30 bp, Artificial Sequence
  Synthetic oligonucleotide
gctacgccgtctaggcctagcgatgccatg

SEQ ID NO: 455274 - DNA, 30 bp, Artificial Sequence
  Synthetic oligonucleotide
actctaggaatttttgtgatcgatgccatg

SEQ ID NO: 455275 - DNA, 30 bp, Artificial Sequence
  Synthetic oligonucleotide
actctgatcttcataagataatgttccatg

SEQ ID NO: 455276 - DNA, 30 bp, Artificial Sequence
  Synthetic oligonucleotide
ttcgctgttcgtacaccccgatgttccatg

SEQ ID NO: 455277 - DNA, 30 bp, Artificial Sequence
  Synthetic oligonucleotide
gtgcagtagactttcaagatagaaagcatg

SEQ ID NO: 455278 - DNA, 30 bp, Artificial Sequence
  Synthetic oligonucleotide
caaaatcttaaagggtagcgaagcagcatg

SEQ ID NO: 455279 - DNA, 30 bp, Artificial Sequence
  Synthetic oligonucleotide
cagtctaactatgcgactgagcagagcatg

SEQ ID NO: 455280 - DNA, 30 bp, Artificial Sequence
  Synthetic oligonucleotide
gcgctgctctgagctttcagcgggagcatg

SEQ ID NO: 455281 - DNA, 30 bp, Artificial Sequence
  Synthetic oligonucleotide
ttacgctatttcctgcaccctcatagcatg

SEQ ID NO: 455282 - DNA, 30 bp, Artificial Sequence
  Synthetic oligonucleotide
tgtcttttcgtcgagctacctagtagcatg

SEQ ID NO: 455283 - DNA, 30 bp, Artificial Sequence
  Synthetic oligonucleotide
tacgctgcgacatgggtatgatttagcatg

SEQ ID NO: 455284 - DNA, 30 bp, Artificial Sequence
  Synthetic oligonucleotide
cacacttttttttaaccatgttaacgcatg

SEQ ID NO: 455285 - DNA, 30 bp, Artificial Sequence
  Synthetic oligonucleotide
cacagcggtgtaacagtttcgagacgcatg

SEQ ID NO: 455286 - DNA, 30 bp, Artificial Sequence
  Synthetic oligonucleotide
agtaatagtattgtttaccgacgacgcatg

SEQ ID NO: 455287 - DNA, 30 bp, Artificial Sequence
  Synthetic oligonucleotide
ggctcaatgtcgacaaccgagcaccgcatg

SEQ ID NO: 455288 - DNA, 30 bp, Artificial Sequence
  Synthetic oligonucleotide
aacctgttgccgatccgacatgaccgcatg

SEQ ID NO: 455289 - DNA, 30 bp, Artificial Sequence
  Synthetic oligonucleotide
acttaacagcgccggctttaaaagcgcatg

SEQ ID NO: 455290 - DNA, 30 bp, Artificial Sequence
  Synthetic oligonucleotide
gggtataccggcagcgggggcaagcgcatg

SEQ ID NO: 455291 - DNA, 30 bp, Artificial Sequence
  Synthetic oligonucleotide
gatgataggagtcgacctcctaggcgcatg

SEQ ID NO: 455292 - DNA, 30 bp, Artificial Sequence
  Synthetic oligonucleotide
tgcagtgctggcgcattgaattatcgcatg

SEQ ID NO: 455293 - DNA, 30 bp, Artificial Sequence
  Synthetic oligonucleotide
gtaaccccggcgctgttacgtcgtcgcatg

SEQ ID NO: 455294 - DNA, 30 bp, Artificial Sequence
  Synthetic oligonucleotide
gatgggttgtactgccatggtcaaggcatg

SEQ ID NO: 455295 - DNA, 30 bp, Artificial Sequence
  Synthetic oligonucleotide
aatcagtgtgatatatggtcccgaggcatg

SEQ ID NO: 455296 - DNA, 30 bp, Artificial Sequence
  Synthetic oligonucleotide
caaagcacgcctcttacattagtaggcatg

SEQ ID NO: 455297 - DNA, 30 bp, Artificial Sequence
  Synthetic oligonucleotide
gagtcgcaattccttgggcggtgcggcatg

SEQ ID NO: 455298 - DNA, 30 bp, Artificial Sequence
  Synthetic oligonucleotide
gttgaggggaccgctgcttattatggcatg

SEQ ID NO: 455299 - DNA, 30 bp, Artificial Sequence
  Synthetic oligonucleotide
tgtttctgtgacgacaggattatctgcatg

SEQ ID NO: 455300 - DNA, 30 bp, Artificial Sequence
  Synthetic oligonucleotide
gccgctaatcccagagtatgaacgtgcatg

SEQ ID NO: 455301 - DNA, 30 bp, Artificial Sequence
  Synthetic oligonucleotide
ctttgtcagggcatagctactgcgtgcatg

SEQ ID NO: 455302 - DNA, 30 bp, Artificial Sequence
  Synthetic oligonucleotide
gctaccaggctcaagctgccccggtgcatg

SEQ ID NO: 455303 - DNA, 30 bp, Artificial Sequence
  Synthetic oligonucleotide
tatagataagtcctccttaccgcttgcatg

SEQ ID NO: 455304 - DNA, 30 bp, Artificial Sequence
  Synthetic oligonucleotide
cccttagatttggggtgtatggcaatcatg

SEQ ID NO: 455305 - DNA, 30 bp, Artificial Sequence
  Synthetic oligonucleotide
gtaaaagcttttagtgtttcccacatcatg

SEQ ID NO: 455306 - DNA, 30 bp, Artificial Sequence
  Synthetic oligonucleotide
aacgactgtttcgttagtgtatcgatcatg

SEQ ID NO: 455307 - DNA, 30 bp, Artificial Sequence
  Synthetic oligonucleotide
atggcacacctgtgtgaaataattatcatg

SEQ ID NO: 455308 - DNA, 30 bp, Artificial Sequence
  Synthetic oligonucleotide
taatccgttgagttcattaaccttatcatg

SEQ ID NO: 455309 - DNA, 30 bp, Artificial Sequence
  Synthetic oligonucleotide
ataaatgcagttatttgattttcactcatg

SEQ ID NO: 455310 - DNA, 30 bp, Artificial Sequence
  Synthetic oligonucleotide
atctatgcatatgagcaggatgacctcatg

SEQ ID NO: 455311 - DNA, 30 bp, Artificial Sequence
  Synthetic oligonucleotide
tattgctataatctgcaaggctagctcatg

SEQ ID NO: 455312 - DNA, 30 bp, Artificial Sequence
  Synthetic oligonucleotide
ccctatatcccgctcttactgaggctcatg

SEQ ID NO: 455313 - DNA, 30 bp, Artificial Sequence
  Synthetic oligonucleotide
aagtacggagaacattagcatttgctcatg

SEQ ID NO: 455314 - DNA, 30 bp, Artificial Sequence
  Synthetic oligonucleotide
tggtttactgtcattgtgttagatctcatg

SEQ ID NO: 455315 - DNA, 30 bp, Artificial Sequence
  Synthetic oligonucleotide
ccgggaacgcgctgatgtcatggagtcatg

SEQ ID NO: 455316 - DNA, 30 bp, Artificial Sequence
  Synthetic oligonucleotide
gatccctggtggttcctgaactacgtcatg

SEQ ID NO: 455317 - DNA, 30 bp, Artificial Sequence
  Synthetic oligonucleotide
aattgactcgtcttaaattcttgcgtcatg

SEQ ID NO: 455318 - DNA, 30 bp, Artificial Sequence
  Synthetic oligonucleotide
cactttggtgatgggacgcccccggtcatg

SEQ ID NO: 455319 - DNA, 30 bp, Artificial Sequence
  Synthetic oligonucleotide
aagcggttttactgatcgcaagcattcatg

SEQ ID NO: 455320 - DNA, 30 bp, Artificial Sequence
  Synthetic oligonucleotide
ttataggacagtggtacctaggtattcatg

SEQ ID NO: 455321 - DNA, 30 bp, Artificial Sequence
  Synthetic oligonucleotide
tttagtgatactccgcacagcagtttcatg

SEQ ID NO: 455322 - DNA, 30 bp, Artificial Sequence
  Synthetic oligonucleotide
tatttgtatattaaggtccattgtttcatg

SEQ ID NO: 455323 - DNA, 30 bp, Artificial Sequence
  Synthetic oligonucleotide
acaaaggtggtacacattgttgttaagatg

SEQ ID NO: 455324 - DNA, 30 bp, Artificial Sequence
  Synthetic oligonucleotide
cttgatcgacgcttcatccgtatacagatg

SEQ ID NO: 455325 - DNA, 30 bp, Artificial Sequence
  Synthetic oligonucleotide
agtctatttggttctcacgaaacgcagatg

SEQ ID NO: 455326 - DNA, 30 bp, Artificial Sequence
  Synthetic oligonucleotide
taccggacctcactatatagaccgcagatg

SEQ ID NO: 455327 - DNA, 30 bp, Artificial Sequence
  Synthetic oligonucleotide
ccagcctcttcatctgaacgaaggcagatg

SEQ ID NO: 455328 - DNA, 30 bp, Artificial Sequence
  Synthetic oligonucleotide
aattcccgaattatacacaacactcagatg

SEQ ID NO: 455329 - DNA, 30 bp, Artificial Sequence
  Synthetic oligonucleotide
taatcgctgtgtctggctttatgcgagatg

SEQ ID NO: 455330 - DNA, 30 bp, Artificial Sequence
  Synthetic oligonucleotide
atcaatgcctgatagacagcagatgagatg

SEQ ID NO: 455331 - DNA, 30 bp, Artificial Sequence
  Synthetic oligonucleotide
cgtatgaagtctcccaggacttttgagatg

SEQ ID NO: 455332 - DNA, 30 bp, Artificial Sequence
  Synthetic oligonucleotide
ggcagtgattgcagagtcttattatagatg

SEQ ID NO: 455333 - DNA, 30 bp, Artificial Sequence
  Synthetic oligonucleotide
acttagttttttagaaattcctgctagatg

SEQ ID NO: 455334 - DNA, 30 bp, Artificial Sequence
  Synthetic oligonucleotide
ccttagttgacgcattcacgttattagatg

SEQ ID NO: 455335 - DNA, 30 bp, Artificial Sequence
  Synthetic oligonucleotide
attataagaccgcgtgccataccaacgatg

SEQ ID NO: 455336 - DNA, 30 bp, Artificial Sequence
  Synthetic oligonucleotide
tataatgcttgctcgtctggaaacacgatg

SEQ ID NO: 455337 - DNA, 30 bp, Artificial Sequence
  Synthetic oligonucleotide
tacaacactacagcttcgttatagacgatg

SEQ ID NO: 455338 - DNA, 30 bp, Artificial Sequence
  Synthetic oligonucleotide
agtattgggaaactaccgcccgttacgatg

SEQ ID NO: 455339 - DNA, 30 bp, Artificial Sequence
  Synthetic oligonucleotide
ttatgtgttggacgcacctgtttaccgatg

SEQ ID NO: 455340 - DNA, 30 bp, Artificial Sequence
  Synthetic oligonucleotide
gggtaaggggagccgcatccacgtccgatg

SEQ ID NO: 455341 - DNA, 30 bp, Artificial Sequence
  Synthetic oligonucleotide
actcttgcgttaggtagactagcggcgatg

SEQ ID NO: 455342 - DNA, 30 bp, Artificial Sequence
  Synthetic oligonucleotide
acattacatgcttcgtgtgattctgcgatg

SEQ ID NO: 455343 - DNA, 30 bp, Artificial Sequence
  Synthetic oligonucleotide
gtttttgtagctcacttaatttgatcgatg

SEQ ID NO: 455344 - DNA, 30 bp, Artificial Sequence
  Synthetic oligonucleotide
ataagtttttcttttattgttctctcgatg

SEQ ID NO: 455345 - DNA, 30 bp, Artificial Sequence
  Synthetic oligonucleotide
tctttctcgtgccctactataaagtcgatg

SEQ ID NO: 455346 - DNA, 30 bp, Artificial Sequence
  Synthetic oligonucleotide
tttcaatgcaatgaactcggtaattcgatg

SEQ ID NO: 455347 - DNA, 30 bp, Artificial Sequence
  Synthetic oligonucleotide
tttcaattccaaagaacagctgctaggatg

SEQ ID NO: 455348 - DNA, 30 bp, Artificial Sequence
  Synthetic oligonucleotide
acgctcgtgggcttgattttctgtaggatg

SEQ ID NO: 455349 - DNA, 30 bp, Artificial Sequence
  Synthetic oligonucleotide
atgtcagcggttcctgctgtagcacggatg

SEQ ID NO: 455350 - DNA, 30 bp, Artificial Sequence
  Synthetic oligonucleotide
gggaatatgattgtatagttacagcggatg

SEQ ID NO: 455351 - DNA, 30 bp, Artificial Sequence
  Synthetic oligonucleotide
gttaagggagcagtcctccaatggcggatg

SEQ ID NO: 455352 - DNA, 30 bp, Artificial Sequence
  Synthetic oligonucleotide
ctggaccgtcatgcatatccatatcggatg

SEQ ID NO: 455353 - DNA, 30 bp, Artificial Sequence
  Synthetic oligonucleotide
gattatgtcagataccttaattaagggatg

SEQ ID NO: 455354 - DNA, 30 bp, Artificial Sequence
  Synthetic oligonucleotide
gatgactcacgtcatacttatacagggatg

SEQ ID NO: 455355 - DNA, 30 bp, Artificial Sequence
  Synthetic oligonucleotide
cgcaaggtagtctgcacggacggggggatg

SEQ ID NO: 455356 - DNA, 30 bp, Artificial Sequence
  Synthetic oligonucleotide
gatcagctggcggcacagccacgtgggatg

SEQ ID NO: 455357 - DNA, 30 bp, Artificial Sequence
  Synthetic oligonucleotide
agtttccggacttacgctgtggcatggatg

SEQ ID NO: 455358 - DNA, 30 bp, Artificial Sequence
  Synthetic oligonucleotide
cctgttttggtatatccgctatcatggatg

SEQ ID NO: 455359 - DNA, 30 bp, Artificial Sequence
  Synthetic oligonucleotide
agttccgcaagtgacaacacgggctggatg

SEQ ID NO: 455360 - DNA, 30 bp, Artificial Sequence
  Synthetic oligonucleotide
acatttcatgggcttatcaggcagtggatg

SEQ ID NO: 455361 - DNA, 30 bp, Artificial Sequence
  Synthetic oligonucleotide
atacgtttcctatggacagtagagtggatg

SEQ ID NO: 455362 - DNA, 30 bp, Artificial Sequence
  Synthetic oligonucleotide
gaccggttttggttttattgagattggatg

SEQ ID NO: 455363 - DNA, 30 bp, Artificial Sequence
  Synthetic oligonucleotide
ggtcccttaagacccaacacgttttggatg

SEQ ID NO: 455364 - DNA, 30 bp, Artificial Sequence
  Synthetic oligonucleotide
ttttgacttaattaagacgtccacatgatg

SEQ ID NO: 455365 - DNA, 30 bp, Artificial Sequence
  Synthetic oligonucleotide
gtagcctcattttagctcagctccatgatg

SEQ ID NO: 455366 - DNA, 30 bp, Artificial Sequence
  Synthetic oligonucleotide
ataggatggctttacaaacgttatatgatg

SEQ ID NO: 455367 - DNA, 31 bp, Artificial Sequence
  Synthetic oligonucleotide
aagggaggcagcttacacctggtaactgatg

SEQ ID NO: 455368 - DNA, 30 bp, Artificial Sequence
  Synthetic oligonucleotide
aaaccgaggcgcggcccaaaggtactgatg

SEQ ID NO: 455369 - DNA, 30 bp, Artificial Sequence
  Synthetic oligonucleotide
gccgttcgccatgcgcatcgtaacctgatg

SEQ ID NO: 455370 - DNA, 30 bp, Artificial Sequence
  Synthetic oligonucleotide
cctgtggagtggtggtgagaggtagtgatg

SEQ ID NO: 455371 - DNA, 30 bp, Artificial Sequence
  Synthetic oligonucleotide
gtctggaattgtaattagtcaatcgtgatg

SEQ ID NO: 455372 - DNA, 30 bp, Artificial Sequence
  Synthetic oligonucleotide
taggaacctcttagacgtttgatcgtgatg

SEQ ID NO: 455373 - DNA, 30 bp, Artificial Sequence
  Synthetic oligonucleotide
cgttggcgatctcctttgcgtacggtgatg

SEQ ID NO: 455374 - DNA, 30 bp, Artificial Sequence
  Synthetic oligonucleotide
tattttaacctcgcttgctcaggggtgatg

SEQ ID NO: 455375 - DNA, 30 bp, Artificial Sequence
  Synthetic oligonucleotide
ggacgccacatcggtgtagaaaatgtgatg

SEQ ID NO: 455376 - DNA, 30 bp, Artificial Sequence
  Synthetic oligonucleotide
taaactacatttgccgattcaagtgtgatg

SEQ ID NO: 455377 - DNA, 30 bp, Artificial Sequence
  Synthetic oligonucleotide
gatgtacagaattactaagtttgtgtgatg

SEQ ID NO: 455378 - DNA, 30 bp, Artificial Sequence
  Synthetic oligonucleotide
gtcggtcgggcgctgcaacgtcttgtgatg

SEQ ID NO: 455379 - DNA, 30 bp, Artificial Sequence
  Synthetic oligonucleotide
ttctatcgggggaagcgtttgtaattgatg

SEQ ID NO: 455380 - DNA, 30 bp, Artificial Sequence
  Synthetic oligonucleotide
tcgcgcccacaatcggctgggggattgatg

SEQ ID NO: 455381 - DNA, 30 bp, Artificial Sequence
  Synthetic oligonucleotide
ttttttactatctaaggtgaaggcttgatg

SEQ ID NO: 455382 - DNA, 30 bp, Artificial Sequence
  Synthetic oligonucleotide
ttaacgcggtacgcaggagtagtcttgatg

SEQ ID NO: 455383 - DNA, 30 bp, Artificial Sequence
  Synthetic oligonucleotide
taatcaatgtaccctgaacgggtgttgatg

SEQ ID NO: 455384 - DNA, 30 bp, Artificial Sequence
  Synthetic oligonucleotide
ggtttagaggaaacacttgttcaaaatatg

SEQ ID NO: 455385 - DNA, 30 bp, Artificial Sequence
  Synthetic oligonucleotide
gagcttttgcttgtttttaattaaaatatg

SEQ ID NO: 455386 - DNA, 30 bp, Artificial Sequence
  Synthetic oligonucleotide
gatttctcaagtggaagcacgagtaatatg

SEQ ID NO: 455387 - DNA, 30 bp, Artificial Sequence
  Synthetic oligonucleotide
atctcacacgcacagatccgtgtccatatg

SEQ ID NO: 455388 - DNA, 30 bp, Artificial Sequence
  Synthetic oligonucleotide
gggttgtgaattggtagacggtatcatatg

SEQ ID NO: 455389 - DNA, 30 bp, Artificial Sequence
  Synthetic oligonucleotide
tcccttgtgttgacggcccatcttcatatg

SEQ ID NO: 455390 - DNA, 30 bp, Artificial Sequence
  Synthetic oligonucleotide
agatcccatcacccgatggtatttcatatg

SEQ ID NO: 455391 - DNA, 30 bp, Artificial Sequence
  Synthetic oligonucleotide
ttcgccccttgggtatttgtgtgcgatatg

SEQ ID NO: 455392 - DNA, 30 bp, Artificial Sequence
  Synthetic oligonucleotide
gaattatggatggcgaggatgcaggatatg

SEQ ID NO: 455393 - DNA, 30 bp, Artificial Sequence
  Synthetic oligonucleotide
ttataaagataccgtttaccaagggatatg

SEQ ID NO: 455394 - DNA, 30 bp, Artificial Sequence
  Synthetic oligonucleotide
ttacagcctagggggcgtagcaatgatatg

SEQ ID NO: 455395 - DNA, 30 bp, Artificial Sequence
  Synthetic oligonucleotide
gtcgctcgaactttcaagacacatgatatg

SEQ ID NO: 455396 - DNA, 30 bp, Artificial Sequence
  Synthetic oligonucleotide
cccttgagggacggggcaccggtatatatg

SEQ ID NO: 455397 - DNA, 30 bp, Artificial Sequence
  Synthetic oligonucleotide
gtatttgctataagtgattttatctatatg

SEQ ID NO: 455398 - DNA, 30 bp, Artificial Sequence
  Synthetic oligonucleotide
cgtatgagaattatagccttcctctatatg

SEQ ID NO: 455399 - DNA, 30 bp, Artificial Sequence
  Synthetic oligonucleotide
gcttatatctagtagggtattaattatatg

SEQ ID NO: 455400 - DNA, 30 bp, Artificial Sequence
  Synthetic oligonucleotide
tttacctgaggtgatctttatagttatatg

SEQ ID NO: 455401 - DNA, 30 bp, Artificial Sequence
  Synthetic oligonucleotide
ctccggaacagttccgcatctgacactatg

SEQ ID NO: 455402 - DNA, 30 bp, Artificial Sequence
  Synthetic oligonucleotide
ccggaaggcccgttagattggcgcactatg

SEQ ID NO: 455403 - DNA, 30 bp, Artificial Sequence
  Synthetic oligonucleotide
attcatttcgatgtcccatattctactatg

SEQ ID NO: 455404 - DNA, 30 bp, Artificial Sequence
  Synthetic oligonucleotide
tgtgagtatcgcaggacactaggtactatg

SEQ ID NO: 455405 - DNA, 30 bp, Artificial Sequence
  Synthetic oligonucleotide
tagcccgcgagcaatcggccacaacctatg

SEQ ID NO: 455406 - DNA, 30 bp, Artificial Sequence
  Synthetic oligonucleotide
aatggaccgcagttatccgtagcacctatg

SEQ ID NO: 455407 - DNA, 30 bp, Artificial Sequence
  Synthetic oligonucleotide
aatttggcaagtttggaggggggacctatg

SEQ ID NO: 455408 - DNA, 30 bp, Artificial Sequence
  Synthetic oligonucleotide
cgggctgaaacgtcatacgaaaggcctatg

SEQ ID NO: 455409 - DNA, 30 bp, Artificial Sequence
  Synthetic oligonucleotide
ttaaacggctgtcgctctgttctgcctatg

SEQ ID NO: 455410 - DNA, 30 bp, Artificial Sequence
  Synthetic oligonucleotide
acattacatacaatgagattatctcctatg

SEQ ID NO: 455411 - DNA, 30 bp, Artificial Sequence
  Synthetic oligonucleotide
tagccctttcaattgggaaggcgtcctatg

SEQ ID NO: 455412 - DNA, 30 bp, Artificial Sequence
  Synthetic oligonucleotide
actaattgttttgcgcccgtaggtcctatg

SEQ ID NO: 455413 - DNA, 30 bp, Artificial Sequence
  Synthetic oligonucleotide
gtcattgtagttatcccctctggagctatg

SEQ ID NO: 455414 - DNA, 30 bp, Artificial Sequence
  Synthetic oligonucleotide
aagatagtggtacttggccctaaggctatg

SEQ ID NO: 455415 - DNA, 30 bp, Artificial Sequence
  Synthetic oligonucleotide
ctcaggggttcgtgcgtccacctggctatg

SEQ ID NO: 455416 - DNA, 30 bp, Artificial Sequence
  Synthetic oligonucleotide
ttcaccgcgtttaagcgctcttcatctatg

SEQ ID NO: 455417 - DNA, 30 bp, Artificial Sequence
  Synthetic oligonucleotide
tgtcagtcggttgtcttcaccgcctctatg

SEQ ID NO: 455418 - DNA, 30 bp, Artificial Sequence
  Synthetic oligonucleotide
ttgcaccgtagcagaattctcacaagtatg

SEQ ID NO: 455419 - DNA, 30 bp, Artificial Sequence
  Synthetic oligonucleotide
aatatcagggagattaaagagaccagtatg

SEQ ID NO: 455420 - DNA, 30 bp, Artificial Sequence
  Synthetic oligonucleotide
tctggtggggattcctgatttttcagtatg

SEQ ID NO: 455421 - DNA, 30 bp, Artificial Sequence
  Synthetic oligonucleotide
atcgattgcggttttttacactcgagtatg

SEQ ID NO: 455422 - DNA, 30 bp, Artificial Sequence
  Synthetic oligonucleotide
ataggtgtagcccattcatactctagtatg

SEQ ID NO: 455423 - DNA, 30 bp, Artificial Sequence
  Synthetic oligonucleotide
tattacactatatatatcgcgtatcgtatg

SEQ ID NO: 455424 - DNA, 30 bp, Artificial Sequence
  Synthetic oligonucleotide
cgatcgaaacaaagtaccctacgtcgtatg

SEQ ID NO: 455425 - DNA, 30 bp, Artificial Sequence
  Synthetic oligonucleotide
tgcacctgtgtgttggttgacgttcgtatg

SEQ ID NO: 455426 - DNA, 30 bp, Artificial Sequence
  Synthetic oligonucleotide
aacatagaaacgttcaacttacgaggtatg

SEQ ID NO: 455427 - DNA, 30 bp, Artificial Sequence
  Synthetic oligonucleotide
agtggtgccggcacctcttatctaggtatg

SEQ ID NO: 455428 - DNA, 30 bp, Artificial Sequence
  Synthetic oligonucleotide
atactccactttggtactcttacgggtatg

SEQ ID NO: 455429 - DNA, 30 bp, Artificial Sequence
  Synthetic oligonucleotide
cgatgatatggtgtggagcatgggggtatg

SEQ ID NO: 455430 - DNA, 30 bp, Artificial Sequence
  Synthetic oligonucleotide
actcgcaacacttagcctgaggatggtatg

SEQ ID NO: 455431 - DNA, 30 bp, Artificial Sequence
  Synthetic oligonucleotide
acgcggcgcattaaacgtgtttatggtatg

SEQ ID NO: 455432 - DNA, 30 bp, Artificial Sequence
  Synthetic oligonucleotide
ttattagcatgacggctgcggtttggtatg

SEQ ID NO: 455433 - DNA, 30 bp, Artificial Sequence
  Synthetic oligonucleotide
gagtggtagtctcagcgtcaggaatgtatg

SEQ ID NO: 455434 - DNA, 30 bp, Artificial Sequence
  Synthetic oligonucleotide
gtagtaggtctttagcatgatacatgtatg

SEQ ID NO: 455435 - DNA, 30 bp, Artificial Sequence
  Synthetic oligonucleotide
ctgcaacggctgcctaactaggcatgtatg

SEQ ID NO: 455436 - DNA, 30 bp, Artificial Sequence
  Synthetic oligonucleotide
caagggtcccgatggccctgcctatgtatg

SEQ ID NO: 455437 - DNA, 30 bp, Artificial Sequence
  Synthetic oligonucleotide
atgtcgctttattaggttaagctgtgtatg

SEQ ID NO: 455438 - DNA, 30 bp, Artificial Sequence
  Synthetic oligonucleotide
cctatccggagaagactgctgcattgtatg

SEQ ID NO: 455439 - DNA, 30 bp, Artificial Sequence
  Synthetic oligonucleotide
tcagatcgagccgttcatcgggcttgtatg

SEQ ID NO: 455440 - DNA, 30 bp, Artificial Sequence
  Synthetic oligonucleotide
gcacgcctacatggtcgcaaatcttgtatg

SEQ ID NO: 455441 - DNA, 30 bp, Artificial Sequence
  Synthetic oligonucleotide
tgacccttagaagactttgttagttgtatg

SEQ ID NO: 455442 - DNA, 30 bp, Artificial Sequence
  Synthetic oligonucleotide
ctctcttttaagacaggcccatgaattatg

SEQ ID NO: 455443 - DNA, 30 bp, Artificial Sequence
  Synthetic oligonucleotide
gtttattgacgagtttttctacccattatg

SEQ ID NO: 455444 - DNA, 30 bp, Artificial Sequence
  Synthetic oligonucleotide
accaatccctaagccctgactcgcattatg

SEQ ID NO: 455445 - DNA, 30 bp, Artificial Sequence
  Synthetic oligonucleotide
aagcctgcggctttccctcgtctcattatg

SEQ ID NO: 455446 - DNA, 30 bp, Artificial Sequence
  Synthetic oligonucleotide
ctttataccgtgcgatgcaaggtcattatg

SEQ ID NO: 455447 - DNA, 30 bp, Artificial Sequence
  Synthetic oligonucleotide
actgtattttatatgttcttagcgattatg

SEQ ID NO: 455448 - DNA, 30 bp, Artificial Sequence
  Synthetic oligonucleotide
ggttgggttttctttaggactctgattatg

SEQ ID NO: 455449 - DNA, 30 bp, Artificial Sequence
  Synthetic oligonucleotide
caaattccaatctcatggtggcttattatg

SEQ ID NO: 455450 - DNA, 30 bp, Artificial Sequence
  Synthetic oligonucleotide
gcgttcacgaatgccaatacattacttatg

SEQ ID NO: 455451 - DNA, 30 bp, Artificial Sequence
  Synthetic oligonucleotide
aagagaattatttccaaatggacgcttatg

SEQ ID NO: 455452 - DNA, 30 bp, Artificial Sequence
  Synthetic oligonucleotide
gattatgccatctacaatttagatcttatg

SEQ ID NO: 455453 - DNA, 30 bp, Artificial Sequence
  Synthetic oligonucleotide
ttgtgcccacttcaagctctatatcttatg

SEQ ID NO: 455454 - DNA, 30 bp, Artificial Sequence
  Synthetic oligonucleotide
ttaagcgattactttcggacgtatcttatg

SEQ ID NO: 455455 - DNA, 30 bp, Artificial Sequence
  Synthetic oligonucleotide
gccactatagcgctaacaaaggccgttatg

SEQ ID NO: 455456 - DNA, 30 bp, Artificial Sequence
  Synthetic oligonucleotide
gcgagacacattttcgctttctgcgttatg

SEQ ID NO: 455457 - DNA, 30 bp, Artificial Sequence
  Synthetic oligonucleotide
tgtgtttgacagcctcgggcctcggttatg

SEQ ID NO: 455458 - DNA, 30 bp, Artificial Sequence
  Synthetic oligonucleotide
taacgttgtatagacccatatgttgttatg

SEQ ID NO: 455459 - DNA, 30 bp, Artificial Sequence
  Synthetic oligonucleotide
gggcagcccgaccagcttgggtaatttatg

SEQ ID NO: 455460 - DNA, 30 bp, Artificial Sequence
  Synthetic oligonucleotide
aaagtcaagtagacggcgcgactatttatg

SEQ ID NO: 455461 - DNA, 30 bp, Artificial Sequence
  Synthetic oligonucleotide
ctcttggaacattcattcggctactttatg

SEQ ID NO: 455462 - DNA, 30 bp, Artificial Sequence
  Synthetic oligonucleotide
gatacatcatcagttaagtcggagtttatg

SEQ ID NO: 455463 - DNA, 30 bp, Artificial Sequence
  Synthetic oligonucleotide
tttctgactttgtgacacgtaccgtttatg

SEQ ID NO: 455464 - DNA, 30 bp, Artificial Sequence
  Synthetic oligonucleotide
agtccggaacatcttctacgttcttttatg

SEQ ID NO: 455465 - DNA, 31 bp, Artificial Sequence
  Synthetic oligonucleotide
aatgagatgctgtgtgtatgacttttttatg

SEQ ID NO: 455466 - DNA, 30 bp, Artificial Sequence
  Synthetic oligonucleotide
ctcagatctgactttctgacctcaaaactg

SEQ ID NO: 455467 - DNA, 30 bp, Artificial Sequence
  Synthetic oligonucleotide
aatgagtctctctcatcgccccacaaactg

SEQ ID NO: 455468 - DNA, 30 bp, Artificial Sequence
  Synthetic oligonucleotide
atatgatgatgatagctcggccgcaaactg

SEQ ID NO: 455469 - DNA, 30 bp, Artificial Sequence
  Synthetic oligonucleotide
aagaaagtgtacgcacccgttgtcaaactg

SEQ ID NO: 455470 - DNA, 30 bp, Artificial Sequence
  Synthetic oligonucleotide
atccaggggtgggccatgtgggtgaaactg

SEQ ID NO: 455471 - DNA, 30 bp, Artificial Sequence
  Synthetic oligonucleotide
tatatatccagtttcgtaaagactaaactg

SEQ ID NO: 455472 - DNA, 30 bp, Artificial Sequence
  Synthetic oligonucleotide
atagctcctaatgcgctagcacaacaactg

SEQ ID NO: 455473 - DNA, 30 bp, Artificial Sequence
  Synthetic oligonucleotide
cccttcgcctatatgcaaggcacacaactg

SEQ ID NO: 455474 - DNA, 30 bp, Artificial Sequence
  Synthetic oligonucleotide
tccataccacatttattcttgacgcaactg

SEQ ID NO: 455475 - DNA, 30 bp, Artificial Sequence
  Synthetic oligonucleotide
gaacagaatttgattctactggcagaactg

SEQ ID NO: 455476 - DNA, 30 bp, Artificial Sequence
  Synthetic oligonucleotide
aacctctaccgggtaacttgagacgaactg

SEQ ID NO: 455477 - DNA, 30 bp, Artificial Sequence
  Synthetic oligonucleotide
cagtgtcaacaccgtatcctcaccgaactg

SEQ ID NO: 455478 - DNA, 30 bp, Artificial Sequence
  Synthetic oligonucleotide
ttgttaaagggggtactggggctcgaactg

SEQ ID NO: 455479 - DNA, 30 bp, Artificial Sequence
  Synthetic oligonucleotide
cctcttcatccgggggggagttaataactg

SEQ ID NO: 455480 - DNA, 30 bp, Artificial Sequence
  Synthetic oligonucleotide
gggggggcttgtgttgactcttactaactg

SEQ ID NO: 455481 - DNA, 30 bp, Artificial Sequence
  Synthetic oligonucleotide
gaacgacgtcagttacagcgctcctaactg

SEQ ID NO: 455482 - DNA, 30 bp, Artificial Sequence
  Synthetic oligonucleotide
atcaatgtaggattgacggtacgctaactg

SEQ ID NO: 455483 - DNA, 30 bp, Artificial Sequence
  Synthetic oligonucleotide
aacattctttccgcagagcagcggtaactg

SEQ ID NO: 455484 - DNA, 30 bp, Artificial Sequence
  Synthetic oligonucleotide
tatctactgtaatgcatcggggggtaactg

SEQ ID NO: 455485 - DNA, 30 bp, Artificial Sequence
  Synthetic oligonucleotide
aaaatagggcttctgaggaagtggtaactg

SEQ ID NO: 455486 - DNA, 30 bp, Artificial Sequence
  Synthetic oligonucleotide
tcatcgatccttcggtccggcccaacactg

SEQ ID NO: 455487 - DNA, 30 bp, Artificial Sequence
  Synthetic oligonucleotide
gacccctacatggcccgaactagcacactg

SEQ ID NO: 455488 - DNA, 30 bp, Artificial Sequence
  Synthetic oligonucleotide
gatatacatggcacggttgcaaagacactg

SEQ ID NO: 455489 - DNA, 30 bp, Artificial Sequence
  Synthetic oligonucleotide
actaactcgcgcgaattgccagcaccactg

SEQ ID NO: 455490 - DNA, 30 bp, Artificial Sequence
  Synthetic oligonucleotide
ccaccccatagggcggttttaacgccactg

SEQ ID NO: 455491 - DNA, 30 bp, Artificial Sequence
  Synthetic oligonucleotide
cgttgttatatggtcacagtcctgccactg

SEQ ID NO: 455492 - DNA, 30 bp, Artificial Sequence
  Synthetic oligonucleotide
caatcgcaaggccagtcgcagatagcactg

SEQ ID NO: 455493 - DNA, 30 bp, Artificial Sequence
  Synthetic oligonucleotide
ataagcgcagtgcagggttatatcgcactg

SEQ ID NO: 455494 - DNA, 30 bp, Artificial Sequence
  Synthetic oligonucleotide
ctcgtttgtgactgaattttactggcactg

SEQ ID NO: 455495 - DNA, 31 bp, Artificial Sequence
  Synthetic oligonucleotide
ctcctatgtcttctacctagaaaatgcactg

SEQ ID NO: 455496 - DNA, 30 bp, Artificial Sequence
  Synthetic oligonucleotide
cgctgcctgtgtacacgatcggatgcactg

SEQ ID NO: 455497 - DNA, 30 bp, Artificial Sequence
  Synthetic oligonucleotide
attcggttagggggtattttgagtgcactg

SEQ ID NO: 455498 - DNA, 30 bp, Artificial Sequence
  Synthetic oligonucleotide
gtattggcgtgtcacagccaacgtgcactg

SEQ ID NO: 455499 - DNA, 30 bp, Artificial Sequence
  Synthetic oligonucleotide
cggcggcgcttcgcaatattatttgcactg

SEQ ID NO: 455500 - DNA, 30 bp, Artificial Sequence
  Synthetic oligonucleotide
gtgacgcatccaagaccttcaagctcactg

SEQ ID NO: 455501 - DNA, 30 bp, Artificial Sequence
  Synthetic oligonucleotide
aatgccttatttagggtcggaaagtcactg

SEQ ID NO: 455502 - DNA, 30 bp, Artificial Sequence
  Synthetic oligonucleotide
tttggaccagcgggaaaatctagttcactg

SEQ ID NO: 455503 - DNA, 30 bp, Artificial Sequence
  Synthetic oligonucleotide
aatggggtatcgacatgagtgacaagactg

SEQ ID NO: 455504 - DNA, 30 bp, Artificial Sequence
  Synthetic oligonucleotide
acaagggttagaggcctgtttacaagactg

SEQ ID NO: 455505 - DNA, 30 bp, Artificial Sequence
  Synthetic oligonucleotide
tctctagtgattaaaggccgctgaagactg

SEQ ID NO: 455506 - DNA, 30 bp, Artificial Sequence
  Synthetic oligonucleotide
agattaacgctgccacatcccctaagactg

SEQ ID NO: 455507 - DNA, 30 bp, Artificial Sequence
  Synthetic oligonucleotide
ctggggcggtacaggggcttctgcagactg

SEQ ID NO: 455508 - DNA, 30 bp, Artificial Sequence
  Synthetic oligonucleotide
tggccgccttgcgccattactatcagactg

SEQ ID NO: 455509 - DNA, 30 bp, Artificial Sequence
  Synthetic oligonucleotide
ttatcacctcgctttatcagtaatagactg

SEQ ID NO: 455510 - DNA, 30 bp, Artificial Sequence
  Synthetic oligonucleotide
gatggaataatagcaacagctttgcgactg

SEQ ID NO: 455511 - DNA, 30 bp, Artificial Sequence
  Synthetic oligonucleotide
gtcctcctcgcgccgggtatccttcgactg

SEQ ID NO: 455512 - DNA, 30 bp, Artificial Sequence
  Synthetic oligonucleotide
acttgcacggacgcactcatatttcgactg

SEQ ID NO: 455513 - DNA, 30 bp, Artificial Sequence
  Synthetic oligonucleotide
acgtatgctacgacgcggtgatacggactg

SEQ ID NO: 455514 - DNA, 30 bp, Artificial Sequence
  Synthetic oligonucleotide
atgaagcttgcatgtgggtttcgcggactg

SEQ ID NO: 455515 - DNA, 30 bp, Artificial Sequence
  Synthetic oligonucleotide
caggcgtctgggcccataagccagggactg

SEQ ID NO: 455516 - DNA, 30 bp, Artificial Sequence
  Synthetic oligonucleotide
cctatacggtacttggccccggatggactg

SEQ ID NO: 455517 - DNA, 25 bp, Artificial Sequence
  Synthetic oligonucleotide
gtcggccacctcgtccagctgactg

SEQ ID NO: 455518 - DNA, 30 bp, Artificial Sequence
  Synthetic oligonucleotide
gtaagtgcgagatgcagggatagctgactg

SEQ ID NO: 455519 - DNA, 30 bp, Artificial Sequence
  Synthetic oligonucleotide
gtaccctataaaccctcggaattctgactg

SEQ ID NO: 455520 - DNA, 30 bp, Artificial Sequence
  Synthetic oligonucleotide
gcgctaagttcccactggacgctgtgactg

SEQ ID NO: 455521 - DNA, 30 bp, Artificial Sequence
  Synthetic oligonucleotide
tgcgagatggtcgctttaaactattgactg

SEQ ID NO: 455522 - DNA, 30 bp, Artificial Sequence
  Synthetic oligonucleotide
gaggtgttaaaattaacacgagcttgactg

SEQ ID NO: 455523 - DNA, 30 bp, Artificial Sequence
  Synthetic oligonucleotide
gaccaccagttcttcggggtattttgactg

SEQ ID NO: 455524 - DNA, 30 bp, Artificial Sequence
  Synthetic oligonucleotide
gccatatacccattcccgggagtaatactg

SEQ ID NO: 455525 - DNA, 30 bp, Artificial Sequence
  Synthetic oligonucleotide
gtagcgggatgtttcggatgtaacatactg

SEQ ID NO: 455526 - DNA, 30 bp, Artificial Sequence
  Synthetic oligonucleotide
cctttaaatagtttggacaaagggatactg

SEQ ID NO: 455527 - DNA, 30 bp, Artificial Sequence
  Synthetic oligonucleotide
acccttgtgagttggacccatttgatactg

SEQ ID NO: 455528 - DNA, 30 bp, Artificial Sequence
  Synthetic oligonucleotide
ttaacatgtgccaatgcgttttctatactg

SEQ ID NO: 455529 - DNA, 30 bp, Artificial Sequence
  Synthetic oligonucleotide
gccaaaagtggttacgcctagggtatactg

SEQ ID NO: 455530 - DNA, 30 bp, Artificial Sequence
  Synthetic oligonucleotide
cttgacagagggcaacaaatatttatactg

SEQ ID NO: 455531 - DNA, 30 bp, Artificial Sequence
  Synthetic oligonucleotide
gacacgaaagacgcaggcgcggatctactg

SEQ ID NO: 455532 - DNA, 30 bp, Artificial Sequence
  Synthetic oligonucleotide
tcctttgtctgtgggctcgggaccgtactg

SEQ ID NO: 455533 - DNA, 30 bp, Artificial Sequence
  Synthetic oligonucleotide
ctccaaggggtacactacgaacatgtactg

SEQ ID NO: 455534 - DNA, 30 bp, Artificial Sequence
  Synthetic oligonucleotide
ttttgtgataaccaagtatcaactgtactg

SEQ ID NO: 455535 - DNA, 30 bp, Artificial Sequence
  Synthetic oligonucleotide
ttctatgaatgctatggtgggtgtgtactg

SEQ ID NO: 455536 - DNA, 30 bp, Artificial Sequence
  Synthetic oligonucleotide
ggcaacgacgacactgttacctggttactg

SEQ ID NO: 455537 - DNA, 30 bp, Artificial Sequence
  Synthetic oligonucleotide
ggattagagtttaaaatgatcactttactg

SEQ ID NO: 455538 - DNA, 30 bp, Artificial Sequence
  Synthetic oligonucleotide
aagttgagtttggtctccttataaaacctg

SEQ ID NO: 455539 - DNA, 30 bp, Artificial Sequence
  Synthetic oligonucleotide
ggactggctcatacgtggcataggaacctg

SEQ ID NO: 455540 - DNA, 30 bp, Artificial Sequence
  Synthetic oligonucleotide
tatattggtttcgtgagacctaggaacctg

SEQ ID NO: 455541 - DNA, 30 bp, Artificial Sequence
  Synthetic oligonucleotide
cgttaaggaaacttaactgtgtgacacctg

SEQ ID NO: 455542 - DNA, 30 bp, Artificial Sequence
  Synthetic oligonucleotide
tgtaatggcagatccctattctgccacctg

SEQ ID NO: 455543 - DNA, 30 bp, Artificial Sequence
  Synthetic oligonucleotide
acaaagggcttattccgactagatcacctg

SEQ ID NO: 455544 - DNA, 30 bp, Artificial Sequence
  Synthetic oligonucleotide
tcaagacgtagttgcgctcgcgctcacctg

SEQ ID NO: 455545 - DNA, 30 bp, Artificial Sequence
  Synthetic oligonucleotide
gagtttattgttaaattaacggtagacctg

SEQ ID NO: 455546 - DNA, 30 bp, Artificial Sequence
  Synthetic oligonucleotide
ggtgtcgtagctcagttccaatgggacctg

SEQ ID NO: 455547 - DNA, 30 bp, Artificial Sequence
  Synthetic oligonucleotide
tataggagccgctcctgggctactgacctg

SEQ ID NO: 455548 - DNA, 30 bp, Artificial Sequence
  Synthetic oligonucleotide
cgcagcctttaggcaatatgcgaatacctg

SEQ ID NO: 455549 - DNA, 30 bp, Artificial Sequence
  Synthetic oligonucleotide
tagtagtcgcggaaatacgatggaaccctg

SEQ ID NO: 455550 - DNA, 30 bp, Artificial Sequence
  Synthetic oligonucleotide
gattaaattagtttaatggatattaccctg

SEQ ID NO: 455551 - DNA, 30 bp, Artificial Sequence
  Synthetic oligonucleotide
agtgtctagtagggaatgagtatccccctg

SEQ ID NO: 455552 - DNA, 30 bp, Artificial Sequence
  Synthetic oligonucleotide
gaccagggtaaggagtaagcactgcccctg

SEQ ID NO: 455553 - DNA, 30 bp, Artificial Sequence
  Synthetic oligonucleotide
actccacagttgagtttgggcaatcccctg

SEQ ID NO: 455554 - DNA, 30 bp, Artificial Sequence
  Synthetic oligonucleotide
ataatgtcattcatagaacggggtcccctg

SEQ ID NO: 455555 - DNA, 30 bp, Artificial Sequence
  Synthetic oligonucleotide
agggatcttgtgctgattaggaaagccctg

SEQ ID NO: 455556 - DNA, 30 bp, Artificial Sequence
  Synthetic oligonucleotide
ggatggacgcgtaggtcgtgaaacgccctg

SEQ ID NO: 455557 - DNA, 30 bp, Artificial Sequence
  Synthetic oligonucleotide
ttatacgggatagtcctagtggtggccctg

SEQ ID NO: 455558 - DNA, 30 bp, Artificial Sequence
  Synthetic oligonucleotide
gtgttaggatgtacggcgctaattgccctg

SEQ ID NO: 455559 - DNA, 30 bp, Artificial Sequence
  Synthetic oligonucleotide
gtccctcgacgaattgtactcgcatccctg

SEQ ID NO: 455560 - DNA, 30 bp, Artificial Sequence
  Synthetic oligonucleotide
tctccggcaatagacgcaaatctctccctg

SEQ ID NO: 455561 - DNA, 30 bp, Artificial Sequence
  Synthetic oligonucleotide
cccccgcaattcgttgtcaggacttccctg

SEQ ID NO: 455562 - DNA, 30 bp, Artificial Sequence
  Synthetic oligonucleotide
attaaaatagacgaacgatcgcacagcctg

SEQ ID NO: 455563 - DNA, 30 bp, Artificial Sequence
  Synthetic oligonucleotide
ttcagtattggttgggcaacagttagcctg

SEQ ID NO: 455564 - DNA, 30 bp, Artificial Sequence
  Synthetic oligonucleotide
cgacggctctgtgcgcggggactgcgcctg

SEQ ID NO: 455565 - DNA, 30 bp, Artificial Sequence
  Synthetic oligonucleotide
agggccatcagaacagaagcgctgcgcctg

SEQ ID NO: 455566 - DNA, 30 bp, Artificial Sequence
  Synthetic oligonucleotide
aatgtttgtatgtgcagttgcggtcgcctg

SEQ ID NO: 455567 - DNA, 30 bp, Artificial Sequence
  Synthetic oligonucleotide
tcacggtgggatgactagtaccccggcctg

SEQ ID NO: 455568 - DNA, 30 bp, Artificial Sequence
  Synthetic oligonucleotide
gaataacagacggtacgtccgtctggcctg

SEQ ID NO: 455569 - DNA, 30 bp, Artificial Sequence
  Synthetic oligonucleotide
gctcgttagtgactcttaggagagatcctg

SEQ ID NO: 455570 - DNA, 30 bp, Artificial Sequence
  Synthetic oligonucleotide
ctctgaacacgccggatatgcgatatcctg

SEQ ID NO: 455571 - DNA, 30 bp, Artificial Sequence
  Synthetic oligonucleotide
ttggtgactttgagttaaagatttatcctg

SEQ ID NO: 455572 - DNA, 30 bp, Artificial Sequence
  Synthetic oligonucleotide
tgaacgcacgcctccccggcaagactcctg

SEQ ID NO: 455573 - DNA, 30 bp, Artificial Sequence
  Synthetic oligonucleotide
gggtcaggagaggattcatgcatactcctg

SEQ ID NO: 455574 - DNA, 30 bp, Artificial Sequence
  Synthetic oligonucleotide
cctccaccatgttcaaccaggggtctcctg

SEQ ID NO: 455575 - DNA, 30 bp, Artificial Sequence
  Synthetic oligonucleotide
gtaatggtatgcagagctcggtccgtcctg

SEQ ID NO: 455576 - DNA, 30 bp, Artificial Sequence
  Synthetic oligonucleotide
ctgtggggcactcgagcgcgcgtcgtcctg

SEQ ID NO: 455577 - DNA, 30 bp, Artificial Sequence
  Synthetic oligonucleotide
catgaagtagccacaagaagttaggtcctg

SEQ ID NO: 455578 - DNA, 30 bp, Artificial Sequence
  Synthetic oligonucleotide
atcccttatgtggagcatgtctttgtcctg

SEQ ID NO: 455579 - DNA, 30 bp, Artificial Sequence
  Synthetic oligonucleotide
ggcaggcgaacagttcttggtgtcttcctg

SEQ ID NO: 455580 - DNA, 30 bp, Artificial Sequence
  Synthetic oligonucleotide
gggggtcaatgatagagatagatgttcctg

SEQ ID NO: 455581 - DNA, 30 bp, Artificial Sequence
  Synthetic oligonucleotide
tagccactcccttttctaacactgttcctg

SEQ ID NO: 455582 - DNA, 30 bp, Artificial Sequence
  Synthetic oligonucleotide
aacgaaagatgttcagaagaattgttcctg

SEQ ID NO: 455583 - DNA, 30 bp, Artificial Sequence
  Synthetic oligonucleotide
tgggtgaagcgcgtagccagagatttcctg

SEQ ID NO: 455584 - DNA, 30 bp, Artificial Sequence
  Synthetic oligonucleotide
tgtccatgttacaatcgttctcgtttcctg

SEQ ID NO: 455585 - DNA, 30 bp, Artificial Sequence
  Synthetic oligonucleotide
cctatgacggcagcagcatgcattttcctg

SEQ ID NO: 455586 - DNA, 30 bp, Artificial Sequence
  Synthetic oligonucleotide
gacacatcatttatctagtttagaaagctg

SEQ ID NO: 455587 - DNA, 30 bp, Artificial Sequence
  Synthetic oligonucleotide
aatgttactgtggccactcgtaagaagctg

SEQ ID NO: 455588 - DNA, 30 bp, Artificial Sequence
  Synthetic oligonucleotide
atatgcaggtgaagcatctaaaggaagctg

SEQ ID NO: 455589 - DNA, 30 bp, Artificial Sequence
  Synthetic oligonucleotide
gcgcagctatcgtaggcccgacgtaagctg

SEQ ID NO: 455590 - DNA, 30 bp, Artificial Sequence
  Synthetic oligonucleotide
atcttacggatgcgggtagatcaccagctg

SEQ ID NO: 455591 - DNA, 30 bp, Artificial Sequence
  Synthetic oligonucleotide
aagctaaaggtgcgtatttatcggcagctg

SEQ ID NO: 455592 - DNA, 30 bp, Artificial Sequence
  Synthetic oligonucleotide
acacattatcggcctagtcggatgcagctg

SEQ ID NO: 455593 - DNA, 30 bp, Artificial Sequence
  Synthetic oligonucleotide
gtaaaaatagtatgcggcgcacatcagctg

SEQ ID NO: 455594 - DNA, 30 bp, Artificial Sequence
  Synthetic oligonucleotide
agttcaaaatgtcgctgccggccagagctg

SEQ ID NO: 455595 - DNA, 30 bp, Artificial Sequence
  Synthetic oligonucleotide
taacactattggggatattcagcagagctg

SEQ ID NO: 455596 - DNA, 30 bp, Artificial Sequence
  Synthetic oligonucleotide
accggcttatggagtgcggtacgagagctg

SEQ ID NO: 455597 - DNA, 30 bp, Artificial Sequence
  Synthetic oligonucleotide
gtttggtcatttccggcctttttagagctg

SEQ ID NO: 455598 - DNA, 30 bp, Artificial Sequence
  Synthetic oligonucleotide
tataggagcggtggatccggtcccgagctg

SEQ ID NO: 455599 - DNA, 30 bp, Artificial Sequence
  Synthetic oligonucleotide
acttatgcgtaattggcctgcacggagctg

SEQ ID NO: 455600 - DNA, 30 bp, Artificial Sequence
  Synthetic oligonucleotide
atgctacaaagactggccctcccggagctg

SEQ ID NO: 455601 - DNA, 30 bp, Artificial Sequence
  Synthetic oligonucleotide
gcctctttggatgctcaacttaatgagctg

SEQ ID NO: 455602 - DNA, 30 bp, Artificial Sequence
  Synthetic oligonucleotide
atggcccggccagtggaagggacatagctg

SEQ ID NO: 455603 - DNA, 30 bp, Artificial Sequence
  Synthetic oligonucleotide
tttgatccaatagattcatttatctagctg

SEQ ID NO: 455604 - DNA, 30 bp, Artificial Sequence
  Synthetic oligonucleotide
tgctgatgaatcggtcgcagtgtctagctg

SEQ ID NO: 455605 - DNA, 30 bp, Artificial Sequence
  Synthetic oligonucleotide
cgtatatcccttcgcgtaaataagtagctg

SEQ ID NO: 455606 - DNA, 30 bp, Artificial Sequence
  Synthetic oligonucleotide
cgtattttcttttcgttttacttgtagctg

SEQ ID NO: 455607 - DNA, 30 bp, Artificial Sequence
  Synthetic oligonucleotide
caccatgattttaagtatctggtttagctg

SEQ ID NO: 455608 - DNA, 30 bp, Artificial Sequence
  Synthetic oligonucleotide
gattaaggaggcgttattgtgatcacgctg

SEQ ID NO: 455609 - DNA, 30 bp, Artificial Sequence
  Synthetic oligonucleotide
aaccttttacataatcaggagaagacgctg

SEQ ID NO: 455610 - DNA, 30 bp, Artificial Sequence
  Synthetic oligonucleotide
cctactgtaggcccaaatcagctgacgctg

SEQ ID NO: 455611 - DNA, 30 bp, Artificial Sequence
  Synthetic oligonucleotide
acagatgtcggcgcacgcgcaaatacgctg

SEQ ID NO: 455612 - DNA, 30 bp, Artificial Sequence
  Synthetic oligonucleotide
tgaagtacatgcgcgtgtctctttacgctg

SEQ ID NO: 455613 - DNA, 30 bp, Artificial Sequence
  Synthetic oligonucleotide
tgctcggtgattggggtaactcacccgctg

SEQ ID NO: 455614 - DNA, 30 bp, Artificial Sequence
  Synthetic oligonucleotide
gaggtggaatagtcgaggtcgggcccgctg

SEQ ID NO: 455615 - DNA, 30 bp, Artificial Sequence
  Synthetic oligonucleotide
attcttcatagtgggtacaggcggccgctg

SEQ ID NO: 455616 - DNA, 30 bp, Artificial Sequence
  Synthetic oligonucleotide
ggcttttataacaactgccctgtgccgctg

SEQ ID NO: 455617 - DNA, 30 bp, Artificial Sequence
  Synthetic oligonucleotide
cgtaaacggagacccatgcagtgtccgctg

SEQ ID NO: 455618 - DNA, 30 bp, Artificial Sequence
  Synthetic oligonucleotide
gggggaacccaattggctttcccagcgctg

SEQ ID NO: 455619 - DNA, 30 bp, Artificial Sequence
  Synthetic oligonucleotide
agaggtatatttatgtctagaaccgcgctg

SEQ ID NO: 455620 - DNA, 30 bp, Artificial Sequence
  Synthetic oligonucleotide
gaggcgcacgctagatttcgtcgcgcgctg

SEQ ID NO: 455621 - DNA, 30 bp, Artificial Sequence
  Synthetic oligonucleotide
ctgcccagacgcgaacatggggaggcgctg

SEQ ID NO: 455622 - DNA, 30 bp, Artificial Sequence
  Synthetic oligonucleotide
tgagtcagacggccccattaataggcgctg

SEQ ID NO: 455623 - DNA, 30 bp, Artificial Sequence
  Synthetic oligonucleotide
accaggatgtctcctgacggtcctgcgctg

SEQ ID NO: 455624 - DNA, 30 bp, Artificial Sequence
  Synthetic oligonucleotide
tttcgaagatacagtcccaaggctgcgctg

SEQ ID NO: 455625 - DNA, 30 bp, Artificial Sequence
  Synthetic oligonucleotide
tgaagcctaacgtcccaccccgttgcgctg

SEQ ID NO: 455626 - DNA, 30 bp, Artificial Sequence
  Synthetic oligonucleotide
caggggaccgctctattaagttactcgctg

SEQ ID NO: 455627 - DNA, 30 bp, Artificial Sequence
  Synthetic oligonucleotide
ggacggtcaccgcccaagtgtcggtcgctg

SEQ ID NO: 455628 - DNA, 30 bp, Artificial Sequence
  Synthetic oligonucleotide
tattatcttagtagtatgagcgggtcgctg

SEQ ID NO: 455629 - DNA, 30 bp, Artificial Sequence
  Synthetic oligonucleotide
gtttatttctcacacccagtcttgtcgctg

SEQ ID NO: 455630 - DNA, 30 bp, Artificial Sequence
  Synthetic oligonucleotide
tccggctttacatgtacacagaattcgctg

SEQ ID NO: 455631 - DNA, 30 bp, Artificial Sequence
  Synthetic oligonucleotide
gttctttggccatctgggagcctcaggctg

SEQ ID NO: 455632 - DNA, 30 bp, Artificial Sequence
  Synthetic oligonucleotide
tttatgttgggattggccaaagtcaggctg

SEQ ID NO: 455633 - DNA, 30 bp, Artificial Sequence
  Synthetic oligonucleotide
agggtagcatgcggcatcagcaataggctg

SEQ ID NO: 455634 - DNA, 30 bp, Artificial Sequence
  Synthetic oligonucleotide
tggttattagtggagcgtggacctcggctg

SEQ ID NO: 455635 - DNA, 30 bp, Artificial Sequence
  Synthetic oligonucleotide
agctcactgaggaatagacctttagggctg

SEQ ID NO: 455636 - DNA, 30 bp, Artificial Sequence
  Synthetic oligonucleotide
aaattcggttaaacgagcaaccatgggctg

SEQ ID NO: 455637 - DNA, 30 bp, Artificial Sequence
  Synthetic oligonucleotide
atctttaagatatttggtatgactgggctg

SEQ ID NO: 455638 - DNA, 30 bp, Artificial Sequence
  Synthetic oligonucleotide
cccccacaggtgggtcgttagaaatggctg

SEQ ID NO: 455639 - DNA, 30 bp, Artificial Sequence
  Synthetic oligonucleotide
accatagcgctgcacccatgctaatggctg

SEQ ID NO: 455640 - DNA, 30 bp, Artificial Sequence
  Synthetic oligonucleotide
ttatacccaggaaagtttagatcatggctg

SEQ ID NO: 455641 - DNA, 30 bp, Artificial Sequence
  Synthetic oligonucleotide
gacttcatttgaagtctaattcactggctg

SEQ ID NO: 455642 - DNA, 30 bp, Artificial Sequence
  Synthetic oligonucleotide
atgtaatattgattagtgcagtagtggctg

SEQ ID NO: 455643 - DNA, 30 bp, Artificial Sequence
  Synthetic oligonucleotide
tctacttgtctgcaataaagtccgtggctg

SEQ ID NO: 455644 - DNA, 30 bp, Artificial Sequence
  Synthetic oligonucleotide
gtcacgcacagaatcaaaatcgcgtggctg

SEQ ID NO: 455645 - DNA, 30 bp, Artificial Sequence
  Synthetic oligonucleotide
cccggaaggctgtcaagcgaagcttggctg

SEQ ID NO: 455646 - DNA, 30 bp, Artificial Sequence
  Synthetic oligonucleotide
actaagtattggtcttaccctagaatgctg

SEQ ID NO: 455647 - DNA, 30 bp, Artificial Sequence
  Synthetic oligonucleotide
gttccgtgtcatttcaaatagttgatgctg

SEQ ID NO: 455648 - DNA, 30 bp, Artificial Sequence
  Synthetic oligonucleotide
ctggaagttcaagtgctgagtttgatgctg

SEQ ID NO: 455649 - DNA, 30 bp, Artificial Sequence
  Synthetic oligonucleotide
gcaggcaattcggtctgttgccaactgctg

SEQ ID NO: 455650 - DNA, 30 bp, Artificial Sequence
  Synthetic oligonucleotide
tgcacggccttcgaggtcgatgaagtgctg

SEQ ID NO: 455651 - DNA, 30 bp, Artificial Sequence
  Synthetic oligonucleotide
ccttttgccccttcaacggaaggcgtgctg

SEQ ID NO: 455652 - DNA, 30 bp, Artificial Sequence
  Synthetic oligonucleotide
ataacttccgcaaacgccgggtgcgtgctg

SEQ ID NO: 455653 - DNA, 30 bp, Artificial Sequence
  Synthetic oligonucleotide
tggaagcatatcgtgtacgggttggtgctg

SEQ ID NO: 455654 - DNA, 30 bp, Artificial Sequence
  Synthetic oligonucleotide
ttgggtgtgcggtggctaacgacattgctg

SEQ ID NO: 455655 - DNA, 30 bp, Artificial Sequence
  Synthetic oligonucleotide
gaaccttggggggactctacccccttgctg

SEQ ID NO: 455656 - DNA, 30 bp, Artificial Sequence
  Synthetic oligonucleotide
ggggttaagggtacgagagccattttgctg

SEQ ID NO: 455657 - DNA, 30 bp, Artificial Sequence
  Synthetic oligonucleotide
ggaatttcgaatcgctccggggaaaatctg

SEQ ID NO: 455658 - DNA, 30 bp, Artificial Sequence
  Synthetic oligonucleotide
ccactacatgactgcgcaagttaaaatctg

SEQ ID NO: 455659 - DNA, 30 bp, Artificial Sequence
  Synthetic oligonucleotide
ggtattttgacgtattaacggtagaatctg

SEQ ID NO: 455660 - DNA, 30 bp, Artificial Sequence
  Synthetic oligonucleotide
ctacaccgcttgattacgccagataatctg

SEQ ID NO: 455661 - DNA, 30 bp, Artificial Sequence
  Synthetic oligonucleotide
cctgtgtgccacgcgggctccgcacatctg

SEQ ID NO: 455662 - DNA, 30 bp, Artificial Sequence
  Synthetic oligonucleotide
ttctcatagacggtcgctctactacatctg

SEQ ID NO: 455663 - DNA, 30 bp, Artificial Sequence
  Synthetic oligonucleotide
catcgcgcaggttaattacagagccatctg

SEQ ID NO: 455664 - DNA, 30 bp, Artificial Sequence
  Synthetic oligonucleotide
tcgcttggttattagttgttctgccatctg

SEQ ID NO: 455665 - DNA, 30 bp, Artificial Sequence
  Synthetic oligonucleotide
aatggctgtcgactaacttgtcggcatctg

SEQ ID NO: 455666 - DNA, 30 bp, Artificial Sequence
  Synthetic oligonucleotide
atgttgcctttgttctgaccattgcatctg

SEQ ID NO: 455667 - DNA, 30 bp, Artificial Sequence
  Synthetic oligonucleotide
atttagttttcggttaatgtaaatcatctg

SEQ ID NO: 455668 - DNA, 30 bp, Artificial Sequence
  Synthetic oligonucleotide
aaacaccttgtttgtactaatcaagatctg

SEQ ID NO: 455669 - DNA, 30 bp, Artificial Sequence
  Synthetic oligonucleotide
aatcgagtaactatgaagggttacgatctg

SEQ ID NO: 455670 - DNA, 30 bp, Artificial Sequence
  Synthetic oligonucleotide
ttggttccaaacgtgggacgctgggatctg

SEQ ID NO: 455671 - DNA, 30 bp, Artificial Sequence
  Synthetic oligonucleotide
gggctgttgtaatcagtatggagatatctg

SEQ ID NO: 455672 - DNA, 30 bp, Artificial Sequence
  Synthetic oligonucleotide
catgaggacaaagatatgatcatatatctg

SEQ ID NO: 455673 - DNA, 30 bp, Artificial Sequence
  Synthetic oligonucleotide
ggtgccttttcccgaatgtctccctatctg

SEQ ID NO: 455674 - DNA, 30 bp, Artificial Sequence
  Synthetic oligonucleotide
ggggctggacggctccaaggagggtatctg

SEQ ID NO: 455675 - DNA, 30 bp, Artificial Sequence
  Synthetic oligonucleotide
ctgcttgctccaggtcaactaggttatctg

SEQ ID NO: 455676 - DNA, 30 bp, Artificial Sequence
  Synthetic oligonucleotide
gaattagagagcctaggtttgggttatctg

SEQ ID NO: 455677 - DNA, 30 bp, Artificial Sequence
  Synthetic oligonucleotide
tagaccggactcgtccgggttttttatctg

SEQ ID NO: 455678 - DNA, 30 bp, Artificial Sequence
  Synthetic oligonucleotide
aagcgcgccgtctcctgtcggaggactctg

SEQ ID NO: 455679 - DNA, 30 bp, Artificial Sequence
  Synthetic oligonucleotide
tagtaaggtgaatggtacggcgctactctg

SEQ ID NO: 455680 - DNA, 30 bp, Artificial Sequence
  Synthetic oligonucleotide
ttcgatatattcttggatacttgtactctg

SEQ ID NO: 455681 - DNA, 30 bp, Artificial Sequence
  Synthetic oligonucleotide
cgccacgtccgctagagcccggttactctg

SEQ ID NO: 455682 - DNA, 30 bp, Artificial Sequence
  Synthetic oligonucleotide
gacctccggaacactcctccccaacctctg

SEQ ID NO: 455683 - DNA, 30 bp, Artificial Sequence
  Synthetic oligonucleotide
ttcggttcatttgttgtatctagccctctg

SEQ ID NO: 455684 - DNA, 30 bp, Artificial Sequence
  Synthetic oligonucleotide
tgtcgtacggatcgtttccggaagcctctg

SEQ ID NO: 455685 - DNA, 30 bp, Artificial Sequence
  Synthetic oligonucleotide
ccacttcacgattttgtggtgaagcctctg

SEQ ID NO: 455686 - DNA, 30 bp, Artificial Sequence
  Synthetic oligonucleotide
ctgcagtcgagtgcagagcgggagcctctg

SEQ ID NO: 455687 - DNA, 30 bp, Artificial Sequence
  Synthetic oligonucleotide
ggtttagagtcttcaagtgcgaggcctctg

SEQ ID NO: 455688 - DNA, 30 bp, Artificial Sequence
  Synthetic oligonucleotide
catatacgttcagccacagtacgagctctg

SEQ ID NO: 455689 - DNA, 30 bp, Artificial Sequence
  Synthetic oligonucleotide
actatagtcgcccttggcctaatagctctg

SEQ ID NO: 455690 - DNA, 30 bp, Artificial Sequence
  Synthetic oligonucleotide
tttaatactcacggggtcgtcccggctctg

SEQ ID NO: 455691 - DNA, 30 bp, Artificial Sequence
  Synthetic oligonucleotide
catatgtaaacgcgtcttcacagtgctctg

SEQ ID NO: 455692 - DNA, 30 bp, Artificial Sequence
  Synthetic oligonucleotide
aagagaatctgaaaatttacccgatctctg

SEQ ID NO: 455693 - DNA, 30 bp, Artificial Sequence
  Synthetic oligonucleotide
aggagttttggcatctcacagcgatctctg

SEQ ID NO: 455694 - DNA, 30 bp, Artificial Sequence
  Synthetic oligonucleotide
atccatggccttcttcaccgatactctctg

SEQ ID NO: 455695 - DNA, 30 bp, Artificial Sequence
  Synthetic oligonucleotide
ggctgtctgggccttagttgtagctctctg

SEQ ID NO: 455696 - DNA, 30 bp, Artificial Sequence
  Synthetic oligonucleotide
tccccttcccaaacggcgttccgctctctg

SEQ ID NO: 455697 - DNA, 30 bp, Artificial Sequence
  Synthetic oligonucleotide
accaatacaggagcatctaccaggtctctg

SEQ ID NO: 455698 - DNA, 30 bp, Artificial Sequence
  Synthetic oligonucleotide
ctggattacataacaatcttctggtctctg

SEQ ID NO: 455699 - DNA, 30 bp, Artificial Sequence
  Synthetic oligonucleotide
cattcgactcgcaggttgcctgtttctctg

SEQ ID NO: 455700 - DNA, 30 bp, Artificial Sequence
  Synthetic oligonucleotide
acgccgcgctgaccttcaggcgaaagtctg

SEQ ID NO: 455701 - DNA, 30 bp, Artificial Sequence
  Synthetic oligonucleotide
ctttaggcagcgactatataatgaagtctg

SEQ ID NO: 455702 - DNA, 30 bp, Artificial Sequence
  Synthetic oligonucleotide
ggactcacaatatctatcagaataagtctg

SEQ ID NO: 455703 - DNA, 30 bp, Artificial Sequence
  Synthetic oligonucleotide
gtgctcggtccttgtcatcattcgagtctg

SEQ ID NO: 455704 - DNA, 30 bp, Artificial Sequence
  Synthetic oligonucleotide
atataaagatggaaaggccgacggagtctg

SEQ ID NO: 455705 - DNA, 30 bp, Artificial Sequence
  Synthetic oligonucleotide
cttgcaatcattggcgggtcagcacgtctg

SEQ ID NO: 455706 - DNA, 30 bp, Artificial Sequence
  Synthetic oligonucleotide
ctcgatccatgcttcgtcatccgacgtctg

SEQ ID NO: 455707 - DNA, 30 bp, Artificial Sequence
  Synthetic oligonucleotide
aagaacaggcacaggggatcgttacgtctg

SEQ ID NO: 455708 - DNA, 30 bp, Artificial Sequence
  Synthetic oligonucleotide
tttacccatacggggctgtgcgtgcgtctg

SEQ ID NO: 455709 - DNA, 30 bp, Artificial Sequence
  Synthetic oligonucleotide
cgcaatggtatgagtcccgtggtgcgtctg

SEQ ID NO: 455710 - DNA, 30 bp, Artificial Sequence
  Synthetic oligonucleotide
tatgctatgccccagaaatactatcgtctg

SEQ ID NO: 455711 - DNA, 30 bp, Artificial Sequence
  Synthetic oligonucleotide
gctttaaagtgcctaccaaattgaggtctg

SEQ ID NO: 455712 - DNA, 30 bp, Artificial Sequence
  Synthetic oligonucleotide
ctatgtatccacgctagctttcacggtctg

SEQ ID NO: 455713 - DNA, 30 bp, Artificial Sequence
  Synthetic oligonucleotide
gagactattaagggaaattcgttcggtctg

SEQ ID NO: 455714 - DNA, 30 bp, Artificial Sequence
  Synthetic oligonucleotide
tgccggtaacccggcaggcaggggggtctg

SEQ ID NO: 455715 - DNA, 30 bp, Artificial Sequence
  Synthetic oligonucleotide
ctggttttgtggccgagcttgttgggtctg

SEQ ID NO: 455716 - DNA, 30 bp, Artificial Sequence
  Synthetic oligonucleotide
cagttcagatccaactcagacagtggtctg

SEQ ID NO: 455717 - DNA, 31 bp, Artificial Sequence
  Synthetic oligonucleotide
ttctcgtgaatagcacgaatggcttggtctg

SEQ ID NO: 455718 - DNA, 30 bp, Artificial Sequence
  Synthetic oligonucleotide
ctgatggtgcttcctagtcagtcatgtctg

SEQ ID NO: 455719 - DNA, 30 bp, Artificial Sequence
  Synthetic oligonucleotide
atgtcctgcctatggtctagttagtgtctg

SEQ ID NO: 455720 - DNA, 30 bp, Artificial Sequence
  Synthetic oligonucleotide
ttcccatcaatgcaaattacttcaattctg

SEQ ID NO: 455721 - DNA, 30 bp, Artificial Sequence
  Synthetic oligonucleotide
cctagtggaacaccgggcgcggcgattctg

SEQ ID NO: 455722 - DNA, 30 bp, Artificial Sequence
  Synthetic oligonucleotide
tatgtctgcgaacatttcttctatattctg

SEQ ID NO: 455723 - DNA, 30 bp, Artificial Sequence
  Synthetic oligonucleotide
accgatttacggtaatcggcttatattctg

SEQ ID NO: 455724 - DNA, 30 bp, Artificial Sequence
  Synthetic oligonucleotide
tagaacgatataaaattgtgacttattctg

SEQ ID NO: 455725 - DNA, 30 bp, Artificial Sequence
  Synthetic oligonucleotide
cagaatttctgtacagagttaaaacttctg

SEQ ID NO: 455726 - DNA, 30 bp, Artificial Sequence
  Synthetic oligonucleotide
gtggtacgtggcattggccggggacttctg

SEQ ID NO: 455727 - DNA, 30 bp, Artificial Sequence
  Synthetic oligonucleotide
gattttgctagagaaatcatgtgacttctg

SEQ ID NO: 455728 - DNA, 30 bp, Artificial Sequence
  Synthetic oligonucleotide
ggacgcaacattataggttacccccttctg

SEQ ID NO: 455729 - DNA, 30 bp, Artificial Sequence
  Synthetic oligonucleotide
gtgaagtatcatttgaagcaaacgcttctg

SEQ ID NO: 455730 - DNA, 30 bp, Artificial Sequence
  Synthetic oligonucleotide
taacacatgtgaatttccggtaggcttctg

SEQ ID NO: 455731 - DNA, 30 bp, Artificial Sequence
  Synthetic oligonucleotide
tactcgcggctaatagcagtctccgttctg

SEQ ID NO: 455732 - DNA, 30 bp, Artificial Sequence
  Synthetic oligonucleotide
gctaacagcgttaaatttaagcgcgttctg

SEQ ID NO: 455733 - DNA, 30 bp, Artificial Sequence
  Synthetic oligonucleotide
ccgctatcgagaacgaacgggtgcgttctg

SEQ ID NO: 455734 - DNA, 30 bp, Artificial Sequence
  Synthetic oligonucleotide
attaattagggcttggtccgcatcgttctg

SEQ ID NO: 455735 - DNA, 30 bp, Artificial Sequence
  Synthetic oligonucleotide
ggcactaggtgctcccacaagggggttctg

SEQ ID NO: 455736 - DNA, 30 bp, Artificial Sequence
  Synthetic oligonucleotide
gtaacctaacctggcttttaagtggttctg

SEQ ID NO: 455737 - DNA, 30 bp, Artificial Sequence
  Synthetic oligonucleotide
gaatacaataagcaactttccggtgttctg

SEQ ID NO: 455738 - DNA, 30 bp, Artificial Sequence
  Synthetic oligonucleotide
gggctatagaggcgatgccactttgttctg

SEQ ID NO: 455739 - DNA, 30 bp, Artificial Sequence
  Synthetic oligonucleotide
tagttatatatgtgcattaatgaatttctg

SEQ ID NO: 455740 - DNA, 30 bp, Artificial Sequence
  Synthetic oligonucleotide
ctgtgcttcatgtgttggaaaggatttctg

SEQ ID NO: 455741 - DNA, 30 bp, Artificial Sequence
  Synthetic oligonucleotide
tccctcaatcgagcttttctatcgtttctg

SEQ ID NO: 455742 - DNA, 30 bp, Artificial Sequence
  Synthetic oligonucleotide
aattctgatctccatatcttatcttttctg

SEQ ID NO: 455743 - DNA, 30 bp, Artificial Sequence
  Synthetic oligonucleotide
tcagaaattttatctagtgtattaaaagtg

SEQ ID NO: 455744 - DNA, 30 bp, Artificial Sequence
  Synthetic oligonucleotide
ccgggcggatttcggccggggttaaaagtg

SEQ ID NO: 455745 - DNA, 30 bp, Artificial Sequence
  Synthetic oligonucleotide
agtttccagaccgtgcagctatataaagtg

SEQ ID NO: 455746 - DNA, 30 bp, Artificial Sequence
  Synthetic oligonucleotide
gagtatgacaaccgattaacttgtaaagtg

SEQ ID NO: 455747 - DNA, 30 bp, Artificial Sequence
  Synthetic oligonucleotide
gttgtcatagcgggatgcgtggtacaagtg

SEQ ID NO: 455748 - DNA, 30 bp, Artificial Sequence
  Synthetic oligonucleotide
ttcaccgtcatgtatataggtgggcaagtg

SEQ ID NO: 455749 - DNA, 30 bp, Artificial Sequence
  Synthetic oligonucleotide
atctattaggtttgatacaattaagaagtg

SEQ ID NO: 455750 - DNA, 30 bp, Artificial Sequence
  Synthetic oligonucleotide
tgtgcaaatggaaggctggcccacgaagtg

SEQ ID NO: 455751 - DNA, 30 bp, Artificial Sequence
  Synthetic oligonucleotide
atctagcatatttcccccgatgaggaagtg

SEQ ID NO: 455752 - DNA, 30 bp, Artificial Sequence
  Synthetic oligonucleotide
ttgcgttgctgtcctgcgaaatatgaagtg

SEQ ID NO: 455753 - DNA, 30 bp, Artificial Sequence
  Synthetic oligonucleotide
cacatcagcacttgaagatgaggtgaagtg

SEQ ID NO: 455754 - DNA, 30 bp, Artificial Sequence
  Synthetic oligonucleotide
caaatatggtggacccttagaaaataagtg

SEQ ID NO: 455755 - DNA, 30 bp, Artificial Sequence
  Synthetic oligonucleotide
ggtggggttgcgggtcgacggaaataagtg

SEQ ID NO: 455756 - DNA, 30 bp, Artificial Sequence
  Synthetic oligonucleotide
cggcactgcatcgcacagcgataataagtg

SEQ ID NO: 455757 - DNA, 30 bp, Artificial Sequence
  Synthetic oligonucleotide
tttggtagccgcgtaccgtcgagataagtg

SEQ ID NO: 455758 - DNA, 30 bp, Artificial Sequence
  Synthetic oligonucleotide
agtgtaccttttaccatttaagacacagtg

SEQ ID NO: 455759 - DNA, 30 bp, Artificial Sequence
  Synthetic oligonucleotide
tagtacattatctggccgctagtcacagtg

SEQ ID NO: 455760 - DNA, 30 bp, Artificial Sequence
  Synthetic oligonucleotide
gagacagccaacgtgattttggtcacagtg

SEQ ID NO: 455761 - DNA, 30 bp, Artificial Sequence
  Synthetic oligonucleotide
ctagttctcgcatcacggagttatacagtg

SEQ ID NO: 455762 - DNA, 30 bp, Artificial Sequence
  Synthetic oligonucleotide
tcctcggctcttccttgagggattacagtg

SEQ ID NO: 455763 - DNA, 30 bp, Artificial Sequence
  Synthetic oligonucleotide
ctttgatgcaacttactctggcttacagtg

SEQ ID NO: 455764 - DNA, 30 bp, Artificial Sequence
  Synthetic oligonucleotide
tggcgagcaaatctggaatcttcgccagtg

SEQ ID NO: 455765 - DNA, 30 bp, Artificial Sequence
  Synthetic oligonucleotide
atttttgtagtaggcgagcgtcatccagtg

SEQ ID NO: 455766 - DNA, 30 bp, Artificial Sequence
  Synthetic oligonucleotide
cgactcctgtgatatagggggtctccagtg

SEQ ID NO: 455767 - DNA, 30 bp, Artificial Sequence
  Synthetic oligonucleotide
caatcgggcgcccccgatgtccaagcagtg

SEQ ID NO: 455768 - DNA, 30 bp, Artificial Sequence
  Synthetic oligonucleotide
agctaagctgaagaactcttgctcgcagtg

SEQ ID NO: 455769 - DNA, 30 bp, Artificial Sequence
  Synthetic oligonucleotide
gttctgcatatcagttgaatgtaggcagtg

SEQ ID NO: 455770 - DNA, 30 bp, Artificial Sequence
  Synthetic oligonucleotide
aagagtcaaagccctcttttgcgggcagtg

SEQ ID NO: 455771 - DNA, 30 bp, Artificial Sequence
  Synthetic oligonucleotide
tttctgtacgagtgcgctattatggcagtg

SEQ ID NO: 455772 - DNA, 30 bp, Artificial Sequence
  Synthetic oligonucleotide
agatatagagacgggacactgctggcagtg

SEQ ID NO: 455773 - DNA, 30 bp, Artificial Sequence
  Synthetic oligonucleotide
cccggtggattgccaactaggttggcagtg

SEQ ID NO: 455774 - DNA, 30 bp, Artificial Sequence
  Synthetic oligonucleotide
tactttaactctacgaagacttatgcagtg

SEQ ID NO: 455775 - DNA, 30 bp, Artificial Sequence
  Synthetic oligonucleotide
ggcccagggtccccccggccaaactcagtg

SEQ ID NO: 455776 - DNA, 30 bp, Artificial Sequence
  Synthetic oligonucleotide
tcctgcgcattaaaagccgactactcagtg

SEQ ID NO: 455777 - DNA, 30 bp, Artificial Sequence
  Synthetic oligonucleotide
tcctttactatgaacttgacgggctcagtg

SEQ ID NO: 455778 - DNA, 30 bp, Artificial Sequence
  Synthetic oligonucleotide
cgtatgctgttttcgagagtgaagtcagtg

SEQ ID NO: 455779 - DNA, 30 bp, Artificial Sequence
  Synthetic oligonucleotide
gcgagagggctttcttattgtacgtcagtg

SEQ ID NO: 455780 - DNA, 30 bp, Artificial Sequence
  Synthetic oligonucleotide
cccgcatggtcgcctgcaccattttcagtg

SEQ ID NO: 455781 - DNA, 30 bp, Artificial Sequence
  Synthetic oligonucleotide
ttctcctatgctttaaatcttataagagtg

SEQ ID NO: 455782 - DNA, 30 bp, Artificial Sequence
  Synthetic oligonucleotide
accatgtcgatactggttaaagtgagagtg

SEQ ID NO: 455783 - DNA, 30 bp, Artificial Sequence
  Synthetic oligonucleotide
caattgtttacactggttggtgtacgagtg

SEQ ID NO: 455784 - DNA, 30 bp, Artificial Sequence
  Synthetic oligonucleotide
ttttctacgtgacggcttgtagcccgagtg

SEQ ID NO: 455785 - DNA, 30 bp, Artificial Sequence
  Synthetic oligonucleotide
gccggcgcggcgtgccctttactccgagtg

SEQ ID NO: 455786 - DNA, 30 bp, Artificial Sequence
  Synthetic oligonucleotide
ctattacgcagcatgcccaactatcgagtg

SEQ ID NO: 455787 - DNA, 30 bp, Artificial Sequence
  Synthetic oligonucleotide
gtacattttcactttcgacggactcgagtg

SEQ ID NO: 455788 - DNA, 30 bp, Artificial Sequence
  Synthetic oligonucleotide
tggagggggacgctatgcccaccaggagtg

SEQ ID NO: 455789 - DNA, 30 bp, Artificial Sequence
  Synthetic oligonucleotide
tcagacaccgttgtatgcaggggaggagtg

SEQ ID NO: 455790 - DNA, 30 bp, Artificial Sequence
  Synthetic oligonucleotide
ccacagcgcattacgctggtctgcggagtg

SEQ ID NO: 455791 - DNA, 30 bp, Artificial Sequence
  Synthetic oligonucleotide
atttgggatgacgcattacccatcggagtg

SEQ ID NO: 455792 - DNA, 30 bp, Artificial Sequence
  Synthetic oligonucleotide
actcgtctctttgaggacattttgggagtg

SEQ ID NO: 455793 - DNA, 30 bp, Artificial Sequence
  Synthetic oligonucleotide
aaccagatccatttgatgtccctttgagtg

SEQ ID NO: 455794 - DNA, 30 bp, Artificial Sequence
  Synthetic oligonucleotide
ggttagatagtggctgcgcaaaaaatagtg

SEQ ID NO: 455795 - DNA, 30 bp, Artificial Sequence
  Synthetic oligonucleotide
ataattcttagtgtgcaagtagcaatagtg

SEQ ID NO: 455796 - DNA, 30 bp, Artificial Sequence
  Synthetic oligonucleotide
atttgcagccttcgccaaatacgcatagtg

SEQ ID NO: 455797 - DNA, 30 bp, Artificial Sequence
  Synthetic oligonucleotide
ctatttagaagcatccctcttgagatagtg

SEQ ID NO: 455798 - DNA, 30 bp, Artificial Sequence
  Synthetic oligonucleotide
gggcgacgttgcggggctgccatgatagtg

SEQ ID NO: 455799 - DNA, 30 bp, Artificial Sequence
  Synthetic oligonucleotide
tagaacagcctaccgcagtcagcactagtg

SEQ ID NO: 455800 - DNA, 30 bp, Artificial Sequence
  Synthetic oligonucleotide
catagactaatttcagtgctatacctagtg

SEQ ID NO: 455801 - DNA, 30 bp, Artificial Sequence
  Synthetic oligonucleotide
cagccaggtggaataagatcgcagctagtg

SEQ ID NO: 455802 - DNA, 30 bp, Artificial Sequence
  Synthetic oligonucleotide
tttgcataaagccatcacggtgtgctagtg

SEQ ID NO: 455803 - DNA, 30 bp, Artificial Sequence
  Synthetic oligonucleotide
cgtggatgtcagtagatttgtcatctagtg

SEQ ID NO: 455804 - DNA, 30 bp, Artificial Sequence
  Synthetic oligonucleotide
tcctgtagcttgaggctgcagattctagtg

SEQ ID NO: 455805 - DNA, 30 bp, Artificial Sequence
  Synthetic oligonucleotide
tcttatcttcgattagctaaatcagtagtg

SEQ ID NO: 455806 - DNA, 30 bp, Artificial Sequence
  Synthetic oligonucleotide
cagatgccagacagcacagctttagtagtg

SEQ ID NO: 455807 - DNA, 30 bp, Artificial Sequence
  Synthetic oligonucleotide
gacttaaattggataaaaacagaggtagtg

SEQ ID NO: 455808 - DNA, 30 bp, Artificial Sequence
  Synthetic oligonucleotide
tgtattggcttaaattgattagaggtagtg

SEQ ID NO: 455809 - DNA, 30 bp, Artificial Sequence
  Synthetic oligonucleotide
ctgaggtggtacccgtgttgccgggtagtg

SEQ ID NO: 455810 - DNA, 30 bp, Artificial Sequence
  Synthetic oligonucleotide
ttcagtcagcagccgctagtcgatgtagtg

SEQ ID NO: 455811 - DNA, 30 bp, Artificial Sequence
  Synthetic oligonucleotide
aaatccaaatcgagtgataaacgattagtg

SEQ ID NO: 455812 - DNA, 30 bp, Artificial Sequence
  Synthetic oligonucleotide
aaagagtacgtccgttatttctccttagtg

SEQ ID NO: 455813 - DNA, 30 bp, Artificial Sequence
  Synthetic oligonucleotide
tggggatgtgtgaggtgaggcttgttagtg

SEQ ID NO: 455814 - DNA, 30 bp, Artificial Sequence
  Synthetic oligonucleotide
taaccctgccgtttatcatattatttagtg

SEQ ID NO: 455815 - DNA, 30 bp, Artificial Sequence
  Synthetic oligonucleotide
ggcgaacttatatatctattgcttttagtg

SEQ ID NO: 455816 - DNA, 30 bp, Artificial Sequence
  Synthetic oligonucleotide
agtttgatacactttagcgtggttttagtg

SEQ ID NO: 455817 - DNA, 30 bp, Artificial Sequence
  Synthetic oligonucleotide
aatgatattaattcttcaattgcaaacgtg

SEQ ID NO: 455818 - DNA, 30 bp, Artificial Sequence
  Synthetic oligonucleotide
tcatttcgcttcgttgacgttaacaacgtg

SEQ ID NO: 455819 - DNA, 30 bp, Artificial Sequence
  Synthetic oligonucleotide
gggctcactgtaccacgatgttcgaacgtg

SEQ ID NO: 455820 - DNA, 30 bp, Artificial Sequence
  Synthetic oligonucleotide
cataccatctccctttggtcacttaacgtg

SEQ ID NO: 455821 - DNA, 30 bp, Artificial Sequence
  Synthetic oligonucleotide
attctaagtaacgtatgcacgtcccacgtg

SEQ ID NO: 455822 - DNA, 30 bp, Artificial Sequence
  Synthetic oligonucleotide
ccacccgttagggggcacgaaatgcacgtg

SEQ ID NO: 455823 - DNA, 30 bp, Artificial Sequence
  Synthetic oligonucleotide
gttcagccaatatacaaaatttttcacgtg

SEQ ID NO: 455824 - DNA, 30 bp, Artificial Sequence
  Synthetic oligonucleotide
gttagatttagcctctaacatggagacgtg

SEQ ID NO: 455825 - DNA, 30 bp, Artificial Sequence
  Synthetic oligonucleotide
ccattataatatatgatggcgaacgacgtg

SEQ ID NO: 455826 - DNA, 30 bp, Artificial Sequence
  Synthetic oligonucleotide
tagggttgtgtcttggtagcgctcgacgtg

SEQ ID NO: 455827 - DNA, 30 bp, Artificial Sequence
  Synthetic oligonucleotide
gaagtttgggaatattgtggccaggacgtg

SEQ ID NO: 455828 - DNA, 30 bp, Artificial Sequence
  Synthetic oligonucleotide
acacttatgatgtgttaagttccggacgtg

SEQ ID NO: 455829 - DNA, 30 bp, Artificial Sequence
  Synthetic oligonucleotide
ctggtccgtagttttgatcccggggacgtg

SEQ ID NO: 455830 - DNA, 30 bp, Artificial Sequence
  Synthetic oligonucleotide
cctcaattggcggatccgatcagtgacgtg

SEQ ID NO: 455831 - DNA, 30 bp, Artificial Sequence
  Synthetic oligonucleotide
gagctgtcaagataaatctgcaaatacgtg

SEQ ID NO: 455832 - DNA, 30 bp, Artificial Sequence
  Synthetic oligonucleotide
gagtcgggccaaagcaatagttaatacgtg

SEQ ID NO: 455833 - DNA, 30 bp, Artificial Sequence
  Synthetic oligonucleotide
aacaagtctgccctaccttggccatacgtg

SEQ ID NO: 455834 - DNA, 30 bp, Artificial Sequence
  Synthetic oligonucleotide
atcaaattcggctaacatgcttcctacgtg

SEQ ID NO: 455835 - DNA, 30 bp, Artificial Sequence
  Synthetic oligonucleotide
taggcctatcaggtcatggcagtgtacgtg

SEQ ID NO: 455836 - DNA, 30 bp, Artificial Sequence
  Synthetic oligonucleotide
tttttaatagcaggagtggtacattacgtg

SEQ ID NO: 455837 - DNA, 30 bp, Artificial Sequence
  Synthetic oligonucleotide
gtctcgccctctgtgacacgcgcttacgtg

SEQ ID NO: 455838 - DNA, 30 bp, Artificial Sequence
  Synthetic oligonucleotide
gaattgaaggtagaagtcaatgtttacgtg

SEQ ID NO: 455839 - DNA, 30 bp, Artificial Sequence
  Synthetic oligonucleotide
tggtgaaatttgtgatggtcgcaaaccgtg

SEQ ID NO: 455840 - DNA, 30 bp, Artificial Sequence
  Synthetic oligonucleotide
tgcatgatccgcgtttgttgaataaccgtg

SEQ ID NO: 455841 - DNA, 30 bp, Artificial Sequence
  Synthetic oligonucleotide
actatccagcgatggcatgttggcaccgtg

SEQ ID NO: 455842 - DNA, 30 bp, Artificial Sequence
  Synthetic oligonucleotide
cctacttccagcaaacccccctgcaccgtg

SEQ ID NO: 455843 - DNA, 30 bp, Artificial Sequence
  Synthetic oligonucleotide
ttctacggctacgtgacaccgggtaccgtg

SEQ ID NO: 455844 - DNA, 30 bp, Artificial Sequence
  Synthetic oligonucleotide
acttttcgagaagtgttagttagacccgtg

SEQ ID NO: 455845 - DNA, 30 bp, Artificial Sequence
  Synthetic oligonucleotide
tgtgcagccacagtgctggggatacccgtg

SEQ ID NO: 455846 - DNA, 30 bp, Artificial Sequence
  Synthetic oligonucleotide
gcacacttcccggttttatttactcccgtg

SEQ ID NO: 455847 - DNA, 30 bp, Artificial Sequence
  Synthetic oligonucleotide
gtctgttactagttgctcactgcagccgtg

SEQ ID NO: 455848 - DNA, 30 bp, Artificial Sequence
  Synthetic oligonucleotide
gctacgctttgtgttattaagttagccgtg

SEQ ID NO: 455849 - DNA, 30 bp, Artificial Sequence
  Synthetic oligonucleotide
cggcgaccgtgggtgattctacgggccgtg

SEQ ID NO: 455850 - DNA, 30 bp, Artificial Sequence
  Synthetic oligonucleotide
gctcacggcaaataaccactaaatgccgtg

SEQ ID NO: 455851 - DNA, 30 bp, Artificial Sequence
  Synthetic oligonucleotide
taccacttattgcgaggctatcatgccgtg

SEQ ID NO: 455852 - DNA, 30 bp, Artificial Sequence
  Synthetic oligonucleotide
cacgccgtagctttgcgcggcattgccgtg

SEQ ID NO: 455853 - DNA, 30 bp, Artificial Sequence
  Synthetic oligonucleotide
tgcctttaagtgtgcttggattcatccgtg

SEQ ID NO: 455854 - DNA, 30 bp, Artificial Sequence
  Synthetic oligonucleotide
agtcaagcatgttaggcacacgcctccgtg

SEQ ID NO: 455855 - DNA, 30 bp, Artificial Sequence
  Synthetic oligonucleotide
gcataaccatttaacgatgcttagtccgtg

SEQ ID NO: 455856 - DNA, 30 bp, Artificial Sequence
  Synthetic oligonucleotide
ttaggaggttcttggtactgatggtccgtg

SEQ ID NO: 455857 - DNA, 30 bp, Artificial Sequence
  Synthetic oligonucleotide
cattttaaaatcttgagttaactgtccgtg

SEQ ID NO: 455858 - DNA, 30 bp, Artificial Sequence
  Synthetic oligonucleotide
tacagctcacagggacccggggcttccgtg

SEQ ID NO: 455859 - DNA, 30 bp, Artificial Sequence
  Synthetic oligonucleotide
aaatatgctacctgtgtatgttcaagcgtg

SEQ ID NO: 455860 - DNA, 30 bp, Artificial Sequence
  Synthetic oligonucleotide
atgacggtcgtagccctctaacgaagcgtg

SEQ ID NO: 455861 - DNA, 30 bp, Artificial Sequence
  Synthetic oligonucleotide
aattagtaggtggcgacgtacaccagcgtg

SEQ ID NO: 455862 - DNA, 30 bp, Artificial Sequence
  Synthetic oligonucleotide
tttcatctgtatttggtaatcagtagcgtg

SEQ ID NO: 455863 - DNA, 30 bp, Artificial Sequence
  Synthetic oligonucleotide
tttgaatctgtaggtgtattacgtagcgtg

SEQ ID NO: 455864 - DNA, 30 bp, Artificial Sequence
  Synthetic oligonucleotide
ctcttttcgtgtgcctttggatttagcgtg

SEQ ID NO: 455865 - DNA, 30 bp, Artificial Sequence
  Synthetic oligonucleotide
acgtttacatatggaacttgtgcacgcgtg

SEQ ID NO: 455866 - DNA, 30 bp, Artificial Sequence
  Synthetic oligonucleotide
tcgcacgtgttccttttgttcagacgcgtg

SEQ ID NO: 455867 - DNA, 30 bp, Artificial Sequence
  Synthetic oligonucleotide
tttaacgcgatgacgaaagccctccgcgtg

SEQ ID NO: 455868 - DNA, 30 bp, Artificial Sequence
  Synthetic oligonucleotide
tttggacgattacacgcgagcgtccgcgtg

SEQ ID NO: 455869 - DNA, 30 bp, Artificial Sequence
  Synthetic oligonucleotide
gtgttagctatgtgttaacgctagcgcgtg

SEQ ID NO: 455870 - DNA, 30 bp, Artificial Sequence
  Synthetic oligonucleotide
acctatgagggggctgtatatcgtcgcgtg

SEQ ID NO: 455871 - DNA, 30 bp, Artificial Sequence
  Synthetic oligonucleotide
cagggatacgccgatttcttctgtcgcgtg

SEQ ID NO: 455872 - DNA, 30 bp, Artificial Sequence
  Synthetic oligonucleotide
ctcatgcacatgttctgcgaccttcgcgtg

SEQ ID NO: 455873 - DNA, 30 bp, Artificial Sequence
  Synthetic oligonucleotide
gagtggaggattacatagtaagtaggcgtg

SEQ ID NO: 455874 - DNA, 30 bp, Artificial Sequence
  Synthetic oligonucleotide
cccgtgcacttggccggtcagctcggcgtg

SEQ ID NO: 455875 - DNA, 30 bp, Artificial Sequence
  Synthetic oligonucleotide
gcactctcgtccggtaccggaaagggcgtg

SEQ ID NO: 455876 - DNA, 30 bp, Artificial Sequence
  Synthetic oligonucleotide
tttcgtatacgcgaatgcgaagcgggcgtg

SEQ ID NO: 455877 - DNA, 30 bp, Artificial Sequence
  Synthetic oligonucleotide
tataaaatcctggcatacggaggtggcgtg

SEQ ID NO: 455878 - DNA, 30 bp, Artificial Sequence
  Synthetic oligonucleotide
ctcagcatacttatgttctgctttggcgtg

SEQ ID NO: 455879 - DNA, 30 bp, Artificial Sequence
  Synthetic oligonucleotide
gtagccgtcgtaccagcgcaattatgcgtg

SEQ ID NO: 455880 - DNA, 30 bp, Artificial Sequence
  Synthetic oligonucleotide
tacgcgccgctgtacgcacttcacatcgtg

SEQ ID NO: 455881 - DNA, 30 bp, Artificial Sequence
  Synthetic oligonucleotide
ttcatgctttaaattgcgcgcaccatcgtg

SEQ ID NO: 455882 - DNA, 30 bp, Artificial Sequence
  Synthetic oligonucleotide
aactatagagcccacgcaagttccatcgtg

SEQ ID NO: 455883 - DNA, 30 bp, Artificial Sequence
  Synthetic oligonucleotide
tgccgggctaattaataccggtggatcgtg

SEQ ID NO: 455884 - DNA, 30 bp, Artificial Sequence
  Synthetic oligonucleotide
aaatggttgcaatgtgattttctgatcgtg

SEQ ID NO: 455885 - DNA, 30 bp, Artificial Sequence
  Synthetic oligonucleotide
aacgttgctggcgcacgacgaactatcgtg

SEQ ID NO: 455886 - DNA, 30 bp, Artificial Sequence
  Synthetic oligonucleotide
gatctaaagtttttgggatacccagtcgtg

SEQ ID NO: 455887 - DNA, 30 bp, Artificial Sequence
  Synthetic oligonucleotide
agtagtctgcccccttcctagctagtcgtg

SEQ ID NO: 455888 - DNA, 30 bp, Artificial Sequence
  Synthetic oligonucleotide
agcgtaactttgtgctactgtggggtcgtg

SEQ ID NO: 455889 - DNA, 30 bp, Artificial Sequence
  Synthetic oligonucleotide
gttagggggtcactgagtttaaagttcgtg

SEQ ID NO: 455890 - DNA, 30 bp, Artificial Sequence
  Synthetic oligonucleotide
atctcgactggtgtccgccttttgttcgtg

SEQ ID NO: 455891 - DNA, 30 bp, Artificial Sequence
  Synthetic oligonucleotide
aattggtactcgtactggactcttttcgtg

SEQ ID NO: 455892 - DNA, 31 bp, Artificial Sequence
  Synthetic oligonucleotide
acaaatttaccgggttacacccgtaaaggtg

SEQ ID NO: 455893 - DNA, 30 bp, Artificial Sequence
  Synthetic oligonucleotide
ttaatttctgaatttaaccaacgcaaggtg

SEQ ID NO: 455894 - DNA, 30 bp, Artificial Sequence
  Synthetic oligonucleotide
tgtgcatgtgggccttcgcaggcgaaggtg

SEQ ID NO: 455895 - DNA, 30 bp, Artificial Sequence
  Synthetic oligonucleotide
gcgaaccctcgaacgtcgaagcaccaggtg

SEQ ID NO: 455896 - DNA, 30 bp, Artificial Sequence
  Synthetic oligonucleotide
ttttaacatgttatattcgtcccccaggtg

SEQ ID NO: 455897 - DNA, 30 bp, Artificial Sequence
  Synthetic oligonucleotide
aaggttgcatagggaatagagagccaggtg

SEQ ID NO: 455898 - DNA, 30 bp, Artificial Sequence
  Synthetic oligonucleotide
ggggggtgcagcatgttcccgtcgcaggtg

SEQ ID NO: 455899 - DNA, 30 bp, Artificial Sequence
  Synthetic oligonucleotide
tgtgcaaagaagataatcacgaggcaggtg

SEQ ID NO: 455900 - DNA, 30 bp, Artificial Sequence
  Synthetic oligonucleotide
tcgtttaggcgcgggagtctccatcaggtg

SEQ ID NO: 455901 - DNA, 30 bp, Artificial Sequence
  Synthetic oligonucleotide
gctgacccggggcatccaaagtatcaggtg

SEQ ID NO: 455902 - DNA, 30 bp, Artificial Sequence
  Synthetic oligonucleotide
agtgaggcctctaaaatccgtgttcaggtg

SEQ ID NO: 455903 - DNA, 30 bp, Artificial Sequence
  Synthetic oligonucleotide
ctggacaggcaatgcttacgcggcgaggtg

SEQ ID NO: 455904 - DNA, 30 bp, Artificial Sequence
  Synthetic oligonucleotide
aggcttcatcctgcacgcgagtgcgaggtg

SEQ ID NO: 455905 - DNA, 30 bp, Artificial Sequence
  Synthetic oligonucleotide
ttttctggctgtactttctgtgtcgaggtg

SEQ ID NO: 455906 - DNA, 30 bp, Artificial Sequence
  Synthetic oligonucleotide
gatgaacatcgggacccgccccctgaggtg

SEQ ID NO: 455907 - DNA, 30 bp, Artificial Sequence
  Synthetic oligonucleotide
atcgtttcaccacggcaagtgatataggtg

SEQ ID NO: 455908 - DNA, 30 bp, Artificial Sequence
  Synthetic oligonucleotide
taaattaacagttctaagagactataggtg

SEQ ID NO: 455909 - DNA, 30 bp, Artificial Sequence
  Synthetic oligonucleotide
tgtatgtaacaggagctaaattactaggtg

SEQ ID NO: 455910 - DNA, 30 bp, Artificial Sequence
  Synthetic oligonucleotide
gtaacctaaattgaaccagaatgctaggtg

SEQ ID NO: 455911 - DNA, 30 bp, Artificial Sequence
  Synthetic oligonucleotide
tgcaccctacacaaaggagtgcgttaggtg

SEQ ID NO: 455912 - DNA, 30 bp, Artificial Sequence
  Synthetic oligonucleotide
acccggaccgttccccgaagctgttaggtg

SEQ ID NO: 455913 - DNA, 30 bp, Artificial Sequence
  Synthetic oligonucleotide
agccatcccactgacggtagttaaacggtg

SEQ ID NO: 455914 - DNA, 30 bp, Artificial Sequence
  Synthetic oligonucleotide
taacctcatactcaacgctccggaacggtg

SEQ ID NO: 455915 - DNA, 30 bp, Artificial Sequence
  Synthetic oligonucleotide
aggtggtcgcttggtttatttataacggtg

SEQ ID NO: 455916 - DNA, 30 bp, Artificial Sequence
  Synthetic oligonucleotide
acacgacgtggagcccgaatcaacacggtg

SEQ ID NO: 455917 - DNA, 30 bp, Artificial Sequence
  Synthetic oligonucleotide
tcactaacatccaagataaatgacacggtg

SEQ ID NO: 455918 - DNA, 30 bp, Artificial Sequence
  Synthetic oligonucleotide
tcaaaatctcccaaattttctaccacggtg

SEQ ID NO: 455919 - DNA, 30 bp, Artificial Sequence
  Synthetic oligonucleotide
cgagacctcgtttatataggagccacggtg

SEQ ID NO: 455920 - DNA, 30 bp, Artificial Sequence
  Synthetic oligonucleotide
ttagcctagggggacttctccagcacggtg

SEQ ID NO: 455921 - DNA, 30 bp, Artificial Sequence
  Synthetic oligonucleotide
gcgctcgatgatgccgtgttacgcacggtg

SEQ ID NO: 455922 - DNA, 30 bp, Artificial Sequence
  Synthetic oligonucleotide
gcgattaatctaccagcagctacgacggtg

SEQ ID NO: 455923 - DNA, 30 bp, Artificial Sequence
  Synthetic oligonucleotide
atggcgctcgtccacgcgcgcatgacggtg

SEQ ID NO: 455924 - DNA, 30 bp, Artificial Sequence
  Synthetic oligonucleotide
gacccctcggatgacaaaaggttgacggtg

SEQ ID NO: 455925 - DNA, 30 bp, Artificial Sequence
  Synthetic oligonucleotide
cttggttgaggaccggtcctggctacggtg

SEQ ID NO: 455926 - DNA, 30 bp, Artificial Sequence
  Synthetic oligonucleotide
cgaaactacggggtgcgtgcggcgccggtg

SEQ ID NO: 455927 - DNA, 30 bp, Artificial Sequence
  Synthetic oligonucleotide
aacacactggtgcctgtcagcaatccggtg

SEQ ID NO: 455928 - DNA, 30 bp, Artificial Sequence
  Synthetic oligonucleotide
ggcaacttaaaaagttctaggggtccggtg

SEQ ID NO: 455929 - DNA, 30 bp, Artificial Sequence
  Synthetic oligonucleotide
tacttatatgttgtacgctgtgttccggtg

SEQ ID NO: 455930 - DNA, 30 bp, Artificial Sequence
  Synthetic oligonucleotide
tatgagtaagtgtgaggtggtgtagcggtg

SEQ ID NO: 455931 - DNA, 30 bp, Artificial Sequence
  Synthetic oligonucleotide
cacgacgcacaagtgcaaaagcatgcggtg

SEQ ID NO: 455932 - DNA, 30 bp, Artificial Sequence
  Synthetic oligonucleotide
ggagggggcaggctgcctcggcatgcggtg

SEQ ID NO: 455933 - DNA, 30 bp, Artificial Sequence
  Synthetic oligonucleotide
ctggttaccgacgccatggatcatgcggtg

SEQ ID NO: 455934 - DNA, 30 bp, Artificial Sequence
  Synthetic oligonucleotide
atggtagacggagtccgtggataatcggtg

SEQ ID NO: 455935 - DNA, 30 bp, Artificial Sequence
  Synthetic oligonucleotide
cgtcacgcgtagaacgcagtttcatcggtg

SEQ ID NO: 455936 - DNA, 30 bp, Artificial Sequence
  Synthetic oligonucleotide
tcgtttttacatcgaataatatattcggtg

SEQ ID NO: 455937 - DNA, 30 bp, Artificial Sequence
  Synthetic oligonucleotide
cattataaccatcgacttaatagttcggtg

SEQ ID NO: 455938 - DNA, 30 bp, Artificial Sequence
  Synthetic oligonucleotide
tttacacgctgcgtccactttacaagggtg

SEQ ID NO: 455939 - DNA, 30 bp, Artificial Sequence
  Synthetic oligonucleotide
tttacatggagttaccgttaagcaagggtg

SEQ ID NO: 455940 - DNA, 30 bp, Artificial Sequence
  Synthetic oligonucleotide
caaaggcggacgcggccctgtataagggtg

SEQ ID NO: 455941 - DNA, 30 bp, Artificial Sequence
  Synthetic oligonucleotide
ataaatgagccaaggagctccccgagggtg

SEQ ID NO: 455942 - DNA, 30 bp, Artificial Sequence
  Synthetic oligonucleotide
tttgcagcgatgtatattgaggcgagggtg

SEQ ID NO: 455943 - DNA, 30 bp, Artificial Sequence
  Synthetic oligonucleotide
gaccagcgcttctacctcgctaggagggtg

SEQ ID NO: 455944 - DNA, 30 bp, Artificial Sequence
  Synthetic oligonucleotide
tggaacttattgggacagccgatgagggtg

SEQ ID NO: 455945 - DNA, 30 bp, Artificial Sequence
  Synthetic oligonucleotide
gaaatacgcccgccggagaacgatagggtg

SEQ ID NO: 455946 - DNA, 30 bp, Artificial Sequence
  Synthetic oligonucleotide
tgtacggtttcaggaccgtggagtagggtg

SEQ ID NO: 455947 - DNA, 31 bp, Artificial Sequence
  Synthetic oligonucleotide
ctgctcacccgaagacacagttgaacgggtg

SEQ ID NO: 455948 - DNA, 30 bp, Artificial Sequence
  Synthetic oligonucleotide
caagatctatttcaccttttgttacgggtg

SEQ ID NO: 455949 - DNA, 31 bp, Artificial Sequence
  Synthetic oligonucleotide
acgcgcctcgccggcatcagcctgccgggtg

SEQ ID NO: 455950 - DNA, 30 bp, Artificial Sequence
  Synthetic oligonucleotide
gccagcgcgccaaatttacgcaagcgggtg

SEQ ID NO: 455951 - DNA, 30 bp, Artificial Sequence
  Synthetic oligonucleotide
tcttcagatgccaggtagaaaactcgggtg

SEQ ID NO: 455952 - DNA, 30 bp, Artificial Sequence
  Synthetic oligonucleotide
gggcgacttggcaaaatgcctgttcgggtg

SEQ ID NO: 455953 - DNA, 30 bp, Artificial Sequence
  Synthetic oligonucleotide
gatgccccgaaacgcggggcactaggggtg

SEQ ID NO: 455954 - DNA, 30 bp, Artificial Sequence
  Synthetic oligonucleotide
gtagtgcagcagtcctttgttcacggggtg

SEQ ID NO: 455955 - DNA, 30 bp, Artificial Sequence
  Synthetic oligonucleotide
ttggagttaacgcctttcatattcggggtg

SEQ ID NO: 455956 - DNA, 30 bp, Artificial Sequence
  Synthetic oligonucleotide
ggagagaggggaatgctcaggccctgggtg

SEQ ID NO: 455957 - DNA, 30 bp, Artificial Sequence
  Synthetic oligonucleotide
ttctgagaattcaacagaccttcttgggtg

SEQ ID NO: 455958 - DNA, 30 bp, Artificial Sequence
  Synthetic oligonucleotide
gcaatgacgctcggggaaggaaaaatggtg

SEQ ID NO: 455959 - DNA, 30 bp, Artificial Sequence
  Synthetic oligonucleotide
gagtgggctcgtgggtacttgaaaatggtg

SEQ ID NO: 455960 - DNA, 30 bp, Artificial Sequence
  Synthetic oligonucleotide
ttgtttgtgtccaaggtgtccatcatggtg

SEQ ID NO: 455961 - DNA, 30 bp, Artificial Sequence
  Synthetic oligonucleotide
tgccaggtgattcatagatgcacgatggtg

SEQ ID NO: 455962 - DNA, 30 bp, Artificial Sequence
  Synthetic oligonucleotide
attctgcctgctggtttgtggatgatggtg

SEQ ID NO: 455963 - DNA, 30 bp, Artificial Sequence
  Synthetic oligonucleotide
cgtgctactgatatagcttatgatatggtg

SEQ ID NO: 455964 - DNA, 30 bp, Artificial Sequence
  Synthetic oligonucleotide
ctagtgccaacacgtgtctcctttatggtg

SEQ ID NO: 455965 - DNA, 30 bp, Artificial Sequence
  Synthetic oligonucleotide
tccaactgtccccagggagcaaccctggtg

SEQ ID NO: 455966 - DNA, 30 bp, Artificial Sequence
  Synthetic oligonucleotide
cgcggtaaccaaggccgtgcaacgctggtg

SEQ ID NO: 455967 - DNA, 30 bp, Artificial Sequence
  Synthetic oligonucleotide
gacccaggcaataggccttcagtgctggtg

SEQ ID NO: 455968 - DNA, 30 bp, Artificial Sequence
  Synthetic oligonucleotide
gaggttgtcgtgaagatacaacctctggtg

SEQ ID NO: 455969 - DNA, 30 bp, Artificial Sequence
  Synthetic oligonucleotide
ttagcggtttcacggagagttgcagtggtg

SEQ ID NO: 455970 - DNA, 30 bp, Artificial Sequence
  Synthetic oligonucleotide
caattaagcagtgaaggatgaaccgtggtg

SEQ ID NO: 455971 - DNA, 30 bp, Artificial Sequence
  Synthetic oligonucleotide
ctgtcgttaaggaaaaatgttcccgtggtg

SEQ ID NO: 455972 - DNA, 30 bp, Artificial Sequence
  Synthetic oligonucleotide
atatatgtacagcgcctcccgttcgtggtg

SEQ ID NO: 455973 - DNA, 30 bp, Artificial Sequence
  Synthetic oligonucleotide
ccgcatatttgactacggtggagggtggtg

SEQ ID NO: 455974 - DNA, 30 bp, Artificial Sequence
  Synthetic oligonucleotide
tctctcacattcgtggacacttacttggtg

SEQ ID NO: 455975 - DNA, 30 bp, Artificial Sequence
  Synthetic oligonucleotide
aatgtctgctatgacgcaccgcccttggtg

SEQ ID NO: 455976 - DNA, 30 bp, Artificial Sequence
  Synthetic oligonucleotide
gaacttaggtctctgtgctgttgcttggtg

SEQ ID NO: 455977 - DNA, 30 bp, Artificial Sequence
  Synthetic oligonucleotide
gttcatacaagtaatcagtgaaagttggtg

SEQ ID NO: 455978 - DNA, 30 bp, Artificial Sequence
  Synthetic oligonucleotide
gttatatagcaaacaaacccttcgttggtg

SEQ ID NO: 455979 - DNA, 30 bp, Artificial Sequence
  Synthetic oligonucleotide
catatgtttcgttcagcggttttgttggtg

SEQ ID NO: 455980 - DNA, 30 bp, Artificial Sequence
  Synthetic oligonucleotide
ccgatctacgcagggactctgaatttggtg

SEQ ID NO: 455981 - DNA, 30 bp, Artificial Sequence
  Synthetic oligonucleotide
cgcgcgcgcgtttcatacgccggtttggtg

SEQ ID NO: 455982 - DNA, 30 bp, Artificial Sequence
  Synthetic oligonucleotide
gttccatgagctgtattctatgttttggtg

SEQ ID NO: 455983 - DNA, 30 bp, Artificial Sequence
  Synthetic oligonucleotide
aactacccgactcgacccggtaaaaatgtg

SEQ ID NO: 455984 - DNA, 29 bp, Artificial Sequence
  Synthetic oligonucleotide
acgagacaccacaaaatatgtaaaatgtg

SEQ ID NO: 455985 - DNA, 30 bp, Artificial Sequence
  Synthetic oligonucleotide
ttatacgaagtccggtatctgtacaatgtg

SEQ ID NO: 455986 - DNA, 30 bp, Artificial Sequence
  Synthetic oligonucleotide
gactgttttatacgataagattagaatgtg

SEQ ID NO: 455987 - DNA, 30 bp, Artificial Sequence
  Synthetic oligonucleotide
gtgccatttgtctatcatcctttgaatgtg

SEQ ID NO: 455988 - DNA, 30 bp, Artificial Sequence
  Synthetic oligonucleotide
cgcgaagcaagctttacagcgagtaatgtg

SEQ ID NO: 455989 - DNA, 30 bp, Artificial Sequence
  Synthetic oligonucleotide
tcacttcgcgagaaaggctaaaagcatgtg

SEQ ID NO: 455990 - DNA, 30 bp, Artificial Sequence
  Synthetic oligonucleotide
tgtcgcaaattggggataatcgggcatgtg

SEQ ID NO: 455991 - DNA, 30 bp, Artificial Sequence
  Synthetic oligonucleotide
ccacacaagggtgtaccatggtggcatgtg

SEQ ID NO: 455992 - DNA, 30 bp, Artificial Sequence
  Synthetic oligonucleotide
tgcaatttgttaggatatcgtattcatgtg

SEQ ID NO: 455993 - DNA, 30 bp, Artificial Sequence
  Synthetic oligonucleotide
caaacctccatttcttttccagttcatgtg

SEQ ID NO: 455994 - DNA, 30 bp, Artificial Sequence
  Synthetic oligonucleotide
gatggtcccattttcactcccgacgatgtg

SEQ ID NO: 455995 - DNA, 30 bp, Artificial Sequence
  Synthetic oligonucleotide
ttaattatatgcgtatgcaatcccgatgtg

SEQ ID NO: 455996 - DNA, 30 bp, Artificial Sequence
  Synthetic oligonucleotide
aacggtggtttttcacatatttaggatgtg

SEQ ID NO: 455997 - DNA, 30 bp, Artificial Sequence
  Synthetic oligonucleotide
ctatagtattctccggaactaagggatgtg

SEQ ID NO: 455998 - DNA, 30 bp, Artificial Sequence
  Synthetic oligonucleotide
gtagtacaatgttttgggtttgtatatgtg

SEQ ID NO: 455999 - DNA, 30 bp, Artificial Sequence
  Synthetic oligonucleotide
ctcctaagcgaggagtggactttatatgtg

SEQ ID NO: 456000 - DNA, 30 bp, Artificial Sequence
  Synthetic oligonucleotide
ggactctaaggacgggatgaggtttatgtg

SEQ ID NO: 456001 - DNA, 30 bp, Artificial Sequence
  Synthetic oligonucleotide
gatcataagttcattatatacgaaactgtg

SEQ ID NO: 456002 - DNA, 30 bp, Artificial Sequence
  Synthetic oligonucleotide
agacaggggtggtttgggttccatactgtg

SEQ ID NO: 456003 - DNA, 30 bp, Artificial Sequence
  Synthetic oligonucleotide
gtttttccataggtgtaaatagttactgtg

SEQ ID NO: 456004 - DNA, 30 bp, Artificial Sequence
  Synthetic oligonucleotide
ttattctccgttctatactcgacacctgtg

SEQ ID NO: 456005 - DNA, 30 bp, Artificial Sequence
  Synthetic oligonucleotide
ttattgtaaactggttctcctccacctgtg

SEQ ID NO: 456006 - DNA, 30 bp, Artificial Sequence
  Synthetic oligonucleotide
gcactcgcttgcgtcacggtttcacctgtg

SEQ ID NO: 456007 - DNA, 30 bp, Artificial Sequence
  Synthetic oligonucleotide
tctgaaaactcccaggttttcagccctgtg

SEQ ID NO: 456008 - DNA, 30 bp, Artificial Sequence
  Synthetic oligonucleotide
gatgggacgaaccactagcatctgcctgtg

SEQ ID NO: 456009 - DNA, 30 bp, Artificial Sequence
  Synthetic oligonucleotide
cgtatgataggtactctgctataagctgtg

SEQ ID NO: 456010 - DNA, 30 bp, Artificial Sequence
  Synthetic oligonucleotide
gacattagcttctattcaacattagctgtg

SEQ ID NO: 456011 - DNA, 30 bp, Artificial Sequence
  Synthetic oligonucleotide
acaggtgtgtaattaatattttgcgctgtg

SEQ ID NO: 456012 - DNA, 30 bp, Artificial Sequence
  Synthetic oligonucleotide
actttgtagtaaggttgccaccgggctgtg

SEQ ID NO: 456013 - DNA, 30 bp, Artificial Sequence
  Synthetic oligonucleotide
ggatattacctcaggaccagtatatctgtg

SEQ ID NO: 456014 - DNA, 30 bp, Artificial Sequence
  Synthetic oligonucleotide
ttggtatgcttcatagcacacgcctctgtg

SEQ ID NO: 456015 - DNA, 30 bp, Artificial Sequence
  Synthetic oligonucleotide
taggcattatgtcgactaactctctctgtg

SEQ ID NO: 456016 - DNA, 30 bp, Artificial Sequence
  Synthetic oligonucleotide
tgctatatcgttccctctccgaattctgtg

SEQ ID NO: 456017 - DNA, 30 bp, Artificial Sequence
  Synthetic oligonucleotide
gtcgttatctctcaaaaatggctaagtgtg

SEQ ID NO: 456018 - DNA, 30 bp, Artificial Sequence
  Synthetic oligonucleotide
gtttaaatgacgtctggtttttacagtgtg

SEQ ID NO: 456019 - DNA, 30 bp, Artificial Sequence
  Synthetic oligonucleotide
ccgcatgcagcgacgtgcctcggcagtgtg

SEQ ID NO: 456020 - DNA, 30 bp, Artificial Sequence
  Synthetic oligonucleotide
aatccctacagcggcccagagtaacgtgtg

SEQ ID NO: 456021 - DNA, 30 bp, Artificial Sequence
  Synthetic oligonucleotide
gtggtcatatattcctttcaatgacgtgtg

SEQ ID NO: 456022 - DNA, 30 bp, Artificial Sequence
  Synthetic oligonucleotide
aatccgcgttcggaaacacctcgccgtgtg

SEQ ID NO: 456023 - DNA, 30 bp, Artificial Sequence
  Synthetic oligonucleotide
atctacggccagaacgcatcccatcgtgtg

SEQ ID NO: 456024 - DNA, 30 bp, Artificial Sequence
  Synthetic oligonucleotide
tgtaggtttgacgtctgtgctttaggtgtg

SEQ ID NO: 456025 - DNA, 30 bp, Artificial Sequence
  Synthetic oligonucleotide
cataccttcacgtagcttggtcacggtgtg

SEQ ID NO: 456026 - DNA, 30 bp, Artificial Sequence
  Synthetic oligonucleotide
gtagttattctagacggcaattgcggtgtg

SEQ ID NO: 456027 - DNA, 30 bp, Artificial Sequence
  Synthetic oligonucleotide
cttgcactcacagtgcttgccctcggtgtg

SEQ ID NO: 456028 - DNA, 30 bp, Artificial Sequence
  Synthetic oligonucleotide
aaagttacgcagaaatcggcatcgggtgtg

SEQ ID NO: 456029 - DNA, 30 bp, Artificial Sequence
  Synthetic oligonucleotide
ggggcgttaaccgatatcaggaggggtgtg

SEQ ID NO: 456030 - DNA, 30 bp, Artificial Sequence
  Synthetic oligonucleotide
cggcacatttggtcggagactccctgtgtg

SEQ ID NO: 456031 - DNA, 30 bp, Artificial Sequence
  Synthetic oligonucleotide
ctttccgtccttcgtcgggtgttgtgtgtg

SEQ ID NO: 456032 - DNA, 30 bp, Artificial Sequence
  Synthetic oligonucleotide
agtaacaacactgaaccctattggattgtg

SEQ ID NO: 456033 - DNA, 30 bp, Artificial Sequence
  Synthetic oligonucleotide
gtggcgactagattctcgacaatgattgtg

SEQ ID NO: 456034 - DNA, 30 bp, Artificial Sequence
  Synthetic oligonucleotide
acgttctattattggttataatgtattgtg

SEQ ID NO: 456035 - DNA, 30 bp, Artificial Sequence
  Synthetic oligonucleotide
aaagaatattatggagcttgctgtattgtg

SEQ ID NO: 456036 - DNA, 30 bp, Artificial Sequence
  Synthetic oligonucleotide
aaattggaggcctaagaatagtttattgtg

SEQ ID NO: 456037 - DNA, 30 bp, Artificial Sequence
  Synthetic oligonucleotide
tgccgctgagtaaatggagtcccacttgtg

SEQ ID NO: 456038 - DNA, 30 bp, Artificial Sequence
  Synthetic oligonucleotide
taggccagtcatcttcccttatcacttgtg

SEQ ID NO: 456039 - DNA, 30 bp, Artificial Sequence
  Synthetic oligonucleotide
gttctgaagtcaggctctaagatacttgtg

SEQ ID NO: 456040 - DNA, 30 bp, Artificial Sequence
  Synthetic oligonucleotide
accttccggcctctctgaaagaggcttgtg

SEQ ID NO: 456041 - DNA, 30 bp, Artificial Sequence
  Synthetic oligonucleotide
gtttattaaccggcatcgccccggcttgtg

SEQ ID NO: 456042 - DNA, 30 bp, Artificial Sequence
  Synthetic oligonucleotide
gcccttaaagaggagtcctttcctcttgtg

SEQ ID NO: 456043 - DNA, 30 bp, Artificial Sequence
  Synthetic oligonucleotide
gtgtacgattctcagctaacatcagttgtg

SEQ ID NO: 456044 - DNA, 30 bp, Artificial Sequence
  Synthetic oligonucleotide
gagcacatttgccatccctcgggcgttgtg

SEQ ID NO: 456045 - DNA, 30 bp, Artificial Sequence
  Synthetic oligonucleotide
ttagttctttgagtcctgcaaagtgttgtg

SEQ ID NO: 456046 - DNA, 30 bp, Artificial Sequence
  Synthetic oligonucleotide
ctttagccttcgtagacaataggtgttgtg

SEQ ID NO: 456047 - DNA, 30 bp, Artificial Sequence
  Synthetic oligonucleotide
tgtacgcccaagtaatcttgatttgttgtg

SEQ ID NO: 456048 - DNA, 30 bp, Artificial Sequence
  Synthetic oligonucleotide
aaggactcaggaggccccaggggatttgtg

SEQ ID NO: 456049 - DNA, 30 bp, Artificial Sequence
  Synthetic oligonucleotide
gttatctgcgccatgtctggggtatttgtg

SEQ ID NO: 456050 - DNA, 30 bp, Artificial Sequence
  Synthetic oligonucleotide
gacgatgcatgtcttttagagtagtttgtg

SEQ ID NO: 456051 - DNA, 30 bp, Artificial Sequence
  Synthetic oligonucleotide
atcgccacatttgcagtagcgagcaaattg

SEQ ID NO: 456052 - DNA, 30 bp, Artificial Sequence
  Synthetic oligonucleotide
gcaaaagacttcagtatattactgaaattg

SEQ ID NO: 456053 - DNA, 30 bp, Artificial Sequence
  Synthetic oligonucleotide
gtataacgacagggtatttaatataaattg

SEQ ID NO: 456054 - DNA, 30 bp, Artificial Sequence
  Synthetic oligonucleotide
ggagaggtatgatacataggctgtaaattg

SEQ ID NO: 456055 - DNA, 30 bp, Artificial Sequence
  Synthetic oligonucleotide
cagattagggaaaggcgcgccggacaattg

SEQ ID NO: 456056 - DNA, 30 bp, Artificial Sequence
  Synthetic oligonucleotide
gtccttgtatggaagtataacaagcaattg

SEQ ID NO: 456057 - DNA, 30 bp, Artificial Sequence
  Synthetic oligonucleotide
cttatgggtggttagtgaactgagcaattg

SEQ ID NO: 456058 - DNA, 30 bp, Artificial Sequence
  Synthetic oligonucleotide
aattggataccgtcgatggagtctcaattg

SEQ ID NO: 456059 - DNA, 30 bp, Artificial Sequence
  Synthetic oligonucleotide
cagtaattggaaataatgctagttcaattg

SEQ ID NO: 456060 - DNA, 30 bp, Artificial Sequence
  Synthetic oligonucleotide
caggccgggtaaaagtttttctaagaattg

SEQ ID NO: 456061 - DNA, 30 bp, Artificial Sequence
  Synthetic oligonucleotide
gaagagtttggctcttctggtccagaattg

SEQ ID NO: 456062 - DNA, 30 bp, Artificial Sequence
  Synthetic oligonucleotide
aatcctccaccgaacttttcgtcggaattg

SEQ ID NO: 456063 - DNA, 30 bp, Artificial Sequence
  Synthetic oligonucleotide
cccggcaataacgggctatttgctgaattg

SEQ ID NO: 456064 - DNA, 30 bp, Artificial Sequence
  Synthetic oligonucleotide
cattggacctcacctattatctctgaattg

SEQ ID NO: 456065 - DNA, 30 bp, Artificial Sequence
  Synthetic oligonucleotide
ttgacgtagcaggcgtaagtctgataattg

SEQ ID NO: 456066 - DNA, 30 bp, Artificial Sequence
  Synthetic oligonucleotide
gtctaactggtcatccgttggcgttaattg

SEQ ID NO: 456067 - DNA, 30 bp, Artificial Sequence
  Synthetic oligonucleotide
aatctggtacgcccgctgtaggggacattg

SEQ ID NO: 456068 - DNA, 30 bp, Artificial Sequence
  Synthetic oligonucleotide
tctcacccctcacctgcggacactacattg

SEQ ID NO: 456069 - DNA, 30 bp, Artificial Sequence
  Synthetic oligonucleotide
tctgttgagaggcgcacactctaaccattg

SEQ ID NO: 456070 - DNA, 30 bp, Artificial Sequence
  Synthetic oligonucleotide
acttcgttcgacgcggtcacacgaccattg

SEQ ID NO: 456071 - DNA, 30 bp, Artificial Sequence
  Synthetic oligonucleotide
tgtatcactccaattgcacgcggaccattg

SEQ ID NO: 456072 - DNA, 30 bp, Artificial Sequence
  Synthetic oligonucleotide
cgaacgctttacatgcaacacagcccattg

SEQ ID NO: 456073 - DNA, 30 bp, Artificial Sequence
  Synthetic oligonucleotide
ccgggctgtatttgcctgtccttgccattg

SEQ ID NO: 456074 - DNA, 30 bp, Artificial Sequence
  Synthetic oligonucleotide
agggttttcctggcatagttgtcagcattg

SEQ ID NO: 456075 - DNA, 30 bp, Artificial Sequence
  Synthetic oligonucleotide
tggatgctctgctatcagccctacgcattg

SEQ ID NO: 456076 - DNA, 29 bp, Artificial Sequence
  Synthetic oligonucleotide
ttgatttaaattggaagggggcggcattg

SEQ ID NO: 456077 - DNA, 30 bp, Artificial Sequence
  Synthetic oligonucleotide
gcatgctgactgacccttggcgcatcattg

SEQ ID NO: 456078 - DNA, 30 bp, Artificial Sequence
  Synthetic oligonucleotide
acatttcaaaccgcgatgcagtcctcattg

SEQ ID NO: 456079 - DNA, 30 bp, Artificial Sequence
  Synthetic oligonucleotide
gtcagattagtacttctaccagcgtcattg

SEQ ID NO: 456080 - DNA, 30 bp, Artificial Sequence
  Synthetic oligonucleotide
cacaggtttttcatgccgacagattcattg

SEQ ID NO: 456081 - DNA, 30 bp, Artificial Sequence
  Synthetic oligonucleotide
gttccgaagaatctaccgctaacttcattg

SEQ ID NO: 456082 - DNA, 30 bp, Artificial Sequence
  Synthetic oligonucleotide
ggcaatctcggagctgaatctcggagattg

SEQ ID NO: 456083 - DNA, 29 bp, Artificial Sequence
  Synthetic oligonucleotide
aatataatcgtttggtgaagtggagattg

SEQ ID NO: 456084 - DNA, 30 bp, Artificial Sequence
  Synthetic oligonucleotide
tattggagcttgcgttaagtacgtagattg

SEQ ID NO: 456085 - DNA, 30 bp, Artificial Sequence
  Synthetic oligonucleotide
gtaccccatatttggtggatctaacgattg

SEQ ID NO: 456086 - DNA, 30 bp, Artificial Sequence
  Synthetic oligonucleotide
gtttgtcgatttgcctcctgtaaaggattg

SEQ ID NO: 456087 - DNA, 30 bp, Artificial Sequence
  Synthetic oligonucleotide
tgacgtctgtgctcggacgcattaggattg

SEQ ID NO: 456088 - DNA, 30 bp, Artificial Sequence
  Synthetic oligonucleotide
gtagtcattgaccctgctcagccgggattg

SEQ ID NO: 456089 - DNA, 30 bp, Artificial Sequence
  Synthetic oligonucleotide
aaggtacacggagctacaacctctggattg

SEQ ID NO: 456090 - DNA, 30 bp, Artificial Sequence
  Synthetic oligonucleotide
gagtgcatcgtcgacagacatttatgattg

SEQ ID NO: 456091 - DNA, 30 bp, Artificial Sequence
  Synthetic oligonucleotide
taaggtgaccgctgcgcgtttcgctgattg

SEQ ID NO: 456092 - DNA, 30 bp, Artificial Sequence
  Synthetic oligonucleotide
ccttagtgagatttgagcgcgccgtgattg

SEQ ID NO: 456093 - DNA, 30 bp, Artificial Sequence
  Synthetic oligonucleotide
tacacataagagaacgccgctttgtgattg

SEQ ID NO: 456094 - DNA, 30 bp, Artificial Sequence
  Synthetic oligonucleotide
cggcttagtaagaacttttagagttgattg

SEQ ID NO: 456095 - DNA, 30 bp, Artificial Sequence
  Synthetic oligonucleotide
gcccatcttcatctggcgatgatttgattg

SEQ ID NO: 456096 - DNA, 30 bp, Artificial Sequence
  Synthetic oligonucleotide
gtaatttagagggctagaaggttttgattg

SEQ ID NO: 456097 - DNA, 29 bp, Artificial Sequence
  Synthetic oligonucleotide
cctgcctcgacagacccgatgcaatattg

SEQ ID NO: 456098 - DNA, 30 bp, Artificial Sequence
  Synthetic oligonucleotide
agggactaacgggcgtcatctcgaatattg

SEQ ID NO: 456099 - DNA, 28 bp, Artificial Sequence
  Synthetic oligonucleotide
aaattggaacaggggactagtaatattg

SEQ ID NO: 456100 - DNA, 30 bp, Artificial Sequence
  Synthetic oligonucleotide
actcgccgcagtccgcggtcattaatattg

SEQ ID NO: 456101 - DNA, 30 bp, Artificial Sequence
  Synthetic oligonucleotide
ttccgaatgggcgattgtggtttaatattg

SEQ ID NO: 456102 - DNA, 30 bp, Artificial Sequence
  Synthetic oligonucleotide
acaagtccgccggttttcatatacatattg

SEQ ID NO: 456103 - DNA, 30 bp, Artificial Sequence
  Synthetic oligonucleotide
taactcaagtatgttctcgggggcatattg

SEQ ID NO: 456104 - DNA, 30 bp, Artificial Sequence
  Synthetic oligonucleotide
ggattcaagttgatctcggggtaactattg

SEQ ID NO: 456105 - DNA, 30 bp, Artificial Sequence
  Synthetic oligonucleotide
tattatcggactttattaccgccactattg

SEQ ID NO: 456106 - DNA, 30 bp, Artificial Sequence
  Synthetic oligonucleotide
attcatatccagatctcttaacagctattg

SEQ ID NO: 456107 - DNA, 30 bp, Artificial Sequence
  Synthetic oligonucleotide
gatttgtaaagtttgtgatataatctattg

SEQ ID NO: 456108 - DNA, 30 bp, Artificial Sequence
  Synthetic oligonucleotide
tagtagaacgccagcaacgtatatctattg

SEQ ID NO: 456109 - DNA, 30 bp, Artificial Sequence
  Synthetic oligonucleotide
gcattcttaacgcaccctccgtctctattg

SEQ ID NO: 456110 - DNA, 30 bp, Artificial Sequence
  Synthetic oligonucleotide
atgagcgatgatatcgtacggtaagtattg

SEQ ID NO: 456111 - DNA, 30 bp, Artificial Sequence
  Synthetic oligonucleotide
tgttaaatattgaggttaaggaacgtattg

SEQ ID NO: 456112 - DNA, 30 bp, Artificial Sequence
  Synthetic oligonucleotide
gttttcatggctgtttgccaaaacttattg

SEQ ID NO: 456113 - DNA, 30 bp, Artificial Sequence
  Synthetic oligonucleotide
aaacttgcatctggattacagaacttattg

SEQ ID NO: 456114 - DNA, 30 bp, Artificial Sequence
  Synthetic oligonucleotide
atcgtgcgtactggggttaacctcttattg

SEQ ID NO: 456115 - DNA, 30 bp, Artificial Sequence
  Synthetic oligonucleotide
ctgctcaggcgggaagcctgccggttattg

SEQ ID NO: 456116 - DNA, 30 bp, Artificial Sequence
  Synthetic oligonucleotide
ccaacctcggcctgtttccttcggttattg

SEQ ID NO: 456117 - DNA, 30 bp, Artificial Sequence
  Synthetic oligonucleotide
atcactttccttatacggaggctgttattg

SEQ ID NO: 456118 - DNA, 30 bp, Artificial Sequence
  Synthetic oligonucleotide
tgtcgcggcacttcatagaagggtttattg

SEQ ID NO: 456119 - DNA, 30 bp, Artificial Sequence
  Synthetic oligonucleotide
cggctatgtatttcgctactctttttattg

SEQ ID NO: 456120 - DNA, 30 bp, Artificial Sequence
  Synthetic oligonucleotide
aatcttgcactgagaatgccattaaacttg

SEQ ID NO: 456121 - DNA, 30 bp, Artificial Sequence
  Synthetic oligonucleotide
ttttatcgccacataatcctgcacaacttg

SEQ ID NO: 456122 - DNA, 30 bp, Artificial Sequence
  Synthetic oligonucleotide
gtgattgtagctctaacgcgattcaacttg

SEQ ID NO: 456123 - DNA, 30 bp, Artificial Sequence
  Synthetic oligonucleotide
gtagacagtccaaccatggtgaggaacttg

SEQ ID NO: 456124 - DNA, 30 bp, Artificial Sequence
  Synthetic oligonucleotide
gcgcgtaccaagggcctcctctataacttg

SEQ ID NO: 456125 - DNA, 30 bp, Artificial Sequence
  Synthetic oligonucleotide
aatcaacggtttgcggaaagagctaacttg

SEQ ID NO: 456126 - DNA, 30 bp, Artificial Sequence
  Synthetic oligonucleotide
tactcttcgtccccttatggggctaacttg

SEQ ID NO: 456127 - DNA, 30 bp, Artificial Sequence
  Synthetic oligonucleotide
accaagggcaggtgaagattctgtaacttg

SEQ ID NO: 456128 - DNA, 30 bp, Artificial Sequence
  Synthetic oligonucleotide
taggttcccgaacccggcagaattaacttg

SEQ ID NO: 456129 - DNA, 25 bp, Artificial Sequence
  Synthetic oligonucleotide
ttttcttagcaatgtacaacacttg

SEQ ID NO: 456130 - DNA, 30 bp, Artificial Sequence
  Synthetic oligonucleotide
ggggggcaggctacaaggggggcccacttg

SEQ ID NO: 456131 - DNA, 30 bp, Artificial Sequence
  Synthetic oligonucleotide
tagtaagtaggtgagcacagaggtcacttg

SEQ ID NO: 456132 - DNA, 30 bp, Artificial Sequence
  Synthetic oligonucleotide
cgagctgcgaggtgtgcctgaattcacttg

SEQ ID NO: 456133 - DNA, 30 bp, Artificial Sequence
  Synthetic oligonucleotide
ttctccagctaggtaactattcgagacttg

SEQ ID NO: 456134 - DNA, 30 bp, Artificial Sequence
  Synthetic oligonucleotide
aaatctccaaaattttaggaaggagacttg

SEQ ID NO: 456135 - DNA, 30 bp, Artificial Sequence
  Synthetic oligonucleotide
ttagtcccgcagtcggcctgtgaggacttg

SEQ ID NO: 456136 - DNA, 30 bp, Artificial Sequence
  Synthetic oligonucleotide
aatctatggccatgcaggtaacatgacttg

SEQ ID NO: 456137 - DNA, 30 bp, Artificial Sequence
  Synthetic oligonucleotide
gctccgcataagataggccgtgaatacttg

SEQ ID NO: 456138 - DNA, 30 bp, Artificial Sequence
  Synthetic oligonucleotide
gaatacacgttaatttgattcctatacttg

SEQ ID NO: 456139 - DNA, 30 bp, Artificial Sequence
  Synthetic oligonucleotide
gcgaaacctgaaacactttagagttacttg

SEQ ID NO: 456140 - DNA, 30 bp, Artificial Sequence
  Synthetic oligonucleotide
taaagggagtatcaaggttttttttacttg

SEQ ID NO: 456141 - DNA, 30 bp, Artificial Sequence
  Synthetic oligonucleotide
tgtgggttttactatttttttcacaccttg

SEQ ID NO: 456142 - DNA, 30 bp, Artificial Sequence
  Synthetic oligonucleotide
aatcgcggggtacgcaagcaacccaccttg

SEQ ID NO: 456143 - DNA, 30 bp, Artificial Sequence
  Synthetic oligonucleotide
ggaggcggcggagacacatgcagcaccttg

SEQ ID NO: 456144 - DNA, 30 bp, Artificial Sequence
  Synthetic oligonucleotide
ggggcatcctgttgtttgccgagcaccttg

SEQ ID NO: 456145 - DNA, 30 bp, Artificial Sequence
  Synthetic oligonucleotide
ccgtagtccctctccgcaggcctcaccttg

SEQ ID NO: 456146 - DNA, 30 bp, Artificial Sequence
  Synthetic oligonucleotide
gagttgcctacacgtaagaggctcaccttg

SEQ ID NO: 456147 - DNA, 30 bp, Artificial Sequence
  Synthetic oligonucleotide
tttataggggaagtgtcacctgtgaccttg

SEQ ID NO: 456148 - DNA, 30 bp, Artificial Sequence
  Synthetic oligonucleotide
acccggggaaaagcctctggcttgaccttg

SEQ ID NO: 456149 - DNA, 30 bp, Artificial Sequence
  Synthetic oligonucleotide
ctcctgttttcacagtgcgagcagcccttg

SEQ ID NO: 456150 - DNA, 30 bp, Artificial Sequence
  Synthetic oligonucleotide
taccaccatttcctcatcttggtgcccttg

SEQ ID NO: 456151 - DNA, 30 bp, Artificial Sequence
  Synthetic oligonucleotide
tttgttctcttgatggtacgtgcagccttg

SEQ ID NO: 456152 - DNA, 30 bp, Artificial Sequence
  Synthetic oligonucleotide
cataccgttggcggagtgaccggagccttg

SEQ ID NO: 456153 - DNA, 30 bp, Artificial Sequence
  Synthetic oligonucleotide
caaatatttttcaacttgttgttagccttg

SEQ ID NO: 456154 - DNA, 30 bp, Artificial Sequence
  Synthetic oligonucleotide
attccacgtcctttcccccaatccgccttg

SEQ ID NO: 456155 - DNA, 30 bp, Artificial Sequence
  Synthetic oligonucleotide
accctatatactagtcagcaatgcgccttg

SEQ ID NO: 456156 - DNA, 30 bp, Artificial Sequence
  Synthetic oligonucleotide
aattaatacgaagttaaatttactgccttg

SEQ ID NO: 456157 - DNA, 30 bp, Artificial Sequence
  Synthetic oligonucleotide
cgtaccacttatctctgacaggctgccttg

SEQ ID NO: 456158 - DNA, 30 bp, Artificial Sequence
  Synthetic oligonucleotide
tggtgttaaccaaatccctgctaatccttg

SEQ ID NO: 456159 - DNA, 30 bp, Artificial Sequence
  Synthetic oligonucleotide
ttccactttcccttcgttgtattctccttg

SEQ ID NO: 456160 - DNA, 30 bp, Artificial Sequence
  Synthetic oligonucleotide
ctggcccctggtgcagttccaaagtccttg

SEQ ID NO: 456161 - DNA, 30 bp, Artificial Sequence
  Synthetic oligonucleotide
acttcccggactgaattccgcagttccttg

SEQ ID NO: 456162 - DNA, 30 bp, Artificial Sequence
  Synthetic oligonucleotide
attagcacagaactaagtaagtgaagcttg

SEQ ID NO: 456163 - DNA, 30 bp, Artificial Sequence
  Synthetic oligonucleotide
cctccaggccttaaagataacgtaagcttg

SEQ ID NO: 456164 - DNA, 30 bp, Artificial Sequence
  Synthetic oligonucleotide
cttggtacagctagtagggcatctagcttg

SEQ ID NO: 456165 - DNA, 30 bp, Artificial Sequence
  Synthetic oligonucleotide
actatgccactaatacaagtccttagcttg

SEQ ID NO: 456166 - DNA, 30 bp, Artificial Sequence
  Synthetic oligonucleotide
atacgatctatcacgctgcagtcacgcttg

SEQ ID NO: 456167 - DNA, 30 bp, Artificial Sequence
  Synthetic oligonucleotide
atagcataagacactcttgatgtacgcttg

SEQ ID NO: 456168 - DNA, 30 bp, Artificial Sequence
  Synthetic oligonucleotide
cccggcgatccggcgtaggtggaccgcttg

SEQ ID NO: 456169 - DNA, 30 bp, Artificial Sequence
  Synthetic oligonucleotide
ttgggtcgccgagcacctggggcccgcttg

SEQ ID NO: 456170 - DNA, 31 bp, Artificial Sequence
  Synthetic oligonucleotide
cagttggtcaaattctagagcgtagcgcttg

SEQ ID NO: 456171 - DNA, 30 bp, Artificial Sequence
  Synthetic oligonucleotide
agcatgcccgtaacaaagactacaggcttg

SEQ ID NO: 456172 - DNA, 30 bp, Artificial Sequence
  Synthetic oligonucleotide
aaaagtttcaaagctggggaatcaggcttg

SEQ ID NO: 456173 - DNA, 30 bp, Artificial Sequence
  Synthetic oligonucleotide
gggttgggcgtcttaaatggacagggcttg

SEQ ID NO: 456174 - DNA, 30 bp, Artificial Sequence
  Synthetic oligonucleotide
cggttaaggggagagtactattctggcttg

SEQ ID NO: 456175 - DNA, 30 bp, Artificial Sequence
  Synthetic oligonucleotide
ttacccgcagccgggtcacgaattggcttg

SEQ ID NO: 456176 - DNA, 30 bp, Artificial Sequence
  Synthetic oligonucleotide
aaaatccactcgggtttaataggatgcttg

SEQ ID NO: 456177 - DNA, 30 bp, Artificial Sequence
  Synthetic oligonucleotide
gcgcagtcacggagtcaagtatactgcttg

SEQ ID NO: 456178 - DNA, 30 bp, Artificial Sequence
  Synthetic oligonucleotide
cttgtactggcggttatattttactgcttg

SEQ ID NO: 456179 - DNA, 30 bp, Artificial Sequence
  Synthetic oligonucleotide
tttaagaagttttggagccacgggtgcttg

SEQ ID NO: 456180 - DNA, 31 bp, Artificial Sequence
  Synthetic oligonucleotide
aatttgacttggatcaaagatactttgcttg

SEQ ID NO: 456181 - DNA, 30 bp, Artificial Sequence
  Synthetic oligonucleotide
gagctgaaggaacgtctgtacgggatcttg

SEQ ID NO: 456182 - DNA, 30 bp, Artificial Sequence
  Synthetic oligonucleotide
ggagttaagcgttatttacgttggatcttg

SEQ ID NO: 456183 - DNA, 30 bp, Artificial Sequence
  Synthetic oligonucleotide
gtttagtatgggaaaaaattcgatatcttg

SEQ ID NO: 456184 - DNA, 30 bp, Artificial Sequence
  Synthetic oligonucleotide
cacggtttttctcccgagccagtactcttg

SEQ ID NO: 456185 - DNA, 30 bp, Artificial Sequence
  Synthetic oligonucleotide
ggtcacaccaggagtacagaaaacctcttg

SEQ ID NO: 456186 - DNA, 30 bp, Artificial Sequence
  Synthetic oligonucleotide
ccttatgctcaagtgattccaggcctcttg

SEQ ID NO: 456187 - DNA, 30 bp, Artificial Sequence
  Synthetic oligonucleotide
gtaagacatgagcagcctggaacgctcttg

SEQ ID NO: 456188 - DNA, 30 bp, Artificial Sequence
  Synthetic oligonucleotide
attgatgttaattctcgcgctctgctcttg

SEQ ID NO: 456189 - DNA, 30 bp, Artificial Sequence
  Synthetic oligonucleotide
gcttattaatgggatgagggggaagtcttg

SEQ ID NO: 456190 - DNA, 30 bp, Artificial Sequence
  Synthetic oligonucleotide
actgtcctctagataggagcaggagtcttg

SEQ ID NO: 456191 - DNA, 30 bp, Artificial Sequence
  Synthetic oligonucleotide
cggcctaaggtcaaggtgaccggagtcttg

SEQ ID NO: 456192 - DNA, 30 bp, Artificial Sequence
  Synthetic oligonucleotide
gaccgggtgatactgtaaatgatagtcttg

SEQ ID NO: 456193 - DNA, 30 bp, Artificial Sequence
  Synthetic oligonucleotide
acttcggaacgcttaaacaaatgcgtcttg

SEQ ID NO: 456194 - DNA, 30 bp, Artificial Sequence
  Synthetic oligonucleotide
tggtgtgagggcctctcttactcggtcttg

SEQ ID NO: 456195 - DNA, 30 bp, Artificial Sequence
  Synthetic oligonucleotide
actggcctatattctaaaggcagggtcttg

SEQ ID NO: 456196 - DNA, 30 bp, Artificial Sequence
  Synthetic oligonucleotide
ttcatgaagaccctgtgctgtcgtgtcttg

SEQ ID NO: 456197 - DNA, 30 bp, Artificial Sequence
  Synthetic oligonucleotide
ttctccggcaagcaatggcaataattcttg

SEQ ID NO: 456198 - DNA, 30 bp, Artificial Sequence
  Synthetic oligonucleotide
ttctaacttatgtccacgtggagattcttg

SEQ ID NO: 456199 - DNA, 30 bp, Artificial Sequence
  Synthetic oligonucleotide
ttccaggcaaggcgtatcttcatattcttg

SEQ ID NO: 456200 - DNA, 30 bp, Artificial Sequence
  Synthetic oligonucleotide
tcttttgtacacgctacctcaatcttcttg

SEQ ID NO: 456201 - DNA, 30 bp, Artificial Sequence
  Synthetic oligonucleotide
aggctttacagttacgtgcactagttcttg

SEQ ID NO: 456202 - DNA, 30 bp, Artificial Sequence
  Synthetic oligonucleotide
aaatggtattttgcgggctgaattttcttg

SEQ ID NO: 456203 - DNA, 30 bp, Artificial Sequence
  Synthetic oligonucleotide
aagataaacctagtccgaggggttttcttg

SEQ ID NO: 456204 - DNA, 30 bp, Artificial Sequence
  Synthetic oligonucleotide
ttacacaattgctctacccagaaaaagttg

SEQ ID NO: 456205 - DNA, 30 bp, Artificial Sequence
  Synthetic oligonucleotide
gaaattttagtggctaaaggaatcaagttg

SEQ ID NO: 456206 - DNA, 30 bp, Artificial Sequence
  Synthetic oligonucleotide
cagatctcgatccgcagcgcagggaagttg

SEQ ID NO: 456207 - DNA, 30 bp, Artificial Sequence
  Synthetic oligonucleotide
atagtgacgtgaagattatgtctgaagttg

SEQ ID NO: 456208 - DNA, 30 bp, Artificial Sequence
  Synthetic oligonucleotide
cgggattcttaggaccgttggtcacagttg

SEQ ID NO: 456209 - DNA, 30 bp, Artificial Sequence
  Synthetic oligonucleotide
atacaacttttcgactcgcggagacagttg

SEQ ID NO: 456210 - DNA, 30 bp, Artificial Sequence
  Synthetic oligonucleotide
ccgggcatcgaggagtaacgtttacagttg

SEQ ID NO: 456211 - DNA, 30 bp, Artificial Sequence
  Synthetic oligonucleotide
ccacctacagggctgctagcgttgcagttg

SEQ ID NO: 456212 - DNA, 30 bp, Artificial Sequence
  Synthetic oligonucleotide
taggccctgcatggaggcatgcatcagttg

SEQ ID NO: 456213 - DNA, 30 bp, Artificial Sequence
  Synthetic oligonucleotide
taatatcactaggcccagccaccagagttg

SEQ ID NO: 456214 - DNA, 30 bp, Artificial Sequence
  Synthetic oligonucleotide
atcaccttatagtatcctggcgccgagttg

SEQ ID NO: 456215 - DNA, 30 bp, Artificial Sequence
  Synthetic oligonucleotide
ctgcacacaaaatcggttggtggcgagttg

SEQ ID NO: 456216 - DNA, 30 bp, Artificial Sequence
  Synthetic oligonucleotide
aatcttatctcctttggagtccaggagttg

SEQ ID NO: 456217 - DNA, 30 bp, Artificial Sequence
  Synthetic oligonucleotide
gacgaatacagtgggtatgtctctgagttg

SEQ ID NO: 456218 - DNA, 30 bp, Artificial Sequence
  Synthetic oligonucleotide
gtttaaatatccttttaggggcgtgagttg

SEQ ID NO: 456219 - DNA, 30 bp, Artificial Sequence
  Synthetic oligonucleotide
ccgcttacccgtagtagttggtaatagttg

SEQ ID NO: 456220 - DNA, 30 bp, Artificial Sequence
  Synthetic oligonucleotide
ctgtgcgtgacacggttagtccactagttg

SEQ ID NO: 456221 - DNA, 30 bp, Artificial Sequence
  Synthetic oligonucleotide
ttcatattttcgacatcccttacctagttg

SEQ ID NO: 456222 - DNA, 30 bp, Artificial Sequence
  Synthetic oligonucleotide
cggtggatccatagatccaaattgtagttg

SEQ ID NO: 456223 - DNA, 30 bp, Artificial Sequence
  Synthetic oligonucleotide
ctaagataggcgctattcttagcaacgttg

SEQ ID NO: 456224 - DNA, 30 bp, Artificial Sequence
  Synthetic oligonucleotide
ttcggattctactaacctaattgaacgttg

SEQ ID NO: 456225 - DNA, 30 bp, Artificial Sequence
  Synthetic oligonucleotide
gcttgtggggtaagttattcgtgcacgttg

SEQ ID NO: 456226 - DNA, 30 bp, Artificial Sequence
  Synthetic oligonucleotide
tgtgaccgatcctatgcagcaaggacgttg

SEQ ID NO: 456227 - DNA, 30 bp, Artificial Sequence
  Synthetic oligonucleotide
ctcgtaggacctgatatgcattggacgttg

SEQ ID NO: 456228 - DNA, 30 bp, Artificial Sequence
  Synthetic oligonucleotide
caatttaggttgcaccgccttcttacgttg

SEQ ID NO: 456229 - DNA, 30 bp, Artificial Sequence
  Synthetic oligonucleotide
acaactgattatgcgctcaatggcccgttg

SEQ ID NO: 456230 - DNA, 30 bp, Artificial Sequence
  Synthetic oligonucleotide
atttgtattttcatgcctgtgcctccgttg

SEQ ID NO: 456231 - DNA, 30 bp, Artificial Sequence
  Synthetic oligonucleotide
tcaactgtatattactggttgaaagcgttg

SEQ ID NO: 456232 - DNA, 30 bp, Artificial Sequence
  Synthetic oligonucleotide
tttcgagttacatctgccaagcacgcgttg

SEQ ID NO: 456233 - DNA, 30 bp, Artificial Sequence
  Synthetic oligonucleotide
tgggggttaaaaaatatatgggccgcgttg

SEQ ID NO: 456234 - DNA, 30 bp, Artificial Sequence
  Synthetic oligonucleotide
tatgtgaaattcctttcccgccaggcgttg

SEQ ID NO: 456235 - DNA, 30 bp, Artificial Sequence
  Synthetic oligonucleotide
gagactcttgctgggattcgctgctcgttg

SEQ ID NO: 456236 - DNA, 30 bp, Artificial Sequence
  Synthetic oligonucleotide
gaaccgtgtcaagatatatcttgctcgttg

SEQ ID NO: 456237 - DNA, 30 bp, Artificial Sequence
  Synthetic oligonucleotide
ttcctccacacctctttacagggttcgttg

SEQ ID NO: 456238 - DNA, 30 bp, Artificial Sequence
  Synthetic oligonucleotide
acctgcgtaattatacaacttacaaggttg

SEQ ID NO: 456239 - DNA, 30 bp, Artificial Sequence
  Synthetic oligonucleotide
gagggtactgacggtcttcttcgcaggttg

SEQ ID NO: 456240 - DNA, 30 bp, Artificial Sequence
  Synthetic oligonucleotide
ccctctcgtaatgcggattaacagaggttg

SEQ ID NO: 456241 - DNA, 30 bp, Artificial Sequence
  Synthetic oligonucleotide
tattgcgtgtacgggctgtaccggaggttg

SEQ ID NO: 456242 - DNA, 30 bp, Artificial Sequence
  Synthetic oligonucleotide
aggcggtgccgacagccgcttcataggttg

SEQ ID NO: 456243 - DNA, 30 bp, Artificial Sequence
  Synthetic oligonucleotide
agaggagtctaaagtcctcttacacggttg

SEQ ID NO: 456244 - DNA, 30 bp, Artificial Sequence
  Synthetic oligonucleotide
cgggcaccccagtgccctaaaatacggttg

SEQ ID NO: 456245 - DNA, 30 bp, Artificial Sequence
  Synthetic oligonucleotide
agatgcttctcgtttggggtaactcggttg

SEQ ID NO: 456246 - DNA, 30 bp, Artificial Sequence
  Synthetic oligonucleotide
gggatagtcttttcccaaccatgagggttg

SEQ ID NO: 456247 - DNA, 30 bp, Artificial Sequence
  Synthetic oligonucleotide
tacccccttatataacagttaatcgggttg

SEQ ID NO: 456248 - DNA, 30 bp, Artificial Sequence
  Synthetic oligonucleotide
agattgtaagtctttcacctagtcgggttg

SEQ ID NO: 456249 - DNA, 30 bp, Artificial Sequence
  Synthetic oligonucleotide
ttgatttctgagaaaattgtggaggggttg

SEQ ID NO: 456250 - DNA, 30 bp, Artificial Sequence
  Synthetic oligonucleotide
agagggctactttctaccttacgggggttg

SEQ ID NO: 456251 - DNA, 30 bp, Artificial Sequence
  Synthetic oligonucleotide
gaagttatcaggcgccccaagggggggttg

SEQ ID NO: 456252 - DNA, 30 bp, Artificial Sequence
  Synthetic oligonucleotide
aaccagctagtaattgtcgccttggggttg

SEQ ID NO: 456253 - DNA, 30 bp, Artificial Sequence
  Synthetic oligonucleotide
aatttgtaacaacctccgaggtactggttg

SEQ ID NO: 456254 - DNA, 30 bp, Artificial Sequence
  Synthetic oligonucleotide
gtccgattcctggtgttttacttaatgttg

SEQ ID NO: 456255 - DNA, 30 bp, Artificial Sequence
  Synthetic oligonucleotide
cgcgggcgaatgtcagcgttttaactgttg

SEQ ID NO: 456256 - DNA, 30 bp, Artificial Sequence
  Synthetic oligonucleotide
tattgttcttctaagccatttatcctgttg

SEQ ID NO: 456257 - DNA, 30 bp, Artificial Sequence
  Synthetic oligonucleotide
taggatgccacagcagtaaacgtagtgttg

SEQ ID NO: 456258 - DNA, 31 bp, Artificial Sequence
  Synthetic oligonucleotide
attaggcacacggaacctactaaacgtgttg

SEQ ID NO: 456259 - DNA, 30 bp, Artificial Sequence
  Synthetic oligonucleotide
ctgagttcacccctgacaagcattgtgttg

SEQ ID NO: 456260 - DNA, 30 bp, Artificial Sequence
  Synthetic oligonucleotide
aacaccttgggaagatcgtacacattgttg

SEQ ID NO: 456261 - DNA, 30 bp, Artificial Sequence
  Synthetic oligonucleotide
tttgcgttaggtacgtgtacggtattgttg

SEQ ID NO: 456262 - DNA, 30 bp, Artificial Sequence
  Synthetic oligonucleotide
cgcattgtatctgcctgcgtaacgttgttg

SEQ ID NO: 456263 - DNA, 30 bp, Artificial Sequence
  Synthetic oligonucleotide
gttataggcggtaatatcgggtttttgttg

SEQ ID NO: 456264 - DNA, 30 bp, Artificial Sequence
  Synthetic oligonucleotide
gttaaagcctgttctaagttgcaaaatttg

SEQ ID NO: 456265 - DNA, 30 bp, Artificial Sequence
  Synthetic oligonucleotide
cttccggctattgtttcatgaagcaatttg

SEQ ID NO: 456266 - DNA, 30 bp, Artificial Sequence
  Synthetic oligonucleotide
taggcccaaagtgctggtttgggcaatttg

SEQ ID NO: 456267 - DNA, 30 bp, Artificial Sequence
  Synthetic oligonucleotide
taggaaagtaactgggaatatgcgaatttg

SEQ ID NO: 456268 - DNA, 30 bp, Artificial Sequence
  Synthetic oligonucleotide
tccaatgatattcttaacaagagtaatttg

SEQ ID NO: 456269 - DNA, 30 bp, Artificial Sequence
  Synthetic oligonucleotide
atatgacgggtatcatgatcgaggcatttg

SEQ ID NO: 456270 - DNA, 29 bp, Artificial Sequence
  Synthetic oligonucleotide
atgtgatatatatgggattcaatcatttg

SEQ ID NO: 456271 - DNA, 30 bp, Artificial Sequence
  Synthetic oligonucleotide
aaaatgtggtccttcttcggtagtcatttg

SEQ ID NO: 456272 - DNA, 30 bp, Artificial Sequence
  Synthetic oligonucleotide
tggcgcgaatacgcagccgcccttcatttg

SEQ ID NO: 456273 - DNA, 30 bp, Artificial Sequence
  Synthetic oligonucleotide
ctgtaggtttgcaagagtaaggttcatttg

SEQ ID NO: 456274 - DNA, 30 bp, Artificial Sequence
  Synthetic oligonucleotide
attattacaaaatctgatttaagagatttg

SEQ ID NO: 456275 - DNA, 30 bp, Artificial Sequence
  Synthetic oligonucleotide
gtttaagagattgtggcgagtatagatttg

SEQ ID NO: 456276 - DNA, 30 bp, Artificial Sequence
  Synthetic oligonucleotide
ggagagccggagccaaatacctacgatttg

SEQ ID NO: 456277 - DNA, 30 bp, Artificial Sequence
  Synthetic oligonucleotide
taatcgagggagcagaagcgcttcgatttg

SEQ ID NO: 456278 - DNA, 30 bp, Artificial Sequence
  Synthetic oligonucleotide
gaagcagtaattggggtccgggcggatttg

SEQ ID NO: 456279 - DNA, 30 bp, Artificial Sequence
  Synthetic oligonucleotide
gctaaccgtatacggccttcttctgatttg

SEQ ID NO: 456280 - DNA, 30 bp, Artificial Sequence
  Synthetic oligonucleotide
tatctggtgcgtgtgtataatatatatttg

SEQ ID NO: 456281 - DNA, 30 bp, Artificial Sequence
  Synthetic oligonucleotide
tatgctggtttacaaacgtatctatatttg

SEQ ID NO: 456282 - DNA, 30 bp, Artificial Sequence
  Synthetic oligonucleotide
tatcagaattctggcacactgttatatttg

SEQ ID NO: 456283 - DNA, 30 bp, Artificial Sequence
  Synthetic oligonucleotide
gaagcagtagtaagctcctcatgctatttg

SEQ ID NO: 456284 - DNA, 30 bp, Artificial Sequence
  Synthetic oligonucleotide
tgcgggtacctgtatcgtgtggcgtatttg

SEQ ID NO: 456285 - DNA, 30 bp, Artificial Sequence
  Synthetic oligonucleotide
gtttttggagatattcgacatgcgtatttg

SEQ ID NO: 456286 - DNA, 30 bp, Artificial Sequence
  Synthetic oligonucleotide
ggaaccttcatatgggtaacatattatttg

SEQ ID NO: 456287 - DNA, 30 bp, Artificial Sequence
  Synthetic oligonucleotide
tagacccggacgcgctctggtcgttatttg

SEQ ID NO: 456288 - DNA, 30 bp, Artificial Sequence
  Synthetic oligonucleotide
gccgcgttatcacttgataccttttatttg

SEQ ID NO: 456289 - DNA, 30 bp, Artificial Sequence
  Synthetic oligonucleotide
acgcgatacgcacttaacgcaggaactttg

SEQ ID NO: 456290 - DNA, 30 bp, Artificial Sequence
  Synthetic oligonucleotide
tcgaatcgttggcgagcctgtgtcactttg

SEQ ID NO: 456291 - DNA, 30 bp, Artificial Sequence
  Synthetic oligonucleotide
caaagtaacatatggttctattggactttg

SEQ ID NO: 456292 - DNA, 30 bp, Artificial Sequence
  Synthetic oligonucleotide
aataggtagagaaaagacgcttggactttg

SEQ ID NO: 456293 - DNA, 30 bp, Artificial Sequence
  Synthetic oligonucleotide
ttaatgttggcgggatcgcgttatactttg

SEQ ID NO: 456294 - DNA, 30 bp, Artificial Sequence
  Synthetic oligonucleotide
atactactccaagggcggagaaaacctttg

SEQ ID NO: 456295 - DNA, 30 bp, Artificial Sequence
  Synthetic oligonucleotide
aataggggtcttccatagaggacacctttg

SEQ ID NO: 456296 - DNA, 30 bp, Artificial Sequence
  Synthetic oligonucleotide
aaaggttaatccccagtatttgggcctttg

SEQ ID NO: 456297 - DNA, 30 bp, Artificial Sequence
  Synthetic oligonucleotide
tacactaattattctttgttgcctcctttg

SEQ ID NO: 456298 - DNA, 30 bp, Artificial Sequence
  Synthetic oligonucleotide
ggtgggtaagttctcctcctgggtcctttg

SEQ ID NO: 456299 - DNA, 30 bp, Artificial Sequence
  Synthetic oligonucleotide
ctgtcacaattatccacagggcttcctttg

SEQ ID NO: 456300 - DNA, 30 bp, Artificial Sequence
  Synthetic oligonucleotide
gataacactttcaaactcgggtttcctttg

SEQ ID NO: 456301 - DNA, 30 bp, Artificial Sequence
  Synthetic oligonucleotide
atctgtagcctttatgcgaccgtcgctttg

SEQ ID NO: 456302 - DNA, 30 bp, Artificial Sequence
  Synthetic oligonucleotide
agtggcacggcaattccgcgggcatctttg

SEQ ID NO: 456303 - DNA, 30 bp, Artificial Sequence
  Synthetic oligonucleotide
cgaccagttcaaagatgcacactatctttg

SEQ ID NO: 456304 - DNA, 30 bp, Artificial Sequence
  Synthetic oligonucleotide
ttttaacaagcaataagggatgcctctttg

SEQ ID NO: 456305 - DNA, 30 bp, Artificial Sequence
  Synthetic oligonucleotide
ataataaatctcaatattcgattctctttg

SEQ ID NO: 456306 - DNA, 30 bp, Artificial Sequence
  Synthetic oligonucleotide
tttcgatagaagggcacgtggttttctttg

SEQ ID NO: 456307 - DNA, 30 bp, Artificial Sequence
  Synthetic oligonucleotide
tctgcgcgcgatagtacaaagggaagtttg

SEQ ID NO: 456308 - DNA, 30 bp, Artificial Sequence
  Synthetic oligonucleotide
atagctgtcactaaacactctaccagtttg

SEQ ID NO: 456309 - DNA, 30 bp, Artificial Sequence
  Synthetic oligonucleotide
cacttactaggcagcactccgtgcagtttg

SEQ ID NO: 456310 - DNA, 30 bp, Artificial Sequence
  Synthetic oligonucleotide
tcgcctagcgtgccgagatagacgagtttg

SEQ ID NO: 456311 - DNA, 30 bp, Artificial Sequence
  Synthetic oligonucleotide
gctactgaatttacatcattgtatagtttg

SEQ ID NO: 456312 - DNA, 30 bp, Artificial Sequence
  Synthetic oligonucleotide
gggatacgcgcggcgtagggggctagtttg

SEQ ID NO: 456313 - DNA, 30 bp, Artificial Sequence
  Synthetic oligonucleotide
taacggacccgtgttcgcaaatctagtttg

SEQ ID NO: 456314 - DNA, 30 bp, Artificial Sequence
  Synthetic oligonucleotide
tgaagatatgcgcgtgcgctttttagtttg

SEQ ID NO: 456315 - DNA, 30 bp, Artificial Sequence
  Synthetic oligonucleotide
tagcgttctctcaatagcataatacgtttg

SEQ ID NO: 456316 - DNA, 30 bp, Artificial Sequence
  Synthetic oligonucleotide
gcaaaaccttactccgaagttggccgtttg

SEQ ID NO: 456317 - DNA, 30 bp, Artificial Sequence
  Synthetic oligonucleotide
tagcgtttctgaattagactacagcgtttg

SEQ ID NO: 456318 - DNA, 30 bp, Artificial Sequence
  Synthetic oligonucleotide
gctcccgcgaataggcggttgtgtcgtttg

SEQ ID NO: 456319 - DNA, 30 bp, Artificial Sequence
  Synthetic oligonucleotide
tatccatgttagcccaaaaacattcgtttg

SEQ ID NO: 456320 - DNA, 30 bp, Artificial Sequence
  Synthetic oligonucleotide
cgcgcaactattcacgcatttataggtttg

SEQ ID NO: 456321 - DNA, 30 bp, Artificial Sequence
  Synthetic oligonucleotide
ggagtgtagataacggatgggtccggtttg

SEQ ID NO: 456322 - DNA, 30 bp, Artificial Sequence
  Synthetic oligonucleotide
gtatttgtcaacctcttagtgggcggtttg

SEQ ID NO: 456323 - DNA, 30 bp, Artificial Sequence
  Synthetic oligonucleotide
gcgccagctgctcctgtggttgcgggtttg

SEQ ID NO: 456324 - DNA, 30 bp, Artificial Sequence
  Synthetic oligonucleotide
ttaggtaataggtgagtatgacgtggtttg

SEQ ID NO: 456325 - DNA, 30 bp, Artificial Sequence
  Synthetic oligonucleotide
ccactacaacaagctgcaacttggtgtttg

SEQ ID NO: 456326 - DNA, 30 bp, Artificial Sequence
  Synthetic oligonucleotide
gctatcggcgggttgcggtaatcttgtttg

SEQ ID NO: 456327 - DNA, 30 bp, Artificial Sequence
  Synthetic oligonucleotide
cgcctgagctgttcatggctcttttgtttg

SEQ ID NO: 456328 - DNA, 30 bp, Artificial Sequence
  Synthetic oligonucleotide
agttgacatggggtatattagggcattttg

SEQ ID NO: 456329 - DNA, 30 bp, Artificial Sequence
  Synthetic oligonucleotide
gcgttttgattatacatatcttttattttg

SEQ ID NO: 456330 - DNA, 30 bp, Artificial Sequence
  Synthetic oligonucleotide
tcgtagctcagcactaacgctccacttttg

SEQ ID NO: 456331 - DNA, 30 bp, Artificial Sequence
  Synthetic oligonucleotide
gagtaacgacgatcagcagggggacttttg

SEQ ID NO: 456332 - DNA, 30 bp, Artificial Sequence
  Synthetic oligonucleotide
gggacgtcttgaagagtagctgcgcttttg

SEQ ID NO: 456333 - DNA, 30 bp, Artificial Sequence
  Synthetic oligonucleotide
attcatatggtaacgattatcgatcttttg

SEQ ID NO: 456334 - DNA, 30 bp, Artificial Sequence
  Synthetic oligonucleotide
tggtcgctgatccatagggatgctcttttg

SEQ ID NO: 456335 - DNA, 30 bp, Artificial Sequence
  Synthetic oligonucleotide
ccgtggtggtcgatccaacaataagttttg

SEQ ID NO: 456336 - DNA, 30 bp, Artificial Sequence
  Synthetic oligonucleotide
atccagttttaggattcagggagagttttg

SEQ ID NO: 456337 - DNA, 30 bp, Artificial Sequence
  Synthetic oligonucleotide
gcaggtggattggagtctactgcggttttg

SEQ ID NO: 456338 - DNA, 30 bp, Artificial Sequence
  Synthetic oligonucleotide
cctacggtgctaaattccaacagggttttg

SEQ ID NO: 456339 - DNA, 30 bp, Artificial Sequence
  Synthetic oligonucleotide
gattattccgagtcagggtatagggttttg

SEQ ID NO: 456340 - DNA, 30 bp, Artificial Sequence
  Synthetic oligonucleotide
ccagaaccgcaaggcaaacattatgttttg

SEQ ID NO: 456341 - DNA, 30 bp, Artificial Sequence
  Synthetic oligonucleotide
aatttttgttgaaccgactgcattgttttg

SEQ ID NO: 456342 - DNA, 30 bp, Artificial Sequence
  Synthetic oligonucleotide
gaaacagtagataaagacacgtgatttttg

SEQ ID NO: 456343 - DNA, 30 bp, Artificial Sequence
  Synthetic oligonucleotide
aattgcggggggtgttgtgatcgctttttg

SEQ ID NO: 456344 - DNA, 30 bp, Artificial Sequence
  Synthetic oligonucleotide
gtatcttggttgaagatttacctctttttg

SEQ ID NO: 456345 - DNA, 30 bp, Artificial Sequence
  Synthetic oligonucleotide
gccgccggcgtgcatgcggtagagtttttg

SEQ ID NO: 456346 - DNA, 30 bp, Artificial Sequence
  Synthetic oligonucleotide
ggcagcgagcgtagatagccaaaaaaaaat

SEQ ID NO: 456347 - DNA, 30 bp, Artificial Sequence
  Synthetic oligonucleotide
attatcagtggttcagatagcgcaaaaaat

SEQ ID NO: 456348 - DNA, 30 bp, Artificial Sequence
  Synthetic oligonucleotide
tctgaatgttgtgatcacaacgtcaaaaat

SEQ ID NO: 456349 - DNA, 30 bp, Artificial Sequence
  Synthetic oligonucleotide
ttattgatgttgagatagacccagaaaaat

SEQ ID NO: 456350 - DNA, 30 bp, Artificial Sequence
  Synthetic oligonucleotide
gaaatatgtgaagcggggaattggaaaaat

SEQ ID NO: 456351 - DNA, 30 bp, Artificial Sequence
  Synthetic oligonucleotide
gccagtgtaccatgtgtgtatatgaaaaat

SEQ ID NO: 456352 - DNA, 30 bp, Artificial Sequence
  Synthetic oligonucleotide
tagtaatcaaaaagagggttgaataaaaat

SEQ ID NO: 456353 - DNA, 30 bp, Artificial Sequence
  Synthetic oligonucleotide
aattcactctgtgatgtaggtactaaaaat

SEQ ID NO: 456354 - DNA, 30 bp, Artificial Sequence
  Synthetic oligonucleotide
gtgaaaacttcgcatttagtcagtaaaaat

SEQ ID NO: 456355 - DNA, 30 bp, Artificial Sequence
  Synthetic oligonucleotide
gtccccctctggcatatgcttggtaaaaat

SEQ ID NO: 456356 - DNA, 30 bp, Artificial Sequence
  Synthetic oligonucleotide
aggtagttactcgttattcagtgtaaaaat

SEQ ID NO: 456357 - DNA, 30 bp, Artificial Sequence
  Synthetic oligonucleotide
cattgtgccgcgttcacacaggcacaaaat

SEQ ID NO: 456358 - DNA, 30 bp, Artificial Sequence
  Synthetic oligonucleotide
agatttgtttgcgatttttcttcacaaaat

SEQ ID NO: 456359 - DNA, 30 bp, Artificial Sequence
  Synthetic oligonucleotide
gttcccgtgttcgagcgatatgaccaaaat

SEQ ID NO: 456360 - DNA, 30 bp, Artificial Sequence
  Synthetic oligonucleotide
cgctgttctgcacgctgattgcgccaaaat

SEQ ID NO: 456361 - DNA, 30 bp, Artificial Sequence
  Synthetic oligonucleotide
atgctatcagaccaccctgtactccaaaat

SEQ ID NO: 456362 - DNA, 30 bp, Artificial Sequence
  Synthetic oligonucleotide
taatagtgtgcgagggtccgtaagcaaaat

SEQ ID NO: 456363 - DNA, 30 bp, Artificial Sequence
  Synthetic oligonucleotide
tcggaggtttacgaacgactgtagcaaaat

SEQ ID NO: 456364 - DNA, 30 bp, Artificial Sequence
  Synthetic oligonucleotide
aaattgtaatggcccggttggcatcaaaat

SEQ ID NO: 456365 - DNA, 30 bp, Artificial Sequence
  Synthetic oligonucleotide
ggcaggttttacctccgccattatcaaaat

SEQ ID NO: 456366 - DNA, 30 bp, Artificial Sequence
  Synthetic oligonucleotide
gaggggacgtgcacaactaaatctcaaaat

SEQ ID NO: 456367 - DNA, 30 bp, Artificial Sequence
  Synthetic oligonucleotide
gtcaagggtcgagactcctactgtcaaaat

SEQ ID NO: 456368 - DNA, 30 bp, Artificial Sequence
  Synthetic oligonucleotide
tttcatcaagccagggggcgccccgaaaat

SEQ ID NO: 456369 - DNA, 30 bp, Artificial Sequence
  Synthetic oligonucleotide
gctgacgctttggacttaggatccgaaaat

SEQ ID NO: 456370 - DNA, 30 bp, Artificial Sequence
  Synthetic oligonucleotide
ggagcctttatttagtcgtaccgcgaaaat

SEQ ID NO: 456371 - DNA, 30 bp, Artificial Sequence
  Synthetic oligonucleotide
aggttctacgagaaccggctgtgcgaaaat

SEQ ID NO: 456372 - DNA, 30 bp, Artificial Sequence
  Synthetic oligonucleotide
tgatgagtgtcattttataacacggaaaat

SEQ ID NO: 456373 - DNA, 30 bp, Artificial Sequence
  Synthetic oligonucleotide
ccgctaggactttcagttacagcggaaaat

SEQ ID NO: 456374 - DNA, 30 bp, Artificial Sequence
  Synthetic oligonucleotide
tttcgcgtgacggtttcgaacatggaaaat

SEQ ID NO: 456375 - DNA, 30 bp, Artificial Sequence
  Synthetic oligonucleotide
atcttcatggcgacagttagtaatgaaaat

SEQ ID NO: 456376 - DNA, 30 bp, Artificial Sequence
  Synthetic oligonucleotide
ttcttaggcatccgagattcctatgaaaat

SEQ ID NO: 456377 - DNA, 30 bp, Artificial Sequence
  Synthetic oligonucleotide
cgacaccgagagctacatcgggcataaaat

SEQ ID NO: 456378 - DNA, 30 bp, Artificial Sequence
  Synthetic oligonucleotide
aacttgggaatcaatgttctcggataaaat

SEQ ID NO: 456379 - DNA, 30 bp, Artificial Sequence
  Synthetic oligonucleotide
ggacaccttgataggagcaatatataaaat

SEQ ID NO: 456380 - DNA, 30 bp, Artificial Sequence
  Synthetic oligonucleotide
tacttgaaacactctgtttctctataaaat

SEQ ID NO: 456381 - DNA, 30 bp, Artificial Sequence
  Synthetic oligonucleotide
ttcctttacggggacctattgtgctaaaat

SEQ ID NO: 456382 - DNA, 30 bp, Artificial Sequence
  Synthetic oligonucleotide
cgatgacggacctgagctcaagggtaaaat

SEQ ID NO: 456383 - DNA, 30 bp, Artificial Sequence
  Synthetic oligonucleotide
ctgtagtcgcacacatactgacattaaaat

SEQ ID NO: 456384 - DNA, 30 bp, Artificial Sequence
  Synthetic oligonucleotide
ttagttgatttacacgttgtcacttaaaat

SEQ ID NO: 456385 - DNA, 30 bp, Artificial Sequence
  Synthetic oligonucleotide
agatctcgataaatccgccgggcttaaaat

SEQ ID NO: 456386 - DNA, 30 bp, Artificial Sequence
  Synthetic oligonucleotide
ttatctatatggctgcgagatgtttaaaat

SEQ ID NO: 456387 - DNA, 30 bp, Artificial Sequence
  Synthetic oligonucleotide
aatctgtgcgtccaacgtttagcaacaaat

SEQ ID NO: 456388 - DNA, 30 bp, Artificial Sequence
  Synthetic oligonucleotide
tggatctgtaactatagcgttgtcacaaat

SEQ ID NO: 456389 - DNA, 30 bp, Artificial Sequence
  Synthetic oligonucleotide
tgtgtgtcgcgtaagcaaaggttcacaaat

SEQ ID NO: 456390 - DNA, 30 bp, Artificial Sequence
  Synthetic oligonucleotide
tcctcacttgttgcaaccgatcagacaaat

SEQ ID NO: 456391 - DNA, 30 bp, Artificial Sequence
  Synthetic oligonucleotide
acagtaattaaaggaggcggcacgacaaat

SEQ ID NO: 456392 - DNA, 30 bp, Artificial Sequence
  Synthetic oligonucleotide
aatgtgggtattgtagagataaggacaaat

SEQ ID NO: 456393 - DNA, 30 bp, Artificial Sequence
  Synthetic oligonucleotide
ctgctaggcctcgccaaagtcaatacaaat

SEQ ID NO: 456394 - DNA, 30 bp, Artificial Sequence
  Synthetic oligonucleotide
ccctacgatttagttcgagggaatacaaat

SEQ ID NO: 456395 - DNA, 30 bp, Artificial Sequence
  Synthetic oligonucleotide
ggtctagcagcaaaacgggagcgtacaaat

SEQ ID NO: 456396 - DNA, 30 bp, Artificial Sequence
  Synthetic oligonucleotide
ggcaaagctgatccccgtgagcccccaaat

SEQ ID NO: 456397 - DNA, 30 bp, Artificial Sequence
  Synthetic oligonucleotide
aaccgatgagaatattctccgcctccaaat

SEQ ID NO: 456398 - DNA, 30 bp, Artificial Sequence
  Synthetic oligonucleotide
taattctatcatggggcctaggtcgcaaat

SEQ ID NO: 456399 - DNA, 30 bp, Artificial Sequence
  Synthetic oligonucleotide
cacaatgaaccgtgtccgtgcacggcaaat

SEQ ID NO: 456400 - DNA, 30 bp, Artificial Sequence
  Synthetic oligonucleotide
tgcgctactgcccgtggttccgcggcaaat

SEQ ID NO: 456401 - DNA, 30 bp, Artificial Sequence
  Synthetic oligonucleotide
ctcatttcaacgtagttcttacgggcaaat

SEQ ID NO: 456402 - DNA, 30 bp, Artificial Sequence
  Synthetic oligonucleotide
agtgcttttagagttgattgactggcaaat

SEQ ID NO: 456403 - DNA, 30 bp, Artificial Sequence
  Synthetic oligonucleotide
gaagataactgttcattgtccaatgcaaat

SEQ ID NO: 456404 - DNA, 30 bp, Artificial Sequence
  Synthetic oligonucleotide
ctgtatgactatacatgttatactgcaaat

SEQ ID NO: 456405 - DNA, 30 bp, Artificial Sequence
  Synthetic oligonucleotide
tatacttttttgcgatgatctcttgcaaat

SEQ ID NO: 456406 - DNA, 30 bp, Artificial Sequence
  Synthetic oligonucleotide
taaaagttccgaagcgatttcgaatcaaat

SEQ ID NO: 456407 - DNA, 30 bp, Artificial Sequence
  Synthetic oligonucleotide
aagcaattcctgctatgatcatcatcaaat

SEQ ID NO: 456408 - DNA, 30 bp, Artificial Sequence
  Synthetic oligonucleotide
gtggagttacatatgctttgcaggtcaaat

SEQ ID NO: 456409 - DNA, 30 bp, Artificial Sequence
  Synthetic oligonucleotide
gatatagctgacaatcctggggtgtcaaat

SEQ ID NO: 456410 - DNA, 30 bp, Artificial Sequence
  Synthetic oligonucleotide
tactgaaagtgtgaagatcactcttcaaat

SEQ ID NO: 456411 - DNA, 30 bp, Artificial Sequence
  Synthetic oligonucleotide
caatatagaataaatgtcactttttcaaat

SEQ ID NO: 456412 - DNA, 30 bp, Artificial Sequence
  Synthetic oligonucleotide
cgtgacgaagcccaggtgggctgaagaaat

SEQ ID NO: 456413 - DNA, 30 bp, Artificial Sequence
  Synthetic oligonucleotide
ggtatgcgaacgtagtgccgacgcagaaat

SEQ ID NO: 456414 - DNA, 30 bp, Artificial Sequence
  Synthetic oligonucleotide
tcgagctaaactgcatgccgtggcagaaat

SEQ ID NO: 456415 - DNA, 30 bp, Artificial Sequence
  Synthetic oligonucleotide
tgccccttctgggattccgcctctagaaat

SEQ ID NO: 456416 - DNA, 30 bp, Artificial Sequence
  Synthetic oligonucleotide
gagtagcgggcaaagttttgagcccgaaat

SEQ ID NO: 456417 - DNA, 30 bp, Artificial Sequence
  Synthetic oligonucleotide
atccgctgttgccacgtcaacggccgaaat

SEQ ID NO: 456418 - DNA, 30 bp, Artificial Sequence
  Synthetic oligonucleotide
ctatgcctgggaaagtcccccgcgcgaaat

SEQ ID NO: 456419 - DNA, 30 bp, Artificial Sequence
  Synthetic oligonucleotide
ttcgactaggttagatattatgggcgaaat

SEQ ID NO: 456420 - DNA, 30 bp, Artificial Sequence
  Synthetic oligonucleotide
aagggtttcgattcttcccttttgcgaaat

SEQ ID NO: 456421 - DNA, 30 bp, Artificial Sequence
  Synthetic oligonucleotide
ttttgcgatttcatgcgaagccatcgaaat

SEQ ID NO: 456422 - DNA, 30 bp, Artificial Sequence
  Synthetic oligonucleotide
ctatgtccgagaacgttcgctcaaggaaat

SEQ ID NO: 456423 - DNA, 30 bp, Artificial Sequence
  Synthetic oligonucleotide
cgttgaaagatggcctgtatggacggaaat

SEQ ID NO: 456424 - DNA, 30 bp, Artificial Sequence
  Synthetic oligonucleotide
ttagaagaccaccggtgtgataccggaaat

SEQ ID NO: 456425 - DNA, 30 bp, Artificial Sequence
  Synthetic oligonucleotide
ttattacctcaatggcggaagtatggaaat

SEQ ID NO: 456426 - DNA, 30 bp, Artificial Sequence
  Synthetic oligonucleotide
tttgagagaatacgataggggcgtggaaat

SEQ ID NO: 456427 - DNA, 30 bp, Artificial Sequence
  Synthetic oligonucleotide
ctacgtcggtgtcaaactccggttggaaat

SEQ ID NO: 456428 - DNA, 30 bp, Artificial Sequence
  Synthetic oligonucleotide
gttaaattgcctggggaccgctttggaaat

SEQ ID NO: 456429 - DNA, 30 bp, Artificial Sequence
  Synthetic oligonucleotide
tagaattcgggtcgttgttcatcatgaaat

SEQ ID NO: 456430 - DNA, 30 bp, Artificial Sequence
  Synthetic oligonucleotide
tcaacggtttgattttaggcaagatgaaat

SEQ ID NO: 456431 - DNA, 30 bp, Artificial Sequence
  Synthetic oligonucleotide
taaagtgtataggaactgtatagctgaaat

SEQ ID NO: 456432 - DNA, 30 bp, Artificial Sequence
  Synthetic oligonucleotide
tttacacagtgaggctttcctgagtgaaat

SEQ ID NO: 456433 - DNA, 30 bp, Artificial Sequence
  Synthetic oligonucleotide
ctcttcataaagcccgcttcatggtgaaat

SEQ ID NO: 456434 - DNA, 30 bp, Artificial Sequence
  Synthetic oligonucleotide
attgcatgggggttcagttggtggtgaaat

SEQ ID NO: 456435 - DNA, 30 bp, Artificial Sequence
  Synthetic oligonucleotide
aagtctacaattagtaaggagatgtgaaat

SEQ ID NO: 456436 - DNA, 30 bp, Artificial Sequence
  Synthetic oligonucleotide
tcggatgcacatcaacacttttattgaaat

SEQ ID NO: 456437 - DNA, 30 bp, Artificial Sequence
  Synthetic oligonucleotide
ctgttctaagatcgagagccccgttgaaat

SEQ ID NO: 456438 - DNA, 30 bp, Artificial Sequence
  Synthetic oligonucleotide
gttattgattgcgacagcgttctttgaaat

SEQ ID NO: 456439 - DNA, 30 bp, Artificial Sequence
  Synthetic oligonucleotide
tccagtgcgagtctttataacgaaataaat

SEQ ID NO: 456440 - DNA, 30 bp, Artificial Sequence
  Synthetic oligonucleotide
atttacggtgtacatgccagcggaataaat

SEQ ID NO: 456441 - DNA, 30 bp, Artificial Sequence
  Synthetic oligonucleotide
cagcatagttaatcgtatcatttaataaat

SEQ ID NO: 456442 - DNA, 30 bp, Artificial Sequence
  Synthetic oligonucleotide
aacactaccctggagtgaagccgcataaat

SEQ ID NO: 456443 - DNA, 30 bp, Artificial Sequence
  Synthetic oligonucleotide
aatctaaaatgacggcttaagcagataaat

SEQ ID NO: 456444 - DNA, 30 bp, Artificial Sequence
  Synthetic oligonucleotide
accaattgctacgcgtctaaagaactaaat

SEQ ID NO: 456445 - DNA, 30 bp, Artificial Sequence
  Synthetic oligonucleotide
ctttgcggtacagtatcttcattcctaaat

SEQ ID NO: 456446 - DNA, 30 bp, Artificial Sequence
  Synthetic oligonucleotide
tgatggacaccggggcagggcacgctaaat

SEQ ID NO: 456447 - DNA, 30 bp, Artificial Sequence
  Synthetic oligonucleotide
tgctcgcaatatttacactagaggctaaat

SEQ ID NO: 456448 - DNA, 30 bp, Artificial Sequence
  Synthetic oligonucleotide
gaaatttggacggattctcacgggctaaat

SEQ ID NO: 456449 - DNA, 30 bp, Artificial Sequence
  Synthetic oligonucleotide
gcgaactatctggctgggctgagtctaaat

SEQ ID NO: 456450 - DNA, 30 bp, Artificial Sequence
  Synthetic oligonucleotide
cgtcgcagtaattggacgtggcaagtaaat

SEQ ID NO: 456451 - DNA, 30 bp, Artificial Sequence
  Synthetic oligonucleotide
atccgtgatctcaccacacacccagtaaat

SEQ ID NO: 456452 - DNA, 30 bp, Artificial Sequence
  Synthetic oligonucleotide
gtcacgaagtgaagtcgtgtctcagtaaat

SEQ ID NO: 456453 - DNA, 30 bp, Artificial Sequence
  Synthetic oligonucleotide
tcgaccttcacgacgctgccgcccgtaaat

SEQ ID NO: 456454 - DNA, 30 bp, Artificial Sequence
  Synthetic oligonucleotide
ttatgatagtcttataaggcactcgtaaat

SEQ ID NO: 456455 - DNA, 30 bp, Artificial Sequence
  Synthetic oligonucleotide
gacatacctcactaggcgtcaattgtaaat

SEQ ID NO: 456456 - DNA, 30 bp, Artificial Sequence
  Synthetic oligonucleotide
gtcctgcgtttaaggaggacgaaattaaat

SEQ ID NO: 456457 - DNA, 30 bp, Artificial Sequence
  Synthetic oligonucleotide
cccccaatttacgttgcaacacaattaaat

SEQ ID NO: 456458 - DNA, 30 bp, Artificial Sequence
  Synthetic oligonucleotide
cgacttcagcataatctgaagagattaaat

SEQ ID NO: 456459 - DNA, 30 bp, Artificial Sequence
  Synthetic oligonucleotide
atttcaaggttcaagattgttaagttaaat

SEQ ID NO: 456460 - DNA, 30 bp, Artificial Sequence
  Synthetic oligonucleotide
gaaaggccgtgtaaatcaacgcagttaaat

SEQ ID NO: 456461 - DNA, 30 bp, Artificial Sequence
  Synthetic oligonucleotide
ttacaagtgggcaaccatcgaaggttaaat

SEQ ID NO: 456462 - DNA, 30 bp, Artificial Sequence
  Synthetic oligonucleotide
aatgctagctttctgtagtaccggttaaat

SEQ ID NO: 456463 - DNA, 30 bp, Artificial Sequence
  Synthetic oligonucleotide
attcccgtcgctttaaagtgcttgttaaat

SEQ ID NO: 456464 - DNA, 30 bp, Artificial Sequence
  Synthetic oligonucleotide
gttgggttacgagcggtagagcatttaaat

SEQ ID NO: 456465 - DNA, 30 bp, Artificial Sequence
  Synthetic oligonucleotide
tgctagaaaggaaaaaactatcctttaaat

SEQ ID NO: 456466 - DNA, 30 bp, Artificial Sequence
  Synthetic oligonucleotide
ggggggattattataagggacgctttaaat

SEQ ID NO: 456467 - DNA, 30 bp, Artificial Sequence
  Synthetic oligonucleotide
aaagctactagcggatctggcgctttaaat

SEQ ID NO: 456468 - DNA, 30 bp, Artificial Sequence
  Synthetic oligonucleotide
gagtaatgggccgtttacacgtaaaacaat

SEQ ID NO: 456469 - DNA, 30 bp, Artificial Sequence
  Synthetic oligonucleotide
agcactttaacggctctggtgtgaaacaat

SEQ ID NO: 456470 - DNA, 30 bp, Artificial Sequence
  Synthetic oligonucleotide
tacccacccgctgcggatagatccaacaat

SEQ ID NO: 456471 - DNA, 30 bp, Artificial Sequence
  Synthetic oligonucleotide
acccactcgtgcactcgcggtggcaacaat

SEQ ID NO: 456472 - DNA, 30 bp, Artificial Sequence
  Synthetic oligonucleotide
tcgtcacgtacgctggagttcccgaacaat

SEQ ID NO: 456473 - DNA, 30 bp, Artificial Sequence
  Synthetic oligonucleotide
atatctgatggctagatcggtatgaacaat

SEQ ID NO: 456474 - DNA, 30 bp, Artificial Sequence
  Synthetic oligonucleotide
caatgtcacgctgcgttacgtgataacaat

SEQ ID NO: 456475 - DNA, 30 bp, Artificial Sequence
  Synthetic oligonucleotide
cgccgttgcgtaattggactatctaacaat

SEQ ID NO: 456476 - DNA, 30 bp, Artificial Sequence
  Synthetic oligonucleotide
ggctgtgccccggagatattcggtaacaat

SEQ ID NO: 456477 - DNA, 30 bp, Artificial Sequence
  Synthetic oligonucleotide
gcatacgggctttgtgtagctatacacaat

SEQ ID NO: 456478 - DNA, 30 bp, Artificial Sequence
  Synthetic oligonucleotide
ggaaagacacggaaggatgctttacacaat

SEQ ID NO: 456479 - DNA, 30 bp, Artificial Sequence
  Synthetic oligonucleotide
acgttttccctaattttgcgtaaccacaat

SEQ ID NO: 456480 - DNA, 30 bp, Artificial Sequence
  Synthetic oligonucleotide
gacaggtgctacgcatttatggagcacaat

SEQ ID NO: 456481 - DNA, 30 bp, Artificial Sequence
  Synthetic oligonucleotide
cctttattattcctaaattcgctgcacaat

SEQ ID NO: 456482 - DNA, 30 bp, Artificial Sequence
  Synthetic oligonucleotide
gcaaccatgacaattccgtaggcagacaat

SEQ ID NO: 456483 - DNA, 30 bp, Artificial Sequence
  Synthetic oligonucleotide
attcgatgtcaattttacaccgcggacaat

SEQ ID NO: 456484 - DNA, 30 bp, Artificial Sequence
  Synthetic oligonucleotide
ggcatcctactgtggaaacctgtggacaat

SEQ ID NO: 456485 - DNA, 30 bp, Artificial Sequence
  Synthetic oligonucleotide
tcctaagcttcgcattctagcctatacaat

SEQ ID NO: 456486 - DNA, 30 bp, Artificial Sequence
  Synthetic oligonucleotide
actttcagcaattttgcctatttatacaat

SEQ ID NO: 456487 - DNA, 30 bp, Artificial Sequence
  Synthetic oligonucleotide
ttccacgacgcgtgggcgtcgtcctacaat

SEQ ID NO: 456488 - DNA, 30 bp, Artificial Sequence
  Synthetic oligonucleotide
catattcccctttacgtagagaggtacaat

SEQ ID NO: 456489 - DNA, 30 bp, Artificial Sequence
  Synthetic oligonucleotide
ttgaaatccgtatggcatgcttaaaccaat

SEQ ID NO: 456490 - DNA, 30 bp, Artificial Sequence
  Synthetic oligonucleotide
aagtgacggtacattaatcgttcaaccaat

SEQ ID NO: 456491 - DNA, 30 bp, Artificial Sequence
  Synthetic oligonucleotide
gcaaatgttgggataccataagtaaccaat

SEQ ID NO: 456492 - DNA, 30 bp, Artificial Sequence
  Synthetic oligonucleotide
tacgtcaactgaaggtgaaacagcaccaat

SEQ ID NO: 456493 - DNA, 30 bp, Artificial Sequence
  Synthetic oligonucleotide
gcgctcagtttatgatcagggcaacccaat

SEQ ID NO: 456494 - DNA, 30 bp, Artificial Sequence
  Synthetic oligonucleotide
taagttagatcatgctaccgtcaacccaat

SEQ ID NO: 456495 - DNA, 30 bp, Artificial Sequence
  Synthetic oligonucleotide
ccgttctttacagacatgctggcccccaat

SEQ ID NO: 456496 - DNA, 30 bp, Artificial Sequence
  Synthetic oligonucleotide
taaggattcttccggtggagtatccccaat

SEQ ID NO: 456497 - DNA, 30 bp, Artificial Sequence
  Synthetic oligonucleotide
tctagatgacccgatagtctctcgcccaat

SEQ ID NO: 456498 - DNA, 30 bp, Artificial Sequence
  Synthetic oligonucleotide
gtggattcacggatttcattagatcccaat

SEQ ID NO: 456499 - DNA, 30 bp, Artificial Sequence
  Synthetic oligonucleotide
gaattaaatacgataggcgcaaaagccaat

SEQ ID NO: 456500 - DNA, 30 bp, Artificial Sequence
  Synthetic oligonucleotide
agtcatttagcaggcgcggctcaagccaat

SEQ ID NO: 456501 - DNA, 30 bp, Artificial Sequence
  Synthetic oligonucleotide
tagttttgagctaatagttcgatagccaat

SEQ ID NO: 456502 - DNA, 30 bp, Artificial Sequence
  Synthetic oligonucleotide
agagtttgatatcgcagagggtcggccaat

SEQ ID NO: 456503 - DNA, 30 bp, Artificial Sequence
  Synthetic oligonucleotide
agtcgtcttatccttgacccttcggccaat

SEQ ID NO: 456504 - DNA, 30 bp, Artificial Sequence
  Synthetic oligonucleotide
tccccatctttaccggtcttcagggccaat

SEQ ID NO: 456505 - DNA, 30 bp, Artificial Sequence
  Synthetic oligonucleotide
ggaagtattaacgcacgcaaatgtgccaat

SEQ ID NO: 456506 - DNA, 30 bp, Artificial Sequence
  Synthetic oligonucleotide
gcagaacgacacggaggcaaacaatccaat

SEQ ID NO: 456507 - DNA, 30 bp, Artificial Sequence
  Synthetic oligonucleotide
gacaccccggagctagggtgacaatccaat

SEQ ID NO: 456508 - DNA, 30 bp, Artificial Sequence
  Synthetic oligonucleotide
taatcttaccttagcggacttgaatccaat

SEQ ID NO: 456509 - DNA, 30 bp, Artificial Sequence
  Synthetic oligonucleotide
aacttaatttcttgtaaaaaaccctccaat

SEQ ID NO: 456510 - DNA, 30 bp, Artificial Sequence
  Synthetic oligonucleotide
aactttgccacggccaaggctgtctccaat

SEQ ID NO: 456511 - DNA, 30 bp, Artificial Sequence
  Synthetic oligonucleotide
tcattgtacactcataagggtgtctccaat

SEQ ID NO: 456512 - DNA, 30 bp, Artificial Sequence
  Synthetic oligonucleotide
ttctatgtatagaaagcaggaaaaagcaat

SEQ ID NO: 456513 - DNA, 30 bp, Artificial Sequence
  Synthetic oligonucleotide
tgaaaatctagttggcttaactgaagcaat

SEQ ID NO: 456514 - DNA, 30 bp, Artificial Sequence
  Synthetic oligonucleotide
tacgcaccagttgaaatatggaacagcaat

SEQ ID NO: 456515 - DNA, 30 bp, Artificial Sequence
  Synthetic oligonucleotide
tgagcctatgatgtaactggtggcagcaat

SEQ ID NO: 456516 - DNA, 30 bp, Artificial Sequence
  Synthetic oligonucleotide
cctggtataagacacaaacaaaagagcaat

SEQ ID NO: 456517 - DNA, 30 bp, Artificial Sequence
  Synthetic oligonucleotide
gggctatatgtctctgtggtagggagcaat

SEQ ID NO: 456518 - DNA, 30 bp, Artificial Sequence
  Synthetic oligonucleotide
gtgagttcgggataatgcgcaagacgcaat

SEQ ID NO: 456519 - DNA, 30 bp, Artificial Sequence
  Synthetic oligonucleotide
tcgagcgcacgtgtacaggggggacgcaat

SEQ ID NO: 456520 - DNA, 30 bp, Artificial Sequence
  Synthetic oligonucleotide
gtgataaagaggagctcgccctgacgcaat

SEQ ID NO: 456521 - DNA, 30 bp, Artificial Sequence
  Synthetic oligonucleotide
aaaataatctagcgacccacaacccgcaat

SEQ ID NO: 456522 - DNA, 30 bp, Artificial Sequence
  Synthetic oligonucleotide
cccctcatgcatctatcctgttccggcaat

SEQ ID NO: 456523 - DNA, 30 bp, Artificial Sequence
  Synthetic oligonucleotide
tcgtgctgggtcgaagccggctgcggcaat

SEQ ID NO: 456524 - DNA, 30 bp, Artificial Sequence
  Synthetic oligonucleotide
atactcagtattagatctacaatcggcaat

SEQ ID NO: 456525 - DNA, 30 bp, Artificial Sequence
  Synthetic oligonucleotide
taggatcgaaaggattatagggggggcaat

SEQ ID NO: 456526 - DNA, 30 bp, Artificial Sequence
  Synthetic oligonucleotide
tactatgaccattaatcacctgatggcaat

SEQ ID NO: 456527 - DNA, 30 bp, Artificial Sequence
  Synthetic oligonucleotide
ttccgctatttcattataccaggatgcaat

SEQ ID NO: 456528 - DNA, 30 bp, Artificial Sequence
  Synthetic oligonucleotide
tgcaatacagagtgcgagacgccgtgcaat

SEQ ID NO: 456529 - DNA, 30 bp, Artificial Sequence
  Synthetic oligonucleotide
gagccgtcgacaaagcactgccattgcaat

SEQ ID NO: 456530 - DNA, 31 bp, Artificial Sequence
  Synthetic oligonucleotide
gtttggaaactgttaactaactcgttgcaat

SEQ ID NO: 456531 - DNA, 30 bp, Artificial Sequence
  Synthetic oligonucleotide
agataagtacagcccttaaagttttgcaat

SEQ ID NO: 456532 - DNA, 30 bp, Artificial Sequence
  Synthetic oligonucleotide
accccaaggaattagggttactaaatcaat

SEQ ID NO: 456533 - DNA, 30 bp, Artificial Sequence
  Synthetic oligonucleotide
aagttcatgtggctcttaatgttaatcaat

SEQ ID NO: 456534 - DNA, 30 bp, Artificial Sequence
  Synthetic oligonucleotide
cgcagatagtttatggtcagacggatcaat

SEQ ID NO: 456535 - DNA, 30 bp, Artificial Sequence
  Synthetic oligonucleotide
tggttgacaccaaatcagccatggatcaat

SEQ ID NO: 456536 - DNA, 30 bp, Artificial Sequence
  Synthetic oligonucleotide
acggcgcgccagtaccacggctcactcaat

SEQ ID NO: 456537 - DNA, 30 bp, Artificial Sequence
  Synthetic oligonucleotide
atgaatgatcagaactttactgtactcaat

SEQ ID NO: 456538 - DNA, 29 bp, Artificial Sequence
  Synthetic oligonucleotide
acccgtagttaatcaacctgaccctcaat

SEQ ID NO: 456539 - DNA, 30 bp, Artificial Sequence
  Synthetic oligonucleotide
atatcccatgcatactcacgccggctcaat

SEQ ID NO: 456540 - DNA, 30 bp, Artificial Sequence
  Synthetic oligonucleotide
ggtttgggggggcgttcccacgggctcaat

SEQ ID NO: 456541 - DNA, 30 bp, Artificial Sequence
  Synthetic oligonucleotide
aatggccaagaccatggcggtctgctcaat

SEQ ID NO: 456542 - DNA, 30 bp, Artificial Sequence
  Synthetic oligonucleotide
aataaaacgatcccggtatacgatctcaat

SEQ ID NO: 456543 - DNA, 30 bp, Artificial Sequence
  Synthetic oligonucleotide
tacatgtcgggagctgctactcgtctcaat

SEQ ID NO: 456544 - DNA, 33 bp, Artificial Sequence
  Synthetic oligonucleotide
caatcacgcttcgcgtggccgcttattctcaat

SEQ ID NO: 456545 - DNA, 30 bp, Artificial Sequence
  Synthetic oligonucleotide
cctgacaggtcaatgacatatccagtcaat

SEQ ID NO: 456546 - DNA, 30 bp, Artificial Sequence
  Synthetic oligonucleotide
gtctctgcgacgtcattggcgggagtcaat

SEQ ID NO: 456547 - DNA, 30 bp, Artificial Sequence
  Synthetic oligonucleotide
cacgctcaggctaggtgaatactagtcaat

SEQ ID NO: 456548 - DNA, 30 bp, Artificial Sequence
  Synthetic oligonucleotide
attggggcccacgctcattacatggtcaat

SEQ ID NO: 456549 - DNA, 30 bp, Artificial Sequence
  Synthetic oligonucleotide
gaaacttaactcattcgtaccgctgtcaat

SEQ ID NO: 456550 - DNA, 30 bp, Artificial Sequence
  Synthetic oligonucleotide
tcgggcgtattccacgcccgaagtgtcaat

SEQ ID NO: 456551 - DNA, 30 bp, Artificial Sequence
  Synthetic oligonucleotide
attgaggattcgcgttcactatgattcaat

SEQ ID NO: 456552 - DNA, 30 bp, Artificial Sequence
  Synthetic oligonucleotide
cctcggggtacttggccacaccccttcaat

SEQ ID NO: 456553 - DNA, 30 bp, Artificial Sequence
  Synthetic oligonucleotide
cctagtaaattggcttgaggtagcttcaat

SEQ ID NO: 456554 - DNA, 30 bp, Artificial Sequence
  Synthetic oligonucleotide
gataattcgtgccatgactaaaagttcaat

SEQ ID NO: 456555 - DNA, 30 bp, Artificial Sequence
  Synthetic oligonucleotide
aaacctggagcagggaagctcggtttcaat

SEQ ID NO: 456556 - DNA, 30 bp, Artificial Sequence
  Synthetic oligonucleotide
attataggagccctaggggtcattttcaat

SEQ ID NO: 456557 - DNA, 30 bp, Artificial Sequence
  Synthetic oligonucleotide
gtttcagtgcccttacggctagaaaagaat

SEQ ID NO: 456558 - DNA, 26 bp, Artificial Sequence
  Synthetic oligonucleotide
gagagatgatccctctgtgaaagaat

SEQ ID NO: 456559 - DNA, 30 bp, Artificial Sequence
  Synthetic oligonucleotide
agtccgtagagaagctatccgagcaagaat

SEQ ID NO: 456560 - DNA, 30 bp, Artificial Sequence
  Synthetic oligonucleotide
ggctctccggcatcatgaacgctcaagaat

SEQ ID NO: 456561 - DNA, 30 bp, Artificial Sequence
  Synthetic oligonucleotide
gcatgttcccccggtaaaggtaagaagaat

SEQ ID NO: 456562 - DNA, 30 bp, Artificial Sequence
  Synthetic oligonucleotide
ggcgagagcaattccctgcagaggaagaat

SEQ ID NO: 456563 - DNA, 30 bp, Artificial Sequence
  Synthetic oligonucleotide
ggtaccgagcgaccaagccttcataagaat

SEQ ID NO: 456564 - DNA, 30 bp, Artificial Sequence
  Synthetic oligonucleotide
cgaagggttcctcacccggaggataagaat

SEQ ID NO: 456565 - DNA, 30 bp, Artificial Sequence
  Synthetic oligonucleotide
tgggttttgtttggatgcaaaagtaagaat

SEQ ID NO: 456566 - DNA, 30 bp, Artificial Sequence
  Synthetic oligonucleotide
cgttggcatagtccaccctatggtaagaat

SEQ ID NO: 456567 - DNA, 30 bp, Artificial Sequence
  Synthetic oligonucleotide
tccgcgtggggttagacccccctacagaat

SEQ ID NO: 456568 - DNA, 31 bp, Artificial Sequence
  Synthetic oligonucleotide
gtctccccagcggattgcgggagtacagaat

SEQ ID NO: 456569 - DNA, 30 bp, Artificial Sequence
  Synthetic oligonucleotide
gttcccagacactgaccggttaagcagaat

SEQ ID NO: 456570 - DNA, 30 bp, Artificial Sequence
  Synthetic oligonucleotide
ttgactgtctatataaaagcctagcagaat

SEQ ID NO: 456571 - DNA, 30 bp, Artificial Sequence
  Synthetic oligonucleotide
gaactgtggctttgatctcatccgcagaat

SEQ ID NO: 456572 - DNA, 30 bp, Artificial Sequence
  Synthetic oligonucleotide
caagatacttagctgctaatgtggcagaat

SEQ ID NO: 456573 - DNA, 30 bp, Artificial Sequence
  Synthetic oligonucleotide
aaaaattaccggcgtaatcgttggcagaat

SEQ ID NO: 456574 - DNA, 30 bp, Artificial Sequence
  Synthetic oligonucleotide
attgaaccacggagaggtggccttcagaat

SEQ ID NO: 456575 - DNA, 30 bp, Artificial Sequence
  Synthetic oligonucleotide
ttaggtacgaggcgaagcagcgtagagaat

SEQ ID NO: 456576 - DNA, 30 bp, Artificial Sequence
  Synthetic oligonucleotide
agtgctctgttagggagttgacccgagaat

SEQ ID NO: 456577 - DNA, 30 bp, Artificial Sequence
  Synthetic oligonucleotide
cacatagtatctcgtaattccttcgagaat

SEQ ID NO: 456578 - DNA, 30 bp, Artificial Sequence
  Synthetic oligonucleotide
gaagatagttaaggcgacgcggcggagaat

SEQ ID NO: 456579 - DNA, 30 bp, Artificial Sequence
  Synthetic oligonucleotide
ggtctgttagcacgacccatggcggagaat

SEQ ID NO: 456580 - DNA, 30 bp, Artificial Sequence
  Synthetic oligonucleotide
atctctggaccccggcccatcggggagaat

SEQ ID NO: 456581 - DNA, 30 bp, Artificial Sequence
  Synthetic oligonucleotide
ggtcgaacgttgctagccaacatggagaat

SEQ ID NO: 456582 - DNA, 30 bp, Artificial Sequence
  Synthetic oligonucleotide
ccaatacacgcgtgggggttgaatgagaat

SEQ ID NO: 456583 - DNA, 30 bp, Artificial Sequence
  Synthetic oligonucleotide
gcagtatttgaacgctgcggcgctgagaat

SEQ ID NO: 456584 - DNA, 30 bp, Artificial Sequence
  Synthetic oligonucleotide
gtttcacgatgggaaacctacagtgagaat

SEQ ID NO: 456585 - DNA, 30 bp, Artificial Sequence
  Synthetic oligonucleotide
ggccatactggaggccgcattctatagaat

SEQ ID NO: 456586 - DNA, 30 bp, Artificial Sequence
  Synthetic oligonucleotide
aatgtaccggcataatccatattatagaat

SEQ ID NO: 456587 - DNA, 30 bp, Artificial Sequence
  Synthetic oligonucleotide
gcaaggtacattaagtatcccgagtagaat

SEQ ID NO: 456588 - DNA, 30 bp, Artificial Sequence
  Synthetic oligonucleotide
gcagcagcagacatcttggttttgtagaat

SEQ ID NO: 456589 - DNA, 30 bp, Artificial Sequence
  Synthetic oligonucleotide
tgaggacagcaacttttcatctcttagaat

SEQ ID NO: 456590 - DNA, 30 bp, Artificial Sequence
  Synthetic oligonucleotide
taaccgatctctctgttatgtggcacgaat

SEQ ID NO: 456591 - DNA, 30 bp, Artificial Sequence
  Synthetic oligonucleotide
agtttgtatccctataggacgatcacgaat

SEQ ID NO: 456592 - DNA, 30 bp, Artificial Sequence
  Synthetic oligonucleotide
gctacgcactttaccaaaattctcacgaat

SEQ ID NO: 456593 - DNA, 30 bp, Artificial Sequence
  Synthetic oligonucleotide
tacagcgtacagaccatacgtcctacgaat

SEQ ID NO: 456594 - DNA, 30 bp, Artificial Sequence
  Synthetic oligonucleotide
tggcgattaggcagcttcgagagaccgaat

SEQ ID NO: 456595 - DNA, 30 bp, Artificial Sequence
  Synthetic oligonucleotide
gtccatgcacgcctttgatagtccccgaat

SEQ ID NO: 456596 - DNA, 30 bp, Artificial Sequence
  Synthetic oligonucleotide
cgtagtttaaatgccgtacacagcccgaat

SEQ ID NO: 456597 - DNA, 30 bp, Artificial Sequence
  Synthetic oligonucleotide
aataaactttggagtaatatacagccgaat

SEQ ID NO: 456598 - DNA, 30 bp, Artificial Sequence
  Synthetic oligonucleotide
gtgtagtgttaagaccctagaccgccgaat

SEQ ID NO: 456599 - DNA, 30 bp, Artificial Sequence
  Synthetic oligonucleotide
tcattcgatgccttgaagcaggcgccgaat

SEQ ID NO: 456600 - DNA, 30 bp, Artificial Sequence
  Synthetic oligonucleotide
tctgttgctgtcacagcaaattggccgaat

SEQ ID NO: 456601 - DNA, 30 bp, Artificial Sequence
  Synthetic oligonucleotide
gcaaattcagaggcagcgaagaatccgaat

SEQ ID NO: 456602 - DNA, 30 bp, Artificial Sequence
  Synthetic oligonucleotide
aactatttcacccgcgtgttcccagcgaat

SEQ ID NO: 456603 - DNA, 30 bp, Artificial Sequence
  Synthetic oligonucleotide
gattgcttcaggtaactttggtcagcgaat

SEQ ID NO: 456604 - DNA, 30 bp, Artificial Sequence
  Synthetic oligonucleotide
atagattgtttggggaccacacgcgcgaat

SEQ ID NO: 456605 - DNA, 30 bp, Artificial Sequence
  Synthetic oligonucleotide
ggtataatctgatccggggcatgcgcgaat

SEQ ID NO: 456606 - DNA, 30 bp, Artificial Sequence
  Synthetic oligonucleotide
cgcagctttatgtacaatattggggcgaat

SEQ ID NO: 456607 - DNA, 30 bp, Artificial Sequence
  Synthetic oligonucleotide
tcttttgaaatatctagctatgtatcgaat

SEQ ID NO: 456608 - DNA, 30 bp, Artificial Sequence
  Synthetic oligonucleotide
tttgatagcagtccagtaggaatctcgaat

SEQ ID NO: 456609 - DNA, 30 bp, Artificial Sequence
  Synthetic oligonucleotide
gccttttgtcttacaaggaatcagtcgaat

SEQ ID NO: 456610 - DNA, 30 bp, Artificial Sequence
  Synthetic oligonucleotide
acctgcttccttattaagacacattcgaat

SEQ ID NO: 456611 - DNA, 30 bp, Artificial Sequence
  Synthetic oligonucleotide
gagtggccaaagacgactatagtttcgaat

SEQ ID NO: 456612 - DNA, 30 bp, Artificial Sequence
  Synthetic oligonucleotide
gccactagtgccataggcaatacaaggaat

SEQ ID NO: 456613 - DNA, 30 bp, Artificial Sequence
  Synthetic oligonucleotide
acaggtttgcagctcaacggtataaggaat

SEQ ID NO: 456614 - DNA, 30 bp, Artificial Sequence
  Synthetic oligonucleotide
tccgacgggtaccgcattcacttaaggaat

SEQ ID NO: 456615 - DNA, 30 bp, Artificial Sequence
  Synthetic oligonucleotide
acatgggctattaatccagtggacaggaat

SEQ ID NO: 456616 - DNA, 30 bp, Artificial Sequence
  Synthetic oligonucleotide
gtgaagcttcgcctgttatttgacaggaat

SEQ ID NO: 456617 - DNA, 30 bp, Artificial Sequence
  Synthetic oligonucleotide
cggtaactcattagacgcttctgcaggaat

SEQ ID NO: 456618 - DNA, 30 bp, Artificial Sequence
  Synthetic oligonucleotide
ttttgatcggctggagaaaaatagaggaat

SEQ ID NO: 456619 - DNA, 30 bp, Artificial Sequence
  Synthetic oligonucleotide
cattcctgagttgccagccatcttaggaat

SEQ ID NO: 456620 - DNA, 30 bp, Artificial Sequence
  Synthetic oligonucleotide
tgcccgaacggtcgggtgaaacaacggaat

SEQ ID NO: 456621 - DNA, 30 bp, Artificial Sequence
  Synthetic oligonucleotide
ggggagtgtgcctaaaccaagtaacggaat

SEQ ID NO: 456622 - DNA, 30 bp, Artificial Sequence
  Synthetic oligonucleotide
ctcaattggcagtcagcacgtggacggaat

SEQ ID NO: 456623 - DNA, 30 bp, Artificial Sequence
  Synthetic oligonucleotide
gcatataccagtagggacacggtccggaat

SEQ ID NO: 456624 - DNA, 30 bp, Artificial Sequence
  Synthetic oligonucleotide
attatactggccattggtgcttggcggaat

SEQ ID NO: 456625 - DNA, 30 bp, Artificial Sequence
  Synthetic oligonucleotide
tagcctaaaacggttcttttggatcggaat

SEQ ID NO: 456626 - DNA, 30 bp, Artificial Sequence
  Synthetic oligonucleotide
gccgggataacaaattcgtgtcctcggaat

SEQ ID NO: 456627 - DNA, 30 bp, Artificial Sequence
  Synthetic oligonucleotide
tagttacaccttttgatcggctaagggaat

SEQ ID NO: 456628 - DNA, 30 bp, Artificial Sequence
  Synthetic oligonucleotide
cacaattgccccgaaggttctaacgggaat

SEQ ID NO: 456629 - DNA, 30 bp, Artificial Sequence
  Synthetic oligonucleotide
gtcactgtagtgaatccacatagcgggaat

SEQ ID NO: 456630 - DNA, 30 bp, Artificial Sequence
  Synthetic oligonucleotide
aacaacgcggcaagacatcctaatgggaat

SEQ ID NO: 456631 - DNA, 30 bp, Artificial Sequence
  Synthetic oligonucleotide
ccctaagctcggaatcgcgtatatgggaat

SEQ ID NO: 456632 - DNA, 30 bp, Artificial Sequence
  Synthetic oligonucleotide
attacagaacaatgtttcaacactgggaat

SEQ ID NO: 456633 - DNA, 30 bp, Artificial Sequence
  Synthetic oligonucleotide
atatcagagcgaaattatctagctgggaat

SEQ ID NO: 456634 - DNA, 30 bp, Artificial Sequence
  Synthetic oligonucleotide
tttctaccgagcgatctcttaggtgggaat

SEQ ID NO: 456635 - DNA, 30 bp, Artificial Sequence
  Synthetic oligonucleotide
ttctcgtaggagtaccacacgtgtgggaat

SEQ ID NO: 456636 - DNA, 30 bp, Artificial Sequence
  Synthetic oligonucleotide
atggtgtgggagaaccacgggaaatggaat

SEQ ID NO: 456637 - DNA, 27 bp, Artificial Sequence
  Synthetic oligonucleotide
gattcgatactacgcatattatggaat

SEQ ID NO: 456638 - DNA, 30 bp, Artificial Sequence
  Synthetic oligonucleotide
tcacatgccttagtaggcggcagctggaat

SEQ ID NO: 456639 - DNA, 30 bp, Artificial Sequence
  Synthetic oligonucleotide
tcttaaggaattccaagtgctgggtggaat

SEQ ID NO: 456640 - DNA, 30 bp, Artificial Sequence
  Synthetic oligonucleotide
cacacaaattgttacaatttctggtggaat

SEQ ID NO: 456641 - DNA, 31 bp, Artificial Sequence
  Synthetic oligonucleotide
agcgacgataggtccacgttgggtgtggaat

SEQ ID NO: 456642 - DNA, 30 bp, Artificial Sequence
  Synthetic oligonucleotide
aagcccaggagcggtcgtggatgttggaat

SEQ ID NO: 456643 - DNA, 30 bp, Artificial Sequence
  Synthetic oligonucleotide
gattatagccagtgctgtatcgaaatgaat

SEQ ID NO: 456644 - DNA, 30 bp, Artificial Sequence
  Synthetic oligonucleotide
gataataacctggtcactggtttaatgaat

SEQ ID NO: 456645 - DNA, 30 bp, Artificial Sequence
  Synthetic oligonucleotide
ggcttctctcatcattgcttcttcatgaat

SEQ ID NO: 456646 - DNA, 30 bp, Artificial Sequence
  Synthetic oligonucleotide
tcgcgcagattcagacccatatagatgaat

SEQ ID NO: 456647 - DNA, 30 bp, Artificial Sequence
  Synthetic oligonucleotide
gactagcaaattccatgtgctcggatgaat

SEQ ID NO: 456648 - DNA, 30 bp, Artificial Sequence
  Synthetic oligonucleotide
aattagatctattctcatatcaatatgaat

SEQ ID NO: 456649 - DNA, 30 bp, Artificial Sequence
  Synthetic oligonucleotide
gttgccgttgtaacctgtcgacatatgaat

SEQ ID NO: 456650 - DNA, 30 bp, Artificial Sequence
  Synthetic oligonucleotide
gcttttaagggcaaaacttttcctatgaat

SEQ ID NO: 456651 - DNA, 30 bp, Artificial Sequence
  Synthetic oligonucleotide
ggcttgtagctataagcggtggctatgaat

SEQ ID NO: 456652 - DNA, 30 bp, Artificial Sequence
  Synthetic oligonucleotide
agttagtttacagctcaggcctctatgaat

SEQ ID NO: 456653 - DNA, 30 bp, Artificial Sequence
  Synthetic oligonucleotide
gagagtaagctcatggtcagcattatgaat

SEQ ID NO: 456654 - DNA, 30 bp, Artificial Sequence
  Synthetic oligonucleotide
acccccaatgtttcgcgcaagaacctgaat

SEQ ID NO: 456655 - DNA, 30 bp, Artificial Sequence
  Synthetic oligonucleotide
gccaagtttgcaacatggccctccctgaat

SEQ ID NO: 456656 - DNA, 30 bp, Artificial Sequence
  Synthetic oligonucleotide
ggattcttactcggtcacaagttcctgaat

SEQ ID NO: 456657 - DNA, 30 bp, Artificial Sequence
  Synthetic oligonucleotide
acaagagcaatacgccccgtttcgctgaat

SEQ ID NO: 456658 - DNA, 30 bp, Artificial Sequence
  Synthetic oligonucleotide
atttctttcatgagacggtgtgtgctgaat

SEQ ID NO: 456659 - DNA, 30 bp, Artificial Sequence
  Synthetic oligonucleotide
ctactggctggatgacctcaccatctgaat

SEQ ID NO: 456660 - DNA, 30 bp, Artificial Sequence
  Synthetic oligonucleotide
ctatagcccgccctatttaattatctgaat

SEQ ID NO: 456661 - DNA, 30 bp, Artificial Sequence
  Synthetic oligonucleotide
gtaggttgacatgtagtccgtacagtgaat

SEQ ID NO: 456662 - DNA, 30 bp, Artificial Sequence
  Synthetic oligonucleotide
aaaatattgggttcgggactatgagtgaat

SEQ ID NO: 456663 - DNA, 30 bp, Artificial Sequence
  Synthetic oligonucleotide
ttatatgattggctattttaagtagtgaat

SEQ ID NO: 456664 - DNA, 30 bp, Artificial Sequence
  Synthetic oligonucleotide
aaaaaggtttgaatcgcaagaaacgtgaat

SEQ ID NO: 456665 - DNA, 30 bp, Artificial Sequence
  Synthetic oligonucleotide
ggctacgtcgctctgtgtaccaccgtgaat

SEQ ID NO: 456666 - DNA, 30 bp, Artificial Sequence
  Synthetic oligonucleotide
gaatgtggctctattcacgccccggtgaat

SEQ ID NO: 456667 - DNA, 30 bp, Artificial Sequence
  Synthetic oligonucleotide
tcaatggaagaaagcactgagccggtgaat

SEQ ID NO: 456668 - DNA, 30 bp, Artificial Sequence
  Synthetic oligonucleotide
ttcggagtcttgctttaaagcttggtgaat

SEQ ID NO: 456669 - DNA, 30 bp, Artificial Sequence
  Synthetic oligonucleotide
tctattaccgtggttcggaacgacttgaat

SEQ ID NO: 456670 - DNA, 31 bp, Artificial Sequence
  Synthetic oligonucleotide
ggaataccttggcatttataaaggcttgaat

SEQ ID NO: 456671 - DNA, 30 bp, Artificial Sequence
  Synthetic oligonucleotide
tttgttctgaaaggtgagtcacagttgaat

SEQ ID NO: 456672 - DNA, 30 bp, Artificial Sequence
  Synthetic oligonucleotide
tcgtgagggggaactcaacgttaaaataat

SEQ ID NO: 456673 - DNA, 30 bp, Artificial Sequence
  Synthetic oligonucleotide
ggtagtgatacgcatcgttaagcaaataat

SEQ ID NO: 456674 - DNA, 30 bp, Artificial Sequence
  Synthetic oligonucleotide
ctccgtagcccaggacttccctcaaataat

SEQ ID NO: 456675 - DNA, 30 bp, Artificial Sequence
  Synthetic oligonucleotide
cgctctaccgaccccgatgcagacaataat

SEQ ID NO: 456676 - DNA, 30 bp, Artificial Sequence
  Synthetic oligonucleotide
ctctatgaacgtactagcctgaccaataat

SEQ ID NO: 456677 - DNA, 30 bp, Artificial Sequence
  Synthetic oligonucleotide
ggacaaaggcataggctatgggccaataat

SEQ ID NO: 456678 - DNA, 30 bp, Artificial Sequence
  Synthetic oligonucleotide
tttcaaaagcggtctacagcgcagaataat

SEQ ID NO: 456679 - DNA, 30 bp, Artificial Sequence
  Synthetic oligonucleotide
ctcttgcagtggtactatgagtcgaataat

SEQ ID NO: 456680 - DNA, 30 bp, Artificial Sequence
  Synthetic oligonucleotide
ggtcaatttggtctcagtgaatataataat

SEQ ID NO: 456681 - DNA, 30 bp, Artificial Sequence
  Synthetic oligonucleotide
gtgatggatcgtatgtagatatctaataat

SEQ ID NO: 456682 - DNA, 30 bp, Artificial Sequence
  Synthetic oligonucleotide
ttttagagagtcctcggggaggttaataat

SEQ ID NO: 456683 - DNA, 30 bp, Artificial Sequence
  Synthetic oligonucleotide
gaactctgcggaaacgtaggatgacataat

SEQ ID NO: 456684 - DNA, 30 bp, Artificial Sequence
  Synthetic oligonucleotide
ccgtccatccaatccgagaacttacataat

SEQ ID NO: 456685 - DNA, 30 bp, Artificial Sequence
  Synthetic oligonucleotide
tgaattagacagctagcacgtttacataat

SEQ ID NO: 456686 - DNA, 30 bp, Artificial Sequence
  Synthetic oligonucleotide
acaagagacttaagtaagggcgcccataat

SEQ ID NO: 456687 - DNA, 30 bp, Artificial Sequence
  Synthetic oligonucleotide
tctgtatcaatttatcttcatgtccataat

SEQ ID NO: 456688 - DNA, 30 bp, Artificial Sequence
  Synthetic oligonucleotide
tttagagtggcggacatattattccataat

SEQ ID NO: 456689 - DNA, 30 bp, Artificial Sequence
  Synthetic oligonucleotide
agtgattcggaatcatgatgcgggcataat

SEQ ID NO: 456690 - DNA, 30 bp, Artificial Sequence
  Synthetic oligonucleotide
gcggggtattgtcgctaagcttatcataat

SEQ ID NO: 456691 - DNA, 30 bp, Artificial Sequence
  Synthetic oligonucleotide
cctaaaactcaatcgtcatggtttcataat

SEQ ID NO: 456692 - DNA, 30 bp, Artificial Sequence
  Synthetic oligonucleotide
cggatggcatgatgtaaacgcagagataat

SEQ ID NO: 456693 - DNA, 30 bp, Artificial Sequence
  Synthetic oligonucleotide
agcatcgatagtctatattactctgataat

SEQ ID NO: 456694 - DNA, 30 bp, Artificial Sequence
  Synthetic oligonucleotide
gaacgcctttagggatttctacgtgataat

SEQ ID NO: 456695 - DNA, 30 bp, Artificial Sequence
  Synthetic oligonucleotide
ttgtcaagtgcgaagtgcaaggaatataat

SEQ ID NO: 456696 - DNA, 30 bp, Artificial Sequence
  Synthetic oligonucleotide
agggtatgtatgcaatgatgtacctataat

SEQ ID NO: 456697 - DNA, 30 bp, Artificial Sequence
  Synthetic oligonucleotide
gtactataagtacgatcgtcatgctataat

SEQ ID NO: 456698 - DNA, 31 bp, Artificial Sequence
  Synthetic oligonucleotide
taacgtatagcatggaaatgcagcgtataat

SEQ ID NO: 456699 - DNA, 30 bp, Artificial Sequence
  Synthetic oligonucleotide
atcggggcatctattgcatactcgtataat

SEQ ID NO: 456700 - DNA, 30 bp, Artificial Sequence
  Synthetic oligonucleotide
gccccaacgttggcagttaatcggtataat

SEQ ID NO: 456701 - DNA, 30 bp, Artificial Sequence
  Synthetic oligonucleotide
accgcagtacatagcccctcatcttataat

SEQ ID NO: 456702 - DNA, 30 bp, Artificial Sequence
  Synthetic oligonucleotide
atatggtcgggggaggggggttgttataat

SEQ ID NO: 456703 - DNA, 30 bp, Artificial Sequence
  Synthetic oligonucleotide
atttagtaagttgcggtgctaataactaat

SEQ ID NO: 456704 - DNA, 30 bp, Artificial Sequence
  Synthetic oligonucleotide
ttgttttatggggcttcgaaaagcactaat

SEQ ID NO: 456705 - DNA, 30 bp, Artificial Sequence
  Synthetic oligonucleotide
tgcatatggaggcactcccatggcactaat

SEQ ID NO: 456706 - DNA, 30 bp, Artificial Sequence
  Synthetic oligonucleotide
ggaattagttgaacttgggtgtagactaat

SEQ ID NO: 456707 - DNA, 30 bp, Artificial Sequence
  Synthetic oligonucleotide
aacggcttgcctacaacggtgccgactaat

SEQ ID NO: 456708 - DNA, 30 bp, Artificial Sequence
  Synthetic oligonucleotide
cttatgagtgctacttgggcacggactaat

SEQ ID NO: 456709 - DNA, 30 bp, Artificial Sequence
  Synthetic oligonucleotide
ctaggaacaccggtaggaatgtggactaat

SEQ ID NO: 456710 - DNA, 30 bp, Artificial Sequence
  Synthetic oligonucleotide
ctgtgagtacttggtagagaatcacctaat

SEQ ID NO: 456711 - DNA, 30 bp, Artificial Sequence
  Synthetic oligonucleotide
gctgccgcagaaacccgtgggtcacctaat

SEQ ID NO: 456712 - DNA, 30 bp, Artificial Sequence
  Synthetic oligonucleotide
agccttgaagggtctcctctttcgcctaat

SEQ ID NO: 456713 - DNA, 30 bp, Artificial Sequence
  Synthetic oligonucleotide
attaaacactgatcaaggcagcggcctaat

SEQ ID NO: 456714 - DNA, 30 bp, Artificial Sequence
  Synthetic oligonucleotide
aatatcatcgtaccgacggccgctcctaat

SEQ ID NO: 456715 - DNA, 30 bp, Artificial Sequence
  Synthetic oligonucleotide
ccaggtccggttcactatacacttcctaat

SEQ ID NO: 456716 - DNA, 28 bp, Artificial Sequence
  Synthetic oligonucleotide
aggatggggtacggatagggttcctaat

SEQ ID NO: 456717 - DNA, 30 bp, Artificial Sequence
  Synthetic oligonucleotide
gagttgcgaatgacattagtttcagctaat

SEQ ID NO: 456718 - DNA, 30 bp, Artificial Sequence
  Synthetic oligonucleotide
accctgcgtgcctcgccatgtcgagctaat

SEQ ID NO: 456719 - DNA, 30 bp, Artificial Sequence
  Synthetic oligonucleotide
atgcggcacgccgccttggatatagctaat

SEQ ID NO: 456720 - DNA, 30 bp, Artificial Sequence
  Synthetic oligonucleotide
ggcccgtgtcgcaatattacaaacgctaat

SEQ ID NO: 456721 - DNA, 30 bp, Artificial Sequence
  Synthetic oligonucleotide
aacattgcgcttggaggcacggacgctaat

SEQ ID NO: 456722 - DNA, 30 bp, Artificial Sequence
  Synthetic oligonucleotide
ttttagttgtaagatataaccttcgctaat

SEQ ID NO: 456723 - DNA, 30 bp, Artificial Sequence
  Synthetic oligonucleotide
cgccctcaccaagcatcaaaataggctaat

SEQ ID NO: 456724 - DNA, 30 bp, Artificial Sequence
  Synthetic oligonucleotide
attctcccacaaagtctgctgtaggctaat

SEQ ID NO: 456725 - DNA, 30 bp, Artificial Sequence
  Synthetic oligonucleotide
cctgttttacccgttatcaatacggctaat

SEQ ID NO: 456726 - DNA, 30 bp, Artificial Sequence
  Synthetic oligonucleotide
aaacgttgtgtggactgacaggtggctaat

SEQ ID NO: 456727 - DNA, 30 bp, Artificial Sequence
  Synthetic oligonucleotide
tgcatcataatcgttatcttgcgtgctaat

SEQ ID NO: 456728 - DNA, 30 bp, Artificial Sequence
  Synthetic oligonucleotide
gagtacttagacaaaccggatcaatctaat

SEQ ID NO: 456729 - DNA, 30 bp, Artificial Sequence
  Synthetic oligonucleotide
tcaatagacagtaaagggtctcaatctaat

SEQ ID NO: 456730 - DNA, 30 bp, Artificial Sequence
  Synthetic oligonucleotide
attgcgttggccacttggcaatcatctaat

SEQ ID NO: 456731 - DNA, 30 bp, Artificial Sequence
  Synthetic oligonucleotide
tcacgcctcgggcactgaacatcatctaat

SEQ ID NO: 456732 - DNA, 30 bp, Artificial Sequence
  Synthetic oligonucleotide
aacagatactggcttctattcgtatctaat

SEQ ID NO: 456733 - DNA, 30 bp, Artificial Sequence
  Synthetic oligonucleotide
tagcttgggtagaattaaggacactctaat

SEQ ID NO: 456734 - DNA, 30 bp, Artificial Sequence
  Synthetic oligonucleotide
gtggtcgctccaaggacaagccactctaat

SEQ ID NO: 456735 - DNA, 30 bp, Artificial Sequence
  Synthetic oligonucleotide
acatatgaagaatcggatctttactctaat

SEQ ID NO: 456736 - DNA, 30 bp, Artificial Sequence
  Synthetic oligonucleotide
gcagtaagaggccaatgaattctctctaat

SEQ ID NO: 456737 - DNA, 30 bp, Artificial Sequence
  Synthetic oligonucleotide
agccctttctgttattctgctgggtctaat

SEQ ID NO: 456738 - DNA, 30 bp, Artificial Sequence
  Synthetic oligonucleotide
gcttttcaggtcaaatgacctgattctaat

SEQ ID NO: 456739 - DNA, 30 bp, Artificial Sequence
  Synthetic oligonucleotide
acttatcagaaacacgacagggcttctaat

SEQ ID NO: 456740 - DNA, 30 bp, Artificial Sequence
  Synthetic oligonucleotide
ccttgagtatagttttctagatcttctaat

SEQ ID NO: 456741 - DNA, 30 bp, Artificial Sequence
  Synthetic oligonucleotide
atgtatggatcattctcaatgtgttctaat

SEQ ID NO: 456742 - DNA, 30 bp, Artificial Sequence
  Synthetic oligonucleotide
gtcgatgtcttaaccaatatagtttctaat

SEQ ID NO: 456743 - DNA, 30 bp, Artificial Sequence
  Synthetic oligonucleotide
cacaagactccacgattaattaaaagtaat

SEQ ID NO: 456744 - DNA, 30 bp, Artificial Sequence
  Synthetic oligonucleotide
tttcaattatggcgaaagtcagaaagtaat

SEQ ID NO: 456745 - DNA, 30 bp, Artificial Sequence
  Synthetic oligonucleotide
tgccggcctttgcgggggacggcaagtaat

SEQ ID NO: 456746 - DNA, 30 bp, Artificial Sequence
  Synthetic oligonucleotide
ccaggcctagcttgtgtcgtcgacagtaat

SEQ ID NO: 456747 - DNA, 30 bp, Artificial Sequence
  Synthetic oligonucleotide
atactgttccacattatccgatgcagtaat

SEQ ID NO: 456748 - DNA, 30 bp, Artificial Sequence
  Synthetic oligonucleotide
agagtctgtattcttcgtcagacgagtaat

SEQ ID NO: 456749 - DNA, 30 bp, Artificial Sequence
  Synthetic oligonucleotide
atagcatccgcaacgggttgcgctagtaat

SEQ ID NO: 456750 - DNA, 30 bp, Artificial Sequence
  Synthetic oligonucleotide
acgtcgtatcacaagtcggattctagtaat

SEQ ID NO: 456751 - DNA, 30 bp, Artificial Sequence
  Synthetic oligonucleotide
cgtttcattttaagtaaaacgggtagtaat

SEQ ID NO: 456752 - DNA, 30 bp, Artificial Sequence
  Synthetic oligonucleotide
tatcttcaaaggggtacatcagtacgtaat

SEQ ID NO: 456753 - DNA, 30 bp, Artificial Sequence
  Synthetic oligonucleotide
aggactgtactcatcctcgtactccgtaat

SEQ ID NO: 456754 - DNA, 30 bp, Artificial Sequence
  Synthetic oligonucleotide
atagacgaatcttcaaactcgtggcgtaat

SEQ ID NO: 456755 - DNA, 30 bp, Artificial Sequence
  Synthetic oligonucleotide
aaaagctctgaattgccccgaatgcgtaat

SEQ ID NO: 456756 - DNA, 30 bp, Artificial Sequence
  Synthetic oligonucleotide
attctggtactttgccccatgatgcgtaat

SEQ ID NO: 456757 - DNA, 30 bp, Artificial Sequence
  Synthetic oligonucleotide
gtcacgcctaccatgggggttatgcgtaat

SEQ ID NO: 456758 - DNA, 29 bp, Artificial Sequence
  Synthetic oligonucleotide
gcataaccagcctgggttagactcgtaat

SEQ ID NO: 456759 - DNA, 30 bp, Artificial Sequence
  Synthetic oligonucleotide
tgccacttctgttacacgtcacgtcgtaat

SEQ ID NO: 456760 - DNA, 30 bp, Artificial Sequence
  Synthetic oligonucleotide
atagtccttccctgcccgagacttcgtaat

SEQ ID NO: 456761 - DNA, 30 bp, Artificial Sequence
  Synthetic oligonucleotide
gtccctggcattctagatttgcaaggtaat

SEQ ID NO: 456762 - DNA, 30 bp, Artificial Sequence
  Synthetic oligonucleotide
gggtgcgtcaggtgctgatgtcgcggtaat

SEQ ID NO: 456763 - DNA, 30 bp, Artificial Sequence
  Synthetic oligonucleotide
gggtaatctatacgctgacataagggtaat

SEQ ID NO: 456764 - DNA, 30 bp, Artificial Sequence
  Synthetic oligonucleotide
agcgactcctttctaagattcacgggtaat

SEQ ID NO: 456765 - DNA, 30 bp, Artificial Sequence
  Synthetic oligonucleotide
cacaggttttcctacgcaagtaggggtaat

SEQ ID NO: 456766 - DNA, 31 bp, Artificial Sequence
  Synthetic oligonucleotide
accaagaccgtggtgcttctgtctgggtaat

SEQ ID NO: 456767 - DNA, 30 bp, Artificial Sequence
  Synthetic oligonucleotide
tcgtcgggtatttaggtttgtaatggtaat

SEQ ID NO: 456768 - DNA, 30 bp, Artificial Sequence
  Synthetic oligonucleotide
atgtatgtgaggtgggcccacggtggtaat

SEQ ID NO: 456769 - DNA, 30 bp, Artificial Sequence
  Synthetic oligonucleotide
gcacgccaccctagtttatcgggtggtaat

SEQ ID NO: 456770 - DNA, 30 bp, Artificial Sequence
  Synthetic oligonucleotide
aaattaatggagcgcagagggtaatgtaat

SEQ ID NO: 456771 - DNA, 30 bp, Artificial Sequence
  Synthetic oligonucleotide
atcctttgaacacaccgtaatacctgtaat

SEQ ID NO: 456772 - DNA, 30 bp, Artificial Sequence
  Synthetic oligonucleotide
gtccgacccgattaccctctcaggtgtaat

SEQ ID NO: 456773 - DNA, 30 bp, Artificial Sequence
  Synthetic oligonucleotide
tctagaaatagacttgtccaattgtgtaat

SEQ ID NO: 456774 - DNA, 30 bp, Artificial Sequence
  Synthetic oligonucleotide
ttggcgtgccgaccgcaagattattgtaat

SEQ ID NO: 456775 - DNA, 30 bp, Artificial Sequence
  Synthetic oligonucleotide
actccaaggagcacgacagataaaattaat

SEQ ID NO: 456776 - DNA, 30 bp, Artificial Sequence
  Synthetic oligonucleotide
taataaacaaaaaagttagtttcaattaat

SEQ ID NO: 456777 - DNA, 30 bp, Artificial Sequence
  Synthetic oligonucleotide
aagcagcctggagctaggtcactaattaat

SEQ ID NO: 456778 - DNA, 30 bp, Artificial Sequence
  Synthetic oligonucleotide
gcccaatttctccgtcaccatgtaattaat

SEQ ID NO: 456779 - DNA, 30 bp, Artificial Sequence
  Synthetic oligonucleotide
gacggcttttgttgtaaaagccccattaat

SEQ ID NO: 456780 - DNA, 30 bp, Artificial Sequence
  Synthetic oligonucleotide
gtccgggggagcatgcttgcagccattaat

SEQ ID NO: 456781 - DNA, 30 bp, Artificial Sequence
  Synthetic oligonucleotide
aacctcgcgcggtcgtcggcggccattaat

SEQ ID NO: 456782 - DNA, 30 bp, Artificial Sequence
  Synthetic oligonucleotide
aaatggttttactctactgctccgattaat

SEQ ID NO: 456783 - DNA, 30 bp, Artificial Sequence
  Synthetic oligonucleotide
tttttcgagggtcagaggcggtcgattaat

SEQ ID NO: 456784 - DNA, 30 bp, Artificial Sequence
  Synthetic oligonucleotide
ccaccctggtgacgctttatttggattaat

SEQ ID NO: 456785 - DNA, 30 bp, Artificial Sequence
  Synthetic oligonucleotide
aagaaaaattagatcgtggcatatattaat

SEQ ID NO: 456786 - DNA, 30 bp, Artificial Sequence
  Synthetic oligonucleotide
ttcgtaaccattttttgccgttttattaat

SEQ ID NO: 456787 - DNA, 30 bp, Artificial Sequence
  Synthetic oligonucleotide
tttttcgcaatcacggatgaataacttaat

SEQ ID NO: 456788 - DNA, 30 bp, Artificial Sequence
  Synthetic oligonucleotide
caaaaaaatcacacggtttggatacttaat

SEQ ID NO: 456789 - DNA, 30 bp, Artificial Sequence
  Synthetic oligonucleotide
gctacgattttttaggcgagtatacttaat

SEQ ID NO: 456790 - DNA, 30 bp, Artificial Sequence
  Synthetic oligonucleotide
aggagctgctggtgggacatgcgccttaat

SEQ ID NO: 456791 - DNA, 30 bp, Artificial Sequence
  Synthetic oligonucleotide
tagtagtgtgaagtagttgatcgccttaat

SEQ ID NO: 456792 - DNA, 30 bp, Artificial Sequence
  Synthetic oligonucleotide
gaggtagctgattctgatagacggcttaat

SEQ ID NO: 456793 - DNA, 30 bp, Artificial Sequence
  Synthetic oligonucleotide
gccgaatagatagcactaagtgctcttaat

SEQ ID NO: 456794 - DNA, 30 bp, Artificial Sequence
  Synthetic oligonucleotide
taattccgaaggacgcggttggttcttaat

SEQ ID NO: 456795 - DNA, 30 bp, Artificial Sequence
  Synthetic oligonucleotide
attcttgagtttagcttacccaaagttaat

SEQ ID NO: 456796 - DNA, 30 bp, Artificial Sequence
  Synthetic oligonucleotide
ctctcattaggtacgtctaatggagttaat

SEQ ID NO: 456797 - DNA, 30 bp, Artificial Sequence
  Synthetic oligonucleotide
gtattaaatactaatataactatagttaat

SEQ ID NO: 456798 - DNA, 30 bp, Artificial Sequence
  Synthetic oligonucleotide
gaggaaatctgtatattacgtttagttaat

SEQ ID NO: 456799 - DNA, 30 bp, Artificial Sequence
  Synthetic oligonucleotide
aagggcccgaggttgctttcttccgttaat

SEQ ID NO: 456800 - DNA, 30 bp, Artificial Sequence
  Synthetic oligonucleotide
ccatcataggaataattactcggcgttaat

SEQ ID NO: 456801 - DNA, 30 bp, Artificial Sequence
  Synthetic oligonucleotide
ttattcaaacggtacgctggagtcgttaat

SEQ ID NO: 456802 - DNA, 30 bp, Artificial Sequence
  Synthetic oligonucleotide
acactccactaccatagtacattcgttaat

SEQ ID NO: 456803 - DNA, 30 bp, Artificial Sequence
  Synthetic oligonucleotide
gagttagtgggctgtatgtatgctgttaat

SEQ ID NO: 456804 - DNA, 30 bp, Artificial Sequence
  Synthetic oligonucleotide
tattttttggtcagtagcggccgtgttaat

SEQ ID NO: 456805 - DNA, 30 bp, Artificial Sequence
  Synthetic oligonucleotide
ttatgatccagagagtgcctgcgtgttaat

SEQ ID NO: 456806 - DNA, 30 bp, Artificial Sequence
  Synthetic oligonucleotide
tgcttcccgccctgactcttctaatttaat

SEQ ID NO: 456807 - DNA, 30 bp, Artificial Sequence
  Synthetic oligonucleotide
tggaccatactcggaccttgggtatttaat

SEQ ID NO: 456808 - DNA, 30 bp, Artificial Sequence
  Synthetic oligonucleotide
ctaaggagacggggtatagttttatttaat

SEQ ID NO: 456809 - DNA, 30 bp, Artificial Sequence
  Synthetic oligonucleotide
ttgggattgtgtaaggtcattgggtttaat

SEQ ID NO: 456810 - DNA, 30 bp, Artificial Sequence
  Synthetic oligonucleotide
ggtccgctccagcttaataaatggtttaat

SEQ ID NO: 456811 - DNA, 30 bp, Artificial Sequence
  Synthetic oligonucleotide
gacatccctttgagacattacacttttaat

SEQ ID NO: 456812 - DNA, 30 bp, Artificial Sequence
  Synthetic oligonucleotide
atgctttacacaaccattgtaacaaaacat

SEQ ID NO: 456813 - DNA, 30 bp, Artificial Sequence
  Synthetic oligonucleotide
tatggtaactaatatcgagcggtaaaacat

SEQ ID NO: 456814 - DNA, 30 bp, Artificial Sequence
  Synthetic oligonucleotide
ttatggaacggtactcggcagtagaaacat

SEQ ID NO: 456815 - DNA, 30 bp, Artificial Sequence
  Synthetic oligonucleotide
cacaattctgatatcaattgacggaaacat

SEQ ID NO: 456816 - DNA, 30 bp, Artificial Sequence
  Synthetic oligonucleotide
tgctctggaataaggggaacgcataaacat

SEQ ID NO: 456817 - DNA, 30 bp, Artificial Sequence
  Synthetic oligonucleotide
aacctgagcaatccttaaatgcctaaacat

SEQ ID NO: 456818 - DNA, 30 bp, Artificial Sequence
  Synthetic oligonucleotide
atctatgaccaataggcccatggtaaacat

SEQ ID NO: 456819 - DNA, 30 bp, Artificial Sequence
  Synthetic oligonucleotide
agtttggcagtactacaggaagttaaacat

SEQ ID NO: 456820 - DNA, 30 bp, Artificial Sequence
  Synthetic oligonucleotide
aatgttatatgtcgtaattccgcacaacat

SEQ ID NO: 456821 - DNA, 30 bp, Artificial Sequence
  Synthetic oligonucleotide
gcccctcacgaagcttctaatgcacaacat

SEQ ID NO: 456822 - DNA, 30 bp, Artificial Sequence
  Synthetic oligonucleotide
cagcgtcgattatgaactcgcagacaacat

SEQ ID NO: 456823 - DNA, 30 bp, Artificial Sequence
  Synthetic oligonucleotide
atccgccgtattggtgaaagacgacaacat

SEQ ID NO: 456824 - DNA, 30 bp, Artificial Sequence
  Synthetic oligonucleotide
gaaaaaagccatagtgcgccgagccaacat

SEQ ID NO: 456825 - DNA, 30 bp, Artificial Sequence
  Synthetic oligonucleotide
atcgtggcggtcagggtggtggatcaacat

SEQ ID NO: 456826 - DNA, 30 bp, Artificial Sequence
  Synthetic oligonucleotide
ttgcaaatttttggcagtgccagtcaacat

SEQ ID NO: 456827 - DNA, 30 bp, Artificial Sequence
  Synthetic oligonucleotide
ctagtttaagcgtccggtggatgagaacat

SEQ ID NO: 456828 - DNA, 30 bp, Artificial Sequence
  Synthetic oligonucleotide
gtactggcgcacaacgtagcaaaggaacat

SEQ ID NO: 456829 - DNA, 30 bp, Artificial Sequence
  Synthetic oligonucleotide
ctgttttcttgcctacaagcgaaggaacat

SEQ ID NO: 456830 - DNA, 30 bp, Artificial Sequence
  Synthetic oligonucleotide
tttctagtacaaaagtggcggttggaacat

SEQ ID NO: 456831 - DNA, 30 bp, Artificial Sequence
  Synthetic oligonucleotide
atcgtgcacgtattccaggatcgtgaacat

SEQ ID NO: 456832 - DNA, 30 bp, Artificial Sequence
  Synthetic oligonucleotide
agactgtacgcaggttcacctagataacat

SEQ ID NO: 456833 - DNA, 30 bp, Artificial Sequence
  Synthetic oligonucleotide
agcatgattcgacatgtagtcgtataacat

SEQ ID NO: 456834 - DNA, 30 bp, Artificial Sequence
  Synthetic oligonucleotide
acattataattcgcgattgcagcctaacat

SEQ ID NO: 456835 - DNA, 30 bp, Artificial Sequence
  Synthetic oligonucleotide
actatggattccagctcggacggctaacat

SEQ ID NO: 456836 - DNA, 30 bp, Artificial Sequence
  Synthetic oligonucleotide
agtataagtgttcccgcatatggctaacat

SEQ ID NO: 456837 - DNA, 30 bp, Artificial Sequence
  Synthetic oligonucleotide
ttcacctccgtccggaagcgacagtaacat

SEQ ID NO: 456838 - DNA, 30 bp, Artificial Sequence
  Synthetic oligonucleotide
tgagaaacgttctaatcgtaccagtaacat

SEQ ID NO: 456839 - DNA, 30 bp, Artificial Sequence
  Synthetic oligonucleotide
aacttgcggcgtatatttccgccgtaacat

SEQ ID NO: 456840 - DNA, 30 bp, Artificial Sequence
  Synthetic oligonucleotide
agttcacaagacggaaaacctgcgtaacat

SEQ ID NO: 456841 - DNA, 30 bp, Artificial Sequence
  Synthetic oligonucleotide
tgaccatgaatagtctgcattaggtaacat

SEQ ID NO: 456842 - DNA, 30 bp, Artificial Sequence
  Synthetic oligonucleotide
tccgaaatcactagtaagcacgcttaacat

SEQ ID NO: 456843 - DNA, 30 bp, Artificial Sequence
  Synthetic oligonucleotide
cacgatccaattctcttcgtgagttaacat

SEQ ID NO: 456844 - DNA, 30 bp, Artificial Sequence
  Synthetic oligonucleotide
ttgggaatagggtagaatgagtgttaacat

SEQ ID NO: 456845 - DNA, 30 bp, Artificial Sequence
  Synthetic oligonucleotide
tgtccacggttcaacaagagtataacacat

SEQ ID NO: 456846 - DNA, 30 bp, Artificial Sequence
  Synthetic oligonucleotide
tacgcgctaaatggctggggtaacacacat

SEQ ID NO: 456847 - DNA, 30 bp, Artificial Sequence
  Synthetic oligonucleotide
agtggtccctattgggcctcacacacacat

SEQ ID NO: 456848 - DNA, 30 bp, Artificial Sequence
  Synthetic oligonucleotide
agcagccgtattttgacagatcagacacat

SEQ ID NO: 456849 - DNA, 30 bp, Artificial Sequence
  Synthetic oligonucleotide
actgtatcatcggggagattatagacacat

SEQ ID NO: 456850 - DNA, 30 bp, Artificial Sequence
  Synthetic oligonucleotide
gtttagaaaaatcgatatttttgtacacat

SEQ ID NO: 456851 - DNA, 30 bp, Artificial Sequence
  Synthetic oligonucleotide
attctaagcccttacttcctagaaccacat

SEQ ID NO: 456852 - DNA, 30 bp, Artificial Sequence
  Synthetic oligonucleotide
ctccgtatctgccacacgtgcgacccacat

SEQ ID NO: 456853 - DNA, 30 bp, Artificial Sequence
  Synthetic oligonucleotide
actgaaatttgcaaattattgcccccacat

SEQ ID NO: 456854 - DNA, 30 bp, Artificial Sequence
  Synthetic oligonucleotide
ctgcgacggtggtgtaacccgttcccacat

SEQ ID NO: 456855 - DNA, 30 bp, Artificial Sequence
  Synthetic oligonucleotide
gtcagatgctcaccaatgaagttgccacat

SEQ ID NO: 456856 - DNA, 30 bp, Artificial Sequence
  Synthetic oligonucleotide
tgtacaggtctaaagccactctccgcacat

SEQ ID NO: 456857 - DNA, 30 bp, Artificial Sequence
  Synthetic oligonucleotide
attcagagtgtcgtaacttggtccgcacat

SEQ ID NO: 456858 - DNA, 30 bp, Artificial Sequence
  Synthetic oligonucleotide
acgttggacaatgtggcttgacgcgcacat

SEQ ID NO: 456859 - DNA, 30 bp, Artificial Sequence
  Synthetic oligonucleotide
cgctcgggcgaaataccgacgcatgcacat

SEQ ID NO: 456860 - DNA, 30 bp, Artificial Sequence
  Synthetic oligonucleotide
acccctactcgccttgaggggcatgcacat

SEQ ID NO: 456861 - DNA, 30 bp, Artificial Sequence
  Synthetic oligonucleotide
attgttatcaacatacagcactatgcacat

SEQ ID NO: 456862 - DNA, 30 bp, Artificial Sequence
  Synthetic oligonucleotide
ccggcacttcgaattgcggtcgttgcacat

SEQ ID NO: 456863 - DNA, 30 bp, Artificial Sequence
  Synthetic oligonucleotide
tgtagcaacgccagacacagactgtcacat

SEQ ID NO: 456864 - DNA, 30 bp, Artificial Sequence
  Synthetic oligonucleotide
ctttactacttactgccgtatatttcacat

SEQ ID NO: 456865 - DNA, 30 bp, Artificial Sequence
  Synthetic oligonucleotide
caatccgctggaagttatttataaagacat

SEQ ID NO: 456866 - DNA, 30 bp, Artificial Sequence
  Synthetic oligonucleotide
accaccgtgcaacgccaggtctaaagacat

SEQ ID NO: 456867 - DNA, 30 bp, Artificial Sequence
  Synthetic oligonucleotide
ttaatggggactaagaggctccgaagacat

SEQ ID NO: 456868 - DNA, 30 bp, Artificial Sequence
  Synthetic oligonucleotide
gcctcaaaactacctgtagtgttcagacat

SEQ ID NO: 456869 - DNA, 30 bp, Artificial Sequence
  Synthetic oligonucleotide
gcagtcaattgggacttcctctcgagacat

SEQ ID NO: 456870 - DNA, 30 bp, Artificial Sequence
  Synthetic oligonucleotide
gtcgtatatgaatacggattacatagacat

SEQ ID NO: 456871 - DNA, 30 bp, Artificial Sequence
  Synthetic oligonucleotide
aagtactatgtcccgtttcaccatagacat

SEQ ID NO: 456872 - DNA, 30 bp, Artificial Sequence
  Synthetic oligonucleotide
tgatttaagtgcggttacatgagtagacat

SEQ ID NO: 456873 - DNA, 30 bp, Artificial Sequence
  Synthetic oligonucleotide
acccgtatcacaactgtatgagttagacat

SEQ ID NO: 456874 - DNA, 30 bp, Artificial Sequence
  Synthetic oligonucleotide
gggctaccgtaacatgaggggtcccgacat

SEQ ID NO: 456875 - DNA, 30 bp, Artificial Sequence
  Synthetic oligonucleotide
tatataggcgcaggatcctacttccgacat

SEQ ID NO: 456876 - DNA, 30 bp, Artificial Sequence
  Synthetic oligonucleotide
ttgagttggccttgaacaggtacgcgacat

SEQ ID NO: 456877 - DNA, 30 bp, Artificial Sequence
  Synthetic oligonucleotide
gatccacaaccggtttcaactatgcgacat

SEQ ID NO: 456878 - DNA, 29 bp, Artificial Sequence
  Synthetic oligonucleotide
ccacgctcaggatctacccgtttcgacat

SEQ ID NO: 456879 - DNA, 30 bp, Artificial Sequence
  Synthetic oligonucleotide
aacagtggaatacctgcggtgtttcgacat

SEQ ID NO: 456880 - DNA, 30 bp, Artificial Sequence
  Synthetic oligonucleotide
gagcgctagcattttcggcgaccaggacat

SEQ ID NO: 456881 - DNA, 30 bp, Artificial Sequence
  Synthetic oligonucleotide
atgcaaatctcctctatatttgcaggacat

SEQ ID NO: 456882 - DNA, 30 bp, Artificial Sequence
  Synthetic oligonucleotide
tgatagtcgaccgctgcggtgctaggacat

SEQ ID NO: 456883 - DNA, 30 bp, Artificial Sequence
  Synthetic oligonucleotide
gagtgcaaatcaacgggaaggaacggacat

SEQ ID NO: 456884 - DNA, 30 bp, Artificial Sequence
  Synthetic oligonucleotide
tagaggagtttttatgaagtatccggacat

SEQ ID NO: 456885 - DNA, 30 bp, Artificial Sequence
  Synthetic oligonucleotide
tcgcagtgacggtgctgtgcacagggacat

SEQ ID NO: 456886 - DNA, 30 bp, Artificial Sequence
  Synthetic oligonucleotide
ttattagctaatgcgttctgagggggacat

SEQ ID NO: 456887 - DNA, 30 bp, Artificial Sequence
  Synthetic oligonucleotide
ctgcaacttcccgtcatatgtgtgggacat

SEQ ID NO: 456888 - DNA, 30 bp, Artificial Sequence
  Synthetic oligonucleotide
cttcgtttttctgagcaggttaatggacat

SEQ ID NO: 456889 - DNA, 30 bp, Artificial Sequence
  Synthetic oligonucleotide
acagttaggagatatccgttcgatggacat

SEQ ID NO: 456890 - DNA, 30 bp, Artificial Sequence
  Synthetic oligonucleotide
atcagtcattaatgtttttctgatggacat

SEQ ID NO: 456891 - DNA, 30 bp, Artificial Sequence
  Synthetic oligonucleotide
ttgtggtaggtgtagtcagggggatgacat

SEQ ID NO: 456892 - DNA, 30 bp, Artificial Sequence
  Synthetic oligonucleotide
attccaatcgagggcgaggcgaagtgacat

SEQ ID NO: 456893 - DNA, 30 bp, Artificial Sequence
  Synthetic oligonucleotide
gagttttttgagacttacgatgggtgacat

SEQ ID NO: 456894 - DNA, 30 bp, Artificial Sequence
  Synthetic oligonucleotide
ttgccaggcagctgtatctgagattgacat

SEQ ID NO: 456895 - DNA, 30 bp, Artificial Sequence
  Synthetic oligonucleotide
ttgtacgtccgtgtaatagcggaaatacat

SEQ ID NO: 456896 - DNA, 30 bp, Artificial Sequence
  Synthetic oligonucleotide
gcaggtattttgtcctcctaaaacatacat

SEQ ID NO: 456897 - DNA, 30 bp, Artificial Sequence
  Synthetic oligonucleotide
ggtaattcagatccacgactgaacatacat

SEQ ID NO: 456898 - DNA, 30 bp, Artificial Sequence
  Synthetic oligonucleotide
gagatgcggttttcccgacattgcatacat

SEQ ID NO: 456899 - DNA, 30 bp, Artificial Sequence
  Synthetic oligonucleotide
ccgggtgcgcgtattgggacgcggatacat

SEQ ID NO: 456900 - DNA, 30 bp, Artificial Sequence
  Synthetic oligonucleotide
taagataataatttggccgaaaatatacat

SEQ ID NO: 456901 - DNA, 30 bp, Artificial Sequence
  Synthetic oligonucleotide
cagcattgagcgatctcgacgaatatacat

SEQ ID NO: 456902 - DNA, 30 bp, Artificial Sequence
  Synthetic oligonucleotide
cccggaagtatgagatgcattgctatacat

SEQ ID NO: 456903 - DNA, 30 bp, Artificial Sequence
  Synthetic oligonucleotide
gtccgctcgtaagattacgttcgtatacat

SEQ ID NO: 456904 - DNA, 30 bp, Artificial Sequence
  Synthetic oligonucleotide
gtacccagttctttgattagtggactacat

SEQ ID NO: 456905 - DNA, 30 bp, Artificial Sequence
  Synthetic oligonucleotide
ggtagcaatgggagttaggtatacctacat

SEQ ID NO: 456906 - DNA, 30 bp, Artificial Sequence
  Synthetic oligonucleotide
caacaagtatcgcgaatttcacagctacat

SEQ ID NO: 456907 - DNA, 30 bp, Artificial Sequence
  Synthetic oligonucleotide
tagattcttctgcgtttaggtcagctacat

SEQ ID NO: 456908 - DNA, 30 bp, Artificial Sequence
  Synthetic oligonucleotide
ggagggagtcctcgtgtaaagcaagtacat

SEQ ID NO: 456909 - DNA, 30 bp, Artificial Sequence
  Synthetic oligonucleotide
gtattttaattcagtcacatcgaagtacat

SEQ ID NO: 456910 - DNA, 30 bp, Artificial Sequence
  Synthetic oligonucleotide
cagctggaatctgttttatgcttagtacat

SEQ ID NO: 456911 - DNA, 30 bp, Artificial Sequence
  Synthetic oligonucleotide
tagttatctgtaaatctacgttacgtacat

SEQ ID NO: 456912 - DNA, 30 bp, Artificial Sequence
  Synthetic oligonucleotide
gagtccgtgaagcagttaggtttcgtacat

SEQ ID NO: 456913 - DNA, 30 bp, Artificial Sequence
  Synthetic oligonucleotide
aatggacactggcgtacgtccacggtacat

SEQ ID NO: 456914 - DNA, 30 bp, Artificial Sequence
  Synthetic oligonucleotide
tgaactttcgtccacaggtctcgggtacat

SEQ ID NO: 456915 - DNA, 30 bp, Artificial Sequence
  Synthetic oligonucleotide
aattaaccggagtctggtaatacattacat

SEQ ID NO: 456916 - DNA, 30 bp, Artificial Sequence
  Synthetic oligonucleotide
ctcctgaatgaccgcatagtgtcattacat

SEQ ID NO: 456917 - DNA, 30 bp, Artificial Sequence
  Synthetic oligonucleotide
ctctcgcgcacacttaaggggatattacat

SEQ ID NO: 456918 - DNA, 30 bp, Artificial Sequence
  Synthetic oligonucleotide
tgtgcgcatctatctaataatctattacat

SEQ ID NO: 456919 - DNA, 30 bp, Artificial Sequence
  Synthetic oligonucleotide
gtccgtggctggaacaaattgtagttacat

SEQ ID NO: 456920 - DNA, 30 bp, Artificial Sequence
  Synthetic oligonucleotide
acttatatggagagaccctatgatttacat

SEQ ID NO: 456921 - DNA, 30 bp, Artificial Sequence
  Synthetic oligonucleotide
tcaagaccctctttttccgcatctttacat

SEQ ID NO: 456922 - DNA, 30 bp, Artificial Sequence
  Synthetic oligonucleotide
ctcaaagatagtaagggacgttctttacat

SEQ ID NO: 456923 - DNA, 30 bp, Artificial Sequence
  Synthetic oligonucleotide
agccgggcatacgtgtgttaatgaaaccat

SEQ ID NO: 456924 - DNA, 30 bp, Artificial Sequence
  Synthetic oligonucleotide
acagtctatgaaatcaactgagacaaccat

SEQ ID NO: 456925 - DNA, 30 bp, Artificial Sequence
  Synthetic oligonucleotide
agaatagatgtcgttctgccagcgaaccat

SEQ ID NO: 456926 - DNA, 30 bp, Artificial Sequence
  Synthetic oligonucleotide
catgacaccgcgtttagtgtcttgaaccat

SEQ ID NO: 456927 - DNA, 30 bp, Artificial Sequence
  Synthetic oligonucleotide
ttccccatcgtcacaatataccgtaaccat

SEQ ID NO: 456928 - DNA, 30 bp, Artificial Sequence
  Synthetic oligonucleotide
cacgctgagaaacgctacaattttaaccat

SEQ ID NO: 456929 - DNA, 30 bp, Artificial Sequence
  Synthetic oligonucleotide
gtatcaacctaattttacatataacaccat

SEQ ID NO: 456930 - DNA, 30 bp, Artificial Sequence
  Synthetic oligonucleotide
aatctaaggcgtttattttcggtacaccat

SEQ ID NO: 456931 - DNA, 30 bp, Artificial Sequence
  Synthetic oligonucleotide
ttctgcggaagcttacagatacagcaccat

SEQ ID NO: 456932 - DNA, 30 bp, Artificial Sequence
  Synthetic oligonucleotide
gcctgcgtgcccggcaggtctgtgcaccat

SEQ ID NO: 456933 - DNA, 30 bp, Artificial Sequence
  Synthetic oligonucleotide
acataggtatcggaagtgcaaggtcaccat

SEQ ID NO: 456934 - DNA, 30 bp, Artificial Sequence
  Synthetic oligonucleotide
tacatttgggtattttttttcggagaccat

SEQ ID NO: 456935 - DNA, 30 bp, Artificial Sequence
  Synthetic oligonucleotide
gccctgtaaattgcgagaacatacgaccat

SEQ ID NO: 456936 - DNA, 30 bp, Artificial Sequence
  Synthetic oligonucleotide
tgagcctatctgaggagtccatgggaccat

SEQ ID NO: 456937 - DNA, 30 bp, Artificial Sequence
  Synthetic oligonucleotide
caaactgtttttcatcccgacctggaccat

SEQ ID NO: 456938 - DNA, 30 bp, Artificial Sequence
  Synthetic oligonucleotide
gttgcaatgttggaccagaaacgataccat

SEQ ID NO: 456939 - DNA, 30 bp, Artificial Sequence
  Synthetic oligonucleotide
aacccccttgcgggaccaacagactaccat

SEQ ID NO: 456940 - DNA, 30 bp, Artificial Sequence
  Synthetic oligonucleotide
agatcctttaagaacgagtaggactaccat

SEQ ID NO: 456941 - DNA, 30 bp, Artificial Sequence
  Synthetic oligonucleotide
gaaacgaccttgtttaactgcccctaccat

SEQ ID NO: 456942 - DNA, 30 bp, Artificial Sequence
  Synthetic oligonucleotide
tcggccctaggatatgtacgcccgtaccat

SEQ ID NO: 456943 - DNA, 30 bp, Artificial Sequence
  Synthetic oligonucleotide
agtagattaagaatttagatggtttaccat

SEQ ID NO: 456944 - DNA, 30 bp, Artificial Sequence
  Synthetic oligonucleotide
acacatctacgcagcctatctctgacccat

SEQ ID NO: 456945 - DNA, 30 bp, Artificial Sequence
  Synthetic oligonucleotide
accgtggatgattggcccccccgtacccat

SEQ ID NO: 456946 - DNA, 30 bp, Artificial Sequence
  Synthetic oligonucleotide
aaaatacctcacgcagttgcccgcccccat

SEQ ID NO: 456947 - DNA, 30 bp, Artificial Sequence
  Synthetic oligonucleotide
acttttcatcgggaccatcagccgccccat

SEQ ID NO: 456948 - DNA, 30 bp, Artificial Sequence
  Synthetic oligonucleotide
attctcttgtcacggttgcgcttgccccat

SEQ ID NO: 456949 - DNA, 30 bp, Artificial Sequence
  Synthetic oligonucleotide
acttttgtgtggtcaccgtaagaagcccat

SEQ ID NO: 456950 - DNA, 30 bp, Artificial Sequence
  Synthetic oligonucleotide
ccgcagtccatgtgatgaaaatgagcccat

SEQ ID NO: 456951 - DNA, 30 bp, Artificial Sequence
  Synthetic oligonucleotide
catggacattttcagtcgccgtaggcccat

SEQ ID NO: 456952 - DNA, 30 bp, Artificial Sequence
  Synthetic oligonucleotide
gtcagtcagcaagtcgcacgtatggcccat

SEQ ID NO: 456953 - DNA, 30 bp, Artificial Sequence
  Synthetic oligonucleotide
tgggaatttctgggcttacccgatgcccat

SEQ ID NO: 456954 - DNA, 30 bp, Artificial Sequence
  Synthetic oligonucleotide
ctttggaattaacaaatctcggctgcccat

SEQ ID NO: 456955 - DNA, 30 bp, Artificial Sequence
  Synthetic oligonucleotide
gacgccgtcgtatcagaattatcatcccat

SEQ ID NO: 456956 - DNA, 30 bp, Artificial Sequence
  Synthetic oligonucleotide
atagtgattatagcggtcaattgatcccat

SEQ ID NO: 456957 - DNA, 30 bp, Artificial Sequence
  Synthetic oligonucleotide
ccgctacatacaaatacgcattggtcccat

SEQ ID NO: 456958 - DNA, 29 bp, Artificial Sequence
  Synthetic oligonucleotide
aaccggctcgtcaacgcaaagattcccat

SEQ ID NO: 456959 - DNA, 30 bp, Artificial Sequence
  Synthetic oligonucleotide
gttgtgtttcttgcttagtatgattcccat

SEQ ID NO: 456960 - DNA, 30 bp, Artificial Sequence
  Synthetic oligonucleotide
aggacttaactatgttggtatacttcccat

SEQ ID NO: 456961 - DNA, 30 bp, Artificial Sequence
  Synthetic oligonucleotide
ggggtctcagcccccggcaggagaagccat

SEQ ID NO: 456962 - DNA, 29 bp, Artificial Sequence
  Synthetic oligonucleotide
gaacgacggtcaatggaatatacagccat

SEQ ID NO: 456963 - DNA, 30 bp, Artificial Sequence
  Synthetic oligonucleotide
tatatgtggtcgacaaggtacccacgccat

SEQ ID NO: 456964 - DNA, 30 bp, Artificial Sequence
  Synthetic oligonucleotide
tacgggggcgttgatatccgcccacgccat

SEQ ID NO: 456965 - DNA, 30 bp, Artificial Sequence
  Synthetic oligonucleotide
taaagaatcgttcgctcgctcctacgccat

SEQ ID NO: 456966 - DNA, 30 bp, Artificial Sequence
  Synthetic oligonucleotide
agtgaagtttaggcccgtaacctccgccat

SEQ ID NO: 456967 - DNA, 30 bp, Artificial Sequence
  Synthetic oligonucleotide
gaactgtttctgccagttctgacgcgccat

SEQ ID NO: 456968 - DNA, 30 bp, Artificial Sequence
  Synthetic oligonucleotide
cttcgccagaagtcgtacgggatgcgccat

SEQ ID NO: 456969 - DNA, 30 bp, Artificial Sequence
  Synthetic oligonucleotide
gcgggcggtgttccattcggcggtcgccat

SEQ ID NO: 456970 - DNA, 30 bp, Artificial Sequence
  Synthetic oligonucleotide
ttgtcgacggagctagtgcatagaggccat

SEQ ID NO: 456971 - DNA, 30 bp, Artificial Sequence
  Synthetic oligonucleotide
gctcctacgatattacaccaaggaggccat

SEQ ID NO: 456972 - DNA, 30 bp, Artificial Sequence
  Synthetic oligonucleotide
aaaaaggttcgacaagcaatcggaggccat

SEQ ID NO: 456973 - DNA, 30 bp, Artificial Sequence
  Synthetic oligonucleotide
catcaataagagcggctgagtataggccat

SEQ ID NO: 456974 - DNA, 30 bp, Artificial Sequence
  Synthetic oligonucleotide
aaaacgtgctttggatttgaccagggccat

SEQ ID NO: 456975 - DNA, 30 bp, Artificial Sequence
  Synthetic oligonucleotide
cagcaagatagcattaattcaacgggccat

SEQ ID NO: 456976 - DNA, 30 bp, Artificial Sequence
  Synthetic oligonucleotide
gcaagaaaaacggtagttttttggggccat

SEQ ID NO: 456977 - DNA, 30 bp, Artificial Sequence
  Synthetic oligonucleotide
agtggagttgcattaagatattttggccat

SEQ ID NO: 456978 - DNA, 30 bp, Artificial Sequence
  Synthetic oligonucleotide
ataaagcagcgcgttcagtctatatgccat

SEQ ID NO: 456979 - DNA, 30 bp, Artificial Sequence
  Synthetic oligonucleotide
tagtcaggtttgggtgccgaagcctgccat

SEQ ID NO: 456980 - DNA, 30 bp, Artificial Sequence
  Synthetic oligonucleotide
agttcgagccggatttaaaatcggtgccat

SEQ ID NO: 456981 - DNA, 30 bp, Artificial Sequence
  Synthetic oligonucleotide
tccgccaactcggagctatctggaatccat

SEQ ID NO: 456982 - DNA, 30 bp, Artificial Sequence
  Synthetic oligonucleotide
ttcaaccggtatagcatccgtgatatccat

SEQ ID NO: 456983 - DNA, 30 bp, Artificial Sequence
  Synthetic oligonucleotide
gcagtcaccggaagatgagaagttatccat

SEQ ID NO: 456984 - DNA, 30 bp, Artificial Sequence
  Synthetic oligonucleotide
acagtagtgcgggtcactattatactccat

SEQ ID NO: 456985 - DNA, 30 bp, Artificial Sequence
  Synthetic oligonucleotide
aaaagacgctgcgcctggagtgcgctccat

SEQ ID NO: 456986 - DNA, 30 bp, Artificial Sequence
  Synthetic oligonucleotide
atgactgcctgttctcctaggcatctccat

SEQ ID NO: 456987 - DNA, 30 bp, Artificial Sequence
  Synthetic oligonucleotide
gcgccaagtcagtacatcgtacctctccat

SEQ ID NO: 456988 - DNA, 30 bp, Artificial Sequence
  Synthetic oligonucleotide
attcctaggggactacacggagttctccat

SEQ ID NO: 456989 - DNA, 30 bp, Artificial Sequence
  Synthetic oligonucleotide
aacgacacgcgcaagacacagcaagtccat

SEQ ID NO: 456990 - DNA, 30 bp, Artificial Sequence
  Synthetic oligonucleotide
cgcgagccaaaggactcccaaacagtccat

SEQ ID NO: 456991 - DNA, 30 bp, Artificial Sequence
  Synthetic oligonucleotide
tgcttcgcagtaaaccaagagccggtccat

SEQ ID NO: 456992 - DNA, 30 bp, Artificial Sequence
  Synthetic oligonucleotide
gaagctagtaaagttaagtcctcggtccat

SEQ ID NO: 456993 - DNA, 30 bp, Artificial Sequence
  Synthetic oligonucleotide
gattagagttttgatatgttacctgtccat

SEQ ID NO: 456994 - DNA, 30 bp, Artificial Sequence
  Synthetic oligonucleotide
tagagtcctccttcgagcatgcctgtccat

SEQ ID NO: 456995 - DNA, 31 bp, Artificial Sequence
  Synthetic oligonucleotide
atgggaaactcaccgctgcggaggtgtccat

SEQ ID NO: 456996 - DNA, 30 bp, Artificial Sequence
  Synthetic oligonucleotide
tacaacgagcattcatatgcgcgcttccat

SEQ ID NO: 456997 - DNA, 30 bp, Artificial Sequence
  Synthetic oligonucleotide
tgtaggtctaacgatcgtgtgtcgttccat

SEQ ID NO: 456998 - DNA, 30 bp, Artificial Sequence
  Synthetic oligonucleotide
ataataaaaggcggtctgcagaacaagcat

SEQ ID NO: 456999 - DNA, 30 bp, Artificial Sequence
  Synthetic oligonucleotide
agcctgaacagacgtcgcggcagcaagcat

SEQ ID NO: 457000 - DNA, 30 bp, Artificial Sequence
  Synthetic oligonucleotide
tttagagcgttttaaaaacccatcaagcat

SEQ ID NO: 457001 - DNA, 30 bp, Artificial Sequence
  Synthetic oligonucleotide
gatcgtcgccaacaatgcaataagaagcat

SEQ ID NO: 457002 - DNA, 30 bp, Artificial Sequence
  Synthetic oligonucleotide
gcactaggcgatatgagattgacgaagcat

SEQ ID NO: 457003 - DNA, 30 bp, Artificial Sequence
  Synthetic oligonucleotide
gtaatcgctaaaaggatggacaataagcat

SEQ ID NO: 457004 - DNA, 30 bp, Artificial Sequence
  Synthetic oligonucleotide
gatataacaagtttggagaagtttaagcat

SEQ ID NO: 457005 - DNA, 30 bp, Artificial Sequence
  Synthetic oligonucleotide
gtattataataaccgatattaccccagcat

SEQ ID NO: 457006 - DNA, 30 bp, Artificial Sequence
  Synthetic oligonucleotide
tacatgtgcagtttgtcgagcatgcagcat

SEQ ID NO: 457007 - DNA, 30 bp, Artificial Sequence
  Synthetic oligonucleotide
tccactaaattattttatacggtcgagcat

SEQ ID NO: 457008 - DNA, 30 bp, Artificial Sequence
  Synthetic oligonucleotide
cgggtggtgctgatgtagcacgaggagcat

SEQ ID NO: 457009 - DNA, 30 bp, Artificial Sequence
  Synthetic oligonucleotide
ataatgatgtttcaggcaactacggagcat

SEQ ID NO: 457010 - DNA, 30 bp, Artificial Sequence
  Synthetic oligonucleotide
tggctttcattgcaggcagcgcctgagcat

SEQ ID NO: 457011 - DNA, 30 bp, Artificial Sequence
  Synthetic oligonucleotide
agatctcgtcggctctttcaataatagcat

SEQ ID NO: 457012 - DNA, 30 bp, Artificial Sequence
  Synthetic oligonucleotide
tgtatgcggttctcctaagggatatagcat

SEQ ID NO: 457013 - DNA, 30 bp, Artificial Sequence
  Synthetic oligonucleotide
gaccagaaacgattgtaagggcactagcat

SEQ ID NO: 457014 - DNA, 30 bp, Artificial Sequence
  Synthetic oligonucleotide
ataggaagcgctcgctagctaagctagcat

SEQ ID NO: 457015 - DNA, 30 bp, Artificial Sequence
  Synthetic oligonucleotide
attgagtcactgtcatggtagatctagcat

SEQ ID NO: 457016 - DNA, 30 bp, Artificial Sequence
  Synthetic oligonucleotide
gtaactctgctcgtcaagttgggttagcat

SEQ ID NO: 457017 - DNA, 30 bp, Artificial Sequence
  Synthetic oligonucleotide
tctagtggcctgcatacctgtatttagcat

SEQ ID NO: 457018 - DNA, 30 bp, Artificial Sequence
  Synthetic oligonucleotide
atccaggatcctgtatgtttcaccacgcat

SEQ ID NO: 457019 - DNA, 30 bp, Artificial Sequence
  Synthetic oligonucleotide
cggatgttattggatttccaggagacgcat

SEQ ID NO: 457020 - DNA, 30 bp, Artificial Sequence
  Synthetic oligonucleotide
gatccgcctgctactgcgtcgctaccgcat

SEQ ID NO: 457021 - DNA, 30 bp, Artificial Sequence
  Synthetic oligonucleotide
ccgaatgcggatgacccagtgtacccgcat

SEQ ID NO: 457022 - DNA, 30 bp, Artificial Sequence
  Synthetic oligonucleotide
ggtttagaactaccggtgaaacagccgcat

SEQ ID NO: 457023 - DNA, 30 bp, Artificial Sequence
  Synthetic oligonucleotide
gactctcagttagcaacaataaatccgcat

SEQ ID NO: 457024 - DNA, 30 bp, Artificial Sequence
  Synthetic oligonucleotide
ctattgaacgcctcagaatataaagcgcat

SEQ ID NO: 457025 - DNA, 30 bp, Artificial Sequence
  Synthetic oligonucleotide
attgtagtcaatccgtgaaacacagcgcat

SEQ ID NO: 457026 - DNA, 30 bp, Artificial Sequence
  Synthetic oligonucleotide
tcactgtcatggactactcccccagcgcat

SEQ ID NO: 457027 - DNA, 30 bp, Artificial Sequence
  Synthetic oligonucleotide
gcataggtcttaagtcatccgctagcgcat

SEQ ID NO: 457028 - DNA, 30 bp, Artificial Sequence
  Synthetic oligonucleotide
agtatgttaaggcggagtaaactcgcgcat

SEQ ID NO: 457029 - DNA, 30 bp, Artificial Sequence
  Synthetic oligonucleotide
atagcgattcacgagtctttttatgcgcat

SEQ ID NO: 457030 - DNA, 30 bp, Artificial Sequence
  Synthetic oligonucleotide
tagaggttaatcgagcgcagttctgcgcat

SEQ ID NO: 457031 - DNA, 30 bp, Artificial Sequence
  Synthetic oligonucleotide
gaatgcagtgcgcgtcctaagattgcgcat

SEQ ID NO: 457032 - DNA, 30 bp, Artificial Sequence
  Synthetic oligonucleotide
aggtacatggtttcttagattagatcgcat

SEQ ID NO: 457033 - DNA, 30 bp, Artificial Sequence
  Synthetic oligonucleotide
ttactacgtcaacgcaatgggggatcgcat

SEQ ID NO: 457034 - DNA, 30 bp, Artificial Sequence
  Synthetic oligonucleotide
attctagtcggccattgttgccactcgcat

SEQ ID NO: 457035 - DNA, 30 bp, Artificial Sequence
  Synthetic oligonucleotide
cctgtttcgcattttaaagcatgctcgcat

SEQ ID NO: 457036 - DNA, 30 bp, Artificial Sequence
  Synthetic oligonucleotide
tatcggatgattgttgggcgttgctcgcat

SEQ ID NO: 457037 - DNA, 30 bp, Artificial Sequence
  Synthetic oligonucleotide
cctgtttttaccgacccactcaggtcgcat

SEQ ID NO: 457038 - DNA, 30 bp, Artificial Sequence
  Synthetic oligonucleotide
gaagtccataagttgtataggtattcgcat

SEQ ID NO: 457039 - DNA, 30 bp, Artificial Sequence
  Synthetic oligonucleotide
gacggaaattgcatcagtgttttcaggcat

SEQ ID NO: 457040 - DNA, 30 bp, Artificial Sequence
  Synthetic oligonucleotide
cagttctgaacgcttagctacggtaggcat

SEQ ID NO: 457041 - DNA, 30 bp, Artificial Sequence
  Synthetic oligonucleotide
actggcttgcataggcttcagcgacggcat

SEQ ID NO: 457042 - DNA, 31 bp, Artificial Sequence
  Synthetic oligonucleotide
ttaaccgagagccgataatgaagtccggcat

SEQ ID NO: 457043 - DNA, 30 bp, Artificial Sequence
  Synthetic oligonucleotide
gaaagccttagtcagggccagccgcggcat

SEQ ID NO: 457044 - DNA, 30 bp, Artificial Sequence
  Synthetic oligonucleotide
ggaaagggtcggcctttttaggcgcggcat

SEQ ID NO: 457045 - DNA, 30 bp, Artificial Sequence
  Synthetic oligonucleotide
agataaaaggctgtatactgtatgcggcat

SEQ ID NO: 457046 - DNA, 30 bp, Artificial Sequence
  Synthetic oligonucleotide
tatgcggcgaaatcactgagcactcggcat

SEQ ID NO: 457047 - DNA, 30 bp, Artificial Sequence
  Synthetic oligonucleotide
ttatcgccctttcaactccgtcctcggcat

SEQ ID NO: 457048 - DNA, 30 bp, Artificial Sequence
  Synthetic oligonucleotide
gttggaaccaagccctctgaggctcggcat

SEQ ID NO: 457049 - DNA, 30 bp, Artificial Sequence
  Synthetic oligonucleotide
aggagaatctcgcagaaatagtctcggcat

SEQ ID NO: 457050 - DNA, 30 bp, Artificial Sequence
  Synthetic oligonucleotide
gtaattcaccctcgcctggcgaaagggcat

SEQ ID NO: 457051 - DNA, 30 bp, Artificial Sequence
  Synthetic oligonucleotide
gatgtttgccctgagcgacagggcgggcat

SEQ ID NO: 457052 - DNA, 30 bp, Artificial Sequence
  Synthetic oligonucleotide
ggatccatttgggaacacgcggtcgggcat

SEQ ID NO: 457053 - DNA, 30 bp, Artificial Sequence
  Synthetic oligonucleotide
gagctctacagtcgccaaacccaggggcat

SEQ ID NO: 457054 - DNA, 30 bp, Artificial Sequence
  Synthetic oligonucleotide
caaacttggttctgtgcttaagatgggcat

SEQ ID NO: 457055 - DNA, 30 bp, Artificial Sequence
  Synthetic oligonucleotide
gactccaaggctcgatgaggttaatggcat

SEQ ID NO: 457056 - DNA, 30 bp, Artificial Sequence
  Synthetic oligonucleotide
gtgcgatatggcacttcggtgccatggcat

SEQ ID NO: 457057 - DNA, 30 bp, Artificial Sequence
  Synthetic oligonucleotide
gcagaaagggccgaacgccagatctggcat

SEQ ID NO: 457058 - DNA, 30 bp, Artificial Sequence
  Synthetic oligonucleotide
gtccatcggtagacgtagtttcagtggcat

SEQ ID NO: 457059 - DNA, 30 bp, Artificial Sequence
  Synthetic oligonucleotide
acccgttgtgagtcatactttaattggcat

SEQ ID NO: 457060 - DNA, 31 bp, Artificial Sequence
  Synthetic oligonucleotide
aaaaagtttccgacaagtcatttgttggcat

SEQ ID NO: 457061 - DNA, 30 bp, Artificial Sequence
  Synthetic oligonucleotide
gacattagtggacaaggcaacacaatgcat

SEQ ID NO: 457062 - DNA, 29 bp, Artificial Sequence
  Synthetic oligonucleotide
aggaacgactgcaatcttgcacaatgcat

SEQ ID NO: 457063 - DNA, 30 bp, Artificial Sequence
  Synthetic oligonucleotide
tcatatgaccctatacgactggcaatgcat

SEQ ID NO: 457064 - DNA, 30 bp, Artificial Sequence
  Synthetic oligonucleotide
tcgcagtaagaggaacgatcctcaatgcat

SEQ ID NO: 457065 - DNA, 30 bp, Artificial Sequence
  Synthetic oligonucleotide
tctgtgtttccagtaggttgtcgaatgcat

SEQ ID NO: 457066 - DNA, 30 bp, Artificial Sequence
  Synthetic oligonucleotide
gcccggaagctgagctgatcaaagatgcat

SEQ ID NO: 457067 - DNA, 30 bp, Artificial Sequence
  Synthetic oligonucleotide
taatgataggcagctatcaactggatgcat

SEQ ID NO: 457068 - DNA, 30 bp, Artificial Sequence
  Synthetic oligonucleotide
gggcacatcctaagttgtgagatgatgcat

SEQ ID NO: 457069 - DNA, 30 bp, Artificial Sequence
  Synthetic oligonucleotide
tagtgaatgcacttattctggcatatgcat

SEQ ID NO: 457070 - DNA, 30 bp, Artificial Sequence
  Synthetic oligonucleotide
gcaccgcacatactacgatccgatatgcat

SEQ ID NO: 457071 - DNA, 30 bp, Artificial Sequence
  Synthetic oligonucleotide
aaatctccaaatgtgcctctatatatgcat

SEQ ID NO: 457072 - DNA, 30 bp, Artificial Sequence
  Synthetic oligonucleotide
taaattcagtacgcctctccttatatgcat

SEQ ID NO: 457073 - DNA, 30 bp, Artificial Sequence
  Synthetic oligonucleotide
tggcccttcagccatgttcagtaactgcat

SEQ ID NO: 457074 - DNA, 29 bp, Artificial Sequence
  Synthetic oligonucleotide
agtgacgacaggtccgacattgcctgcat

SEQ ID NO: 457075 - DNA, 30 bp, Artificial Sequence
  Synthetic oligonucleotide
tatatattgtccgtatctagcatgctgcat

SEQ ID NO: 457076 - DNA, 30 bp, Artificial Sequence
  Synthetic oligonucleotide
tagctaacgagacagcagtgcttgctgcat

SEQ ID NO: 457077 - DNA, 30 bp, Artificial Sequence
  Synthetic oligonucleotide
atgcttggtcgcgtcagcgactaagtgcat

SEQ ID NO: 457078 - DNA, 30 bp, Artificial Sequence
  Synthetic oligonucleotide
gagtcgagtgaggtgggtttttaagtgcat

SEQ ID NO: 457079 - DNA, 30 bp, Artificial Sequence
  Synthetic oligonucleotide
cgcggtaatggaattgagcctctagtgcat

SEQ ID NO: 457080 - DNA, 30 bp, Artificial Sequence
  Synthetic oligonucleotide
cacctgcaaaggtggtggacggccgtgcat

SEQ ID NO: 457081 - DNA, 30 bp, Artificial Sequence
  Synthetic oligonucleotide
ttatagccttgcaatcatttgcccttgcat

SEQ ID NO: 457082 - DNA, 30 bp, Artificial Sequence
  Synthetic oligonucleotide
ggactcggtgcaacagcccgtacgttgcat

SEQ ID NO: 457083 - DNA, 30 bp, Artificial Sequence
  Synthetic oligonucleotide
tcctaatgtaccttaagcagaaggttgcat

SEQ ID NO: 457084 - DNA, 30 bp, Artificial Sequence
  Synthetic oligonucleotide
cttttgggctcatgctactatcatttgcat

SEQ ID NO: 457085 - DNA, 30 bp, Artificial Sequence
  Synthetic oligonucleotide
tccaggtcaaagcaaattattcatttgcat

SEQ ID NO: 457086 - DNA, 30 bp, Artificial Sequence
  Synthetic oligonucleotide
tgaacttaatcgactaggtttcctttgcat

SEQ ID NO: 457087 - DNA, 30 bp, Artificial Sequence
  Synthetic oligonucleotide
cttaaggatatttggacctagagaaatcat

SEQ ID NO: 457088 - DNA, 30 bp, Artificial Sequence
  Synthetic oligonucleotide
gatcctccgtcgtatttcctgatcaatcat

SEQ ID NO: 457089 - DNA, 30 bp, Artificial Sequence
  Synthetic oligonucleotide
gtctaattctagtgtaatagcaggaatcat

SEQ ID NO: 457090 - DNA, 30 bp, Artificial Sequence
  Synthetic oligonucleotide
agcaatgaacttgctgcgctagtgaatcat

SEQ ID NO: 457091 - DNA, 30 bp, Artificial Sequence
  Synthetic oligonucleotide
gtacgtgtttcagtgcagtcgcataatcat

SEQ ID NO: 457092 - DNA, 30 bp, Artificial Sequence
  Synthetic oligonucleotide
gttgtctaaccgggatacagcggtaatcat

SEQ ID NO: 457093 - DNA, 30 bp, Artificial Sequence
  Synthetic oligonucleotide
ccatttgtgtgcagtgcgctgcaccatcat

SEQ ID NO: 457094 - DNA, 30 bp, Artificial Sequence
  Synthetic oligonucleotide
aaactggtccggacattttcgcagcatcat

SEQ ID NO: 457095 - DNA, 30 bp, Artificial Sequence
  Synthetic oligonucleotide
taaagacatgcgggactcaggtcgcatcat

SEQ ID NO: 457096 - DNA, 30 bp, Artificial Sequence
  Synthetic oligonucleotide
gggagtggcgctgcgctatcagggcatcat

SEQ ID NO: 457097 - DNA, 30 bp, Artificial Sequence
  Synthetic oligonucleotide
gtatatatgacaggaccactatgtcatcat

SEQ ID NO: 457098 - DNA, 30 bp, Artificial Sequence
  Synthetic oligonucleotide
acaacaaactccgggcgggtatgtcatcat

SEQ ID NO: 457099 - DNA, 30 bp, Artificial Sequence
  Synthetic oligonucleotide
tttgacctatgtagtcgactttgtcatcat

SEQ ID NO: 457100 - DNA, 30 bp, Artificial Sequence
  Synthetic oligonucleotide
cgaggtaaagcctcttacttgtttcatcat

SEQ ID NO: 457101 - DNA, 30 bp, Artificial Sequence
  Synthetic oligonucleotide
ataatcgaattctaggtgtttcaagatcat

SEQ ID NO: 457102 - DNA, 30 bp, Artificial Sequence
  Synthetic oligonucleotide
aaatgatctggcggcactggttgagatcat

SEQ ID NO: 457103 - DNA, 30 bp, Artificial Sequence
  Synthetic oligonucleotide
attaactcctctaagtcgcacgaggatcat

SEQ ID NO: 457104 - DNA, 30 bp, Artificial Sequence
  Synthetic oligonucleotide
aggtctatccaaactgaattgggtgatcat

SEQ ID NO: 457105 - DNA, 30 bp, Artificial Sequence
  Synthetic oligonucleotide
ggaatgcgttacttgccaacataatatcat

SEQ ID NO: 457106 - DNA, 30 bp, Artificial Sequence
  Synthetic oligonucleotide
tggatataaccgtattgcataagctatcat

SEQ ID NO: 457107 - DNA, 30 bp, Artificial Sequence
  Synthetic oligonucleotide
gaaaataatccaccccgaaggcggtatcat

SEQ ID NO: 457108 - DNA, 30 bp, Artificial Sequence
  Synthetic oligonucleotide
caatatcactgggtgtcaggagggtatcat

SEQ ID NO: 457109 - DNA, 30 bp, Artificial Sequence
  Synthetic oligonucleotide
gcctctaagaagagccgagtttcttatcat

SEQ ID NO: 457110 - DNA, 30 bp, Artificial Sequence
  Synthetic oligonucleotide
ccgccgaggtcagtttatggtagttatcat

SEQ ID NO: 457111 - DNA, 30 bp, Artificial Sequence
  Synthetic oligonucleotide
gtgtacttcgaaccctactatcgttatcat

SEQ ID NO: 457112 - DNA, 30 bp, Artificial Sequence
  Synthetic oligonucleotide
tgtggcccgttttggatatggggcactcat

SEQ ID NO: 457113 - DNA, 30 bp, Artificial Sequence
  Synthetic oligonucleotide
ttaacctaagtgtgagattggaagactcat

SEQ ID NO: 457114 - DNA, 30 bp, Artificial Sequence
  Synthetic oligonucleotide
gttactttcgtgaggtcaatggagactcat

SEQ ID NO: 457115 - DNA, 30 bp, Artificial Sequence
  Synthetic oligonucleotide
ttgtcatcagattcaactgcacggactcat

SEQ ID NO: 457116 - DNA, 30 bp, Artificial Sequence
  Synthetic oligonucleotide
tacttaaatagtatcggaatcattactcat

SEQ ID NO: 457117 - DNA, 30 bp, Artificial Sequence
  Synthetic oligonucleotide
acttttatccccctatggaatgtacctcat

SEQ ID NO: 457118 - DNA, 30 bp, Artificial Sequence
  Synthetic oligonucleotide
tttttggcgttttcattgttgtcccctcat

SEQ ID NO: 457119 - DNA, 30 bp, Artificial Sequence
  Synthetic oligonucleotide
tgtttgaatctcgtttatatggagcctcat

SEQ ID NO: 457120 - DNA, 30 bp, Artificial Sequence
  Synthetic oligonucleotide
ttcagacgcgtctcatggttatggcctcat

SEQ ID NO: 457121 - DNA, 30 bp, Artificial Sequence
  Synthetic oligonucleotide
tatatccgattgatatataggtggcctcat

SEQ ID NO: 457122 - DNA, 30 bp, Artificial Sequence
  Synthetic oligonucleotide
gcacattacgccaattagcaaatgcctcat

SEQ ID NO: 457123 - DNA, 30 bp, Artificial Sequence
  Synthetic oligonucleotide
ctgatgcggcctcgggatgagactcctcat

SEQ ID NO: 457124 - DNA, 30 bp, Artificial Sequence
  Synthetic oligonucleotide
aagtgggactatcaagagctgtgtcctcat

SEQ ID NO: 457125 - DNA, 30 bp, Artificial Sequence
  Synthetic oligonucleotide
gtttgtttggcggcacatatcgttcctcat

SEQ ID NO: 457126 - DNA, 30 bp, Artificial Sequence
  Synthetic oligonucleotide
gggcctgttattctgtgccgcacagctcat

SEQ ID NO: 457127 - DNA, 30 bp, Artificial Sequence
  Synthetic oligonucleotide
ggcttcattaatgcggctccatgcgctcat

SEQ ID NO: 457128 - DNA, 30 bp, Artificial Sequence
  Synthetic oligonucleotide
tgctctgtgtactttatggcagaggctcat

SEQ ID NO: 457129 - DNA, 30 bp, Artificial Sequence
  Synthetic oligonucleotide
atttttgggacggagggggccgaggctcat

SEQ ID NO: 457130 - DNA, 30 bp, Artificial Sequence
  Synthetic oligonucleotide
gttagtccctagctatcatagccggctcat

SEQ ID NO: 457131 - DNA, 30 bp, Artificial Sequence
  Synthetic oligonucleotide
tcttctggcagcatgatggggaatgctcat

SEQ ID NO: 457132 - DNA, 30 bp, Artificial Sequence
  Synthetic oligonucleotide
gttgggagcccgcacattttgccctctcat

SEQ ID NO: 457133 - DNA, 30 bp, Artificial Sequence
  Synthetic oligonucleotide
gtgggcgatttaaaagatacagtctctcat

SEQ ID NO: 457134 - DNA, 30 bp, Artificial Sequence
  Synthetic oligonucleotide
ggcgccacttatctttggtatttctctcat

SEQ ID NO: 457135 - DNA, 30 bp, Artificial Sequence
  Synthetic oligonucleotide
gccttagactcctagtagtgttggtctcat

SEQ ID NO: 457136 - DNA, 30 bp, Artificial Sequence
  Synthetic oligonucleotide
gtcgatgaactgttttacagccattctcat

SEQ ID NO: 457137 - DNA, 30 bp, Artificial Sequence
  Synthetic oligonucleotide
ccagtattaagtatctccctttaaagtcat

SEQ ID NO: 457138 - DNA, 30 bp, Artificial Sequence
  Synthetic oligonucleotide
gttaaagttttactccgggtgtcaagtcat

SEQ ID NO: 457139 - DNA, 30 bp, Artificial Sequence
  Synthetic oligonucleotide
cacgttcagggagttggcagaggcagtcat

SEQ ID NO: 457140 - DNA, 30 bp, Artificial Sequence
  Synthetic oligonucleotide
gctgcaatgagtcgagacccgacgagtcat

SEQ ID NO: 457141 - DNA, 30 bp, Artificial Sequence
  Synthetic oligonucleotide
ctcgaatttgcggtcgtggttaggagtcat

SEQ ID NO: 457142 - DNA, 30 bp, Artificial Sequence
  Synthetic oligonucleotide
ttgctgttcacccatctgttcttgagtcat

SEQ ID NO: 457143 - DNA, 30 bp, Artificial Sequence
  Synthetic oligonucleotide
atgccgctgctgtacggatagggtagtcat

SEQ ID NO: 457144 - DNA, 30 bp, Artificial Sequence
  Synthetic oligonucleotide
cgcgaacctgcatggtagtatgtacgtcat

SEQ ID NO: 457145 - DNA, 30 bp, Artificial Sequence
  Synthetic oligonucleotide
accggttctcttctgagaatgttccgtcat

SEQ ID NO: 457146 - DNA, 30 bp, Artificial Sequence
  Synthetic oligonucleotide
atgaacgattacatttaaaaggctcgtcat

SEQ ID NO: 457147 - DNA, 30 bp, Artificial Sequence
  Synthetic oligonucleotide
tgcgattaactaagaaccaccataggtcat

SEQ ID NO: 457148 - DNA, 30 bp, Artificial Sequence
  Synthetic oligonucleotide
aaattagaggccggagcgtcaaagggtcat

SEQ ID NO: 457149 - DNA, 30 bp, Artificial Sequence
  Synthetic oligonucleotide
atgaaggccgacgatttacgctagggtcat

SEQ ID NO: 457150 - DNA, 31 bp, Artificial Sequence
  Synthetic oligonucleotide
gtcagtactagtccgagactaggcgggtcat

SEQ ID NO: 457151 - DNA, 30 bp, Artificial Sequence
  Synthetic oligonucleotide
ttgtttcgtcatctggcaacagtgggtcat

SEQ ID NO: 457152 - DNA, 30 bp, Artificial Sequence
  Synthetic oligonucleotide
agttccagtttgatacttgtaaactgtcat

SEQ ID NO: 457153 - DNA, 30 bp, Artificial Sequence
  Synthetic oligonucleotide
ttatcaagatcgtcggtgttgcgctgtcat

SEQ ID NO: 457154 - DNA, 30 bp, Artificial Sequence
  Synthetic oligonucleotide
cgcgttacggaaatgcagcccatttgtcat

SEQ ID NO: 457155 - DNA, 30 bp, Artificial Sequence
  Synthetic oligonucleotide
gatgcatatacgacagggccattttgtcat

SEQ ID NO: 457156 - DNA, 30 bp, Artificial Sequence
  Synthetic oligonucleotide
cccaaggctaggtccttggtcttttgtcat

SEQ ID NO: 457157 - DNA, 30 bp, Artificial Sequence
  Synthetic oligonucleotide
caaagcatcatatccgcccacacaattcat

SEQ ID NO: 457158 - DNA, 30 bp, Artificial Sequence
  Synthetic oligonucleotide
attatttagagacaagctagatgcattcat

SEQ ID NO: 457159 - DNA, 30 bp, Artificial Sequence
  Synthetic oligonucleotide
cgcttctgtcgtcagaccggaatgattcat

SEQ ID NO: 457160 - DNA, 30 bp, Artificial Sequence
  Synthetic oligonucleotide
ccatgtcggaggataaatcctgtgattcat

SEQ ID NO: 457161 - DNA, 30 bp, Artificial Sequence
  Synthetic oligonucleotide
agaacacagagtatactcgtgttgattcat

SEQ ID NO: 457162 - DNA, 30 bp, Artificial Sequence
  Synthetic oligonucleotide
cgaggcaattcattaatacttactattcat

SEQ ID NO: 457163 - DNA, 30 bp, Artificial Sequence
  Synthetic oligonucleotide
cttcgatccataggcgaagtgtaccttcat

SEQ ID NO: 457164 - DNA, 30 bp, Artificial Sequence
  Synthetic oligonucleotide
ggaagttccgaaaactactaagggcttcat

SEQ ID NO: 457165 - DNA, 30 bp, Artificial Sequence
  Synthetic oligonucleotide
aaaggttttgaaacagtctcttgtcttcat

SEQ ID NO: 457166 - DNA, 30 bp, Artificial Sequence
  Synthetic oligonucleotide
ccgagtcggggggaagaaacgaaagttcat

SEQ ID NO: 457167 - DNA, 30 bp, Artificial Sequence
  Synthetic oligonucleotide
ggtatctataatgcattaacatcagttcat

SEQ ID NO: 457168 - DNA, 30 bp, Artificial Sequence
  Synthetic oligonucleotide
tgatgcggacggtaaatgggatcagttcat

SEQ ID NO: 457169 - DNA, 30 bp, Artificial Sequence
  Synthetic oligonucleotide
tggtcctagtcaggcaagagcggagttcat

SEQ ID NO: 457170 - DNA, 30 bp, Artificial Sequence
  Synthetic oligonucleotide
gaacaaatttactaattaaagtgagttcat

SEQ ID NO: 457171 - DNA, 30 bp, Artificial Sequence
  Synthetic oligonucleotide
gcactatgctacctgtatttaatagttcat

SEQ ID NO: 457172 - DNA, 30 bp, Artificial Sequence
  Synthetic oligonucleotide
caacgcatacataggagagaattagttcat

SEQ ID NO: 457173 - DNA, 30 bp, Artificial Sequence
  Synthetic oligonucleotide
tacatgccgggactctgaacgcccgttcat

SEQ ID NO: 457174 - DNA, 30 bp, Artificial Sequence
  Synthetic oligonucleotide
gtccaagacgtaatttgtccacaggttcat

SEQ ID NO: 457175 - DNA, 30 bp, Artificial Sequence
  Synthetic oligonucleotide
cccttacgtcccttgggcgacgaggttcat

SEQ ID NO: 457176 - DNA, 30 bp, Artificial Sequence
  Synthetic oligonucleotide
ggatggtctcggatgtaccagggggttcat

SEQ ID NO: 457177 - DNA, 30 bp, Artificial Sequence
  Synthetic oligonucleotide
gcggctatcgttctataacggggggttcat

SEQ ID NO: 457178 - DNA, 30 bp, Artificial Sequence
  Synthetic oligonucleotide
tgatactaaagtttttctcggtgggttcat

SEQ ID NO: 457179 - DNA, 30 bp, Artificial Sequence
  Synthetic oligonucleotide
tcggagcgctacgacaccggcattgttcat

SEQ ID NO: 457180 - DNA, 30 bp, Artificial Sequence
  Synthetic oligonucleotide
cttcataaccgcaagttcaactttgttcat

SEQ ID NO: 457181 - DNA, 30 bp, Artificial Sequence
  Synthetic oligonucleotide
ttaacaagcagcgagaactcggcatttcat

SEQ ID NO: 457182 - DNA, 30 bp, Artificial Sequence
  Synthetic oligonucleotide
ctctcacgtacctttgacgccagatttcat

SEQ ID NO: 457183 - DNA, 30 bp, Artificial Sequence
  Synthetic oligonucleotide
ggtctcactgtcagtaggtatgtatttcat

SEQ ID NO: 457184 - DNA, 30 bp, Artificial Sequence
  Synthetic oligonucleotide
gtataccgcttttttactgaatactttcat

SEQ ID NO: 457185 - DNA, 30 bp, Artificial Sequence
  Synthetic oligonucleotide
tacgacctgcctgtgtcgcaggggtttcat

SEQ ID NO: 457186 - DNA, 30 bp, Artificial Sequence
  Synthetic oligonucleotide
ggaaactattttcaacactacctgtttcat

SEQ ID NO: 457187 - DNA, 30 bp, Artificial Sequence
  Synthetic oligonucleotide
aaaagtatatgtacaatcacgaattttcat

SEQ ID NO: 457188 - DNA, 30 bp, Artificial Sequence
  Synthetic oligonucleotide
gcccgaagagccccataggtacattttcat

SEQ ID NO: 457189 - DNA, 30 bp, Artificial Sequence
  Synthetic oligonucleotide
cactctccgtgttagttcgggctttttcat

SEQ ID NO: 457190 - DNA, 30 bp, Artificial Sequence
  Synthetic oligonucleotide
gcgttattgttttgctagcaggtttttcat

SEQ ID NO: 457191 - DNA, 30 bp, Artificial Sequence
  Synthetic oligonucleotide
tatattcagcccagtggtaccacaaaagat

SEQ ID NO: 457192 - DNA, 30 bp, Artificial Sequence
  Synthetic oligonucleotide
gtaatactgcaattcgtttatccgaaagat

SEQ ID NO: 457193 - DNA, 30 bp, Artificial Sequence
  Synthetic oligonucleotide
ctaaggtccctgccctaaattcctaaagat

SEQ ID NO: 457194 - DNA, 30 bp, Artificial Sequence
  Synthetic oligonucleotide
aaagtttcagcctttgggatgcttaaagat

SEQ ID NO: 457195 - DNA, 30 bp, Artificial Sequence
  Synthetic oligonucleotide
cgatttctctatcctggtcagagacaagat

SEQ ID NO: 457196 - DNA, 30 bp, Artificial Sequence
  Synthetic oligonucleotide
gttaatgcactagcattggcgtgccaagat

SEQ ID NO: 457197 - DNA, 30 bp, Artificial Sequence
  Synthetic oligonucleotide
aaaagcctcgaagggggccctacgcaagat

SEQ ID NO: 457198 - DNA, 30 bp, Artificial Sequence
  Synthetic oligonucleotide
gattttggtccgagcatgttagcgcaagat

SEQ ID NO: 457199 - DNA, 30 bp, Artificial Sequence
  Synthetic oligonucleotide
ggtggtgcttgatgagttatgtcgcaagat

SEQ ID NO: 457200 - DNA, 30 bp, Artificial Sequence
  Synthetic oligonucleotide
gacagagcacttaaagcccggaggcaagat

SEQ ID NO: 457201 - DNA, 30 bp, Artificial Sequence
  Synthetic oligonucleotide
gctgtatgcgccctgcgttgctggcaagat

SEQ ID NO: 457202 - DNA, 30 bp, Artificial Sequence
  Synthetic oligonucleotide
ggacttgcgtagtagaattttttcgaagat

SEQ ID NO: 457203 - DNA, 30 bp, Artificial Sequence
  Synthetic oligonucleotide
attaataggtaaagcgatcttagggaagat

SEQ ID NO: 457204 - DNA, 30 bp, Artificial Sequence
  Synthetic oligonucleotide
gaattgtaacagattacattagatgaagat

SEQ ID NO: 457205 - DNA, 30 bp, Artificial Sequence
  Synthetic oligonucleotide
tatacttcgcataattctgtgtatgaagat

SEQ ID NO: 457206 - DNA, 30 bp, Artificial Sequence
  Synthetic oligonucleotide
gagaacgcctagatgagctatactgaagat

SEQ ID NO: 457207 - DNA, 30 bp, Artificial Sequence
  Synthetic oligonucleotide
ccctacaccggctattctatatttgaagat

SEQ ID NO: 457208 - DNA, 30 bp, Artificial Sequence
  Synthetic oligonucleotide
cagacgtgatgcttcagtaggtgataagat

SEQ ID NO: 457209 - DNA, 30 bp, Artificial Sequence
  Synthetic oligonucleotide
aagacccgccgttgccgtggaacgtaagat

SEQ ID NO: 457210 - DNA, 30 bp, Artificial Sequence
  Synthetic oligonucleotide
cttgtaacgaggtgttatcttgcgtaagat

SEQ ID NO: 457211 - DNA, 30 bp, Artificial Sequence
  Synthetic oligonucleotide
tgcagaacaacagcaactccgttgtaagat

SEQ ID NO: 457212 - DNA, 30 bp, Artificial Sequence
  Synthetic oligonucleotide
attaacgggggagcgatgaatgtaacagat

SEQ ID NO: 457213 - DNA, 30 bp, Artificial Sequence
  Synthetic oligonucleotide
gtacgcaaggtacggcatttgacaccagat

SEQ ID NO: 457214 - DNA, 30 bp, Artificial Sequence
  Synthetic oligonucleotide
cagtgataacggcgcgcgcaatccccagat

SEQ ID NO: 457215 - DNA, 30 bp, Artificial Sequence
  Synthetic oligonucleotide
gcgctgtgctcaatccacgatgagccagat

SEQ ID NO: 457216 - DNA, 30 bp, Artificial Sequence
  Synthetic oligonucleotide
aagccatggtgcccatttgtgtctccagat

SEQ ID NO: 457217 - DNA, 30 bp, Artificial Sequence
  Synthetic oligonucleotide
atcccagtcaggcgcttcattcttccagat

SEQ ID NO: 457218 - DNA, 30 bp, Artificial Sequence
  Synthetic oligonucleotide
actatgtcccattcttatttcccagcagat

SEQ ID NO: 457219 - DNA, 30 bp, Artificial Sequence
  Synthetic oligonucleotide
atgtcgaaagcactggactcatacgcagat

SEQ ID NO: 457220 - DNA, 30 bp, Artificial Sequence
  Synthetic oligonucleotide
tagggtgtaggggtgcataggggcgcagat

SEQ ID NO: 457221 - DNA, 30 bp, Artificial Sequence
  Synthetic oligonucleotide
aatatcccctatcagcagtcatctgcagat

SEQ ID NO: 457222 - DNA, 30 bp, Artificial Sequence
  Synthetic oligonucleotide
ggactaaaggctggtattgaccgtgcagat

SEQ ID NO: 457223 - DNA, 30 bp, Artificial Sequence
  Synthetic oligonucleotide
gagcactgactaagtgaagtttttgcagat

SEQ ID NO: 457224 - DNA, 30 bp, Artificial Sequence
  Synthetic oligonucleotide
ttttattatcgtatcgtctggatatcagat

SEQ ID NO: 457225 - DNA, 30 bp, Artificial Sequence
  Synthetic oligonucleotide
tctgttcatttaatttgttagtggtcagat

SEQ ID NO: 457226 - DNA, 30 bp, Artificial Sequence
  Synthetic oligonucleotide
tacagacggctatcgagattcccttcagat

SEQ ID NO: 457227 - DNA, 30 bp, Artificial Sequence
  Synthetic oligonucleotide
atttgctatttgccgacgggattaagagat

SEQ ID NO: 457228 - DNA, 30 bp, Artificial Sequence
  Synthetic oligonucleotide
acgttaggcgtcattccaagcgatagagat

SEQ ID NO: 457229 - DNA, 30 bp, Artificial Sequence
  Synthetic oligonucleotide
catatctactttttctcaggatctagagat

SEQ ID NO: 457230 - DNA, 30 bp, Artificial Sequence
  Synthetic oligonucleotide
acacataggattcgagtacagagtagagat

SEQ ID NO: 457231 - DNA, 30 bp, Artificial Sequence
  Synthetic oligonucleotide
agatgacgattctgctatacaagacgagat

SEQ ID NO: 457232 - DNA, 30 bp, Artificial Sequence
  Synthetic oligonucleotide
atagccgtcggttatctataccgacgagat

SEQ ID NO: 457233 - DNA, 30 bp, Artificial Sequence
  Synthetic oligonucleotide
tgacgatgcggctctatcaggcgccgagat

SEQ ID NO: 457234 - DNA, 30 bp, Artificial Sequence
  Synthetic oligonucleotide
acgcgtgctctacggccagttggccgagat

SEQ ID NO: 457235 - DNA, 30 bp, Artificial Sequence
  Synthetic oligonucleotide
agacacttatcacgcatcttacctcgagat

SEQ ID NO: 457236 - DNA, 30 bp, Artificial Sequence
  Synthetic oligonucleotide
aaatttgatacgtcggaacagcctcgagat

SEQ ID NO: 457237 - DNA, 30 bp, Artificial Sequence
  Synthetic oligonucleotide
cccccccttcgcactaacatttaaggagat

SEQ ID NO: 457238 - DNA, 30 bp, Artificial Sequence
  Synthetic oligonucleotide
cgcgagcaagctggattctttagaggagat

SEQ ID NO: 457239 - DNA, 30 bp, Artificial Sequence
  Synthetic oligonucleotide
acccccataccgggtctgctgtgaggagat

SEQ ID NO: 457240 - DNA, 30 bp, Artificial Sequence
  Synthetic oligonucleotide
gttttgaatgtcgcgctgtgtcatggagat

SEQ ID NO: 457241 - DNA, 30 bp, Artificial Sequence
  Synthetic oligonucleotide
ataaagcttattatagtattgggatgagat

SEQ ID NO: 457242 - DNA, 30 bp, Artificial Sequence
  Synthetic oligonucleotide
gaattaacggggactttaaaaatatgagat

SEQ ID NO: 457243 - DNA, 30 bp, Artificial Sequence
  Synthetic oligonucleotide
tacaatacgtttcaggtgtttgcctgagat

SEQ ID NO: 457244 - DNA, 30 bp, Artificial Sequence
  Synthetic oligonucleotide
gtgttgtgggactcgagttacatctgagat

SEQ ID NO: 457245 - DNA, 30 bp, Artificial Sequence
  Synthetic oligonucleotide
tatgggggcgcagcaaggagaaggtgagat

SEQ ID NO: 457246 - DNA, 30 bp, Artificial Sequence
  Synthetic oligonucleotide
aaacgagtctggattctttgcaattgagat

SEQ ID NO: 457247 - DNA, 30 bp, Artificial Sequence
  Synthetic oligonucleotide
ttatagagattttgattcagatattgagat

SEQ ID NO: 457248 - DNA, 30 bp, Artificial Sequence
  Synthetic oligonucleotide
aatagtcgccgtctttttcgcagaatagat

SEQ ID NO: 457249 - DNA, 30 bp, Artificial Sequence
  Synthetic oligonucleotide
tgccttatggtgtatggaattttaatagat

SEQ ID NO: 457250 - DNA, 30 bp, Artificial Sequence
  Synthetic oligonucleotide
ttctattgttcctgggtaaggggcctagat

SEQ ID NO: 457251 - DNA, 30 bp, Artificial Sequence
  Synthetic oligonucleotide
gtagaggaacgactagatgtatctctagat

SEQ ID NO: 457252 - DNA, 30 bp, Artificial Sequence
  Synthetic oligonucleotide
gtggtctaacatacccttttatgtctagat

SEQ ID NO: 457253 - DNA, 30 bp, Artificial Sequence
  Synthetic oligonucleotide
caggcaccgcgaggccgcaagcttctagat

SEQ ID NO: 457254 - DNA, 30 bp, Artificial Sequence
  Synthetic oligonucleotide
ctgggacgatttatactcatcgtagtagat

SEQ ID NO: 457255 - DNA, 30 bp, Artificial Sequence
  Synthetic oligonucleotide
gttacacttctctacgaggtgtacgtagat

SEQ ID NO: 457256 - DNA, 30 bp, Artificial Sequence
  Synthetic oligonucleotide
gaggaggattcccccgccgtggccgtagat

SEQ ID NO: 457257 - DNA, 30 bp, Artificial Sequence
  Synthetic oligonucleotide
ccgttaggttacgggtggctttccgtagat

SEQ ID NO: 457258 - DNA, 30 bp, Artificial Sequence
  Synthetic oligonucleotide
gacaacccgcaaatcagctacagggtagat

SEQ ID NO: 457259 - DNA, 30 bp, Artificial Sequence
  Synthetic oligonucleotide
tcctacatgcagtagccacgcgatgtagat

SEQ ID NO: 457260 - DNA, 30 bp, Artificial Sequence
  Synthetic oligonucleotide
gtaaatctaaaaaccttcggcggtgtagat

SEQ ID NO: 457261 - DNA, 30 bp, Artificial Sequence
  Synthetic oligonucleotide
cagaaaaacgcccgtagaagaagattagat

SEQ ID NO: 457262 - DNA, 30 bp, Artificial Sequence
  Synthetic oligonucleotide
tgcaaatctagaagatttcatgcgttagat

SEQ ID NO: 457263 - DNA, 30 bp, Artificial Sequence
  Synthetic oligonucleotide
agtcatttcggcggcgcaaggtatttagat

SEQ ID NO: 457264 - DNA, 30 bp, Artificial Sequence
  Synthetic oligonucleotide
gagtaacgcattccgtgcgctacaaacgat

SEQ ID NO: 457265 - DNA, 30 bp, Artificial Sequence
  Synthetic oligonucleotide
tctatgtattggttggatacaccaaacgat

SEQ ID NO: 457266 - DNA, 30 bp, Artificial Sequence
  Synthetic oligonucleotide
gaatctacagccacggcgtcagtaaacgat

SEQ ID NO: 457267 - DNA, 30 bp, Artificial Sequence
  Synthetic oligonucleotide
atagaagcatagacgatacattcgaacgat

SEQ ID NO: 457268 - DNA, 30 bp, Artificial Sequence
  Synthetic oligonucleotide
gacttatatagagagtatttacggaacgat

SEQ ID NO: 457269 - DNA, 30 bp, Artificial Sequence
  Synthetic oligonucleotide
atccgtttaagtatagcctcgtggaacgat

SEQ ID NO: 457270 - DNA, 30 bp, Artificial Sequence
  Synthetic oligonucleotide
aggtcaatgcagtaagtgttgggtaacgat

SEQ ID NO: 457271 - DNA, 30 bp, Artificial Sequence
  Synthetic oligonucleotide
gtcctgcgtgggaaacggagtcaacacgat

SEQ ID NO: 457272 - DNA, 30 bp, Artificial Sequence
  Synthetic oligonucleotide
tttataccaccataatacacgcgacacgat

SEQ ID NO: 457273 - DNA, 30 bp, Artificial Sequence
  Synthetic oligonucleotide
ctatggtgtacgtttaacgtattacacgat

SEQ ID NO: 457274 - DNA, 30 bp, Artificial Sequence
  Synthetic oligonucleotide
tctcgctgcagaagagtaaactgccacgat

SEQ ID NO: 457275 - DNA, 30 bp, Artificial Sequence
  Synthetic oligonucleotide
catccccacattgcataagggacgcacgat

SEQ ID NO: 457276 - DNA, 30 bp, Artificial Sequence
  Synthetic oligonucleotide
ttatgagctgtttctcagcgctcgcacgat

SEQ ID NO: 457277 - DNA, 30 bp, Artificial Sequence
  Synthetic oligonucleotide
acttacaaacgccgggaaaaccgtcacgat

SEQ ID NO: 457278 - DNA, 30 bp, Artificial Sequence
  Synthetic oligonucleotide
gagtacggaccaggtccatttggtcacgat

SEQ ID NO: 457279 - DNA, 30 bp, Artificial Sequence
  Synthetic oligonucleotide
acactgtttggtagtcggcgacaagacgat

SEQ ID NO: 457280 - DNA, 30 bp, Artificial Sequence
  Synthetic oligonucleotide
cagagtttatcgtggtccctggtagacgat

SEQ ID NO: 457281 - DNA, 30 bp, Artificial Sequence
  Synthetic oligonucleotide
tacattcgcttttcctaaccacacgacgat

SEQ ID NO: 457282 - DNA, 30 bp, Artificial Sequence
  Synthetic oligonucleotide
tatgtattgaggttccgctgacaggacgat

SEQ ID NO: 457283 - DNA, 30 bp, Artificial Sequence
  Synthetic oligonucleotide
atgccttatcggagcagcctgccggacgat

SEQ ID NO: 457284 - DNA, 30 bp, Artificial Sequence
  Synthetic oligonucleotide
acgactggtaccagtcttatcagtgacgat

SEQ ID NO: 457285 - DNA, 30 bp, Artificial Sequence
  Synthetic oligonucleotide
tggaacggccgctaacgacccgaatacgat

SEQ ID NO: 457286 - DNA, 30 bp, Artificial Sequence
  Synthetic oligonucleotide
gattgacaatgcttgggaccgtcatacgat

SEQ ID NO: 457287 - DNA, 30 bp, Artificial Sequence
  Synthetic oligonucleotide
tccgtaacttttcggccttgacactacgat

SEQ ID NO: 457288 - DNA, 30 bp, Artificial Sequence
  Synthetic oligonucleotide
gtttttcgcacgggccttaatgtctacgat

SEQ ID NO: 457289 - DNA, 30 bp, Artificial Sequence
  Synthetic oligonucleotide
aaaatgcctcgcaaactttcgaggtacgat

SEQ ID NO: 457290 - DNA, 30 bp, Artificial Sequence
  Synthetic oligonucleotide
ccgatattacagggaaaggcccaaaccgat

SEQ ID NO: 457291 - DNA, 29 bp, Artificial Sequence
  Synthetic oligonucleotide
ttttctctccggcaggcgggttaaccgat

SEQ ID NO: 457292 - DNA, 30 bp, Artificial Sequence
  Synthetic oligonucleotide
gcgtataccagtaaaccaccgcgcaccgat

SEQ ID NO: 457293 - DNA, 30 bp, Artificial Sequence
  Synthetic oligonucleotide
agccagtaatttatattcgagaggaccgat

SEQ ID NO: 457294 - DNA, 30 bp, Artificial Sequence
  Synthetic oligonucleotide
tatacacacgtgtttctcgggattaccgat

SEQ ID NO: 457295 - DNA, 30 bp, Artificial Sequence
  Synthetic oligonucleotide
ctggacggtatcacaacgggtgtacccgat

SEQ ID NO: 457296 - DNA, 30 bp, Artificial Sequence
  Synthetic oligonucleotide
gataggattcatactccactgtcgcccgat

SEQ ID NO: 457297 - DNA, 30 bp, Artificial Sequence
  Synthetic oligonucleotide
ctgatcagcctataatggaactggcccgat

SEQ ID NO: 457298 - DNA, 30 bp, Artificial Sequence
  Synthetic oligonucleotide
acggagtccagcacgcttggtgcagccgat

SEQ ID NO: 457299 - DNA, 29 bp, Artificial Sequence
  Synthetic oligonucleotide
tgggcgctgtgactcgccggccggccgat

SEQ ID NO: 457300 - DNA, 30 bp, Artificial Sequence
  Synthetic oligonucleotide
gaggttttcctacgcgcaggacctgccgat

SEQ ID NO: 457301 - DNA, 29 bp, Artificial Sequence
  Synthetic oligonucleotide
agccgtaactaattaagagcagctccgat

SEQ ID NO: 457302 - DNA, 30 bp, Artificial Sequence
  Synthetic oligonucleotide
cctaatggtattatctcggacatctccgat

SEQ ID NO: 457303 - DNA, 30 bp, Artificial Sequence
  Synthetic oligonucleotide
ggttattgtctttctctattgacgtccgat

SEQ ID NO: 457304 - DNA, 30 bp, Artificial Sequence
  Synthetic oligonucleotide
aaatctgaaccttgctactcctcaagcgat

SEQ ID NO: 457305 - DNA, 30 bp, Artificial Sequence
  Synthetic oligonucleotide
gttgcacgtttttttttcagtaacagcgat

SEQ ID NO: 457306 - DNA, 30 bp, Artificial Sequence
  Synthetic oligonucleotide
acggtagtaaggggctctctacacagcgat

SEQ ID NO: 457307 - DNA, 30 bp, Artificial Sequence
  Synthetic oligonucleotide
cgtccgggggtagccccagagcgcagcgat

SEQ ID NO: 457308 - DNA, 30 bp, Artificial Sequence
  Synthetic oligonucleotide
ttacgtagatcgcctccttgatgcagcgat

SEQ ID NO: 457309 - DNA, 30 bp, Artificial Sequence
  Synthetic oligonucleotide
gcatcgcagagactgtcccgaatcagcgat

SEQ ID NO: 457310 - DNA, 30 bp, Artificial Sequence
  Synthetic oligonucleotide
ctagtagcgcctgcccgatcgaagagcgat

SEQ ID NO: 457311 - DNA, 30 bp, Artificial Sequence
  Synthetic oligonucleotide
atccaactctgaccttaaaagtggagcgat

SEQ ID NO: 457312 - DNA, 30 bp, Artificial Sequence
  Synthetic oligonucleotide
catacaaatagtttgtcggcccatagcgat

SEQ ID NO: 457313 - DNA, 30 bp, Artificial Sequence
  Synthetic oligonucleotide
ggccatcccgtgcagctacttcgtagcgat

SEQ ID NO: 457314 - DNA, 30 bp, Artificial Sequence
  Synthetic oligonucleotide
tatgtacgtttaacaactgtacaacgcgat

SEQ ID NO: 457315 - DNA, 30 bp, Artificial Sequence
  Synthetic oligonucleotide
gcaatagtactggggggcgttacacgcgat

SEQ ID NO: 457316 - DNA, 30 bp, Artificial Sequence
  Synthetic oligonucleotide
tatctcaggcttaataaaccgggacgcgat

SEQ ID NO: 457317 - DNA, 30 bp, Artificial Sequence
  Synthetic oligonucleotide
cagcaatggtattgtaatgagatacgcgat

SEQ ID NO: 457318 - DNA, 30 bp, Artificial Sequence
  Synthetic oligonucleotide
accattacgtgtccagtgcgcccccgcgat

SEQ ID NO: 457319 - DNA, 30 bp, Artificial Sequence
  Synthetic oligonucleotide
gtagtggtggaatacattctgtcccgcgat

SEQ ID NO: 457320 - DNA, 30 bp, Artificial Sequence
  Synthetic oligonucleotide
actaggggtaggtgtcataattcccgcgat

SEQ ID NO: 457321 - DNA, 30 bp, Artificial Sequence
  Synthetic oligonucleotide
atcctcagtccgaaacgcttggagcgcgat

SEQ ID NO: 457322 - DNA, 30 bp, Artificial Sequence
  Synthetic oligonucleotide
ctaccgatataccgatagttcacgcgcgat

SEQ ID NO: 457323 - DNA, 30 bp, Artificial Sequence
  Synthetic oligonucleotide
aacattgtaatagcttggtgaccgcgcgat

SEQ ID NO: 457324 - DNA, 30 bp, Artificial Sequence
  Synthetic oligonucleotide
tttgcctgaagatatcgaaacttgcgcgat

SEQ ID NO: 457325 - DNA, 30 bp, Artificial Sequence
  Synthetic oligonucleotide
ggctgaatcaaagacgtcagccttcgcgat

SEQ ID NO: 457326 - DNA, 30 bp, Artificial Sequence
  Synthetic oligonucleotide
accgggagagctctggtcggtgcaggcgat

SEQ ID NO: 457327 - DNA, 30 bp, Artificial Sequence
  Synthetic oligonucleotide
ctttacccacccatgatggctggaggcgat

SEQ ID NO: 457328 - DNA, 30 bp, Artificial Sequence
  Synthetic oligonucleotide
aagctgcaagactccttgtcgcacggcgat

SEQ ID NO: 457329 - DNA, 30 bp, Artificial Sequence
  Synthetic oligonucleotide
ccggctttccgggcccgcgttcggggcgat

SEQ ID NO: 457330 - DNA, 30 bp, Artificial Sequence
  Synthetic oligonucleotide
tgccgcgggacgggcgcaacgaatggcgat

SEQ ID NO: 457331 - DNA, 30 bp, Artificial Sequence
  Synthetic oligonucleotide
gctctagtgaagatacctgggtatggcgat

SEQ ID NO: 457332 - DNA, 30 bp, Artificial Sequence
  Synthetic oligonucleotide
cactccgttacgcgggattccagtggcgat

SEQ ID NO: 457333 - DNA, 30 bp, Artificial Sequence
  Synthetic oligonucleotide
atttgggttttaggttgtctcgtatgcgat

SEQ ID NO: 457334 - DNA, 30 bp, Artificial Sequence
  Synthetic oligonucleotide
aattacgatatgtgttacgcggtgtgcgat

SEQ ID NO: 457335 - DNA, 30 bp, Artificial Sequence
  Synthetic oligonucleotide
gggaacaaggttcatcgttatacttgcgat

SEQ ID NO: 457336 - DNA, 30 bp, Artificial Sequence
  Synthetic oligonucleotide
ttataacgggccccggacgtttgttgcgat

SEQ ID NO: 457337 - DNA, 30 bp, Artificial Sequence
  Synthetic oligonucleotide
agcggccgggcagggcaatctatttgcgat

SEQ ID NO: 457338 - DNA, 30 bp, Artificial Sequence
  Synthetic oligonucleotide
agctaggctggatcgcgatgtctttgcgat

SEQ ID NO: 457339 - DNA, 30 bp, Artificial Sequence
  Synthetic oligonucleotide
atgtggtttacctctcgtatcccaatcgat

SEQ ID NO: 457340 - DNA, 30 bp, Artificial Sequence
  Synthetic oligonucleotide
ttcaatttatgggtcactcggaccatcgat

SEQ ID NO: 457341 - DNA, 30 bp, Artificial Sequence
  Synthetic oligonucleotide
gtgtacctaagtaagaccgcgcccatcgat

SEQ ID NO: 457342 - DNA, 30 bp, Artificial Sequence
  Synthetic oligonucleotide
ccacgtgctattcctgccggatgcatcgat

SEQ ID NO: 457343 - DNA, 30 bp, Artificial Sequence
  Synthetic oligonucleotide
tttttcgagccggtcagcggtgtcatcgat

SEQ ID NO: 457344 - DNA, 30 bp, Artificial Sequence
  Synthetic oligonucleotide
catttgtgacgggatggagcaattatcgat

SEQ ID NO: 457345 - DNA, 30 bp, Artificial Sequence
  Synthetic oligonucleotide
aagaagatgcgatctgatggaggactcgat

SEQ ID NO: 457346 - DNA, 30 bp, Artificial Sequence
  Synthetic oligonucleotide
gctgggatccggatacgagcggtactcgat

SEQ ID NO: 457347 - DNA, 30 bp, Artificial Sequence
  Synthetic oligonucleotide
tccgtcaatgaccacatgcgtacgctcgat

SEQ ID NO: 457348 - DNA, 30 bp, Artificial Sequence
  Synthetic oligonucleotide
aatagatctggctgggacggtagcgtcgat

SEQ ID NO: 457349 - DNA, 30 bp, Artificial Sequence
  Synthetic oligonucleotide
catagactattccccaaacctgtcgtcgat

SEQ ID NO: 457350 - DNA, 30 bp, Artificial Sequence
  Synthetic oligonucleotide
tacgccgggtcgaggtcggcgtaggtcgat

SEQ ID NO: 457351 - DNA, 30 bp, Artificial Sequence
  Synthetic oligonucleotide
gcactcttcctggccaaaggcccattcgat

SEQ ID NO: 457352 - DNA, 30 bp, Artificial Sequence
  Synthetic oligonucleotide
acacccgaatgcgtatccgggagattcgat

SEQ ID NO: 457353 - DNA, 30 bp, Artificial Sequence
  Synthetic oligonucleotide
gaagtccttaacccgtattctaggttcgat

SEQ ID NO: 457354 - DNA, 30 bp, Artificial Sequence
  Synthetic oligonucleotide
gtacgacaagggaatcctccggatttcgat

SEQ ID NO: 457355 - DNA, 30 bp, Artificial Sequence
  Synthetic oligonucleotide
atcttcatcaattattgcagtcgtttcgat

SEQ ID NO: 457356 - DNA, 30 bp, Artificial Sequence
  Synthetic oligonucleotide
atcacggtgaccgtactaacggaaaaggat

SEQ ID NO: 457357 - DNA, 30 bp, Artificial Sequence
  Synthetic oligonucleotide
gccaagtgttctgtcgcattaccaaaggat

SEQ ID NO: 457358 - DNA, 31 bp, Artificial Sequence
  Synthetic oligonucleotide
cgatgcacaactattgtgtccatcaaaggat

SEQ ID NO: 457359 - DNA, 30 bp, Artificial Sequence
  Synthetic oligonucleotide
aaatttataagagcggtacacggaaaggat

SEQ ID NO: 457360 - DNA, 30 bp, Artificial Sequence
  Synthetic oligonucleotide
tgtatagtctgttcgtccgcgtgaaaggat

SEQ ID NO: 457361 - DNA, 30 bp, Artificial Sequence
  Synthetic oligonucleotide
cgctgggacaagatggtcatatccaaggat

SEQ ID NO: 457362 - DNA, 30 bp, Artificial Sequence
  Synthetic oligonucleotide
gttcaagtacccgtaggtcatcgcaaggat

SEQ ID NO: 457363 - DNA, 30 bp, Artificial Sequence
  Synthetic oligonucleotide
gctattaccgtggctaaaccgtggaaggat

SEQ ID NO: 457364 - DNA, 30 bp, Artificial Sequence
  Synthetic oligonucleotide
tcggcgcttgacgagtgattacataaggat

SEQ ID NO: 457365 - DNA, 30 bp, Artificial Sequence
  Synthetic oligonucleotide
tcttcctttaatcactcgcatgataaggat

SEQ ID NO: 457366 - DNA, 30 bp, Artificial Sequence
  Synthetic oligonucleotide
tcttgtgttgacagcagtgcagttaaggat

SEQ ID NO: 457367 - DNA, 30 bp, Artificial Sequence
  Synthetic oligonucleotide
cccgtgtcatgccatacgggtgaacaggat

SEQ ID NO: 457368 - DNA, 30 bp, Artificial Sequence
  Synthetic oligonucleotide
ggatacgaaacagcggcaagccgacaggat

SEQ ID NO: 457369 - DNA, 30 bp, Artificial Sequence
  Synthetic oligonucleotide
tgtggctactcactatcgagtagccaggat

SEQ ID NO: 457370 - DNA, 30 bp, Artificial Sequence
  Synthetic oligonucleotide
ggggatgtaaatcgtgcggttctccaggat

SEQ ID NO: 457371 - DNA, 30 bp, Artificial Sequence
  Synthetic oligonucleotide
ttcaccgggcggctacaaaaaattcaggat

SEQ ID NO: 457372 - DNA, 30 bp, Artificial Sequence
  Synthetic oligonucleotide
actgtattaatattaagggctattcaggat

SEQ ID NO: 457373 - DNA, 30 bp, Artificial Sequence
  Synthetic oligonucleotide
agcaaccctccttgcgtccagtacgaggat

SEQ ID NO: 457374 - DNA, 30 bp, Artificial Sequence
  Synthetic oligonucleotide
tcgcaacgagtccgcagtgacaccgaggat

SEQ ID NO: 457375 - DNA, 30 bp, Artificial Sequence
  Synthetic oligonucleotide
agtatcttattagtactaggtctcgaggat

SEQ ID NO: 457376 - DNA, 30 bp, Artificial Sequence
  Synthetic oligonucleotide
cgtggcacccggcgtatcggctaggaggat

SEQ ID NO: 457377 - DNA, 30 bp, Artificial Sequence
  Synthetic oligonucleotide
ttaaatttgtggaatatagttcgggaggat

SEQ ID NO: 457378 - DNA, 30 bp, Artificial Sequence
  Synthetic oligonucleotide
atctccgcgccaccgacctcgtgggaggat

SEQ ID NO: 457379 - DNA, 30 bp, Artificial Sequence
  Synthetic oligonucleotide
taaaatgcagcccaacaaatacaataggat

SEQ ID NO: 457380 - DNA, 30 bp, Artificial Sequence
  Synthetic oligonucleotide
attatcgcacccgggaaccagcaataggat

SEQ ID NO: 457381 - DNA, 30 bp, Artificial Sequence
  Synthetic oligonucleotide
tactaatactgactactatcattataggat

SEQ ID NO: 457382 - DNA, 30 bp, Artificial Sequence
  Synthetic oligonucleotide
ggtcccgtgcttttggggatacactaggat

SEQ ID NO: 457383 - DNA, 30 bp, Artificial Sequence
  Synthetic oligonucleotide
cccggcgagcacggctaccctcgctaggat

SEQ ID NO: 457384 - DNA, 30 bp, Artificial Sequence
  Synthetic oligonucleotide
ataaaatgtactaacggacatccttaggat

SEQ ID NO: 457385 - DNA, 30 bp, Artificial Sequence
  Synthetic oligonucleotide
actcttcaagacatagaaaggcgttaggat

SEQ ID NO: 457386 - DNA, 30 bp, Artificial Sequence
  Synthetic oligonucleotide
ctcaggtacagggatgtatgggcaacggat

SEQ ID NO: 457387 - DNA, 30 bp, Artificial Sequence
  Synthetic oligonucleotide
aacgacgttaacatccgtagaagaacggat

SEQ ID NO: 457388 - DNA, 30 bp, Artificial Sequence
  Synthetic oligonucleotide
gatgcgtcaccggttggtttgctaacggat

SEQ ID NO: 457389 - DNA, 30 bp, Artificial Sequence
  Synthetic oligonucleotide
tgacacgcagcgaaaaatatggacacggat

SEQ ID NO: 457390 - DNA, 30 bp, Artificial Sequence
  Synthetic oligonucleotide
gatcctagactttttgaggccacaccggat

SEQ ID NO: 457391 - DNA, 30 bp, Artificial Sequence
  Synthetic oligonucleotide
ctcataaatacgtaatgctatccaccggat

SEQ ID NO: 457392 - DNA, 30 bp, Artificial Sequence
  Synthetic oligonucleotide
gtcctttttaggactcagagtctaccggat

SEQ ID NO: 457393 - DNA, 30 bp, Artificial Sequence
  Synthetic oligonucleotide
taaaaaacccaccgctgtgcggtaccggat

SEQ ID NO: 457394 - DNA, 30 bp, Artificial Sequence
  Synthetic oligonucleotide
tgcagcttaaatagataataagccccggat

SEQ ID NO: 457395 - DNA, 30 bp, Artificial Sequence
  Synthetic oligonucleotide
gagcctcgctaacagcatttggccccggat

SEQ ID NO: 457396 - DNA, 30 bp, Artificial Sequence
  Synthetic oligonucleotide
accgcaggcatcaatcaggaccgcccggat

SEQ ID NO: 457397 - DNA, 30 bp, Artificial Sequence
  Synthetic oligonucleotide
gagagatggtcatacttcgcaggcccggat

SEQ ID NO: 457398 - DNA, 30 bp, Artificial Sequence
  Synthetic oligonucleotide
agctgttattgtaagtactcgcagccggat

SEQ ID NO: 457399 - DNA, 30 bp, Artificial Sequence
  Synthetic oligonucleotide
gacataaaaaatccgggggaggagccggat

SEQ ID NO: 457400 - DNA, 30 bp, Artificial Sequence
  Synthetic oligonucleotide
ttaagaagtcccggcacattttagccggat

SEQ ID NO: 457401 - DNA, 30 bp, Artificial Sequence
  Synthetic oligonucleotide
taagtatcccttcgctagaacgctccggat

SEQ ID NO: 457402 - DNA, 30 bp, Artificial Sequence
  Synthetic oligonucleotide
tagctgagctataacgagcgtattccggat

SEQ ID NO: 457403 - DNA, 30 bp, Artificial Sequence
  Synthetic oligonucleotide
aagtgcgtggaacgtgattgataagcggat

SEQ ID NO: 457404 - DNA, 30 bp, Artificial Sequence
  Synthetic oligonucleotide
gtgcctaagcgaacttgtgttcccgcggat

SEQ ID NO: 457405 - DNA, 30 bp, Artificial Sequence
  Synthetic oligonucleotide
gtcctaaagtccttgtgcattgcggcggat

SEQ ID NO: 457406 - DNA, 30 bp, Artificial Sequence
  Synthetic oligonucleotide
gggaccggtacccgttcttgaatggcggat

SEQ ID NO: 457407 - DNA, 30 bp, Artificial Sequence
  Synthetic oligonucleotide
tataaagtacggtcggaaatacatgcggat

SEQ ID NO: 457408 - DNA, 30 bp, Artificial Sequence
  Synthetic oligonucleotide
tctacgcgtacacgggggcagtatgcggat

SEQ ID NO: 457409 - DNA, 30 bp, Artificial Sequence
  Synthetic oligonucleotide
tatactggagtgccgctttgtagtgcggat

SEQ ID NO: 457410 - DNA, 30 bp, Artificial Sequence
  Synthetic oligonucleotide
ataccgcccgccagataactgcgtgcggat

SEQ ID NO: 457411 - DNA, 30 bp, Artificial Sequence
  Synthetic oligonucleotide
gccggccaatgggcctacgtgggtgcggat

SEQ ID NO: 457412 - DNA, 30 bp, Artificial Sequence
  Synthetic oligonucleotide
actggattgcctgcaacgtacgttgcggat

SEQ ID NO: 457413 - DNA, 30 bp, Artificial Sequence
  Synthetic oligonucleotide
tgttggattggcgctagtaacttctcggat

SEQ ID NO: 457414 - DNA, 30 bp, Artificial Sequence
  Synthetic oligonucleotide
cttattttctgtccggcgagtaattcggat

SEQ ID NO: 457415 - DNA, 30 bp, Artificial Sequence
  Synthetic oligonucleotide
tttatataacgtggtgtggttggttcggat

SEQ ID NO: 457416 - DNA, 30 bp, Artificial Sequence
  Synthetic oligonucleotide
acggttcgttacgacatcgtagtttcggat

SEQ ID NO: 457417 - DNA, 30 bp, Artificial Sequence
  Synthetic oligonucleotide
aaggcgcactatcaacagttcacaagggat

SEQ ID NO: 457418 - DNA, 30 bp, Artificial Sequence
  Synthetic oligonucleotide
aggtatgctgctctggttaatacaagggat

SEQ ID NO: 457419 - DNA, 30 bp, Artificial Sequence
  Synthetic oligonucleotide
acagaaccgaatgggctgtttataagggat

SEQ ID NO: 457420 - DNA, 30 bp, Artificial Sequence
  Synthetic oligonucleotide
agagtgacttagtgaatcccactaagggat

SEQ ID NO: 457421 - DNA, 30 bp, Artificial Sequence
  Synthetic oligonucleotide
acactggctcccaggcgtcaagccagggat

SEQ ID NO: 457422 - DNA, 30 bp, Artificial Sequence
  Synthetic oligonucleotide
aaacatccctacacacgaccttccagggat

SEQ ID NO: 457423 - DNA, 30 bp, Artificial Sequence
  Synthetic oligonucleotide
atcgtcgcccttaatgggttcttcagggat

SEQ ID NO: 457424 - DNA, 30 bp, Artificial Sequence
  Synthetic oligonucleotide
ggatgcatgctccggggacccatgagggat

SEQ ID NO: 457425 - DNA, 30 bp, Artificial Sequence
  Synthetic oligonucleotide
gtctatgttataaaatgaaatgctagggat

SEQ ID NO: 457426 - DNA, 30 bp, Artificial Sequence
  Synthetic oligonucleotide
ggggtgtcatgcggggtaaggtttagggat

SEQ ID NO: 457427 - DNA, 30 bp, Artificial Sequence
  Synthetic oligonucleotide
gtactctagtccagtattggtcaacgggat

SEQ ID NO: 457428 - DNA, 30 bp, Artificial Sequence
  Synthetic oligonucleotide
tgtttccccaggttaattagataacgggat

SEQ ID NO: 457429 - DNA, 30 bp, Artificial Sequence
  Synthetic oligonucleotide
gatgatggtgtggcatatctgtcacgggat

SEQ ID NO: 457430 - DNA, 30 bp, Artificial Sequence
  Synthetic oligonucleotide
atcctggctttggcggagtctttacgggat

SEQ ID NO: 457431 - DNA, 30 bp, Artificial Sequence
  Synthetic oligonucleotide
agttagtgggcaccggcttgaggccgggat

SEQ ID NO: 457432 - DNA, 30 bp, Artificial Sequence
  Synthetic oligonucleotide
aggtcccattacgagtaattaggccgggat

SEQ ID NO: 457433 - DNA, 30 bp, Artificial Sequence
  Synthetic oligonucleotide
aatcagggacggaccaagaggagtcgggat

SEQ ID NO: 457434 - DNA, 30 bp, Artificial Sequence
  Synthetic oligonucleotide
aatcccccaacctgacacactgaaggggat

SEQ ID NO: 457435 - DNA, 30 bp, Artificial Sequence
  Synthetic oligonucleotide
gccctgatatgaaggactaacaacggggat

SEQ ID NO: 457436 - DNA, 30 bp, Artificial Sequence
  Synthetic oligonucleotide
catcgctatctcctgcagaccaagggggat

SEQ ID NO: 457437 - DNA, 30 bp, Artificial Sequence
  Synthetic oligonucleotide
ggctttagggagagattttctttgggggat

SEQ ID NO: 457438 - DNA, 30 bp, Artificial Sequence
  Synthetic oligonucleotide
cacggacagggattttggtttttgggggat

SEQ ID NO: 457439 - DNA, 30 bp, Artificial Sequence
  Synthetic oligonucleotide
tcctatctctacgtgggtatcgaatgggat

SEQ ID NO: 457440 - DNA, 30 bp, Artificial Sequence
  Synthetic oligonucleotide
ccgccgcgacagtcaatttgactctgggat

SEQ ID NO: 457441 - DNA, 30 bp, Artificial Sequence
  Synthetic oligonucleotide
caggtattactgttgatgaaacggtgggat

SEQ ID NO: 457442 - DNA, 30 bp, Artificial Sequence
  Synthetic oligonucleotide
tcctattttcgggtatcaggtatgtgggat

SEQ ID NO: 457443 - DNA, 30 bp, Artificial Sequence
  Synthetic oligonucleotide
ttcagccgggttgtgttctaagacatggat

SEQ ID NO: 457444 - DNA, 30 bp, Artificial Sequence
  Synthetic oligonucleotide
ctaattcccgcatatgggacatacatggat

SEQ ID NO: 457445 - DNA, 30 bp, Artificial Sequence
  Synthetic oligonucleotide
ctacgcgattacagcggcatgcgcatggat

SEQ ID NO: 457446 - DNA, 30 bp, Artificial Sequence
  Synthetic oligonucleotide
atggagatgattcggcgtccctagatggat

SEQ ID NO: 457447 - DNA, 30 bp, Artificial Sequence
  Synthetic oligonucleotide
ctacgtaaggatacagccactacgatggat

SEQ ID NO: 457448 - DNA, 30 bp, Artificial Sequence
  Synthetic oligonucleotide
aacataactctttttctccacaggatggat

SEQ ID NO: 457449 - DNA, 30 bp, Artificial Sequence
  Synthetic oligonucleotide
ccgtcaccctattcatatatgttgatggat

SEQ ID NO: 457450 - DNA, 30 bp, Artificial Sequence
  Synthetic oligonucleotide
ttcggtggcctgcgcatagcaactatggat

SEQ ID NO: 457451 - DNA, 30 bp, Artificial Sequence
  Synthetic oligonucleotide
ggaagttcacggtacgtagtgcctatggat

SEQ ID NO: 457452 - DNA, 30 bp, Artificial Sequence
  Synthetic oligonucleotide
attatttgcttagttatcgtcgccctggat

SEQ ID NO: 457453 - DNA, 30 bp, Artificial Sequence
  Synthetic oligonucleotide
tataacattaagtctcagggcgtgctggat

SEQ ID NO: 457454 - DNA, 30 bp, Artificial Sequence
  Synthetic oligonucleotide
gagactctgcagtgtctagcagttctggat

SEQ ID NO: 457455 - DNA, 30 bp, Artificial Sequence
  Synthetic oligonucleotide
ccaggtaaaagcgtagtaatgtttctggat

SEQ ID NO: 457456 - DNA, 30 bp, Artificial Sequence
  Synthetic oligonucleotide
ttattgtaagatcttaagttttaagtggat

SEQ ID NO: 457457 - DNA, 30 bp, Artificial Sequence
  Synthetic oligonucleotide
gagtgtttcatataattggggaacgtggat

SEQ ID NO: 457458 - DNA, 30 bp, Artificial Sequence
  Synthetic oligonucleotide
ttctaccaattgtgtgccagtaacgtggat

SEQ ID NO: 457459 - DNA, 30 bp, Artificial Sequence
  Synthetic oligonucleotide
ttaaaatcttgaaacaacttcaccgtggat

SEQ ID NO: 457460 - DNA, 30 bp, Artificial Sequence
  Synthetic oligonucleotide
tagctgttggtgaaataaggccgcgtggat

SEQ ID NO: 457461 - DNA, 30 bp, Artificial Sequence
  Synthetic oligonucleotide
atgcgaatacatacttagtccggggtggat

SEQ ID NO: 457462 - DNA, 30 bp, Artificial Sequence
  Synthetic oligonucleotide
ttgggagacttagccggttcggtggtggat

SEQ ID NO: 457463 - DNA, 30 bp, Artificial Sequence
  Synthetic oligonucleotide
cttaatgatgcgaatgggatctatgtggat

SEQ ID NO: 457464 - DNA, 30 bp, Artificial Sequence
  Synthetic oligonucleotide
tactcctatgatatagagttgggtgtggat

SEQ ID NO: 457465 - DNA, 30 bp, Artificial Sequence
  Synthetic oligonucleotide
acggcgattaggccgcggttatttgtggat

SEQ ID NO: 457466 - DNA, 30 bp, Artificial Sequence
  Synthetic oligonucleotide
tgtggttcccgggtgccgtactcattggat

SEQ ID NO: 457467 - DNA, 30 bp, Artificial Sequence
  Synthetic oligonucleotide
tgcgagtcagggtctcagcaaggattggat

SEQ ID NO: 457468 - DNA, 30 bp, Artificial Sequence
  Synthetic oligonucleotide
gagtacctgctccgaaacttcgccttggat

SEQ ID NO: 457469 - DNA, 30 bp, Artificial Sequence
  Synthetic oligonucleotide
tatatgggcgggtgccatttactcttggat

SEQ ID NO: 457470 - DNA, 30 bp, Artificial Sequence
  Synthetic oligonucleotide
cgaaagctcggtggatcccggtagttggat

SEQ ID NO: 457471 - DNA, 30 bp, Artificial Sequence
  Synthetic oligonucleotide
cccttatttcatggatccgtttagttggat

SEQ ID NO: 457472 - DNA, 30 bp, Artificial Sequence
  Synthetic oligonucleotide
agctcaatcataacataatccgggttggat

SEQ ID NO: 457473 - DNA, 30 bp, Artificial Sequence
  Synthetic oligonucleotide
aaattgcataaagcgggctggtctttggat

SEQ ID NO: 457474 - DNA, 30 bp, Artificial Sequence
  Synthetic oligonucleotide
aagttctggatcaatccggggcaaaatgat

SEQ ID NO: 457475 - DNA, 30 bp, Artificial Sequence
  Synthetic oligonucleotide
cgctccgaggcgggtcaatcgggaaatgat

SEQ ID NO: 457476 - DNA, 30 bp, Artificial Sequence
  Synthetic oligonucleotide
gcggcgcgctttcgtgttcccgccaatgat

SEQ ID NO: 457477 - DNA, 30 bp, Artificial Sequence
  Synthetic oligonucleotide
ggaaatggtcgctggagatcccgcaatgat

SEQ ID NO: 457478 - DNA, 30 bp, Artificial Sequence
  Synthetic oligonucleotide
gggatttatgcaacacagcgcatcaatgat

SEQ ID NO: 457479 - DNA, 30 bp, Artificial Sequence
  Synthetic oligonucleotide
cacgggacccggtcacgctcggcgaatgat

SEQ ID NO: 457480 - DNA, 30 bp, Artificial Sequence
  Synthetic oligonucleotide
cggtgtttttctttatcgcgcctgaatgat

SEQ ID NO: 457481 - DNA, 30 bp, Artificial Sequence
  Synthetic oligonucleotide
caagtccttacttatatgatcctgaatgat

SEQ ID NO: 457482 - DNA, 30 bp, Artificial Sequence
  Synthetic oligonucleotide
aactcggtgaccatacttttaatacatgat

SEQ ID NO: 457483 - DNA, 30 bp, Artificial Sequence
  Synthetic oligonucleotide
acagtacttctgccgtggcaattacatgat

SEQ ID NO: 457484 - DNA, 30 bp, Artificial Sequence
  Synthetic oligonucleotide
ggccaattgcattaacatacgctccatgat

SEQ ID NO: 457485 - DNA, 30 bp, Artificial Sequence
  Synthetic oligonucleotide
ccgccacaccgggttctaggagatcatgat

SEQ ID NO: 457486 - DNA, 30 bp, Artificial Sequence
  Synthetic oligonucleotide
ctggaaatctactttcatcaggaagatgat

SEQ ID NO: 457487 - DNA, 30 bp, Artificial Sequence
  Synthetic oligonucleotide
gaacacgcagcccatatgcggaacgatgat

SEQ ID NO: 457488 - DNA, 29 bp, Artificial Sequence
  Synthetic oligonucleotide
gcaggtttgacgcgtcatcggacgatgat

SEQ ID NO: 457489 - DNA, 29 bp, Artificial Sequence
  Synthetic oligonucleotide
tcttggtttaatgggagttttacgatgat

SEQ ID NO: 457490 - DNA, 30 bp, Artificial Sequence
  Synthetic oligonucleotide
acctatcgactatgttcgaggagcgatgat

SEQ ID NO: 457491 - DNA, 30 bp, Artificial Sequence
  Synthetic oligonucleotide
aacttaggtcgtgtgatacgtcgcgatgat

SEQ ID NO: 457492 - DNA, 30 bp, Artificial Sequence
  Synthetic oligonucleotide
gacactggtttttgagcaccaggggatgat

SEQ ID NO: 457493 - DNA, 30 bp, Artificial Sequence
  Synthetic oligonucleotide
agctaatatcagtagagctagagtgatgat

SEQ ID NO: 457494 - DNA, 30 bp, Artificial Sequence
  Synthetic oligonucleotide
taatctcttctctgtttacagtaatatgat

SEQ ID NO: 457495 - DNA, 30 bp, Artificial Sequence
  Synthetic oligonucleotide
aactccgggctcggccataaaccatatgat

SEQ ID NO: 457496 - DNA, 30 bp, Artificial Sequence
  Synthetic oligonucleotide
cccttcaaaatggaacgtgtgtgctatgat

SEQ ID NO: 457497 - DNA, 30 bp, Artificial Sequence
  Synthetic oligonucleotide
aacctgtactacagcaacgcggagtatgat

SEQ ID NO: 457498 - DNA, 30 bp, Artificial Sequence
  Synthetic oligonucleotide
ttagacaggaccctcactatttagtatgat

SEQ ID NO: 457499 - DNA, 30 bp, Artificial Sequence
  Synthetic oligonucleotide
tcacctgccattcttgttcttagaactgat

SEQ ID NO: 457500 - DNA, 30 bp, Artificial Sequence
  Synthetic oligonucleotide
tattgtgttgacctgctttacttcactgat

SEQ ID NO: 457501 - DNA, 30 bp, Artificial Sequence
  Synthetic oligonucleotide
cactgtcggtgatccccccacaggactgat

SEQ ID NO: 457502 - DNA, 30 bp, Artificial Sequence
  Synthetic oligonucleotide
agtgcagatcagaacagacaaatgactgat

SEQ ID NO: 457503 - DNA, 30 bp, Artificial Sequence
  Synthetic oligonucleotide
accttctaggatatggaatgaatgactgat

SEQ ID NO: 457504 - DNA, 30 bp, Artificial Sequence
  Synthetic oligonucleotide
gtactaggcgaccctcgtacaattactgat

SEQ ID NO: 457505 - DNA, 30 bp, Artificial Sequence
  Synthetic oligonucleotide
gcagaattatctgaaagtaggcttactgat

SEQ ID NO: 457506 - DNA, 30 bp, Artificial Sequence
  Synthetic oligonucleotide
catctcaaaaagtacgcaaacctacctgat

SEQ ID NO: 457507 - DNA, 30 bp, Artificial Sequence
  Synthetic oligonucleotide
cttgggtaatcgtcataaccgctacctgat

SEQ ID NO: 457508 - DNA, 30 bp, Artificial Sequence
  Synthetic oligonucleotide
tgcgtcgagaagatccaaggcacgcctgat

SEQ ID NO: 457509 - DNA, 30 bp, Artificial Sequence
  Synthetic oligonucleotide
gtcaggggcgccccacgggccgggcctgat

SEQ ID NO: 457510 - DNA, 30 bp, Artificial Sequence
  Synthetic oligonucleotide
ctccatttgcagggcagaaagtggcctgat

SEQ ID NO: 457511 - DNA, 30 bp, Artificial Sequence
  Synthetic oligonucleotide
ggaggaggggcattcagggagtggcctgat

SEQ ID NO: 457512 - DNA, 30 bp, Artificial Sequence
  Synthetic oligonucleotide
gtactctgtactgatgattatgatcctgat

SEQ ID NO: 457513 - DNA, 30 bp, Artificial Sequence
  Synthetic oligonucleotide
gtcttaatgctgagcaagctttatcctgat

SEQ ID NO: 457514 - DNA, 30 bp, Artificial Sequence
  Synthetic oligonucleotide
cgcaaatgaaaggctttgcctagagctgat

SEQ ID NO: 457515 - DNA, 30 bp, Artificial Sequence
  Synthetic oligonucleotide
ttgctatagtctcgcgtctcacacgctgat

SEQ ID NO: 457516 - DNA, 30 bp, Artificial Sequence
  Synthetic oligonucleotide
ggcgatagcgtgttattgggatacgctgat

SEQ ID NO: 457517 - DNA, 30 bp, Artificial Sequence
  Synthetic oligonucleotide
gggttaatgatcacctgacgctaggctgat

SEQ ID NO: 457518 - DNA, 30 bp, Artificial Sequence
  Synthetic oligonucleotide
attccgtaccccaatcgtccctcggctgat

SEQ ID NO: 457519 - DNA, 30 bp, Artificial Sequence
  Synthetic oligonucleotide
attggtttacgcgtgccgcactgggctgat

SEQ ID NO: 457520 - DNA, 30 bp, Artificial Sequence
  Synthetic oligonucleotide
gggtgttaagcgggtatctgattttctgat

SEQ ID NO: 457521 - DNA, 30 bp, Artificial Sequence
  Synthetic oligonucleotide
gattgtacattggtataggggcaaagtgat

SEQ ID NO: 457522 - DNA, 30 bp, Artificial Sequence
  Synthetic oligonucleotide
agttagctgttgcccggacgaccaagtgat

SEQ ID NO: 457523 - DNA, 30 bp, Artificial Sequence
  Synthetic oligonucleotide
tttggttttgccacgagttccgtaagtgat

SEQ ID NO: 457524 - DNA, 30 bp, Artificial Sequence
  Synthetic oligonucleotide
gcgaccgcatgttggatgccaagcagtgat

SEQ ID NO: 457525 - DNA, 30 bp, Artificial Sequence
  Synthetic oligonucleotide
ttattccgagctcggtccgacggcagtgat

SEQ ID NO: 457526 - DNA, 30 bp, Artificial Sequence
  Synthetic oligonucleotide
aaatcggttgaatgcttgcagactagtgat

SEQ ID NO: 457527 - DNA, 30 bp, Artificial Sequence
  Synthetic oligonucleotide
caagtattgctcatactgacgattagtgat

SEQ ID NO: 457528 - DNA, 30 bp, Artificial Sequence
  Synthetic oligonucleotide
gaataactctacaggactaccttacgtgat

SEQ ID NO: 457529 - DNA, 30 bp, Artificial Sequence
  Synthetic oligonucleotide
catatacatgtcgtgaggcactgccgtgat

SEQ ID NO: 457530 - DNA, 30 bp, Artificial Sequence
  Synthetic oligonucleotide
agcaggacgttctaggttccttagcgtgat

SEQ ID NO: 457531 - DNA, 30 bp, Artificial Sequence
  Synthetic oligonucleotide
atagagacacaggggtcttctattcgtgat

SEQ ID NO: 457532 - DNA, 30 bp, Artificial Sequence
  Synthetic oligonucleotide
ctcggttcgggcgcgagtcacataggtgat

SEQ ID NO: 457533 - DNA, 30 bp, Artificial Sequence
  Synthetic oligonucleotide
gtgggtctggtaaggagcgcccgcggtgat

SEQ ID NO: 457534 - DNA, 30 bp, Artificial Sequence
  Synthetic oligonucleotide
accacttttgctgcattaccgggcggtgat

SEQ ID NO: 457535 - DNA, 30 bp, Artificial Sequence
  Synthetic oligonucleotide
gaattatgccgctggagagcgtatggtgat

SEQ ID NO: 457536 - DNA, 30 bp, Artificial Sequence
  Synthetic oligonucleotide
aaagccagctgtttagagcccaaatgtgat

SEQ ID NO: 457537 - DNA, 30 bp, Artificial Sequence
  Synthetic oligonucleotide
tagcgcgatcgcagctccctatgatgtgat

SEQ ID NO: 457538 - DNA, 30 bp, Artificial Sequence
  Synthetic oligonucleotide
tttacgcatagcttaaaatcaaactgtgat

SEQ ID NO: 457539 - DNA, 30 bp, Artificial Sequence
  Synthetic oligonucleotide
agaagtaattagggtagcgtaggttgtgat

SEQ ID NO: 457540 - DNA, 30 bp, Artificial Sequence
  Synthetic oligonucleotide
cactgtagcaaggttcacatggtttgtgat

SEQ ID NO: 457541 - DNA, 30 bp, Artificial Sequence
  Synthetic oligonucleotide
caagaacgtcaactcgacgcctaaattgat

SEQ ID NO: 457542 - DNA, 30 bp, Artificial Sequence
  Synthetic oligonucleotide
tattcgttggtaggctcgacggacattgat

SEQ ID NO: 457543 - DNA, 30 bp, Artificial Sequence
  Synthetic oligonucleotide
atctctaaccgcttaagggtgtacattgat

SEQ ID NO: 457544 - DNA, 30 bp, Artificial Sequence
  Synthetic oligonucleotide
tgacgctattagttgctcttaagcattgat

SEQ ID NO: 457545 - DNA, 30 bp, Artificial Sequence
  Synthetic oligonucleotide
acgtgtcatttgtgtccacggggcattgat

SEQ ID NO: 457546 - DNA, 30 bp, Artificial Sequence
  Synthetic oligonucleotide
gtttcgggcatatgcaacagtttcattgat

SEQ ID NO: 457547 - DNA, 30 bp, Artificial Sequence
  Synthetic oligonucleotide
gttgtatgaccatgcatccctaagattgat

SEQ ID NO: 457548 - DNA, 30 bp, Artificial Sequence
  Synthetic oligonucleotide
gcatctgggccggctgcaacttggattgat

SEQ ID NO: 457549 - DNA, 30 bp, Artificial Sequence
  Synthetic oligonucleotide
tataatgggtgatacgcactgaaacttgat

SEQ ID NO: 457550 - DNA, 30 bp, Artificial Sequence
  Synthetic oligonucleotide
ccgtttacgccattatctgttaaccttgat

SEQ ID NO: 457551 - DNA, 30 bp, Artificial Sequence
  Synthetic oligonucleotide
gtttctccgcggagccttcttgagcttgat

SEQ ID NO: 457552 - DNA, 30 bp, Artificial Sequence
  Synthetic oligonucleotide
ttgtataatacgctgactccaatgcttgat

SEQ ID NO: 457553 - DNA, 30 bp, Artificial Sequence
  Synthetic oligonucleotide
tgttgctggcagtagtacctgcatcttgat

SEQ ID NO: 457554 - DNA, 30 bp, Artificial Sequence
  Synthetic oligonucleotide
tcacctgcgtatcatagacccgctcttgat

SEQ ID NO: 457555 - DNA, 30 bp, Artificial Sequence
  Synthetic oligonucleotide
acacaatcagtccggttatccattcttgat

SEQ ID NO: 457556 - DNA, 30 bp, Artificial Sequence
  Synthetic oligonucleotide
cctactacacggggttcgagcatcgttgat

SEQ ID NO: 457557 - DNA, 30 bp, Artificial Sequence
  Synthetic oligonucleotide
taattctggtcagaatgtgtttaatttgat

SEQ ID NO: 457558 - DNA, 30 bp, Artificial Sequence
  Synthetic oligonucleotide
agttggattgcatatcgtacaacatttgat

SEQ ID NO: 457559 - DNA, 30 bp, Artificial Sequence
  Synthetic oligonucleotide
ccctctgcacctgcattgagcctgtttgat

SEQ ID NO: 457560 - DNA, 30 bp, Artificial Sequence
  Synthetic oligonucleotide
gctaaagtggcacgggcagcatcttttgat

SEQ ID NO: 457561 - DNA, 30 bp, Artificial Sequence
  Synthetic oligonucleotide
cggtagtggtacctttggggtatttttgat

SEQ ID NO: 457562 - DNA, 30 bp, Artificial Sequence
  Synthetic oligonucleotide
aggagagaccgtaatggccgataaaaatat

SEQ ID NO: 457563 - DNA, 30 bp, Artificial Sequence
  Synthetic oligonucleotide
ggtggccgttgattagcgtcgataaaatat

SEQ ID NO: 457564 - DNA, 30 bp, Artificial Sequence
  Synthetic oligonucleotide
gagccttcgtgtggatgcggttacaaatat

SEQ ID NO: 457565 - DNA, 30 bp, Artificial Sequence
  Synthetic oligonucleotide
ccctcttaacagatgtatttttacaaatat

SEQ ID NO: 457566 - DNA, 30 bp, Artificial Sequence
  Synthetic oligonucleotide
cgcagctgcagcggacgggtcatcaaatat

SEQ ID NO: 457567 - DNA, 30 bp, Artificial Sequence
  Synthetic oligonucleotide
tacatgttccgatgtggtcactagaaatat

SEQ ID NO: 457568 - DNA, 30 bp, Artificial Sequence
  Synthetic oligonucleotide
taaggatatgcagccagaaacctgaaatat

SEQ ID NO: 457569 - DNA, 30 bp, Artificial Sequence
  Synthetic oligonucleotide
cctcgcggtgtactgataatgagtaaatat

SEQ ID NO: 457570 - DNA, 30 bp, Artificial Sequence
  Synthetic oligonucleotide
ataacctgtgatgctccggtcaaacaatat

SEQ ID NO: 457571 - DNA, 30 bp, Artificial Sequence
  Synthetic oligonucleotide
ttaagtaaataccccgccgggaaacaatat

SEQ ID NO: 457572 - DNA, 30 bp, Artificial Sequence
  Synthetic oligonucleotide
cccacacttacaagtggaagtccacaatat

SEQ ID NO: 457573 - DNA, 30 bp, Artificial Sequence
  Synthetic oligonucleotide
gcattctcggaggggatctggcaccaatat

SEQ ID NO: 457574 - DNA, 30 bp, Artificial Sequence
  Synthetic oligonucleotide
ttcggaactctgcaatattctacgcaatat

SEQ ID NO: 457575 - DNA, 30 bp, Artificial Sequence
  Synthetic oligonucleotide
gcgacccatgcaaaatgcgtaatgcaatat

SEQ ID NO: 457576 - DNA, 30 bp, Artificial Sequence
  Synthetic oligonucleotide
acacctgggccactttcggggcatcaatat

SEQ ID NO: 457577 - DNA, 30 bp, Artificial Sequence
  Synthetic oligonucleotide
ccaaatcctggcctcgcagcttatcaatat

SEQ ID NO: 457578 - DNA, 30 bp, Artificial Sequence
  Synthetic oligonucleotide
cccgcgaaattcatgattcggggtcaatat

SEQ ID NO: 457579 - DNA, 30 bp, Artificial Sequence
  Synthetic oligonucleotide
aaacgagctccgcaggcaagtccagaatat

SEQ ID NO: 457580 - DNA, 30 bp, Artificial Sequence
  Synthetic oligonucleotide
aatggggtagagatcgatgacgtagaatat

SEQ ID NO: 457581 - DNA, 30 bp, Artificial Sequence
  Synthetic oligonucleotide
gtgattgtcttagcaagaaatgtagaatat

SEQ ID NO: 457582 - DNA, 30 bp, Artificial Sequence
  Synthetic oligonucleotide
catggcggcctcttgactgccaccgaatat

SEQ ID NO: 457583 - DNA, 30 bp, Artificial Sequence
  Synthetic oligonucleotide
actcagcacgttttaaattctctcgaatat

SEQ ID NO: 457584 - DNA, 30 bp, Artificial Sequence
  Synthetic oligonucleotide
ttggttgtcgtactcttttaaaaggaatat

SEQ ID NO: 457585 - DNA, 30 bp, Artificial Sequence
  Synthetic oligonucleotide
gggtcgcatggccagaatgctcgggaatat

SEQ ID NO: 457586 - DNA, 30 bp, Artificial Sequence
  Synthetic oligonucleotide
ctcggtctgatatttgtagtcgtggaatat

SEQ ID NO: 457587 - DNA, 30 bp, Artificial Sequence
  Synthetic oligonucleotide
gatgttacgtctttaaagaagtatgaatat

SEQ ID NO: 457588 - DNA, 30 bp, Artificial Sequence
  Synthetic oligonucleotide
ttattcatgggatgtgtttactctgaatat

SEQ ID NO: 457589 - DNA, 30 bp, Artificial Sequence
  Synthetic oligonucleotide
gaggggcattgtatttataagacataatat

SEQ ID NO: 457590 - DNA, 30 bp, Artificial Sequence
  Synthetic oligonucleotide
ggaggcccgagtagctgcggcgtataatat

SEQ ID NO: 457591 - DNA, 30 bp, Artificial Sequence
  Synthetic oligonucleotide
tcggtagcatctgtctacagtaagtaatat

SEQ ID NO: 457592 - DNA, 30 bp, Artificial Sequence
  Synthetic oligonucleotide
gcagacctgccggattccggcgagtaatat

SEQ ID NO: 457593 - DNA, 30 bp, Artificial Sequence
  Synthetic oligonucleotide
gagtacggagtctgtacccgggagtaatat

SEQ ID NO: 457594 - DNA, 30 bp, Artificial Sequence
  Synthetic oligonucleotide
gttgattcgtgggtattcggatagtaatat

SEQ ID NO: 457595 - DNA, 30 bp, Artificial Sequence
  Synthetic oligonucleotide
atgggttaggttatagcggagggttaatat

SEQ ID NO: 457596 - DNA, 30 bp, Artificial Sequence
  Synthetic oligonucleotide
acatatatgatgatatttgcattaacatat

SEQ ID NO: 457597 - DNA, 30 bp, Artificial Sequence
  Synthetic oligonucleotide
tgaaagcttgggttgacactagcgacatat

SEQ ID NO: 457598 - DNA, 30 bp, Artificial Sequence
  Synthetic oligonucleotide
acgcctggcagctagaaacgatcgacatat

SEQ ID NO: 457599 - DNA, 30 bp, Artificial Sequence
  Synthetic oligonucleotide
ggtagttgcatgactttcaggcatacatat

SEQ ID NO: 457600 - DNA, 30 bp, Artificial Sequence
  Synthetic oligonucleotide
gcaatgttattgtaccgtctacaaccatat

SEQ ID NO: 457601 - DNA, 30 bp, Artificial Sequence
  Synthetic oligonucleotide
gagggctacctggctctccgctgaccatat

SEQ ID NO: 457602 - DNA, 30 bp, Artificial Sequence
  Synthetic oligonucleotide
aaatgtttgacatacagtacaggcccatat

SEQ ID NO: 457603 - DNA, 30 bp, Artificial Sequence
  Synthetic oligonucleotide
ccagacttccttcgaggggctttcccatat

SEQ ID NO: 457604 - DNA, 30 bp, Artificial Sequence
  Synthetic oligonucleotide
cgttacgcattgctttataaaacgccatat

SEQ ID NO: 457605 - DNA, 30 bp, Artificial Sequence
  Synthetic oligonucleotide
aaattgagttcaattccggttggtccatat

SEQ ID NO: 457606 - DNA, 30 bp, Artificial Sequence
  Synthetic oligonucleotide
gggaactttttcagactgtagtgtccatat

SEQ ID NO: 457607 - DNA, 30 bp, Artificial Sequence
  Synthetic oligonucleotide
actgaagtcgatgaaccgcacacagcatat

SEQ ID NO: 457608 - DNA, 30 bp, Artificial Sequence
  Synthetic oligonucleotide
ttcaacggagattaaagtatcgcagcatat

SEQ ID NO: 457609 - DNA, 30 bp, Artificial Sequence
  Synthetic oligonucleotide
aaaatctagttagcgggttaatgagcatat

SEQ ID NO: 457610 - DNA, 30 bp, Artificial Sequence
  Synthetic oligonucleotide
acaacgtgggtcacgctgggcttagcatat

SEQ ID NO: 457611 - DNA, 30 bp, Artificial Sequence
  Synthetic oligonucleotide
cgttgatattagggcatgcatggcgcatat

SEQ ID NO: 457612 - DNA, 30 bp, Artificial Sequence
  Synthetic oligonucleotide
gaactacttactacgaatgactgcgcatat

SEQ ID NO: 457613 - DNA, 30 bp, Artificial Sequence
  Synthetic oligonucleotide
ttttcaaaacgtggccaaaactaggcatat

SEQ ID NO: 457614 - DNA, 30 bp, Artificial Sequence
  Synthetic oligonucleotide
ttcaggaactctttgagtatagttgcatat

SEQ ID NO: 457615 - DNA, 30 bp, Artificial Sequence
  Synthetic oligonucleotide
aaggttttccagcgtaaaattaaatcatat

SEQ ID NO: 457616 - DNA, 30 bp, Artificial Sequence
  Synthetic oligonucleotide
cttgtgtcacgtgtacatcttagctcatat

SEQ ID NO: 457617 - DNA, 30 bp, Artificial Sequence
  Synthetic oligonucleotide
tgaattgcctaggctaaaggtaagtcatat

SEQ ID NO: 457618 - DNA, 30 bp, Artificial Sequence
  Synthetic oligonucleotide
tcataaagcatctaagtgatacagtcatat

SEQ ID NO: 457619 - DNA, 30 bp, Artificial Sequence
  Synthetic oligonucleotide
tcaaatggtttatcgtggcggtcgtcatat

SEQ ID NO: 457620 - DNA, 30 bp, Artificial Sequence
  Synthetic oligonucleotide
agaataagagatttgttggggcattcatat

SEQ ID NO: 457621 - DNA, 30 bp, Artificial Sequence
  Synthetic oligonucleotide
gttttcaaagtacctgagaggcgttcatat

SEQ ID NO: 457622 - DNA, 30 bp, Artificial Sequence
  Synthetic oligonucleotide
caatctgtttcagatatgctgaaaagatat

SEQ ID NO: 457623 - DNA, 30 bp, Artificial Sequence
  Synthetic oligonucleotide
cgcggtataactttaatagcagtaagatat

SEQ ID NO: 457624 - DNA, 30 bp, Artificial Sequence
  Synthetic oligonucleotide
ttttaaaggaggtcttatctccgcagatat

SEQ ID NO: 457625 - DNA, 30 bp, Artificial Sequence
  Synthetic oligonucleotide
ctctagatggccgcgactcagtcgagatat

SEQ ID NO: 457626 - DNA, 30 bp, Artificial Sequence
  Synthetic oligonucleotide
cgacctcaggacgttacaacgcctagatat

SEQ ID NO: 457627 - DNA, 30 bp, Artificial Sequence
  Synthetic oligonucleotide
ggtgggaacgttttcctcgacattagatat

SEQ ID NO: 457628 - DNA, 30 bp, Artificial Sequence
  Synthetic oligonucleotide
agggcggctttcggggaaatgggccgatat

SEQ ID NO: 457629 - DNA, 30 bp, Artificial Sequence
  Synthetic oligonucleotide
ctcctgccccgtggacaacttcggcgatat

SEQ ID NO: 457630 - DNA, 30 bp, Artificial Sequence
  Synthetic oligonucleotide
atcgaaaaaattgcatgttcatgtcgatat

SEQ ID NO: 457631 - DNA, 30 bp, Artificial Sequence
  Synthetic oligonucleotide
aatcacggttcgaaaaccacggttcgatat

SEQ ID NO: 457632 - DNA, 30 bp, Artificial Sequence
  Synthetic oligonucleotide
ctatgtgaaggaccgtacgcagtaggatat

SEQ ID NO: 457633 - DNA, 30 bp, Artificial Sequence
  Synthetic oligonucleotide
aataggcctcggcgcggacaagccggatat

SEQ ID NO: 457634 - DNA, 30 bp, Artificial Sequence
  Synthetic oligonucleotide
gtgggaggttttcctggtcttgccggatat

SEQ ID NO: 457635 - DNA, 30 bp, Artificial Sequence
  Synthetic oligonucleotide
tgtgttgcgttgagcgtagcgaggggatat

SEQ ID NO: 457636 - DNA, 30 bp, Artificial Sequence
  Synthetic oligonucleotide
gtatatgttctgacgatttactctggatat

SEQ ID NO: 457637 - DNA, 30 bp, Artificial Sequence
  Synthetic oligonucleotide
tgctccactagcgcccatggtcttggatat

SEQ ID NO: 457638 - DNA, 30 bp, Artificial Sequence
  Synthetic oligonucleotide
tattaaaggtagtagtgtggactatgatat

SEQ ID NO: 457639 - DNA, 30 bp, Artificial Sequence
  Synthetic oligonucleotide
aaggcatgatcgccaggtatatactgatat

SEQ ID NO: 457640 - DNA, 30 bp, Artificial Sequence
  Synthetic oligonucleotide
tctctgagagggtccacccacctctgatat

SEQ ID NO: 457641 - DNA, 30 bp, Artificial Sequence
  Synthetic oligonucleotide
ggaggctagcattttcacatagcgtgatat

SEQ ID NO: 457642 - DNA, 30 bp, Artificial Sequence
  Synthetic oligonucleotide
tagttccgaataatatatggcttgtgatat

SEQ ID NO: 457643 - DNA, 30 bp, Artificial Sequence
  Synthetic oligonucleotide
catttcgaaggggtatgagccgattgatat

SEQ ID NO: 457644 - DNA, 30 bp, Artificial Sequence
  Synthetic oligonucleotide
tactagactatgattcgagacgaaatatat

SEQ ID NO: 457645 - DNA, 30 bp, Artificial Sequence
  Synthetic oligonucleotide
cgcgctgtctgttctagggtggaaatatat

SEQ ID NO: 457646 - DNA, 30 bp, Artificial Sequence
  Synthetic oligonucleotide
gataatacagtagcccaagacccaatatat

SEQ ID NO: 457647 - DNA, 30 bp, Artificial Sequence
  Synthetic oligonucleotide
attcttgtgagacctgggattgcaatatat

SEQ ID NO: 457648 - DNA, 30 bp, Artificial Sequence
  Synthetic oligonucleotide
aaacccttggccaggagatgactaatatat

SEQ ID NO: 457649 - DNA, 30 bp, Artificial Sequence
  Synthetic oligonucleotide
gtgattatggggcattaaagctacatatat

SEQ ID NO: 457650 - DNA, 30 bp, Artificial Sequence
  Synthetic oligonucleotide
tataaggccgaaaagttcgaaagcatatat

SEQ ID NO: 457651 - DNA, 30 bp, Artificial Sequence
  Synthetic oligonucleotide
cgctaatctgctggagcagttgggatatat

SEQ ID NO: 457652 - DNA, 30 bp, Artificial Sequence
  Synthetic oligonucleotide
ggtatacttaggtccagtagcgatatatat

SEQ ID NO: 457653 - DNA, 30 bp, Artificial Sequence
  Synthetic oligonucleotide
gactcctaaggaaagtggccatcactatat

SEQ ID NO: 457654 - DNA, 30 bp, Artificial Sequence
  Synthetic oligonucleotide
gtactgtgagtggtgagtcgctgactatat

SEQ ID NO: 457655 - DNA, 30 bp, Artificial Sequence
  Synthetic oligonucleotide
cttagtggatacgatggtggccacctatat

SEQ ID NO: 457656 - DNA, 30 bp, Artificial Sequence
  Synthetic oligonucleotide
cttccgtaccgcgtgattcaagacctatat

SEQ ID NO: 457657 - DNA, 30 bp, Artificial Sequence
  Synthetic oligonucleotide
tcacacttttttgagggtagagcgctatat

SEQ ID NO: 457658 - DNA, 30 bp, Artificial Sequence
  Synthetic oligonucleotide
agtgagattgtcccacacaaggcgctatat

SEQ ID NO: 457659 - DNA, 30 bp, Artificial Sequence
  Synthetic oligonucleotide
cgatttgatctgctctcgaattcgctatat

SEQ ID NO: 457660 - DNA, 30 bp, Artificial Sequence
  Synthetic oligonucleotide
taaacccctcagaacgccccgaggctatat

SEQ ID NO: 457661 - DNA, 30 bp, Artificial Sequence
  Synthetic oligonucleotide
tattctaagaaggcccgttcgtatctatat

SEQ ID NO: 457662 - DNA, 30 bp, Artificial Sequence
  Synthetic oligonucleotide
cagtaaacgcctttgtacttaagtctatat

SEQ ID NO: 457663 - DNA, 31 bp, Artificial Sequence
  Synthetic oligonucleotide
ctccaagctaacgagattgccgcaagtatat

SEQ ID NO: 457664 - DNA, 30 bp, Artificial Sequence
  Synthetic oligonucleotide
aaatgtactccagcttgacaagcagtatat

SEQ ID NO: 457665 - DNA, 30 bp, Artificial Sequence
  Synthetic oligonucleotide
acaacaggccggggtacggggatagtatat

SEQ ID NO: 457666 - DNA, 30 bp, Artificial Sequence
  Synthetic oligonucleotide
atcacagtgaattttgttggactagtatat

SEQ ID NO: 457667 - DNA, 30 bp, Artificial Sequence
  Synthetic oligonucleotide
tggagtttcctcagtgttctacacgtatat

SEQ ID NO: 457668 - DNA, 30 bp, Artificial Sequence
  Synthetic oligonucleotide
ggcggagcctaggcccgctccgtcgtatat

SEQ ID NO: 457669 - DNA, 30 bp, Artificial Sequence
  Synthetic oligonucleotide
tattttccaaactaacgcgggccggtatat

SEQ ID NO: 457670 - DNA, 30 bp, Artificial Sequence
  Synthetic oligonucleotide
tggaccctcacacattgataggcggtatat

SEQ ID NO: 457671 - DNA, 30 bp, Artificial Sequence
  Synthetic oligonucleotide
aatacgtcaacatttccctttgcggtatat

SEQ ID NO: 457672 - DNA, 30 bp, Artificial Sequence
  Synthetic oligonucleotide
caaaacggttagagccacatcgctgtatat

SEQ ID NO: 457673 - DNA, 30 bp, Artificial Sequence
  Synthetic oligonucleotide
aaggcgtcttaaatgtcgacgtgtgtatat

SEQ ID NO: 457674 - DNA, 30 bp, Artificial Sequence
  Synthetic oligonucleotide
aactcttagggtatgagacagattgtatat

SEQ ID NO: 457675 - DNA, 30 bp, Artificial Sequence
  Synthetic oligonucleotide
agtaccagtgctagaggcataagattatat

SEQ ID NO: 457676 - DNA, 30 bp, Artificial Sequence
  Synthetic oligonucleotide
taggctcaagtgtagttcacgtgattatat

SEQ ID NO: 457677 - DNA, 30 bp, Artificial Sequence
  Synthetic oligonucleotide
accaacctaatgtaaatagtccgcttatat

SEQ ID NO: 457678 - DNA, 30 bp, Artificial Sequence
  Synthetic oligonucleotide
gagagaatcctatctcactagcgcttatat

SEQ ID NO: 457679 - DNA, 30 bp, Artificial Sequence
  Synthetic oligonucleotide
ttctggaaagcatttagcccggagttatat

SEQ ID NO: 457680 - DNA, 30 bp, Artificial Sequence
  Synthetic oligonucleotide
gatctgaggactttttgacggtagttatat

SEQ ID NO: 457681 - DNA, 30 bp, Artificial Sequence
  Synthetic oligonucleotide
cattgcacctctcctcggtctgggttatat

SEQ ID NO: 457682 - DNA, 30 bp, Artificial Sequence
  Synthetic oligonucleotide
aagtaggacgcgctcagaataactttatat

SEQ ID NO: 457683 - DNA, 30 bp, Artificial Sequence
  Synthetic oligonucleotide
tgactataagcgttgtacacgcttttatat

SEQ ID NO: 457684 - DNA, 30 bp, Artificial Sequence
  Synthetic oligonucleotide
tgttaaagattaggcgatatagaaaactat

SEQ ID NO: 457685 - DNA, 30 bp, Artificial Sequence
  Synthetic oligonucleotide
gatatactcagaacgaagtaaaacaactat

SEQ ID NO: 457686 - DNA, 30 bp, Artificial Sequence
  Synthetic oligonucleotide
aaatgtgaatccagtaatttcaccaactat

SEQ ID NO: 457687 - DNA, 30 bp, Artificial Sequence
  Synthetic oligonucleotide
tagataatcagtcccagcatggtcaactat

SEQ ID NO: 457688 - DNA, 30 bp, Artificial Sequence
  Synthetic oligonucleotide
aggaattccgttttacggttaccgaactat

SEQ ID NO: 457689 - DNA, 30 bp, Artificial Sequence
  Synthetic oligonucleotide
ggataagacgacaacaattctttgaactat

SEQ ID NO: 457690 - DNA, 30 bp, Artificial Sequence
  Synthetic oligonucleotide
cagatatatgttaggtggttcaaacactat

SEQ ID NO: 457691 - DNA, 30 bp, Artificial Sequence
  Synthetic oligonucleotide
ccacaagtcgccaggtcgattgtccactat

SEQ ID NO: 457692 - DNA, 30 bp, Artificial Sequence
  Synthetic oligonucleotide
caagtttagggatgccgcgctaagcactat

SEQ ID NO: 457693 - DNA, 30 bp, Artificial Sequence
  Synthetic oligonucleotide
acatatgtgttaaagtttcgccagcactat

SEQ ID NO: 457694 - DNA, 30 bp, Artificial Sequence
  Synthetic oligonucleotide
gagctttagaaggccactgtatagcactat

SEQ ID NO: 457695 - DNA, 30 bp, Artificial Sequence
  Synthetic oligonucleotide
ggttagatataggcgaatttgcatcactat

SEQ ID NO: 457696 - DNA, 30 bp, Artificial Sequence
  Synthetic oligonucleotide
tgttccttatctgtatttggttgtcactat

SEQ ID NO: 457697 - DNA, 30 bp, Artificial Sequence
  Synthetic oligonucleotide
ccaaaatttcaggtgcaaatcccggactat

SEQ ID NO: 457698 - DNA, 30 bp, Artificial Sequence
  Synthetic oligonucleotide
tgataagctttgcgaggcccaggggactat

SEQ ID NO: 457699 - DNA, 30 bp, Artificial Sequence
  Synthetic oligonucleotide
agtgcgaaatattttacaggatgggactat

SEQ ID NO: 457700 - DNA, 30 bp, Artificial Sequence
  Synthetic oligonucleotide
gagtggatcaggattatgaccgtggactat

SEQ ID NO: 457701 - DNA, 30 bp, Artificial Sequence
  Synthetic oligonucleotide
cacgcgaacgtagcgctgcgacaatactat

SEQ ID NO: 457702 - DNA, 30 bp, Artificial Sequence
  Synthetic oligonucleotide
ttcggcctttaaaattagcatagctactat

SEQ ID NO: 457703 - DNA, 30 bp, Artificial Sequence
  Synthetic oligonucleotide
ccttgttggggtagttgattcgtctactat

SEQ ID NO: 457704 - DNA, 30 bp, Artificial Sequence
  Synthetic oligonucleotide
gttaaccgagaacaggttccaaagtactat

SEQ ID NO: 457705 - DNA, 30 bp, Artificial Sequence
  Synthetic oligonucleotide
tcataaaaaacccgaggtatgaagtactat

SEQ ID NO: 457706 - DNA, 30 bp, Artificial Sequence
  Synthetic oligonucleotide
tggattttacgaagctaacgtcagtactat

SEQ ID NO: 457707 - DNA, 30 bp, Artificial Sequence
  Synthetic oligonucleotide
cggttccctgggattcatccccggtactat

SEQ ID NO: 457708 - DNA, 30 bp, Artificial Sequence
  Synthetic oligonucleotide
atcttcaagagacacgatcgttggtactat

SEQ ID NO: 457709 - DNA, 30 bp, Artificial Sequence
  Synthetic oligonucleotide
cggagcgttcttatagcttgtgtgtactat

SEQ ID NO: 457710 - DNA, 30 bp, Artificial Sequence
  Synthetic oligonucleotide
cgcacataaagcccacttgctttgtactat

SEQ ID NO: 457711 - DNA, 30 bp, Artificial Sequence
  Synthetic oligonucleotide
ggtataaaggttagggatctgggttactat

SEQ ID NO: 457712 - DNA, 30 bp, Artificial Sequence
  Synthetic oligonucleotide
ataaagtgatatttaacgcatatttactat

SEQ ID NO: 457713 - DNA, 30 bp, Artificial Sequence
  Synthetic oligonucleotide
tgagctgaattttagtgcctcttttactat

SEQ ID NO: 457714 - DNA, 30 bp, Artificial Sequence
  Synthetic oligonucleotide
cattactcgaattgtaattcgttttactat

SEQ ID NO: 457715 - DNA, 30 bp, Artificial Sequence
  Synthetic oligonucleotide
aagaaaaatccgtccatgctgcaaacctat

SEQ ID NO: 457716 - DNA, 30 bp, Artificial Sequence
  Synthetic oligonucleotide
taggttctgataagatacagggaaacctat

SEQ ID NO: 457717 - DNA, 30 bp, Artificial Sequence
  Synthetic oligonucleotide
gatgttcatacggatatgcatgtaacctat

SEQ ID NO: 457718 - DNA, 30 bp, Artificial Sequence
  Synthetic oligonucleotide
aactttaggatgcgtccacgaaacacctat

SEQ ID NO: 457719 - DNA, 30 bp, Artificial Sequence
  Synthetic oligonucleotide
gataccagttaggccgcaaggtacacctat

SEQ ID NO: 457720 - DNA, 30 bp, Artificial Sequence
  Synthetic oligonucleotide
ctaatggggacatgcatctaaggcacctat

SEQ ID NO: 457721 - DNA, 30 bp, Artificial Sequence
  Synthetic oligonucleotide
aatagtcactcggcgctatttttgacctat

SEQ ID NO: 457722 - DNA, 30 bp, Artificial Sequence
  Synthetic oligonucleotide
agcagacagtttattcgataaattacctat

SEQ ID NO: 457723 - DNA, 30 bp, Artificial Sequence
  Synthetic oligonucleotide
acggcagctcgtgggtcaataaccccctat

SEQ ID NO: 457724 - DNA, 30 bp, Artificial Sequence
  Synthetic oligonucleotide
cggtattgtgtttttgcattaccgccctat

SEQ ID NO: 457725 - DNA, 30 bp, Artificial Sequence
  Synthetic oligonucleotide
atcttcgtccgagtcttatagcggccctat

SEQ ID NO: 457726 - DNA, 30 bp, Artificial Sequence
  Synthetic oligonucleotide
cttttcatcgggaatcgagggaatccctat

SEQ ID NO: 457727 - DNA, 30 bp, Artificial Sequence
  Synthetic oligonucleotide
tctatcggttatttaagtcaagctccctat

SEQ ID NO: 457728 - DNA, 30 bp, Artificial Sequence
  Synthetic oligonucleotide
tttttgacgtgtcacctccttcgtccctat

SEQ ID NO: 457729 - DNA, 30 bp, Artificial Sequence
  Synthetic oligonucleotide
gataatgtctcgtaggaggcaggtccctat

SEQ ID NO: 457730 - DNA, 30 bp, Artificial Sequence
  Synthetic oligonucleotide
tttcctattaggggcatgatgccagcctat

SEQ ID NO: 457731 - DNA, 30 bp, Artificial Sequence
  Synthetic oligonucleotide
gagattcggattagccacgggcgggcctat

SEQ ID NO: 457732 - DNA, 30 bp, Artificial Sequence
  Synthetic oligonucleotide
ggttagcgtgtcggctctggactggcctat

SEQ ID NO: 457733 - DNA, 30 bp, Artificial Sequence
  Synthetic oligonucleotide
ccaggcatatcttttataggcaatgcctat

SEQ ID NO: 457734 - DNA, 30 bp, Artificial Sequence
  Synthetic oligonucleotide
gaaattcttcatatagccttacatgcctat

SEQ ID NO: 457735 - DNA, 30 bp, Artificial Sequence
  Synthetic oligonucleotide
ttctttgcgagcaactataggggtgcctat

SEQ ID NO: 457736 - DNA, 30 bp, Artificial Sequence
  Synthetic oligonucleotide
gaagctagattgggccgttggtactcctat

SEQ ID NO: 457737 - DNA, 30 bp, Artificial Sequence
  Synthetic oligonucleotide
taccaatgcgcttgtgatctttcctcctat

SEQ ID NO: 457738 - DNA, 30 bp, Artificial Sequence
  Synthetic oligonucleotide
ttgttgtgttctctttttgggttttcctat

SEQ ID NO: 457739 - DNA, 30 bp, Artificial Sequence
  Synthetic oligonucleotide
ttgttgtgttctctatttgtgttttcctat

SEQ ID NO: 457740 - DNA, 30 bp, Artificial Sequence
  Synthetic oligonucleotide
ttgttgtgttctcattttgtgttttcctat

SEQ ID NO: 457741 - DNA, 30 bp, Artificial Sequence
  Synthetic oligonucleotide
ttgttgtgtcctctttttgtgttttcctat

SEQ ID NO: 457742 - DNA, 30 bp, Artificial Sequence
  Synthetic oligonucleotide
ttgatgtgttctctttttgtgttttcctat

SEQ ID NO: 457743 - DNA, 30 bp, Artificial Sequence
  Synthetic oligonucleotide
ttattcagtcctaggcacgttaaaagctat

SEQ ID NO: 457744 - DNA, 30 bp, Artificial Sequence
  Synthetic oligonucleotide
ggctcgggtctattgggcgtctaaagctat

SEQ ID NO: 457745 - DNA, 30 bp, Artificial Sequence
  Synthetic oligonucleotide
cctttatcaaacttgatgtaatcgagctat

SEQ ID NO: 457746 - DNA, 30 bp, Artificial Sequence
  Synthetic oligonucleotide
gacatctatggatagctcccgtatagctat

SEQ ID NO: 457747 - DNA, 30 bp, Artificial Sequence
  Synthetic oligonucleotide
aaatagctaggtggagagcgttttagctat

SEQ ID NO: 457748 - DNA, 30 bp, Artificial Sequence
  Synthetic oligonucleotide
atggaaatcgttacataggggtaacgctat

SEQ ID NO: 457749 - DNA, 30 bp, Artificial Sequence
  Synthetic oligonucleotide
aggaaaaatagctgatatgcgtgacgctat

SEQ ID NO: 457750 - DNA, 30 bp, Artificial Sequence
  Synthetic oligonucleotide
aagttagttctatgatatgcaatacgctat

SEQ ID NO: 457751 - DNA, 30 bp, Artificial Sequence
  Synthetic oligonucleotide
cagacaccagttatacatgagaaccgctat

SEQ ID NO: 457752 - DNA, 30 bp, Artificial Sequence
  Synthetic oligonucleotide
gtcggcacggagctcttgcgaggccgctat

SEQ ID NO: 457753 - DNA, 30 bp, Artificial Sequence
  Synthetic oligonucleotide
aaagtagtcgattaacaatttcatcgctat

SEQ ID NO: 457754 - DNA, 30 bp, Artificial Sequence
  Synthetic oligonucleotide
caggttagaggaagctggcgagctcgctat

SEQ ID NO: 457755 - DNA, 30 bp, Artificial Sequence
  Synthetic oligonucleotide
tctgaaatgtcttggatcttaagaggctat

SEQ ID NO: 457756 - DNA, 30 bp, Artificial Sequence
  Synthetic oligonucleotide
gccgtgggagtcccccagttcagcggctat

SEQ ID NO: 457757 - DNA, 30 bp, Artificial Sequence
  Synthetic oligonucleotide
gggccggacgcatggcatggcttgggctat

SEQ ID NO: 457758 - DNA, 30 bp, Artificial Sequence
  Synthetic oligonucleotide
gcagctctgtgctatccttttatatgctat

SEQ ID NO: 457759 - DNA, 30 bp, Artificial Sequence
  Synthetic oligonucleotide
gcaaatagttacctaatagtgctatgctat

SEQ ID NO: 457760 - DNA, 30 bp, Artificial Sequence
  Synthetic oligonucleotide
gaagttagtatctaaggtgccatctgctat

SEQ ID NO: 457761 - DNA, 30 bp, Artificial Sequence
  Synthetic oligonucleotide
cgaattgagtcgaacctgtttcaaatctat

SEQ ID NO: 457762 - DNA, 30 bp, Artificial Sequence
  Synthetic oligonucleotide
cttcagcccttctcacacttggcaatctat

SEQ ID NO: 457763 - DNA, 30 bp, Artificial Sequence
  Synthetic oligonucleotide
gaccgtggcaaacggatgtagagcatctat

SEQ ID NO: 457764 - DNA, 30 bp, Artificial Sequence
  Synthetic oligonucleotide
atctgggttccgacgccgtacccgatctat

SEQ ID NO: 457765 - DNA, 30 bp, Artificial Sequence
  Synthetic oligonucleotide
ctttggctgagcaataaatgctggatctat

SEQ ID NO: 457766 - DNA, 30 bp, Artificial Sequence
  Synthetic oligonucleotide
cacggagtaacgtgatgaacgttgatctat

SEQ ID NO: 457767 - DNA, 30 bp, Artificial Sequence
  Synthetic oligonucleotide
agggcttacgtttcccctggtgttatctat

SEQ ID NO: 457768 - DNA, 30 bp, Artificial Sequence
  Synthetic oligonucleotide
actttgcgagacgacatgcagtgcctctat

SEQ ID NO: 457769 - DNA, 30 bp, Artificial Sequence
  Synthetic oligonucleotide
gagactgttccgagtcggtttgatctctat

SEQ ID NO: 457770 - DNA, 30 bp, Artificial Sequence
  Synthetic oligonucleotide
ttcgtgccctctttctgtatagcagtctat

SEQ ID NO: 457771 - DNA, 30 bp, Artificial Sequence
  Synthetic oligonucleotide
attccgctaaatagtgaaaaaggagtctat

SEQ ID NO: 457772 - DNA, 30 bp, Artificial Sequence
  Synthetic oligonucleotide
gccggatatagacgacattgggtagtctat

SEQ ID NO: 457773 - DNA, 30 bp, Artificial Sequence
  Synthetic oligonucleotide
ctcggcagccagtaacatgcccgcgtctat

SEQ ID NO: 457774 - DNA, 30 bp, Artificial Sequence
  Synthetic oligonucleotide
acaaagccgactttagtttaagcggtctat

SEQ ID NO: 457775 - DNA, 30 bp, Artificial Sequence
  Synthetic oligonucleotide
cccgcacaaagctcctggttttatgtctat

SEQ ID NO: 457776 - DNA, 30 bp, Artificial Sequence
  Synthetic oligonucleotide
acagcgagggttctttcattatttgtctat

SEQ ID NO: 457777 - DNA, 30 bp, Artificial Sequence
  Synthetic oligonucleotide
ttaagcagacatggttaacgtccattctat

SEQ ID NO: 457778 - DNA, 30 bp, Artificial Sequence
  Synthetic oligonucleotide
gtatctaaagctcataggaagcgcttctat

SEQ ID NO: 457779 - DNA, 30 bp, Artificial Sequence
  Synthetic oligonucleotide
tgaccacttaggaacacttcagcgttctat

SEQ ID NO: 457780 - DNA, 30 bp, Artificial Sequence
  Synthetic oligonucleotide
aggccccatacgttatcacaacggttctat

SEQ ID NO: 457781 - DNA, 30 bp, Artificial Sequence
  Synthetic oligonucleotide
ctggaaggcccggagcatggggtgttctat

SEQ ID NO: 457782 - DNA, 30 bp, Artificial Sequence
  Synthetic oligonucleotide
tgcatttacacagatagacttttgttctat

SEQ ID NO: 457783 - DNA, 30 bp, Artificial Sequence
  Synthetic oligonucleotide
gacatcggtatgtcaacggtagctttctat

SEQ ID NO: 457784 - DNA, 30 bp, Artificial Sequence
  Synthetic oligonucleotide
aaaagatattgaaaaaaacggtacaagtat

SEQ ID NO: 457785 - DNA, 30 bp, Artificial Sequence
  Synthetic oligonucleotide
gaatgcagcttgccgacatcaggtaagtat

SEQ ID NO: 457786 - DNA, 30 bp, Artificial Sequence
  Synthetic oligonucleotide
accagtcagggatctccgctgggtaagtat

SEQ ID NO: 457787 - DNA, 30 bp, Artificial Sequence
  Synthetic oligonucleotide
ccgtcgcctgtatttagccgccaacagtat

SEQ ID NO: 457788 - DNA, 30 bp, Artificial Sequence
  Synthetic oligonucleotide
gcacccgagctcacgccaagtagacagtat

SEQ ID NO: 457789 - DNA, 30 bp, Artificial Sequence
  Synthetic oligonucleotide
ggaatttctaggttgcttggtggacagtat

SEQ ID NO: 457790 - DNA, 30 bp, Artificial Sequence
  Synthetic oligonucleotide
aaaggtaatatctagccgaacgtacagtat

SEQ ID NO: 457791 - DNA, 30 bp, Artificial Sequence
  Synthetic oligonucleotide
agtaccccactcggctacatgggccagtat

SEQ ID NO: 457792 - DNA, 30 bp, Artificial Sequence
  Synthetic oligonucleotide
atactgcgctcgctggaaactatccagtat

SEQ ID NO: 457793 - DNA, 30 bp, Artificial Sequence
  Synthetic oligonucleotide
ctcccttcgtaagttttcaaatcgcagtat

SEQ ID NO: 457794 - DNA, 30 bp, Artificial Sequence
  Synthetic oligonucleotide
gctggtatggccggagccatacaagagtat

SEQ ID NO: 457795 - DNA, 30 bp, Artificial Sequence
  Synthetic oligonucleotide
ccattaaggtaaactcggtgatgagagtat

SEQ ID NO: 457796 - DNA, 30 bp, Artificial Sequence
  Synthetic oligonucleotide
gttattgcaaggctacaacgggtagagtat

SEQ ID NO: 457797 - DNA, 30 bp, Artificial Sequence
  Synthetic oligonucleotide
taagctttggactcaccgggcttagagtat

SEQ ID NO: 457798 - DNA, 30 bp, Artificial Sequence
  Synthetic oligonucleotide
gtcaaaacccggtggggggaaaacgagtat

SEQ ID NO: 457799 - DNA, 30 bp, Artificial Sequence
  Synthetic oligonucleotide
ttttagtgtgactgtgccgctaacgagtat

SEQ ID NO: 457800 - DNA, 30 bp, Artificial Sequence
  Synthetic oligonucleotide
ctttatctgctgtaatcagttgtcgagtat

SEQ ID NO: 457801 - DNA, 30 bp, Artificial Sequence
  Synthetic oligonucleotide
gtgcaatcatagggtccttgaccggagtat

SEQ ID NO: 457802 - DNA, 30 bp, Artificial Sequence
  Synthetic oligonucleotide
atccaccagccatgaaaaatgtcggagtat

SEQ ID NO: 457803 - DNA, 31 bp, Artificial Sequence
  Synthetic oligonucleotide
gagtcaggaatagtcggatcgtggggagtat

SEQ ID NO: 457804 - DNA, 30 bp, Artificial Sequence
  Synthetic oligonucleotide
cgcgatcctattttcactttactggagtat

SEQ ID NO: 457805 - DNA, 30 bp, Artificial Sequence
  Synthetic oligonucleotide
gggacttccggcggttcttacactgagtat

SEQ ID NO: 457806 - DNA, 30 bp, Artificial Sequence
  Synthetic oligonucleotide
catgaaaggatttgtcttgaatctgagtat

SEQ ID NO: 457807 - DNA, 30 bp, Artificial Sequence
  Synthetic oligonucleotide
ggcagcaaactattatcagttggtgagtat

SEQ ID NO: 457808 - DNA, 30 bp, Artificial Sequence
  Synthetic oligonucleotide
accaatcacacacccgggtaagaatagtat

SEQ ID NO: 457809 - DNA, 30 bp, Artificial Sequence
  Synthetic oligonucleotide
taaaagttggagccgctgttctcatagtat

SEQ ID NO: 457810 - DNA, 30 bp, Artificial Sequence
  Synthetic oligonucleotide
tgaaaccttcggcaatgattttcctagtat

SEQ ID NO: 457811 - DNA, 30 bp, Artificial Sequence
  Synthetic oligonucleotide
tgggtcctttcaactcctcatcgctagtat

SEQ ID NO: 457812 - DNA, 30 bp, Artificial Sequence
  Synthetic oligonucleotide
gttctctttaaagctgctgtatgttagtat

SEQ ID NO: 457813 - DNA, 30 bp, Artificial Sequence
  Synthetic oligonucleotide
aagctagctacttgcttaaagatttagtat

SEQ ID NO: 457814 - DNA, 30 bp, Artificial Sequence
  Synthetic oligonucleotide
tttcgggccaccgggactcagcacacgtat

SEQ ID NO: 457815 - DNA, 30 bp, Artificial Sequence
  Synthetic oligonucleotide
cggatggttctcacggcccttgacacgtat

SEQ ID NO: 457816 - DNA, 30 bp, Artificial Sequence
  Synthetic oligonucleotide
tcgtcatgtacgtcgcgtcgcatcacgtat

SEQ ID NO: 457817 - DNA, 30 bp, Artificial Sequence
  Synthetic oligonucleotide
gccctccctggtcacggtacgttgacgtat

SEQ ID NO: 457818 - DNA, 30 bp, Artificial Sequence
  Synthetic oligonucleotide
ttataaaatcccgtcgcgccccctacgtat

SEQ ID NO: 457819 - DNA, 30 bp, Artificial Sequence
  Synthetic oligonucleotide
tatttaaaaggcggaggttgacttacgtat

SEQ ID NO: 457820 - DNA, 30 bp, Artificial Sequence
  Synthetic oligonucleotide
actaagatataggtttgggaatacccgtat

SEQ ID NO: 457821 - DNA, 30 bp, Artificial Sequence
  Synthetic oligonucleotide
gtgacttgtcttaacggtacggtcccgtat

SEQ ID NO: 457822 - DNA, 30 bp, Artificial Sequence
  Synthetic oligonucleotide
gaggctggcatgaacaagtacatgccgtat

SEQ ID NO: 457823 - DNA, 30 bp, Artificial Sequence
  Synthetic oligonucleotide
ggattattctggttgtccgtatctccgtat

SEQ ID NO: 457824 - DNA, 30 bp, Artificial Sequence
  Synthetic oligonucleotide
cagaatgtgctccgctcgcacggtccgtat

SEQ ID NO: 457825 - DNA, 30 bp, Artificial Sequence
  Synthetic oligonucleotide
cgcgtgcacagttaacgcacgccagcgtat

SEQ ID NO: 457826 - DNA, 30 bp, Artificial Sequence
  Synthetic oligonucleotide
taggcgactcaatatttagttaccgcgtat

SEQ ID NO: 457827 - DNA, 30 bp, Artificial Sequence
  Synthetic oligonucleotide
attaagggaatctgttagttacgcgcgtat

SEQ ID NO: 457828 - DNA, 30 bp, Artificial Sequence
  Synthetic oligonucleotide
aatgacacgcacgcgtccgcccgtgcgtat

SEQ ID NO: 457829 - DNA, 30 bp, Artificial Sequence
  Synthetic oligonucleotide
ttacgataagcctcccgtgacctctcgtat

SEQ ID NO: 457830 - DNA, 30 bp, Artificial Sequence
  Synthetic oligonucleotide
aattgatcgtttagtccgccgctctcgtat

SEQ ID NO: 457831 - DNA, 30 bp, Artificial Sequence
  Synthetic oligonucleotide
cttaacaggacgcgatccagtaagtcgtat

SEQ ID NO: 457832 - DNA, 30 bp, Artificial Sequence
  Synthetic oligonucleotide
aaccagattccctcacgaatagattcgtat

SEQ ID NO: 457833 - DNA, 30 bp, Artificial Sequence
  Synthetic oligonucleotide
catgttaggacggagaattgattaaggtat

SEQ ID NO: 457834 - DNA, 30 bp, Artificial Sequence
  Synthetic oligonucleotide
ttgttcgtaggttttatgcgtcccaggtat

SEQ ID NO: 457835 - DNA, 30 bp, Artificial Sequence
  Synthetic oligonucleotide
gtgcacctctccggctttcgtaagaggtat

SEQ ID NO: 457836 - DNA, 30 bp, Artificial Sequence
  Synthetic oligonucleotide
agtcagtaaacggggtatttgccgaggtat

SEQ ID NO: 457837 - DNA, 30 bp, Artificial Sequence
  Synthetic oligonucleotide
gttacgtcacacagcaacgaatataggtat

SEQ ID NO: 457838 - DNA, 30 bp, Artificial Sequence
  Synthetic oligonucleotide
attagctgttttacgatgactggacggtat

SEQ ID NO: 457839 - DNA, 30 bp, Artificial Sequence
  Synthetic oligonucleotide
acccctcgccgcgagtacacggaccggtat

SEQ ID NO: 457840 - DNA, 30 bp, Artificial Sequence
  Synthetic oligonucleotide
tacactcatccctctgcttggggccggtat

SEQ ID NO: 457841 - DNA, 30 bp, Artificial Sequence
  Synthetic oligonucleotide
tgatgttccattatataaggtttgcggtat

SEQ ID NO: 457842 - DNA, 30 bp, Artificial Sequence
  Synthetic oligonucleotide
gtgtgccacggggacgtcctggttcggtat

SEQ ID NO: 457843 - DNA, 30 bp, Artificial Sequence
  Synthetic oligonucleotide
cttacatcctaacgccgttaataagggtat

SEQ ID NO: 457844 - DNA, 30 bp, Artificial Sequence
  Synthetic oligonucleotide
ggttgctggtcgttccgcataacagggtat

SEQ ID NO: 457845 - DNA, 30 bp, Artificial Sequence
  Synthetic oligonucleotide
tgtacacacaggtgcacccgtggagggtat

SEQ ID NO: 457846 - DNA, 30 bp, Artificial Sequence
  Synthetic oligonucleotide
gccgtccaccctaaaccgcacctagggtat

SEQ ID NO: 457847 - DNA, 30 bp, Artificial Sequence
  Synthetic oligonucleotide
caggaaaagatatgccatattgacgggtat

SEQ ID NO: 457848 - DNA, 30 bp, Artificial Sequence
  Synthetic oligonucleotide
catgatagtcattttatagacgtcgggtat

SEQ ID NO: 457849 - DNA, 30 bp, Artificial Sequence
  Synthetic oligonucleotide
gatgcatgcgtgaaccggcttttcgggtat

SEQ ID NO: 457850 - DNA, 30 bp, Artificial Sequence
  Synthetic oligonucleotide
gcggcttacagtattcctctagaggggtat

SEQ ID NO: 457851 - DNA, 30 bp, Artificial Sequence
  Synthetic oligonucleotide
gccgagctcccgggagtacatccggggtat

SEQ ID NO: 457852 - DNA, 30 bp, Artificial Sequence
  Synthetic oligonucleotide
tacgaattagagctttatattatggggtat

SEQ ID NO: 457853 - DNA, 30 bp, Artificial Sequence
  Synthetic oligonucleotide
atctcgcttcagtagtgttaggctgggtat

SEQ ID NO: 457854 - DNA, 30 bp, Artificial Sequence
  Synthetic oligonucleotide
acgtacttgagcgacgcgtcagaatggtat

SEQ ID NO: 457855 - DNA, 30 bp, Artificial Sequence
  Synthetic oligonucleotide
tctggcgcacggctggcggcgggatggtat

SEQ ID NO: 457856 - DNA, 30 bp, Artificial Sequence
  Synthetic oligonucleotide
catttctgtttactcgagtgatgatggtat

SEQ ID NO: 457857 - DNA, 30 bp, Artificial Sequence
  Synthetic oligonucleotide
tcccttcttgtcagtcgcgtagactggtat

SEQ ID NO: 457858 - DNA, 30 bp, Artificial Sequence
  Synthetic oligonucleotide
agtcccattactccatgaggaagctggtat

SEQ ID NO: 457859 - DNA, 30 bp, Artificial Sequence
  Synthetic oligonucleotide
acggtcaggtttttggccatcttctggtat

SEQ ID NO: 457860 - DNA, 30 bp, Artificial Sequence
  Synthetic oligonucleotide
agctacagtcgcacttttacagtgtggtat

SEQ ID NO: 457861 - DNA, 30 bp, Artificial Sequence
  Synthetic oligonucleotide
caagcaacacatgctgatcagataatgtat

SEQ ID NO: 457862 - DNA, 30 bp, Artificial Sequence
  Synthetic oligonucleotide
aatatggtgaacgctatcaatttaatgtat

SEQ ID NO: 457863 - DNA, 30 bp, Artificial Sequence
  Synthetic oligonucleotide
tatggatttcgcggctacaatcccatgtat

SEQ ID NO: 457864 - DNA, 30 bp, Artificial Sequence
  Synthetic oligonucleotide
cccattgttcagatgtaaggggccatgtat

SEQ ID NO: 457865 - DNA, 29 bp, Artificial Sequence
  Synthetic oligonucleotide
gtaacagaagcgataacatctgcatgtat

SEQ ID NO: 457866 - DNA, 30 bp, Artificial Sequence
  Synthetic oligonucleotide
atctcgtgccctgggttaattctcatgtat

SEQ ID NO: 457867 - DNA, 30 bp, Artificial Sequence
  Synthetic oligonucleotide
taaggagtttgccgatctcaccagatgtat

SEQ ID NO: 457868 - DNA, 30 bp, Artificial Sequence
  Synthetic oligonucleotide
tgggggccgacgacagctacatagatgtat

SEQ ID NO: 457869 - DNA, 30 bp, Artificial Sequence
  Synthetic oligonucleotide
tacctcggtttcaaaggattaccgatgtat

SEQ ID NO: 457870 - DNA, 30 bp, Artificial Sequence
  Synthetic oligonucleotide
gagcggcgcacctagggtgtcccgatgtat

SEQ ID NO: 457871 - DNA, 30 bp, Artificial Sequence
  Synthetic oligonucleotide
tcttgtgccgacgcatcggtacggatgtat

SEQ ID NO: 457872 - DNA, 30 bp, Artificial Sequence
  Synthetic oligonucleotide
agggtttaggtcttttaagtcagtatgtat

SEQ ID NO: 457873 - DNA, 30 bp, Artificial Sequence
  Synthetic oligonucleotide
tggagtcattaagtcgtactaattatgtat

SEQ ID NO: 457874 - DNA, 30 bp, Artificial Sequence
  Synthetic oligonucleotide
cggaggaggaacagttttggcggactgtat

SEQ ID NO: 457875 - DNA, 30 bp, Artificial Sequence
  Synthetic oligonucleotide
tagtcctgtccctgacgagaagacctgtat

SEQ ID NO: 457876 - DNA, 30 bp, Artificial Sequence
  Synthetic oligonucleotide
gacttattcgtccattgctcgtacctgtat

SEQ ID NO: 457877 - DNA, 30 bp, Artificial Sequence
  Synthetic oligonucleotide
tgaacgtccgtacgggtggggccgctgtat

SEQ ID NO: 457878 - DNA, 30 bp, Artificial Sequence
  Synthetic oligonucleotide
acagtgacttatggccagagcaatctgtat

SEQ ID NO: 457879 - DNA, 30 bp, Artificial Sequence
  Synthetic oligonucleotide
ttggatgctacccatgctatagatctgtat

SEQ ID NO: 457880 - DNA, 30 bp, Artificial Sequence
  Synthetic oligonucleotide
taatttcaaaaggtgtaggtgggtctgtat

SEQ ID NO: 457881 - DNA, 30 bp, Artificial Sequence
  Synthetic oligonucleotide
gtagttgtgccaaatgatgtgggtctgtat

SEQ ID NO: 457882 - DNA, 30 bp, Artificial Sequence
  Synthetic oligonucleotide
gagaagcagactcgcagctcctgtctgtat

SEQ ID NO: 457883 - DNA, 30 bp, Artificial Sequence
  Synthetic oligonucleotide
actcgtatttggatacccacttaagtgtat

SEQ ID NO: 457884 - DNA, 30 bp, Artificial Sequence
  Synthetic oligonucleotide
tccggtaacttagcatctcagatagtgtat

SEQ ID NO: 457885 - DNA, 30 bp, Artificial Sequence
  Synthetic oligonucleotide
actctgcgctcatctatacgttacgtgtat

SEQ ID NO: 457886 - DNA, 30 bp, Artificial Sequence
  Synthetic oligonucleotide
aaaattactttcgtgccagtttccgtgtat

SEQ ID NO: 457887 - DNA, 30 bp, Artificial Sequence
  Synthetic oligonucleotide
ttcttgtggtggttattagagggcgtgtat

SEQ ID NO: 457888 - DNA, 30 bp, Artificial Sequence
  Synthetic oligonucleotide
ttcatctctcaattggccttagaggtgtat

SEQ ID NO: 457889 - DNA, 30 bp, Artificial Sequence
  Synthetic oligonucleotide
tctacatggtatttgtgtcacacggtgtat

SEQ ID NO: 457890 - DNA, 30 bp, Artificial Sequence
  Synthetic oligonucleotide
gctgtgcattaccgcgtcttcccggtgtat

SEQ ID NO: 457891 - DNA, 30 bp, Artificial Sequence
  Synthetic oligonucleotide
atgcctaaacaacctttggatgatgtgtat

SEQ ID NO: 457892 - DNA, 30 bp, Artificial Sequence
  Synthetic oligonucleotide
gtatcattttaatagatatcgtatgtgtat

SEQ ID NO: 457893 - DNA, 30 bp, Artificial Sequence
  Synthetic oligonucleotide
tctattcggtttcgaggtccttatgtgtat

SEQ ID NO: 457894 - DNA, 30 bp, Artificial Sequence
  Synthetic oligonucleotide
tggcgcattcagggttcacgccctgtgtat

SEQ ID NO: 457895 - DNA, 30 bp, Artificial Sequence
  Synthetic oligonucleotide
ccgataaatctgttagcgagagctgtgtat

SEQ ID NO: 457896 - DNA, 30 bp, Artificial Sequence
  Synthetic oligonucleotide
tcttatctgttgagttttcctcttgtgtat

SEQ ID NO: 457897 - DNA, 36 bp, Artificial Sequence
  Synthetic oligonucleotide
ttcccttgtttcctgttgtgttttcctcttgtgtat

SEQ ID NO: 457898 - DNA, 30 bp, Artificial Sequence
  Synthetic oligonucleotide
ccttatctgttgtgttttcctcttgtgtat

SEQ ID NO: 457899 - DNA, 30 bp, Artificial Sequence
  Synthetic oligonucleotide
ttttatctgttgtgttttcctcttgtgtat

SEQ ID NO: 457900 - DNA, 30 bp, Artificial Sequence
  Synthetic oligonucleotide
agcaatgattgagcgcgagctaaattgtat

SEQ ID NO: 457901 - DNA, 30 bp, Artificial Sequence
  Synthetic oligonucleotide
gatttgtgtttcatcccatcagacttgtat

SEQ ID NO: 457902 - DNA, 30 bp, Artificial Sequence
  Synthetic oligonucleotide
taccttatagcttcacgctgagtcttgtat

SEQ ID NO: 457903 - DNA, 30 bp, Artificial Sequence
  Synthetic oligonucleotide
tttgaatcctagagagccgtccagttgtat

SEQ ID NO: 457904 - DNA, 30 bp, Artificial Sequence
  Synthetic oligonucleotide
gtatacgagggaatcgtacggtagttgtat

SEQ ID NO: 457905 - DNA, 30 bp, Artificial Sequence
  Synthetic oligonucleotide
ggattggatgagacgtcataaccgttgtat

SEQ ID NO: 457906 - DNA, 30 bp, Artificial Sequence
  Synthetic oligonucleotide
ccaatgtctataagggggcaatcgttgtat

SEQ ID NO: 457907 - DNA, 30 bp, Artificial Sequence
  Synthetic oligonucleotide
agcaatatagcttagcaagcttcgttgtat

SEQ ID NO: 457908 - DNA, 30 bp, Artificial Sequence
  Synthetic oligonucleotide
agctgggctcatcgctggcatattttgtat

SEQ ID NO: 457909 - DNA, 30 bp, Artificial Sequence
  Synthetic oligonucleotide
ggaatatgcggatctaacgtgtttttgtat

SEQ ID NO: 457910 - DNA, 30 bp, Artificial Sequence
  Synthetic oligonucleotide
atgtgtccggattattattggcaaaattat

SEQ ID NO: 457911 - DNA, 30 bp, Artificial Sequence
  Synthetic oligonucleotide
attgagtgatttggtcagtcgcgaaattat

SEQ ID NO: 457912 - DNA, 30 bp, Artificial Sequence
  Synthetic oligonucleotide
aaggggcgccagcgccaggaccccaattat

SEQ ID NO: 457913 - DNA, 30 bp, Artificial Sequence
  Synthetic oligonucleotide
agtcgaccatattcaatgagggccaattat

SEQ ID NO: 457914 - DNA, 30 bp, Artificial Sequence
  Synthetic oligonucleotide
ttactcagccgaggaatttgtgccaattat

SEQ ID NO: 457915 - DNA, 30 bp, Artificial Sequence
  Synthetic oligonucleotide
attcatggtaaccccctacgttccaattat

SEQ ID NO: 457916 - DNA, 30 bp, Artificial Sequence
  Synthetic oligonucleotide
cgccctgagcgtaccctagatcgcaattat

SEQ ID NO: 457917 - DNA, 30 bp, Artificial Sequence
  Synthetic oligonucleotide
gccatcctgatagactaggtacagaattat

SEQ ID NO: 457918 - DNA, 30 bp, Artificial Sequence
  Synthetic oligonucleotide
attaggggggaacgtagctagacgaattat

SEQ ID NO: 457919 - DNA, 30 bp, Artificial Sequence
  Synthetic oligonucleotide
ttgtattccatacctgtggcgaggaattat

SEQ ID NO: 457920 - DNA, 30 bp, Artificial Sequence
  Synthetic oligonucleotide
aaccttaatcccctaatacaagggaattat

SEQ ID NO: 457921 - DNA, 30 bp, Artificial Sequence
  Synthetic oligonucleotide
taaagttacacaaaataaaccgggaattat

SEQ ID NO: 457922 - DNA, 30 bp, Artificial Sequence
  Synthetic oligonucleotide
tgcaagatactccatccagagcaacattat

SEQ ID NO: 457923 - DNA, 30 bp, Artificial Sequence
  Synthetic oligonucleotide
gagtgagactacagagacgtcttacattat

SEQ ID NO: 457924 - DNA, 30 bp, Artificial Sequence
  Synthetic oligonucleotide
tcggatgaatgttgatcgtagcaccattat

SEQ ID NO: 457925 - DNA, 30 bp, Artificial Sequence
  Synthetic oligonucleotide
cactcgaaggcaattgggggaacccattat

SEQ ID NO: 457926 - DNA, 30 bp, Artificial Sequence
  Synthetic oligonucleotide
ccgcaccgcttcccttgggccagccattat

SEQ ID NO: 457927 - DNA, 30 bp, Artificial Sequence
  Synthetic oligonucleotide
atcaagccaatattccttagaggccattat

SEQ ID NO: 457928 - DNA, 30 bp, Artificial Sequence
  Synthetic oligonucleotide
ttcgcggataacagtattacgatgcattat

SEQ ID NO: 457929 - DNA, 30 bp, Artificial Sequence
  Synthetic oligonucleotide
ggttttgctgtagtgatagggaatcattat

SEQ ID NO: 457930 - DNA, 30 bp, Artificial Sequence
  Synthetic oligonucleotide
ccgtctgccgtaataccgctagatcattat

SEQ ID NO: 457931 - DNA, 30 bp, Artificial Sequence
  Synthetic oligonucleotide
ccactcgcgatgtcacctaatcctcattat

SEQ ID NO: 457932 - DNA, 30 bp, Artificial Sequence
  Synthetic oligonucleotide
gaatttcaacaggaagatctggctcattat

SEQ ID NO: 457933 - DNA, 30 bp, Artificial Sequence
  Synthetic oligonucleotide
taatgttcctgatcacgcttttgtcattat

SEQ ID NO: 457934 - DNA, 30 bp, Artificial Sequence
  Synthetic oligonucleotide
atatttagacgggctgttgatgaagattat

SEQ ID NO: 457935 - DNA, 30 bp, Artificial Sequence
  Synthetic oligonucleotide
cgacttctcgggctatcaccccgagattat

SEQ ID NO: 457936 - DNA, 28 bp, Artificial Sequence
  Synthetic oligonucleotide
cccagctaacctcgacgttggcgattat

SEQ ID NO: 457937 - DNA, 30 bp, Artificial Sequence
  Synthetic oligonucleotide
gacctggttcagccctcgcgtgtcgattat

SEQ ID NO: 457938 - DNA, 30 bp, Artificial Sequence
  Synthetic oligonucleotide
ctagtgcaagctgcccattctatggattat

SEQ ID NO: 457939 - DNA, 30 bp, Artificial Sequence
  Synthetic oligonucleotide
ggggtcaaaatcagtattgagctggattat

SEQ ID NO: 457940 - DNA, 31 bp, Artificial Sequence
  Synthetic oligonucleotide
tgacgccgattccacctaggcgttggattat

SEQ ID NO: 457941 - DNA, 30 bp, Artificial Sequence
  Synthetic oligonucleotide
ttccattccaaccccgcggttcatgattat

SEQ ID NO: 457942 - DNA, 30 bp, Artificial Sequence
  Synthetic oligonucleotide
gtttctgcgttgtccgctcagcttgattat

SEQ ID NO: 457943 - DNA, 30 bp, Artificial Sequence
  Synthetic oligonucleotide
gaccagcgcagaaataaatgaatatattat

SEQ ID NO: 457944 - DNA, 30 bp, Artificial Sequence
  Synthetic oligonucleotide
gccgcaattagggagtcgggctactattat

SEQ ID NO: 457945 - DNA, 30 bp, Artificial Sequence
  Synthetic oligonucleotide
tttaaataaggtgacgcatggtactattat

SEQ ID NO: 457946 - DNA, 30 bp, Artificial Sequence
  Synthetic oligonucleotide
gtgatcttgtaaaaccctggtacctattat

SEQ ID NO: 457947 - DNA, 30 bp, Artificial Sequence
  Synthetic oligonucleotide
tacaggcagatcgtacaccgcccctattat

SEQ ID NO: 457948 - DNA, 29 bp, Artificial Sequence
  Synthetic oligonucleotide
gagttgagtacgtagattaatgctattat

SEQ ID NO: 457949 - DNA, 30 bp, Artificial Sequence
  Synthetic oligonucleotide
gctaatatagtacctatgtaattctattat

SEQ ID NO: 457950 - DNA, 30 bp, Artificial Sequence
  Synthetic oligonucleotide
tggagtcatggtacatgatccacgtattat

SEQ ID NO: 457951 - DNA, 30 bp, Artificial Sequence
  Synthetic oligonucleotide
tcttggtatttaagtcgcttctcgtattat

SEQ ID NO: 457952 - DNA, 30 bp, Artificial Sequence
  Synthetic oligonucleotide
actgctatgggaagaacccagtcgtattat

SEQ ID NO: 457953 - DNA, 30 bp, Artificial Sequence
  Synthetic oligonucleotide
gaacttcgccatgactagtccctgtattat

SEQ ID NO: 457954 - DNA, 30 bp, Artificial Sequence
  Synthetic oligonucleotide
gtgtcgcaaatatagcaatttttgtattat

SEQ ID NO: 457955 - DNA, 30 bp, Artificial Sequence
  Synthetic oligonucleotide
atgtaggaatagtctctatactattattat

SEQ ID NO: 457956 - DNA, 30 bp, Artificial Sequence
  Synthetic oligonucleotide
ctcaggtgacggaggaatatgccttattat

SEQ ID NO: 457957 - DNA, 30 bp, Artificial Sequence
  Synthetic oligonucleotide
gaaggaacagctccgtgcatgctttattat

SEQ ID NO: 457958 - DNA, 30 bp, Artificial Sequence
  Synthetic oligonucleotide
atcagtgctacattataatggcaaacttat

SEQ ID NO: 457959 - DNA, 30 bp, Artificial Sequence
  Synthetic oligonucleotide
tcaatagcacagtgatgttacgtgacttat

SEQ ID NO: 457960 - DNA, 30 bp, Artificial Sequence
  Synthetic oligonucleotide
gttacacaaaaagccgtgcctattacttat

SEQ ID NO: 457961 - DNA, 30 bp, Artificial Sequence
  Synthetic oligonucleotide
gctgagagtattacatagtaggaaccttat

SEQ ID NO: 457962 - DNA, 30 bp, Artificial Sequence
  Synthetic oligonucleotide
agccacagctggcaacccgtggcaccttat

SEQ ID NO: 457963 - DNA, 30 bp, Artificial Sequence
  Synthetic oligonucleotide
atgcgtggatgctttgttagaggaccttat

SEQ ID NO: 457964 - DNA, 30 bp, Artificial Sequence
  Synthetic oligonucleotide
aattcgagttcgccggtacgcgacccttat

SEQ ID NO: 457965 - DNA, 30 bp, Artificial Sequence
  Synthetic oligonucleotide
ccagttccaaaggcatagctggaagcttat

SEQ ID NO: 457966 - DNA, 30 bp, Artificial Sequence
  Synthetic oligonucleotide
ctggttggatcttagggtctaacagcttat

SEQ ID NO: 457967 - DNA, 30 bp, Artificial Sequence
  Synthetic oligonucleotide
cggtgagctaagtcatggaacgacgcttat

SEQ ID NO: 457968 - DNA, 30 bp, Artificial Sequence
  Synthetic oligonucleotide
ggagtttgagtcgcgggcagagccgcttat

SEQ ID NO: 457969 - DNA, 30 bp, Artificial Sequence
  Synthetic oligonucleotide
gggatagactgtctaatgtaaagcgcttat

SEQ ID NO: 457970 - DNA, 30 bp, Artificial Sequence
  Synthetic oligonucleotide
cttgtatagggcattttgcccggcgcttat

SEQ ID NO: 457971 - DNA, 30 bp, Artificial Sequence
  Synthetic oligonucleotide
taaacccgtattgtttgcaagggcgcttat

SEQ ID NO: 457972 - DNA, 30 bp, Artificial Sequence
  Synthetic oligonucleotide
ggtagtatcgactctcagacgtgcgcttat

SEQ ID NO: 457973 - DNA, 30 bp, Artificial Sequence
  Synthetic oligonucleotide
cttaagcgtcggtatgtgtgtagtgcttat

SEQ ID NO: 457974 - DNA, 30 bp, Artificial Sequence
  Synthetic oligonucleotide
gttgctaagcaattcttcctatgtgcttat

SEQ ID NO: 457975 - DNA, 30 bp, Artificial Sequence
  Synthetic oligonucleotide
gttgtacccaattaaggcaactaatcttat

SEQ ID NO: 457976 - DNA, 30 bp, Artificial Sequence
  Synthetic oligonucleotide
ggggatagaacactggcacgggtatcttat

SEQ ID NO: 457977 - DNA, 30 bp, Artificial Sequence
  Synthetic oligonucleotide
aaagaacatagcgcgtgccccttatcttat

SEQ ID NO: 457978 - DNA, 30 bp, Artificial Sequence
  Synthetic oligonucleotide
tcaaaattatattctctgggtttatcttat

SEQ ID NO: 457979 - DNA, 30 bp, Artificial Sequence
  Synthetic oligonucleotide
atcggggtctaaatgtttaggccctcttat

SEQ ID NO: 457980 - DNA, 30 bp, Artificial Sequence
  Synthetic oligonucleotide
tttccggtcccggcgttgacctcctcttat

SEQ ID NO: 457981 - DNA, 30 bp, Artificial Sequence
  Synthetic oligonucleotide
acgctcggacctggatcaaaatcgtcttat

SEQ ID NO: 457982 - DNA, 30 bp, Artificial Sequence
  Synthetic oligonucleotide
agccctcctgaagcgcttgaccattcttat

SEQ ID NO: 457983 - DNA, 30 bp, Artificial Sequence
  Synthetic oligonucleotide
gggcgtggagatattgacaatatttcttat

SEQ ID NO: 457984 - DNA, 30 bp, Artificial Sequence
  Synthetic oligonucleotide
ttgttgtgttctctttttgtgttttcttat

SEQ ID NO: 457985 - DNA, 30 bp, Artificial Sequence
  Synthetic oligonucleotide
tcctccggcccggcaattatccaaagttat

SEQ ID NO: 457986 - DNA, 30 bp, Artificial Sequence
  Synthetic oligonucleotide
aaaccgatcggtgtcctcggtacaagttat

SEQ ID NO: 457987 - DNA, 30 bp, Artificial Sequence
  Synthetic oligonucleotide
ctggttaatatgcgtattaaaagaagttat

SEQ ID NO: 457988 - DNA, 30 bp, Artificial Sequence
  Synthetic oligonucleotide
gttcacgagaccaaaaaccgagacagttat

SEQ ID NO: 457989 - DNA, 30 bp, Artificial Sequence
  Synthetic oligonucleotide
tctgggaatttgtccatcgacggcagttat

SEQ ID NO: 457990 - DNA, 30 bp, Artificial Sequence
  Synthetic oligonucleotide
gcggtagcgccttgctgcgctggcagttat

SEQ ID NO: 457991 - DNA, 30 bp, Artificial Sequence
  Synthetic oligonucleotide
caagtttggtaaacgcgctgtttcagttat

SEQ ID NO: 457992 - DNA, 30 bp, Artificial Sequence
  Synthetic oligonucleotide
gtgtttcatcacgatgactactagagttat

SEQ ID NO: 457993 - DNA, 30 bp, Artificial Sequence
  Synthetic oligonucleotide
cgggggggtggcatgtggctaatgagttat

SEQ ID NO: 457994 - DNA, 30 bp, Artificial Sequence
  Synthetic oligonucleotide
tctggttcattctccaccacccctagttat

SEQ ID NO: 457995 - DNA, 30 bp, Artificial Sequence
  Synthetic oligonucleotide
agacaatttcttatcggttcaggtagttat

SEQ ID NO: 457996 - DNA, 30 bp, Artificial Sequence
  Synthetic oligonucleotide
gaatttaatgtcgagtttgtcaaacgttat

SEQ ID NO: 457997 - DNA, 30 bp, Artificial Sequence
  Synthetic oligonucleotide
tccagcagatttgaaggtcgtatacgttat

SEQ ID NO: 457998 - DNA, 30 bp, Artificial Sequence
  Synthetic oligonucleotide
aatcggccgtagtggttaacggaccgttat

SEQ ID NO: 457999 - DNA, 30 bp, Artificial Sequence
  Synthetic oligonucleotide
gctgaacggtgatggcccgggtaccgttat

SEQ ID NO: 458000 - DNA, 30 bp, Artificial Sequence
  Synthetic oligonucleotide
gttggacatgccccccgtccgccccgttat

SEQ ID NO: 458001 - DNA, 30 bp, Artificial Sequence
  Synthetic oligonucleotide
caactcatgctaacgtaggaccgccgttat

SEQ ID NO: 458002 - DNA, 30 bp, Artificial Sequence
  Synthetic oligonucleotide
tcttagggtccatttaaggaacatcgttat

SEQ ID NO: 458003 - DNA, 30 bp, Artificial Sequence
  Synthetic oligonucleotide
cgctgtgtaactccgcatatcaaaggttat

SEQ ID NO: 458004 - DNA, 30 bp, Artificial Sequence
  Synthetic oligonucleotide
aggttcgacctgtttgacccccaaggttat

SEQ ID NO: 458005 - DNA, 30 bp, Artificial Sequence
  Synthetic oligonucleotide
tgatcctcacctaactcactccgaggttat

SEQ ID NO: 458006 - DNA, 30 bp, Artificial Sequence
  Synthetic oligonucleotide
acagttatagtctgtttctggataggttat

SEQ ID NO: 458007 - DNA, 31 bp, Artificial Sequence
  Synthetic oligonucleotide
ccaggctatttgacgttatgatcacggttat

SEQ ID NO: 458008 - DNA, 30 bp, Artificial Sequence
  Synthetic oligonucleotide
agtagttcgattagaaaactggacggttat

SEQ ID NO: 458009 - DNA, 30 bp, Artificial Sequence
  Synthetic oligonucleotide
attccgcccttggagtattgaaccggttat

SEQ ID NO: 458010 - DNA, 30 bp, Artificial Sequence
  Synthetic oligonucleotide
gttaaactttcatttcacatggtcggttat

SEQ ID NO: 458011 - DNA, 30 bp, Artificial Sequence
  Synthetic oligonucleotide
tacttcatccacaaccgatgtttcggttat

SEQ ID NO: 458012 - DNA, 30 bp, Artificial Sequence
  Synthetic oligonucleotide
agttatgctacgtgtaaatagtcgggttat

SEQ ID NO: 458013 - DNA, 30 bp, Artificial Sequence
  Synthetic oligonucleotide
cagtgttcaataaaatcttaaaggggttat

SEQ ID NO: 458014 - DNA, 31 bp, Artificial Sequence
  Synthetic oligonucleotide
aagtgttcgttcacgcggatacaggggttat

SEQ ID NO: 458015 - DNA, 30 bp, Artificial Sequence
  Synthetic oligonucleotide
gtattcttctggacaagaagacatggttat

SEQ ID NO: 458016 - DNA, 30 bp, Artificial Sequence
  Synthetic oligonucleotide
tataccctagtttttctataccttggttat

SEQ ID NO: 458017 - DNA, 30 bp, Artificial Sequence
  Synthetic oligonucleotide
tgatcaaggatgagtttggggagatgttat

SEQ ID NO: 458018 - DNA, 30 bp, Artificial Sequence
  Synthetic oligonucleotide
gtgttgtttcagttggcagatgactgttat

SEQ ID NO: 458019 - DNA, 30 bp, Artificial Sequence
  Synthetic oligonucleotide
tggctatgctgtttcgccggaaagtgttat

SEQ ID NO: 458020 - DNA, 31 bp, Artificial Sequence
  Synthetic oligonucleotide
taatcagtgatagggccgatgcaattgttat

SEQ ID NO: 458021 - DNA, 30 bp, Artificial Sequence
  Synthetic oligonucleotide
ataactggttgttcgcgttaaagttgttat

SEQ ID NO: 458022 - DNA, 30 bp, Artificial Sequence
  Synthetic oligonucleotide
attagatgcgggaacgtggacagttgttat

SEQ ID NO: 458023 - DNA, 30 bp, Artificial Sequence
  Synthetic oligonucleotide
actcgcatcttatcagtatatttttgttat

SEQ ID NO: 458024 - DNA, 30 bp, Artificial Sequence
  Synthetic oligonucleotide
ataagcgcagtttaatgcaacaaaatttat

SEQ ID NO: 458025 - DNA, 30 bp, Artificial Sequence
  Synthetic oligonucleotide
ggctcctgatacctgggtgcacaaatttat

SEQ ID NO: 458026 - DNA, 30 bp, Artificial Sequence
  Synthetic oligonucleotide
cgtcttaattatcaggattatcaaatttat

SEQ ID NO: 458027 - DNA, 30 bp, Artificial Sequence
  Synthetic oligonucleotide
cgactatcgtcggtagctctggaaatttat

SEQ ID NO: 458028 - DNA, 30 bp, Artificial Sequence
  Synthetic oligonucleotide
tgaacgtacaccttctgagcggcaatttat

SEQ ID NO: 458029 - DNA, 30 bp, Artificial Sequence
  Synthetic oligonucleotide
cactagcaagttaattgtacggtaatttat

SEQ ID NO: 458030 - DNA, 30 bp, Artificial Sequence
  Synthetic oligonucleotide
agcaggagtacctctgatgcattaatttat

SEQ ID NO: 458031 - DNA, 30 bp, Artificial Sequence
  Synthetic oligonucleotide
cttattaggactactgtagcagccatttat

SEQ ID NO: 458032 - DNA, 30 bp, Artificial Sequence
  Synthetic oligonucleotide
gaagaaacctgagcctatgtggccatttat

SEQ ID NO: 458033 - DNA, 30 bp, Artificial Sequence
  Synthetic oligonucleotide
tgatatgcaatacgtggttgatagatttat

SEQ ID NO: 458034 - DNA, 30 bp, Artificial Sequence
  Synthetic oligonucleotide
tacaactttcggggttcattcgggatttat

SEQ ID NO: 458035 - DNA, 30 bp, Artificial Sequence
  Synthetic oligonucleotide
gacgttagtcaaaaatccgtgactatttat

SEQ ID NO: 458036 - DNA, 30 bp, Artificial Sequence
  Synthetic oligonucleotide
agtagtccggtcaaagagttacgtatttat

SEQ ID NO: 458037 - DNA, 30 bp, Artificial Sequence
  Synthetic oligonucleotide
tcctcggtccggtgggggtccatactttat

SEQ ID NO: 458038 - DNA, 30 bp, Artificial Sequence
  Synthetic oligonucleotide
ataaattcgagtgacatatccagcctttat

SEQ ID NO: 458039 - DNA, 30 bp, Artificial Sequence
  Synthetic oligonucleotide
tagaacttgccgcaagcgaactcgctttat

SEQ ID NO: 458040 - DNA, 30 bp, Artificial Sequence
  Synthetic oligonucleotide
tggaaagggcacgtgcattttttgctttat

SEQ ID NO: 458041 - DNA, 30 bp, Artificial Sequence
  Synthetic oligonucleotide
cttaagctagggagaacggccagtctttat

SEQ ID NO: 458042 - DNA, 30 bp, Artificial Sequence
  Synthetic oligonucleotide
gtaaagatggactcttcaggacttctttat

SEQ ID NO: 458043 - DNA, 30 bp, Artificial Sequence
  Synthetic oligonucleotide
atatacagcgcagcttagctcgaagtttat

SEQ ID NO: 458044 - DNA, 30 bp, Artificial Sequence
  Synthetic oligonucleotide
gcgcttggtgtgctatatagaggagtttat

SEQ ID NO: 458045 - DNA, 30 bp, Artificial Sequence
  Synthetic oligonucleotide
aagaaaggttcggctgttgagggagtttat

SEQ ID NO: 458046 - DNA, 30 bp, Artificial Sequence
  Synthetic oligonucleotide
ccgtgtaacacaaagtccctattagtttat

SEQ ID NO: 458047 - DNA, 30 bp, Artificial Sequence
  Synthetic oligonucleotide
actttcatacgaatcattgtaaacgtttat

SEQ ID NO: 458048 - DNA, 30 bp, Artificial Sequence
  Synthetic oligonucleotide
aatcgaccactcaataataggcgcgtttat

SEQ ID NO: 458049 - DNA, 30 bp, Artificial Sequence
  Synthetic oligonucleotide
tcaccatgctttttagcccttcgcgtttat

SEQ ID NO: 458050 - DNA, 30 bp, Artificial Sequence
  Synthetic oligonucleotide
ctgcataattatatcgtctcgtgcgtttat

SEQ ID NO: 458051 - DNA, 30 bp, Artificial Sequence
  Synthetic oligonucleotide
gccacctgacgtttagtgtagttcgtttat

SEQ ID NO: 458052 - DNA, 30 bp, Artificial Sequence
  Synthetic oligonucleotide
taaagggggtaacagcccaactcggtttat

SEQ ID NO: 458053 - DNA, 30 bp, Artificial Sequence
  Synthetic oligonucleotide
gaactcaccgagatcgatctatgggtttat

SEQ ID NO: 458054 - DNA, 30 bp, Artificial Sequence
  Synthetic oligonucleotide
ctatcagttcacgggtgtatttgggtttat

SEQ ID NO: 458055 - DNA, 30 bp, Artificial Sequence
  Synthetic oligonucleotide
catttccaaactcgttggaatatggtttat

SEQ ID NO: 458056 - DNA, 30 bp, Artificial Sequence
  Synthetic oligonucleotide
ggacagcggcttgcttgttggcatgtttat

SEQ ID NO: 458057 - DNA, 28 bp, Artificial Sequence
  Synthetic oligonucleotide
gggggtgatacttacgagctatgtttat

SEQ ID NO: 458058 - DNA, 30 bp, Artificial Sequence
  Synthetic oligonucleotide
acacccggtaagatctatttgactgtttat

SEQ ID NO: 458059 - DNA, 30 bp, Artificial Sequence
  Synthetic oligonucleotide
acctccagttatcttaggctgcgtgtttat

SEQ ID NO: 458060 - DNA, 30 bp, Artificial Sequence
  Synthetic oligonucleotide
cagcacattaaattaaacatctttgtttat

SEQ ID NO: 458061 - DNA, 30 bp, Artificial Sequence
  Synthetic oligonucleotide
acatagatcattcttctctcgtttgtttat

SEQ ID NO: 458062 - DNA, 30 bp, Artificial Sequence
  Synthetic oligonucleotide
ctctcaatattttggttacaaaaattttat

SEQ ID NO: 458063 - DNA, 30 bp, Artificial Sequence
  Synthetic oligonucleotide
atggataggtagcacagccggtaattttat

SEQ ID NO: 458064 - DNA, 30 bp, Artificial Sequence
  Synthetic oligonucleotide
ccataggcgtctagcgtcaggggattttat

SEQ ID NO: 458065 - DNA, 30 bp, Artificial Sequence
  Synthetic oligonucleotide
cccggtttatcaaagtgacgagtcttttat

SEQ ID NO: 458066 - DNA, 30 bp, Artificial Sequence
  Synthetic oligonucleotide
gggcaggctatagctattcgcacgttttat

SEQ ID NO: 458067 - DNA, 30 bp, Artificial Sequence
  Synthetic oligonucleotide
agatgcgtgttagcgatcttggtgttttat

SEQ ID NO: 458068 - DNA, 30 bp, Artificial Sequence
  Synthetic oligonucleotide
tttatatgtggacccccattaaaaaaaact

SEQ ID NO: 458069 - DNA, 30 bp, Artificial Sequence
  Synthetic oligonucleotide
gagtgtgcaatactatgggtcccaaaaact

SEQ ID NO: 458070 - DNA, 30 bp, Artificial Sequence
  Synthetic oligonucleotide
gtcgtttacatcataatactaagaaaaact

SEQ ID NO: 458071 - DNA, 30 bp, Artificial Sequence
  Synthetic oligonucleotide
tgctattgtgtaacgccagaggtaaaaact

SEQ ID NO: 458072 - DNA, 30 bp, Artificial Sequence
  Synthetic oligonucleotide
tcaggtccaattctaccaaagtgcaaaact

SEQ ID NO: 458073 - DNA, 30 bp, Artificial Sequence
  Synthetic oligonucleotide
gtactttcgcagagttacgttttcaaaact

SEQ ID NO: 458074 - DNA, 30 bp, Artificial Sequence
  Synthetic oligonucleotide
gggttaggatcgggcctttaattgaaaact

SEQ ID NO: 458075 - DNA, 30 bp, Artificial Sequence
  Synthetic oligonucleotide
attgcattatggtgtggcagtgctaaaact

SEQ ID NO: 458076 - DNA, 30 bp, Artificial Sequence
  Synthetic oligonucleotide
tatatcgtctttgcagaacatggtaaaact

SEQ ID NO: 458077 - DNA, 30 bp, Artificial Sequence
  Synthetic oligonucleotide
gtatagggaacatcgcgcacgacccaaact

SEQ ID NO: 458078 - DNA, 30 bp, Artificial Sequence
  Synthetic oligonucleotide
ctaccgcagcaggaagagtaccgccaaact

SEQ ID NO: 458079 - DNA, 30 bp, Artificial Sequence
  Synthetic oligonucleotide
cctagtttaatgtgtagatatcgccaaact

SEQ ID NO: 458080 - DNA, 30 bp, Artificial Sequence
  Synthetic oligonucleotide
tattaggtgaggaaggtgcttcagcaaact

SEQ ID NO: 458081 - DNA, 30 bp, Artificial Sequence
  Synthetic oligonucleotide
tatgataagttatgctgggatgatcaaact

SEQ ID NO: 458082 - DNA, 30 bp, Artificial Sequence
  Synthetic oligonucleotide
ttctgactacagtcatggtgatatcaaact

SEQ ID NO: 458083 - DNA, 30 bp, Artificial Sequence
  Synthetic oligonucleotide
gaactattacgtgtggcagtcggtcaaact

SEQ ID NO: 458084 - DNA, 30 bp, Artificial Sequence
  Synthetic oligonucleotide
ctatcacgcatagcaccttccaaagaaact

SEQ ID NO: 458085 - DNA, 30 bp, Artificial Sequence
  Synthetic oligonucleotide
tcgccatatgagacctatggaatagaaact

SEQ ID NO: 458086 - DNA, 30 bp, Artificial Sequence
  Synthetic oligonucleotide
tggggtttcgaccgtccagagagggaaact

SEQ ID NO: 458087 - DNA, 30 bp, Artificial Sequence
  Synthetic oligonucleotide
agttatacgtaccataatctgttggaaact

SEQ ID NO: 458088 - DNA, 30 bp, Artificial Sequence
  Synthetic oligonucleotide
gcgggataagcgctcgtttgctgtgaaact

SEQ ID NO: 458089 - DNA, 30 bp, Artificial Sequence
  Synthetic oligonucleotide
tggccgagcgcttttcgagttcttgaaact

SEQ ID NO: 458090 - DNA, 30 bp, Artificial Sequence
  Synthetic oligonucleotide
ttcttcctctacaaaccgctccactaaact

SEQ ID NO: 458091 - DNA, 30 bp, Artificial Sequence
  Synthetic oligonucleotide
gttggttatccacaagatggtggctaaact

SEQ ID NO: 458092 - DNA, 30 bp, Artificial Sequence
  Synthetic oligonucleotide
gaggggtttttagcgttcttaatgtaaact

SEQ ID NO: 458093 - DNA, 30 bp, Artificial Sequence
  Synthetic oligonucleotide
aaaatcgctatgaaagccgcttattaaact

SEQ ID NO: 458094 - DNA, 30 bp, Artificial Sequence
  Synthetic oligonucleotide
tagagtggaagggcctttgctctttaaact

SEQ ID NO: 458095 - DNA, 30 bp, Artificial Sequence
  Synthetic oligonucleotide
cgcaggtcagtcaacgcataccgcacaact

SEQ ID NO: 458096 - DNA, 30 bp, Artificial Sequence
  Synthetic oligonucleotide
ctgggaactctctcccttaacgggacaact

SEQ ID NO: 458097 - DNA, 30 bp, Artificial Sequence
  Synthetic oligonucleotide
aaccaggtgtgcaggtaactgggcccaact

SEQ ID NO: 458098 - DNA, 30 bp, Artificial Sequence
  Synthetic oligonucleotide
taactttgtgaccgggtcaaaccgccaact

SEQ ID NO: 458099 - DNA, 30 bp, Artificial Sequence
  Synthetic oligonucleotide
attttctggccctcgccacgatcagcaact

SEQ ID NO: 458100 - DNA, 30 bp, Artificial Sequence
  Synthetic oligonucleotide
ttctccgaggtatggtggcacggagcaact

SEQ ID NO: 458101 - DNA, 30 bp, Artificial Sequence
  Synthetic oligonucleotide
gctgttggcattccttgttgcttagcaact

SEQ ID NO: 458102 - DNA, 30 bp, Artificial Sequence
  Synthetic oligonucleotide
cccactgccagctagcgggcgtccgcaact

SEQ ID NO: 458103 - DNA, 30 bp, Artificial Sequence
  Synthetic oligonucleotide
aaagcgctagcgctagaacggcgcgcaact

SEQ ID NO: 458104 - DNA, 30 bp, Artificial Sequence
  Synthetic oligonucleotide
gaataccgtgaacgtgcttaaggcgcaact

SEQ ID NO: 458105 - DNA, 30 bp, Artificial Sequence
  Synthetic oligonucleotide
gttggaggccattcgtacattggcgcaact

SEQ ID NO: 458106 - DNA, 30 bp, Artificial Sequence
  Synthetic oligonucleotide
gatctgttatagaatagatccctcgcaact

SEQ ID NO: 458107 - DNA, 30 bp, Artificial Sequence
  Synthetic oligonucleotide
gctagagccacaggctcgatcctggcaact

SEQ ID NO: 458108 - DNA, 30 bp, Artificial Sequence
  Synthetic oligonucleotide
ttttatctggcgtcgggctatcgtgcaact

SEQ ID NO: 458109 - DNA, 30 bp, Artificial Sequence
  Synthetic oligonucleotide
ttaatcgtccttttccgaaagatctcaact

SEQ ID NO: 458110 - DNA, 30 bp, Artificial Sequence
  Synthetic oligonucleotide
atctctaagcctatttatcggcattcaact

SEQ ID NO: 458111 - DNA, 30 bp, Artificial Sequence
  Synthetic oligonucleotide
agcgttagttactaggcggttagttcaact

SEQ ID NO: 458112 - DNA, 30 bp, Artificial Sequence
  Synthetic oligonucleotide
ccttcaattattctataatcagaaagaact

SEQ ID NO: 458113 - DNA, 30 bp, Artificial Sequence
  Synthetic oligonucleotide
attaacagtctaagcaattgctagagaact

SEQ ID NO: 458114 - DNA, 30 bp, Artificial Sequence
  Synthetic oligonucleotide
ataacctcttagcgccctaatcctagaact

SEQ ID NO: 458115 - DNA, 30 bp, Artificial Sequence
  Synthetic oligonucleotide
aaagacaacctaagcatgaacggtagaact

SEQ ID NO: 458116 - DNA, 30 bp, Artificial Sequence
  Synthetic oligonucleotide
tatgtcgggtgttaggtcaaggcccgaact

SEQ ID NO: 458117 - DNA, 30 bp, Artificial Sequence
  Synthetic oligonucleotide
gtagcatcagccaatcataaaatccgaact

SEQ ID NO: 458118 - DNA, 30 bp, Artificial Sequence
  Synthetic oligonucleotide
caggacaatttgattaccttggagcgaact

SEQ ID NO: 458119 - DNA, 30 bp, Artificial Sequence
  Synthetic oligonucleotide
gacgttcattagccgtaaccgccgcgaact

SEQ ID NO: 458120 - DNA, 30 bp, Artificial Sequence
  Synthetic oligonucleotide
tagagtcccgaggattgggtaatgcgaact

SEQ ID NO: 458121 - DNA, 30 bp, Artificial Sequence
  Synthetic oligonucleotide
ggggcgttacgtatttgcttggatcgaact

SEQ ID NO: 458122 - DNA, 30 bp, Artificial Sequence
  Synthetic oligonucleotide
taaaaggttactcaatctagccgcggaact

SEQ ID NO: 458123 - DNA, 30 bp, Artificial Sequence
  Synthetic oligonucleotide
tgcccacagtcgcaacttatgcgcggaact

SEQ ID NO: 458124 - DNA, 30 bp, Artificial Sequence
  Synthetic oligonucleotide
gattcctgtccgatgtactaggggggaact

SEQ ID NO: 458125 - DNA, 30 bp, Artificial Sequence
  Synthetic oligonucleotide
tgttgacgcaaggttctcgcgtttggaact

SEQ ID NO: 458126 - DNA, 30 bp, Artificial Sequence
  Synthetic oligonucleotide
ccccccgcgggcttaccgaggagttgaact

SEQ ID NO: 458127 - DNA, 30 bp, Artificial Sequence
  Synthetic oligonucleotide
cttggccatgttcccttgagcaaaataact

SEQ ID NO: 458128 - DNA, 30 bp, Artificial Sequence
  Synthetic oligonucleotide
tgtcgtccctcctgcggataagaaataact

SEQ ID NO: 458129 - DNA, 30 bp, Artificial Sequence
  Synthetic oligonucleotide
gggctttgcagagagtcgatcagcataact

SEQ ID NO: 458130 - DNA, 30 bp, Artificial Sequence
  Synthetic oligonucleotide
tttgcaaagctcttacatcaacgcataact

SEQ ID NO: 458131 - DNA, 30 bp, Artificial Sequence
  Synthetic oligonucleotide
atgcaagctcatcgaggataaacgataact

SEQ ID NO: 458132 - DNA, 30 bp, Artificial Sequence
  Synthetic oligonucleotide
ggaaatgtgtatagttgttttgatataact

SEQ ID NO: 458133 - DNA, 30 bp, Artificial Sequence
  Synthetic oligonucleotide
ctgttgagtgggacagctaaagttataact

SEQ ID NO: 458134 - DNA, 30 bp, Artificial Sequence
  Synthetic oligonucleotide
ctagttgctgtctcatttggttgactaact

SEQ ID NO: 458135 - DNA, 30 bp, Artificial Sequence
  Synthetic oligonucleotide
gccatgtgagcctcaacagccgtactaact

SEQ ID NO: 458136 - DNA, 30 bp, Artificial Sequence
  Synthetic oligonucleotide
gtctgataagccgggtcaaccaagctaact

SEQ ID NO: 458137 - DNA, 30 bp, Artificial Sequence
  Synthetic oligonucleotide
ttgtgtgcttatctctaccgacagctaact

SEQ ID NO: 458138 - DNA, 30 bp, Artificial Sequence
  Synthetic oligonucleotide
taagacgtgagatcacacagggagctaact

SEQ ID NO: 458139 - DNA, 30 bp, Artificial Sequence
  Synthetic oligonucleotide
tagcctggaagaaactccaccggagtaact

SEQ ID NO: 458140 - DNA, 30 bp, Artificial Sequence
  Synthetic oligonucleotide
gccgtctgcgaacacgcaacgcgcgtaact

SEQ ID NO: 458141 - DNA, 30 bp, Artificial Sequence
  Synthetic oligonucleotide
atgattcggggatggcgaagactcgtaact

SEQ ID NO: 458142 - DNA, 30 bp, Artificial Sequence
  Synthetic oligonucleotide
ggttgtcttcataagacttaataggtaact

SEQ ID NO: 458143 - DNA, 30 bp, Artificial Sequence
  Synthetic oligonucleotide
ctcaaacgcctggggtttggcagggtaact

SEQ ID NO: 458144 - DNA, 30 bp, Artificial Sequence
  Synthetic oligonucleotide
ttcttttaggaaatacttaggggggtaact

SEQ ID NO: 458145 - DNA, 30 bp, Artificial Sequence
  Synthetic oligonucleotide
caattggaacccaacgctttgggtgtaact

SEQ ID NO: 458146 - DNA, 30 bp, Artificial Sequence
  Synthetic oligonucleotide
atttaccgagtacggtttttcagattaact

SEQ ID NO: 458147 - DNA, 30 bp, Artificial Sequence
  Synthetic oligonucleotide
catggcagtgatggaatgtagtgattaact

SEQ ID NO: 458148 - DNA, 30 bp, Artificial Sequence
  Synthetic oligonucleotide
acagcaaacactccctagttcgtattaact

SEQ ID NO: 458149 - DNA, 30 bp, Artificial Sequence
  Synthetic oligonucleotide
gaaaattccggaggtccataagacttaact

SEQ ID NO: 458150 - DNA, 30 bp, Artificial Sequence
  Synthetic oligonucleotide
actcttcggcctgacggtcaggacttaact

SEQ ID NO: 458151 - DNA, 30 bp, Artificial Sequence
  Synthetic oligonucleotide
ccagagcagaataggccgtagcccttaact

SEQ ID NO: 458152 - DNA, 30 bp, Artificial Sequence
  Synthetic oligonucleotide
aacgcgggcatttttggtttggagttaact

SEQ ID NO: 458153 - DNA, 30 bp, Artificial Sequence
  Synthetic oligonucleotide
caagttctccactacacgtgcaatttaact

SEQ ID NO: 458154 - DNA, 30 bp, Artificial Sequence
  Synthetic oligonucleotide
tcgaacggacaagtagtaatatatttaact

SEQ ID NO: 458155 - DNA, 30 bp, Artificial Sequence
  Synthetic oligonucleotide
gagtccttatctcggcgtgtacttttaact

SEQ ID NO: 458156 - DNA, 30 bp, Artificial Sequence
  Synthetic oligonucleotide
ttctgactatagagaactgacgttttaact

SEQ ID NO: 458157 - DNA, 30 bp, Artificial Sequence
  Synthetic oligonucleotide
atatctcaatgtatggacgcggttttaact

SEQ ID NO: 458158 - DNA, 30 bp, Artificial Sequence
  Synthetic oligonucleotide
ggcaccaagccccagcaaagctcaaacact

SEQ ID NO: 458159 - DNA, 30 bp, Artificial Sequence
  Synthetic oligonucleotide
gtatgacgcatacgcgatgacttaaacact

SEQ ID NO: 458160 - DNA, 30 bp, Artificial Sequence
  Synthetic oligonucleotide
cttcacggcgcccgggacaaggacaacact

SEQ ID NO: 458161 - DNA, 30 bp, Artificial Sequence
  Synthetic oligonucleotide
atcgggtgttgaccacgcaatagcaacact

SEQ ID NO: 458162 - DNA, 30 bp, Artificial Sequence
  Synthetic oligonucleotide
gtcaagggtttctcgaacactccgaacact

SEQ ID NO: 458163 - DNA, 30 bp, Artificial Sequence
  Synthetic oligonucleotide
gccatgttgtaacgataagtcgcacacact

SEQ ID NO: 458164 - DNA, 30 bp, Artificial Sequence
  Synthetic oligonucleotide
cttaagggaaggccggtaaacggacacact

SEQ ID NO: 458165 - DNA, 30 bp, Artificial Sequence
  Synthetic oligonucleotide
tttactgcagtggcttggatcggacacact

SEQ ID NO: 458166 - DNA, 30 bp, Artificial Sequence
  Synthetic oligonucleotide
tctggtatgggagccgggcggcagcacact

SEQ ID NO: 458167 - DNA, 30 bp, Artificial Sequence
  Synthetic oligonucleotide
atcccgtcttctggccgaatttggcacact

SEQ ID NO: 458168 - DNA, 30 bp, Artificial Sequence
  Synthetic oligonucleotide
atctattttggcgtccgccgcgtgcacact

SEQ ID NO: 458169 - DNA, 30 bp, Artificial Sequence
  Synthetic oligonucleotide
cacctgccaaagtacgcatttggtcacact

SEQ ID NO: 458170 - DNA, 30 bp, Artificial Sequence
  Synthetic oligonucleotide
ttcagattggagtgaccctgtcttcacact

SEQ ID NO: 458171 - DNA, 30 bp, Artificial Sequence
  Synthetic oligonucleotide
tgtctggcgccaaaagccctgggagacact

SEQ ID NO: 458172 - DNA, 30 bp, Artificial Sequence
  Synthetic oligonucleotide
taaagatcactatcgtgcgggtgagacact

SEQ ID NO: 458173 - DNA, 30 bp, Artificial Sequence
  Synthetic oligonucleotide
acgttcgggaaaattatgcattgggacact

SEQ ID NO: 458174 - DNA, 30 bp, Artificial Sequence
  Synthetic oligonucleotide
tcatttggtcgcaatagtaccgttgacact

SEQ ID NO: 458175 - DNA, 30 bp, Artificial Sequence
  Synthetic oligonucleotide
ctggatcgttcgactggaccctttgacact

SEQ ID NO: 458176 - DNA, 30 bp, Artificial Sequence
  Synthetic oligonucleotide
gtcaccggtgatacaaggtagcaatacact

SEQ ID NO: 458177 - DNA, 30 bp, Artificial Sequence
  Synthetic oligonucleotide
gagtctccgtctcggatgttaatatacact

SEQ ID NO: 458178 - DNA, 30 bp, Artificial Sequence
  Synthetic oligonucleotide
tgtagtattcaacagtgaactatatacact

SEQ ID NO: 458179 - DNA, 25 bp, Artificial Sequence
  Synthetic oligonucleotide
tagtaaagccagttggttatacact

SEQ ID NO: 458180 - DNA, 30 bp, Artificial Sequence
  Synthetic oligonucleotide
agcaccaccgtgttaaggtacctctacact

SEQ ID NO: 458181 - DNA, 30 bp, Artificial Sequence
  Synthetic oligonucleotide
attaagttatgtgaggttcgcaagtacact

SEQ ID NO: 458182 - DNA, 30 bp, Artificial Sequence
  Synthetic oligonucleotide
gatcaaatgtccactataaggcggtacact

SEQ ID NO: 458183 - DNA, 30 bp, Artificial Sequence
  Synthetic oligonucleotide
tggatatagctgtcgcgggtctattacact

SEQ ID NO: 458184 - DNA, 30 bp, Artificial Sequence
  Synthetic oligonucleotide
ccagggttttgatagagctctgcaaccact

SEQ ID NO: 458185 - DNA, 30 bp, Artificial Sequence
  Synthetic oligonucleotide
ataccaacctggtctaatcgtagaaccact

SEQ ID NO: 458186 - DNA, 30 bp, Artificial Sequence
  Synthetic oligonucleotide
tctatattgtctgattatatcaacaccact

SEQ ID NO: 458187 - DNA, 30 bp, Artificial Sequence
  Synthetic oligonucleotide
atctttctgcctaagtgcccgtccaccact

SEQ ID NO: 458188 - DNA, 30 bp, Artificial Sequence
  Synthetic oligonucleotide
tacctattgtcgacgtgatcaatgaccact

SEQ ID NO: 458189 - DNA, 30 bp, Artificial Sequence
  Synthetic oligonucleotide
gcaaaatgaagcaagtgaaattgccccact

SEQ ID NO: 458190 - DNA, 30 bp, Artificial Sequence
  Synthetic oligonucleotide
gggttccttgcaaatgaaggttcgcccact

SEQ ID NO: 458191 - DNA, 30 bp, Artificial Sequence
  Synthetic oligonucleotide
ttgggaacgtcgggtttatgccgcgccact

SEQ ID NO: 458192 - DNA, 30 bp, Artificial Sequence
  Synthetic oligonucleotide
agcagatcatgactgtcagggtgcgccact

SEQ ID NO: 458193 - DNA, 30 bp, Artificial Sequence
  Synthetic oligonucleotide
attgacacatgtcgggaatggtgctccact

SEQ ID NO: 458194 - DNA, 30 bp, Artificial Sequence
  Synthetic oligonucleotide
gatcgctgtatgccctgaggtgattccact

SEQ ID NO: 458195 - DNA, 30 bp, Artificial Sequence
  Synthetic oligonucleotide
gctctccctggacgggcttatacttccact

SEQ ID NO: 458196 - DNA, 30 bp, Artificial Sequence
  Synthetic oligonucleotide
ggcaatgcaacttagtgcgaatgttccact

SEQ ID NO: 458197 - DNA, 30 bp, Artificial Sequence
  Synthetic oligonucleotide
cggaaatttgtctgtagatgcgaaagcact

SEQ ID NO: 458198 - DNA, 30 bp, Artificial Sequence
  Synthetic oligonucleotide
accgctatctatgggcgccgtcgaagcact

SEQ ID NO: 458199 - DNA, 30 bp, Artificial Sequence
  Synthetic oligonucleotide
taaacaaaggaccccctgaatatcagcact

SEQ ID NO: 458200 - DNA, 30 bp, Artificial Sequence
  Synthetic oligonucleotide
cataaagtccgtgggtagatacggagcact

SEQ ID NO: 458201 - DNA, 30 bp, Artificial Sequence
  Synthetic oligonucleotide
gtctttgttagagagtattacggtagcact

SEQ ID NO: 458202 - DNA, 30 bp, Artificial Sequence
  Synthetic oligonucleotide
tataggaaatctgcagggacctttagcact

SEQ ID NO: 458203 - DNA, 30 bp, Artificial Sequence
  Synthetic oligonucleotide
tacaccatggcgtagagctctacacgcact

SEQ ID NO: 458204 - DNA, 30 bp, Artificial Sequence
  Synthetic oligonucleotide
tgcctgatttgacataggggccagcgcact

SEQ ID NO: 458205 - DNA, 30 bp, Artificial Sequence
  Synthetic oligonucleotide
cttaaaacacagctatggtaggcgcgcact

SEQ ID NO: 458206 - DNA, 30 bp, Artificial Sequence
  Synthetic oligonucleotide
cttgccatgctactgcaagctgcgcgcact

SEQ ID NO: 458207 - DNA, 30 bp, Artificial Sequence
  Synthetic oligonucleotide
tgggtgagcgtactaatgccagggcgcact

SEQ ID NO: 458208 - DNA, 30 bp, Artificial Sequence
  Synthetic oligonucleotide
cgatattggtgactaatggtatgtcgcact

SEQ ID NO: 458209 - DNA, 30 bp, Artificial Sequence
  Synthetic oligonucleotide
ggtggacgccctcgcgatcggcttcgcact

SEQ ID NO: 458210 - DNA, 30 bp, Artificial Sequence
  Synthetic oligonucleotide
gaccgaatttatgatcgttccgttcgcact

SEQ ID NO: 458211 - DNA, 30 bp, Artificial Sequence
  Synthetic oligonucleotide
tagtgaatcctttaatttcggaaaggcact

SEQ ID NO: 458212 - DNA, 30 bp, Artificial Sequence
  Synthetic oligonucleotide
gtgaacgggtctgcacttggctgaggcact

SEQ ID NO: 458213 - DNA, 30 bp, Artificial Sequence
  Synthetic oligonucleotide
ttcgggaggtaattcgtcctggtaggcact

SEQ ID NO: 458214 - DNA, 30 bp, Artificial Sequence
  Synthetic oligonucleotide
cacatcgaatttcgtttaggtcgcggcact

SEQ ID NO: 458215 - DNA, 30 bp, Artificial Sequence
  Synthetic oligonucleotide
agcaacgcctaccgcattatcgggggcact

SEQ ID NO: 458216 - DNA, 30 bp, Artificial Sequence
  Synthetic oligonucleotide
atttaactggcaatatacggcgtgggcact

SEQ ID NO: 458217 - DNA, 30 bp, Artificial Sequence
  Synthetic oligonucleotide
aattcaacatgttaatatcacgaatgcact

SEQ ID NO: 458218 - DNA, 30 bp, Artificial Sequence
  Synthetic oligonucleotide
gtcgagtgcatataggtcacctgatgcact

SEQ ID NO: 458219 - DNA, 30 bp, Artificial Sequence
  Synthetic oligonucleotide
gtgacagtggaccttcttcacatatgcact

SEQ ID NO: 458220 - DNA, 30 bp, Artificial Sequence
  Synthetic oligonucleotide
gcactttataaaaagcgggatgtatgcact

SEQ ID NO: 458221 - DNA, 30 bp, Artificial Sequence
  Synthetic oligonucleotide
tagggatgactcgaaagtgagaactgcact

SEQ ID NO: 458222 - DNA, 30 bp, Artificial Sequence
  Synthetic oligonucleotide
gcggcttaatacgtcgtttagtggtgcact

SEQ ID NO: 458223 - DNA, 30 bp, Artificial Sequence
  Synthetic oligonucleotide
aatccgcctatttacggaaaggtaatcact

SEQ ID NO: 458224 - DNA, 30 bp, Artificial Sequence
  Synthetic oligonucleotide
acttacgattagtccgggtactggatcact

SEQ ID NO: 458225 - DNA, 30 bp, Artificial Sequence
  Synthetic oligonucleotide
gagttaaccagcggtatggtaaatatcact

SEQ ID NO: 458226 - DNA, 30 bp, Artificial Sequence
  Synthetic oligonucleotide
atattaatctgggggtgaaaaattatcact

SEQ ID NO: 458227 - DNA, 30 bp, Artificial Sequence
  Synthetic oligonucleotide
agaaagtagtcctagcgcgtcattatcact

SEQ ID NO: 458228 - DNA, 30 bp, Artificial Sequence
  Synthetic oligonucleotide
ccccgacgtctggcgaaggatttactcact

SEQ ID NO: 458229 - DNA, 30 bp, Artificial Sequence
  Synthetic oligonucleotide
gaatgtggactggttgtccgccagctcact

SEQ ID NO: 458230 - DNA, 30 bp, Artificial Sequence
  Synthetic oligonucleotide
agttggcaatttagtcaagtttttctcact

SEQ ID NO: 458231 - DNA, 30 bp, Artificial Sequence
  Synthetic oligonucleotide
gtaaaaaggtctccttttgcaccagtcact

SEQ ID NO: 458232 - DNA, 30 bp, Artificial Sequence
  Synthetic oligonucleotide
ggtcgggcctcgcaaagcgtttgagtcact

SEQ ID NO: 458233 - DNA, 30 bp, Artificial Sequence
  Synthetic oligonucleotide
gttagtgacgaatgcactgtggtcgtcact

SEQ ID NO: 458234 - DNA, 30 bp, Artificial Sequence
  Synthetic oligonucleotide
ggctttttagttgtgcatatttgggtcact

SEQ ID NO: 458235 - DNA, 30 bp, Artificial Sequence
  Synthetic oligonucleotide
cgcaagttcttggacatagacgtggtcact

SEQ ID NO: 458236 - DNA, 30 bp, Artificial Sequence
  Synthetic oligonucleotide
gtggccaagggacccagtcccacattcact

SEQ ID NO: 458237 - DNA, 30 bp, Artificial Sequence
  Synthetic oligonucleotide
aatatggcgcggaggggctccctattcact

SEQ ID NO: 458238 - DNA, 30 bp, Artificial Sequence
  Synthetic oligonucleotide
gcacgcattgaccctctgcagaggttcact

SEQ ID NO: 458239 - DNA, 30 bp, Artificial Sequence
  Synthetic oligonucleotide
agcaatattctggcgaggatgcatttcact

SEQ ID NO: 458240 - DNA, 30 bp, Artificial Sequence
  Synthetic oligonucleotide
catatccatgggtaacctgatattttcact

SEQ ID NO: 458241 - DNA, 30 bp, Artificial Sequence
  Synthetic oligonucleotide
tgttcgacgtcaaagaatgtccaaaagact

SEQ ID NO: 458242 - DNA, 30 bp, Artificial Sequence
  Synthetic oligonucleotide
actactcaggggtgattgcccgaaaagact

SEQ ID NO: 458243 - DNA, 30 bp, Artificial Sequence
  Synthetic oligonucleotide
actgccatacgtctttgatggcgcaagact

SEQ ID NO: 458244 - DNA, 30 bp, Artificial Sequence
  Synthetic oligonucleotide
aaataccgcgggcagctgaaggtcaagact

SEQ ID NO: 458245 - DNA, 30 bp, Artificial Sequence
  Synthetic oligonucleotide
atctgcatgttccgaggtgttgcgaagact

SEQ ID NO: 458246 - DNA, 30 bp, Artificial Sequence
  Synthetic oligonucleotide
atacccttagcagggctcaaatggaagact

SEQ ID NO: 458247 - DNA, 30 bp, Artificial Sequence
  Synthetic oligonucleotide
cttggccaattttaggcggggaataagact

SEQ ID NO: 458248 - DNA, 30 bp, Artificial Sequence
  Synthetic oligonucleotide
ctgacttatgaattgccagaatataagact

SEQ ID NO: 458249 - DNA, 30 bp, Artificial Sequence
  Synthetic oligonucleotide
tttctctaagaaagatgagggagtaagact

SEQ ID NO: 458250 - DNA, 30 bp, Artificial Sequence
  Synthetic oligonucleotide
gaaccacaggtacgtgcttctgaacagact

SEQ ID NO: 458251 - DNA, 30 bp, Artificial Sequence
  Synthetic oligonucleotide
tttccacgttcacggttaggggtacagact

SEQ ID NO: 458252 - DNA, 30 bp, Artificial Sequence
  Synthetic oligonucleotide
ttcgcagcccagtgtggattgcgccagact

SEQ ID NO: 458253 - DNA, 30 bp, Artificial Sequence
  Synthetic oligonucleotide
ggaagtccgatcctaagcatcatccagact

SEQ ID NO: 458254 - DNA, 30 bp, Artificial Sequence
  Synthetic oligonucleotide
cccccaatgggatccagttaattccagact

SEQ ID NO: 458255 - DNA, 30 bp, Artificial Sequence
  Synthetic oligonucleotide
tgcaaatgtactcttatccggaagcagact

SEQ ID NO: 458256 - DNA, 30 bp, Artificial Sequence
  Synthetic oligonucleotide
gctcttgaaggaccaacgccggcgcagact

SEQ ID NO: 458257 - DNA, 30 bp, Artificial Sequence
  Synthetic oligonucleotide
aaatctccttcagagtagcacctgcagact

SEQ ID NO: 458258 - DNA, 30 bp, Artificial Sequence
  Synthetic oligonucleotide
aaatttagcgcccagggcggtgatcagact

SEQ ID NO: 458259 - DNA, 30 bp, Artificial Sequence
  Synthetic oligonucleotide
tgcaacgagccattgtccgttattcagact

SEQ ID NO: 458260 - DNA, 30 bp, Artificial Sequence
  Synthetic oligonucleotide
agcacggaagcaggactcggtcgggagact

SEQ ID NO: 458261 - DNA, 30 bp, Artificial Sequence
  Synthetic oligonucleotide
cggtcaaacttttacgatgcggctgagact

SEQ ID NO: 458262 - DNA, 30 bp, Artificial Sequence
  Synthetic oligonucleotide
gcccttccgacgctccagttcgaatagact

SEQ ID NO: 458263 - DNA, 30 bp, Artificial Sequence
  Synthetic oligonucleotide
ttggggttccattcggttatcggctagact

SEQ ID NO: 458264 - DNA, 30 bp, Artificial Sequence
  Synthetic oligonucleotide
tctttgcttatgaggggtccaagttagact

SEQ ID NO: 458265 - DNA, 30 bp, Artificial Sequence
  Synthetic oligonucleotide
ctagatgctccgtcttaggattgttagact

SEQ ID NO: 458266 - DNA, 30 bp, Artificial Sequence
  Synthetic oligonucleotide
aaagaattgcaatgctgcaggatttagact

SEQ ID NO: 458267 - DNA, 30 bp, Artificial Sequence
  Synthetic oligonucleotide
gaataattttaggatgatacagaaacgact

SEQ ID NO: 458268 - DNA, 30 bp, Artificial Sequence
  Synthetic oligonucleotide
aatacaccgaagtctgatctcgaaacgact

SEQ ID NO: 458269 - DNA, 30 bp, Artificial Sequence
  Synthetic oligonucleotide
gttttgtcccggcaacattttggtacgact

SEQ ID NO: 458270 - DNA, 30 bp, Artificial Sequence
  Synthetic oligonucleotide
ataccagcgcgccctctttcgcaaccgact

SEQ ID NO: 458271 - DNA, 30 bp, Artificial Sequence
  Synthetic oligonucleotide
agatttagtatctaatcgggtcgcccgact

SEQ ID NO: 458272 - DNA, 30 bp, Artificial Sequence
  Synthetic oligonucleotide
aattctgtaaaatgcgtaacggatccgact

SEQ ID NO: 458273 - DNA, 30 bp, Artificial Sequence
  Synthetic oligonucleotide
ggtgcgttgcggggtttttgagaagcgact

SEQ ID NO: 458274 - DNA, 30 bp, Artificial Sequence
  Synthetic oligonucleotide
tcgcagtgaatgcgcgatatattagcgact

SEQ ID NO: 458275 - DNA, 30 bp, Artificial Sequence
  Synthetic oligonucleotide
aaggtcctgaattaatattgtggctcgact

SEQ ID NO: 458276 - DNA, 30 bp, Artificial Sequence
  Synthetic oligonucleotide
ttagaacttgaagccctcaggaattcgact

SEQ ID NO: 458277 - DNA, 30 bp, Artificial Sequence
  Synthetic oligonucleotide
tccgttttcatcgtggttattgattcgact

SEQ ID NO: 458278 - DNA, 30 bp, Artificial Sequence
  Synthetic oligonucleotide
taagcaacgcaaaaagcacggctaaggact

SEQ ID NO: 458279 - DNA, 30 bp, Artificial Sequence
  Synthetic oligonucleotide
aagctggacgtggtatcggtggtaaggact

SEQ ID NO: 458280 - DNA, 30 bp, Artificial Sequence
  Synthetic oligonucleotide
ccctgagagccaaaatgatttcaacggact

SEQ ID NO: 458281 - DNA, 30 bp, Artificial Sequence
  Synthetic oligonucleotide
ctaaagactgcctaccaaggagaacggact

SEQ ID NO: 458282 - DNA, 30 bp, Artificial Sequence
  Synthetic oligonucleotide
gcggtgtgccacgcggactttacacggact

SEQ ID NO: 458283 - DNA, 30 bp, Artificial Sequence
  Synthetic oligonucleotide
ctagttcgtaatctaacgccctgacggact

SEQ ID NO: 458284 - DNA, 30 bp, Artificial Sequence
  Synthetic oligonucleotide
cgatgaattgtgagttccgggtgacggact

SEQ ID NO: 458285 - DNA, 30 bp, Artificial Sequence
  Synthetic oligonucleotide
aagatcaggaaccctatgtgtatacggact

SEQ ID NO: 458286 - DNA, 30 bp, Artificial Sequence
  Synthetic oligonucleotide
atatctcgatgttgtatgtaggcgcggact

SEQ ID NO: 458287 - DNA, 30 bp, Artificial Sequence
  Synthetic oligonucleotide
aggttagcgcgcattatcgcgactcggact

SEQ ID NO: 458288 - DNA, 30 bp, Artificial Sequence
  Synthetic oligonucleotide
tcgggaaactatcgctcaggtagtcggact

SEQ ID NO: 458289 - DNA, 30 bp, Artificial Sequence
  Synthetic oligonucleotide
aatcatgagaccagctagtcgaaagggact

SEQ ID NO: 458290 - DNA, 30 bp, Artificial Sequence
  Synthetic oligonucleotide
gtaaaggattttggttacgcttgagggact

SEQ ID NO: 458291 - DNA, 30 bp, Artificial Sequence
  Synthetic oligonucleotide
cccccaaacagtttatgtaattacgggact

SEQ ID NO: 458292 - DNA, 30 bp, Artificial Sequence
  Synthetic oligonucleotide
cgcgggtatagttacgtgcaccccgggact

SEQ ID NO: 458293 - DNA, 30 bp, Artificial Sequence
  Synthetic oligonucleotide
cgcgcataatcgtgtccttcggaggggact

SEQ ID NO: 458294 - DNA, 30 bp, Artificial Sequence
  Synthetic oligonucleotide
ggagcccgatcaggaggtgctggggggact

SEQ ID NO: 458295 - DNA, 30 bp, Artificial Sequence
  Synthetic oligonucleotide
aatgataaaagtcccaacggggatgggact

SEQ ID NO: 458296 - DNA, 30 bp, Artificial Sequence
  Synthetic oligonucleotide
ggaaccggactggcgcgcacatatgggact

SEQ ID NO: 458297 - DNA, 30 bp, Artificial Sequence
  Synthetic oligonucleotide
aatcttcatttagttgtgatatttgggact

SEQ ID NO: 458298 - DNA, 30 bp, Artificial Sequence
  Synthetic oligonucleotide
aagtcattaccgattctgcgtcaatggact

SEQ ID NO: 458299 - DNA, 30 bp, Artificial Sequence
  Synthetic oligonucleotide
cgttcgaacaagtttttctagcgctggact

SEQ ID NO: 458300 - DNA, 30 bp, Artificial Sequence
  Synthetic oligonucleotide
tattcttgaacacctcaaagagtctggact

SEQ ID NO: 458301 - DNA, 30 bp, Artificial Sequence
  Synthetic oligonucleotide
aatccattcattagttcgtaatagtggact

SEQ ID NO: 458302 - DNA, 30 bp, Artificial Sequence
  Synthetic oligonucleotide
gcagccaatgatgatgccaggaattggact

SEQ ID NO: 458303 - DNA, 30 bp, Artificial Sequence
  Synthetic oligonucleotide
ctctgcgagattttactcgtccgttggact

SEQ ID NO: 458304 - DNA, 30 bp, Artificial Sequence
  Synthetic oligonucleotide
gttttgattactcgtcacgaggcaatgact

SEQ ID NO: 458305 - DNA, 30 bp, Artificial Sequence
  Synthetic oligonucleotide
ttcggtactactgtgggggttgggatgact

SEQ ID NO: 458306 - DNA, 30 bp, Artificial Sequence
  Synthetic oligonucleotide
cacccacccatgaattcggcaatgatgact

SEQ ID NO: 458307 - DNA, 30 bp, Artificial Sequence
  Synthetic oligonucleotide
aaaactgggtttcgtcatatagtgatgact

SEQ ID NO: 458308 - DNA, 30 bp, Artificial Sequence
  Synthetic oligonucleotide
cggggccaactccgtagccaaaatatgact

SEQ ID NO: 458309 - DNA, 30 bp, Artificial Sequence
  Synthetic oligonucleotide
atgattgtgatgcacattcggcatatgact

SEQ ID NO: 458310 - DNA, 30 bp, Artificial Sequence
  Synthetic oligonucleotide
gataggttctccacggggcgtcctatgact

SEQ ID NO: 458311 - DNA, 30 bp, Artificial Sequence
  Synthetic oligonucleotide
gtttcccgagcggctccgtgcgctatgact

SEQ ID NO: 458312 - DNA, 30 bp, Artificial Sequence
  Synthetic oligonucleotide
aaaatggttgtgggaactgcatttatgact

SEQ ID NO: 458313 - DNA, 30 bp, Artificial Sequence
  Synthetic oligonucleotide
aaactggtaagggaggcgcactttatgact

SEQ ID NO: 458314 - DNA, 30 bp, Artificial Sequence
  Synthetic oligonucleotide
acccagcatagagacgtttcggaactgact

SEQ ID NO: 458315 - DNA, 30 bp, Artificial Sequence
  Synthetic oligonucleotide
caaggacagggagctctagcaaccctgact

SEQ ID NO: 458316 - DNA, 30 bp, Artificial Sequence
  Synthetic oligonucleotide
gttcggagtcaacgatgtgttggcctgact

SEQ ID NO: 458317 - DNA, 30 bp, Artificial Sequence
  Synthetic oligonucleotide
ggacgtgcaggataggtctgagggctgact

SEQ ID NO: 458318 - DNA, 30 bp, Artificial Sequence
  Synthetic oligonucleotide
accgacaatacaattgttgctcctctgact

SEQ ID NO: 458319 - DNA, 30 bp, Artificial Sequence
  Synthetic oligonucleotide
ggattggtccccgacggcacatgtctgact

SEQ ID NO: 458320 - DNA, 30 bp, Artificial Sequence
  Synthetic oligonucleotide
acacaagtgtcgtgctgctaaattctgact

SEQ ID NO: 458321 - DNA, 30 bp, Artificial Sequence
  Synthetic oligonucleotide
agccggactgggcaagtttacgacgtgact

SEQ ID NO: 458322 - DNA, 26 bp, Artificial Sequence
  Synthetic oligonucleotide
gaattgtgatgagtttttccgtgact

SEQ ID NO: 458323 - DNA, 30 bp, Artificial Sequence
  Synthetic oligonucleotide
cttggagtctgtcgtgtttacacggtgact

SEQ ID NO: 458324 - DNA, 30 bp, Artificial Sequence
  Synthetic oligonucleotide
tactccgaggcagcagagggtgatgtgact

SEQ ID NO: 458325 - DNA, 30 bp, Artificial Sequence
  Synthetic oligonucleotide
gaacgcaccgtggggaaatatgaattgact

SEQ ID NO: 458326 - DNA, 30 bp, Artificial Sequence
  Synthetic oligonucleotide
cttcgtcggactaactcgggtatcttgact

SEQ ID NO: 458327 - DNA, 30 bp, Artificial Sequence
  Synthetic oligonucleotide
catgtcgtcgttgtactacgggtgttgact

SEQ ID NO: 458328 - DNA, 30 bp, Artificial Sequence
  Synthetic oligonucleotide
ctaaatttaagatactggtttgtgttgact

SEQ ID NO: 458329 - DNA, 30 bp, Artificial Sequence
  Synthetic oligonucleotide
atggcagtaaaagaagcctgggttttgact

SEQ ID NO: 458330 - DNA, 30 bp, Artificial Sequence
  Synthetic oligonucleotide
gtgtaggtcagctaaagacggaaaaatact

SEQ ID NO: 458331 - DNA, 30 bp, Artificial Sequence
  Synthetic oligonucleotide
gaaccagaggagcgattaggaataaatact

SEQ ID NO: 458332 - DNA, 30 bp, Artificial Sequence
  Synthetic oligonucleotide
acagggcatagccaaccgcctcacaatact

SEQ ID NO: 458333 - DNA, 30 bp, Artificial Sequence
  Synthetic oligonucleotide
gtgtacatttttgcaaggttagacaatact

SEQ ID NO: 458334 - DNA, 30 bp, Artificial Sequence
  Synthetic oligonucleotide
ccacggatgatcgctagcctagtcaatact

SEQ ID NO: 458335 - DNA, 30 bp, Artificial Sequence
  Synthetic oligonucleotide
ttggtttggtaatgtactgagactaatact

SEQ ID NO: 458336 - DNA, 30 bp, Artificial Sequence
  Synthetic oligonucleotide
tgccgctcatcccacgggtatcctaatact

SEQ ID NO: 458337 - DNA, 30 bp, Artificial Sequence
  Synthetic oligonucleotide
cacttagtcacccgggaagaacgtaatact

SEQ ID NO: 458338 - DNA, 30 bp, Artificial Sequence
  Synthetic oligonucleotide
gcgtggatttaaggtcgacgatttaatact

SEQ ID NO: 458339 - DNA, 30 bp, Artificial Sequence
  Synthetic oligonucleotide
ctatcgtcaatgaaatgtatcagacatact

SEQ ID NO: 458340 - DNA, 30 bp, Artificial Sequence
  Synthetic oligonucleotide
gtgtcacctgagtatggaagaggacatact

SEQ ID NO: 458341 - DNA, 30 bp, Artificial Sequence
  Synthetic oligonucleotide
gcgttaatgcactgttcttcgaagcatact

SEQ ID NO: 458342 - DNA, 30 bp, Artificial Sequence
  Synthetic oligonucleotide
gtatgccatagatcgattggtaggcatact

SEQ ID NO: 458343 - DNA, 30 bp, Artificial Sequence
  Synthetic oligonucleotide
cgcgtgattagtcgtcgagacggtcatact

SEQ ID NO: 458344 - DNA, 30 bp, Artificial Sequence
  Synthetic oligonucleotide
cggggagagtgcatccatgtatgtcatact

SEQ ID NO: 458345 - DNA, 30 bp, Artificial Sequence
  Synthetic oligonucleotide
gagtacgttacgtggcaggcccttcatact

SEQ ID NO: 458346 - DNA, 30 bp, Artificial Sequence
  Synthetic oligonucleotide
tgatttccatcaattcaaggccaagatact

SEQ ID NO: 458347 - DNA, 30 bp, Artificial Sequence
  Synthetic oligonucleotide
gccataggttatctcctctttagagatact

SEQ ID NO: 458348 - DNA, 30 bp, Artificial Sequence
  Synthetic oligonucleotide
ttcgtgtgatgacggcaatcacgagatact

SEQ ID NO: 458349 - DNA, 30 bp, Artificial Sequence
  Synthetic oligonucleotide
ccaaagcataccggttatagctacgatact

SEQ ID NO: 458350 - DNA, 30 bp, Artificial Sequence
  Synthetic oligonucleotide
agatcgacacagggacaacctgtggatact

SEQ ID NO: 458351 - DNA, 30 bp, Artificial Sequence
  Synthetic oligonucleotide
gcccctaacaattttacatataatgatact

SEQ ID NO: 458352 - DNA, 30 bp, Artificial Sequence
  Synthetic oligonucleotide
gttgaaatgtacgtaaaagagcatgatact

SEQ ID NO: 458353 - DNA, 30 bp, Artificial Sequence
  Synthetic oligonucleotide
agattagtctaattgctctactttgatact

SEQ ID NO: 458354 - DNA, 30 bp, Artificial Sequence
  Synthetic oligonucleotide
gccctcgggttttaggcgccttttgatact

SEQ ID NO: 458355 - DNA, 30 bp, Artificial Sequence
  Synthetic oligonucleotide
tattgcatcaagccttgaaagtcatatact

SEQ ID NO: 458356 - DNA, 30 bp, Artificial Sequence
  Synthetic oligonucleotide
tatccaaggcgactgtaacaggactatact

SEQ ID NO: 458357 - DNA, 30 bp, Artificial Sequence
  Synthetic oligonucleotide
cttattctcaaataagttgtttactatact

SEQ ID NO: 458358 - DNA, 31 bp, Artificial Sequence
  Synthetic oligonucleotide
gctagaactagggtctgtccttgcctatact

SEQ ID NO: 458359 - DNA, 30 bp, Artificial Sequence
  Synthetic oligonucleotide
gagtacgcaaccattctgatatagtatact

SEQ ID NO: 458360 - DNA, 30 bp, Artificial Sequence
  Synthetic oligonucleotide
ccgccatatcgtcggggacatagttatact

SEQ ID NO: 458361 - DNA, 30 bp, Artificial Sequence
  Synthetic oligonucleotide
ttaatagggtgtccaacacatctttatact

SEQ ID NO: 458362 - DNA, 30 bp, Artificial Sequence
  Synthetic oligonucleotide
ttagtttacacggcgctcctcaaaactact

SEQ ID NO: 458363 - DNA, 30 bp, Artificial Sequence
  Synthetic oligonucleotide
ttaggccaagtatcgtcggaacagactact

SEQ ID NO: 458364 - DNA, 30 bp, Artificial Sequence
  Synthetic oligonucleotide
ctgggggaggctaggtgtctttggactact

SEQ ID NO: 458365 - DNA, 30 bp, Artificial Sequence
  Synthetic oligonucleotide
attcgattgatgtcgggaacgagtactact

SEQ ID NO: 458366 - DNA, 30 bp, Artificial Sequence
  Synthetic oligonucleotide
tggtggaatctaggtacttatctacctact

SEQ ID NO: 458367 - DNA, 30 bp, Artificial Sequence
  Synthetic oligonucleotide
atattatgtccagcctggcgggctcctact

SEQ ID NO: 458368 - DNA, 30 bp, Artificial Sequence
  Synthetic oligonucleotide
agcttgagatttggcattcatggtcctact

SEQ ID NO: 458369 - DNA, 30 bp, Artificial Sequence
  Synthetic oligonucleotide
agtagcttgtcacgcttcctgtaagctact

SEQ ID NO: 458370 - DNA, 30 bp, Artificial Sequence
  Synthetic oligonucleotide
tggtagtactattgacccaaagtagctact

SEQ ID NO: 458371 - DNA, 30 bp, Artificial Sequence
  Synthetic oligonucleotide
taagtccagtttgcgctagtatttgctact

SEQ ID NO: 458372 - DNA, 30 bp, Artificial Sequence
  Synthetic oligonucleotide
gttgtcggctcagacctcgattttgctact

SEQ ID NO: 458373 - DNA, 30 bp, Artificial Sequence
  Synthetic oligonucleotide
aggcatgatggtatcactaaaccctctact

SEQ ID NO: 458374 - DNA, 30 bp, Artificial Sequence
  Synthetic oligonucleotide
cggtcgaataataggctttgcttctctact

SEQ ID NO: 458375 - DNA, 30 bp, Artificial Sequence
  Synthetic oligonucleotide
cggacgtgacccttatttcgactgtctact

SEQ ID NO: 458376 - DNA, 31 bp, Artificial Sequence
  Synthetic oligonucleotide
gccacagttaacaggtaatagcgtgtctact

SEQ ID NO: 458377 - DNA, 30 bp, Artificial Sequence
  Synthetic oligonucleotide
ttttaggaccaaacgtctacaggttctact

SEQ ID NO: 458378 - DNA, 30 bp, Artificial Sequence
  Synthetic oligonucleotide
agcgacggcatacgctgccctcaaagtact

SEQ ID NO: 458379 - DNA, 30 bp, Artificial Sequence
  Synthetic oligonucleotide
aattcaataaacaggggacgatcaagtact

SEQ ID NO: 458380 - DNA, 30 bp, Artificial Sequence
  Synthetic oligonucleotide
agtcattgttcatgtctacaaataagtact

SEQ ID NO: 458381 - DNA, 30 bp, Artificial Sequence
  Synthetic oligonucleotide
ttaaaacgtctgaaatttttgataagtact

SEQ ID NO: 458382 - DNA, 30 bp, Artificial Sequence
  Synthetic oligonucleotide
tcgtattactggtttgattctataagtact

SEQ ID NO: 458383 - DNA, 30 bp, Artificial Sequence
  Synthetic oligonucleotide
cgcaaccctgccgcgacgttggatagtact

SEQ ID NO: 458384 - DNA, 30 bp, Artificial Sequence
  Synthetic oligonucleotide
aagtgttaactcactttaagaccgcgtact

SEQ ID NO: 458385 - DNA, 30 bp, Artificial Sequence
  Synthetic oligonucleotide
taagtacaactagtcacgctttcgcgtact

SEQ ID NO: 458386 - DNA, 30 bp, Artificial Sequence
  Synthetic oligonucleotide
gcctcacagttgagacccgcactgcgtact

SEQ ID NO: 458387 - DNA, 30 bp, Artificial Sequence
  Synthetic oligonucleotide
attgagggaagtcaatacgggttgcgtact

SEQ ID NO: 458388 - DNA, 30 bp, Artificial Sequence
  Synthetic oligonucleotide
cactcccggcccgtgttgatatctcgtact

SEQ ID NO: 458389 - DNA, 30 bp, Artificial Sequence
  Synthetic oligonucleotide
agtgagaataactgtcttagcattcgtact

SEQ ID NO: 458390 - DNA, 30 bp, Artificial Sequence
  Synthetic oligonucleotide
gcatttctgtgacctacggtaataggtact

SEQ ID NO: 458391 - DNA, 30 bp, Artificial Sequence
  Synthetic oligonucleotide
gctatttcggaagtttgaactttaggtact

SEQ ID NO: 458392 - DNA, 30 bp, Artificial Sequence
  Synthetic oligonucleotide
tgcgcagggccagaccggaaatccggtact

SEQ ID NO: 458393 - DNA, 30 bp, Artificial Sequence
  Synthetic oligonucleotide
gggcgtttccgacctggtcatgtcggtact

SEQ ID NO: 458394 - DNA, 30 bp, Artificial Sequence
  Synthetic oligonucleotide
gttaattcagagtaattcattcagggtact

SEQ ID NO: 458395 - DNA, 30 bp, Artificial Sequence
  Synthetic oligonucleotide
gtttccctggggggctttaaatcgggtact

SEQ ID NO: 458396 - DNA, 30 bp, Artificial Sequence
  Synthetic oligonucleotide
cggaccgctccattgagctatgggggtact

SEQ ID NO: 458397 - DNA, 30 bp, Artificial Sequence
  Synthetic oligonucleotide
gatatctagaccgtactgtgttatggtact

SEQ ID NO: 458398 - DNA, 30 bp, Artificial Sequence
  Synthetic oligonucleotide
agacacttgacatttccttgctttggtact

SEQ ID NO: 458399 - DNA, 30 bp, Artificial Sequence
  Synthetic oligonucleotide
catgggattggggttcgtacgctatgtact

SEQ ID NO: 458400 - DNA, 30 bp, Artificial Sequence
  Synthetic oligonucleotide
tgttggccagcggaggcagtaacgtgtact

SEQ ID NO: 458401 - DNA, 30 bp, Artificial Sequence
  Synthetic oligonucleotide
caccaggattgatagtacgatgggtgtact

SEQ ID NO: 458402 - DNA, 30 bp, Artificial Sequence
  Synthetic oligonucleotide
agttctgctacatcaggccggggttgtact

SEQ ID NO: 458403 - DNA, 30 bp, Artificial Sequence
  Synthetic oligonucleotide
agccctagagatacattagtcttttgtact

SEQ ID NO: 458404 - DNA, 30 bp, Artificial Sequence
  Synthetic oligonucleotide
ataatgtagcaggaggcaggccacattact

SEQ ID NO: 458405 - DNA, 30 bp, Artificial Sequence
  Synthetic oligonucleotide
ttcctacaattactgtggcagaagattact

SEQ ID NO: 458406 - DNA, 30 bp, Artificial Sequence
  Synthetic oligonucleotide
gattccattgatggaatctagactattact

SEQ ID NO: 458407 - DNA, 30 bp, Artificial Sequence
  Synthetic oligonucleotide
gcaaggtttttcgaaagggagagtattact

SEQ ID NO: 458408 - DNA, 30 bp, Artificial Sequence
  Synthetic oligonucleotide
gcaggtggtttatactcagaagttattact

SEQ ID NO: 458409 - DNA, 30 bp, Artificial Sequence
  Synthetic oligonucleotide
ggaaaaatgttttgagccgttggacttact

SEQ ID NO: 458410 - DNA, 30 bp, Artificial Sequence
  Synthetic oligonucleotide
gtttaccttctaatttagtctgaccttact

SEQ ID NO: 458411 - DNA, 30 bp, Artificial Sequence
  Synthetic oligonucleotide
ctaacgcaatcaggaagaaacagccttact

SEQ ID NO: 458412 - DNA, 30 bp, Artificial Sequence
  Synthetic oligonucleotide
gcgcacaagtatgaaggcaacgtgcttact

SEQ ID NO: 458413 - DNA, 30 bp, Artificial Sequence
  Synthetic oligonucleotide
caagcaagtaggaaaaggaatcctcttact

SEQ ID NO: 458414 - DNA, 30 bp, Artificial Sequence
  Synthetic oligonucleotide
agaattcagcgaaaagctgaaaacgttact

SEQ ID NO: 458415 - DNA, 30 bp, Artificial Sequence
  Synthetic oligonucleotide
taacgcccccattttccgtccaacgttact

SEQ ID NO: 458416 - DNA, 30 bp, Artificial Sequence
  Synthetic oligonucleotide
aactcaaacagcctacgaaggttcgttact

SEQ ID NO: 458417 - DNA, 30 bp, Artificial Sequence
  Synthetic oligonucleotide
tatcatatatgatcaagttcatgggttact

SEQ ID NO: 458418 - DNA, 30 bp, Artificial Sequence
  Synthetic oligonucleotide
agtagcgcggcaataaatggtactgttact

SEQ ID NO: 458419 - DNA, 30 bp, Artificial Sequence
  Synthetic oligonucleotide
gcagtatttaatcggagttggccatttact

SEQ ID NO: 458420 - DNA, 30 bp, Artificial Sequence
  Synthetic oligonucleotide
aatactagttaagcggttagtctctttact

SEQ ID NO: 458421 - DNA, 30 bp, Artificial Sequence
  Synthetic oligonucleotide
gttaggagtctgttatgtcttctctttact

SEQ ID NO: 458422 - DNA, 30 bp, Artificial Sequence
  Synthetic oligonucleotide
agccatactagatggtcagtaaagtttact

SEQ ID NO: 458423 - DNA, 30 bp, Artificial Sequence
  Synthetic oligonucleotide
atacttatttccgcgaataagtcgtttact

SEQ ID NO: 458424 - DNA, 30 bp, Artificial Sequence
  Synthetic oligonucleotide
cttattcttatatcgaataagtcgtttact

SEQ ID NO: 458425 - DNA, 30 bp, Artificial Sequence
  Synthetic oligonucleotide
cttattcgtccccacaataagttgtttact

SEQ ID NO: 458426 - DNA, 30 bp, Artificial Sequence
  Synthetic oligonucleotide
gagtttggaattttcaccagtacttttact

SEQ ID NO: 458427 - DNA, 30 bp, Artificial Sequence
  Synthetic oligonucleotide
agattatgggcattatttaaccgttttact

SEQ ID NO: 458428 - DNA, 30 bp, Artificial Sequence
  Synthetic oligonucleotide
ccggggtatgcactccttgatcgttttact

SEQ ID NO: 458429 - DNA, 30 bp, Artificial Sequence
  Synthetic oligonucleotide
tcatgtttcttgtgcactcgactttttact

SEQ ID NO: 458430 - DNA, 30 bp, Artificial Sequence
  Synthetic oligonucleotide
tttaattggtaaagtcggtccatcaaacct

SEQ ID NO: 458431 - DNA, 30 bp, Artificial Sequence
  Synthetic oligonucleotide
cttcctataggtgcacccggccagaaacct

SEQ ID NO: 458432 - DNA, 30 bp, Artificial Sequence
  Synthetic oligonucleotide
ttattgaaacagtccattacccggaaacct

SEQ ID NO: 458433 - DNA, 30 bp, Artificial Sequence
  Synthetic oligonucleotide
caaagcgtctgggcaagaaggtggaaacct

SEQ ID NO: 458434 - DNA, 30 bp, Artificial Sequence
  Synthetic oligonucleotide
cggcacaattatggagtgtcagctaaacct

SEQ ID NO: 458435 - DNA, 30 bp, Artificial Sequence
  Synthetic oligonucleotide
actgtaggcgctctatacattcgtaaacct

SEQ ID NO: 458436 - DNA, 30 bp, Artificial Sequence
  Synthetic oligonucleotide
gttaaaggcggttgtatattaagacaacct

SEQ ID NO: 458437 - DNA, 30 bp, Artificial Sequence
  Synthetic oligonucleotide
gcacacagggaaaggtttttaccccaacct

SEQ ID NO: 458438 - DNA, 30 bp, Artificial Sequence
  Synthetic oligonucleotide
gaagggtttgtagtcttcgcccagcaacct

SEQ ID NO: 458439 - DNA, 30 bp, Artificial Sequence
  Synthetic oligonucleotide
attctagttcggtgggacgcgacgcaacct

SEQ ID NO: 458440 - DNA, 30 bp, Artificial Sequence
  Synthetic oligonucleotide
atagtcaatccacagtcaggtaggcaacct

SEQ ID NO: 458441 - DNA, 30 bp, Artificial Sequence
  Synthetic oligonucleotide
ggcatgttggtgttggtcttgcctcaacct

SEQ ID NO: 458442 - DNA, 30 bp, Artificial Sequence
  Synthetic oligonucleotide
gttcacgatagagccgcttaatgagaacct

SEQ ID NO: 458443 - DNA, 30 bp, Artificial Sequence
  Synthetic oligonucleotide
taaaacggagggagtcgttagttagaacct

SEQ ID NO: 458444 - DNA, 30 bp, Artificial Sequence
  Synthetic oligonucleotide
tgagggggggttgagggaaacaacgaacct

SEQ ID NO: 458445 - DNA, 30 bp, Artificial Sequence
  Synthetic oligonucleotide
agtgacgccggagtaaaatgagccgaacct

SEQ ID NO: 458446 - DNA, 30 bp, Artificial Sequence
  Synthetic oligonucleotide
ggctcgtcgtatggtggacaagcggaacct

SEQ ID NO: 458447 - DNA, 30 bp, Artificial Sequence
  Synthetic oligonucleotide
catctcgcactctgtgatcgaggggaacct

SEQ ID NO: 458448 - DNA, 30 bp, Artificial Sequence
  Synthetic oligonucleotide
ctaatgatcggccactacgaagatgaacct

SEQ ID NO: 458449 - DNA, 30 bp, Artificial Sequence
  Synthetic oligonucleotide
ttgtttatgttctttgttaggactgaacct

SEQ ID NO: 458450 - DNA, 30 bp, Artificial Sequence
  Synthetic oligonucleotide
ccagtggagcggtaatcataatttgaacct

SEQ ID NO: 458451 - DNA, 30 bp, Artificial Sequence
  Synthetic oligonucleotide
gtctcttgttccttagccctatcataacct

SEQ ID NO: 458452 - DNA, 30 bp, Artificial Sequence
  Synthetic oligonucleotide
taacatgcacttgtggcctttgtataacct

SEQ ID NO: 458453 - DNA, 30 bp, Artificial Sequence
  Synthetic oligonucleotide
aataacaatttgcaacgggccatctaacct

SEQ ID NO: 458454 - DNA, 30 bp, Artificial Sequence
  Synthetic oligonucleotide
taccctgtgcatacaacgcagccgtaacct

SEQ ID NO: 458455 - DNA, 30 bp, Artificial Sequence
  Synthetic oligonucleotide
tcgatgatgtcgattaataactcgtaacct

SEQ ID NO: 458456 - DNA, 30 bp, Artificial Sequence
  Synthetic oligonucleotide
caaaaaccatagtattcgacgcgttaacct

SEQ ID NO: 458457 - DNA, 30 bp, Artificial Sequence
  Synthetic oligonucleotide
cagatctagtaggaacgcataagaacacct

SEQ ID NO: 458458 - DNA, 30 bp, Artificial Sequence
  Synthetic oligonucleotide
atgtattctctaatctcgccgcgaacacct

SEQ ID NO: 458459 - DNA, 30 bp, Artificial Sequence
  Synthetic oligonucleotide
gtcagcattaagcgttcccatctcacacct

SEQ ID NO: 458460 - DNA, 30 bp, Artificial Sequence
  Synthetic oligonucleotide
gagtgttatcactttgcgcagtcgacacct

SEQ ID NO: 458461 - DNA, 30 bp, Artificial Sequence
  Synthetic oligonucleotide
cggttcttacggtcgaggtggacaccacct

SEQ ID NO: 458462 - DNA, 30 bp, Artificial Sequence
  Synthetic oligonucleotide
tactagatcttgccagcctgtgctccacct

SEQ ID NO: 458463 - DNA, 30 bp, Artificial Sequence
  Synthetic oligonucleotide
caaagtgctgactccatcaactgtccacct

SEQ ID NO: 458464 - DNA, 30 bp, Artificial Sequence
  Synthetic oligonucleotide
gtagtcccaaacgtgcctccaccagcacct

SEQ ID NO: 458465 - DNA, 29 bp, Artificial Sequence
  Synthetic oligonucleotide
cagttagctgaagatcggcaaacgcacct

SEQ ID NO: 458466 - DNA, 30 bp, Artificial Sequence
  Synthetic oligonucleotide
tgaaaatacgtctgagttcgggaggcacct

SEQ ID NO: 458467 - DNA, 30 bp, Artificial Sequence
  Synthetic oligonucleotide
ttgcagtgccatgccacaatgagggcacct

SEQ ID NO: 458468 - DNA, 30 bp, Artificial Sequence
  Synthetic oligonucleotide
tctccggcaccgtataatggtactgcacct

SEQ ID NO: 458469 - DNA, 30 bp, Artificial Sequence
  Synthetic oligonucleotide
gtgcgcaggctgctccagttagttgcacct

SEQ ID NO: 458470 - DNA, 30 bp, Artificial Sequence
  Synthetic oligonucleotide
atgttttagtgcgccaggtgaatatcacct

SEQ ID NO: 458471 - DNA, 30 bp, Artificial Sequence
  Synthetic oligonucleotide
ccgttatttgggtttattcgtacctcacct

SEQ ID NO: 458472 - DNA, 30 bp, Artificial Sequence
  Synthetic oligonucleotide
actcctttttagtagagaacagtctcacct

SEQ ID NO: 458473 - DNA, 30 bp, Artificial Sequence
  Synthetic oligonucleotide
tgtcgtagggatgctgttttaaagtcacct

SEQ ID NO: 458474 - DNA, 30 bp, Artificial Sequence
  Synthetic oligonucleotide
cttaagtggggtgaatttcgaacttcacct

SEQ ID NO: 458475 - DNA, 30 bp, Artificial Sequence
  Synthetic oligonucleotide
tcggctttttgatgaaagagataaagacct

SEQ ID NO: 458476 - DNA, 30 bp, Artificial Sequence
  Synthetic oligonucleotide
tatagagtaaacttatctattcgaagacct

SEQ ID NO: 458477 - DNA, 30 bp, Artificial Sequence
  Synthetic oligonucleotide
gcagcgccaggatagaggtttataagacct

SEQ ID NO: 458478 - DNA, 30 bp, Artificial Sequence
  Synthetic oligonucleotide
attccacattccgtggcgattttaagacct

SEQ ID NO: 458479 - DNA, 30 bp, Artificial Sequence
  Synthetic oligonucleotide
acaatctagcgtacagaccagcgcagacct

SEQ ID NO: 458480 - DNA, 30 bp, Artificial Sequence
  Synthetic oligonucleotide
tcccggtagacggcgtagatctagagacct

SEQ ID NO: 458481 - DNA, 30 bp, Artificial Sequence
  Synthetic oligonucleotide
atcccagctaaaataagtctctagagacct

SEQ ID NO: 458482 - DNA, 30 bp, Artificial Sequence
  Synthetic oligonucleotide
tataagatgactaacgactttaatagacct

SEQ ID NO: 458483 - DNA, 30 bp, Artificial Sequence
  Synthetic oligonucleotide
tacagtctcagtagttctaagactagacct

SEQ ID NO: 458484 - DNA, 30 bp, Artificial Sequence
  Synthetic oligonucleotide
aaactatgtttagcgagatggtctagacct

SEQ ID NO: 458485 - DNA, 30 bp, Artificial Sequence
  Synthetic oligonucleotide
cattgccttgatatcagtcaaagtagacct

SEQ ID NO: 458486 - DNA, 30 bp, Artificial Sequence
  Synthetic oligonucleotide
tttacaaccagtaatggagtcgaacgacct

SEQ ID NO: 458487 - DNA, 30 bp, Artificial Sequence
  Synthetic oligonucleotide
ctatagtcctgaggttgggttacaggacct

SEQ ID NO: 458488 - DNA, 30 bp, Artificial Sequence
  Synthetic oligonucleotide
acatctagtacaacactatttcgaggacct

SEQ ID NO: 458489 - DNA, 30 bp, Artificial Sequence
  Synthetic oligonucleotide
aagtgtctctggtctatattcttaggacct

SEQ ID NO: 458490 - DNA, 31 bp, Artificial Sequence
  Synthetic oligonucleotide
tcgcagactgcgggaaaagtcctgcggacct

SEQ ID NO: 458491 - DNA, 30 bp, Artificial Sequence
  Synthetic oligonucleotide
gatccctctacaaccccgatgaggggacct

SEQ ID NO: 458492 - DNA, 30 bp, Artificial Sequence
  Synthetic oligonucleotide
cgcagagggcggtctccagcatggggacct

SEQ ID NO: 458493 - DNA, 30 bp, Artificial Sequence
  Synthetic oligonucleotide
gctcgttcatctcggactcgctgatgacct

SEQ ID NO: 458494 - DNA, 30 bp, Artificial Sequence
  Synthetic oligonucleotide
gaacaagttgaggccaagagacgctgacct

SEQ ID NO: 458495 - DNA, 30 bp, Artificial Sequence
  Synthetic oligonucleotide
ccgacttatggagtgggtattacaatacct

SEQ ID NO: 458496 - DNA, 30 bp, Artificial Sequence
  Synthetic oligonucleotide
gcgacttgcaacaggttaatgtcaatacct

SEQ ID NO: 458497 - DNA, 30 bp, Artificial Sequence
  Synthetic oligonucleotide
cagtcggtgtatccgcgcactgccatacct

SEQ ID NO: 458498 - DNA, 30 bp, Artificial Sequence
  Synthetic oligonucleotide
agacacggtacgagaagtgacggcatacct

SEQ ID NO: 458499 - DNA, 30 bp, Artificial Sequence
  Synthetic oligonucleotide
gccgcctattatagtaaaatcgagatacct

SEQ ID NO: 458500 - DNA, 30 bp, Artificial Sequence
  Synthetic oligonucleotide
catcaaatggagcccgccttcacgatacct

SEQ ID NO: 458501 - DNA, 30 bp, Artificial Sequence
  Synthetic oligonucleotide
ctatctcgcaaagtaagaacgtcgatacct

SEQ ID NO: 458502 - DNA, 30 bp, Artificial Sequence
  Synthetic oligonucleotide
gattgccgcctagcaaccggcagtatacct

SEQ ID NO: 458503 - DNA, 30 bp, Artificial Sequence
  Synthetic oligonucleotide
gatattaacagcttacaaatcggtatacct

SEQ ID NO: 458504 - DNA, 30 bp, Artificial Sequence
  Synthetic oligonucleotide
tagtgacgcgacagtctaagctcactacct

SEQ ID NO: 458505 - DNA, 30 bp, Artificial Sequence
  Synthetic oligonucleotide
actattgttcttaagtgggaaggactacct

SEQ ID NO: 458506 - DNA, 30 bp, Artificial Sequence
  Synthetic oligonucleotide
attaagaaatctataagacgggccctacct

SEQ ID NO: 458507 - DNA, 30 bp, Artificial Sequence
  Synthetic oligonucleotide
ctgttcaagctaggtgctaagatcctacct

SEQ ID NO: 458508 - DNA, 30 bp, Artificial Sequence
  Synthetic oligonucleotide
ccgggcgtcaagcaatttccgctcctacct

SEQ ID NO: 458509 - DNA, 30 bp, Artificial Sequence
  Synthetic oligonucleotide
tttcggacgtgtctctacgcgccgctacct

SEQ ID NO: 458510 - DNA, 30 bp, Artificial Sequence
  Synthetic oligonucleotide
caagacatgatgatcgaaatggcgctacct

SEQ ID NO: 458511 - DNA, 30 bp, Artificial Sequence
  Synthetic oligonucleotide
gtcagtactttaggttataacgggctacct

SEQ ID NO: 458512 - DNA, 30 bp, Artificial Sequence
  Synthetic oligonucleotide
ttttgcattcgaacatcaaatttgctacct

SEQ ID NO: 458513 - DNA, 30 bp, Artificial Sequence
  Synthetic oligonucleotide
caaggcaaacgtttttcgtaccaagtacct

SEQ ID NO: 458514 - DNA, 30 bp, Artificial Sequence
  Synthetic oligonucleotide
cgcgcgtctgatgtattgagacacgtacct

SEQ ID NO: 458515 - DNA, 30 bp, Artificial Sequence
  Synthetic oligonucleotide
atctagtgttagtaacagtgctcggtacct

SEQ ID NO: 458516 - DNA, 30 bp, Artificial Sequence
  Synthetic oligonucleotide
cgtcacgtcttcgtccctacggctgtacct

SEQ ID NO: 458517 - DNA, 30 bp, Artificial Sequence
  Synthetic oligonucleotide
tcgcggttcgatcggccctcgttattacct

SEQ ID NO: 458518 - DNA, 30 bp, Artificial Sequence
  Synthetic oligonucleotide
acatctctgatcgacgctgcacccttacct

SEQ ID NO: 458519 - DNA, 30 bp, Artificial Sequence
  Synthetic oligonucleotide
tgtccggttatagagggtacttggttacct

SEQ ID NO: 458520 - DNA, 30 bp, Artificial Sequence
  Synthetic oligonucleotide
acttaggggaacagccaacgcgttttacct

SEQ ID NO: 458521 - DNA, 30 bp, Artificial Sequence
  Synthetic oligonucleotide
ctcgttaaaagtttgttagtaacaaaccct

SEQ ID NO: 458522 - DNA, 30 bp, Artificial Sequence
  Synthetic oligonucleotide
gttcatccctttgtttattacagcaaccct

SEQ ID NO: 458523 - DNA, 30 bp, Artificial Sequence
  Synthetic oligonucleotide
tagtcgagctactaattgaccagcaaccct

SEQ ID NO: 458524 - DNA, 30 bp, Artificial Sequence
  Synthetic oligonucleotide
cacgtggacggagcaattgtctagaaccct

SEQ ID NO: 458525 - DNA, 30 bp, Artificial Sequence
  Synthetic oligonucleotide
tatccgcaattgttgtgggcacggaaccct

SEQ ID NO: 458526 - DNA, 30 bp, Artificial Sequence
  Synthetic oligonucleotide
tcaaatgtcatctctcctgatcgtaaccct

SEQ ID NO: 458527 - DNA, 30 bp, Artificial Sequence
  Synthetic oligonucleotide
agcccgacgctgccacattggaagcaccct

SEQ ID NO: 458528 - DNA, 30 bp, Artificial Sequence
  Synthetic oligonucleotide
gttcattgaccctatgagagcgggcaccct

SEQ ID NO: 458529 - DNA, 30 bp, Artificial Sequence
  Synthetic oligonucleotide
attaacaaaatgaataaatgaaatcaccct

SEQ ID NO: 458530 - DNA, 30 bp, Artificial Sequence
  Synthetic oligonucleotide
gtaggaaggatagggcgggaatatcaccct

SEQ ID NO: 458531 - DNA, 30 bp, Artificial Sequence
  Synthetic oligonucleotide
gtgacacggagtttcaataactatcaccct

SEQ ID NO: 458532 - DNA, 30 bp, Artificial Sequence
  Synthetic oligonucleotide
ggagggtatatacttaaaaagtatcaccct

SEQ ID NO: 458533 - DNA, 30 bp, Artificial Sequence
  Synthetic oligonucleotide
ctgtagtaaagggtaagtccaggtcaccct

SEQ ID NO: 458534 - DNA, 30 bp, Artificial Sequence
  Synthetic oligonucleotide
gcggtgagagccgattccggctgcgaccct

SEQ ID NO: 458535 - DNA, 30 bp, Artificial Sequence
  Synthetic oligonucleotide
gtgttctcctattacttacgaccggaccct

SEQ ID NO: 458536 - DNA, 30 bp, Artificial Sequence
  Synthetic oligonucleotide
cggctgccacctcggcgacggccggaccct

SEQ ID NO: 458537 - DNA, 30 bp, Artificial Sequence
  Synthetic oligonucleotide
gacagtgtggggcaagacccatgggaccct

SEQ ID NO: 458538 - DNA, 30 bp, Artificial Sequence
  Synthetic oligonucleotide
ggtaactatttgacaccggtacaataccct

SEQ ID NO: 458539 - DNA, 30 bp, Artificial Sequence
  Synthetic oligonucleotide
ttacttctgtatttaaagccccaataccct

SEQ ID NO: 458540 - DNA, 30 bp, Artificial Sequence
  Synthetic oligonucleotide
tttttgggcggtccaatgatgtcataccct

SEQ ID NO: 458541 - DNA, 30 bp, Artificial Sequence
  Synthetic oligonucleotide
agtgtggtgaaatcataagttctataccct

SEQ ID NO: 458542 - DNA, 30 bp, Artificial Sequence
  Synthetic oligonucleotide
tccagattggcaagtttccgattctaccct

SEQ ID NO: 458543 - DNA, 30 bp, Artificial Sequence
  Synthetic oligonucleotide
cgagacagcataagccggagatattaccct

SEQ ID NO: 458544 - DNA, 30 bp, Artificial Sequence
  Synthetic oligonucleotide
caacacgactcgaaagtagcgcgaacccct

SEQ ID NO: 458545 - DNA, 30 bp, Artificial Sequence
  Synthetic oligonucleotide
ggacccctaggtgctcggtggggcacccct

SEQ ID NO: 458546 - DNA, 30 bp, Artificial Sequence
  Synthetic oligonucleotide
tcgagagatcgagagggtctttgcacccct

SEQ ID NO: 458547 - DNA, 30 bp, Artificial Sequence
  Synthetic oligonucleotide
aacccaaattctttaaagcggctcacccct

SEQ ID NO: 458548 - DNA, 30 bp, Artificial Sequence
  Synthetic oligonucleotide
caactgtaataaatgtcaaagatgacccct

SEQ ID NO: 458549 - DNA, 30 bp, Artificial Sequence
  Synthetic oligonucleotide
ttgtatgaggagatcgacaccggtacccct

SEQ ID NO: 458550 - DNA, 30 bp, Artificial Sequence
  Synthetic oligonucleotide
gggtagtatgccggatttaatcttacccct

SEQ ID NO: 458551 - DNA, 40 bp, Artificial Sequence
  Synthetic oligonucleotide
tatccagggcgctatgcaccccaccctggcagaagcccct

SEQ ID NO: 458552 - DNA, 30 bp, Artificial Sequence
  Synthetic oligonucleotide
cctatctaaggtcgccaacaggacgcccct

SEQ ID NO: 458553 - DNA, 30 bp, Artificial Sequence
  Synthetic oligonucleotide
acgtcgaatgacattcgggacggtgcccct

SEQ ID NO: 458554 - DNA, 30 bp, Artificial Sequence
  Synthetic oligonucleotide
gtaagggagtctttctattgctgtgcccct

SEQ ID NO: 458555 - DNA, 30 bp, Artificial Sequence
  Synthetic oligonucleotide
cagcgccacagcatttcatatcttgcccct

SEQ ID NO: 458556 - DNA, 30 bp, Artificial Sequence
  Synthetic oligonucleotide
atagactacaaatctgtagtcgcttcccct

SEQ ID NO: 458557 - DNA, 30 bp, Artificial Sequence
  Synthetic oligonucleotide
tcctgtcggtccggagagcaagaaagccct

SEQ ID NO: 458558 - DNA, 30 bp, Artificial Sequence
  Synthetic oligonucleotide
atgagaagaaggtgcgtagttacacgccct

SEQ ID NO: 458559 - DNA, 30 bp, Artificial Sequence
  Synthetic oligonucleotide
gtgctgattatagatcctttagttcgccct

SEQ ID NO: 458560 - DNA, 30 bp, Artificial Sequence
  Synthetic oligonucleotide
tagagcggtagctgcctgagctcaggccct

SEQ ID NO: 458561 - DNA, 30 bp, Artificial Sequence
  Synthetic oligonucleotide
gatgtgcgaaaataacaaggcctaggccct

SEQ ID NO: 458562 - DNA, 30 bp, Artificial Sequence
  Synthetic oligonucleotide
gtctgagatataagaatgctcttaggccct

SEQ ID NO: 458563 - DNA, 30 bp, Artificial Sequence
  Synthetic oligonucleotide
tgttgacctcggattcggcgcggcggccct

SEQ ID NO: 458564 - DNA, 30 bp, Artificial Sequence
  Synthetic oligonucleotide
agcttgcggtaaaagttcaacgcgggccct

SEQ ID NO: 458565 - DNA, 30 bp, Artificial Sequence
  Synthetic oligonucleotide
ctagcgtcacaggtacccggggcgggccct

SEQ ID NO: 458566 - DNA, 30 bp, Artificial Sequence
  Synthetic oligonucleotide
aactattcaagtagaatccgcatgggccct

SEQ ID NO: 458567 - DNA, 30 bp, Artificial Sequence
  Synthetic oligonucleotide
atattgccacctgttaaggtgaatggccct

SEQ ID NO: 458568 - DNA, 30 bp, Artificial Sequence
  Synthetic oligonucleotide
cgatgctataatcaccagtaacctggccct

SEQ ID NO: 458569 - DNA, 30 bp, Artificial Sequence
  Synthetic oligonucleotide
gggctgtgggcttgactagttattggccct

SEQ ID NO: 458570 - DNA, 30 bp, Artificial Sequence
  Synthetic oligonucleotide
gatgacattttaggtctggatcgctgccct

SEQ ID NO: 458571 - DNA, 30 bp, Artificial Sequence
  Synthetic oligonucleotide
tacatagcaaagctgtattaactgtgccct

SEQ ID NO: 458572 - DNA, 30 bp, Artificial Sequence
  Synthetic oligonucleotide
cccctctcgctttctattactttgtgccct

SEQ ID NO: 458573 - DNA, 30 bp, Artificial Sequence
  Synthetic oligonucleotide
accctctcgctttctattcctttgtgccct

SEQ ID NO: 458574 - DNA, 29 bp, Artificial Sequence
  Synthetic oligonucleotide
ccccttcgctttctattcctttgtgccct

SEQ ID NO: 458575 - DNA, 29 bp, Artificial Sequence
  Synthetic oligonucleotide
cccctctcgtttctattcctttgtgccct

SEQ ID NO: 458576 - DNA, 29 bp, Artificial Sequence
  Synthetic oligonucleotide
cccctctcgcttttattcctttgtgccct

SEQ ID NO: 458577 - DNA, 30 bp, Artificial Sequence
  Synthetic oligonucleotide
cccctctcgctttcttttcctttgtgccct

SEQ ID NO: 458578 - DNA, 30 bp, Artificial Sequence
  Synthetic oligonucleotide
agtgtcattgtttcttagtaaaattgccct

SEQ ID NO: 458579 - DNA, 30 bp, Artificial Sequence
  Synthetic oligonucleotide
cagcatagacgcctaactccaagttgccct

SEQ ID NO: 458580 - DNA, 30 bp, Artificial Sequence
  Synthetic oligonucleotide
gaatgccagcttatcgcttcgtaaatccct

SEQ ID NO: 458581 - DNA, 30 bp, Artificial Sequence
  Synthetic oligonucleotide
cggatagcccctcattacttggcaatccct

SEQ ID NO: 458582 - DNA, 30 bp, Artificial Sequence
  Synthetic oligonucleotide
gtcagccagtgaaaagcttgggtaatccct

SEQ ID NO: 458583 - DNA, 30 bp, Artificial Sequence
  Synthetic oligonucleotide
gttgagtgtatcatgtacgaagccatccct

SEQ ID NO: 458584 - DNA, 30 bp, Artificial Sequence
  Synthetic oligonucleotide
tacccaccagcggcttctcgagtgatccct

SEQ ID NO: 458585 - DNA, 30 bp, Artificial Sequence
  Synthetic oligonucleotide
tgattgggttttaattctatccttatccct

SEQ ID NO: 458586 - DNA, 30 bp, Artificial Sequence
  Synthetic oligonucleotide
agctctgccgtttgccacggcccactccct

SEQ ID NO: 458587 - DNA, 30 bp, Artificial Sequence
  Synthetic oligonucleotide
ctcgaggattaatgttactgattactccct

SEQ ID NO: 458588 - DNA, 30 bp, Artificial Sequence
  Synthetic oligonucleotide
cagacaaccatgtaactcgtcggcctccct

SEQ ID NO: 458589 - DNA, 30 bp, Artificial Sequence
  Synthetic oligonucleotide
gcgaatctattgtggaactcattcctccct

SEQ ID NO: 458590 - DNA, 30 bp, Artificial Sequence
  Synthetic oligonucleotide
actgaatgttcggtaacacgctggctccct

SEQ ID NO: 458591 - DNA, 30 bp, Artificial Sequence
  Synthetic oligonucleotide
agttgtgattctatgatggggtttctccct

SEQ ID NO: 458592 - DNA, 30 bp, Artificial Sequence
  Synthetic oligonucleotide
cgtataggaatgtcaaccttatacgtccct

SEQ ID NO: 458593 - DNA, 30 bp, Artificial Sequence
  Synthetic oligonucleotide
tcgagtgtgatattgaacgcagtcgtccct

SEQ ID NO: 458594 - DNA, 30 bp, Artificial Sequence
  Synthetic oligonucleotide
gagtctgagctccaataaatacatgtccct

SEQ ID NO: 458595 - DNA, 30 bp, Artificial Sequence
  Synthetic oligonucleotide
cgcttccatgtttgtgtagggggcttccct

SEQ ID NO: 458596 - DNA, 30 bp, Artificial Sequence
  Synthetic oligonucleotide
catggaggacggcaaagtgattgcttccct

SEQ ID NO: 458597 - DNA, 30 bp, Artificial Sequence
  Synthetic oligonucleotide
aacaattagggagccatcgttgcgttccct

SEQ ID NO: 458598 - DNA, 30 bp, Artificial Sequence
  Synthetic oligonucleotide
ttacgtgcttcatgtatacgcctaaagcct

SEQ ID NO: 458599 - DNA, 30 bp, Artificial Sequence
  Synthetic oligonucleotide
cgcccaagctttggtcaggagatgaagcct

SEQ ID NO: 458600 - DNA, 30 bp, Artificial Sequence
  Synthetic oligonucleotide
taagtctcctttcccggtgacttgaagcct

SEQ ID NO: 458601 - DNA, 30 bp, Artificial Sequence
  Synthetic oligonucleotide
catctcaaatgttgtacgagtacacagcct

SEQ ID NO: 458602 - DNA, 30 bp, Artificial Sequence
  Synthetic oligonucleotide
ttgcaggggttgacgccggggccccagcct

SEQ ID NO: 458603 - DNA, 30 bp, Artificial Sequence
  Synthetic oligonucleotide
tactttacaagatctaagtcgcagcagcct

SEQ ID NO: 458604 - DNA, 30 bp, Artificial Sequence
  Synthetic oligonucleotide
tcgggtgagtacactagatgtactcagcct

SEQ ID NO: 458605 - DNA, 30 bp, Artificial Sequence
  Synthetic oligonucleotide
ctcccgatgcttatagcttttagagagcct

SEQ ID NO: 458606 - DNA, 30 bp, Artificial Sequence
  Synthetic oligonucleotide
agcgcgcgcaaattgcacttgctagagcct

SEQ ID NO: 458607 - DNA, 30 bp, Artificial Sequence
  Synthetic oligonucleotide
atgtcatgtcagcgtgccataaacgagcct

SEQ ID NO: 458608 - DNA, 30 bp, Artificial Sequence
  Synthetic oligonucleotide
catgatatattggccgggcatacggagcct

SEQ ID NO: 458609 - DNA, 30 bp, Artificial Sequence
  Synthetic oligonucleotide
tgctcagattttaaaaggtatcttgagcct

SEQ ID NO: 458610 - DNA, 30 bp, Artificial Sequence
  Synthetic oligonucleotide
ccaatcgtgctagttttaaccccatagcct

SEQ ID NO: 458611 - DNA, 30 bp, Artificial Sequence
  Synthetic oligonucleotide
gatttgcaccagcggagaggctcatagcct

SEQ ID NO: 458612 - DNA, 30 bp, Artificial Sequence
  Synthetic oligonucleotide
gtagagcttttaagcttcagccagtagcct

SEQ ID NO: 458613 - DNA, 30 bp, Artificial Sequence
  Synthetic oligonucleotide
gaatctgcataaggtgctccatcgtagcct

SEQ ID NO: 458614 - DNA, 30 bp, Artificial Sequence
  Synthetic oligonucleotide
taggaacccagtttaatgatggggtagcct

SEQ ID NO: 458615 - DNA, 30 bp, Artificial Sequence
  Synthetic oligonucleotide
ggcactcgatattctttagagcaaacgcct

SEQ ID NO: 458616 - DNA, 30 bp, Artificial Sequence
  Synthetic oligonucleotide
acccggacaggagccgcgcgggaaacgcct

SEQ ID NO: 458617 - DNA, 30 bp, Artificial Sequence
  Synthetic oligonucleotide
acgctagaactatctccgattaacacgcct

SEQ ID NO: 458618 - DNA, 30 bp, Artificial Sequence
  Synthetic oligonucleotide
aatgtctgtgatgacatcacaggcacgcct

SEQ ID NO: 458619 - DNA, 30 bp, Artificial Sequence
  Synthetic oligonucleotide
gacgagtctgtggctcgtctacggacgcct

SEQ ID NO: 458620 - DNA, 30 bp, Artificial Sequence
  Synthetic oligonucleotide
tccatccattgtagcattcccaatacgcct

SEQ ID NO: 458621 - DNA, 30 bp, Artificial Sequence
  Synthetic oligonucleotide
gggtcaagtcaccggctggttccaccgcct

SEQ ID NO: 458622 - DNA, 30 bp, Artificial Sequence
  Synthetic oligonucleotide
gcaccctaggccaagccacggcgaccgcct

SEQ ID NO: 458623 - DNA, 30 bp, Artificial Sequence
  Synthetic oligonucleotide
ctggtggccgcggggcagcaccacccgcct

SEQ ID NO: 458624 - DNA, 30 bp, Artificial Sequence
  Synthetic oligonucleotide
tgctatatacctctcggaccgcagccgcct

SEQ ID NO: 458625 - DNA, 30 bp, Artificial Sequence
  Synthetic oligonucleotide
tgtacagggcccgtcgttgtaactccgcct

SEQ ID NO: 458626 - DNA, 30 bp, Artificial Sequence
  Synthetic oligonucleotide
ttttatcgtgatttacctgtagtagcgcct

SEQ ID NO: 458627 - DNA, 30 bp, Artificial Sequence
  Synthetic oligonucleotide
tgatgcggaagtacctcggggcccgcgcct

SEQ ID NO: 458628 - DNA, 30 bp, Artificial Sequence
  Synthetic oligonucleotide
gacaaggattgtttcggagactatgcgcct

SEQ ID NO: 458629 - DNA, 30 bp, Artificial Sequence
  Synthetic oligonucleotide
aatgctattattcagtactgcactgcgcct

SEQ ID NO: 458630 - DNA, 30 bp, Artificial Sequence
  Synthetic oligonucleotide
cttaggtttagacttatgggcgctgcgcct

SEQ ID NO: 458631 - DNA, 30 bp, Artificial Sequence
  Synthetic oligonucleotide
taagcttcgtttcaatgtagatcatcgcct

SEQ ID NO: 458632 - DNA, 30 bp, Artificial Sequence
  Synthetic oligonucleotide
ttgcgtgcattacccaggttcatatcgcct

SEQ ID NO: 458633 - DNA, 30 bp, Artificial Sequence
  Synthetic oligonucleotide
attcctcgtgggaacatgcgcgtatcgcct

SEQ ID NO: 458634 - DNA, 30 bp, Artificial Sequence
  Synthetic oligonucleotide
tttaagtttatgatatgaatgatctcgcct

SEQ ID NO: 458635 - DNA, 30 bp, Artificial Sequence
  Synthetic oligonucleotide
gaggcttgcatagattgcgaagagtcgcct

SEQ ID NO: 458636 - DNA, 30 bp, Artificial Sequence
  Synthetic oligonucleotide
aattgattgcacggttattggctttcgcct

SEQ ID NO: 458637 - DNA, 30 bp, Artificial Sequence
  Synthetic oligonucleotide
aaccatactagtatatgattgcgaaggcct

SEQ ID NO: 458638 - DNA, 30 bp, Artificial Sequence
  Synthetic oligonucleotide
agtctctgcgtaagacctcgaaccaggcct

SEQ ID NO: 458639 - DNA, 30 bp, Artificial Sequence
  Synthetic oligonucleotide
cataactaatgggaacctatcggcaggcct

SEQ ID NO: 458640 - DNA, 30 bp, Artificial Sequence
  Synthetic oligonucleotide
cttcaccggtacccttaaaagggcaggcct

SEQ ID NO: 458641 - DNA, 30 bp, Artificial Sequence
  Synthetic oligonucleotide
tctcgcgtgtgacacagaggtctcaggcct

SEQ ID NO: 458642 - DNA, 30 bp, Artificial Sequence
  Synthetic oligonucleotide
ggccttctgagggggaaaagcgggaggcct

SEQ ID NO: 458643 - DNA, 30 bp, Artificial Sequence
  Synthetic oligonucleotide
taatgtttaaacactgacggtttgaggcct

SEQ ID NO: 458644 - DNA, 31 bp, Artificial Sequence
  Synthetic oligonucleotide
tgcaacaatatcagggatcgctcaacggcct

SEQ ID NO: 458645 - DNA, 30 bp, Artificial Sequence
  Synthetic oligonucleotide
agcgctctctataatatctagtaacggcct

SEQ ID NO: 458646 - DNA, 30 bp, Artificial Sequence
  Synthetic oligonucleotide
gctggtgtgttgagtcgtgaaacacggcct

SEQ ID NO: 458647 - DNA, 30 bp, Artificial Sequence
  Synthetic oligonucleotide
acgacagcctttagtatatgcctacggcct

SEQ ID NO: 458648 - DNA, 30 bp, Artificial Sequence
  Synthetic oligonucleotide
tccccgggctacgaaaatactccgcggcct

SEQ ID NO: 458649 - DNA, 30 bp, Artificial Sequence
  Synthetic oligonucleotide
aatactggatttaataggaaagggcggcct

SEQ ID NO: 458650 - DNA, 30 bp, Artificial Sequence
  Synthetic oligonucleotide
tatttgtattaacaagtaaggttgcggcct

SEQ ID NO: 458651 - DNA, 30 bp, Artificial Sequence
  Synthetic oligonucleotide
atctgttggagtgcggtggactatcggcct

SEQ ID NO: 458652 - DNA, 30 bp, Artificial Sequence
  Synthetic oligonucleotide
cccgggtgcttgtaagatcccagcgggcct

SEQ ID NO: 458653 - DNA, 30 bp, Artificial Sequence
  Synthetic oligonucleotide
aatcgttacggtatactgattcgcgggcct

SEQ ID NO: 458654 - DNA, 30 bp, Artificial Sequence
  Synthetic oligonucleotide
caggctacggggtcaaaccggtaggggcct

SEQ ID NO: 458655 - DNA, 30 bp, Artificial Sequence
  Synthetic oligonucleotide
ttaaagcagaaattgtacaatcttgggcct

SEQ ID NO: 458656 - DNA, 30 bp, Artificial Sequence
  Synthetic oligonucleotide
gttgtgccggccccaggaatatgatggcct

SEQ ID NO: 458657 - DNA, 30 bp, Artificial Sequence
  Synthetic oligonucleotide
atgtagtgcccgcaactgacgtcctggcct

SEQ ID NO: 458658 - DNA, 30 bp, Artificial Sequence
  Synthetic oligonucleotide
tcttgaagaactcagccctatagctggcct

SEQ ID NO: 458659 - DNA, 30 bp, Artificial Sequence
  Synthetic oligonucleotide
tttccccgtaccatcgcaactatctggcct

SEQ ID NO: 458660 - DNA, 30 bp, Artificial Sequence
  Synthetic oligonucleotide
aaagtaccggaatagacagacgtctggcct

SEQ ID NO: 458661 - DNA, 30 bp, Artificial Sequence
  Synthetic oligonucleotide
ggcctcaaagtaagagctaagtagtggcct

SEQ ID NO: 458662 - DNA, 30 bp, Artificial Sequence
  Synthetic oligonucleotide
gaacctgcgcattgacgtgtacggtggcct

SEQ ID NO: 458663 - DNA, 30 bp, Artificial Sequence
  Synthetic oligonucleotide
cagcagcaaagaatgctagagctgtggcct

SEQ ID NO: 458664 - DNA, 30 bp, Artificial Sequence
  Synthetic oligonucleotide
ggtttgggttggcttgcgttggtgtggcct

SEQ ID NO: 458665 - DNA, 30 bp, Artificial Sequence
  Synthetic oligonucleotide
cctctcaatgctttggaggtctattggcct

SEQ ID NO: 458666 - DNA, 30 bp, Artificial Sequence
  Synthetic oligonucleotide
acactcacgcattgttctcaaacttggcct

SEQ ID NO: 458667 - DNA, 30 bp, Artificial Sequence
  Synthetic oligonucleotide
tcgttacgacaaaggtcaaattcttggcct

SEQ ID NO: 458668 - DNA, 30 bp, Artificial Sequence
  Synthetic oligonucleotide
gactcggcggccaaatttaggacaatgcct

SEQ ID NO: 458669 - DNA, 30 bp, Artificial Sequence
  Synthetic oligonucleotide
caccacagcctggcccgttgaggaatgcct

SEQ ID NO: 458670 - DNA, 30 bp, Artificial Sequence
  Synthetic oligonucleotide
cccagtacgagccctttcgcaataatgcct

SEQ ID NO: 458671 - DNA, 30 bp, Artificial Sequence
  Synthetic oligonucleotide
ttttggagggtaccatccacaaacatgcct

SEQ ID NO: 458672 - DNA, 30 bp, Artificial Sequence
  Synthetic oligonucleotide
agcggataaaggcctgagtcacgcatgcct

SEQ ID NO: 458673 - DNA, 30 bp, Artificial Sequence
  Synthetic oligonucleotide
gcgacccgcaccagcacaatcatcatgcct

SEQ ID NO: 458674 - DNA, 30 bp, Artificial Sequence
  Synthetic oligonucleotide
cagcgagacgaagcaccagtgcagatgcct

SEQ ID NO: 458675 - DNA, 30 bp, Artificial Sequence
  Synthetic oligonucleotide
tccccaccggttcttcctccgtgtatgcct

SEQ ID NO: 458676 - DNA, 30 bp, Artificial Sequence
  Synthetic oligonucleotide
tatctgtagtgtcggggattagttatgcct

SEQ ID NO: 458677 - DNA, 30 bp, Artificial Sequence
  Synthetic oligonucleotide
aaacttctttgaaaacccgattgactgcct

SEQ ID NO: 458678 - DNA, 30 bp, Artificial Sequence
  Synthetic oligonucleotide
cttggcatgtaggccatgtatgtactgcct

SEQ ID NO: 458679 - DNA, 30 bp, Artificial Sequence
  Synthetic oligonucleotide
ttctcaagcggctagcgccgagccctgcct

SEQ ID NO: 458680 - DNA, 30 bp, Artificial Sequence
  Synthetic oligonucleotide
agagtaaatatgtagccacttccgctgcct

SEQ ID NO: 458681 - DNA, 30 bp, Artificial Sequence
  Synthetic oligonucleotide
tcacctgcataaggactgagaactctgcct

SEQ ID NO: 458682 - DNA, 30 bp, Artificial Sequence
  Synthetic oligonucleotide
accgcgtctccgggcaagagctgtctgcct

SEQ ID NO: 458683 - DNA, 30 bp, Artificial Sequence
  Synthetic oligonucleotide
agcggaacgattagtgtgcttattctgcct

SEQ ID NO: 458684 - DNA, 30 bp, Artificial Sequence
  Synthetic oligonucleotide
gatctctctcagaccccggcaaatgtgcct

SEQ ID NO: 458685 - DNA, 30 bp, Artificial Sequence
  Synthetic oligonucleotide
tcctcacactcctgtagcgcgtttgtgcct

SEQ ID NO: 458686 - DNA, 30 bp, Artificial Sequence
  Synthetic oligonucleotide
catacgcgggtagatcccccatcattgcct

SEQ ID NO: 458687 - DNA, 30 bp, Artificial Sequence
  Synthetic oligonucleotide
atcacagtcatatgtcacaaacgcttgcct

SEQ ID NO: 458688 - DNA, 30 bp, Artificial Sequence
  Synthetic oligonucleotide
agtaagtcgtgcactgtgcatcgcttgcct

SEQ ID NO: 458689 - DNA, 30 bp, Artificial Sequence
  Synthetic oligonucleotide
aatggctatgatttaaggaaaggcttgcct

SEQ ID NO: 458690 - DNA, 30 bp, Artificial Sequence
  Synthetic oligonucleotide
gcttcagctggggcctaccgggcgttgcct

SEQ ID NO: 458691 - DNA, 30 bp, Artificial Sequence
  Synthetic oligonucleotide
ctcaggagctacgcagggagcgcaaatcct

SEQ ID NO: 458692 - DNA, 30 bp, Artificial Sequence
  Synthetic oligonucleotide
attccggcaatcaatcactagagcaatcct

SEQ ID NO: 458693 - DNA, 30 bp, Artificial Sequence
  Synthetic oligonucleotide
ggcatcgcgcgtatcgggacactcaatcct

SEQ ID NO: 458694 - DNA, 30 bp, Artificial Sequence
  Synthetic oligonucleotide
ctttgcactatacctgtctctgtcaatcct

SEQ ID NO: 458695 - DNA, 30 bp, Artificial Sequence
  Synthetic oligonucleotide
aaaattcacagtccaaatgccacgaatcct

SEQ ID NO: 458696 - DNA, 30 bp, Artificial Sequence
  Synthetic oligonucleotide
ggccaggcggatatgagttaccataatcct

SEQ ID NO: 458697 - DNA, 30 bp, Artificial Sequence
  Synthetic oligonucleotide
acgaccagatattcacgtctcgataatcct

SEQ ID NO: 458698 - DNA, 30 bp, Artificial Sequence
  Synthetic oligonucleotide
tggtccgtctgctaggatagtcagcatcct

SEQ ID NO: 458699 - DNA, 30 bp, Artificial Sequence
  Synthetic oligonucleotide
cgcattctgaccagcatcatggctcatcct

SEQ ID NO: 458700 - DNA, 30 bp, Artificial Sequence
  Synthetic oligonucleotide
gttatacgcgcatcttgatgatttcatcct

SEQ ID NO: 458701 - DNA, 30 bp, Artificial Sequence
  Synthetic oligonucleotide
gaaggcgttatgcagccctagatagatcct

SEQ ID NO: 458702 - DNA, 30 bp, Artificial Sequence
  Synthetic oligonucleotide
agacgatttacggactcagctaccgatcct

SEQ ID NO: 458703 - DNA, 30 bp, Artificial Sequence
  Synthetic oligonucleotide
agcggggggttattcgcatggtccgatcct

SEQ ID NO: 458704 - DNA, 30 bp, Artificial Sequence
  Synthetic oligonucleotide
cgtgacgtaaagtggatcctttaggatcct

SEQ ID NO: 458705 - DNA, 30 bp, Artificial Sequence
  Synthetic oligonucleotide
gagctacgccaaacgctaactggtgatcct

SEQ ID NO: 458706 - DNA, 30 bp, Artificial Sequence
  Synthetic oligonucleotide
cattgagacaccctcagatgtcttgatcct

SEQ ID NO: 458707 - DNA, 30 bp, Artificial Sequence
  Synthetic oligonucleotide
cctttttagccactttgcggtgttgatcct

SEQ ID NO: 458708 - DNA, 30 bp, Artificial Sequence
  Synthetic oligonucleotide
cttttctctctgctatttttctttgatcct

SEQ ID NO: 458709 - DNA, 30 bp, Artificial Sequence
  Synthetic oligonucleotide
aacgaaaacaactcagtggctcactatcct

SEQ ID NO: 458710 - DNA, 30 bp, Artificial Sequence
  Synthetic oligonucleotide
aaactgtctcgttcgtcggggaagtatcct

SEQ ID NO: 458711 - DNA, 30 bp, Artificial Sequence
  Synthetic oligonucleotide
taaatcaccctgtacaaataggagtatcct

SEQ ID NO: 458712 - DNA, 30 bp, Artificial Sequence
  Synthetic oligonucleotide
aaagaacttccgtaactggcaatgtatcct

SEQ ID NO: 458713 - DNA, 30 bp, Artificial Sequence
  Synthetic oligonucleotide
ataacagggtgtagtttagctccttatcct

SEQ ID NO: 458714 - DNA, 30 bp, Artificial Sequence
  Synthetic oligonucleotide
aatcaccgagcttgcgtcgaagcttatcct

SEQ ID NO: 458715 - DNA, 30 bp, Artificial Sequence
  Synthetic oligonucleotide
ctttaagcagtgtcacgcggaatttatcct

SEQ ID NO: 458716 - DNA, 30 bp, Artificial Sequence
  Synthetic oligonucleotide
catactggcgtgttttgctgaaaaactcct

SEQ ID NO: 458717 - DNA, 30 bp, Artificial Sequence
  Synthetic oligonucleotide
aagcaagtgagggcttagagagaaactcct

SEQ ID NO: 458718 - DNA, 30 bp, Artificial Sequence
  Synthetic oligonucleotide
attaaattattaacaccagtggacactcct

SEQ ID NO: 458719 - DNA, 30 bp, Artificial Sequence
  Synthetic oligonucleotide
atctggaagtggctagtcgaaggcactcct

SEQ ID NO: 458720 - DNA, 30 bp, Artificial Sequence
  Synthetic oligonucleotide
gaaatcgcaacacagagatgagtcactcct

SEQ ID NO: 458721 - DNA, 30 bp, Artificial Sequence
  Synthetic oligonucleotide
caacatcgaggcaagatgtttatgactcct

SEQ ID NO: 458722 - DNA, 30 bp, Artificial Sequence
  Synthetic oligonucleotide
gaatagtgaaccttgaccagtgatactcct

SEQ ID NO: 458723 - DNA, 30 bp, Artificial Sequence
  Synthetic oligonucleotide
gcaatttttcacacgtacgatggtactcct

SEQ ID NO: 458724 - DNA, 30 bp, Artificial Sequence
  Synthetic oligonucleotide
cggaaacgattccatcaggagacacctcct

SEQ ID NO: 458725 - DNA, 30 bp, Artificial Sequence
  Synthetic oligonucleotide
tccgggtgtcaggcaagtgagggccctcct

SEQ ID NO: 458726 - DNA, 30 bp, Artificial Sequence
  Synthetic oligonucleotide
gagtggagagcccgaatttccctccctcct

SEQ ID NO: 458727 - DNA, 30 bp, Artificial Sequence
  Synthetic oligonucleotide
tttttgttctgagaacgcgcggttcctcct

SEQ ID NO: 458728 - DNA, 30 bp, Artificial Sequence
  Synthetic oligonucleotide
taggcgccggctgtccgacgcgtagctcct

SEQ ID NO: 458729 - DNA, 30 bp, Artificial Sequence
  Synthetic oligonucleotide
cctagtcctaattctctactactcgctcct

SEQ ID NO: 458730 - DNA, 30 bp, Artificial Sequence
  Synthetic oligonucleotide
gcgtccataaatttttagggtctcgctcct

SEQ ID NO: 458731 - DNA, 30 bp, Artificial Sequence
  Synthetic oligonucleotide
gcctatatagcgcgagcttcgcaggctcct

SEQ ID NO: 458732 - DNA, 30 bp, Artificial Sequence
  Synthetic oligonucleotide
catatgtgtacggaactgaaggaatctcct

SEQ ID NO: 458733 - DNA, 30 bp, Artificial Sequence
  Synthetic oligonucleotide
tagaactaatcctgctggtcttcatctcct

SEQ ID NO: 458734 - DNA, 30 bp, Artificial Sequence
  Synthetic oligonucleotide
gattctgtatcatgtcgatgaaactctcct

SEQ ID NO: 458735 - DNA, 30 bp, Artificial Sequence
  Synthetic oligonucleotide
tgcgccgtaacttgtgattggcgctctcct

SEQ ID NO: 458736 - DNA, 30 bp, Artificial Sequence
  Synthetic oligonucleotide
atcttgttaactggacagtccgagtctcct

SEQ ID NO: 458737 - DNA, 30 bp, Artificial Sequence
  Synthetic oligonucleotide
cgcaacacaccgactctgcgtgtgtctcct

SEQ ID NO: 458738 - DNA, 30 bp, Artificial Sequence
  Synthetic oligonucleotide
gtcggacaccccacttgtgcgttgtctcct

SEQ ID NO: 458739 - DNA, 30 bp, Artificial Sequence
  Synthetic oligonucleotide
cggcagccacaaggacggctccattctcct

SEQ ID NO: 458740 - DNA, 30 bp, Artificial Sequence
  Synthetic oligonucleotide
gcccactcatgggtaccatgaagttctcct

SEQ ID NO: 458741 - DNA, 30 bp, Artificial Sequence
  Synthetic oligonucleotide
ttatctcgaataggtacacaaatttctcct

SEQ ID NO: 458742 - DNA, 30 bp, Artificial Sequence
  Synthetic oligonucleotide
aaattaagcgataattcgatggtttctcct

SEQ ID NO: 458743 - DNA, 30 bp, Artificial Sequence
  Synthetic oligonucleotide
ttcggtgagtagtcatagtattcaagtcct

SEQ ID NO: 458744 - DNA, 30 bp, Artificial Sequence
  Synthetic oligonucleotide
tccgtaacgctcaagcccaatgggagtcct

SEQ ID NO: 458745 - DNA, 30 bp, Artificial Sequence
  Synthetic oligonucleotide
ttgtgcagcgcggcacttgctcgtagtcct

SEQ ID NO: 458746 - DNA, 30 bp, Artificial Sequence
  Synthetic oligonucleotide
aatctcggttcagaatttattgtacgtcct

SEQ ID NO: 458747 - DNA, 30 bp, Artificial Sequence
  Synthetic oligonucleotide
gggaggcggatcaagtacaaggaaggtcct

SEQ ID NO: 458748 - DNA, 30 bp, Artificial Sequence
  Synthetic oligonucleotide
acgatcagcccatcggacgtcgtaggtcct

SEQ ID NO: 458749 - DNA, 30 bp, Artificial Sequence
  Synthetic oligonucleotide
tgcagtatcgtgattttcatgcagggtcct

SEQ ID NO: 458750 - DNA, 30 bp, Artificial Sequence
  Synthetic oligonucleotide
accttgggcggcggctggccttagggtcct

SEQ ID NO: 458751 - DNA, 30 bp, Artificial Sequence
  Synthetic oligonucleotide
agttggcacgtagggcctcacagtggtcct

SEQ ID NO: 458752 - DNA, 30 bp, Artificial Sequence
  Synthetic oligonucleotide
gtgcggagatactagtcgcaatttggtcct

SEQ ID NO: 458753 - DNA, 30 bp, Artificial Sequence
  Synthetic oligonucleotide
cggcatttacgttggtgtaacatatgtcct

SEQ ID NO: 458754 - DNA, 30 bp, Artificial Sequence
  Synthetic oligonucleotide
cacattgtaaggctgtaccttacctgtcct

SEQ ID NO: 458755 - DNA, 30 bp, Artificial Sequence
  Synthetic oligonucleotide
gccgagagaaatgtaggagaaccgtgtcct

SEQ ID NO: 458756 - DNA, 30 bp, Artificial Sequence
  Synthetic oligonucleotide
atatagccggatacagcttgacattgtcct

SEQ ID NO: 458757 - DNA, 30 bp, Artificial Sequence
  Synthetic oligonucleotide
taagcggctctgtattccgtttgttgtcct

SEQ ID NO: 458758 - DNA, 30 bp, Artificial Sequence
  Synthetic oligonucleotide
cgtaaaagctttcttcctgaagtttgtcct

SEQ ID NO: 458759 - DNA, 30 bp, Artificial Sequence
  Synthetic oligonucleotide
aaaaggaattaatctttagtatcaattcct

SEQ ID NO: 458760 - DNA, 30 bp, Artificial Sequence
  Synthetic oligonucleotide
caggtggaatttctcacccgcgccattcct

SEQ ID NO: 458761 - DNA, 30 bp, Artificial Sequence
  Synthetic oligonucleotide
gctagaggccctatacgctataggattcct

SEQ ID NO: 458762 - DNA, 30 bp, Artificial Sequence
  Synthetic oligonucleotide
ttcggcagctatcgttctttaattattcct

SEQ ID NO: 458763 - DNA, 30 bp, Artificial Sequence
  Synthetic oligonucleotide
actagaaaccgattcagatcctcacttcct

SEQ ID NO: 458764 - DNA, 30 bp, Artificial Sequence
  Synthetic oligonucleotide
gtcgtgtcttgcccgtgacttctacttcct

SEQ ID NO: 458765 - DNA, 30 bp, Artificial Sequence
  Synthetic oligonucleotide
acaagcaaaccgcaggttatagcccttcct

SEQ ID NO: 458766 - DNA, 30 bp, Artificial Sequence
  Synthetic oligonucleotide
tatcttggaggtcactataacatccttcct

SEQ ID NO: 458767 - DNA, 30 bp, Artificial Sequence
  Synthetic oligonucleotide
ctcaaccgggcagccaaccgaattcttcct

SEQ ID NO: 458768 - DNA, 30 bp, Artificial Sequence
  Synthetic oligonucleotide
acggaaccgggtgtggtgagtcttcttcct

SEQ ID NO: 458769 - DNA, 30 bp, Artificial Sequence
  Synthetic oligonucleotide
ccacagacgacgcgcgcctgtacagttcct

SEQ ID NO: 458770 - DNA, 30 bp, Artificial Sequence
  Synthetic oligonucleotide
tcgcgcttgaaagccacggcatccgttcct

SEQ ID NO: 458771 - DNA, 30 bp, Artificial Sequence
  Synthetic oligonucleotide
tctttcacgtcctcgatttcggtcgttcct

SEQ ID NO: 458772 - DNA, 30 bp, Artificial Sequence
  Synthetic oligonucleotide
ggcactaacgtcgcgtgctacaaggttcct

SEQ ID NO: 458773 - DNA, 30 bp, Artificial Sequence
  Synthetic oligonucleotide
attttcacttgtgctaggacataggttcct

SEQ ID NO: 458774 - DNA, 30 bp, Artificial Sequence
  Synthetic oligonucleotide
agcgccttagcaagtattcgcgatgttcct

SEQ ID NO: 458775 - DNA, 30 bp, Artificial Sequence
  Synthetic oligonucleotide
ggtatataggctcagcagacctctgttcct

SEQ ID NO: 458776 - DNA, 30 bp, Artificial Sequence
  Synthetic oligonucleotide
tgcaagcactgttttcaccgtagtgttcct

SEQ ID NO: 458777 - DNA, 30 bp, Artificial Sequence
  Synthetic oligonucleotide
ccgcttatgccactgatcagataatttcct

SEQ ID NO: 458778 - DNA, 30 bp, Artificial Sequence
  Synthetic oligonucleotide
acatgtttagaaagccgaaaggcatttcct

SEQ ID NO: 458779 - DNA, 30 bp, Artificial Sequence
  Synthetic oligonucleotide
gagtcaaattaccgcttttatctatttcct

SEQ ID NO: 458780 - DNA, 30 bp, Artificial Sequence
  Synthetic oligonucleotide
gagtaatgaattgaatcagccagctttcct

SEQ ID NO: 458781 - DNA, 30 bp, Artificial Sequence
  Synthetic oligonucleotide
cgcgagattgcaactacgcggaggtttcct

SEQ ID NO: 458782 - DNA, 30 bp, Artificial Sequence
  Synthetic oligonucleotide
agatggttattagtccaatattggtttcct

SEQ ID NO: 458783 - DNA, 30 bp, Artificial Sequence
  Synthetic oligonucleotide
atttttagaacagatgagtccggttttcct

SEQ ID NO: 458784 - DNA, 30 bp, Artificial Sequence
  Synthetic oligonucleotide
tcccctgagattcgctgtcagcgaaaagct

SEQ ID NO: 458785 - DNA, 30 bp, Artificial Sequence
  Synthetic oligonucleotide
tcacattctaagctgtctagtttaaaagct

SEQ ID NO: 458786 - DNA, 30 bp, Artificial Sequence
  Synthetic oligonucleotide
tacatggctctcattttagctatcaaagct

SEQ ID NO: 458787 - DNA, 30 bp, Artificial Sequence
  Synthetic oligonucleotide
cttaacgtgagcctggggcttgagaaagct

SEQ ID NO: 458788 - DNA, 30 bp, Artificial Sequence
  Synthetic oligonucleotide
gtattgggtatacttacggacactaaagct

SEQ ID NO: 458789 - DNA, 30 bp, Artificial Sequence
  Synthetic oligonucleotide
acatcttgcttgatgatggaacctaaagct

SEQ ID NO: 458790 - DNA, 30 bp, Artificial Sequence
  Synthetic oligonucleotide
cccatggggcccaagtatgtgcctaaagct

SEQ ID NO: 458791 - DNA, 30 bp, Artificial Sequence
  Synthetic oligonucleotide
ctctgactcgtggacactagctgtaaagct

SEQ ID NO: 458792 - DNA, 30 bp, Artificial Sequence
  Synthetic oligonucleotide
tagttggatattagctctaatcttaaagct

SEQ ID NO: 458793 - DNA, 30 bp, Artificial Sequence
  Synthetic oligonucleotide
tacgtctagctcatctctgacatacaagct

SEQ ID NO: 458794 - DNA, 30 bp, Artificial Sequence
  Synthetic oligonucleotide
acaccagaacccgatggtatctgccaagct

SEQ ID NO: 458795 - DNA, 31 bp, Artificial Sequence
  Synthetic oligonucleotide
ttcccttcatcctggaagctactggcaagct

SEQ ID NO: 458796 - DNA, 30 bp, Artificial Sequence
  Synthetic oligonucleotide
aaaagtgcgaaatatttggttaatcaagct

SEQ ID NO: 458797 - DNA, 30 bp, Artificial Sequence
  Synthetic oligonucleotide
aacacccatgaaggtgtatcgattcaagct

SEQ ID NO: 458798 - DNA, 30 bp, Artificial Sequence
  Synthetic oligonucleotide
ggcagaactcagcgcttttcgtaagaagct

SEQ ID NO: 458799 - DNA, 30 bp, Artificial Sequence
  Synthetic oligonucleotide
gacaagatagcaagataagtcggagaagct

SEQ ID NO: 458800 - DNA, 30 bp, Artificial Sequence
  Synthetic oligonucleotide
cagatactctaattttggctcctagaagct

SEQ ID NO: 458801 - DNA, 30 bp, Artificial Sequence
  Synthetic oligonucleotide
acactccatgattggagcgaagacgaagct

SEQ ID NO: 458802 - DNA, 30 bp, Artificial Sequence
  Synthetic oligonucleotide
ttgttacatactgtatgccgttccgaagct

SEQ ID NO: 458803 - DNA, 30 bp, Artificial Sequence
  Synthetic oligonucleotide
cacaggatcattctagaccaattcgaagct

SEQ ID NO: 458804 - DNA, 30 bp, Artificial Sequence
  Synthetic oligonucleotide
tttaagggatataatggatctattgaagct

SEQ ID NO: 458805 - DNA, 30 bp, Artificial Sequence
  Synthetic oligonucleotide
ctcctatatatcgtgccaccgcagtaagct

SEQ ID NO: 458806 - DNA, 30 bp, Artificial Sequence
  Synthetic oligonucleotide
tctttgtatcgacatcgcggcgattaagct

SEQ ID NO: 458807 - DNA, 30 bp, Artificial Sequence
  Synthetic oligonucleotide
taaacctgctgttcaaataatgtaacagct

SEQ ID NO: 458808 - DNA, 30 bp, Artificial Sequence
  Synthetic oligonucleotide
ggtgtcgtcttctatgtaagtcacacagct

SEQ ID NO: 458809 - DNA, 30 bp, Artificial Sequence
  Synthetic oligonucleotide
cgactggtttggaatgaggcagccacagct

SEQ ID NO: 458810 - DNA, 30 bp, Artificial Sequence
  Synthetic oligonucleotide
gagaggaacccacgcgggtatcagacagct

SEQ ID NO: 458811 - DNA, 30 bp, Artificial Sequence
  Synthetic oligonucleotide
aacggtccaaagtttgttatagggacagct

SEQ ID NO: 458812 - DNA, 30 bp, Artificial Sequence
  Synthetic oligonucleotide
ataggggtcattaggttaaaacttacagct

SEQ ID NO: 458813 - DNA, 30 bp, Artificial Sequence
  Synthetic oligonucleotide
tagtcgatgagaaacggataccggccagct

SEQ ID NO: 458814 - DNA, 29 bp, Artificial Sequence
  Synthetic oligonucleotide
cccacggacgagctcgctcccgtccagct

SEQ ID NO: 458815 - DNA, 30 bp, Artificial Sequence
  Synthetic oligonucleotide
gaggagcagtttatacagaacggagcagct

SEQ ID NO: 458816 - DNA, 30 bp, Artificial Sequence
  Synthetic oligonucleotide
ttaccgttgttgtccaagaaacacgcagct

SEQ ID NO: 458817 - DNA, 30 bp, Artificial Sequence
  Synthetic oligonucleotide
ttgagagaagtaaagggggagcacgcagct

SEQ ID NO: 458818 - DNA, 30 bp, Artificial Sequence
  Synthetic oligonucleotide
ttctacacgcattccaggagatacgcagct

SEQ ID NO: 458819 - DNA, 30 bp, Artificial Sequence
  Synthetic oligonucleotide
aattagtaaagcactatcactcccgcagct

SEQ ID NO: 458820 - DNA, 30 bp, Artificial Sequence
  Synthetic oligonucleotide
tcggaatggcgagccaaacggtccgcagct

SEQ ID NO: 458821 - DNA, 30 bp, Artificial Sequence
  Synthetic oligonucleotide
ttcaaaagcgggactcctgggctcgcagct

SEQ ID NO: 458822 - DNA, 30 bp, Artificial Sequence
  Synthetic oligonucleotide
tgacctcacgatgtagttcggtaggcagct

SEQ ID NO: 458823 - DNA, 30 bp, Artificial Sequence
  Synthetic oligonucleotide
ctaaccgcagcctcagtacgcacggcagct

SEQ ID NO: 458824 - DNA, 30 bp, Artificial Sequence
  Synthetic oligonucleotide
atcggtggatcagataactagaggtcagct

SEQ ID NO: 458825 - DNA, 30 bp, Artificial Sequence
  Synthetic oligonucleotide
atgttgcaggtccttatggaacattcagct

SEQ ID NO: 458826 - DNA, 30 bp, Artificial Sequence
  Synthetic oligonucleotide
ttattaggccctgttccgaatcattcagct

SEQ ID NO: 458827 - DNA, 30 bp, Artificial Sequence
  Synthetic oligonucleotide
tttgggataatctcggggagaaaaagagct

SEQ ID NO: 458828 - DNA, 30 bp, Artificial Sequence
  Synthetic oligonucleotide
ttcctcacgcacaacgtcaataaaagagct

SEQ ID NO: 458829 - DNA, 30 bp, Artificial Sequence
  Synthetic oligonucleotide
gtatcactcgaatccgacagaccaagagct

SEQ ID NO: 458830 - DNA, 30 bp, Artificial Sequence
  Synthetic oligonucleotide
gtgctgtgggcttgtgtctgaagcagagct

SEQ ID NO: 458831 - DNA, 30 bp, Artificial Sequence
  Synthetic oligonucleotide
ttgaacgtttcaattcagggctagagagct

SEQ ID NO: 458832 - DNA, 30 bp, Artificial Sequence
  Synthetic oligonucleotide
aaataagtaactacctgtggcagccgagct

SEQ ID NO: 458833 - DNA, 29 bp, Artificial Sequence
  Synthetic oligonucleotide
gacgtagctagaaggtctgactccgagct

SEQ ID NO: 458834 - DNA, 30 bp, Artificial Sequence
  Synthetic oligonucleotide
ttaaaggtattatgtatagctgtccgagct

SEQ ID NO: 458835 - DNA, 30 bp, Artificial Sequence
  Synthetic oligonucleotide
tggggggcacaggttcggactcagcgagct

SEQ ID NO: 458836 - DNA, 30 bp, Artificial Sequence
  Synthetic oligonucleotide
aatctgcgggggccttttagatggcgagct

SEQ ID NO: 458837 - DNA, 30 bp, Artificial Sequence
  Synthetic oligonucleotide
tgtgatgataatcaacataagtggcgagct

SEQ ID NO: 458838 - DNA, 30 bp, Artificial Sequence
  Synthetic oligonucleotide
ttatcggcgcaagtactatctatgcgagct

SEQ ID NO: 458839 - DNA, 30 bp, Artificial Sequence
  Synthetic oligonucleotide
gcaatctgttgttagaccaactaaggagct

SEQ ID NO: 458840 - DNA, 30 bp, Artificial Sequence
  Synthetic oligonucleotide
cgccattctgagtgtgtatgcgacggagct

SEQ ID NO: 458841 - DNA, 30 bp, Artificial Sequence
  Synthetic oligonucleotide
tcaagacgcggccaacgacgaagcggagct

SEQ ID NO: 458842 - DNA, 30 bp, Artificial Sequence
  Synthetic oligonucleotide
ccacgcacagcgtggtcggggtgcggagct

SEQ ID NO: 458843 - DNA, 30 bp, Artificial Sequence
  Synthetic oligonucleotide
tagtataatgacccagcacgtcatggagct

SEQ ID NO: 458844 - DNA, 30 bp, Artificial Sequence
  Synthetic oligonucleotide
tagttgagatgatgtataaggccgtgagct

SEQ ID NO: 458845 - DNA, 30 bp, Artificial Sequence
  Synthetic oligonucleotide
gtacgtcataacattggaaatcggtgagct

SEQ ID NO: 458846 - DNA, 30 bp, Artificial Sequence
  Synthetic oligonucleotide
ataatctgagatgcgtacggcttgtgagct

SEQ ID NO: 458847 - DNA, 30 bp, Artificial Sequence
  Synthetic oligonucleotide
taccataagaggcaggacgtataaatagct

SEQ ID NO: 458848 - DNA, 30 bp, Artificial Sequence
  Synthetic oligonucleotide
gagtgtctatgcatcgaacacgtaatagct

SEQ ID NO: 458849 - DNA, 30 bp, Artificial Sequence
  Synthetic oligonucleotide
gaatctagaccgagctacgtggccatagct

SEQ ID NO: 458850 - DNA, 30 bp, Artificial Sequence
  Synthetic oligonucleotide
taaaggcggtagtgtcgcgcggtcatagct

SEQ ID NO: 458851 - DNA, 30 bp, Artificial Sequence
  Synthetic oligonucleotide
caagcgcacgtccgcttaggacagatagct

SEQ ID NO: 458852 - DNA, 30 bp, Artificial Sequence
  Synthetic oligonucleotide
aacagtgctgacatcacgccctcgatagct

SEQ ID NO: 458853 - DNA, 30 bp, Artificial Sequence
  Synthetic oligonucleotide
gctatagggcgtcttgttgctaatatagct

SEQ ID NO: 458854 - DNA, 30 bp, Artificial Sequence
  Synthetic oligonucleotide
cccagtgccgcgcactaggtaccactagct

SEQ ID NO: 458855 - DNA, 30 bp, Artificial Sequence
  Synthetic oligonucleotide
gcattgggtcacgagataagcttcctagct

SEQ ID NO: 458856 - DNA, 30 bp, Artificial Sequence
  Synthetic oligonucleotide
cttgtactcttgatgaaataccctctagct

SEQ ID NO: 458857 - DNA, 30 bp, Artificial Sequence
  Synthetic oligonucleotide
tagatctgcagttagaggattaaagtagct

SEQ ID NO: 458858 - DNA, 30 bp, Artificial Sequence
  Synthetic oligonucleotide
ggcgcttggcgatgtcctccgggagtagct

SEQ ID NO: 458859 - DNA, 30 bp, Artificial Sequence
  Synthetic oligonucleotide
aatgtcctcgcagtgagtgcgggagtagct

SEQ ID NO: 458860 - DNA, 30 bp, Artificial Sequence
  Synthetic oligonucleotide
tgtatacatcgaggcggctatgacgtagct

SEQ ID NO: 458861 - DNA, 30 bp, Artificial Sequence
  Synthetic oligonucleotide
gcacgaccccggcggttacggtacgtagct

SEQ ID NO: 458862 - DNA, 30 bp, Artificial Sequence
  Synthetic oligonucleotide
tggcgcgggattgagtatagggccgtagct

SEQ ID NO: 458863 - DNA, 30 bp, Artificial Sequence
  Synthetic oligonucleotide
agccagggctttagcatggtaccggtagct

SEQ ID NO: 458864 - DNA, 30 bp, Artificial Sequence
  Synthetic oligonucleotide
ttgcgaaactcagcaaattacactgtagct

SEQ ID NO: 458865 - DNA, 30 bp, Artificial Sequence
  Synthetic oligonucleotide
cagattttttacagcggggtcgaattagct

SEQ ID NO: 458866 - DNA, 30 bp, Artificial Sequence
  Synthetic oligonucleotide
aatcacgggattatgccctgtccattagct

SEQ ID NO: 458867 - DNA, 30 bp, Artificial Sequence
  Synthetic oligonucleotide
atcaccctgtgctttgatcggctattagct

SEQ ID NO: 458868 - DNA, 30 bp, Artificial Sequence
  Synthetic oligonucleotide
tggttgagcaaactcaagaacgtattagct

SEQ ID NO: 458869 - DNA, 30 bp, Artificial Sequence
  Synthetic oligonucleotide
gtttaacattgagataacttatctttagct

SEQ ID NO: 458870 - DNA, 30 bp, Artificial Sequence
  Synthetic oligonucleotide
aatcatctaaacatcatgatcacgaacgct

SEQ ID NO: 458871 - DNA, 30 bp, Artificial Sequence
  Synthetic oligonucleotide
ccgagttaaggattccagtcatcgaacgct

SEQ ID NO: 458872 - DNA, 30 bp, Artificial Sequence
  Synthetic oligonucleotide
ttcaacacaagaaggccacgctataacgct

SEQ ID NO: 458873 - DNA, 30 bp, Artificial Sequence
  Synthetic oligonucleotide
tccacctacgacgcaagtgaagctaacgct

SEQ ID NO: 458874 - DNA, 30 bp, Artificial Sequence
  Synthetic oligonucleotide
ttggtatgggttgtctcggaggctaacgct

SEQ ID NO: 458875 - DNA, 30 bp, Artificial Sequence
  Synthetic oligonucleotide
gtcaaagtcaccaagattgtgggtaacgct

SEQ ID NO: 458876 - DNA, 31 bp, Artificial Sequence
  Synthetic oligonucleotide
gtgtacaattgataacattttctcacacgct

SEQ ID NO: 458877 - DNA, 30 bp, Artificial Sequence
  Synthetic oligonucleotide
tcctgatagctcctgcgtaatggacacgct

SEQ ID NO: 458878 - DNA, 30 bp, Artificial Sequence
  Synthetic oligonucleotide
ctcccctattctcgggcccaatgccacgct

SEQ ID NO: 458879 - DNA, 31 bp, Artificial Sequence
  Synthetic oligonucleotide
tcgaccggtgttttgctctcctacgcacgct

SEQ ID NO: 458880 - DNA, 30 bp, Artificial Sequence
  Synthetic oligonucleotide
aagtgttagtatagtgatgtgatgcacgct

SEQ ID NO: 458881 - DNA, 30 bp, Artificial Sequence
  Synthetic oligonucleotide
atgtgaccgacagagcaatcgcctcacgct

SEQ ID NO: 458882 - DNA, 30 bp, Artificial Sequence
  Synthetic oligonucleotide
catattgttggaattaccgtgtctcacgct

SEQ ID NO: 458883 - DNA, 30 bp, Artificial Sequence
  Synthetic oligonucleotide
ccggacgcggatttctgcccacgtcacgct

SEQ ID NO: 458884 - DNA, 30 bp, Artificial Sequence
  Synthetic oligonucleotide
gcgttgacggtagatggtaagtcagacgct

SEQ ID NO: 458885 - DNA, 30 bp, Artificial Sequence
  Synthetic oligonucleotide
gcctgcatctttatcggataattagacgct

SEQ ID NO: 458886 - DNA, 28 bp, Artificial Sequence
  Synthetic oligonucleotide
atcgctagtaatcccaggattagacgct

SEQ ID NO: 458887 - DNA, 30 bp, Artificial Sequence
  Synthetic oligonucleotide
ccaaatgactcagtatgacaataggacgct

SEQ ID NO: 458888 - DNA, 30 bp, Artificial Sequence
  Synthetic oligonucleotide
cgtcatgctacgagctaggagcatgacgct

SEQ ID NO: 458889 - DNA, 30 bp, Artificial Sequence
  Synthetic oligonucleotide
aggcatgaccatcccgcgagcacatacgct

SEQ ID NO: 458890 - DNA, 30 bp, Artificial Sequence
  Synthetic oligonucleotide
gtcttttaagctgaagcctaaaggtacgct

SEQ ID NO: 458891 - DNA, 30 bp, Artificial Sequence
  Synthetic oligonucleotide
atagtgccccttgtaaatttgggaaccgct

SEQ ID NO: 458892 - DNA, 30 bp, Artificial Sequence
  Synthetic oligonucleotide
gactcagcctctcccgtgatgtgtaccgct

SEQ ID NO: 458893 - DNA, 30 bp, Artificial Sequence
  Synthetic oligonucleotide
aagaggggcatatgccggtgtcgacccgct

SEQ ID NO: 458894 - DNA, 30 bp, Artificial Sequence
  Synthetic oligonucleotide
ccccggcaccggggttttaatacccccgct

SEQ ID NO: 458895 - DNA, 30 bp, Artificial Sequence
  Synthetic oligonucleotide
gccgccagtcaggaaatgatacagcccgct

SEQ ID NO: 458896 - DNA, 30 bp, Artificial Sequence
  Synthetic oligonucleotide
tgagcgtacctccggacttgagggcccgct

SEQ ID NO: 458897 - DNA, 30 bp, Artificial Sequence
  Synthetic oligonucleotide
ggaatcagttagcggaactcgttagccgct

SEQ ID NO: 458898 - DNA, 30 bp, Artificial Sequence
  Synthetic oligonucleotide
tgattccccaatgcggagcagcacgccgct

SEQ ID NO: 458899 - DNA, 30 bp, Artificial Sequence
  Synthetic oligonucleotide
tagccctgtgtctgtctacatcaggccgct

SEQ ID NO: 458900 - DNA, 30 bp, Artificial Sequence
  Synthetic oligonucleotide
gctataggtaaaagccgtagttaggccgct

SEQ ID NO: 458901 - DNA, 30 bp, Artificial Sequence
  Synthetic oligonucleotide
atatcctcgattcgcgaggcccctgccgct

SEQ ID NO: 458902 - DNA, 30 bp, Artificial Sequence
  Synthetic oligonucleotide
tatacctttgggttatcgtcgcttgccgct

SEQ ID NO: 458903 - DNA, 30 bp, Artificial Sequence
  Synthetic oligonucleotide
ttgcagctagcttattcagggcttgccgct

SEQ ID NO: 458904 - DNA, 30 bp, Artificial Sequence
  Synthetic oligonucleotide
aagccctttaaaacctgtaagcaatccgct

SEQ ID NO: 458905 - DNA, 30 bp, Artificial Sequence
  Synthetic oligonucleotide
gtttagataggtggcctaccatgctccgct

SEQ ID NO: 458906 - DNA, 30 bp, Artificial Sequence
  Synthetic oligonucleotide
tcaaatgtcgcgcgatgttatcgaagcgct

SEQ ID NO: 458907 - DNA, 30 bp, Artificial Sequence
  Synthetic oligonucleotide
gtgcccgtcggagcattcggaacgagcgct

SEQ ID NO: 458908 - DNA, 30 bp, Artificial Sequence
  Synthetic oligonucleotide
tcatatgtcacgtgggtccgttcgagcgct

SEQ ID NO: 458909 - DNA, 30 bp, Artificial Sequence
  Synthetic oligonucleotide
gagttacgaatcatgataaattctagcgct

SEQ ID NO: 458910 - DNA, 30 bp, Artificial Sequence
  Synthetic oligonucleotide
gaacgatatcaaggtcgctacagtagcgct

SEQ ID NO: 458911 - DNA, 30 bp, Artificial Sequence
  Synthetic oligonucleotide
agggctgactcggcgagtggggttagcgct

SEQ ID NO: 458912 - DNA, 30 bp, Artificial Sequence
  Synthetic oligonucleotide
acgaatggatctatatatggctaacgcgct

SEQ ID NO: 458913 - DNA, 30 bp, Artificial Sequence
  Synthetic oligonucleotide
gcgtactggcgaagtcgctctgcacgcgct

SEQ ID NO: 458914 - DNA, 30 bp, Artificial Sequence
  Synthetic oligonucleotide
gcgcccttacggtttttcgcgagacgcgct

SEQ ID NO: 458915 - DNA, 30 bp, Artificial Sequence
  Synthetic oligonucleotide
agcttggactctactacggtgggacgcgct

SEQ ID NO: 458916 - DNA, 30 bp, Artificial Sequence
  Synthetic oligonucleotide
ttgcacgcgacgggtataactttccgcgct

SEQ ID NO: 458917 - DNA, 30 bp, Artificial Sequence
  Synthetic oligonucleotide
tagggacgaccaagcgaaaggcagcgcgct

SEQ ID NO: 458918 - DNA, 30 bp, Artificial Sequence
  Synthetic oligonucleotide
tcgagcggcgggagtctattagagcgcgct

SEQ ID NO: 458919 - DNA, 30 bp, Artificial Sequence
  Synthetic oligonucleotide
ctagttacgtacccggcgcgtcggcgcgct

SEQ ID NO: 458920 - DNA, 30 bp, Artificial Sequence
  Synthetic oligonucleotide
tatgggatcattcaaggcgggaatcgcgct

SEQ ID NO: 458921 - DNA, 30 bp, Artificial Sequence
  Synthetic oligonucleotide
actcttcgattgcacccttatgttcgcgct

SEQ ID NO: 458922 - DNA, 30 bp, Artificial Sequence
  Synthetic oligonucleotide
gacggctacattatattctgcaaaggcgct

SEQ ID NO: 458923 - DNA, 30 bp, Artificial Sequence
  Synthetic oligonucleotide
ttctcgaatgggggcaacattccaggcgct

SEQ ID NO: 458924 - DNA, 30 bp, Artificial Sequence
  Synthetic oligonucleotide
aaggggctggtggccaggaagcgcggcgct

SEQ ID NO: 458925 - DNA, 30 bp, Artificial Sequence
  Synthetic oligonucleotide
taggcgatcggtgctacccaatgcggcgct

SEQ ID NO: 458926 - DNA, 30 bp, Artificial Sequence
  Synthetic oligonucleotide
ggctcttaagaatagaacttatgtggcgct

SEQ ID NO: 458927 - DNA, 30 bp, Artificial Sequence
  Synthetic oligonucleotide
cacatacctgtcatgcgtcttattggcgct

SEQ ID NO: 458928 - DNA, 30 bp, Artificial Sequence
  Synthetic oligonucleotide
gttatcgttaacaggcttagagttggcgct

SEQ ID NO: 458929 - DNA, 30 bp, Artificial Sequence
  Synthetic oligonucleotide
acaataggcataataaacttagttggcgct

SEQ ID NO: 458930 - DNA, 30 bp, Artificial Sequence
  Synthetic oligonucleotide
tttagtagtacctacagtctgaaatgcgct

SEQ ID NO: 458931 - DNA, 30 bp, Artificial Sequence
  Synthetic oligonucleotide
accgttaattgtatcgctatccaatgcgct

SEQ ID NO: 458932 - DNA, 30 bp, Artificial Sequence
  Synthetic oligonucleotide
ccattgagactcggtcctttggaatgcgct

SEQ ID NO: 458933 - DNA, 30 bp, Artificial Sequence
  Synthetic oligonucleotide
gctctttactggatgacccatacctgcgct

SEQ ID NO: 458934 - DNA, 30 bp, Artificial Sequence
  Synthetic oligonucleotide
ctgcgaaaggttctttagctgacgtgcgct

SEQ ID NO: 458935 - DNA, 30 bp, Artificial Sequence
  Synthetic oligonucleotide
gaaagcggagtctgcgtagcagtttgcgct

SEQ ID NO: 458936 - DNA, 30 bp, Artificial Sequence
  Synthetic oligonucleotide
tgcggtcggacttggggaaggacgatcgct

SEQ ID NO: 458937 - DNA, 30 bp, Artificial Sequence
  Synthetic oligonucleotide
gcatgcggctttaggggggatacgatcgct

SEQ ID NO: 458938 - DNA, 30 bp, Artificial Sequence
  Synthetic oligonucleotide
atgagttgagatcaccccagtgcactcgct

SEQ ID NO: 458939 - DNA, 30 bp, Artificial Sequence
  Synthetic oligonucleotide
acgagtccagtggtaacatgatgactcgct

SEQ ID NO: 458940 - DNA, 30 bp, Artificial Sequence
  Synthetic oligonucleotide
atactaccacctcgatgacgacgcctcgct

SEQ ID NO: 458941 - DNA, 30 bp, Artificial Sequence
  Synthetic oligonucleotide
tacacacgtctagtacttattctgctcgct

SEQ ID NO: 458942 - DNA, 30 bp, Artificial Sequence
  Synthetic oligonucleotide
gccctacggtacgcgccgtctactctcgct

SEQ ID NO: 458943 - DNA, 30 bp, Artificial Sequence
  Synthetic oligonucleotide
agacgcggcctggtgccatcggctctcgct

SEQ ID NO: 458944 - DNA, 30 bp, Artificial Sequence
  Synthetic oligonucleotide
gagtactgtcactgaccgtgtcacgtcgct

SEQ ID NO: 458945 - DNA, 30 bp, Artificial Sequence
  Synthetic oligonucleotide
cccgctactgctcgttgtcgttccgtcgct

SEQ ID NO: 458946 - DNA, 30 bp, Artificial Sequence
  Synthetic oligonucleotide
ttatccttgtgtgggacttagggcgtcgct

SEQ ID NO: 458947 - DNA, 30 bp, Artificial Sequence
  Synthetic oligonucleotide
gggtagtgggaatttctatatgtcgtcgct

SEQ ID NO: 458948 - DNA, 30 bp, Artificial Sequence
  Synthetic oligonucleotide
tgccagcgaaggcaaccgcgcggggtcgct

SEQ ID NO: 458949 - DNA, 30 bp, Artificial Sequence
  Synthetic oligonucleotide
ttatgtttggggaaaaactgttgtgtcgct

SEQ ID NO: 458950 - DNA, 30 bp, Artificial Sequence
  Synthetic oligonucleotide
gctaaatgcgactgtttagatcttgtcgct

SEQ ID NO: 458951 - DNA, 30 bp, Artificial Sequence
  Synthetic oligonucleotide
ggtttttactgagtcgaatattaattcgct

SEQ ID NO: 458952 - DNA, 30 bp, Artificial Sequence
  Synthetic oligonucleotide
tctatgcgcaactggttctggatcttcgct

SEQ ID NO: 458953 - DNA, 30 bp, Artificial Sequence
  Synthetic oligonucleotide
atttatcaaaatggaaccgcatatttcgct

SEQ ID NO: 458954 - DNA, 30 bp, Artificial Sequence
  Synthetic oligonucleotide
ccagatctacccggtagaatttaaaaggct

SEQ ID NO: 458955 - DNA, 30 bp, Artificial Sequence
  Synthetic oligonucleotide
gtagctagcttccgtacttatataaaggct

SEQ ID NO: 458956 - DNA, 30 bp, Artificial Sequence
  Synthetic oligonucleotide
ttacgctttagaatttgcttgaacaaggct

SEQ ID NO: 458957 - DNA, 30 bp, Artificial Sequence
  Synthetic oligonucleotide
atagtatgtcagcatgatacgttcaaggct

SEQ ID NO: 458958 - DNA, 30 bp, Artificial Sequence
  Synthetic oligonucleotide
ccgtcctgtctattttataatggtaaggct

SEQ ID NO: 458959 - DNA, 30 bp, Artificial Sequence
  Synthetic oligonucleotide
gctctgaagtagctagtgtgttttaaggct

SEQ ID NO: 458960 - DNA, 30 bp, Artificial Sequence
  Synthetic oligonucleotide
ggtctggactgttctgacgtgaaacaggct

SEQ ID NO: 458961 - DNA, 30 bp, Artificial Sequence
  Synthetic oligonucleotide
ttatcgtataatttcatcttggaccaggct

SEQ ID NO: 458962 - DNA, 30 bp, Artificial Sequence
  Synthetic oligonucleotide
taaacgcatgttctaaatgccgtccaggct

SEQ ID NO: 458963 - DNA, 30 bp, Artificial Sequence
  Synthetic oligonucleotide
tatctattctggattgcacaggtccaggct

SEQ ID NO: 458964 - DNA, 30 bp, Artificial Sequence
  Synthetic oligonucleotide
tgcatttttaggcgttttcaaaatcaggct

SEQ ID NO: 458965 - DNA, 30 bp, Artificial Sequence
  Synthetic oligonucleotide
aattgagctggatcggcatgaattcaggct

SEQ ID NO: 458966 - DNA, 31 bp, Artificial Sequence
  Synthetic oligonucleotide
accaccctagcatggtttaggagtagaggct

SEQ ID NO: 458967 - DNA, 30 bp, Artificial Sequence
  Synthetic oligonucleotide
attgacaggatggtaccgtgatacgaggct

SEQ ID NO: 458968 - DNA, 30 bp, Artificial Sequence
  Synthetic oligonucleotide
atctggtttgggttatatcagtacgaggct

SEQ ID NO: 458969 - DNA, 30 bp, Artificial Sequence
  Synthetic oligonucleotide
gcctgggttgaggcggagcccagggaggct

SEQ ID NO: 458970 - DNA, 30 bp, Artificial Sequence
  Synthetic oligonucleotide
ctctagacgatctcccatagggtggaggct

SEQ ID NO: 458971 - DNA, 30 bp, Artificial Sequence
  Synthetic oligonucleotide
acaacggagtagataaagactcctgaggct

SEQ ID NO: 458972 - DNA, 30 bp, Artificial Sequence
  Synthetic oligonucleotide
tcttgccaagtcaggactatagttgaggct

SEQ ID NO: 458973 - DNA, 30 bp, Artificial Sequence
  Synthetic oligonucleotide
ctcatggcgtgtcaattatatgtataggct

SEQ ID NO: 458974 - DNA, 30 bp, Artificial Sequence
  Synthetic oligonucleotide
cctttatggacagagagaaccccctaggct

SEQ ID NO: 458975 - DNA, 30 bp, Artificial Sequence
  Synthetic oligonucleotide
ttgggggggggttgcaagtccatctaggct

SEQ ID NO: 458976 - DNA, 30 bp, Artificial Sequence
  Synthetic oligonucleotide
ctggtgaacacacatcttcgattgtaggct

SEQ ID NO: 458977 - DNA, 30 bp, Artificial Sequence
  Synthetic oligonucleotide
ttgattaagatatgcagatttcattaggct

SEQ ID NO: 458978 - DNA, 30 bp, Artificial Sequence
  Synthetic oligonucleotide
ccagtagggatgtgtaaacgtacttaggct

SEQ ID NO: 458979 - DNA, 30 bp, Artificial Sequence
  Synthetic oligonucleotide
ggctgggacccggagtgttgcccttaggct

SEQ ID NO: 458980 - DNA, 30 bp, Artificial Sequence
  Synthetic oligonucleotide
aactcgtcaagcatcatgtaccgttaggct

SEQ ID NO: 458981 - DNA, 30 bp, Artificial Sequence
  Synthetic oligonucleotide
tattattatcacgacgtaagtttttaggct

SEQ ID NO: 458982 - DNA, 30 bp, Artificial Sequence
  Synthetic oligonucleotide
gagccggtgtaagtccttatccaaacggct

SEQ ID NO: 458983 - DNA, 30 bp, Artificial Sequence
  Synthetic oligonucleotide
gttcagagcatgctcatggtcttaccggct

SEQ ID NO: 458984 - DNA, 30 bp, Artificial Sequence
  Synthetic oligonucleotide
acccatgggcgcagacatggtaatccggct

SEQ ID NO: 458985 - DNA, 30 bp, Artificial Sequence
  Synthetic oligonucleotide
gaaaaaggtggtcagcacatgacagcggct

SEQ ID NO: 458986 - DNA, 30 bp, Artificial Sequence
  Synthetic oligonucleotide
cgacatacttctctttaattccacgcggct

SEQ ID NO: 458987 - DNA, 30 bp, Artificial Sequence
  Synthetic oligonucleotide
tcaggtttacaattacagtcggccgcggct

SEQ ID NO: 458988 - DNA, 30 bp, Artificial Sequence
  Synthetic oligonucleotide
agtaaagccgagatcatggcaagcgcggct

SEQ ID NO: 458989 - DNA, 30 bp, Artificial Sequence
  Synthetic oligonucleotide
gtaagggctagatgttactgctagtcggct

SEQ ID NO: 458990 - DNA, 30 bp, Artificial Sequence
  Synthetic oligonucleotide
gagcgtagcatcaggccatgtccttcggct

SEQ ID NO: 458991 - DNA, 30 bp, Artificial Sequence
  Synthetic oligonucleotide
tatctaagaatctgtcggtaataaagggct

SEQ ID NO: 458992 - DNA, 30 bp, Artificial Sequence
  Synthetic oligonucleotide
cggggcgctgggaacatcgttccaagggct

SEQ ID NO: 458993 - DNA, 30 bp, Artificial Sequence
  Synthetic oligonucleotide
gcacaagaaatggttgtcgactcaagggct

SEQ ID NO: 458994 - DNA, 30 bp, Artificial Sequence
  Synthetic oligonucleotide
ggattttatgttgagattatattaagggct

SEQ ID NO: 458995 - DNA, 30 bp, Artificial Sequence
  Synthetic oligonucleotide
cgggtttactacaggtcagttgtcagggct

SEQ ID NO: 458996 - DNA, 30 bp, Artificial Sequence
  Synthetic oligonucleotide
ttggtgatttgggataagaggatgagggct

SEQ ID NO: 458997 - DNA, 30 bp, Artificial Sequence
  Synthetic oligonucleotide
ggacatacgcgggaaggtcctgatagggct

SEQ ID NO: 458998 - DNA, 30 bp, Artificial Sequence
  Synthetic oligonucleotide
gattggagtatgtggttaaggcctagggct

SEQ ID NO: 458999 - DNA, 30 bp, Artificial Sequence
  Synthetic oligonucleotide
gaagggcgcctgtgggatcctctccgggct

SEQ ID NO: 459000 - DNA, 30 bp, Artificial Sequence
  Synthetic oligonucleotide
gactggtctaaacgaccagcagagcgggct

SEQ ID NO: 459001 - DNA, 30 bp, Artificial Sequence
  Synthetic oligonucleotide
gccgcgcccgggaaagcttgacgtcgggct

SEQ ID NO: 459002 - DNA, 30 bp, Artificial Sequence
  Synthetic oligonucleotide
gatggtggcgtcgaaataggtataggggct

SEQ ID NO: 459003 - DNA, 30 bp, Artificial Sequence
  Synthetic oligonucleotide
tctctctctaccttgtcgaacctaggggct

SEQ ID NO: 459004 - DNA, 30 bp, Artificial Sequence
  Synthetic oligonucleotide
tgaagagagcctcctcgcgaagacggggct

SEQ ID NO: 459005 - DNA, 30 bp, Artificial Sequence
  Synthetic oligonucleotide
gcaaaagttgttttctaagtgcatggggct

SEQ ID NO: 459006 - DNA, 30 bp, Artificial Sequence
  Synthetic oligonucleotide
tgaacctggatcctcaggtgttatggggct

SEQ ID NO: 459007 - DNA, 30 bp, Artificial Sequence
  Synthetic oligonucleotide
aggtagggaatattaggcggttaatgggct

SEQ ID NO: 459008 - DNA, 30 bp, Artificial Sequence
  Synthetic oligonucleotide
gttttgtattgtgtagggttaacatgggct

SEQ ID NO: 459009 - DNA, 30 bp, Artificial Sequence
  Synthetic oligonucleotide
tcctacccgtagtctttatgctcatgggct

SEQ ID NO: 459010 - DNA, 30 bp, Artificial Sequence
  Synthetic oligonucleotide
cctctatgcggggcatgaagtacctgggct

SEQ ID NO: 459011 - DNA, 30 bp, Artificial Sequence
  Synthetic oligonucleotide
tatgtttgctcttaatcggacgcctgggct

SEQ ID NO: 459012 - DNA, 30 bp, Artificial Sequence
  Synthetic oligonucleotide
aaaaagcgatacggaccccgtccgtgggct

SEQ ID NO: 459013 - DNA, 30 bp, Artificial Sequence
  Synthetic oligonucleotide
tatctagttagtaaaatgacgaggtgggct

SEQ ID NO: 459014 - DNA, 30 bp, Artificial Sequence
  Synthetic oligonucleotide
ctgtgtgacttagattaatagtcttgggct

SEQ ID NO: 459015 - DNA, 30 bp, Artificial Sequence
  Synthetic oligonucleotide
aaagcagtgtggaaaccttatcaaatggct

SEQ ID NO: 459016 - DNA, 30 bp, Artificial Sequence
  Synthetic oligonucleotide
agttatctggctccgcatgaagcaatggct

SEQ ID NO: 459017 - DNA, 30 bp, Artificial Sequence
  Synthetic oligonucleotide
ggcaggaaatcgcagaggccctgaatggct

SEQ ID NO: 459018 - DNA, 30 bp, Artificial Sequence
  Synthetic oligonucleotide
gttacacgaccgcctataagtctaatggct

SEQ ID NO: 459019 - DNA, 30 bp, Artificial Sequence
  Synthetic oligonucleotide
gagaataacaccgcttgtatgatcatggct

SEQ ID NO: 459020 - DNA, 25 bp, Artificial Sequence
  Synthetic oligonucleotide
ttggtcttgtttcaagtagctggct

SEQ ID NO: 459021 - DNA, 30 bp, Artificial Sequence
  Synthetic oligonucleotide
aatctaaatgtatagggttaagcgctggct

SEQ ID NO: 459022 - DNA, 30 bp, Artificial Sequence
  Synthetic oligonucleotide
attctcaatctagcctagtattctctggct

SEQ ID NO: 459023 - DNA, 30 bp, Artificial Sequence
  Synthetic oligonucleotide
aatgtattagcccgcgtgggctgagtggct

SEQ ID NO: 459024 - DNA, 30 bp, Artificial Sequence
  Synthetic oligonucleotide
atgttgacaggtttacgtttcgacgtggct

SEQ ID NO: 459025 - DNA, 30 bp, Artificial Sequence
  Synthetic oligonucleotide
attggggatatgacacccgttaccgtggct

SEQ ID NO: 459026 - DNA, 30 bp, Artificial Sequence
  Synthetic oligonucleotide
ttagttcagtacgtccggactcaggtggct

SEQ ID NO: 459027 - DNA, 30 bp, Artificial Sequence
  Synthetic oligonucleotide
gcacaggtagaaattctagcggcggtggct

SEQ ID NO: 459028 - DNA, 30 bp, Artificial Sequence
  Synthetic oligonucleotide
tgtgccttgttgttttaactcaacttggct

SEQ ID NO: 459029 - DNA, 30 bp, Artificial Sequence
  Synthetic oligonucleotide
cttcggtgggcaatcgcgtcatggttggct

SEQ ID NO: 459030 - DNA, 30 bp, Artificial Sequence
  Synthetic oligonucleotide
gagattacggagtctagaattgaaaatgct

SEQ ID NO: 459031 - DNA, 30 bp, Artificial Sequence
  Synthetic oligonucleotide
gctcctcactcatggaaaagttgaaatgct

SEQ ID NO: 459032 - DNA, 30 bp, Artificial Sequence
  Synthetic oligonucleotide
atttgaacgtaaacaaatgacgccaatgct

SEQ ID NO: 459033 - DNA, 30 bp, Artificial Sequence
  Synthetic oligonucleotide
gatgtaaaccggtttagttcagcgaatgct

SEQ ID NO: 459034 - DNA, 30 bp, Artificial Sequence
  Synthetic oligonucleotide
tcccgaggcatgggcggggtccggaatgct

SEQ ID NO: 459035 - DNA, 30 bp, Artificial Sequence
  Synthetic oligonucleotide
aaagtcgtgtcgcgtcaactcttgaatgct

SEQ ID NO: 459036 - DNA, 30 bp, Artificial Sequence
  Synthetic oligonucleotide
ttcatactgggcaataccgttgctaatgct

SEQ ID NO: 459037 - DNA, 30 bp, Artificial Sequence
  Synthetic oligonucleotide
tggcatgctgtcaagatgtggtgtaatgct

SEQ ID NO: 459038 - DNA, 30 bp, Artificial Sequence
  Synthetic oligonucleotide
agcagcatgccatatatgtttcttaatgct

SEQ ID NO: 459039 - DNA, 30 bp, Artificial Sequence
  Synthetic oligonucleotide
taataggtcatgcagtttgcctcacatgct

SEQ ID NO: 459040 - DNA, 30 bp, Artificial Sequence
  Synthetic oligonucleotide
agagtaccggggcgtatgtatttacatgct

SEQ ID NO: 459041 - DNA, 30 bp, Artificial Sequence
  Synthetic oligonucleotide
ttctcttgacgtctggttgtacagcatgct

SEQ ID NO: 459042 - DNA, 30 bp, Artificial Sequence
  Synthetic oligonucleotide
tccacaagtctatgtagcagggggcatgct

SEQ ID NO: 459043 - DNA, 30 bp, Artificial Sequence
  Synthetic oligonucleotide
gtatttcgaccccgtattcatgtgcatgct

SEQ ID NO: 459044 - DNA, 30 bp, Artificial Sequence
  Synthetic oligonucleotide
ttctcttggggctttacgagttgtcatgct

SEQ ID NO: 459045 - DNA, 30 bp, Artificial Sequence
  Synthetic oligonucleotide
gtaaagggcctctgatacctgacagatgct

SEQ ID NO: 459046 - DNA, 30 bp, Artificial Sequence
  Synthetic oligonucleotide
ctgggtaccggtgtccgcgatggagatgct

SEQ ID NO: 459047 - DNA, 30 bp, Artificial Sequence
  Synthetic oligonucleotide
catgtcccccaatttcctgatatagatgct

SEQ ID NO: 459048 - DNA, 30 bp, Artificial Sequence
  Synthetic oligonucleotide
tgagtgtattgttgtctagtagacgatgct

SEQ ID NO: 459049 - DNA, 30 bp, Artificial Sequence
  Synthetic oligonucleotide
tactttgggttctggttttgatgcgatgct

SEQ ID NO: 459050 - DNA, 30 bp, Artificial Sequence
  Synthetic oligonucleotide
attactgtgccagttaacactctcgatgct

SEQ ID NO: 459051 - DNA, 30 bp, Artificial Sequence
  Synthetic oligonucleotide
taacgggaatgagcttatttaacggatgct

SEQ ID NO: 459052 - DNA, 30 bp, Artificial Sequence
  Synthetic oligonucleotide
gcttatagctccgcaacccctacggatgct

SEQ ID NO: 459053 - DNA, 30 bp, Artificial Sequence
  Synthetic oligonucleotide
ttctaccttcgacgtgttgtaagtgatgct

SEQ ID NO: 459054 - DNA, 30 bp, Artificial Sequence
  Synthetic oligonucleotide
aaaataaatataattccctggacatatgct

SEQ ID NO: 459055 - DNA, 30 bp, Artificial Sequence
  Synthetic oligonucleotide
ggatcacgatagggcgccgaaatctatgct

SEQ ID NO: 459056 - DNA, 30 bp, Artificial Sequence
  Synthetic oligonucleotide
ttactgtccttacctcagcctatctatgct

SEQ ID NO: 459057 - DNA, 30 bp, Artificial Sequence
  Synthetic oligonucleotide
gttgttaaatgcgccaatcaaggttatgct

SEQ ID NO: 459058 - DNA, 30 bp, Artificial Sequence
  Synthetic oligonucleotide
attccgtcgacagcggtacttcgaactgct

SEQ ID NO: 459059 - DNA, 30 bp, Artificial Sequence
  Synthetic oligonucleotide
tcattaggtttatgatcatatataactgct

SEQ ID NO: 459060 - DNA, 30 bp, Artificial Sequence
  Synthetic oligonucleotide
gtaagtcattactggaacgttgacactgct

SEQ ID NO: 459061 - DNA, 30 bp, Artificial Sequence
  Synthetic oligonucleotide
tcgtacgccacacatcgaggatcgactgct

SEQ ID NO: 459062 - DNA, 30 bp, Artificial Sequence
  Synthetic oligonucleotide
ggccccacggtggatgagtaaacacctgct

SEQ ID NO: 459063 - DNA, 30 bp, Artificial Sequence
  Synthetic oligonucleotide
tcgaccacacgccgctaggccttacctgct

SEQ ID NO: 459064 - DNA, 30 bp, Artificial Sequence
  Synthetic oligonucleotide
ttggtatagcttatcttttcactgcctgct

SEQ ID NO: 459065 - DNA, 30 bp, Artificial Sequence
  Synthetic oligonucleotide
gtcccccgcatacgttctctatctcctgct

SEQ ID NO: 459066 - DNA, 30 bp, Artificial Sequence
  Synthetic oligonucleotide
gcaccggcccggtttcaacaggttcctgct

SEQ ID NO: 459067 - DNA, 30 bp, Artificial Sequence
  Synthetic oligonucleotide
gggagaacgcctgggttcgggtttcctgct

SEQ ID NO: 459068 - DNA, 30 bp, Artificial Sequence
  Synthetic oligonucleotide
gacaggttctacagcagctgattagctgct

SEQ ID NO: 459069 - DNA, 30 bp, Artificial Sequence
  Synthetic oligonucleotide
tatcgagtggccggctgatgcgacgctgct

SEQ ID NO: 459070 - DNA, 30 bp, Artificial Sequence
  Synthetic oligonucleotide
ggttgttatagcccagcgccctacgctgct

SEQ ID NO: 459071 - DNA, 30 bp, Artificial Sequence
  Synthetic oligonucleotide
ctaaatgatgtagcagtcattaccgctgct

SEQ ID NO: 459072 - DNA, 30 bp, Artificial Sequence
  Synthetic oligonucleotide
gtagtacgacacgttgagtgcccggctgct

SEQ ID NO: 459073 - DNA, 30 bp, Artificial Sequence
  Synthetic oligonucleotide
ctatgagggagttgagttcatccggctgct

SEQ ID NO: 459074 - DNA, 30 bp, Artificial Sequence
  Synthetic oligonucleotide
acccggtctctgacgattgtaaaatctgct

SEQ ID NO: 459075 - DNA, 30 bp, Artificial Sequence
  Synthetic oligonucleotide
attaaatcttatgaagatatgcaatctgct

SEQ ID NO: 459076 - DNA, 30 bp, Artificial Sequence
  Synthetic oligonucleotide
ggctcgctattgaacacaatgcgatctgct

SEQ ID NO: 459077 - DNA, 30 bp, Artificial Sequence
  Synthetic oligonucleotide
ggcaagccgtaagctctccgcacctctgct

SEQ ID NO: 459078 - DNA, 30 bp, Artificial Sequence
  Synthetic oligonucleotide
gagtggatgtagcaggggttaccgagtgct

SEQ ID NO: 459079 - DNA, 30 bp, Artificial Sequence
  Synthetic oligonucleotide
aactctaccccgcctccgcgggcgagtgct

SEQ ID NO: 459080 - DNA, 30 bp, Artificial Sequence
  Synthetic oligonucleotide
ttgggttcagaacgaaccccctcgagtgct

SEQ ID NO: 459081 - DNA, 30 bp, Artificial Sequence
  Synthetic oligonucleotide
catgagcgtattgcgtcaattcggagtgct

SEQ ID NO: 459082 - DNA, 30 bp, Artificial Sequence
  Synthetic oligonucleotide
gcaattaatcgctccctcgcccatagtgct

SEQ ID NO: 459083 - DNA, 30 bp, Artificial Sequence
  Synthetic oligonucleotide
ttattgaaaacactttcgagagatagtgct

SEQ ID NO: 459084 - DNA, 30 bp, Artificial Sequence
  Synthetic oligonucleotide
acagcacagtctaatccttggtatagtgct

SEQ ID NO: 459085 - DNA, 30 bp, Artificial Sequence
  Synthetic oligonucleotide
cggagctgcgcgtgataagttactagtgct

SEQ ID NO: 459086 - DNA, 30 bp, Artificial Sequence
  Synthetic oligonucleotide
ctgttctcatttcgtggtcgatctagtgct

SEQ ID NO: 459087 - DNA, 30 bp, Artificial Sequence
  Synthetic oligonucleotide
ctgcaatttttcaaagtattccaacgtgct

SEQ ID NO: 459088 - DNA, 30 bp, Artificial Sequence
  Synthetic oligonucleotide
atgatgggcggtcgcacgcccgaacgtgct

SEQ ID NO: 459089 - DNA, 30 bp, Artificial Sequence
  Synthetic oligonucleotide
taatgcagttctcccgggtttaaccgtgct

SEQ ID NO: 459090 - DNA, 30 bp, Artificial Sequence
  Synthetic oligonucleotide
tgtcaagctcgcgaggccctaggtcgtgct

SEQ ID NO: 459091 - DNA, 30 bp, Artificial Sequence
  Synthetic oligonucleotide
gtcgcaatgagatcatccagttttcgtgct

SEQ ID NO: 459092 - DNA, 30 bp, Artificial Sequence
  Synthetic oligonucleotide
gtcagctggaagttcgatggttttcgtgct

SEQ ID NO: 459093 - DNA, 30 bp, Artificial Sequence
  Synthetic oligonucleotide
tgtcatcgctgttgcttcctcaacggtgct

SEQ ID NO: 459094 - DNA, 30 bp, Artificial Sequence
  Synthetic oligonucleotide
catattgatgaagcatttaaagacggtgct

SEQ ID NO: 459095 - DNA, 30 bp, Artificial Sequence
  Synthetic oligonucleotide
gtctgacctccacccataggtagcggtgct

SEQ ID NO: 459096 - DNA, 30 bp, Artificial Sequence
  Synthetic oligonucleotide
aatcgtcatagcaagcatgtcctcggtgct

SEQ ID NO: 459097 - DNA, 30 bp, Artificial Sequence
  Synthetic oligonucleotide
atctcgtaagctcgcacgatagtcggtgct

SEQ ID NO: 459098 - DNA, 30 bp, Artificial Sequence
  Synthetic oligonucleotide
actggttctagtgatgtttcctcgggtgct

SEQ ID NO: 459099 - DNA, 30 bp, Artificial Sequence
  Synthetic oligonucleotide
tcagcagacggtcctcatttgaatggtgct

SEQ ID NO: 459100 - DNA, 30 bp, Artificial Sequence
  Synthetic oligonucleotide
ggcggctcctcgtccgaagtgatctgtgct

SEQ ID NO: 459101 - DNA, 30 bp, Artificial Sequence
  Synthetic oligonucleotide
tcagataccggcgtgctagggttctgtgct

SEQ ID NO: 459102 - DNA, 30 bp, Artificial Sequence
  Synthetic oligonucleotide
ggggctataaatcctgtccggaagtgtgct

SEQ ID NO: 459103 - DNA, 30 bp, Artificial Sequence
  Synthetic oligonucleotide
ccacttttcgcaacatctacaatgtgtgct

SEQ ID NO: 459104 - DNA, 30 bp, Artificial Sequence
  Synthetic oligonucleotide
gtgtatggattttctgagcgccattgtgct

SEQ ID NO: 459105 - DNA, 30 bp, Artificial Sequence
  Synthetic oligonucleotide
acctcgcgtcgcttaagatggacaattgct

SEQ ID NO: 459106 - DNA, 30 bp, Artificial Sequence
  Synthetic oligonucleotide
gtcattatcctgccgtaatggcagattgct

SEQ ID NO: 459107 - DNA, 30 bp, Artificial Sequence
  Synthetic oligonucleotide
gttagtcggtatatttacggcgtgattgct

SEQ ID NO: 459108 - DNA, 30 bp, Artificial Sequence
  Synthetic oligonucleotide
acccgcgctcatttataatttaatattgct

SEQ ID NO: 459109 - DNA, 30 bp, Artificial Sequence
  Synthetic oligonucleotide
ttttacatccaaggtaggctgtatattgct

SEQ ID NO: 459110 - DNA, 30 bp, Artificial Sequence
  Synthetic oligonucleotide
ctatccgctgtagggaattaaactattgct

SEQ ID NO: 459111 - DNA, 30 bp, Artificial Sequence
  Synthetic oligonucleotide
cctcttcgtcgcaggatcgggggtattgct

SEQ ID NO: 459112 - DNA, 30 bp, Artificial Sequence
  Synthetic oligonucleotide
gccctgtattcagcatgctgacgccttgct

SEQ ID NO: 459113 - DNA, 30 bp, Artificial Sequence
  Synthetic oligonucleotide
tatctgtccgagtatcccgcttagcttgct

SEQ ID NO: 459114 - DNA, 30 bp, Artificial Sequence
  Synthetic oligonucleotide
ggccagttcactcgtactacgccagttgct

SEQ ID NO: 459115 - DNA, 30 bp, Artificial Sequence
  Synthetic oligonucleotide
gtgaaaaatacaagtctaaatgcagttgct

SEQ ID NO: 459116 - DNA, 30 bp, Artificial Sequence
  Synthetic oligonucleotide
caacaatggtatcttgataccagagttgct

SEQ ID NO: 459117 - DNA, 30 bp, Artificial Sequence
  Synthetic oligonucleotide
cagtagcaataattatatgactgcgttgct

SEQ ID NO: 459118 - DNA, 30 bp, Artificial Sequence
  Synthetic oligonucleotide
ttgagttatggtctataggagaatgttgct

SEQ ID NO: 459119 - DNA, 30 bp, Artificial Sequence
  Synthetic oligonucleotide
aacagtataccagcctgcgtttgtgttgct

SEQ ID NO: 459120 - DNA, 30 bp, Artificial Sequence
  Synthetic oligonucleotide
cattacaaatgcacccgtgaaacatttgct

SEQ ID NO: 459121 - DNA, 30 bp, Artificial Sequence
  Synthetic oligonucleotide
gttccccgagagcgaaagctggtatttgct

SEQ ID NO: 459122 - DNA, 30 bp, Artificial Sequence
  Synthetic oligonucleotide
gggtataaactcgttactattcactttgct

SEQ ID NO: 459123 - DNA, 30 bp, Artificial Sequence
  Synthetic oligonucleotide
aagaatgctggcgcacctccgcgctttgct

SEQ ID NO: 459124 - DNA, 30 bp, Artificial Sequence
  Synthetic oligonucleotide
aagccgccagggcgtacactattctttgct

SEQ ID NO: 459125 - DNA, 30 bp, Artificial Sequence
  Synthetic oligonucleotide
ctgatgttgcttactttggtgctgtttgct

SEQ ID NO: 459126 - DNA, 30 bp, Artificial Sequence
  Synthetic oligonucleotide
ttaaagatactggggccggacgcttttgct

SEQ ID NO: 459127 - DNA, 30 bp, Artificial Sequence
  Synthetic oligonucleotide
tcggtgggccagcttcgctagagttttgct

SEQ ID NO: 459128 - DNA, 30 bp, Artificial Sequence
  Synthetic oligonucleotide
catccgcgtaagtacaagtaaaaaaaatct

SEQ ID NO: 459129 - DNA, 30 bp, Artificial Sequence
  Synthetic oligonucleotide
gatttcaaaagcggtctatgcacaaaatct

SEQ ID NO: 459130 - DNA, 30 bp, Artificial Sequence
  Synthetic oligonucleotide
tggctatgggaaacggctgcgggaaaatct

SEQ ID NO: 459131 - DNA, 30 bp, Artificial Sequence
  Synthetic oligonucleotide
cgaagagtatagcgggtactactaaaatct

SEQ ID NO: 459132 - DNA, 30 bp, Artificial Sequence
  Synthetic oligonucleotide
ttataaagggtgtacaccacgttaaaatct

SEQ ID NO: 459133 - DNA, 30 bp, Artificial Sequence
  Synthetic oligonucleotide
catatcagcaagcgtccagggcgcaaatct

SEQ ID NO: 459134 - DNA, 30 bp, Artificial Sequence
  Synthetic oligonucleotide
cgagtttatacagtatgcagaaagaaatct

SEQ ID NO: 459135 - DNA, 30 bp, Artificial Sequence
  Synthetic oligonucleotide
ataacgggcgcagccagtaaatagaaatct

SEQ ID NO: 459136 - DNA, 30 bp, Artificial Sequence
  Synthetic oligonucleotide
ggggtcctagtacgacgcatcttgaaatct

SEQ ID NO: 459137 - DNA, 30 bp, Artificial Sequence
  Synthetic oligonucleotide
tttttgaaggttattagggaaactaaatct

SEQ ID NO: 459138 - DNA, 30 bp, Artificial Sequence
  Synthetic oligonucleotide
caaagataccgctgatctgctcgtaaatct

SEQ ID NO: 459139 - DNA, 30 bp, Artificial Sequence
  Synthetic oligonucleotide
tctttcgtgaaaccgatgcacggtaaatct

SEQ ID NO: 459140 - DNA, 30 bp, Artificial Sequence
  Synthetic oligonucleotide
gcctctcttttatggatcctaaaacaatct

SEQ ID NO: 459141 - DNA, 30 bp, Artificial Sequence
  Synthetic oligonucleotide
aatcagtaacaggaattaaggatacaatct

SEQ ID NO: 459142 - DNA, 30 bp, Artificial Sequence
  Synthetic oligonucleotide
gtcggcggtgatacagcatggctacaatct

SEQ ID NO: 459143 - DNA, 30 bp, Artificial Sequence
  Synthetic oligonucleotide
gagtatgaggaaaaaagagggttccaatct

SEQ ID NO: 459144 - DNA, 30 bp, Artificial Sequence
  Synthetic oligonucleotide
ggaacttacgtacacactttaacgcaatct

SEQ ID NO: 459145 - DNA, 30 bp, Artificial Sequence
  Synthetic oligonucleotide
gtcttcctatctaagaggtactttcaatct

SEQ ID NO: 459146 - DNA, 30 bp, Artificial Sequence
  Synthetic oligonucleotide
gatactgaaactaaggtttactttcaatct

SEQ ID NO: 459147 - DNA, 30 bp, Artificial Sequence
  Synthetic oligonucleotide
atcggcgcactgtcgatcatttcagaatct

SEQ ID NO: 459148 - DNA, 30 bp, Artificial Sequence
  Synthetic oligonucleotide
gagctgtgtgttgataaatgcggagaatct

SEQ ID NO: 459149 - DNA, 30 bp, Artificial Sequence
  Synthetic oligonucleotide
tagatgccccctgaggtagtttacgaatct

SEQ ID NO: 459150 - DNA, 30 bp, Artificial Sequence
  Synthetic oligonucleotide
cgttattacagccggtttcccggcgaatct

SEQ ID NO: 459151 - DNA, 30 bp, Artificial Sequence
  Synthetic oligonucleotide
gacgtaattaccggcatgccgcgggaatct

SEQ ID NO: 459152 - DNA, 30 bp, Artificial Sequence
  Synthetic oligonucleotide
cgagtaggcagatttgcaaggggggaatct

SEQ ID NO: 459153 - DNA, 30 bp, Artificial Sequence
  Synthetic oligonucleotide
gaattcactaaacttcttatgaaataatct

SEQ ID NO: 459154 - DNA, 30 bp, Artificial Sequence
  Synthetic oligonucleotide
ttcacgcgaattcaagatggttcataatct

SEQ ID NO: 459155 - DNA, 30 bp, Artificial Sequence
  Synthetic oligonucleotide
acggtcagctgcatttagtgtcgataatct

SEQ ID NO: 459156 - DNA, 30 bp, Artificial Sequence
  Synthetic oligonucleotide
ttatggttatctaaccagagcttctaatct

SEQ ID NO: 459157 - DNA, 30 bp, Artificial Sequence
  Synthetic oligonucleotide
ggaatcaacatagcgcaagaccgaacatct

SEQ ID NO: 459158 - DNA, 30 bp, Artificial Sequence
  Synthetic oligonucleotide
aaacttaaggaacattcaaatgccacatct

SEQ ID NO: 459159 - DNA, 30 bp, Artificial Sequence
  Synthetic oligonucleotide
agaagcgggcaccatttttccgtgccatct

SEQ ID NO: 459160 - DNA, 30 bp, Artificial Sequence
  Synthetic oligonucleotide
gacaaaccccatgtgttctaacatccatct

SEQ ID NO: 459161 - DNA, 30 bp, Artificial Sequence
  Synthetic oligonucleotide
atttaaacttggctctcattacaagcatct

SEQ ID NO: 459162 - DNA, 30 bp, Artificial Sequence
  Synthetic oligonucleotide
ggcacccttgacgcttacatgcaagcatct

SEQ ID NO: 459163 - DNA, 30 bp, Artificial Sequence
  Synthetic oligonucleotide
accgctgtgtagcaaattttagaatcatct

SEQ ID NO: 459164 - DNA, 31 bp, Artificial Sequence
  Synthetic oligonucleotide
atgcctcctaacctgttcttataagtcatct

SEQ ID NO: 459165 - DNA, 30 bp, Artificial Sequence
  Synthetic oligonucleotide
caggggttaatacacgtttgcgcgtcatct

SEQ ID NO: 459166 - DNA, 30 bp, Artificial Sequence
  Synthetic oligonucleotide
ggtctttggctaaatttggtggtgtcatct

SEQ ID NO: 459167 - DNA, 30 bp, Artificial Sequence
  Synthetic oligonucleotide
gagtgggagtataaaagaaggctttcatct

SEQ ID NO: 459168 - DNA, 30 bp, Artificial Sequence
  Synthetic oligonucleotide
cttaagtaaagcacatgaagcaacagatct

SEQ ID NO: 459169 - DNA, 30 bp, Artificial Sequence
  Synthetic oligonucleotide
gagatctgtggtagtgaatctcgtagatct

SEQ ID NO: 459170 - DNA, 30 bp, Artificial Sequence
  Synthetic oligonucleotide
gccagttcgagcaaaattgcctcacgatct

SEQ ID NO: 459171 - DNA, 30 bp, Artificial Sequence
  Synthetic oligonucleotide
cattctattcgatcattttgggaccgatct

SEQ ID NO: 459172 - DNA, 30 bp, Artificial Sequence
  Synthetic oligonucleotide
accgtacggcatttagtgttttagcgatct

SEQ ID NO: 459173 - DNA, 30 bp, Artificial Sequence
  Synthetic oligonucleotide
tgtcacacacgcattgcctgggctcgatct

SEQ ID NO: 459174 - DNA, 30 bp, Artificial Sequence
  Synthetic oligonucleotide
atgcggcctgttgtcagaatggttcgatct

SEQ ID NO: 459175 - DNA, 30 bp, Artificial Sequence
  Synthetic oligonucleotide
tgtctacgacctaagtccgacggaggatct

SEQ ID NO: 459176 - DNA, 30 bp, Artificial Sequence
  Synthetic oligonucleotide
atagcgggattactagtttatctaggatct

SEQ ID NO: 459177 - DNA, 30 bp, Artificial Sequence
  Synthetic oligonucleotide
aaacgttttgcttgttaatatttcggatct

SEQ ID NO: 459178 - DNA, 30 bp, Artificial Sequence
  Synthetic oligonucleotide
ccgcaaggataactccccttctaatgatct

SEQ ID NO: 459179 - DNA, 30 bp, Artificial Sequence
  Synthetic oligonucleotide
tagtatatcagtcaaggattaggatgatct

SEQ ID NO: 459180 - DNA, 30 bp, Artificial Sequence
  Synthetic oligonucleotide
gagagtaaaagcaagttcggaaactgatct

SEQ ID NO: 459181 - DNA, 30 bp, Artificial Sequence
  Synthetic oligonucleotide
gtcaggcttgccttattatagacctgatct

SEQ ID NO: 459182 - DNA, 30 bp, Artificial Sequence
  Synthetic oligonucleotide
ttatgacagctgaccgctcactggtgatct

SEQ ID NO: 459183 - DNA, 30 bp, Artificial Sequence
  Synthetic oligonucleotide
aactcggctgtataagtaggtctgtgatct

SEQ ID NO: 459184 - DNA, 30 bp, Artificial Sequence
  Synthetic oligonucleotide
ttattaggggccgcttaagtcaattgatct

SEQ ID NO: 459185 - DNA, 30 bp, Artificial Sequence
  Synthetic oligonucleotide
aaacgggaagatacctactcaggttgatct

SEQ ID NO: 459186 - DNA, 30 bp, Artificial Sequence
  Synthetic oligonucleotide
tgctatgtaaaggtcgttcagatttgatct

SEQ ID NO: 459187 - DNA, 30 bp, Artificial Sequence
  Synthetic oligonucleotide
ggaagctcgcattagcggcttctttgatct

SEQ ID NO: 459188 - DNA, 30 bp, Artificial Sequence
  Synthetic oligonucleotide
tgattccgacgcctggtctcgagaatatct

SEQ ID NO: 459189 - DNA, 30 bp, Artificial Sequence
  Synthetic oligonucleotide
tggttactgcgtggatgacttagcatatct

SEQ ID NO: 459190 - DNA, 30 bp, Artificial Sequence
  Synthetic oligonucleotide
cggctgacagctcagacaagagagatatct

SEQ ID NO: 459191 - DNA, 30 bp, Artificial Sequence
  Synthetic oligonucleotide
gaccaaggtaccgcggttaggtatatatct

SEQ ID NO: 459192 - DNA, 30 bp, Artificial Sequence
  Synthetic oligonucleotide
gaactacatggaaaacctactggtatatct

SEQ ID NO: 459193 - DNA, 30 bp, Artificial Sequence
  Synthetic oligonucleotide
accatccctagttgtgctagcgaactatct

SEQ ID NO: 459194 - DNA, 30 bp, Artificial Sequence
  Synthetic oligonucleotide
aacaattctcgtcaacactccagactatct

SEQ ID NO: 459195 - DNA, 30 bp, Artificial Sequence
  Synthetic oligonucleotide
cgtgaggtatttcagtcgtagatactatct

SEQ ID NO: 459196 - DNA, 30 bp, Artificial Sequence
  Synthetic oligonucleotide
gtcgtacgtcaggtcgaaagacgcctatct

SEQ ID NO: 459197 - DNA, 30 bp, Artificial Sequence
  Synthetic oligonucleotide
cagaagagctggaggtttttggggctatct

SEQ ID NO: 459198 - DNA, 30 bp, Artificial Sequence
  Synthetic oligonucleotide
ccagtaggacattcggacgggcatctatct

SEQ ID NO: 459199 - DNA, 30 bp, Artificial Sequence
  Synthetic oligonucleotide
tgtagaaggtgtgtacttcacgatctatct

SEQ ID NO: 459200 - DNA, 31 bp, Artificial Sequence
  Synthetic oligonucleotide
gccaaacagctctcgatgtatagaagtatct

SEQ ID NO: 459201 - DNA, 29 bp, Artificial Sequence
  Synthetic oligonucleotide
cgattgcgtacaaatttaaaatcgtatct

SEQ ID NO: 459202 - DNA, 30 bp, Artificial Sequence
  Synthetic oligonucleotide
gttggcacgcgcgcagtaaataacttatct

SEQ ID NO: 459203 - DNA, 30 bp, Artificial Sequence
  Synthetic oligonucleotide
atgtggagtttgtagactagggccttatct

SEQ ID NO: 459204 - DNA, 30 bp, Artificial Sequence
  Synthetic oligonucleotide
gcttctgaacaccctttcaacagcttatct

SEQ ID NO: 459205 - DNA, 30 bp, Artificial Sequence
  Synthetic oligonucleotide
tgtgttcatgggtagcaatatgtcttatct

SEQ ID NO: 459206 - DNA, 30 bp, Artificial Sequence
  Synthetic oligonucleotide
aatttcaagggtagagggtctgtgttatct

SEQ ID NO: 459207 - DNA, 30 bp, Artificial Sequence
  Synthetic oligonucleotide
accgcctggaataagatgagcttgttatct

SEQ ID NO: 459208 - DNA, 30 bp, Artificial Sequence
  Synthetic oligonucleotide
tgaggatcatcatgtagcatcattttatct

SEQ ID NO: 459209 - DNA, 30 bp, Artificial Sequence
  Synthetic oligonucleotide
caagtcaggcagtcccaggacgttttatct

SEQ ID NO: 459210 - DNA, 30 bp, Artificial Sequence
  Synthetic oligonucleotide
ttaagcattgagggtacaacatttttatct

SEQ ID NO: 459211 - DNA, 30 bp, Artificial Sequence
  Synthetic oligonucleotide
aaaaattaagggagttcaagaaaaaactct

SEQ ID NO: 459212 - DNA, 30 bp, Artificial Sequence
  Synthetic oligonucleotide
gttggtatgtcagcctaatccggaaactct

SEQ ID NO: 459213 - DNA, 30 bp, Artificial Sequence
  Synthetic oligonucleotide
ttgttgagtactgtgtccgtgtgaaactct

SEQ ID NO: 459214 - DNA, 30 bp, Artificial Sequence
  Synthetic oligonucleotide
tatccagtggtgtgcatggcgataaactct

SEQ ID NO: 459215 - DNA, 30 bp, Artificial Sequence
  Synthetic oligonucleotide
ccagcgcatattttgttcgcaatcaactct

SEQ ID NO: 459216 - DNA, 30 bp, Artificial Sequence
  Synthetic oligonucleotide
atagactgttgggaggcttttaagaactct

SEQ ID NO: 459217 - DNA, 30 bp, Artificial Sequence
  Synthetic oligonucleotide
ccaagcgacgctatgaaatgtctgaactct

SEQ ID NO: 459218 - DNA, 30 bp, Artificial Sequence
  Synthetic oligonucleotide
gccgatagcagttggtgcattgtacactct

SEQ ID NO: 459219 - DNA, 30 bp, Artificial Sequence
  Synthetic oligonucleotide
ttgcctttggtagtgcaagactgccactct

SEQ ID NO: 459220 - DNA, 30 bp, Artificial Sequence
  Synthetic oligonucleotide
agtgactgcctgatcacgcgggtccactct

SEQ ID NO: 459221 - DNA, 30 bp, Artificial Sequence
  Synthetic oligonucleotide
cattaatgaagagtctgagtggggcactct

SEQ ID NO: 459222 - DNA, 34 bp, Artificial Sequence
  Synthetic oligonucleotide
aacatcagcttttatcttaatgctgcgtcactct

SEQ ID NO: 459223 - DNA, 34 bp, Artificial Sequence
  Synthetic oligonucleotide
tctttcgtcttgttatgtatttctgcgtcactct

SEQ ID NO: 459224 - DNA, 30 bp, Artificial Sequence
  Synthetic oligonucleotide
attgatcagtgcgtcgcgccgggtcactct

SEQ ID NO: 459225 - DNA, 30 bp, Artificial Sequence
  Synthetic oligonucleotide
cgcctcaaaggttttttggccacagactct

SEQ ID NO: 459226 - DNA, 30 bp, Artificial Sequence
  Synthetic oligonucleotide
taaggagcacgtagcggattccacgactct

SEQ ID NO: 459227 - DNA, 30 bp, Artificial Sequence
  Synthetic oligonucleotide
gttctctcgttgtaacagtagtaggactct

SEQ ID NO: 459228 - DNA, 30 bp, Artificial Sequence
  Synthetic oligonucleotide
ctgtcatatatagccttaagtagggactct

SEQ ID NO: 459229 - DNA, 30 bp, Artificial Sequence
  Synthetic oligonucleotide
ggaaatgacaaccccggcaacaggtactct

SEQ ID NO: 459230 - DNA, 30 bp, Artificial Sequence
  Synthetic oligonucleotide
tcttttccagacacgtcctgcaggtactct

SEQ ID NO: 459231 - DNA, 30 bp, Artificial Sequence
  Synthetic oligonucleotide
gtaccttgacgtttctgtgctaggtactct

SEQ ID NO: 459232 - DNA, 30 bp, Artificial Sequence
  Synthetic oligonucleotide
gacttgcaccccacccatgcctgttactct

SEQ ID NO: 459233 - DNA, 30 bp, Artificial Sequence
  Synthetic oligonucleotide
aatgcgtcgcataggtgtgcataaacctct

SEQ ID NO: 459234 - DNA, 30 bp, Artificial Sequence
  Synthetic oligonucleotide
tctagaccccatattacgtttttcacctct

SEQ ID NO: 459235 - DNA, 30 bp, Artificial Sequence
  Synthetic oligonucleotide
gttgcgagcccttccacacacacgacctct

SEQ ID NO: 459236 - DNA, 30 bp, Artificial Sequence
  Synthetic oligonucleotide
catttcgttcacggtccagtgcttacctct

SEQ ID NO: 459237 - DNA, 30 bp, Artificial Sequence
  Synthetic oligonucleotide
atggtcactgcacagtacaatctaccctct

SEQ ID NO: 459238 - DNA, 30 bp, Artificial Sequence
  Synthetic oligonucleotide
cctaatgaatgggctacccgatccccctct

SEQ ID NO: 459239 - DNA, 30 bp, Artificial Sequence
  Synthetic oligonucleotide
tcgggggcttcctagctggtggcgccctct

SEQ ID NO: 459240 - DNA, 30 bp, Artificial Sequence
  Synthetic oligonucleotide
aaagtatagggtattgagtaataagcctct

SEQ ID NO: 459241 - DNA, 30 bp, Artificial Sequence
  Synthetic oligonucleotide
cctattaatctgaatgcccgtgacgcctct

SEQ ID NO: 459242 - DNA, 30 bp, Artificial Sequence
  Synthetic oligonucleotide
tgggtcggcctgaagcagaaagaggcctct

SEQ ID NO: 459243 - DNA, 30 bp, Artificial Sequence
  Synthetic oligonucleotide
gatctttctatcgataatcatacggcctct

SEQ ID NO: 459244 - DNA, 30 bp, Artificial Sequence
  Synthetic oligonucleotide
agagaggtagagcaccacattcgggcctct

SEQ ID NO: 459245 - DNA, 30 bp, Artificial Sequence
  Synthetic oligonucleotide
gtgtgtacgatcgactgtaacgatgcctct

SEQ ID NO: 459246 - DNA, 30 bp, Artificial Sequence
  Synthetic oligonucleotide
gaatgagggaaggttcatggtacatcctct

SEQ ID NO: 459247 - DNA, 30 bp, Artificial Sequence
  Synthetic oligonucleotide
gactgtggattccaggctttcggatcctct

SEQ ID NO: 459248 - DNA, 30 bp, Artificial Sequence
  Synthetic oligonucleotide
tacaactgcggggggagttagggatcctct

SEQ ID NO: 459249 - DNA, 30 bp, Artificial Sequence
  Synthetic oligonucleotide
aattgctaacaccacatacacaagtcctct

SEQ ID NO: 459250 - DNA, 30 bp, Artificial Sequence
  Synthetic oligonucleotide
tacgactgtcctgcgttcgtcctgtcctct

SEQ ID NO: 459251 - DNA, 30 bp, Artificial Sequence
  Synthetic oligonucleotide
aatcaggactagcggtttgagcattcctct

SEQ ID NO: 459252 - DNA, 30 bp, Artificial Sequence
  Synthetic oligonucleotide
tccagagatgagttatcggtgacaagctct

SEQ ID NO: 459253 - DNA, 30 bp, Artificial Sequence
  Synthetic oligonucleotide
acttatgccggtaccgcgatagagagctct

SEQ ID NO: 459254 - DNA, 30 bp, Artificial Sequence
  Synthetic oligonucleotide
ggatctgcacagcatagtcagtcgagctct

SEQ ID NO: 459255 - DNA, 30 bp, Artificial Sequence
  Synthetic oligonucleotide
gttttgcgtgttttagcacaaaggagctct

SEQ ID NO: 459256 - DNA, 30 bp, Artificial Sequence
  Synthetic oligonucleotide
cttataaatcaggcgcggataaaacgctct

SEQ ID NO: 459257 - DNA, 30 bp, Artificial Sequence
  Synthetic oligonucleotide
ccgcttaagtctcacgacgtcggacgctct

SEQ ID NO: 459258 - DNA, 30 bp, Artificial Sequence
  Synthetic oligonucleotide
agggtcaagataatcatcttgaaccgctct

SEQ ID NO: 459259 - DNA, 30 bp, Artificial Sequence
  Synthetic oligonucleotide
tgattaggtagatccgcgtagaagcgctct

SEQ ID NO: 459260 - DNA, 30 bp, Artificial Sequence
  Synthetic oligonucleotide
tggtatacaacggagcgtttgcagcgctct

SEQ ID NO: 459261 - DNA, 30 bp, Artificial Sequence
  Synthetic oligonucleotide
tccacgttttatgacacgtacgtgcgctct

SEQ ID NO: 459262 - DNA, 30 bp, Artificial Sequence
  Synthetic oligonucleotide
tatgaaattcattcccagctcgccggctct

SEQ ID NO: 459263 - DNA, 30 bp, Artificial Sequence
  Synthetic oligonucleotide
ctactgtaaaagaagctctgaagcggctct

SEQ ID NO: 459264 - DNA, 30 bp, Artificial Sequence
  Synthetic oligonucleotide
acatgatcgtcacgtgctagaccgggctct

SEQ ID NO: 459265 - DNA, 31 bp, Artificial Sequence
  Synthetic oligonucleotide
ggagcctttaagtgctcgcctaggtggctct

SEQ ID NO: 459266 - DNA, 30 bp, Artificial Sequence
  Synthetic oligonucleotide
gactacttttcactttaccaacttggctct

SEQ ID NO: 459267 - DNA, 30 bp, Artificial Sequence
  Synthetic oligonucleotide
ctcttggatcgagtatccacaagatgctct

SEQ ID NO: 459268 - DNA, 30 bp, Artificial Sequence
  Synthetic oligonucleotide
aagtgtcagtatacaggggattgatgctct

SEQ ID NO: 459269 - DNA, 30 bp, Artificial Sequence
  Synthetic oligonucleotide
ataatccgcatggaagcacccatatgctct

SEQ ID NO: 459270 - DNA, 30 bp, Artificial Sequence
  Synthetic oligonucleotide
attagcgggtttaacccagttgtatgctct

SEQ ID NO: 459271 - DNA, 30 bp, Artificial Sequence
  Synthetic oligonucleotide
tgatgacgaacatggcagcaaacctgctct

SEQ ID NO: 459272 - DNA, 30 bp, Artificial Sequence
  Synthetic oligonucleotide
gagcaatcgccccaaggcaggaagtgctct

SEQ ID NO: 459273 - DNA, 30 bp, Artificial Sequence
  Synthetic oligonucleotide
cctatataatagtcccgaagggcgtgctct

SEQ ID NO: 459274 - DNA, 30 bp, Artificial Sequence
  Synthetic oligonucleotide
cgttgaaccaatatcttattgtcttgctct

SEQ ID NO: 459275 - DNA, 30 bp, Artificial Sequence
  Synthetic oligonucleotide
acatagccgtgataaccctcctgttgctct

SEQ ID NO: 459276 - DNA, 30 bp, Artificial Sequence
  Synthetic oligonucleotide
actttgttttggcattctgagtgaatctct

SEQ ID NO: 459277 - DNA, 29 bp, Artificial Sequence
  Synthetic oligonucleotide
ctcttctctgccccctgtttttcatctct

SEQ ID NO: 459278 - DNA, 30 bp, Artificial Sequence
  Synthetic oligonucleotide
gagtcagtccagagctccgcaaggatctct

SEQ ID NO: 459279 - DNA, 31 bp, Artificial Sequence
  Synthetic oligonucleotide
ctcttctctggccccctgtttttctatctct

SEQ ID NO: 459280 - DNA, 30 bp, Artificial Sequence
  Synthetic oligonucleotide
gagagcaggggcaatagagaggaactctct

SEQ ID NO: 459281 - DNA, 30 bp, Artificial Sequence
  Synthetic oligonucleotide
attgcgcggttaagaatgtccatgctctct

SEQ ID NO: 459282 - DNA, 30 bp, Artificial Sequence
  Synthetic oligonucleotide
tgacagaacatcgatggtagctttctctct

SEQ ID NO: 459283 - DNA, 30 bp, Artificial Sequence
  Synthetic oligonucleotide
atccggctaacttccgcgcaaagcgtctct

SEQ ID NO: 459284 - DNA, 30 bp, Artificial Sequence
  Synthetic oligonucleotide
tcagctatacttatactgtagttcgtctct

SEQ ID NO: 459285 - DNA, 30 bp, Artificial Sequence
  Synthetic oligonucleotide
tcctcagagaagttttacatcatggtctct

SEQ ID NO: 459286 - DNA, 30 bp, Artificial Sequence
  Synthetic oligonucleotide
acgttccgagcgggttttattatggtctct

SEQ ID NO: 459287 - DNA, 30 bp, Artificial Sequence
  Synthetic oligonucleotide
atgcgaagctccttgaagacattggtctct

SEQ ID NO: 459288 - DNA, 30 bp, Artificial Sequence
  Synthetic oligonucleotide
gtcttaaaatgatagctcgggattgtctct

SEQ ID NO: 459289 - DNA, 30 bp, Artificial Sequence
  Synthetic oligonucleotide
ggtccataaaaccccctaaaaagattctct

SEQ ID NO: 459290 - DNA, 30 bp, Artificial Sequence
  Synthetic oligonucleotide
ttcaggggtccagtatttaggtccttctct

SEQ ID NO: 459291 - DNA, 30 bp, Artificial Sequence
  Synthetic oligonucleotide
ctttggaacatctctccaggcagcttctct

SEQ ID NO: 459292 - DNA, 30 bp, Artificial Sequence
  Synthetic oligonucleotide
gtttaagccatgccgggcacgagcttctct

SEQ ID NO: 459293 - DNA, 30 bp, Artificial Sequence
  Synthetic oligonucleotide
acacccggcgcatgctctcgtggcttctct

SEQ ID NO: 459294 - DNA, 30 bp, Artificial Sequence
  Synthetic oligonucleotide
cgtccttggaaccaaagatttatcttctct

SEQ ID NO: 459295 - DNA, 30 bp, Artificial Sequence
  Synthetic oligonucleotide
tagacagcgaacgggtgttaaacgttctct

SEQ ID NO: 459296 - DNA, 30 bp, Artificial Sequence
  Synthetic oligonucleotide
gcaaggccaacttcaccgcggcctttctct

SEQ ID NO: 459297 - DNA, 30 bp, Artificial Sequence
  Synthetic oligonucleotide
gcgagcgccttacagaggctgtgtttctct

SEQ ID NO: 459298 - DNA, 30 bp, Artificial Sequence
  Synthetic oligonucleotide
accggcccgcgactgcaacaatttttctct

SEQ ID NO: 459299 - DNA, 30 bp, Artificial Sequence
  Synthetic oligonucleotide
agtcgtccagctagaactaactaaaagtct

SEQ ID NO: 459300 - DNA, 30 bp, Artificial Sequence
  Synthetic oligonucleotide
ggtattccagacgagtcaaatgacaagtct

SEQ ID NO: 459301 - DNA, 30 bp, Artificial Sequence
  Synthetic oligonucleotide
ttagggacgctatttagttattacaagtct

SEQ ID NO: 459302 - DNA, 30 bp, Artificial Sequence
  Synthetic oligonucleotide
aatattactatacggtttctttcccagtct

SEQ ID NO: 459303 - DNA, 30 bp, Artificial Sequence
  Synthetic oligonucleotide
ttctcagtggtctcgagccgtgtccagtct

SEQ ID NO: 459304 - DNA, 30 bp, Artificial Sequence
  Synthetic oligonucleotide
tcatttatatcgcggtggactacgcagtct

SEQ ID NO: 459305 - DNA, 30 bp, Artificial Sequence
  Synthetic oligonucleotide
aaacgagaataaatcgtggtgccgcagtct

SEQ ID NO: 459306 - DNA, 30 bp, Artificial Sequence
  Synthetic oligonucleotide
ggacgttttgttaagagggtttttcagtct

SEQ ID NO: 459307 - DNA, 30 bp, Artificial Sequence
  Synthetic oligonucleotide
cgggccccaaagtgctaactttcagagtct

SEQ ID NO: 459308 - DNA, 30 bp, Artificial Sequence
  Synthetic oligonucleotide
acgccaagattagtctaaagattagagtct

SEQ ID NO: 459309 - DNA, 30 bp, Artificial Sequence
  Synthetic oligonucleotide
ttgcattctgattggtaaatgcacgagtct

SEQ ID NO: 459310 - DNA, 30 bp, Artificial Sequence
  Synthetic oligonucleotide
acgaagccccctcatgctcatgtcgagtct

SEQ ID NO: 459311 - DNA, 30 bp, Artificial Sequence
  Synthetic oligonucleotide
cctccagggtaaacttgatttatggagtct

SEQ ID NO: 459312 - DNA, 30 bp, Artificial Sequence
  Synthetic oligonucleotide
agattattctgagcagcgacagttgagtct

SEQ ID NO: 459313 - DNA, 30 bp, Artificial Sequence
  Synthetic oligonucleotide
ttgactgtgtaagtcttagctaaatagtct

SEQ ID NO: 459314 - DNA, 30 bp, Artificial Sequence
  Synthetic oligonucleotide
caagtgggagtttgtcgcccgccatagtct

SEQ ID NO: 459315 - DNA, 30 bp, Artificial Sequence
  Synthetic oligonucleotide
ccccttgggggcacacgtgggacgtagtct

SEQ ID NO: 459316 - DNA, 30 bp, Artificial Sequence
  Synthetic oligonucleotide
tagactaaagcacgtctagttacgtagtct

SEQ ID NO: 459317 - DNA, 30 bp, Artificial Sequence
  Synthetic oligonucleotide
ttggccttaaatggtaaccttccaacgtct

SEQ ID NO: 459318 - DNA, 30 bp, Artificial Sequence
  Synthetic oligonucleotide
agaccaatttcacgtaccctcgcaacgtct

SEQ ID NO: 459319 - DNA, 30 bp, Artificial Sequence
  Synthetic oligonucleotide
gagcatacctgccaatggttaatgacgtct

SEQ ID NO: 459320 - DNA, 30 bp, Artificial Sequence
  Synthetic oligonucleotide
tgttcgtttagctactgttatacgccgtct

SEQ ID NO: 459321 - DNA, 30 bp, Artificial Sequence
  Synthetic oligonucleotide
actctacggatactggaccgtgatccgtct

SEQ ID NO: 459322 - DNA, 30 bp, Artificial Sequence
  Synthetic oligonucleotide
cggcgttagacggtctactacgttccgtct

SEQ ID NO: 459323 - DNA, 30 bp, Artificial Sequence
  Synthetic oligonucleotide
gcgcgggcgtctttttgacgcaacgcgtct

SEQ ID NO: 459324 - DNA, 30 bp, Artificial Sequence
  Synthetic oligonucleotide
ttatcgagcatgtcgtatgaaggatcgtct

SEQ ID NO: 459325 - DNA, 30 bp, Artificial Sequence
  Synthetic oligonucleotide
gccgcctcggaagccttggcgccgtcgtct

SEQ ID NO: 459326 - DNA, 30 bp, Artificial Sequence
  Synthetic oligonucleotide
ggtccggctggcgctcatgatcattcgtct

SEQ ID NO: 459327 - DNA, 30 bp, Artificial Sequence
  Synthetic oligonucleotide
agatggtactgctagcgtttattaaggtct

SEQ ID NO: 459328 - DNA, 30 bp, Artificial Sequence
  Synthetic oligonucleotide
cgtgcagatttccacgggttgcccaggtct

SEQ ID NO: 459329 - DNA, 30 bp, Artificial Sequence
  Synthetic oligonucleotide
atgttaaacaaggtggccggacgcaggtct

SEQ ID NO: 459330 - DNA, 30 bp, Artificial Sequence
  Synthetic oligonucleotide
agcacgagattgccgccctccggcaggtct

SEQ ID NO: 459331 - DNA, 30 bp, Artificial Sequence
  Synthetic oligonucleotide
tgagtctgccgcttggcgaacttgaggtct

SEQ ID NO: 459332 - DNA, 30 bp, Artificial Sequence
  Synthetic oligonucleotide
ccccgttgactttatttcaattataggtct

SEQ ID NO: 459333 - DNA, 30 bp, Artificial Sequence
  Synthetic oligonucleotide
caggaggtcacgtacctttcttataggtct

SEQ ID NO: 459334 - DNA, 30 bp, Artificial Sequence
  Synthetic oligonucleotide
gcctcttacaaaagatcgccccctaggtct

SEQ ID NO: 459335 - DNA, 30 bp, Artificial Sequence
  Synthetic oligonucleotide
agtatcgttcgcgcactgtgaaaacggtct

SEQ ID NO: 459336 - DNA, 30 bp, Artificial Sequence
  Synthetic oligonucleotide
aacggcggttagatgaaccgtacacggtct

SEQ ID NO: 459337 - DNA, 30 bp, Artificial Sequence
  Synthetic oligonucleotide
tctgatacacattttgttgtagcacggtct

SEQ ID NO: 459338 - DNA, 30 bp, Artificial Sequence
  Synthetic oligonucleotide
caaccctcccttcgggatttcagacggtct

SEQ ID NO: 459339 - DNA, 30 bp, Artificial Sequence
  Synthetic oligonucleotide
gatcccagtgccttaagaaggcgccggtct

SEQ ID NO: 459340 - DNA, 30 bp, Artificial Sequence
  Synthetic oligonucleotide
tttttagttgatggcttactctagcggtct

SEQ ID NO: 459341 - DNA, 30 bp, Artificial Sequence
  Synthetic oligonucleotide
gaagtctgtcgacccgtgaggccagggtct

SEQ ID NO: 459342 - DNA, 40 bp, Artificial Sequence
  Synthetic oligonucleotide
aagactagttactgggcttttttgtttagagatagggtct

SEQ ID NO: 459343 - DNA, 30 bp, Artificial Sequence
  Synthetic oligonucleotide
tgagttcgtactgttaagccataggggtct

SEQ ID NO: 459344 - DNA, 30 bp, Artificial Sequence
  Synthetic oligonucleotide
gtggtaattaatgcagatcggcgggggtct

SEQ ID NO: 459345 - DNA, 30 bp, Artificial Sequence
  Synthetic oligonucleotide
ccacggtattctattggtggaattgggtct

SEQ ID NO: 459346 - DNA, 30 bp, Artificial Sequence
  Synthetic oligonucleotide
ctggcctagcatgatctcaaccttgggtct

SEQ ID NO: 459347 - DNA, 30 bp, Artificial Sequence
  Synthetic oligonucleotide
aataatggaccacgcagttggtttgggtct

SEQ ID NO: 459348 - DNA, 30 bp, Artificial Sequence
  Synthetic oligonucleotide
tctgaattccttgaggcggcgatatggtct

SEQ ID NO: 459349 - DNA, 30 bp, Artificial Sequence
  Synthetic oligonucleotide
tagaaggcgtggaagtcacaaaagtggtct

SEQ ID NO: 459350 - DNA, 30 bp, Artificial Sequence
  Synthetic oligonucleotide
tcgtgactgggtatgaggatatcttggtct

SEQ ID NO: 459351 - DNA, 30 bp, Artificial Sequence
  Synthetic oligonucleotide
tcaaatcagccagatctatgctcttggtct

SEQ ID NO: 459352 - DNA, 30 bp, Artificial Sequence
  Synthetic oligonucleotide
ttctgcgccaactacattgaatgttggtct

SEQ ID NO: 459353 - DNA, 30 bp, Artificial Sequence
  Synthetic oligonucleotide
cgtccaccctgcatggcaacaaacatgtct

SEQ ID NO: 459354 - DNA, 30 bp, Artificial Sequence
  Synthetic oligonucleotide
aaacaatgcagtaagccatccggcatgtct

SEQ ID NO: 459355 - DNA, 30 bp, Artificial Sequence
  Synthetic oligonucleotide
gcggctactccagaacgcatgtgcatgtct

SEQ ID NO: 459356 - DNA, 30 bp, Artificial Sequence
  Synthetic oligonucleotide
actccagttgtatttgacgaggagatgtct

SEQ ID NO: 459357 - DNA, 30 bp, Artificial Sequence
  Synthetic oligonucleotide
gtcaaccggcgcacaatccaaccgatgtct

SEQ ID NO: 459358 - DNA, 30 bp, Artificial Sequence
  Synthetic oligonucleotide
tttcctttgttaggtgtttcgcatatgtct

SEQ ID NO: 459359 - DNA, 30 bp, Artificial Sequence
  Synthetic oligonucleotide
ttacagaattatacgcgaaagagtatgtct

SEQ ID NO: 459360 - DNA, 30 bp, Artificial Sequence
  Synthetic oligonucleotide
aacgcttcaagcgtttgggcagcactgtct

SEQ ID NO: 459361 - DNA, 30 bp, Artificial Sequence
  Synthetic oligonucleotide
aatggtcatggtaatatcgtaggcctgtct

SEQ ID NO: 459362 - DNA, 30 bp, Artificial Sequence
  Synthetic oligonucleotide
ttttcacacaaccggtataagggcctgtct

SEQ ID NO: 459363 - DNA, 30 bp, Artificial Sequence
  Synthetic oligonucleotide
gggttacggccggatatagcgctcctgtct

SEQ ID NO: 459364 - DNA, 30 bp, Artificial Sequence
  Synthetic oligonucleotide
tagatacactcttagcgagctctcctgtct

SEQ ID NO: 459365 - DNA, 30 bp, Artificial Sequence
  Synthetic oligonucleotide
ccttgtggcggatgcagcgattggctgtct

SEQ ID NO: 459366 - DNA, 30 bp, Artificial Sequence
  Synthetic oligonucleotide
gagcttgtacgtgtcgcgggctgtctgtct

SEQ ID NO: 459367 - DNA, 30 bp, Artificial Sequence
  Synthetic oligonucleotide
ctcctacaataaccgaaatacccagtgtct

SEQ ID NO: 459368 - DNA, 30 bp, Artificial Sequence
  Synthetic oligonucleotide
aaagttttgtgattagacgcggtagtgtct

SEQ ID NO: 459369 - DNA, 30 bp, Artificial Sequence
  Synthetic oligonucleotide
atcaacacagcgtagcatagacccgtgtct

SEQ ID NO: 459370 - DNA, 30 bp, Artificial Sequence
  Synthetic oligonucleotide
ctattacttccagcaacagcccgcgtgtct

SEQ ID NO: 459371 - DNA, 30 bp, Artificial Sequence
  Synthetic oligonucleotide
acccatataaggtgcgttttatgcgtgtct

SEQ ID NO: 459372 - DNA, 30 bp, Artificial Sequence
  Synthetic oligonucleotide
gcggaacaagaccacatggtttaggtgtct

SEQ ID NO: 459373 - DNA, 30 bp, Artificial Sequence
  Synthetic oligonucleotide
gtggttagtaccgtaataggcagggtgtct

SEQ ID NO: 459374 - DNA, 30 bp, Artificial Sequence
  Synthetic oligonucleotide
cagtattcaaagtccatgacgggggtgtct

SEQ ID NO: 459375 - DNA, 30 bp, Artificial Sequence
  Synthetic oligonucleotide
agaatgcgcaccgcggcttggtgggtgtct

SEQ ID NO: 459376 - DNA, 30 bp, Artificial Sequence
  Synthetic oligonucleotide
catgctccgatgtgactcttagtggtgtct

SEQ ID NO: 459377 - DNA, 30 bp, Artificial Sequence
  Synthetic oligonucleotide
ttcagttgtcttgtgctcaagtatgtgtct

SEQ ID NO: 459378 - DNA, 30 bp, Artificial Sequence
  Synthetic oligonucleotide
cttcctaaaagctaagtacgcattgtgtct

SEQ ID NO: 459379 - DNA, 30 bp, Artificial Sequence
  Synthetic oligonucleotide
gtactcttggaaagagtgtaaacattgtct

SEQ ID NO: 459380 - DNA, 30 bp, Artificial Sequence
  Synthetic oligonucleotide
gatagccgacgttacggccagcgattgtct

SEQ ID NO: 459381 - DNA, 30 bp, Artificial Sequence
  Synthetic oligonucleotide
tgcatacccccgcaaagatcgggattgtct

SEQ ID NO: 459382 - DNA, 30 bp, Artificial Sequence
  Synthetic oligonucleotide
cccacttactcacgattttttatcttgtct

SEQ ID NO: 459383 - DNA, 30 bp, Artificial Sequence
  Synthetic oligonucleotide
gagagttacgcacttaagtcgaatttgtct

SEQ ID NO: 459384 - DNA, 30 bp, Artificial Sequence
  Synthetic oligonucleotide
tagggtaaggtatgttacaccattttgtct

SEQ ID NO: 459385 - DNA, 30 bp, Artificial Sequence
  Synthetic oligonucleotide
ggccaggacttaggctacaccgacaattct

SEQ ID NO: 459386 - DNA, 30 bp, Artificial Sequence
  Synthetic oligonucleotide
tgcgacgtagacagtcaagtgtgcaattct

SEQ ID NO: 459387 - DNA, 30 bp, Artificial Sequence
  Synthetic oligonucleotide
ggtaagaactattaactgtccaagaattct

SEQ ID NO: 459388 - DNA, 30 bp, Artificial Sequence
  Synthetic oligonucleotide
ggctcttgacacaagtcgaactctaattct

SEQ ID NO: 459389 - DNA, 30 bp, Artificial Sequence
  Synthetic oligonucleotide
aaaaatcgggtgccctaattgcaacattct

SEQ ID NO: 459390 - DNA, 30 bp, Artificial Sequence
  Synthetic oligonucleotide
acctggtctagagcacctcttaaccattct

SEQ ID NO: 459391 - DNA, 30 bp, Artificial Sequence
  Synthetic oligonucleotide
atggctgatggggtgatcccataccattct

SEQ ID NO: 459392 - DNA, 30 bp, Artificial Sequence
  Synthetic oligonucleotide
tttgctaggtggccaactgtctagcattct

SEQ ID NO: 459393 - DNA, 30 bp, Artificial Sequence
  Synthetic oligonucleotide
tatgtttcgcgtcaagcccgggcgcattct

SEQ ID NO: 459394 - DNA, 30 bp, Artificial Sequence
  Synthetic oligonucleotide
tggatagagcgggaatgaataagtcattct

SEQ ID NO: 459395 - DNA, 30 bp, Artificial Sequence
  Synthetic oligonucleotide
tatgcgtcgcgtcgaccccagggtcattct

SEQ ID NO: 459396 - DNA, 30 bp, Artificial Sequence
  Synthetic oligonucleotide
gagaagactttagtagagggagttcattct

SEQ ID NO: 459397 - DNA, 30 bp, Artificial Sequence
  Synthetic oligonucleotide
ggggattccatgaccacccttttggattct

SEQ ID NO: 459398 - DNA, 30 bp, Artificial Sequence
  Synthetic oligonucleotide
ccggtacacggcgcactcataggatattct

SEQ ID NO: 459399 - DNA, 30 bp, Artificial Sequence
  Synthetic oligonucleotide
atccgggttggcgcaaggtggttatattct

SEQ ID NO: 459400 - DNA, 30 bp, Artificial Sequence
  Synthetic oligonucleotide
ttgaacgtttcccaagtcagaacctattct

SEQ ID NO: 459401 - DNA, 30 bp, Artificial Sequence
  Synthetic oligonucleotide
cgctcttttccgggtagtactgagtattct

SEQ ID NO: 459402 - DNA, 30 bp, Artificial Sequence
  Synthetic oligonucleotide
cacaaaatactccggtcccatacgtattct

SEQ ID NO: 459403 - DNA, 30 bp, Artificial Sequence
  Synthetic oligonucleotide
acgaagcagggctctagcgtttggtattct

SEQ ID NO: 459404 - DNA, 30 bp, Artificial Sequence
  Synthetic oligonucleotide
ggtctcatgccacattaaacggtgtattct

SEQ ID NO: 459405 - DNA, 30 bp, Artificial Sequence
  Synthetic oligonucleotide
agccgtccgcgataggagctcccttattct

SEQ ID NO: 459406 - DNA, 30 bp, Artificial Sequence
  Synthetic oligonucleotide
ggggctccgtgcactggggatgcttattct

SEQ ID NO: 459407 - DNA, 30 bp, Artificial Sequence
  Synthetic oligonucleotide
atgcgggtacgtccctcttgaatttattct

SEQ ID NO: 459408 - DNA, 30 bp, Artificial Sequence
  Synthetic oligonucleotide
cggcgaccctacgtatgtccgtcgacttct

SEQ ID NO: 459409 - DNA, 30 bp, Artificial Sequence
  Synthetic oligonucleotide
gcctctcgcgatcattacattgatacttct

SEQ ID NO: 459410 - DNA, 30 bp, Artificial Sequence
  Synthetic oligonucleotide
aaggcggtttcgagatgtagctctacttct

SEQ ID NO: 459411 - DNA, 30 bp, Artificial Sequence
  Synthetic oligonucleotide
ttttcttcagacgaacaaacgattacttct

SEQ ID NO: 459412 - DNA, 30 bp, Artificial Sequence
  Synthetic oligonucleotide
gctgatcccacgggcctaagtattacttct

SEQ ID NO: 459413 - DNA, 30 bp, Artificial Sequence
  Synthetic oligonucleotide
ttgctagctagctttctagatggaccttct

SEQ ID NO: 459414 - DNA, 30 bp, Artificial Sequence
  Synthetic oligonucleotide
aatgtctgttaccctgcgatcatgccttct

SEQ ID NO: 459415 - DNA, 30 bp, Artificial Sequence
  Synthetic oligonucleotide
gacaccgacataggatccatggatccttct

SEQ ID NO: 459416 - DNA, 30 bp, Artificial Sequence
  Synthetic oligonucleotide
aagcaggcaaggggaccattctgtccttct

SEQ ID NO: 459417 - DNA, 30 bp, Artificial Sequence
  Synthetic oligonucleotide
ttaaaaagccaggaaaaacgcgttccttct

SEQ ID NO: 459418 - DNA, 30 bp, Artificial Sequence
  Synthetic oligonucleotide
gacaatctttaggaaagtcacgtagcttct

SEQ ID NO: 459419 - DNA, 30 bp, Artificial Sequence
  Synthetic oligonucleotide
gtactgaaacagatcacgaaggtagcttct

SEQ ID NO: 459420 - DNA, 30 bp, Artificial Sequence
  Synthetic oligonucleotide
tgaagcggaataggcccgcgtaaggcttct

SEQ ID NO: 459421 - DNA, 30 bp, Artificial Sequence
  Synthetic oligonucleotide
gaaatcctttgtgcgcgaatattggcttct

SEQ ID NO: 459422 - DNA, 30 bp, Artificial Sequence
  Synthetic oligonucleotide
caaaaatttacactatctaatgttgcttct

SEQ ID NO: 459423 - DNA, 30 bp, Artificial Sequence
  Synthetic oligonucleotide
ctggctgcgggttctatcccgcaatcttct

SEQ ID NO: 459424 - DNA, 30 bp, Artificial Sequence
  Synthetic oligonucleotide
ggccgatttcgttaaacccctcgatcttct

SEQ ID NO: 459425 - DNA, 30 bp, Artificial Sequence
  Synthetic oligonucleotide
atgtggaagaaggcctggtactgatcttct

SEQ ID NO: 459426 - DNA, 30 bp, Artificial Sequence
  Synthetic oligonucleotide
ttaggttccactcgttcactgtcctcttct

SEQ ID NO: 459427 - DNA, 30 bp, Artificial Sequence
  Synthetic oligonucleotide
aactttagctatggctggtcttggtcttct

SEQ ID NO: 459428 - DNA, 30 bp, Artificial Sequence
  Synthetic oligonucleotide
tagcaatcagtcggagctattgtgtcttct

SEQ ID NO: 459429 - DNA, 30 bp, Artificial Sequence
  Synthetic oligonucleotide
gtgtgcttatctaaaactggtctttcttct

SEQ ID NO: 459430 - DNA, 30 bp, Artificial Sequence
  Synthetic oligonucleotide
ggaaccgggcaggatcctatcttttcttct

SEQ ID NO: 459431 - DNA, 30 bp, Artificial Sequence
  Synthetic oligonucleotide
caacaagtgggagactccgttaaaagttct

SEQ ID NO: 459432 - DNA, 30 bp, Artificial Sequence
  Synthetic oligonucleotide
accataacttcttttgacacagaaagttct

SEQ ID NO: 459433 - DNA, 30 bp, Artificial Sequence
  Synthetic oligonucleotide
tagaacgactggcaccaaaaataaagttct

SEQ ID NO: 459434 - DNA, 30 bp, Artificial Sequence
  Synthetic oligonucleotide
ggcctcgcacgaatggttgcgctcagttct

SEQ ID NO: 459435 - DNA, 30 bp, Artificial Sequence
  Synthetic oligonucleotide
cgtccgctggctgtcggacatgtcagttct

SEQ ID NO: 459436 - DNA, 30 bp, Artificial Sequence
  Synthetic oligonucleotide
ttctcgtcgcaagtgagatcccagagttct

SEQ ID NO: 459437 - DNA, 30 bp, Artificial Sequence
  Synthetic oligonucleotide
gaaacacgaatagatgttcgttcgagttct

SEQ ID NO: 459438 - DNA, 30 bp, Artificial Sequence
  Synthetic oligonucleotide
ggaaaccaccgcacgcgttcggggagttct

SEQ ID NO: 459439 - DNA, 30 bp, Artificial Sequence
  Synthetic oligonucleotide
agcctaattctgttcggatgcctgagttct

SEQ ID NO: 459440 - DNA, 30 bp, Artificial Sequence
  Synthetic oligonucleotide
aaccactggggagcattaacgagtagttct

SEQ ID NO: 459441 - DNA, 30 bp, Artificial Sequence
  Synthetic oligonucleotide
ctacatgaggctagaggacttattagttct

SEQ ID NO: 459442 - DNA, 30 bp, Artificial Sequence
  Synthetic oligonucleotide
aaaactattaggtgagaatgttcccgttct

SEQ ID NO: 459443 - DNA, 30 bp, Artificial Sequence
  Synthetic oligonucleotide
ctaatcaaatcaggcgcccatgcgcgttct

SEQ ID NO: 459444 - DNA, 30 bp, Artificial Sequence
  Synthetic oligonucleotide
cagaaccggactgcactataatgtcgttct

SEQ ID NO: 459445 - DNA, 30 bp, Artificial Sequence
  Synthetic oligonucleotide
ttctgaatagaccaagcagatattcgttct

SEQ ID NO: 459446 - DNA, 31 bp, Artificial Sequence
  Synthetic oligonucleotide
accagttataagatcgacttgcacaggttct

SEQ ID NO: 459447 - DNA, 30 bp, Artificial Sequence
  Synthetic oligonucleotide
aatgcaatgccttttagaacacccggttct

SEQ ID NO: 459448 - DNA, 30 bp, Artificial Sequence
  Synthetic oligonucleotide
ggaacgatgagtcatccgattatcggttct

SEQ ID NO: 459449 - DNA, 30 bp, Artificial Sequence
  Synthetic oligonucleotide
ataagggttataccaaagggctagggttct

SEQ ID NO: 459450 - DNA, 30 bp, Artificial Sequence
  Synthetic oligonucleotide
actgagaacacaggtatatggttgggttct

SEQ ID NO: 459451 - DNA, 30 bp, Artificial Sequence
  Synthetic oligonucleotide
aaaaccgcgatgccaaacgttgcatgttct

SEQ ID NO: 459452 - DNA, 30 bp, Artificial Sequence
  Synthetic oligonucleotide
tgaacgccagcaggcagtattacctgttct

SEQ ID NO: 459453 - DNA, 30 bp, Artificial Sequence
  Synthetic oligonucleotide
cgcctggtctaataggagaccagctgttct

SEQ ID NO: 459454 - DNA, 30 bp, Artificial Sequence
  Synthetic oligonucleotide
tttagccttggaatcctatcaatctgttct

SEQ ID NO: 459455 - DNA, 30 bp, Artificial Sequence
  Synthetic oligonucleotide
agaccttagatcctgcaaggggtctgttct

SEQ ID NO: 459456 - DNA, 30 bp, Artificial Sequence
  Synthetic oligonucleotide
gaaaagaatcgcgggaaggcatattgttct

SEQ ID NO: 459457 - DNA, 30 bp, Artificial Sequence
  Synthetic oligonucleotide
gcgtacgtcctgattgtcagactttgttct

SEQ ID NO: 459458 - DNA, 30 bp, Artificial Sequence
  Synthetic oligonucleotide
atccagaagagggcgtccagcgtttgttct

SEQ ID NO: 459459 - DNA, 30 bp, Artificial Sequence
  Synthetic oligonucleotide
cgtcattcgattacttgtggtaaaatttct

SEQ ID NO: 459460 - DNA, 30 bp, Artificial Sequence
  Synthetic oligonucleotide
taggccccggaaatatgaccggaaatttct

SEQ ID NO: 459461 - DNA, 30 bp, Artificial Sequence
  Synthetic oligonucleotide
cagttgcatgggcttcttcatgcaatttct

SEQ ID NO: 459462 - DNA, 30 bp, Artificial Sequence
  Synthetic oligonucleotide
tgactgttatttagtggtatctgaatttct

SEQ ID NO: 459463 - DNA, 30 bp, Artificial Sequence
  Synthetic oligonucleotide
gggtatgccttgggtaataagaacatttct

SEQ ID NO: 459464 - DNA, 30 bp, Artificial Sequence
  Synthetic oligonucleotide
ctagtgaattatacctcgcataccatttct

SEQ ID NO: 459465 - DNA, 30 bp, Artificial Sequence
  Synthetic oligonucleotide
ggtcttgagcataaacgcctttccatttct

SEQ ID NO: 459466 - DNA, 30 bp, Artificial Sequence
  Synthetic oligonucleotide
tgcagtacagcggtaagcggtcagatttct

SEQ ID NO: 459467 - DNA, 30 bp, Artificial Sequence
  Synthetic oligonucleotide
tgtctataaagcgcgcgccttaggatttct

SEQ ID NO: 459468 - DNA, 30 bp, Artificial Sequence
  Synthetic oligonucleotide
ttcacgtggcgtgtatattgactgatttct

SEQ ID NO: 459469 - DNA, 30 bp, Artificial Sequence
  Synthetic oligonucleotide
gtctagacatcattcaccggggtgatttct

SEQ ID NO: 459470 - DNA, 30 bp, Artificial Sequence
  Synthetic oligonucleotide
ctatcccgcagtgcatggaattatatttct

SEQ ID NO: 459471 - DNA, 30 bp, Artificial Sequence
  Synthetic oligonucleotide
gggcgaggcaccaggggatagcttatttct

SEQ ID NO: 459472 - DNA, 30 bp, Artificial Sequence
  Synthetic oligonucleotide
attgatacgctacatagggacaaactttct

SEQ ID NO: 459473 - DNA, 30 bp, Artificial Sequence
  Synthetic oligonucleotide
taaaaaactgaaagttcgcgttaactttct

SEQ ID NO: 459474 - DNA, 30 bp, Artificial Sequence
  Synthetic oligonucleotide
actggggaggtccaaattgaatacctttct

SEQ ID NO: 459475 - DNA, 30 bp, Artificial Sequence
  Synthetic oligonucleotide
agatcaggtgaggcggcatctagcctttct

SEQ ID NO: 459476 - DNA, 30 bp, Artificial Sequence
  Synthetic oligonucleotide
attcttatggtgctaatggacaagctttct

SEQ ID NO: 459477 - DNA, 30 bp, Artificial Sequence
  Synthetic oligonucleotide
ctggagccgtatactgcggaacgtctttct

SEQ ID NO: 459478 - DNA, 30 bp, Artificial Sequence
  Synthetic oligonucleotide
tgtacataggagtaggtgggtcgtctttct

SEQ ID NO: 459479 - DNA, 30 bp, Artificial Sequence
  Synthetic oligonucleotide
atcaagggacctcgatcatagcttctttct

SEQ ID NO: 459480 - DNA, 30 bp, Artificial Sequence
  Synthetic oligonucleotide
ttttgtgcggggaggctttgaatagtttct

SEQ ID NO: 459481 - DNA, 30 bp, Artificial Sequence
  Synthetic oligonucleotide
attaacttatctttccatggtaacgtttct

SEQ ID NO: 459482 - DNA, 30 bp, Artificial Sequence
  Synthetic oligonucleotide
tttatttgcgccacatccaatgacgtttct

SEQ ID NO: 459483 - DNA, 30 bp, Artificial Sequence
  Synthetic oligonucleotide
ggagaacgccacgggcatagggtcgtttct

SEQ ID NO: 459484 - DNA, 30 bp, Artificial Sequence
  Synthetic oligonucleotide
aggggtgaatttccgggtacggcggtttct

SEQ ID NO: 459485 - DNA, 30 bp, Artificial Sequence
  Synthetic oligonucleotide
tgttacctagcggtatgatcatcggtttct

SEQ ID NO: 459486 - DNA, 30 bp, Artificial Sequence
  Synthetic oligonucleotide
gccaaagtggccggggcgcgctcggtttct

SEQ ID NO: 459487 - DNA, 30 bp, Artificial Sequence
  Synthetic oligonucleotide
ttgagtcaagtttatggtgtagtggtttct

SEQ ID NO: 459488 - DNA, 30 bp, Artificial Sequence
  Synthetic oligonucleotide
tgcgcacagttgcgatccgcacctgtttct

SEQ ID NO: 459489 - DNA, 30 bp, Artificial Sequence
  Synthetic oligonucleotide
gttaagacggagagaccggtgggtgtttct

SEQ ID NO: 459490 - DNA, 30 bp, Artificial Sequence
  Synthetic oligonucleotide
gagtttacttggaatggcgtacaattttct

SEQ ID NO: 459491 - DNA, 30 bp, Artificial Sequence
  Synthetic oligonucleotide
tccgtcacattgtgtattaaactcttttct

SEQ ID NO: 459492 - DNA, 30 bp, Artificial Sequence
  Synthetic oligonucleotide
cgatatgagcttatgctgtcgctcttttct

SEQ ID NO: 459493 - DNA, 30 bp, Artificial Sequence
  Synthetic oligonucleotide
tgagcgcaactatatcttccggggttttct

SEQ ID NO: 459494 - DNA, 30 bp, Artificial Sequence
  Synthetic oligonucleotide
cacagcgagcaaaccaagacactgttttct

SEQ ID NO: 459495 - DNA, 30 bp, Artificial Sequence
  Synthetic oligonucleotide
gtacaaatttggccaggcaagtttttttct

SEQ ID NO: 459496 - DNA, 30 bp, Artificial Sequence
  Synthetic oligonucleotide
gggtggcgtcacaaatctatttttttttct

SEQ ID NO: 459497 - DNA, 30 bp, Artificial Sequence
  Synthetic oligonucleotide
atactggttgcaggatttatagaaaaaagt

SEQ ID NO: 459498 - DNA, 30 bp, Artificial Sequence
  Synthetic oligonucleotide
actacacgcagtgaccctccaacaaaaagt

SEQ ID NO: 459499 - DNA, 30 bp, Artificial Sequence
  Synthetic oligonucleotide
gcacaggcttgtctagattaactaaaaagt

SEQ ID NO: 459500 - DNA, 30 bp, Artificial Sequence
  Synthetic oligonucleotide
tggggaccacacgtacgatatttaaaaagt

SEQ ID NO: 459501 - DNA, 30 bp, Artificial Sequence
  Synthetic oligonucleotide
tttatggtcctaaaccgagcgtccaaaagt

SEQ ID NO: 459502 - DNA, 30 bp, Artificial Sequence
  Synthetic oligonucleotide
attacattcaaaagtaatagtggcaaaagt

SEQ ID NO: 459503 - DNA, 30 bp, Artificial Sequence
  Synthetic oligonucleotide
ttcggctatgggtaagggagcaagaaaagt

SEQ ID NO: 459504 - DNA, 30 bp, Artificial Sequence
  Synthetic oligonucleotide
tagtctacatatttgttattgccacaaagt

SEQ ID NO: 459505 - DNA, 30 bp, Artificial Sequence
  Synthetic oligonucleotide
gcactttgtgcgcggttttcctgacaaagt

SEQ ID NO: 459506 - DNA, 30 bp, Artificial Sequence
  Synthetic oligonucleotide
tcctggacacaagtggggtaatcccaaagt

SEQ ID NO: 459507 - DNA, 30 bp, Artificial Sequence
  Synthetic oligonucleotide
ccccgttcccccaaataagcgatccaaagt

SEQ ID NO: 459508 - DNA, 30 bp, Artificial Sequence
  Synthetic oligonucleotide
aaagagtgccggaaggatgattagcaaagt

SEQ ID NO: 459509 - DNA, 30 bp, Artificial Sequence
  Synthetic oligonucleotide
acactagttgctgcatcgcgtccgcaaagt

SEQ ID NO: 459510 - DNA, 30 bp, Artificial Sequence
  Synthetic oligonucleotide
gttatcgaattcaggcaagcgcggcaaagt

SEQ ID NO: 459511 - DNA, 30 bp, Artificial Sequence
  Synthetic oligonucleotide
cgcactgcaccagggatctccgtgcaaagt

SEQ ID NO: 459512 - DNA, 30 bp, Artificial Sequence
  Synthetic oligonucleotide
aatggcatgaacgcacatggaaatcaaagt

SEQ ID NO: 459513 - DNA, 30 bp, Artificial Sequence
  Synthetic oligonucleotide
gatccttgcgtgcgaagtaactaagaaagt

SEQ ID NO: 459514 - DNA, 30 bp, Artificial Sequence
  Synthetic oligonucleotide
cgctgctttcggaggattaagtaagaaagt

SEQ ID NO: 459515 - DNA, 30 bp, Artificial Sequence
  Synthetic oligonucleotide
ccaaacgtctcactttccgtcccagaaagt

SEQ ID NO: 459516 - DNA, 30 bp, Artificial Sequence
  Synthetic oligonucleotide
tcctggaattttatgttcgtcagagaaagt

SEQ ID NO: 459517 - DNA, 30 bp, Artificial Sequence
  Synthetic oligonucleotide
gaaaaacgcgtactccgggctcgagaaagt

SEQ ID NO: 459518 - DNA, 30 bp, Artificial Sequence
  Synthetic oligonucleotide
aatcacgagtacgatctggcgttcgaaagt

SEQ ID NO: 459519 - DNA, 30 bp, Artificial Sequence
  Synthetic oligonucleotide
ggaagacgtatcactgtaacttttgaaagt

SEQ ID NO: 459520 - DNA, 30 bp, Artificial Sequence
  Synthetic oligonucleotide
catagctggtacctgatagatacataaagt

SEQ ID NO: 459521 - DNA, 30 bp, Artificial Sequence
  Synthetic oligonucleotide
tgccggctcagcattcatcatatataaagt

SEQ ID NO: 459522 - DNA, 30 bp, Artificial Sequence
  Synthetic oligonucleotide
acccgctattctgccttttttagctaaagt

SEQ ID NO: 459523 - DNA, 30 bp, Artificial Sequence
  Synthetic oligonucleotide
tacactgtgcgcgacatacgtacgtaaagt

SEQ ID NO: 459524 - DNA, 30 bp, Artificial Sequence
  Synthetic oligonucleotide
aactaactactgggattcaacaggtaaagt

SEQ ID NO: 459525 - DNA, 30 bp, Artificial Sequence
  Synthetic oligonucleotide
attatccctggggtaaggcactggtaaagt

SEQ ID NO: 459526 - DNA, 30 bp, Artificial Sequence
  Synthetic oligonucleotide
tgttgcgcggaccagtgaaataattaaagt

SEQ ID NO: 459527 - DNA, 30 bp, Artificial Sequence
  Synthetic oligonucleotide
aaagcatcctgaggaggcacaccttaaagt

SEQ ID NO: 459528 - DNA, 30 bp, Artificial Sequence
  Synthetic oligonucleotide
tcttaacattttcatcacgtgcgttaaagt

SEQ ID NO: 459529 - DNA, 30 bp, Artificial Sequence
  Synthetic oligonucleotide
ctcctatcgggagcgtacatgtgttaaagt

SEQ ID NO: 459530 - DNA, 30 bp, Artificial Sequence
  Synthetic oligonucleotide
aaagataaagacgcacggtactcaacaagt

SEQ ID NO: 459531 - DNA, 30 bp, Artificial Sequence
  Synthetic oligonucleotide
taccaactctggatctgtccgtcaacaagt

SEQ ID NO: 459532 - DNA, 30 bp, Artificial Sequence
  Synthetic oligonucleotide
acccccgtaggtcctaggaataacacaagt

SEQ ID NO: 459533 - DNA, 30 bp, Artificial Sequence
  Synthetic oligonucleotide
gaaatacaacgcacaacgtagaagacaagt

SEQ ID NO: 459534 - DNA, 30 bp, Artificial Sequence
  Synthetic oligonucleotide
ttttcagtcgcggatggaaaagtgacaagt

SEQ ID NO: 459535 - DNA, 30 bp, Artificial Sequence
  Synthetic oligonucleotide
ataaaaaaggatccgtggcacctaccaagt

SEQ ID NO: 459536 - DNA, 30 bp, Artificial Sequence
  Synthetic oligonucleotide
gtctctctgtagagacgaagggacccaagt

SEQ ID NO: 459537 - DNA, 30 bp, Artificial Sequence
  Synthetic oligonucleotide
tttacttggaggattacgtgcaccccaagt

SEQ ID NO: 459538 - DNA, 30 bp, Artificial Sequence
  Synthetic oligonucleotide
ttccactgtacctacgcgttagcgccaagt

SEQ ID NO: 459539 - DNA, 30 bp, Artificial Sequence
  Synthetic oligonucleotide
agctcaaagctctccttcacattgccaagt

SEQ ID NO: 459540 - DNA, 30 bp, Artificial Sequence
  Synthetic oligonucleotide
ttttacacggaggcattattatttccaagt

SEQ ID NO: 459541 - DNA, 30 bp, Artificial Sequence
  Synthetic oligonucleotide
atttggtactaggattgtgcagcagcaagt

SEQ ID NO: 459542 - DNA, 30 bp, Artificial Sequence
  Synthetic oligonucleotide
gtattcagtagcccgtatgcgtcagcaagt

SEQ ID NO: 459543 - DNA, 30 bp, Artificial Sequence
  Synthetic oligonucleotide
gtgtctcagcaatatgggtcagccgcaagt

SEQ ID NO: 459544 - DNA, 30 bp, Artificial Sequence
  Synthetic oligonucleotide
ccgacgcaggcaatctcagaaaaggcaagt

SEQ ID NO: 459545 - DNA, 30 bp, Artificial Sequence
  Synthetic oligonucleotide
aaatcagacaaagcacgagctacggcaagt

SEQ ID NO: 459546 - DNA, 30 bp, Artificial Sequence
  Synthetic oligonucleotide
ttacctgacctcttgcatcccgcggcaagt

SEQ ID NO: 459547 - DNA, 30 bp, Artificial Sequence
  Synthetic oligonucleotide
tagtcctaatgtgatcctggagatgcaagt

SEQ ID NO: 459548 - DNA, 30 bp, Artificial Sequence
  Synthetic oligonucleotide
agggctccactttggtttgtagatgcaagt

SEQ ID NO: 459549 - DNA, 30 bp, Artificial Sequence
  Synthetic oligonucleotide
ttccgccattccggaatagattatgcaagt

SEQ ID NO: 459550 - DNA, 30 bp, Artificial Sequence
  Synthetic oligonucleotide
cctctcgttttacttgtattatgtgcaagt

SEQ ID NO: 459551 - DNA, 30 bp, Artificial Sequence
  Synthetic oligonucleotide
tgtctttgacttactttaacgtaatcaagt

SEQ ID NO: 459552 - DNA, 30 bp, Artificial Sequence
  Synthetic oligonucleotide
atgttatgcgcagggaacggtgactcaagt

SEQ ID NO: 459553 - DNA, 30 bp, Artificial Sequence
  Synthetic oligonucleotide
ttacggcagacttaagccagttcctcaagt

SEQ ID NO: 459554 - DNA, 30 bp, Artificial Sequence
  Synthetic oligonucleotide
gctcgggatgcttgcaagttctagtcaagt

SEQ ID NO: 459555 - DNA, 30 bp, Artificial Sequence
  Synthetic oligonucleotide
gttataactaaatcgcggttaccgtcaagt

SEQ ID NO: 459556 - DNA, 30 bp, Artificial Sequence
  Synthetic oligonucleotide
tttgcacgcccgctgttgcgactcagaagt

SEQ ID NO: 459557 - DNA, 30 bp, Artificial Sequence
  Synthetic oligonucleotide
atgaccttggccctttacttactcagaagt

SEQ ID NO: 459558 - DNA, 30 bp, Artificial Sequence
  Synthetic oligonucleotide
gccgatctcgtaaattcgctctcgagaagt

SEQ ID NO: 459559 - DNA, 30 bp, Artificial Sequence
  Synthetic oligonucleotide
accagggccatctggagttttaatagaagt

SEQ ID NO: 459560 - DNA, 30 bp, Artificial Sequence
  Synthetic oligonucleotide
gcaaaagccgtgagcctcagtactagaagt

SEQ ID NO: 459561 - DNA, 30 bp, Artificial Sequence
  Synthetic oligonucleotide
agaccgccacggcagcaaaagtgtagaagt

SEQ ID NO: 459562 - DNA, 30 bp, Artificial Sequence
  Synthetic oligonucleotide
ccggatgctatcattgtttcgaaacgaagt

SEQ ID NO: 459563 - DNA, 30 bp, Artificial Sequence
  Synthetic oligonucleotide
atcacgcgagagccgatacaataacgaagt

SEQ ID NO: 459564 - DNA, 30 bp, Artificial Sequence
  Synthetic oligonucleotide
gggcgattggtaaaaacgtgctgacgaagt

SEQ ID NO: 459565 - DNA, 30 bp, Artificial Sequence
  Synthetic oligonucleotide
gttttgattaagcgtactacccgccgaagt

SEQ ID NO: 459566 - DNA, 30 bp, Artificial Sequence
  Synthetic oligonucleotide
gcgttcttaagattcaagcaatgtcgaagt

SEQ ID NO: 459567 - DNA, 30 bp, Artificial Sequence
  Synthetic oligonucleotide
gagttgcatctaccgcataggtaaggaagt

SEQ ID NO: 459568 - DNA, 30 bp, Artificial Sequence
  Synthetic oligonucleotide
cggaagaagcattacgtggaatcaggaagt

SEQ ID NO: 459569 - DNA, 30 bp, Artificial Sequence
  Synthetic oligonucleotide
ggtagcgattttctagtcaaccacggaagt

SEQ ID NO: 459570 - DNA, 30 bp, Artificial Sequence
  Synthetic oligonucleotide
tttgtggtacgccacctcgtcggcggaagt

SEQ ID NO: 459571 - DNA, 30 bp, Artificial Sequence
  Synthetic oligonucleotide
aagttgattgtattaattcgtgtgggaagt

SEQ ID NO: 459572 - DNA, 30 bp, Artificial Sequence
  Synthetic oligonucleotide
ctccagtatggttgtgttttgtatggaagt

SEQ ID NO: 459573 - DNA, 30 bp, Artificial Sequence
  Synthetic oligonucleotide
taggggcaatcctggtcacccgctggaagt

SEQ ID NO: 459574 - DNA, 30 bp, Artificial Sequence
  Synthetic oligonucleotide
ggtgcacgtagtctcatatccagtggaagt

SEQ ID NO: 459575 - DNA, 30 bp, Artificial Sequence
  Synthetic oligonucleotide
gcttcagcccccctgatggagcttggaagt

SEQ ID NO: 459576 - DNA, 30 bp, Artificial Sequence
  Synthetic oligonucleotide
atgtctcagttatgtgtgtgcacatgaagt

SEQ ID NO: 459577 - DNA, 30 bp, Artificial Sequence
  Synthetic oligonucleotide
tcaaggcacaatgtcgtttcggcctgaagt

SEQ ID NO: 459578 - DNA, 30 bp, Artificial Sequence
  Synthetic oligonucleotide
cgaggccgccgctcgttacccctctgaagt

SEQ ID NO: 459579 - DNA, 30 bp, Artificial Sequence
  Synthetic oligonucleotide
ttatgattaatatgtttttaacgttgaagt

SEQ ID NO: 459580 - DNA, 30 bp, Artificial Sequence
  Synthetic oligonucleotide
acttaggtgcgatcttaggatgcaataagt

SEQ ID NO: 459581 - DNA, 30 bp, Artificial Sequence
  Synthetic oligonucleotide
gacgtgtaataatgccgtttaggaataagt

SEQ ID NO: 459582 - DNA, 30 bp, Artificial Sequence
  Synthetic oligonucleotide
gacccgaatgatctaacacagcacataagt

SEQ ID NO: 459583 - DNA, 30 bp, Artificial Sequence
  Synthetic oligonucleotide
gacttgtcgatatgaatcgtgagcataagt

SEQ ID NO: 459584 - DNA, 30 bp, Artificial Sequence
  Synthetic oligonucleotide
gtatattctatttatgtaagatagataagt

SEQ ID NO: 459585 - DNA, 30 bp, Artificial Sequence
  Synthetic oligonucleotide
aactcgggtaattcaatatcccggataagt

SEQ ID NO: 459586 - DNA, 30 bp, Artificial Sequence
  Synthetic oligonucleotide
accggatcggtcatcaaccatatgataagt

SEQ ID NO: 459587 - DNA, 30 bp, Artificial Sequence
  Synthetic oligonucleotide
gagcgtggaattacgcctcgtttgataagt

SEQ ID NO: 459588 - DNA, 30 bp, Artificial Sequence
  Synthetic oligonucleotide
ggcgaaagccgggacccgcgcggtataagt

SEQ ID NO: 459589 - DNA, 30 bp, Artificial Sequence
  Synthetic oligonucleotide
ctattggactgtgtgcaatagtaactaagt

SEQ ID NO: 459590 - DNA, 30 bp, Artificial Sequence
  Synthetic oligonucleotide
atcttgtgggcagatgatgtaggactaagt

SEQ ID NO: 459591 - DNA, 30 bp, Artificial Sequence
  Synthetic oligonucleotide
tacgaaggtctacgcaaactatgactaagt

SEQ ID NO: 459592 - DNA, 30 bp, Artificial Sequence
  Synthetic oligonucleotide
actactcacctgggtatgtcgtggctaagt

SEQ ID NO: 459593 - DNA, 30 bp, Artificial Sequence
  Synthetic oligonucleotide
gtttgcgggttaaacatcacgtttctaagt

SEQ ID NO: 459594 - DNA, 30 bp, Artificial Sequence
  Synthetic oligonucleotide
gtcgaacgaggaaaccagtcgttagtaagt

SEQ ID NO: 459595 - DNA, 30 bp, Artificial Sequence
  Synthetic oligonucleotide
tttaatttaggtaatgtcgggccggtaagt

SEQ ID NO: 459596 - DNA, 30 bp, Artificial Sequence
  Synthetic oligonucleotide
gtagattcgagagctagggtagcggtaagt

SEQ ID NO: 459597 - DNA, 30 bp, Artificial Sequence
  Synthetic oligonucleotide
ttaaataccgccggtacgttctatgtaagt

SEQ ID NO: 459598 - DNA, 30 bp, Artificial Sequence
  Synthetic oligonucleotide
tgattcaccttactgtagtccgctgtaagt

SEQ ID NO: 459599 - DNA, 30 bp, Artificial Sequence
  Synthetic oligonucleotide
tgaggagcgatttctttatatattgtaagt

SEQ ID NO: 459600 - DNA, 30 bp, Artificial Sequence
  Synthetic oligonucleotide
agaagggaagtgtgggcgcacgttgtaagt

SEQ ID NO: 459601 - DNA, 30 bp, Artificial Sequence
  Synthetic oligonucleotide
gtagaatatgtactaaaaacgatattaagt

SEQ ID NO: 459602 - DNA, 30 bp, Artificial Sequence
  Synthetic oligonucleotide
agtcgttattataatcagaagatcttaagt

SEQ ID NO: 459603 - DNA, 30 bp, Artificial Sequence
  Synthetic oligonucleotide
aggcagctgctgctgtgtaacgtcttaagt

SEQ ID NO: 459604 - DNA, 30 bp, Artificial Sequence
  Synthetic oligonucleotide
atttacgatgcttggcacggtttcttaagt

SEQ ID NO: 459605 - DNA, 30 bp, Artificial Sequence
  Synthetic oligonucleotide
gcttctgggtcgttacatttccatttaagt

SEQ ID NO: 459606 - DNA, 30 bp, Artificial Sequence
  Synthetic oligonucleotide
aaccggccggcaatgcgctcgagtttaagt

SEQ ID NO: 459607 - DNA, 30 bp, Artificial Sequence
  Synthetic oligonucleotide
gtataagataagatatgcgccggtttaagt

SEQ ID NO: 459608 - DNA, 30 bp, Artificial Sequence
  Synthetic oligonucleotide
aggcgctactaacgtacgtagtgtttaagt

SEQ ID NO: 459609 - DNA, 30 bp, Artificial Sequence
  Synthetic oligonucleotide
gaggggctagtcctgccaactcttttaagt

SEQ ID NO: 459610 - DNA, 30 bp, Artificial Sequence
  Synthetic oligonucleotide
cctgacggtcaatcgaggttgtaaaacagt

SEQ ID NO: 459611 - DNA, 30 bp, Artificial Sequence
  Synthetic oligonucleotide
tctcaaggttggagcctcgcagacaacagt

SEQ ID NO: 459612 - DNA, 30 bp, Artificial Sequence
  Synthetic oligonucleotide
caacataatgcacccatctcactcaacagt

SEQ ID NO: 459613 - DNA, 30 bp, Artificial Sequence
  Synthetic oligonucleotide
gtctatggttattatagctcccggaacagt

SEQ ID NO: 459614 - DNA, 30 bp, Artificial Sequence
  Synthetic oligonucleotide
aaatctgccgcaggttgagctaataacagt

SEQ ID NO: 459615 - DNA, 30 bp, Artificial Sequence
  Synthetic oligonucleotide
agcaactgtaatgggttatgccttaacagt

SEQ ID NO: 459616 - DNA, 30 bp, Artificial Sequence
  Synthetic oligonucleotide
attggatggagcaaatccgaggtacacagt

SEQ ID NO: 459617 - DNA, 30 bp, Artificial Sequence
  Synthetic oligonucleotide
ccatacagcaaaagacagtgcacccacagt

SEQ ID NO: 459618 - DNA, 30 bp, Artificial Sequence
  Synthetic oligonucleotide
ttcgtgatcggctgaagtgctcgccacagt

SEQ ID NO: 459619 - DNA, 30 bp, Artificial Sequence
  Synthetic oligonucleotide
gttatgatgcactgtatatgttgccacagt

SEQ ID NO: 459620 - DNA, 30 bp, Artificial Sequence
  Synthetic oligonucleotide
tttaaattgtttaatgttggagcagacagt

SEQ ID NO: 459621 - DNA, 30 bp, Artificial Sequence
  Synthetic oligonucleotide
gacaaggccttcggtctaaatatagacagt

SEQ ID NO: 459622 - DNA, 30 bp, Artificial Sequence
  Synthetic oligonucleotide
gcctttcattcgagtagcaaagtcgacagt

SEQ ID NO: 459623 - DNA, 30 bp, Artificial Sequence
  Synthetic oligonucleotide
gcttaagtatgccgcaagtattgggacagt

SEQ ID NO: 459624 - DNA, 30 bp, Artificial Sequence
  Synthetic oligonucleotide
tacggggccttgcatcggtagtgctacagt

SEQ ID NO: 459625 - DNA, 30 bp, Artificial Sequence
  Synthetic oligonucleotide
tagcatgggtttctgacgctgttctacagt

SEQ ID NO: 459626 - DNA, 30 bp, Artificial Sequence
  Synthetic oligonucleotide
gcctggtcactaggatgttcatcttacagt

SEQ ID NO: 459627 - DNA, 30 bp, Artificial Sequence
  Synthetic oligonucleotide
aactctgataaaccttggcggcagaccagt

SEQ ID NO: 459628 - DNA, 30 bp, Artificial Sequence
  Synthetic oligonucleotide
gatctaagaaagggcctctcgtggaccagt

SEQ ID NO: 459629 - DNA, 30 bp, Artificial Sequence
  Synthetic oligonucleotide
agagcagtaggagactgcaaactgaccagt

SEQ ID NO: 459630 - DNA, 30 bp, Artificial Sequence
  Synthetic oligonucleotide
tttaaactgacgtagccccgagctaccagt

SEQ ID NO: 459631 - DNA, 30 bp, Artificial Sequence
  Synthetic oligonucleotide
gggggggttgtctaaatccgcgaacccagt

SEQ ID NO: 459632 - DNA, 30 bp, Artificial Sequence
  Synthetic oligonucleotide
ggaagctggttaggatcgatccgacccagt

SEQ ID NO: 459633 - DNA, 30 bp, Artificial Sequence
  Synthetic oligonucleotide
cactagaaagagggggggacgacccccagt

SEQ ID NO: 459634 - DNA, 30 bp, Artificial Sequence
  Synthetic oligonucleotide
ctccttacgattaattcataacgccccagt

SEQ ID NO: 459635 - DNA, 30 bp, Artificial Sequence
  Synthetic oligonucleotide
gcccttgctcttgtgggattgcaagccagt

SEQ ID NO: 459636 - DNA, 30 bp, Artificial Sequence
  Synthetic oligonucleotide
ccagatggtccttgaccagcaacagccagt

SEQ ID NO: 459637 - DNA, 30 bp, Artificial Sequence
  Synthetic oligonucleotide
aagggggagcttggcggagggcccgccagt

SEQ ID NO: 459638 - DNA, 30 bp, Artificial Sequence
  Synthetic oligonucleotide
aaaacatatccgatgctaccaacggccagt

SEQ ID NO: 459639 - DNA, 30 bp, Artificial Sequence
  Synthetic oligonucleotide
acgtaccatacgatacagtccaatgccagt

SEQ ID NO: 459640 - DNA, 30 bp, Artificial Sequence
  Synthetic oligonucleotide
taaccgatttttgtaaaatatggtgccagt

SEQ ID NO: 459641 - DNA, 30 bp, Artificial Sequence
  Synthetic oligonucleotide
tatcaagtagccacataaagcattgccagt

SEQ ID NO: 459642 - DNA, 30 bp, Artificial Sequence
  Synthetic oligonucleotide
cataagagttgtgataattggatatccagt

SEQ ID NO: 459643 - DNA, 30 bp, Artificial Sequence
  Synthetic oligonucleotide
ggaccctctgtcatgcaatataagtccagt

SEQ ID NO: 459644 - DNA, 30 bp, Artificial Sequence
  Synthetic oligonucleotide
tgatccggcatccccttccagtggtccagt

SEQ ID NO: 459645 - DNA, 30 bp, Artificial Sequence
  Synthetic oligonucleotide
acctcccgctaagcctctccaggcagcagt

SEQ ID NO: 459646 - DNA, 30 bp, Artificial Sequence
  Synthetic oligonucleotide
aatgcgggcatagataggggtttcagcagt

SEQ ID NO: 459647 - DNA, 30 bp, Artificial Sequence
  Synthetic oligonucleotide
aagcggcaacatcatttgggtaatagcagt

SEQ ID NO: 459648 - DNA, 30 bp, Artificial Sequence
  Synthetic oligonucleotide
cgagccaaatatacgaaataggatagcagt

SEQ ID NO: 459649 - DNA, 30 bp, Artificial Sequence
  Synthetic oligonucleotide
ggagcgctctgtcatccggggcctagcagt

SEQ ID NO: 459650 - DNA, 30 bp, Artificial Sequence
  Synthetic oligonucleotide
aaatgggtccagaataaaggtcgtagcagt

SEQ ID NO: 459651 - DNA, 30 bp, Artificial Sequence
  Synthetic oligonucleotide
gtgacacagcctttcatacgaacacgcagt

SEQ ID NO: 459652 - DNA, 30 bp, Artificial Sequence
  Synthetic oligonucleotide
gcccctactccatatcagcggacacgcagt

SEQ ID NO: 459653 - DNA, 30 bp, Artificial Sequence
  Synthetic oligonucleotide
ctccactttggttcgcaaacattacgcagt

SEQ ID NO: 459654 - DNA, 30 bp, Artificial Sequence
  Synthetic oligonucleotide
cttttcttcaagctcaatatttggcgcagt

SEQ ID NO: 459655 - DNA, 30 bp, Artificial Sequence
  Synthetic oligonucleotide
gatgtgatcggacggtgtcacgatcgcagt

SEQ ID NO: 459656 - DNA, 30 bp, Artificial Sequence
  Synthetic oligonucleotide
cccatgtcgagtatcaaccagcttcgcagt

SEQ ID NO: 459657 - DNA, 30 bp, Artificial Sequence
  Synthetic oligonucleotide
gatggagtgcctcaggattactacggcagt

SEQ ID NO: 459658 - DNA, 30 bp, Artificial Sequence
  Synthetic oligonucleotide
atctctacttaagtgaataatacgggcagt

SEQ ID NO: 459659 - DNA, 30 bp, Artificial Sequence
  Synthetic oligonucleotide
ggactacggattggtagacccgggggcagt

SEQ ID NO: 459660 - DNA, 30 bp, Artificial Sequence
  Synthetic oligonucleotide
tgcggctctgcgttctgtttgactggcagt

SEQ ID NO: 459661 - DNA, 30 bp, Artificial Sequence
  Synthetic oligonucleotide
aggaggccggcgatttaggcagctggcagt

SEQ ID NO: 459662 - DNA, 30 bp, Artificial Sequence
  Synthetic oligonucleotide
agcagctatagcgaatattgacaatgcagt

SEQ ID NO: 459663 - DNA, 30 bp, Artificial Sequence
  Synthetic oligonucleotide
ccactgcccaagtctacgtacgcatgcagt

SEQ ID NO: 459664 - DNA, 30 bp, Artificial Sequence
  Synthetic oligonucleotide
tcagcttcatccggcgtatacagctgcagt

SEQ ID NO: 459665 - DNA, 30 bp, Artificial Sequence
  Synthetic oligonucleotide
tatataataagaactgcctggttctgcagt

SEQ ID NO: 459666 - DNA, 30 bp, Artificial Sequence
  Synthetic oligonucleotide
atttatcccgttgcttgcaatcggtgcagt

SEQ ID NO: 459667 - DNA, 30 bp, Artificial Sequence
  Synthetic oligonucleotide
gttttcatcgggttgagcgggttgtgcagt

SEQ ID NO: 459668 - DNA, 30 bp, Artificial Sequence
  Synthetic oligonucleotide
cgccccctgttcgtcaaggaccgttgcagt

SEQ ID NO: 459669 - DNA, 30 bp, Artificial Sequence
  Synthetic oligonucleotide
ggctttggcgacagttcgttgcgttgcagt

SEQ ID NO: 459670 - DNA, 31 bp, Artificial Sequence
  Synthetic oligonucleotide
tttggtcggctgatctcaatgaatttgcagt

SEQ ID NO: 459671 - DNA, 30 bp, Artificial Sequence
  Synthetic oligonucleotide
aatactgggaccctatgtaatgtttgcagt

SEQ ID NO: 459672 - DNA, 30 bp, Artificial Sequence
  Synthetic oligonucleotide
gtatcgggtttttcacaaattaaaatcagt

SEQ ID NO: 459673 - DNA, 30 bp, Artificial Sequence
  Synthetic oligonucleotide
gctccggcattgtgatgcgacgaaatcagt

SEQ ID NO: 459674 - DNA, 30 bp, Artificial Sequence
  Synthetic oligonucleotide
tagtacctcttccttttaataagcatcagt

SEQ ID NO: 459675 - DNA, 30 bp, Artificial Sequence
  Synthetic oligonucleotide
ctattgcattgtgccgataggagcatcagt

SEQ ID NO: 459676 - DNA, 30 bp, Artificial Sequence
  Synthetic oligonucleotide
cccgcaggagtattcatcgacctcatcagt

SEQ ID NO: 459677 - DNA, 30 bp, Artificial Sequence
  Synthetic oligonucleotide
tccaacagtaataagttacagtatatcagt

SEQ ID NO: 459678 - DNA, 30 bp, Artificial Sequence
  Synthetic oligonucleotide
ggcgattcatacacggctgcgtgtatcagt

SEQ ID NO: 459679 - DNA, 30 bp, Artificial Sequence
  Synthetic oligonucleotide
gatgatatagcagcgtcaggtagcctcagt

SEQ ID NO: 459680 - DNA, 30 bp, Artificial Sequence
  Synthetic oligonucleotide
ggcctaaggccatttcggtgtgatctcagt

SEQ ID NO: 459681 - DNA, 30 bp, Artificial Sequence
  Synthetic oligonucleotide
cattgcaccgcggcaacgtggacagtcagt

SEQ ID NO: 459682 - DNA, 30 bp, Artificial Sequence
  Synthetic oligonucleotide
gttgtatggtatatggtttcgcccgtcagt

SEQ ID NO: 459683 - DNA, 31 bp, Artificial Sequence
  Synthetic oligonucleotide
ccccggacggcgatctgtaatttaggtcagt

SEQ ID NO: 459684 - DNA, 30 bp, Artificial Sequence
  Synthetic oligonucleotide
acagggtaaaggcccggttctagggtcagt

SEQ ID NO: 459685 - DNA, 31 bp, Artificial Sequence
  Synthetic oligonucleotide
aaccagcatcttcaacgtatgatgggtcagt

SEQ ID NO: 459686 - DNA, 30 bp, Artificial Sequence
  Synthetic oligonucleotide
cggctgacattcggatgtaacatggtcagt

SEQ ID NO: 459687 - DNA, 30 bp, Artificial Sequence
  Synthetic oligonucleotide
ctttttcacagctacattccttaattcagt

SEQ ID NO: 459688 - DNA, 30 bp, Artificial Sequence
  Synthetic oligonucleotide
aaactcagagcgtttttactcagcttcagt

SEQ ID NO: 459689 - DNA, 30 bp, Artificial Sequence
  Synthetic oligonucleotide
actcattaatagtgacggcactgcttcagt

SEQ ID NO: 459690 - DNA, 30 bp, Artificial Sequence
  Synthetic oligonucleotide
tacaactggttgccatcttgaatgttcagt

SEQ ID NO: 459691 - DNA, 30 bp, Artificial Sequence
  Synthetic oligonucleotide
atgtagtgttcggagatcgagaatttcagt

SEQ ID NO: 459692 - DNA, 30 bp, Artificial Sequence
  Synthetic oligonucleotide
cagttgttagtgcacgtgtataatttcagt

SEQ ID NO: 459693 - DNA, 30 bp, Artificial Sequence
  Synthetic oligonucleotide
agcgttacccccttgctctaccatttcagt

SEQ ID NO: 459694 - DNA, 30 bp, Artificial Sequence
  Synthetic oligonucleotide
gattcgtcctgcacattttttcatttcagt

SEQ ID NO: 459695 - DNA, 30 bp, Artificial Sequence
  Synthetic oligonucleotide
aggtcatttaatagatcagcaactttcagt

SEQ ID NO: 459696 - DNA, 30 bp, Artificial Sequence
  Synthetic oligonucleotide
gaacccgttttgtgttattgaaaaaagagt

SEQ ID NO: 459697 - DNA, 30 bp, Artificial Sequence
  Synthetic oligonucleotide
agccttaggtgtgttaagccacaaaagagt

SEQ ID NO: 459698 - DNA, 30 bp, Artificial Sequence
  Synthetic oligonucleotide
tggttaaaaacggcggtatctgaaaagagt

SEQ ID NO: 459699 - DNA, 30 bp, Artificial Sequence
  Synthetic oligonucleotide
aggaaatagagtctgaagtaataaaagagt

SEQ ID NO: 459700 - DNA, 30 bp, Artificial Sequence
  Synthetic oligonucleotide
gtttttctacgcttcggggccctcaagagt

SEQ ID NO: 459701 - DNA, 30 bp, Artificial Sequence
  Synthetic oligonucleotide
gattttggatctagaggttccttgaagagt

SEQ ID NO: 459702 - DNA, 30 bp, Artificial Sequence
  Synthetic oligonucleotide
ctatatctctagcgctcaccggctaagagt

SEQ ID NO: 459703 - DNA, 30 bp, Artificial Sequence
  Synthetic oligonucleotide
atcatgctccactcttgcaaccgacagagt

SEQ ID NO: 459704 - DNA, 30 bp, Artificial Sequence
  Synthetic oligonucleotide
ccctgtcttgcgcggttccaaattcagagt

SEQ ID NO: 459705 - DNA, 30 bp, Artificial Sequence
  Synthetic oligonucleotide
ctggggctatggtcatagcagagagagagt

SEQ ID NO: 459706 - DNA, 30 bp, Artificial Sequence
  Synthetic oligonucleotide
cgagttgaagtaagggctgacggcgagagt

SEQ ID NO: 459707 - DNA, 30 bp, Artificial Sequence
  Synthetic oligonucleotide
gagatagaaggacactcgctcggcgagagt

SEQ ID NO: 459708 - DNA, 30 bp, Artificial Sequence
  Synthetic oligonucleotide
agaacttttagggttcttcaatgatagagt

SEQ ID NO: 459709 - DNA, 30 bp, Artificial Sequence
  Synthetic oligonucleotide
ctcgggtttgagacgcggacacgctagagt

SEQ ID NO: 459710 - DNA, 30 bp, Artificial Sequence
  Synthetic oligonucleotide
atccgggcccctactactaacatgtagagt

SEQ ID NO: 459711 - DNA, 30 bp, Artificial Sequence
  Synthetic oligonucleotide
ggcggtcgctgctaatgtttccattagagt

SEQ ID NO: 459712 - DNA, 30 bp, Artificial Sequence
  Synthetic oligonucleotide
tgcgtggttctatatgcccgtgccacgagt

SEQ ID NO: 459713 - DNA, 30 bp, Artificial Sequence
  Synthetic oligonucleotide
tagcccacttaaggggttttgtagacgagt

SEQ ID NO: 459714 - DNA, 30 bp, Artificial Sequence
  Synthetic oligonucleotide
agttgtcaaatgctcgcataattgacgagt

SEQ ID NO: 459715 - DNA, 30 bp, Artificial Sequence
  Synthetic oligonucleotide
taatatcatttcatagtatgttatccgagt

SEQ ID NO: 459716 - DNA, 30 bp, Artificial Sequence
  Synthetic oligonucleotide
ggctttcggaggcaacaccctcctccgagt

SEQ ID NO: 459717 - DNA, 30 bp, Artificial Sequence
  Synthetic oligonucleotide
agcatgttcacgaattgtcgagacgcgagt

SEQ ID NO: 459718 - DNA, 30 bp, Artificial Sequence
  Synthetic oligonucleotide
aaactagtactaatatgacggttcgcgagt

SEQ ID NO: 459719 - DNA, 30 bp, Artificial Sequence
  Synthetic oligonucleotide
gacccctcttggtaggcggtagaggcgagt

SEQ ID NO: 459720 - DNA, 30 bp, Artificial Sequence
  Synthetic oligonucleotide
cggcctccagatcttactcgccctgcgagt

SEQ ID NO: 459721 - DNA, 30 bp, Artificial Sequence
  Synthetic oligonucleotide
ggaatccgactccgagtcttggaatcgagt

SEQ ID NO: 459722 - DNA, 30 bp, Artificial Sequence
  Synthetic oligonucleotide
accgctttcttgcttcattatttctcgagt

SEQ ID NO: 459723 - DNA, 30 bp, Artificial Sequence
  Synthetic oligonucleotide
ccgcttaagattcttcgcgctacgtcgagt

SEQ ID NO: 459724 - DNA, 30 bp, Artificial Sequence
  Synthetic oligonucleotide
cgcgggaactcttcatataatcggtcgagt

SEQ ID NO: 459725 - DNA, 30 bp, Artificial Sequence
  Synthetic oligonucleotide
gtgctatcgcatcagcaaacctattcgagt

SEQ ID NO: 459726 - DNA, 30 bp, Artificial Sequence
  Synthetic oligonucleotide
gaaagataccccaggaacggggtttcgagt

SEQ ID NO: 459727 - DNA, 30 bp, Artificial Sequence
  Synthetic oligonucleotide
ctttcgagttaccgcatttcctcgaggagt

SEQ ID NO: 459728 - DNA, 30 bp, Artificial Sequence
  Synthetic oligonucleotide
taggtaccattacagctatgaatgaggagt

SEQ ID NO: 459729 - DNA, 30 bp, Artificial Sequence
  Synthetic oligonucleotide
tgaaccttcgattaacatggattgaggagt

SEQ ID NO: 459730 - DNA, 30 bp, Artificial Sequence
  Synthetic oligonucleotide
cccctgtagtcttacaagacgtttaggagt

SEQ ID NO: 459731 - DNA, 30 bp, Artificial Sequence
  Synthetic oligonucleotide
gaacgatgcaagaagagccctaaacggagt

SEQ ID NO: 459732 - DNA, 30 bp, Artificial Sequence
  Synthetic oligonucleotide
aattcttgtcagaccggtcgagcacggagt

SEQ ID NO: 459733 - DNA, 30 bp, Artificial Sequence
  Synthetic oligonucleotide
tgatctttgtaaattccaagtcgacggagt

SEQ ID NO: 459734 - DNA, 30 bp, Artificial Sequence
  Synthetic oligonucleotide
aaggtcccttaacgcagcaccggacggagt

SEQ ID NO: 459735 - DNA, 30 bp, Artificial Sequence
  Synthetic oligonucleotide
gccccttgagggcggcaaataggtcggagt

SEQ ID NO: 459736 - DNA, 30 bp, Artificial Sequence
  Synthetic oligonucleotide
ttgcctgttcgggcaacgagcttagggagt

SEQ ID NO: 459737 - DNA, 30 bp, Artificial Sequence
  Synthetic oligonucleotide
ggtaaaactttgtcggtcattcgcgggagt

SEQ ID NO: 459738 - DNA, 30 bp, Artificial Sequence
  Synthetic oligonucleotide
attggacagcagcgtgtctctagatggagt

SEQ ID NO: 459739 - DNA, 30 bp, Artificial Sequence
  Synthetic oligonucleotide
ccgagcacggaatgtgcgttcacgtggagt

SEQ ID NO: 459740 - DNA, 30 bp, Artificial Sequence
  Synthetic oligonucleotide
ctatttggtgataagttcacacgttggagt

SEQ ID NO: 459741 - DNA, 30 bp, Artificial Sequence
  Synthetic oligonucleotide
tcaactagtaatgatgccacgcacatgagt

SEQ ID NO: 459742 - DNA, 30 bp, Artificial Sequence
  Synthetic oligonucleotide
gtttttaggcagacggtgagcacgatgagt

SEQ ID NO: 459743 - DNA, 30 bp, Artificial Sequence
  Synthetic oligonucleotide
aaaattttcaagaaaatagcgattatgagt

SEQ ID NO: 459744 - DNA, 30 bp, Artificial Sequence
  Synthetic oligonucleotide
tcagatgcagaacgatccggggagctgagt

SEQ ID NO: 459745 - DNA, 30 bp, Artificial Sequence
  Synthetic oligonucleotide
tttcatattaattcgatgtttcgagtgagt

SEQ ID NO: 459746 - DNA, 30 bp, Artificial Sequence
  Synthetic oligonucleotide
ttccttacctacaaagaatccaacgtgagt

SEQ ID NO: 459747 - DNA, 30 bp, Artificial Sequence
  Synthetic oligonucleotide
tacgtatttttgggctcgcgtaacgtgagt

SEQ ID NO: 459748 - DNA, 30 bp, Artificial Sequence
  Synthetic oligonucleotide
gtacaccgtacgtaggttactcgcgtgagt

SEQ ID NO: 459749 - DNA, 30 bp, Artificial Sequence
  Synthetic oligonucleotide
caacccacaggagcgctcagcgtcgtgagt

SEQ ID NO: 459750 - DNA, 30 bp, Artificial Sequence
  Synthetic oligonucleotide
tctattttggcattgagtatcgtcgtgagt

SEQ ID NO: 459751 - DNA, 30 bp, Artificial Sequence
  Synthetic oligonucleotide
aagtttccacaaatcatgataggggtgagt

SEQ ID NO: 459752 - DNA, 30 bp, Artificial Sequence
  Synthetic oligonucleotide
gggcggagcaatacaagtctcgcattgagt

SEQ ID NO: 459753 - DNA, 30 bp, Artificial Sequence
  Synthetic oligonucleotide
ccggattatggaacacaggtgtacttgagt

SEQ ID NO: 459754 - DNA, 30 bp, Artificial Sequence
  Synthetic oligonucleotide
ccttggggtgggactataggtcccttgagt

SEQ ID NO: 459755 - DNA, 30 bp, Artificial Sequence
  Synthetic oligonucleotide
cgtgtaggttcatcgacgggaaggttgagt

SEQ ID NO: 459756 - DNA, 30 bp, Artificial Sequence
  Synthetic oligonucleotide
aacactgttctacgttatataaggttgagt

SEQ ID NO: 459757 - DNA, 30 bp, Artificial Sequence
  Synthetic oligonucleotide
gggatctcggcatttctgtctcatttgagt

SEQ ID NO: 459758 - DNA, 30 bp, Artificial Sequence
  Synthetic oligonucleotide
agtcaggcggtgaacttagggcgtttgagt

SEQ ID NO: 459759 - DNA, 30 bp, Artificial Sequence
  Synthetic oligonucleotide
aagatatccaaaggtcccgccaaaaatagt

SEQ ID NO: 459760 - DNA, 30 bp, Artificial Sequence
  Synthetic oligonucleotide
gactacgactggatcgagcagcaaaatagt

SEQ ID NO: 459761 - DNA, 30 bp, Artificial Sequence
  Synthetic oligonucleotide
tgtgtactagtaacgagtaatgtaaatagt

SEQ ID NO: 459762 - DNA, 30 bp, Artificial Sequence
  Synthetic oligonucleotide
cacccgacagtcttattaagccgcaatagt

SEQ ID NO: 459763 - DNA, 30 bp, Artificial Sequence
  Synthetic oligonucleotide
atcgcgactcacaagtattgctgtaatagt

SEQ ID NO: 459764 - DNA, 30 bp, Artificial Sequence
  Synthetic oligonucleotide
gataggatttgtctagataatgcgcatagt

SEQ ID NO: 459765 - DNA, 30 bp, Artificial Sequence
  Synthetic oligonucleotide
taatgtagttattgaaaacggtcgcatagt

SEQ ID NO: 459766 - DNA, 30 bp, Artificial Sequence
  Synthetic oligonucleotide
ctttagcggagtagtgacggcttgcatagt

SEQ ID NO: 459767 - DNA, 30 bp, Artificial Sequence
  Synthetic oligonucleotide
gactcgttcactattatcttcgttcatagt

SEQ ID NO: 459768 - DNA, 30 bp, Artificial Sequence
  Synthetic oligonucleotide
gtcttcaactgaatgactccagcagatagt

SEQ ID NO: 459769 - DNA, 30 bp, Artificial Sequence
  Synthetic oligonucleotide
ttgtctaatctcctattacacagagatagt

SEQ ID NO: 459770 - DNA, 30 bp, Artificial Sequence
  Synthetic oligonucleotide
ggacgtaatgcagcacagtcttgagatagt

SEQ ID NO: 459771 - DNA, 30 bp, Artificial Sequence
  Synthetic oligonucleotide
agactgtgactgcagacaaacatagatagt

SEQ ID NO: 459772 - DNA, 30 bp, Artificial Sequence
  Synthetic oligonucleotide
tgtttaaaccggttaactgtaaacgatagt

SEQ ID NO: 459773 - DNA, 30 bp, Artificial Sequence
  Synthetic oligonucleotide
gccatcttgaggcctatcgccttcgatagt

SEQ ID NO: 459774 - DNA, 30 bp, Artificial Sequence
  Synthetic oligonucleotide
ctgacgaatattagcgtcggtaatgatagt

SEQ ID NO: 459775 - DNA, 30 bp, Artificial Sequence
  Synthetic oligonucleotide
agttacggtttttgcgtatatgctgatagt

SEQ ID NO: 459776 - DNA, 30 bp, Artificial Sequence
  Synthetic oligonucleotide
tttgcaaggtgcccttacataattgatagt

SEQ ID NO: 459777 - DNA, 30 bp, Artificial Sequence
  Synthetic oligonucleotide
gaagtccccattacccacttttcatatagt

SEQ ID NO: 459778 - DNA, 30 bp, Artificial Sequence
  Synthetic oligonucleotide
caggatgaatggaggttaaactgctatagt

SEQ ID NO: 459779 - DNA, 30 bp, Artificial Sequence
  Synthetic oligonucleotide
aaatggggcttgattgcggtaatctatagt

SEQ ID NO: 459780 - DNA, 30 bp, Artificial Sequence
  Synthetic oligonucleotide
gaaatactatcttattctcgtatctatagt

SEQ ID NO: 459781 - DNA, 30 bp, Artificial Sequence
  Synthetic oligonucleotide
atctattcattggaaaggcgtccgtatagt

SEQ ID NO: 459782 - DNA, 30 bp, Artificial Sequence
  Synthetic oligonucleotide
taagtcaccaatgctgttgtcgcgtatagt

SEQ ID NO: 459783 - DNA, 30 bp, Artificial Sequence
  Synthetic oligonucleotide
tgaggacccctctaacgtatagtgtatagt

SEQ ID NO: 459784 - DNA, 30 bp, Artificial Sequence
  Synthetic oligonucleotide
tgactgcccttgatagcctatcattatagt

SEQ ID NO: 459785 - DNA, 30 bp, Artificial Sequence
  Synthetic oligonucleotide
ttttgtcgagtcgaagttaaatcttatagt

SEQ ID NO: 459786 - DNA, 30 bp, Artificial Sequence
  Synthetic oligonucleotide
ccgcttgattaaaattcgagatcttatagt

SEQ ID NO: 459787 - DNA, 30 bp, Artificial Sequence
  Synthetic oligonucleotide
ccgtattcggaaacggttgagtcttatagt

SEQ ID NO: 459788 - DNA, 30 bp, Artificial Sequence
  Synthetic oligonucleotide
ttccagggaagttacgttacagtttatagt

SEQ ID NO: 459789 - DNA, 30 bp, Artificial Sequence
  Synthetic oligonucleotide
gaggttgtcctaaaaccaacgttttatagt

SEQ ID NO: 459790 - DNA, 30 bp, Artificial Sequence
  Synthetic oligonucleotide
gttcaaaatggtattctttgataaactagt

SEQ ID NO: 459791 - DNA, 30 bp, Artificial Sequence
  Synthetic oligonucleotide
gactcatgttgcgacggtgcgggaactagt

SEQ ID NO: 459792 - DNA, 30 bp, Artificial Sequence
  Synthetic oligonucleotide
ctgtactaggtttagccctggcacactagt

SEQ ID NO: 459793 - DNA, 30 bp, Artificial Sequence
  Synthetic oligonucleotide
ccatatccttgggtcgcggttccgactagt

SEQ ID NO: 459794 - DNA, 30 bp, Artificial Sequence
  Synthetic oligonucleotide
cacactttacggtaatgcagttggactagt

SEQ ID NO: 459795 - DNA, 30 bp, Artificial Sequence
  Synthetic oligonucleotide
taaatgggcagcgacggacgcctgactagt

SEQ ID NO: 459796 - DNA, 30 bp, Artificial Sequence
  Synthetic oligonucleotide
gactggatagtcgtttgattccatactagt

SEQ ID NO: 459797 - DNA, 30 bp, Artificial Sequence
  Synthetic oligonucleotide
ttaattgtagagttattgcggtatactagt

SEQ ID NO: 459798 - DNA, 30 bp, Artificial Sequence
  Synthetic oligonucleotide
acatagtgttgaatgttcttcattactagt

SEQ ID NO: 459799 - DNA, 30 bp, Artificial Sequence
  Synthetic oligonucleotide
gaaagcgcaatttcttctcgaaaacctagt

SEQ ID NO: 459800 - DNA, 30 bp, Artificial Sequence
  Synthetic oligonucleotide
cgggattgcatgagcacccagcaacctagt

SEQ ID NO: 459801 - DNA, 30 bp, Artificial Sequence
  Synthetic oligonucleotide
tagctcatgtagcgaacaaccatacctagt

SEQ ID NO: 459802 - DNA, 30 bp, Artificial Sequence
  Synthetic oligonucleotide
acttttgaagggtaatattgcaaccctagt

SEQ ID NO: 459803 - DNA, 30 bp, Artificial Sequence
  Synthetic oligonucleotide
tttgcatataactcagcggaccagcctagt

SEQ ID NO: 459804 - DNA, 30 bp, Artificial Sequence
  Synthetic oligonucleotide
gaatgccccggttgccgcggggatcctagt

SEQ ID NO: 459805 - DNA, 30 bp, Artificial Sequence
  Synthetic oligonucleotide
ggaaccaacacgtcctcagcaaacgctagt

SEQ ID NO: 459806 - DNA, 30 bp, Artificial Sequence
  Synthetic oligonucleotide
gacgtactcccagctctttataacgctagt

SEQ ID NO: 459807 - DNA, 30 bp, Artificial Sequence
  Synthetic oligonucleotide
ggtacgctaactaagccatacagcgctagt

SEQ ID NO: 459808 - DNA, 30 bp, Artificial Sequence
  Synthetic oligonucleotide
agaatcacggttcttcgggatggggctagt

SEQ ID NO: 459809 - DNA, 30 bp, Artificial Sequence
  Synthetic oligonucleotide
tgaatataaccaatccgatcggctgctagt

SEQ ID NO: 459810 - DNA, 30 bp, Artificial Sequence
  Synthetic oligonucleotide
tagcgttggtttggtagtatttaatctagt

SEQ ID NO: 459811 - DNA, 30 bp, Artificial Sequence
  Synthetic oligonucleotide
accgaaactgcgagctcattacgatctagt

SEQ ID NO: 459812 - DNA, 30 bp, Artificial Sequence
  Synthetic oligonucleotide
tgggtcttctagatcatcaggatatctagt

SEQ ID NO: 459813 - DNA, 30 bp, Artificial Sequence
  Synthetic oligonucleotide
tagtaattcactacttcggctttatctagt

SEQ ID NO: 459814 - DNA, 30 bp, Artificial Sequence
  Synthetic oligonucleotide
ccgaaccgcgatctcacacacgcctctagt

SEQ ID NO: 459815 - DNA, 30 bp, Artificial Sequence
  Synthetic oligonucleotide
ctattaacccgtgctcaagtacacagtagt

SEQ ID NO: 459816 - DNA, 30 bp, Artificial Sequence
  Synthetic oligonucleotide
tgttaggtttctaggaatgtactcagtagt

SEQ ID NO: 459817 - DNA, 30 bp, Artificial Sequence
  Synthetic oligonucleotide
ccgcctgtaatattacgggtgctcagtagt

SEQ ID NO: 459818 - DNA, 30 bp, Artificial Sequence
  Synthetic oligonucleotide
actccgaattttcataatggtctcagtagt

SEQ ID NO: 459819 - DNA, 30 bp, Artificial Sequence
  Synthetic oligonucleotide
aagataaaaggcatctactactcgagtagt

SEQ ID NO: 459820 - DNA, 30 bp, Artificial Sequence
  Synthetic oligonucleotide
cacttgggtgtcgccgagataactagtagt

SEQ ID NO: 459821 - DNA, 30 bp, Artificial Sequence
  Synthetic oligonucleotide
gtgtcccagtcattagtccttggtagtagt

SEQ ID NO: 459822 - DNA, 30 bp, Artificial Sequence
  Synthetic oligonucleotide
gtctaaaaactgtaacgagattttagtagt

SEQ ID NO: 459823 - DNA, 30 bp, Artificial Sequence
  Synthetic oligonucleotide
cgggactcgccttggcttagcatacgtagt

SEQ ID NO: 459824 - DNA, 30 bp, Artificial Sequence
  Synthetic oligonucleotide
ggcgcgggtatggtcagcggacaaggtagt

SEQ ID NO: 459825 - DNA, 30 bp, Artificial Sequence
  Synthetic oligonucleotide
atcgaaagcttcggccacctgtcaggtagt

SEQ ID NO: 459826 - DNA, 30 bp, Artificial Sequence
  Synthetic oligonucleotide
aatttgtgtcctgtatccgaggacggtagt

SEQ ID NO: 459827 - DNA, 30 bp, Artificial Sequence
  Synthetic oligonucleotide
cggagcagacacaggaaggcccccggtagt

SEQ ID NO: 459828 - DNA, 30 bp, Artificial Sequence
  Synthetic oligonucleotide
aggcccgttcaggatagtcctgagggtagt

SEQ ID NO: 459829 - DNA, 30 bp, Artificial Sequence
  Synthetic oligonucleotide
tgtcttataagaggctgaacatcgggtagt

SEQ ID NO: 459830 - DNA, 30 bp, Artificial Sequence
  Synthetic oligonucleotide
ttcactgcgctccggcccctccggggtagt

SEQ ID NO: 459831 - DNA, 30 bp, Artificial Sequence
  Synthetic oligonucleotide
ccagctgggccttcggccaatcttggtagt

SEQ ID NO: 459832 - DNA, 30 bp, Artificial Sequence
  Synthetic oligonucleotide
tatacacgaatgccctgtccttactgtagt

SEQ ID NO: 459833 - DNA, 30 bp, Artificial Sequence
  Synthetic oligonucleotide
caaacactttcaatttagtaatagtgtagt

SEQ ID NO: 459834 - DNA, 30 bp, Artificial Sequence
  Synthetic oligonucleotide
attacggcaaccgaattggcggtgtgtagt

SEQ ID NO: 459835 - DNA, 30 bp, Artificial Sequence
  Synthetic oligonucleotide
gatacgtttttagaatgataagattgtagt

SEQ ID NO: 459836 - DNA, 30 bp, Artificial Sequence
  Synthetic oligonucleotide
ggcacatttagaactggtacattttgtagt

SEQ ID NO: 459837 - DNA, 30 bp, Artificial Sequence
  Synthetic oligonucleotide
agcacagtgccatctcgatgaagaattagt

SEQ ID NO: 459838 - DNA, 30 bp, Artificial Sequence
  Synthetic oligonucleotide
agtcgaatatattccgtcggaggaattagt

SEQ ID NO: 459839 - DNA, 30 bp, Artificial Sequence
  Synthetic oligonucleotide
agcctcgacacgagtagccgttccattagt

SEQ ID NO: 459840 - DNA, 30 bp, Artificial Sequence
  Synthetic oligonucleotide
ccactcgcatcaattttgtttctcattagt

SEQ ID NO: 459841 - DNA, 30 bp, Artificial Sequence
  Synthetic oligonucleotide
tcatttaaattgtagttctctcgtattagt

SEQ ID NO: 459842 - DNA, 30 bp, Artificial Sequence
  Synthetic oligonucleotide
ttagctcaaggtaagtatgtgaaacttagt

SEQ ID NO: 459843 - DNA, 30 bp, Artificial Sequence
  Synthetic oligonucleotide
ggcatcggaacacttgtaccgtcgcttagt

SEQ ID NO: 459844 - DNA, 30 bp, Artificial Sequence
  Synthetic oligonucleotide
attgatgcatagtgttgtaggggtcttagt

SEQ ID NO: 459845 - DNA, 30 bp, Artificial Sequence
  Synthetic oligonucleotide
ttgttcctcatggacctataactagttagt

SEQ ID NO: 459846 - DNA, 30 bp, Artificial Sequence
  Synthetic oligonucleotide
gcgtctaattaacggttacgcttagttagt

SEQ ID NO: 459847 - DNA, 30 bp, Artificial Sequence
  Synthetic oligonucleotide
tttcctccgaactttcaaatctgcgttagt

SEQ ID NO: 459848 - DNA, 30 bp, Artificial Sequence
  Synthetic oligonucleotide
tattgcgatattcattcactgtgggttagt

SEQ ID NO: 459849 - DNA, 30 bp, Artificial Sequence
  Synthetic oligonucleotide
ttcagcgttctctattatctgtctgttagt

SEQ ID NO: 459850 - DNA, 30 bp, Artificial Sequence
  Synthetic oligonucleotide
ctaaaaaagttcccgctttggtgtgttagt

SEQ ID NO: 459851 - DNA, 30 bp, Artificial Sequence
  Synthetic oligonucleotide
ctcacgagaatgagcaatttagttgttagt

SEQ ID NO: 459852 - DNA, 30 bp, Artificial Sequence
  Synthetic oligonucleotide
ctgttgaagcgctgtgcccgcgttgttagt

SEQ ID NO: 459853 - DNA, 30 bp, Artificial Sequence
  Synthetic oligonucleotide
cgctggggttctcctggtcttaaatttagt

SEQ ID NO: 459854 - DNA, 30 bp, Artificial Sequence
  Synthetic oligonucleotide
gaaatccttaaaggcgcagtggtatttagt

SEQ ID NO: 459855 - DNA, 30 bp, Artificial Sequence
  Synthetic oligonucleotide
agcatggaagcggcatcacatcactttagt

SEQ ID NO: 459856 - DNA, 30 bp, Artificial Sequence
  Synthetic oligonucleotide
ttaaagtgccatcgatgtttaccctttagt

SEQ ID NO: 459857 - DNA, 30 bp, Artificial Sequence
  Synthetic oligonucleotide
tcggtacgaataaattcagttaggtttagt

SEQ ID NO: 459858 - DNA, 30 bp, Artificial Sequence
  Synthetic oligonucleotide
tcaaggatgacgccccgtatctggtttagt

SEQ ID NO: 459859 - DNA, 30 bp, Artificial Sequence
  Synthetic oligonucleotide
taagacagaagtactcaagttctgtttagt

SEQ ID NO: 459860 - DNA, 30 bp, Artificial Sequence
  Synthetic oligonucleotide
gcaggaattgacgactgcgacacttttagt

SEQ ID NO: 459861 - DNA, 30 bp, Artificial Sequence
  Synthetic oligonucleotide
gaatcgctctggctgcatcacgtttttagt

SEQ ID NO: 459862 - DNA, 30 bp, Artificial Sequence
  Synthetic oligonucleotide
gtccattggcgataacgccaagcaaaacgt

SEQ ID NO: 459863 - DNA, 30 bp, Artificial Sequence
  Synthetic oligonucleotide
agcatgcaggctacgacttcaggaaaacgt

SEQ ID NO: 459864 - DNA, 30 bp, Artificial Sequence
  Synthetic oligonucleotide
tggtccggaaactgtacgcagggaaaacgt

SEQ ID NO: 459865 - DNA, 30 bp, Artificial Sequence
  Synthetic oligonucleotide
tagccccggttattttaatttctaaaacgt

SEQ ID NO: 459866 - DNA, 30 bp, Artificial Sequence
  Synthetic oligonucleotide
ccagtcgcggcgcggagcgaaatcaaacgt

SEQ ID NO: 459867 - DNA, 30 bp, Artificial Sequence
  Synthetic oligonucleotide
atctcgcgggcagttgccatgcctaaacgt

SEQ ID NO: 459868 - DNA, 30 bp, Artificial Sequence
  Synthetic oligonucleotide
ttggatgcgagctcagggtgttctaaacgt

SEQ ID NO: 459869 - DNA, 30 bp, Artificial Sequence
  Synthetic oligonucleotide
gggtgattgggcggtgtatctatagaacgt

SEQ ID NO: 459870 - DNA, 30 bp, Artificial Sequence
  Synthetic oligonucleotide
ctttcgatgagaataggtctggacgaacgt

SEQ ID NO: 459871 - DNA, 30 bp, Artificial Sequence
  Synthetic oligonucleotide
ccatggtgagcgaaggaggggtacgaacgt

SEQ ID NO: 459872 - DNA, 30 bp, Artificial Sequence
  Synthetic oligonucleotide
aatgcctaccgggatccctgatgtgaacgt

SEQ ID NO: 459873 - DNA, 30 bp, Artificial Sequence
  Synthetic oligonucleotide
tgcaggtggcgatatggcgcaaaataacgt

SEQ ID NO: 459874 - DNA, 30 bp, Artificial Sequence
  Synthetic oligonucleotide
cgcgcgcaaggctagatctcctactaacgt

SEQ ID NO: 459875 - DNA, 30 bp, Artificial Sequence
  Synthetic oligonucleotide
aactttctgtttgcatgaggcctctaacgt

SEQ ID NO: 459876 - DNA, 30 bp, Artificial Sequence
  Synthetic oligonucleotide
gggctgcgatttaccatttgtgagtaacgt

SEQ ID NO: 459877 - DNA, 30 bp, Artificial Sequence
  Synthetic oligonucleotide
taccatacataatgtgtatgaccgtaacgt

SEQ ID NO: 459878 - DNA, 30 bp, Artificial Sequence
  Synthetic oligonucleotide
atagtcgtttgaatgagggcatcgtaacgt

SEQ ID NO: 459879 - DNA, 30 bp, Artificial Sequence
  Synthetic oligonucleotide
aacgcctactacaactgtgctgggtaacgt

SEQ ID NO: 459880 - DNA, 30 bp, Artificial Sequence
  Synthetic oligonucleotide
tgctcaaaagacgggtactcaccttaacgt

SEQ ID NO: 459881 - DNA, 30 bp, Artificial Sequence
  Synthetic oligonucleotide
acgtagaagttgttaaacacggtttaacgt

SEQ ID NO: 459882 - DNA, 30 bp, Artificial Sequence
  Synthetic oligonucleotide
cggcatctacgggcagtaacgtacacacgt

SEQ ID NO: 459883 - DNA, 30 bp, Artificial Sequence
  Synthetic oligonucleotide
tccgtttgttttcgggtgataatcacacgt

SEQ ID NO: 459884 - DNA, 30 bp, Artificial Sequence
  Synthetic oligonucleotide
tcggcatattttgttacgcgggggacacgt

SEQ ID NO: 459885 - DNA, 30 bp, Artificial Sequence
  Synthetic oligonucleotide
acaaattctttaggggaactcctgacacgt

SEQ ID NO: 459886 - DNA, 30 bp, Artificial Sequence
  Synthetic oligonucleotide
gatgaataacgcggagtcaacgctacacgt

SEQ ID NO: 459887 - DNA, 30 bp, Artificial Sequence
  Synthetic oligonucleotide
ttttgtctgttgaacgggggggttacacgt

SEQ ID NO: 459888 - DNA, 30 bp, Artificial Sequence
  Synthetic oligonucleotide
gcttgttttcttacattccctgtaccacgt

SEQ ID NO: 459889 - DNA, 30 bp, Artificial Sequence
  Synthetic oligonucleotide
gctatatcgctctcgtggattatgccacgt

SEQ ID NO: 459890 - DNA, 30 bp, Artificial Sequence
  Synthetic oligonucleotide
ccggttttgccaactccgcacactccacgt

SEQ ID NO: 459891 - DNA, 30 bp, Artificial Sequence
  Synthetic oligonucleotide
gccgggtgagtatatataaccactccacgt

SEQ ID NO: 459892 - DNA, 30 bp, Artificial Sequence
  Synthetic oligonucleotide
aataatcttgtgtgcaatacgcctccacgt

SEQ ID NO: 459893 - DNA, 30 bp, Artificial Sequence
  Synthetic oligonucleotide
ggctgtgcacatctgctaattggtccacgt

SEQ ID NO: 459894 - DNA, 30 bp, Artificial Sequence
  Synthetic oligonucleotide
aactcctagcagaaatcgcttcttccacgt

SEQ ID NO: 459895 - DNA, 30 bp, Artificial Sequence
  Synthetic oligonucleotide
gcattcacaagaagcgtgatagccgcacgt

SEQ ID NO: 459896 - DNA, 30 bp, Artificial Sequence
  Synthetic oligonucleotide
atttaattccgaattaaggcagtcgcacgt

SEQ ID NO: 459897 - DNA, 30 bp, Artificial Sequence
  Synthetic oligonucleotide
tgttcggcctatatccgataatatgcacgt

SEQ ID NO: 459898 - DNA, 30 bp, Artificial Sequence
  Synthetic oligonucleotide
ttgaagtgtcagtctgatgcatatgcacgt

SEQ ID NO: 459899 - DNA, 30 bp, Artificial Sequence
  Synthetic oligonucleotide
gttaaacataatgaaggggtttttgcacgt

SEQ ID NO: 459900 - DNA, 30 bp, Artificial Sequence
  Synthetic oligonucleotide
gaaacattctcaagaatttgataatcacgt

SEQ ID NO: 459901 - DNA, 30 bp, Artificial Sequence
  Synthetic oligonucleotide
agtttgcatgcgggtaatcctatatcacgt

SEQ ID NO: 459902 - DNA, 30 bp, Artificial Sequence
  Synthetic oligonucleotide
gggcaccgtcaagcccaatacgactcacgt

SEQ ID NO: 459903 - DNA, 30 bp, Artificial Sequence
  Synthetic oligonucleotide
ccgacgtatggacgttgggacaagtcacgt

SEQ ID NO: 459904 - DNA, 30 bp, Artificial Sequence
  Synthetic oligonucleotide
gccctatagttgaagtgggacccgtcacgt

SEQ ID NO: 459905 - DNA, 30 bp, Artificial Sequence
  Synthetic oligonucleotide
ctccggtaggtgtgaatatcggggtcacgt

SEQ ID NO: 459906 - DNA, 30 bp, Artificial Sequence
  Synthetic oligonucleotide
caggaatagaagtaactcaaactgtcacgt

SEQ ID NO: 459907 - DNA, 30 bp, Artificial Sequence
  Synthetic oligonucleotide
tcctccatgacgtttgtgtgacattcacgt

SEQ ID NO: 459908 - DNA, 30 bp, Artificial Sequence
  Synthetic oligonucleotide
gaaatttgctgaagtgaggatcattcacgt

SEQ ID NO: 459909 - DNA, 30 bp, Artificial Sequence
  Synthetic oligonucleotide
cagtaggcatagaataacgtcgtttcacgt

SEQ ID NO: 459910 - DNA, 30 bp, Artificial Sequence
  Synthetic oligonucleotide
agtaacgacccgtatactcgtagaagacgt

SEQ ID NO: 459911 - DNA, 30 bp, Artificial Sequence
  Synthetic oligonucleotide
attagtctaggtcctacctggcgaagacgt

SEQ ID NO: 459912 - DNA, 30 bp, Artificial Sequence
  Synthetic oligonucleotide
aacttatggtcttattctaaaggaagacgt

SEQ ID NO: 459913 - DNA, 30 bp, Artificial Sequence
  Synthetic oligonucleotide
aagaattgctgtagtactctcggaagacgt

SEQ ID NO: 459914 - DNA, 30 bp, Artificial Sequence
  Synthetic oligonucleotide
cagtcaaatgcttttcttcgctggagacgt

SEQ ID NO: 459915 - DNA, 30 bp, Artificial Sequence
  Synthetic oligonucleotide
gaagtttaatcggatgtatcgtggagacgt

SEQ ID NO: 459916 - DNA, 30 bp, Artificial Sequence
  Synthetic oligonucleotide
catagtttgtggagggcttattctagacgt

SEQ ID NO: 459917 - DNA, 30 bp, Artificial Sequence
  Synthetic oligonucleotide
cgcataggcatagatcgcagatgtagacgt

SEQ ID NO: 459918 - DNA, 30 bp, Artificial Sequence
  Synthetic oligonucleotide
gtacgatgacctatatatatctcacgacgt

SEQ ID NO: 459919 - DNA, 30 bp, Artificial Sequence
  Synthetic oligonucleotide
tccaagatattcggcccggacctacgacgt

SEQ ID NO: 459920 - DNA, 30 bp, Artificial Sequence
  Synthetic oligonucleotide
cccagtggccaatttatccgtttacgacgt

SEQ ID NO: 459921 - DNA, 30 bp, Artificial Sequence
  Synthetic oligonucleotide
tgggtattttttcaggatattcagcgacgt

SEQ ID NO: 459922 - DNA, 30 bp, Artificial Sequence
  Synthetic oligonucleotide
agtcgtcgaaacaaaaaaaacctgcgacgt

SEQ ID NO: 459923 - DNA, 30 bp, Artificial Sequence
  Synthetic oligonucleotide
tattctgagatcagggttataagtcgacgt

SEQ ID NO: 459924 - DNA, 30 bp, Artificial Sequence
  Synthetic oligonucleotide
tagtaaattctttcttggatgcggggacgt

SEQ ID NO: 459925 - DNA, 30 bp, Artificial Sequence
  Synthetic oligonucleotide
tctttaatatcattatgttcttaatgacgt

SEQ ID NO: 459926 - DNA, 30 bp, Artificial Sequence
  Synthetic oligonucleotide
tttcacagacagcgaacagtctcctgacgt

SEQ ID NO: 459927 - DNA, 30 bp, Artificial Sequence
  Synthetic oligonucleotide
ctgttcagttgcgcctgagatgcgctacgt

SEQ ID NO: 459928 - DNA, 30 bp, Artificial Sequence
  Synthetic oligonucleotide
tattgatatggatgtaatgcacatctacgt

SEQ ID NO: 459929 - DNA, 30 bp, Artificial Sequence
  Synthetic oligonucleotide
cgtatttctaggcacacgccaagtctacgt

SEQ ID NO: 459930 - DNA, 30 bp, Artificial Sequence
  Synthetic oligonucleotide
cagaatagcggctggaattcaattctacgt

SEQ ID NO: 459931 - DNA, 30 bp, Artificial Sequence
  Synthetic oligonucleotide
agcaccgcgctggcttaccgagaagtacgt

SEQ ID NO: 459932 - DNA, 30 bp, Artificial Sequence
  Synthetic oligonucleotide
aataaccctatatccggcactatagtacgt

SEQ ID NO: 459933 - DNA, 30 bp, Artificial Sequence
  Synthetic oligonucleotide
ctgtgctctgtcgtgggtacagaggtacgt

SEQ ID NO: 459934 - DNA, 30 bp, Artificial Sequence
  Synthetic oligonucleotide
tcccgctttaacatcttccccttggtacgt

SEQ ID NO: 459935 - DNA, 30 bp, Artificial Sequence
  Synthetic oligonucleotide
aataggagctaagtccgtggttttgtacgt

SEQ ID NO: 459936 - DNA, 30 bp, Artificial Sequence
  Synthetic oligonucleotide
gtcacataaccacatttaagtgccttacgt

SEQ ID NO: 459937 - DNA, 30 bp, Artificial Sequence
  Synthetic oligonucleotide
tcacgcttttttgctctgggttccttacgt

SEQ ID NO: 459938 - DNA, 30 bp, Artificial Sequence
  Synthetic oligonucleotide
ctcagtgattataacaaaatcggcttacgt

SEQ ID NO: 459939 - DNA, 30 bp, Artificial Sequence
  Synthetic oligonucleotide
acacctctaggatttaatcagatcttacgt

SEQ ID NO: 459940 - DNA, 30 bp, Artificial Sequence
  Synthetic oligonucleotide
ctaatcacggagtcaacgatactcttacgt

SEQ ID NO: 459941 - DNA, 30 bp, Artificial Sequence
  Synthetic oligonucleotide
tgaacatgagcgatacgtacgtatttacgt

SEQ ID NO: 459942 - DNA, 35 bp, Artificial Sequence
  Synthetic oligonucleotide
tagtcggttggcgggtcggctccatgcttttacgt

SEQ ID NO: 459943 - DNA, 30 bp, Artificial Sequence
  Synthetic oligonucleotide
taattgtaggcgtctgaacgagttttacgt

SEQ ID NO: 459944 - DNA, 30 bp, Artificial Sequence
  Synthetic oligonucleotide
tccgcacggtactggcaacaagagaaccgt

SEQ ID NO: 459945 - DNA, 30 bp, Artificial Sequence
  Synthetic oligonucleotide
agcagggtcaggactctgacaccgaaccgt

SEQ ID NO: 459946 - DNA, 30 bp, Artificial Sequence
  Synthetic oligonucleotide
acaacgatctgagctcgtactcgtaaccgt

SEQ ID NO: 459947 - DNA, 30 bp, Artificial Sequence
  Synthetic oligonucleotide
gcaacgcttggcatgtctccgtaacaccgt

SEQ ID NO: 459948 - DNA, 30 bp, Artificial Sequence
  Synthetic oligonucleotide
ttccggaattttttatacatatagcaccgt

SEQ ID NO: 459949 - DNA, 30 bp, Artificial Sequence
  Synthetic oligonucleotide
gtggcccgaataagatatagaactcaccgt

SEQ ID NO: 459950 - DNA, 30 bp, Artificial Sequence
  Synthetic oligonucleotide
ggcagtgctctcccggcgtccattcaccgt

SEQ ID NO: 459951 - DNA, 30 bp, Artificial Sequence
  Synthetic oligonucleotide
agctcttacctcggaacttaagttcaccgt

SEQ ID NO: 459952 - DNA, 30 bp, Artificial Sequence
  Synthetic oligonucleotide
gtgatcgtcttgagcttactcgcagaccgt

SEQ ID NO: 459953 - DNA, 30 bp, Artificial Sequence
  Synthetic oligonucleotide
atagcctaaaggctaaacagcgacgaccgt

SEQ ID NO: 459954 - DNA, 30 bp, Artificial Sequence
  Synthetic oligonucleotide
ttaaagacgagtaaaggaagtctcgaccgt

SEQ ID NO: 459955 - DNA, 30 bp, Artificial Sequence
  Synthetic oligonucleotide
ggaactccagatctacaatcaatggaccgt

SEQ ID NO: 459956 - DNA, 30 bp, Artificial Sequence
  Synthetic oligonucleotide
gctaaaagctgacactagaggtttgaccgt

SEQ ID NO: 459957 - DNA, 30 bp, Artificial Sequence
  Synthetic oligonucleotide
tattagttttgcatcttgcaataataccgt

SEQ ID NO: 459958 - DNA, 30 bp, Artificial Sequence
  Synthetic oligonucleotide
tacgcctataacttggctaaagcctaccgt

SEQ ID NO: 459959 - DNA, 30 bp, Artificial Sequence
  Synthetic oligonucleotide
atgggatatttatggcaactggagtaccgt

SEQ ID NO: 459960 - DNA, 30 bp, Artificial Sequence
  Synthetic oligonucleotide
taactgtacttatccttaggatggtaccgt

SEQ ID NO: 459961 - DNA, 30 bp, Artificial Sequence
  Synthetic oligonucleotide
acgcgattcaacacggttgtgcattaccgt

SEQ ID NO: 459962 - DNA, 30 bp, Artificial Sequence
  Synthetic oligonucleotide
aagaagcacctatctgacgcctattaccgt

SEQ ID NO: 459963 - DNA, 30 bp, Artificial Sequence
  Synthetic oligonucleotide
gatgtctgggaatgggttaatccttaccgt

SEQ ID NO: 459964 - DNA, 30 bp, Artificial Sequence
  Synthetic oligonucleotide
gttacgacttaacgctatactcaaacccgt

SEQ ID NO: 459965 - DNA, 30 bp, Artificial Sequence
  Synthetic oligonucleotide
gcttgacctaacgccgtttccggaacccgt

SEQ ID NO: 459966 - DNA, 30 bp, Artificial Sequence
  Synthetic oligonucleotide
acgctagtttattgttggggggccacccgt

SEQ ID NO: 459967 - DNA, 30 bp, Artificial Sequence
  Synthetic oligonucleotide
tctcttggttgcttttgcgtatccacccgt

SEQ ID NO: 459968 - DNA, 30 bp, Artificial Sequence
  Synthetic oligonucleotide
gttacttattgcgagtatcgacgcacccgt

SEQ ID NO: 459969 - DNA, 30 bp, Artificial Sequence
  Synthetic oligonucleotide
gactgcttagggctctgtggaggaccccgt

SEQ ID NO: 459970 - DNA, 30 bp, Artificial Sequence
  Synthetic oligonucleotide
cacagggttagcggggattcacccccccgt

SEQ ID NO: 459971 - DNA, 30 bp, Artificial Sequence
  Synthetic oligonucleotide
tccgtacataatgacttattccgcccccgt

SEQ ID NO: 459972 - DNA, 31 bp, Artificial Sequence
  Synthetic oligonucleotide
ctgtatttgcaatctataccggtcgccccgt

SEQ ID NO: 459973 - DNA, 30 bp, Artificial Sequence
  Synthetic oligonucleotide
aaagcgcgcggtctggttgcacctccccgt

SEQ ID NO: 459974 - DNA, 30 bp, Artificial Sequence
  Synthetic oligonucleotide
gaaggatgctaggcgggtgatccagcccgt

SEQ ID NO: 459975 - DNA, 30 bp, Artificial Sequence
  Synthetic oligonucleotide
atattagcttggcactaggtcgacgcccgt

SEQ ID NO: 459976 - DNA, 30 bp, Artificial Sequence
  Synthetic oligonucleotide
aatgtacgtgaaatgggatgcagcgcccgt

SEQ ID NO: 459977 - DNA, 30 bp, Artificial Sequence
  Synthetic oligonucleotide
gctaaacatgtttccgtaatatctgcccgt

SEQ ID NO: 459978 - DNA, 30 bp, Artificial Sequence
  Synthetic oligonucleotide
tcgcgcggttcagcgggaggtaaatcccgt

SEQ ID NO: 459979 - DNA, 30 bp, Artificial Sequence
  Synthetic oligonucleotide
ttcagttccttaagaggtcctgactcccgt

SEQ ID NO: 459980 - DNA, 30 bp, Artificial Sequence
  Synthetic oligonucleotide
tcaagtgtatccgcggcactgacctcccgt

SEQ ID NO: 459981 - DNA, 30 bp, Artificial Sequence
  Synthetic oligonucleotide
ttggagcagaaggtacgcctaccgtcccgt

SEQ ID NO: 459982 - DNA, 30 bp, Artificial Sequence
  Synthetic oligonucleotide
ccgctacctatcgcgagttattggtcccgt

SEQ ID NO: 459983 - DNA, 30 bp, Artificial Sequence
  Synthetic oligonucleotide
taggggtctaagtagggggaactgtcccgt

SEQ ID NO: 459984 - DNA, 30 bp, Artificial Sequence
  Synthetic oligonucleotide
ggttctatggaattaattgtagtgtcccgt

SEQ ID NO: 459985 - DNA, 30 bp, Artificial Sequence
  Synthetic oligonucleotide
gctttatccttggcgccttcaataagccgt

SEQ ID NO: 459986 - DNA, 30 bp, Artificial Sequence
  Synthetic oligonucleotide
gttttaacatgcagctttaattagagccgt

SEQ ID NO: 459987 - DNA, 30 bp, Artificial Sequence
  Synthetic oligonucleotide
gagagatagacgcaggtacattggagccgt

SEQ ID NO: 459988 - DNA, 30 bp, Artificial Sequence
  Synthetic oligonucleotide
cgcagggaggctcccgcggcactgagccgt

SEQ ID NO: 459989 - DNA, 30 bp, Artificial Sequence
  Synthetic oligonucleotide
gcacttttttggccggattttcgccgccgt

SEQ ID NO: 459990 - DNA, 30 bp, Artificial Sequence
  Synthetic oligonucleotide
gcccatcaatctttcgcgtcagagcgccgt

SEQ ID NO: 459991 - DNA, 30 bp, Artificial Sequence
  Synthetic oligonucleotide
gcctgtcactctgcgaattagttgcgccgt

SEQ ID NO: 459992 - DNA, 30 bp, Artificial Sequence
  Synthetic oligonucleotide
ggttcatttagatgtgcctaacctcgccgt

SEQ ID NO: 459993 - DNA, 30 bp, Artificial Sequence
  Synthetic oligonucleotide
gagccgtttctagtcggactttctcgccgt

SEQ ID NO: 459994 - DNA, 30 bp, Artificial Sequence
  Synthetic oligonucleotide
tcgtagagtggtatggtctacggtcgccgt

SEQ ID NO: 459995 - DNA, 30 bp, Artificial Sequence
  Synthetic oligonucleotide
tttcaagcactattggcgctgggtcgccgt

SEQ ID NO: 459996 - DNA, 30 bp, Artificial Sequence
  Synthetic oligonucleotide
acctggttaggtgagttactaattcgccgt

SEQ ID NO: 459997 - DNA, 30 bp, Artificial Sequence
  Synthetic oligonucleotide
gacgaacaatataaggagacattaggccgt

SEQ ID NO: 459998 - DNA, 30 bp, Artificial Sequence
  Synthetic oligonucleotide
accaaagtaaaatcgatttttgacggccgt

SEQ ID NO: 459999 - DNA, 30 bp, Artificial Sequence
  Synthetic oligonucleotide
tactcaggcgcctcacgggtaccgggccgt

SEQ ID NO: 460000 - DNA, 30 bp, Artificial Sequence
  Synthetic oligonucleotide
gacaggggccgtagtgcaaacaatggccgt

SEQ ID NO: 460001 - DNA, 30 bp, Artificial Sequence
  Synthetic oligonucleotide
ttcgaggctttccgtagggacggatgccgt

SEQ ID NO: 460002 - DNA, 30 bp, Artificial Sequence
  Synthetic oligonucleotide
ttcatgagtaaatgggaactattatgccgt

SEQ ID NO: 460003 - DNA, 30 bp, Artificial Sequence
  Synthetic oligonucleotide
cttgctatctacaaagaatgccgctgccgt

SEQ ID NO: 460004 - DNA, 30 bp, Artificial Sequence
  Synthetic oligonucleotide
tagcgacctcgtatggagaggcattgccgt

SEQ ID NO: 460005 - DNA, 30 bp, Artificial Sequence
  Synthetic oligonucleotide
tcacctatgtaagggtcttatgaaatccgt

SEQ ID NO: 460006 - DNA, 30 bp, Artificial Sequence
  Synthetic oligonucleotide
tcacattattgaatttaggtctaaatccgt

SEQ ID NO: 460007 - DNA, 30 bp, Artificial Sequence
  Synthetic oligonucleotide
ctccaagcgccttaaattgctacaatccgt

SEQ ID NO: 460008 - DNA, 30 bp, Artificial Sequence
  Synthetic oligonucleotide
cgttgggttgaatgaaagtcaccaatccgt

SEQ ID NO: 460009 - DNA, 30 bp, Artificial Sequence
  Synthetic oligonucleotide
tcccctccggatcacggtacgttaatccgt

SEQ ID NO: 460010 - DNA, 30 bp, Artificial Sequence
  Synthetic oligonucleotide
ggtacgggggagcgggttcctctcatccgt

SEQ ID NO: 460011 - DNA, 30 bp, Artificial Sequence
  Synthetic oligonucleotide
tacactggtgtaaaatatccgctgatccgt

SEQ ID NO: 460012 - DNA, 30 bp, Artificial Sequence
  Synthetic oligonucleotide
catcagcgatcgcatatcgctgtgatccgt

SEQ ID NO: 460013 - DNA, 30 bp, Artificial Sequence
  Synthetic oligonucleotide
gtatcgctgtctgatggaggagctatccgt

SEQ ID NO: 460014 - DNA, 30 bp, Artificial Sequence
  Synthetic oligonucleotide
tttaggtcatgcgaccaccggggactccgt

SEQ ID NO: 460015 - DNA, 30 bp, Artificial Sequence
  Synthetic oligonucleotide
tctaaggtttttcactgtttcccgctccgt

SEQ ID NO: 460016 - DNA, 30 bp, Artificial Sequence
  Synthetic oligonucleotide
aagcatcaggacgctctaacgggtctccgt

SEQ ID NO: 460017 - DNA, 30 bp, Artificial Sequence
  Synthetic oligonucleotide
gtcccgcaccaaacttcatgggttctccgt

SEQ ID NO: 460018 - DNA, 30 bp, Artificial Sequence
  Synthetic oligonucleotide
ggcacgtcaagctgacccaggacagtccgt

SEQ ID NO: 460019 - DNA, 30 bp, Artificial Sequence
  Synthetic oligonucleotide
tggcctgagcgcctggcagacgcagtccgt

SEQ ID NO: 460020 - DNA, 30 bp, Artificial Sequence
  Synthetic oligonucleotide
gctgcgggcatgcttctacatttagtccgt

SEQ ID NO: 460021 - DNA, 30 bp, Artificial Sequence
  Synthetic oligonucleotide
cttcgcgaaccaagaattgaatgtgtccgt

SEQ ID NO: 460022 - DNA, 30 bp, Artificial Sequence
  Synthetic oligonucleotide
agaatttaaagtgatgtctggacattccgt

SEQ ID NO: 460023 - DNA, 30 bp, Artificial Sequence
  Synthetic oligonucleotide
cctgattcgcggtaagctagatacttccgt

SEQ ID NO: 460024 - DNA, 30 bp, Artificial Sequence
  Synthetic oligonucleotide
cctccggtgtatatttgaaaatctttccgt

SEQ ID NO: 460025 - DNA, 30 bp, Artificial Sequence
  Synthetic oligonucleotide
ttcaatttgaagaatcagtaacaaaagcgt

SEQ ID NO: 460026 - DNA, 30 bp, Artificial Sequence
  Synthetic oligonucleotide
gaggacgcatgggaccaccaaataaagcgt

SEQ ID NO: 460027 - DNA, 30 bp, Artificial Sequence
  Synthetic oligonucleotide
gcacgcaacccgatttgggaattaaagcgt

SEQ ID NO: 460028 - DNA, 30 bp, Artificial Sequence
  Synthetic oligonucleotide
tttagggaaaccgttgtgcaattgaagcgt

SEQ ID NO: 460029 - DNA, 30 bp, Artificial Sequence
  Synthetic oligonucleotide
ccatagttcgtttctcagcaaagtaagcgt

SEQ ID NO: 460030 - DNA, 30 bp, Artificial Sequence
  Synthetic oligonucleotide
ataaccacgaatccgacgccgacacagcgt

SEQ ID NO: 460031 - DNA, 30 bp, Artificial Sequence
  Synthetic oligonucleotide
tagtatccagctggatacttaggacagcgt

SEQ ID NO: 460032 - DNA, 30 bp, Artificial Sequence
  Synthetic oligonucleotide
ggacggggcggggatccacaaatacagcgt

SEQ ID NO: 460033 - DNA, 30 bp, Artificial Sequence
  Synthetic oligonucleotide
gaatagctgctttgcgacatgacccagcgt

SEQ ID NO: 460034 - DNA, 30 bp, Artificial Sequence
  Synthetic oligonucleotide
cttcgtgtcgacggacttatcacgcagcgt

SEQ ID NO: 460035 - DNA, 30 bp, Artificial Sequence
  Synthetic oligonucleotide
atttattatgcggaagggagtaggcagcgt

SEQ ID NO: 460036 - DNA, 30 bp, Artificial Sequence
  Synthetic oligonucleotide
aaaagcgtcacctgttggtcacggcagcgt

SEQ ID NO: 460037 - DNA, 30 bp, Artificial Sequence
  Synthetic oligonucleotide
aaatcagcgatcacagggctttttcagcgt

SEQ ID NO: 460038 - DNA, 30 bp, Artificial Sequence
  Synthetic oligonucleotide
accattgccagctaggggtccagagagcgt

SEQ ID NO: 460039 - DNA, 30 bp, Artificial Sequence
  Synthetic oligonucleotide
aaggcctttgcaattaacctccgagagcgt

SEQ ID NO: 460040 - DNA, 30 bp, Artificial Sequence
  Synthetic oligonucleotide
aaggtaagatctcaagaatggatggagcgt

SEQ ID NO: 460041 - DNA, 30 bp, Artificial Sequence
  Synthetic oligonucleotide
acgcccgaccgacggcagtaactgtagcgt

SEQ ID NO: 460042 - DNA, 30 bp, Artificial Sequence
  Synthetic oligonucleotide
gcgcagtcgtctaaaaatttgttgtagcgt

SEQ ID NO: 460043 - DNA, 30 bp, Artificial Sequence
  Synthetic oligonucleotide
gggccaacaccgattcggcgaggttagcgt

SEQ ID NO: 460044 - DNA, 30 bp, Artificial Sequence
  Synthetic oligonucleotide
actctaagcaaagtgtatgcgacaacgcgt

SEQ ID NO: 460045 - DNA, 30 bp, Artificial Sequence
  Synthetic oligonucleotide
ttcgcatctcgatcacaaggacacacgcgt

SEQ ID NO: 460046 - DNA, 30 bp, Artificial Sequence
  Synthetic oligonucleotide
aagggactagttgtatgatttaccacgcgt

SEQ ID NO: 460047 - DNA, 30 bp, Artificial Sequence
  Synthetic oligonucleotide
cgccccccgcgtataggtcacagcacgcgt

SEQ ID NO: 460048 - DNA, 30 bp, Artificial Sequence
  Synthetic oligonucleotide
tgacacattctattcgcgtgtatcacgcgt

SEQ ID NO: 460049 - DNA, 30 bp, Artificial Sequence
  Synthetic oligonucleotide
ctaatcgacggtggagaaatgtggacgcgt

SEQ ID NO: 460050 - DNA, 30 bp, Artificial Sequence
  Synthetic oligonucleotide
ggatcgcctatccatggctcgcatacgcgt

SEQ ID NO: 460051 - DNA, 29 bp, Artificial Sequence
  Synthetic oligonucleotide
gacatgggcaaccaaaaggctgtacgcgt

SEQ ID NO: 460052 - DNA, 30 bp, Artificial Sequence
  Synthetic oligonucleotide
tcaatttgttaatcttggtgagttacgcgt

SEQ ID NO: 460053 - DNA, 30 bp, Artificial Sequence
  Synthetic oligonucleotide
tttctctgtcgcatgcgagattccccgcgt

SEQ ID NO: 460054 - DNA, 30 bp, Artificial Sequence
  Synthetic oligonucleotide
ttattgtctacgcaggactcgttcccgcgt

SEQ ID NO: 460055 - DNA, 30 bp, Artificial Sequence
  Synthetic oligonucleotide
tatgtacctcagggtttaaggcagccgcgt

SEQ ID NO: 460056 - DNA, 30 bp, Artificial Sequence
  Synthetic oligonucleotide
agtccgtcgcaattgaccatcaggccgcgt

SEQ ID NO: 460057 - DNA, 30 bp, Artificial Sequence
  Synthetic oligonucleotide
gctgctagcggagttacctctagtccgcgt

SEQ ID NO: 460058 - DNA, 30 bp, Artificial Sequence
  Synthetic oligonucleotide
tcgctgcttcggttcattactgcagcgcgt

SEQ ID NO: 460059 - DNA, 30 bp, Artificial Sequence
  Synthetic oligonucleotide
ctacggctacgacgccgcagtaacgcgcgt

SEQ ID NO: 460060 - DNA, 30 bp, Artificial Sequence
  Synthetic oligonucleotide
tgtatgctacgaccccgtctcggtgcgcgt

SEQ ID NO: 460061 - DNA, 30 bp, Artificial Sequence
  Synthetic oligonucleotide
gcgagtgggactccggtcccctaatcgcgt

SEQ ID NO: 460062 - DNA, 30 bp, Artificial Sequence
  Synthetic oligonucleotide
tgtatatgactcgccacacactgatcgcgt

SEQ ID NO: 460063 - DNA, 30 bp, Artificial Sequence
  Synthetic oligonucleotide
tctaaaacgataattcttctcatatcgcgt

SEQ ID NO: 460064 - DNA, 30 bp, Artificial Sequence
  Synthetic oligonucleotide
cccgtcgtcgagacacccagcgactcgcgt

SEQ ID NO: 460065 - DNA, 30 bp, Artificial Sequence
  Synthetic oligonucleotide
atggggaccgcatccgacattgcctcgcgt

SEQ ID NO: 460066 - DNA, 30 bp, Artificial Sequence
  Synthetic oligonucleotide
tcaaggtcactggcttaatctaagtcgcgt

SEQ ID NO: 460067 - DNA, 30 bp, Artificial Sequence
  Synthetic oligonucleotide
tccgctccttgagcgctgctaggttcgcgt

SEQ ID NO: 460068 - DNA, 30 bp, Artificial Sequence
  Synthetic oligonucleotide
gattatcattgtatactgtcaaaaaggcgt

SEQ ID NO: 460069 - DNA, 30 bp, Artificial Sequence
  Synthetic oligonucleotide
agcattttggtgcggacacaggtaaggcgt

SEQ ID NO: 460070 - DNA, 30 bp, Artificial Sequence
  Synthetic oligonucleotide
aatataaagggactggtacaacacaggcgt

SEQ ID NO: 460071 - DNA, 30 bp, Artificial Sequence
  Synthetic oligonucleotide
tctcgcgtctctcttaattttaagaggcgt

SEQ ID NO: 460072 - DNA, 30 bp, Artificial Sequence
  Synthetic oligonucleotide
aagtatttccatgataaagtctataggcgt

SEQ ID NO: 460073 - DNA, 30 bp, Artificial Sequence
  Synthetic oligonucleotide
gggcgggtaacgctgtccatacgacggcgt

SEQ ID NO: 460074 - DNA, 30 bp, Artificial Sequence
  Synthetic oligonucleotide
aaccaagtcggcgcgggacgaggacggcgt

SEQ ID NO: 460075 - DNA, 30 bp, Artificial Sequence
  Synthetic oligonucleotide
tgagaaaaccatgagttcccccgccggcgt

SEQ ID NO: 460076 - DNA, 30 bp, Artificial Sequence
  Synthetic oligonucleotide
ctcggtgcttgggagctagtgaagcggcgt

SEQ ID NO: 460077 - DNA, 30 bp, Artificial Sequence
  Synthetic oligonucleotide
accatagtgaggactttctggaggcggcgt

SEQ ID NO: 460078 - DNA, 30 bp, Artificial Sequence
  Synthetic oligonucleotide
tgtgccggaaatatatggatccggcggcgt

SEQ ID NO: 460079 - DNA, 30 bp, Artificial Sequence
  Synthetic oligonucleotide
atatggcacggtgcaagtctgtttcggcgt

SEQ ID NO: 460080 - DNA, 30 bp, Artificial Sequence
  Synthetic oligonucleotide
ttttggaaacctgtttcgaatacagggcgt

SEQ ID NO: 460081 - DNA, 30 bp, Artificial Sequence
  Synthetic oligonucleotide
gggcgcaaatagctgggggtcccagggcgt

SEQ ID NO: 460082 - DNA, 30 bp, Artificial Sequence
  Synthetic oligonucleotide
atccggcgatgtgttgacgcttgagggcgt

SEQ ID NO: 460083 - DNA, 30 bp, Artificial Sequence
  Synthetic oligonucleotide
acttcacttgacttcgtccgatccgggcgt

SEQ ID NO: 460084 - DNA, 30 bp, Artificial Sequence
  Synthetic oligonucleotide
cataggtattagctccgattttctgggcgt

SEQ ID NO: 460085 - DNA, 30 bp, Artificial Sequence
  Synthetic oligonucleotide
tgctctccagctgcgctcataattgggcgt

SEQ ID NO: 460086 - DNA, 30 bp, Artificial Sequence
  Synthetic oligonucleotide
tcccctgtatgattgcgggaggttgggcgt

SEQ ID NO: 460087 - DNA, 29 bp, Artificial Sequence
  Synthetic oligonucleotide
gaattttctcggagaaagcgcagtggcgt

SEQ ID NO: 460088 - DNA, 30 bp, Artificial Sequence
  Synthetic oligonucleotide
gacctttttgtcaggtcagaaccgtggcgt

SEQ ID NO: 460089 - DNA, 30 bp, Artificial Sequence
  Synthetic oligonucleotide
tgtgaagagaggtttcttatcatttggcgt

SEQ ID NO: 460090 - DNA, 30 bp, Artificial Sequence
  Synthetic oligonucleotide
cagggcggtatcggggaccctcccatgcgt

SEQ ID NO: 460091 - DNA, 30 bp, Artificial Sequence
  Synthetic oligonucleotide
ggctcaggcaaatcctccgttgagatgcgt

SEQ ID NO: 460092 - DNA, 30 bp, Artificial Sequence
  Synthetic oligonucleotide
gggctaacaatagcgcttagaaggatgcgt

SEQ ID NO: 460093 - DNA, 30 bp, Artificial Sequence
  Synthetic oligonucleotide
aagaagaagtttgtacgataacgtatgcgt

SEQ ID NO: 460094 - DNA, 30 bp, Artificial Sequence
  Synthetic oligonucleotide
actctccacttagtaaagatccgtatgcgt

SEQ ID NO: 460095 - DNA, 30 bp, Artificial Sequence
  Synthetic oligonucleotide
tatagcagtcaacggtattagcttatgcgt

SEQ ID NO: 460096 - DNA, 30 bp, Artificial Sequence
  Synthetic oligonucleotide
cagtatttacaagtataaacggttatgcgt

SEQ ID NO: 460097 - DNA, 30 bp, Artificial Sequence
  Synthetic oligonucleotide
ttgctctcaactggattctaatgactgcgt

SEQ ID NO: 460098 - DNA, 30 bp, Artificial Sequence
  Synthetic oligonucleotide
accatagatacgggtgcaaacggcctgcgt

SEQ ID NO: 460099 - DNA, 30 bp, Artificial Sequence
  Synthetic oligonucleotide
gagtattgtcgcagagaaatgcggctgcgt

SEQ ID NO: 460100 - DNA, 30 bp, Artificial Sequence
  Synthetic oligonucleotide
agaacatcgcgtttgacaacatggctgcgt

SEQ ID NO: 460101 - DNA, 30 bp, Artificial Sequence
  Synthetic oligonucleotide
cgcagttcccgactgaaccgagatctgcgt

SEQ ID NO: 460102 - DNA, 30 bp, Artificial Sequence
  Synthetic oligonucleotide
cccgaataaaagattcattgtactctgcgt

SEQ ID NO: 460103 - DNA, 30 bp, Artificial Sequence
  Synthetic oligonucleotide
cagatttgattgagtggtcaatttctgcgt

SEQ ID NO: 460104 - DNA, 30 bp, Artificial Sequence
  Synthetic oligonucleotide
atagatccaagcgtacatatatttctgcgt

SEQ ID NO: 460105 - DNA, 30 bp, Artificial Sequence
  Synthetic oligonucleotide
gggtcgtactgtcggccgataccagtgcgt

SEQ ID NO: 460106 - DNA, 30 bp, Artificial Sequence
  Synthetic oligonucleotide
aacgcctgccgattaaattatccagtgcgt

SEQ ID NO: 460107 - DNA, 30 bp, Artificial Sequence
  Synthetic oligonucleotide
acttagtcgcacttcaaataccgagtgcgt

SEQ ID NO: 460108 - DNA, 30 bp, Artificial Sequence
  Synthetic oligonucleotide
attaaagcggcatatggtcgattagtgcgt

SEQ ID NO: 460109 - DNA, 30 bp, Artificial Sequence
  Synthetic oligonucleotide
ggatagtgagattctggaatttttgtgcgt

SEQ ID NO: 460110 - DNA, 30 bp, Artificial Sequence
  Synthetic oligonucleotide
aatctctcagctaatgggactaacttgcgt

SEQ ID NO: 460111 - DNA, 30 bp, Artificial Sequence
  Synthetic oligonucleotide
ggggctcgcaaacaaccggtttagttgcgt

SEQ ID NO: 460112 - DNA, 30 bp, Artificial Sequence
  Synthetic oligonucleotide
ttccggaacttggtcagcgccgatttgcgt

SEQ ID NO: 460113 - DNA, 30 bp, Artificial Sequence
  Synthetic oligonucleotide
aattactgcacgtctgggccgctaaatcgt

SEQ ID NO: 460114 - DNA, 30 bp, Artificial Sequence
  Synthetic oligonucleotide
ggtagtgtggtaggctctagtaagaatcgt

SEQ ID NO: 460115 - DNA, 30 bp, Artificial Sequence
  Synthetic oligonucleotide
atgtgtacaacttggtgccgcaggaatcgt

SEQ ID NO: 460116 - DNA, 30 bp, Artificial Sequence
  Synthetic oligonucleotide
aaaccaggagttcctgggataggacatcgt

SEQ ID NO: 460117 - DNA, 30 bp, Artificial Sequence
  Synthetic oligonucleotide
tgcggtccgtagggctggccagaccatcgt

SEQ ID NO: 460118 - DNA, 30 bp, Artificial Sequence
  Synthetic oligonucleotide
ggaaagaaaatggctaaagatagccatcgt

SEQ ID NO: 460119 - DNA, 30 bp, Artificial Sequence
  Synthetic oligonucleotide
cgtttgcgcctagtcgtctacgggcatcgt

SEQ ID NO: 460120 - DNA, 30 bp, Artificial Sequence
  Synthetic oligonucleotide
cggtggaagatacgcctcctctggcatcgt

SEQ ID NO: 460121 - DNA, 30 bp, Artificial Sequence
  Synthetic oligonucleotide
gagttagctctcggaacatgaaatcatcgt

SEQ ID NO: 460122 - DNA, 30 bp, Artificial Sequence
  Synthetic oligonucleotide
ttgtcggcgaacgattcgacgtccgatcgt

SEQ ID NO: 460123 - DNA, 30 bp, Artificial Sequence
  Synthetic oligonucleotide
gtccagacctgtagtatttgacgggatcgt

SEQ ID NO: 460124 - DNA, 30 bp, Artificial Sequence
  Synthetic oligonucleotide
aacctcacggtagtgatttacggggatcgt

SEQ ID NO: 460125 - DNA, 30 bp, Artificial Sequence
  Synthetic oligonucleotide
aaacttccggcaacgcttactctggatcgt

SEQ ID NO: 460126 - DNA, 30 bp, Artificial Sequence
  Synthetic oligonucleotide
gatttgagggtacatcgacgccaatatcgt

SEQ ID NO: 460127 - DNA, 30 bp, Artificial Sequence
  Synthetic oligonucleotide
gacgtcaaaacgcacggcaacttctatcgt

SEQ ID NO: 460128 - DNA, 30 bp, Artificial Sequence
  Synthetic oligonucleotide
tggaagggggtatggttctacgcgtatcgt

SEQ ID NO: 460129 - DNA, 30 bp, Artificial Sequence
  Synthetic oligonucleotide
ccgcaatttgtgctatttatatcgtatcgt

SEQ ID NO: 460130 - DNA, 30 bp, Artificial Sequence
  Synthetic oligonucleotide
tggagcactgtgccttttccgtattatcgt

SEQ ID NO: 460131 - DNA, 30 bp, Artificial Sequence
  Synthetic oligonucleotide
taatcatcgaggtgaacggatctaactcgt

SEQ ID NO: 460132 - DNA, 30 bp, Artificial Sequence
  Synthetic oligonucleotide
aaggttccgaggagaacaccacacactcgt

SEQ ID NO: 460133 - DNA, 30 bp, Artificial Sequence
  Synthetic oligonucleotide
acttccgtggaccgacgctgcgccactcgt

SEQ ID NO: 460134 - DNA, 30 bp, Artificial Sequence
  Synthetic oligonucleotide
agcccaggtcagacttgatagacgactcgt

SEQ ID NO: 460135 - DNA, 30 bp, Artificial Sequence
  Synthetic oligonucleotide
tatcaacttctgtatgcattccgtactcgt

SEQ ID NO: 460136 - DNA, 30 bp, Artificial Sequence
  Synthetic oligonucleotide
ggattgatcgatgacaattgccttactcgt

SEQ ID NO: 460137 - DNA, 30 bp, Artificial Sequence
  Synthetic oligonucleotide
ccgggcccggacagcagaccttcacctcgt

SEQ ID NO: 460138 - DNA, 30 bp, Artificial Sequence
  Synthetic oligonucleotide
agataccagcaactaccggcgcaccctcgt

SEQ ID NO: 460139 - DNA, 30 bp, Artificial Sequence
  Synthetic oligonucleotide
gtttttccactgacatcccaaggccctcgt

SEQ ID NO: 460140 - DNA, 30 bp, Artificial Sequence
  Synthetic oligonucleotide
aaaaaatgaaggaaccagccgatccctcgt

SEQ ID NO: 460141 - DNA, 30 bp, Artificial Sequence
  Synthetic oligonucleotide
gtcgtgaagtcgctgttgcacaagcctcgt

SEQ ID NO: 460142 - DNA, 30 bp, Artificial Sequence
  Synthetic oligonucleotide
cgaagcgtatatacgaggtgtctgcctcgt

SEQ ID NO: 460143 - DNA, 30 bp, Artificial Sequence
  Synthetic oligonucleotide
tatctcgaccacgtgcgacgcagtcctcgt

SEQ ID NO: 460144 - DNA, 30 bp, Artificial Sequence
  Synthetic oligonucleotide
cgtgtacgagccatactcgcacaagctcgt

SEQ ID NO: 460145 - DNA, 30 bp, Artificial Sequence
  Synthetic oligonucleotide
tgggcaataccggattcaaacgcagctcgt

SEQ ID NO: 460146 - DNA, 30 bp, Artificial Sequence
  Synthetic oligonucleotide
ctcacgcgctgccactcggatgcggctcgt

SEQ ID NO: 460147 - DNA, 30 bp, Artificial Sequence
  Synthetic oligonucleotide
attttagccggtcggctgcttgcatctcgt

SEQ ID NO: 460148 - DNA, 30 bp, Artificial Sequence
  Synthetic oligonucleotide
agtgtcttacaggtcgcaaagttatctcgt

SEQ ID NO: 460149 - DNA, 30 bp, Artificial Sequence
  Synthetic oligonucleotide
tttctattcccccctgcccttttgtctcgt

SEQ ID NO: 460150 - DNA, 30 bp, Artificial Sequence
  Synthetic oligonucleotide
gatggtgtaaaagtaaccgcggcttctcgt

SEQ ID NO: 460151 - DNA, 30 bp, Artificial Sequence
  Synthetic oligonucleotide
aaactacgcggaagctagagtaggagtcgt

SEQ ID NO: 460152 - DNA, 30 bp, Artificial Sequence
  Synthetic oligonucleotide
tggggtcagcacggtaccgaaggtagtcgt

SEQ ID NO: 460153 - DNA, 30 bp, Artificial Sequence
  Synthetic oligonucleotide
gagttgtcgtctaatcaaggacttagtcgt

SEQ ID NO: 460154 - DNA, 30 bp, Artificial Sequence
  Synthetic oligonucleotide
cggccctggggttgggaacagtttagtcgt

SEQ ID NO: 460155 - DNA, 30 bp, Artificial Sequence
  Synthetic oligonucleotide
gattggcctgtaatctttatcaaacgtcgt

SEQ ID NO: 460156 - DNA, 30 bp, Artificial Sequence
  Synthetic oligonucleotide
cttcttttcttcaccgaatagtaacgtcgt

SEQ ID NO: 460157 - DNA, 30 bp, Artificial Sequence
  Synthetic oligonucleotide
tatgatcgtgaggggcctcttgaccgtcgt

SEQ ID NO: 460158 - DNA, 30 bp, Artificial Sequence
  Synthetic oligonucleotide
gtatgcaaataggataccctctaccgtcgt

SEQ ID NO: 460159 - DNA, 30 bp, Artificial Sequence
  Synthetic oligonucleotide
agttgacgatcgataaagggttcccgtcgt

SEQ ID NO: 460160 - DNA, 30 bp, Artificial Sequence
  Synthetic oligonucleotide
actcctgaggtgagagtataaaagcgtcgt

SEQ ID NO: 460161 - DNA, 30 bp, Artificial Sequence
  Synthetic oligonucleotide
gtgcccatcttcctgctatacgaaggtcgt

SEQ ID NO: 460162 - DNA, 30 bp, Artificial Sequence
  Synthetic oligonucleotide
ctttttttaggcagaaggtcaaggggtcgt

SEQ ID NO: 460163 - DNA, 30 bp, Artificial Sequence
  Synthetic oligonucleotide
tggaaatgtgggaacggcacagggggtcgt

SEQ ID NO: 460164 - DNA, 30 bp, Artificial Sequence
  Synthetic oligonucleotide
ccgtaacgagcaggacgcaaggactgtcgt

SEQ ID NO: 460165 - DNA, 29 bp, Artificial Sequence
  Synthetic oligonucleotide
acttacggaaaagagaactcggctgtcgt

SEQ ID NO: 460166 - DNA, 30 bp, Artificial Sequence
  Synthetic oligonucleotide
catgggacgaacaaggtcggggtctgtcgt

SEQ ID NO: 460167 - DNA, 30 bp, Artificial Sequence
  Synthetic oligonucleotide
ggatgctacgcgaagggcatcccgtgtcgt

SEQ ID NO: 460168 - DNA, 30 bp, Artificial Sequence
  Synthetic oligonucleotide
cgagtcccttacggcaaataatattgtcgt

SEQ ID NO: 460169 - DNA, 30 bp, Artificial Sequence
  Synthetic oligonucleotide
catcacgaatcgcacttatgcctttgtcgt

SEQ ID NO: 460170 - DNA, 30 bp, Artificial Sequence
  Synthetic oligonucleotide
ggaagtccagacgcgcggctaaaaattcgt

SEQ ID NO: 460171 - DNA, 30 bp, Artificial Sequence
  Synthetic oligonucleotide
attgtaattgcgcgtttgccggaaattcgt

SEQ ID NO: 460172 - DNA, 30 bp, Artificial Sequence
  Synthetic oligonucleotide
acgatatcgtgattctattaattaattcgt

SEQ ID NO: 460173 - DNA, 30 bp, Artificial Sequence
  Synthetic oligonucleotide
ctatggttagcgatgcccggtaacattcgt

SEQ ID NO: 460174 - DNA, 30 bp, Artificial Sequence
  Synthetic oligonucleotide
agagaatgtccccgatttattttcattcgt

SEQ ID NO: 460175 - DNA, 30 bp, Artificial Sequence
  Synthetic oligonucleotide
ccaaactaggtagacacggaaggtattcgt

SEQ ID NO: 460176 - DNA, 30 bp, Artificial Sequence
  Synthetic oligonucleotide
taaagagggctagggttcctcggacttcgt

SEQ ID NO: 460177 - DNA, 30 bp, Artificial Sequence
  Synthetic oligonucleotide
tcaagaaacaagtgcttcgcgtcccttcgt

SEQ ID NO: 460178 - DNA, 30 bp, Artificial Sequence
  Synthetic oligonucleotide
cgcgagaagagttttgccaaatatcttcgt

SEQ ID NO: 460179 - DNA, 30 bp, Artificial Sequence
  Synthetic oligonucleotide
tcctttctaaaaggctcactaccagttcgt

SEQ ID NO: 460180 - DNA, 30 bp, Artificial Sequence
  Synthetic oligonucleotide
gcatcgcgtgaggtgtgacaacacgttcgt

SEQ ID NO: 460181 - DNA, 30 bp, Artificial Sequence
  Synthetic oligonucleotide
gacgcttaacatattggctacgacgttcgt

SEQ ID NO: 460182 - DNA, 30 bp, Artificial Sequence
  Synthetic oligonucleotide
gagtaccgacatattatcactgacgttcgt

SEQ ID NO: 460183 - DNA, 30 bp, Artificial Sequence
  Synthetic oligonucleotide
agattttggcctacgtataccagggttcgt

SEQ ID NO: 460184 - DNA, 30 bp, Artificial Sequence
  Synthetic oligonucleotide
tttctagtctccgatgggcagaatgttcgt

SEQ ID NO: 460185 - DNA, 30 bp, Artificial Sequence
  Synthetic oligonucleotide
actcggtgatgatgagtcgagtcgtttcgt

SEQ ID NO: 460186 - DNA, 30 bp, Artificial Sequence
  Synthetic oligonucleotide
tgtttttccagaggatcatgatattttcgt

SEQ ID NO: 460187 - DNA, 30 bp, Artificial Sequence
  Synthetic oligonucleotide
ggcaagggattcgtggcatctagaaaaggt

SEQ ID NO: 460188 - DNA, 30 bp, Artificial Sequence
  Synthetic oligonucleotide
gccagcgagaattctccgcagctcaaaggt

SEQ ID NO: 460189 - DNA, 30 bp, Artificial Sequence
  Synthetic oligonucleotide
tgaaaaaaagatgaggagtgattcaaaggt

SEQ ID NO: 460190 - DNA, 30 bp, Artificial Sequence
  Synthetic oligonucleotide
tttgattacccagtggagacgtataaaggt

SEQ ID NO: 460191 - DNA, 30 bp, Artificial Sequence
  Synthetic oligonucleotide
tcaaattagaggtatgtgcaacttaaaggt

SEQ ID NO: 460192 - DNA, 30 bp, Artificial Sequence
  Synthetic oligonucleotide
ggagttaccactaatcagtgcgttaaaggt

SEQ ID NO: 460193 - DNA, 30 bp, Artificial Sequence
  Synthetic oligonucleotide
ggtataggcagttgggttggggggcaaggt

SEQ ID NO: 460194 - DNA, 30 bp, Artificial Sequence
  Synthetic oligonucleotide
gtaagacggaggtgtttcgtacatcaaggt

SEQ ID NO: 460195 - DNA, 30 bp, Artificial Sequence
  Synthetic oligonucleotide
ttttgggtcctatggaaaaagagtcaaggt

SEQ ID NO: 460196 - DNA, 30 bp, Artificial Sequence
  Synthetic oligonucleotide
ataggttgtaaggcgcagtgacaagaaggt

SEQ ID NO: 460197 - DNA, 30 bp, Artificial Sequence
  Synthetic oligonucleotide
acttcgaactcgagtctcgaagaggaaggt

SEQ ID NO: 460198 - DNA, 30 bp, Artificial Sequence
  Synthetic oligonucleotide
gtctgccagcctctgttctctccataaggt

SEQ ID NO: 460199 - DNA, 30 bp, Artificial Sequence
  Synthetic oligonucleotide
agggtcttggaaacttagagcggataaggt

SEQ ID NO: 460200 - DNA, 30 bp, Artificial Sequence
  Synthetic oligonucleotide
cccccttccacacacatcttggtataaggt

SEQ ID NO: 460201 - DNA, 30 bp, Artificial Sequence
  Synthetic oligonucleotide
aacgacatcgtcctgcagtagttctaaggt

SEQ ID NO: 460202 - DNA, 30 bp, Artificial Sequence
  Synthetic oligonucleotide
gcctgctctgggacgcaccaaggttaaggt

SEQ ID NO: 460203 - DNA, 30 bp, Artificial Sequence
  Synthetic oligonucleotide
ttaggactatggcgtcttacgccaacaggt

SEQ ID NO: 460204 - DNA, 30 bp, Artificial Sequence
  Synthetic oligonucleotide
cgggtttatgtcatggtgtctccaacaggt

SEQ ID NO: 460205 - DNA, 30 bp, Artificial Sequence
  Synthetic oligonucleotide
gaacccgacgaaggaagctgaggaacaggt

SEQ ID NO: 460206 - DNA, 30 bp, Artificial Sequence
  Synthetic oligonucleotide
ctattcgcctcttaaaccgtgatcacaggt

SEQ ID NO: 460207 - DNA, 30 bp, Artificial Sequence
  Synthetic oligonucleotide
cgttcaagaggttttactgacgtcacaggt

SEQ ID NO: 460208 - DNA, 30 bp, Artificial Sequence
  Synthetic oligonucleotide
ggttcagacaccgacacttacccgacaggt

SEQ ID NO: 460209 - DNA, 29 bp, Artificial Sequence
  Synthetic oligonucleotide
gtggacgagttagttcccatctgacaggt

SEQ ID NO: 460210 - DNA, 30 bp, Artificial Sequence
  Synthetic oligonucleotide
acgtagtcagccctcccaattcctacaggt

SEQ ID NO: 460211 - DNA, 30 bp, Artificial Sequence
  Synthetic oligonucleotide
ctacgctagtgcagtcaggggtgtacaggt

SEQ ID NO: 460212 - DNA, 30 bp, Artificial Sequence
  Synthetic oligonucleotide
tatcctcacggttggctggggtgtacaggt

SEQ ID NO: 460213 - DNA, 30 bp, Artificial Sequence
  Synthetic oligonucleotide
ccccctgattctcgggactcggttacaggt

SEQ ID NO: 460214 - DNA, 30 bp, Artificial Sequence
  Synthetic oligonucleotide
atttacaggtgctgtgtatacataccaggt

SEQ ID NO: 460215 - DNA, 30 bp, Artificial Sequence
  Synthetic oligonucleotide
aggatgggtcctccaacttagttcccaggt

SEQ ID NO: 460216 - DNA, 30 bp, Artificial Sequence
  Synthetic oligonucleotide
tcctttacttaaggcgctaaatcgccaggt

SEQ ID NO: 460217 - DNA, 30 bp, Artificial Sequence
  Synthetic oligonucleotide
gcgtaggtcccgaggattaccgggccaggt

SEQ ID NO: 460218 - DNA, 30 bp, Artificial Sequence
  Synthetic oligonucleotide
ggccacagagatagaaggccgcatccaggt

SEQ ID NO: 460219 - DNA, 30 bp, Artificial Sequence
  Synthetic oligonucleotide
gtaggtaattgaacaataccgtgtccaggt

SEQ ID NO: 460220 - DNA, 30 bp, Artificial Sequence
  Synthetic oligonucleotide
gtctataccgaaagcatcatctttccaggt

SEQ ID NO: 460221 - DNA, 30 bp, Artificial Sequence
  Synthetic oligonucleotide
aggaaactactggcttagtgcatagcaggt

SEQ ID NO: 460222 - DNA, 30 bp, Artificial Sequence
  Synthetic oligonucleotide
ggcctgcttcatatgatatagggcgcaggt

SEQ ID NO: 460223 - DNA, 30 bp, Artificial Sequence
  Synthetic oligonucleotide
gaactggctccgatatgttacgtcgcaggt

SEQ ID NO: 460224 - DNA, 30 bp, Artificial Sequence
  Synthetic oligonucleotide
aggtgtgcattaacttccgaggcggcaggt

SEQ ID NO: 460225 - DNA, 30 bp, Artificial Sequence
  Synthetic oligonucleotide
ctgacgtaagaggcatactatggggcaggt

SEQ ID NO: 460226 - DNA, 30 bp, Artificial Sequence
  Synthetic oligonucleotide
cagcggtgcctagaccgaagttctgcaggt

SEQ ID NO: 460227 - DNA, 30 bp, Artificial Sequence
  Synthetic oligonucleotide
gggctcgtttatctgatagaagttgcaggt

SEQ ID NO: 460228 - DNA, 30 bp, Artificial Sequence
  Synthetic oligonucleotide
gaggccgcgcgcgacatatctaaatcaggt

SEQ ID NO: 460229 - DNA, 30 bp, Artificial Sequence
  Synthetic oligonucleotide
cgatgtgcgccatgaaggaaagaatcaggt

SEQ ID NO: 460230 - DNA, 30 bp, Artificial Sequence
  Synthetic oligonucleotide
gcaggttatgtaatactgcaccgatcaggt

SEQ ID NO: 460231 - DNA, 30 bp, Artificial Sequence
  Synthetic oligonucleotide
ttatgtaggaagcacgccactgcctcaggt

SEQ ID NO: 460232 - DNA, 30 bp, Artificial Sequence
  Synthetic oligonucleotide
caattcgcccggtcggaaaaaccgtcaggt

SEQ ID NO: 460233 - DNA, 30 bp, Artificial Sequence
  Synthetic oligonucleotide
acgcggcagcacgcgagatcgtgttcaggt

SEQ ID NO: 460234 - DNA, 30 bp, Artificial Sequence
  Synthetic oligonucleotide
taatgtttcctgaaggttcatccaagaggt

SEQ ID NO: 460235 - DNA, 30 bp, Artificial Sequence
  Synthetic oligonucleotide
cggagtgaattatttggctcgagaagaggt

SEQ ID NO: 460236 - DNA, 30 bp, Artificial Sequence
  Synthetic oligonucleotide
tggaagggcccaccgctacaactaagaggt

SEQ ID NO: 460237 - DNA, 30 bp, Artificial Sequence
  Synthetic oligonucleotide
aaagtgaagctccaaatgcgaaccagaggt

SEQ ID NO: 460238 - DNA, 30 bp, Artificial Sequence
  Synthetic oligonucleotide
cataagcgctttcctgggccacccagaggt

SEQ ID NO: 460239 - DNA, 30 bp, Artificial Sequence
  Synthetic oligonucleotide
ccggattagtgccttcaccttttcagaggt

SEQ ID NO: 460240 - DNA, 30 bp, Artificial Sequence
  Synthetic oligonucleotide
cactacaaagcaacctgtttaactagaggt

SEQ ID NO: 460241 - DNA, 30 bp, Artificial Sequence
  Synthetic oligonucleotide
ttatccgagacggacggcttcggtagaggt

SEQ ID NO: 460242 - DNA, 30 bp, Artificial Sequence
  Synthetic oligonucleotide
catgcccggttaaacgtagtcgcacgaggt

SEQ ID NO: 460243 - DNA, 30 bp, Artificial Sequence
  Synthetic oligonucleotide
ctccttaatgctgacacggctttccgaggt

SEQ ID NO: 460244 - DNA, 30 bp, Artificial Sequence
  Synthetic oligonucleotide
aaattactgctggaacccaactatcgaggt

SEQ ID NO: 460245 - DNA, 30 bp, Artificial Sequence
  Synthetic oligonucleotide
gtccatgatatcgtgggcacttatcgaggt

SEQ ID NO: 460246 - DNA, 30 bp, Artificial Sequence
  Synthetic oligonucleotide
cccatagagagggggatatcaactcgaggt

SEQ ID NO: 460247 - DNA, 30 bp, Artificial Sequence
  Synthetic oligonucleotide
gcgtgcctactaaagacgtatgttcgaggt

SEQ ID NO: 460248 - DNA, 30 bp, Artificial Sequence
  Synthetic oligonucleotide
tctggttggggttgtagcgacgacggaggt

SEQ ID NO: 460249 - DNA, 30 bp, Artificial Sequence
  Synthetic oligonucleotide
ctataaattgactatgcgacactcggaggt

SEQ ID NO: 460250 - DNA, 30 bp, Artificial Sequence
  Synthetic oligonucleotide
tttaaaccgcattgcgtaatagtcggaggt

SEQ ID NO: 460251 - DNA, 30 bp, Artificial Sequence
  Synthetic oligonucleotide
gatggcgcccccggcagcttcctgggaggt

SEQ ID NO: 460252 - DNA, 30 bp, Artificial Sequence
  Synthetic oligonucleotide
cggacaacaagagcggggctcgatggaggt

SEQ ID NO: 460253 - DNA, 30 bp, Artificial Sequence
  Synthetic oligonucleotide
taaagtgactggcacttgtttaaatgaggt

SEQ ID NO: 460254 - DNA, 30 bp, Artificial Sequence
  Synthetic oligonucleotide
tggtttgatactaaaaaacttgaatgaggt

SEQ ID NO: 460255 - DNA, 30 bp, Artificial Sequence
  Synthetic oligonucleotide
tccggacctatccggcttacaacatgaggt

SEQ ID NO: 460256 - DNA, 30 bp, Artificial Sequence
  Synthetic oligonucleotide
aacgtaacgacagctcatgcagtatgaggt

SEQ ID NO: 460257 - DNA, 30 bp, Artificial Sequence
  Synthetic oligonucleotide
ggcctaaaattgggcggagcaccctgaggt

SEQ ID NO: 460258 - DNA, 30 bp, Artificial Sequence
  Synthetic oligonucleotide
ggcaggcataaggatccgacagacataggt

SEQ ID NO: 460259 - DNA, 30 bp, Artificial Sequence
  Synthetic oligonucleotide
gttataaaggttatcacattaaccataggt

SEQ ID NO: 460260 - DNA, 30 bp, Artificial Sequence
  Synthetic oligonucleotide
cacttggtattctaaagacgtttcataggt

SEQ ID NO: 460261 - DNA, 30 bp, Artificial Sequence
  Synthetic oligonucleotide
ggctctgcaatcaggagtataaggataggt

SEQ ID NO: 460262 - DNA, 30 bp, Artificial Sequence
  Synthetic oligonucleotide
aatatcgtaacgaagggtcggatgataggt

SEQ ID NO: 460263 - DNA, 30 bp, Artificial Sequence
  Synthetic oligonucleotide
ggaacctcgggctgttgtaaccctataggt

SEQ ID NO: 460264 - DNA, 30 bp, Artificial Sequence
  Synthetic oligonucleotide
cagattagttaagtaggaggaagtataggt

SEQ ID NO: 460265 - DNA, 30 bp, Artificial Sequence
  Synthetic oligonucleotide
gacgccagtgttctggtcctccgtataggt

SEQ ID NO: 460266 - DNA, 30 bp, Artificial Sequence
  Synthetic oligonucleotide
aacggatcaatcctcggattaattataggt

SEQ ID NO: 460267 - DNA, 30 bp, Artificial Sequence
  Synthetic oligonucleotide
tttataatactggttgcctcagttataggt

SEQ ID NO: 460268 - DNA, 30 bp, Artificial Sequence
  Synthetic oligonucleotide
accatcgagggtccatacacactactaggt

SEQ ID NO: 460269 - DNA, 30 bp, Artificial Sequence
  Synthetic oligonucleotide
agaattagttgaaaggtactagggctaggt

SEQ ID NO: 460270 - DNA, 30 bp, Artificial Sequence
  Synthetic oligonucleotide
cacagtgtacgtatactagacgtgctaggt

SEQ ID NO: 460271 - DNA, 30 bp, Artificial Sequence
  Synthetic oligonucleotide
ccgattagggaataaagatttccagtaggt

SEQ ID NO: 460272 - DNA, 30 bp, Artificial Sequence
  Synthetic oligonucleotide
tactgttgcttgcgtgcaaacttagtaggt

SEQ ID NO: 460273 - DNA, 30 bp, Artificial Sequence
  Synthetic oligonucleotide
cagtatatcacgcacagaccaagcgtaggt

SEQ ID NO: 460274 - DNA, 30 bp, Artificial Sequence
  Synthetic oligonucleotide
caatttctcgggatgacacacctggtaggt

SEQ ID NO: 460275 - DNA, 30 bp, Artificial Sequence
  Synthetic oligonucleotide
ctaatttaattggcgggctacagattaggt

SEQ ID NO: 460276 - DNA, 30 bp, Artificial Sequence
  Synthetic oligonucleotide
tgttgggactagcgagctggggtattaggt

SEQ ID NO: 460277 - DNA, 30 bp, Artificial Sequence
  Synthetic oligonucleotide
ccttgaacgcgtatttcctgtgtattaggt

SEQ ID NO: 460278 - DNA, 30 bp, Artificial Sequence
  Synthetic oligonucleotide
tgcacagtaggtgtttaagttatcttaggt

SEQ ID NO: 460279 - DNA, 30 bp, Artificial Sequence
  Synthetic oligonucleotide
ctagtccataaggactatttatagttaggt

SEQ ID NO: 460280 - DNA, 30 bp, Artificial Sequence
  Synthetic oligonucleotide
gaccctggtgtgcatcctacttggttaggt

SEQ ID NO: 460281 - DNA, 30 bp, Artificial Sequence
  Synthetic oligonucleotide
aaggggaccgatctttttttttggttaggt

SEQ ID NO: 460282 - DNA, 30 bp, Artificial Sequence
  Synthetic oligonucleotide
atttggaatgactcctggtttgtgttaggt

SEQ ID NO: 460283 - DNA, 30 bp, Artificial Sequence
  Synthetic oligonucleotide
ggtctatcttcacagagacatgctttaggt

SEQ ID NO: 460284 - DNA, 30 bp, Artificial Sequence
  Synthetic oligonucleotide
gcgtaatgccccgttcgtgacggtttaggt

SEQ ID NO: 460285 - DNA, 30 bp, Artificial Sequence
  Synthetic oligonucleotide
cacaaacccaagtactacctttttttaggt

SEQ ID NO: 460286 - DNA, 30 bp, Artificial Sequence
  Synthetic oligonucleotide
atattaccataggctcttcggacaaacggt

SEQ ID NO: 460287 - DNA, 30 bp, Artificial Sequence
  Synthetic oligonucleotide
atccgttaatctgattgtacaccaaacggt

SEQ ID NO: 460288 - DNA, 30 bp, Artificial Sequence
  Synthetic oligonucleotide
tctgccactagatgaattatcggaaacggt

SEQ ID NO: 460289 - DNA, 30 bp, Artificial Sequence
  Synthetic oligonucleotide
ttccaaggttacaggggttcatcgaacggt

SEQ ID NO: 460290 - DNA, 30 bp, Artificial Sequence
  Synthetic oligonucleotide
actatgattggggtaactactctgaacggt

SEQ ID NO: 460291 - DNA, 30 bp, Artificial Sequence
  Synthetic oligonucleotide
tgatgaaaggaattcgtagaagtgaacggt

SEQ ID NO: 460292 - DNA, 30 bp, Artificial Sequence
  Synthetic oligonucleotide
ccggctttccagtacggatggtataacggt

SEQ ID NO: 460293 - DNA, 30 bp, Artificial Sequence
  Synthetic oligonucleotide
cagtagttacgtagcaaataccgtaacggt

SEQ ID NO: 460294 - DNA, 30 bp, Artificial Sequence
  Synthetic oligonucleotide
aaatgggttaacactcaatgagtacacggt

SEQ ID NO: 460295 - DNA, 28 bp, Artificial Sequence
  Synthetic oligonucleotide
catatctccggtgcagtagcaccacggt

SEQ ID NO: 460296 - DNA, 30 bp, Artificial Sequence
  Synthetic oligonucleotide
cggacgcgcaagtggaggggaagccacggt

SEQ ID NO: 460297 - DNA, 30 bp, Artificial Sequence
  Synthetic oligonucleotide
ttctcccatctgccaccccaacagcacggt

SEQ ID NO: 460298 - DNA, 30 bp, Artificial Sequence
  Synthetic oligonucleotide
cttctccagaagcgcttgatctggcacggt

SEQ ID NO: 460299 - DNA, 30 bp, Artificial Sequence
  Synthetic oligonucleotide
tttgatagaagtttcattttatatcacggt

SEQ ID NO: 460300 - DNA, 30 bp, Artificial Sequence
  Synthetic oligonucleotide
gttgggattggtcatatccgttatcacggt

SEQ ID NO: 460301 - DNA, 30 bp, Artificial Sequence
  Synthetic oligonucleotide
ctgtgattacgggccacgagtactcacggt

SEQ ID NO: 460302 - DNA, 30 bp, Artificial Sequence
  Synthetic oligonucleotide
ataccgatatttgttcacgggtgtcacggt

SEQ ID NO: 460303 - DNA, 30 bp, Artificial Sequence
  Synthetic oligonucleotide
aacggtctgtgaatcattgtaattcacggt

SEQ ID NO: 460304 - DNA, 30 bp, Artificial Sequence
  Synthetic oligonucleotide
gcaccaatggcgattggctaagcagacggt

SEQ ID NO: 460305 - DNA, 30 bp, Artificial Sequence
  Synthetic oligonucleotide
cacgcgggctagggccttccgcgagacggt

SEQ ID NO: 460306 - DNA, 30 bp, Artificial Sequence
  Synthetic oligonucleotide
ccatgtggacagaacttccccgccgacggt

SEQ ID NO: 460307 - DNA, 30 bp, Artificial Sequence
  Synthetic oligonucleotide
ctggagccagattcatcccaatgcgacggt

SEQ ID NO: 460308 - DNA, 30 bp, Artificial Sequence
  Synthetic oligonucleotide
tagaaaatcggtcggggaccgatcgacggt

SEQ ID NO: 460309 - DNA, 30 bp, Artificial Sequence
  Synthetic oligonucleotide
actcatattatattattctgcaaggacggt

SEQ ID NO: 460310 - DNA, 30 bp, Artificial Sequence
  Synthetic oligonucleotide
ttttcgttgaaaagagtctaaatgtacggt

SEQ ID NO: 460311 - DNA, 30 bp, Artificial Sequence
  Synthetic oligonucleotide
gatggttttccgttggcgcatatttacggt

SEQ ID NO: 460312 - DNA, 30 bp, Artificial Sequence
  Synthetic oligonucleotide
ccccgtgctgtgccacagatgggaaccggt

SEQ ID NO: 460313 - DNA, 30 bp, Artificial Sequence
  Synthetic oligonucleotide
taggcgattagaactggttttctaaccggt

SEQ ID NO: 460314 - DNA, 30 bp, Artificial Sequence
  Synthetic oligonucleotide
atccccccatgtagggcagctaagaccggt

SEQ ID NO: 460315 - DNA, 30 bp, Artificial Sequence
  Synthetic oligonucleotide
ttatgtgtaaggttatagagctagaccggt

SEQ ID NO: 460316 - DNA, 30 bp, Artificial Sequence
  Synthetic oligonucleotide
tggttcgtgtcggtacgggggcggaccggt

SEQ ID NO: 460317 - DNA, 30 bp, Artificial Sequence
  Synthetic oligonucleotide
ctcggggcagtatccctaatatataccggt

SEQ ID NO: 460318 - DNA, 30 bp, Artificial Sequence
  Synthetic oligonucleotide
ctgggctcctatggtgccaaaagtaccggt

SEQ ID NO: 460319 - DNA, 30 bp, Artificial Sequence
  Synthetic oligonucleotide
ggagtcccatgtggagcaattatacccggt

SEQ ID NO: 460320 - DNA, 30 bp, Artificial Sequence
  Synthetic oligonucleotide
ggactttacagggctttcgaccaccccggt

SEQ ID NO: 460321 - DNA, 35 bp, Artificial Sequence
  Synthetic oligonucleotide
tatacttctgtaaaaattgacgtgcggaccccggt

SEQ ID NO: 460322 - DNA, 30 bp, Artificial Sequence
  Synthetic oligonucleotide
agtgcgagtttatgtgttagactccccggt

SEQ ID NO: 460323 - DNA, 30 bp, Artificial Sequence
  Synthetic oligonucleotide
aacaacctgcgtaactccttcgtccccggt

SEQ ID NO: 460324 - DNA, 30 bp, Artificial Sequence
  Synthetic oligonucleotide
cttagctggatagagacaagcactcccggt

SEQ ID NO: 460325 - DNA, 30 bp, Artificial Sequence
  Synthetic oligonucleotide
aatctaacaaccaggaggtttacagccggt

SEQ ID NO: 460326 - DNA, 30 bp, Artificial Sequence
  Synthetic oligonucleotide
cccgctcgcccgcaacactttcccgccggt

SEQ ID NO: 460327 - DNA, 30 bp, Artificial Sequence
  Synthetic oligonucleotide
tactagcattgatcactgtttgccgccggt

SEQ ID NO: 460328 - DNA, 30 bp, Artificial Sequence
  Synthetic oligonucleotide
aggcaatgcgaaggcaggggtaaggccggt

SEQ ID NO: 460329 - DNA, 30 bp, Artificial Sequence
  Synthetic oligonucleotide
accggccgcttgtctagccacaatgccggt

SEQ ID NO: 460330 - DNA, 30 bp, Artificial Sequence
  Synthetic oligonucleotide
agtcgaggctacgcggaatagacttccggt

SEQ ID NO: 460331 - DNA, 30 bp, Artificial Sequence
  Synthetic oligonucleotide
agtgataccgtggaccctccggcttccggt

SEQ ID NO: 460332 - DNA, 30 bp, Artificial Sequence
  Synthetic oligonucleotide
aaaacttaaatgtgtgacttaagttccggt

SEQ ID NO: 460333 - DNA, 30 bp, Artificial Sequence
  Synthetic oligonucleotide
aagcacgccgacacttttatgttttccggt

SEQ ID NO: 460334 - DNA, 30 bp, Artificial Sequence
  Synthetic oligonucleotide
gtttaacttcgacgcgtcagtcaaagcggt

SEQ ID NO: 460335 - DNA, 30 bp, Artificial Sequence
  Synthetic oligonucleotide
gtaatctcagtccgatcaaccgtaagcggt

SEQ ID NO: 460336 - DNA, 30 bp, Artificial Sequence
  Synthetic oligonucleotide
ctaacctataggaaatggtagcacagcggt

SEQ ID NO: 460337 - DNA, 30 bp, Artificial Sequence
  Synthetic oligonucleotide
cactgtagcaatacgcgaaattacagcggt

SEQ ID NO: 460338 - DNA, 30 bp, Artificial Sequence
  Synthetic oligonucleotide
gagatgccgatccttccatcaaccagcggt

SEQ ID NO: 460339 - DNA, 30 bp, Artificial Sequence
  Synthetic oligonucleotide
gccccacccaagtgttatacgagcagcggt

SEQ ID NO: 460340 - DNA, 30 bp, Artificial Sequence
  Synthetic oligonucleotide
tggcgagtagttgcccagcaactcagcggt

SEQ ID NO: 460341 - DNA, 30 bp, Artificial Sequence
  Synthetic oligonucleotide
gatttataatgagtaaagtctaagagcggt

SEQ ID NO: 460342 - DNA, 30 bp, Artificial Sequence
  Synthetic oligonucleotide
ccagtcaataccgcggaaggtacgagcggt

SEQ ID NO: 460343 - DNA, 30 bp, Artificial Sequence
  Synthetic oligonucleotide
ttcccgacgaggacgcggagcgcgagcggt

SEQ ID NO: 460344 - DNA, 30 bp, Artificial Sequence
  Synthetic oligonucleotide
gatgtatactttaatgtcttcagtagcggt

SEQ ID NO: 460345 - DNA, 30 bp, Artificial Sequence
  Synthetic oligonucleotide
tagaaccgcgggcataacggcccacgcggt

SEQ ID NO: 460346 - DNA, 30 bp, Artificial Sequence
  Synthetic oligonucleotide
aagcaatataaatgtgaggttagacgcggt

SEQ ID NO: 460347 - DNA, 30 bp, Artificial Sequence
  Synthetic oligonucleotide
ttattcccgccactagtttaaatacgcggt

SEQ ID NO: 460348 - DNA, 30 bp, Artificial Sequence
  Synthetic oligonucleotide
cagatgccttagacccactgtacccgcggt

SEQ ID NO: 460349 - DNA, 30 bp, Artificial Sequence
  Synthetic oligonucleotide
acccttactattcaagatgatccgcgcggt

SEQ ID NO: 460350 - DNA, 30 bp, Artificial Sequence
  Synthetic oligonucleotide
taagctctgacccaactacaatggcgcggt

SEQ ID NO: 460351 - DNA, 30 bp, Artificial Sequence
  Synthetic oligonucleotide
gtctgcaccttgctatataagaacggcggt

SEQ ID NO: 460352 - DNA, 30 bp, Artificial Sequence
  Synthetic oligonucleotide
ttcttccatccggacgcgcgttatggcggt

SEQ ID NO: 460353 - DNA, 30 bp, Artificial Sequence
  Synthetic oligonucleotide
taggtaaccggcagaaagctcacctgcggt

SEQ ID NO: 460354 - DNA, 30 bp, Artificial Sequence
  Synthetic oligonucleotide
acaccgagcagggtctagccatcctgcggt

SEQ ID NO: 460355 - DNA, 31 bp, Artificial Sequence
  Synthetic oligonucleotide
cgtctgagcattagggtgctcctagtgcggt

SEQ ID NO: 460356 - DNA, 30 bp, Artificial Sequence
  Synthetic oligonucleotide
aacgtgagtaacacacgtaaatcttgcggt

SEQ ID NO: 460357 - DNA, 30 bp, Artificial Sequence
  Synthetic oligonucleotide
ttaggggtaatcgaaacccactgttgcggt

SEQ ID NO: 460358 - DNA, 30 bp, Artificial Sequence
  Synthetic oligonucleotide
tccttcgggggacgagggccggtttgcggt

SEQ ID NO: 460359 - DNA, 30 bp, Artificial Sequence
  Synthetic oligonucleotide
ttgtgtaagaacaagactttcaccatcggt

SEQ ID NO: 460360 - DNA, 30 bp, Artificial Sequence
  Synthetic oligonucleotide
cacttttcgtacacggtactatgcatcggt

SEQ ID NO: 460361 - DNA, 30 bp, Artificial Sequence
  Synthetic oligonucleotide
tttcgaatcagagtcctgccgaggatcggt

SEQ ID NO: 460362 - DNA, 30 bp, Artificial Sequence
  Synthetic oligonucleotide
atatttaagaccattgttccggttatcggt

SEQ ID NO: 460363 - DNA, 30 bp, Artificial Sequence
  Synthetic oligonucleotide
aaggcgcgttatacgagtagacacctcggt

SEQ ID NO: 460364 - DNA, 30 bp, Artificial Sequence
  Synthetic oligonucleotide
cagacgaacgcgttcagtcccagcctcggt

SEQ ID NO: 460365 - DNA, 30 bp, Artificial Sequence
  Synthetic oligonucleotide
gtagcgaacaagggggggaatggcctcggt

SEQ ID NO: 460366 - DNA, 30 bp, Artificial Sequence
  Synthetic oligonucleotide
aaaatcagggtcacttgtcctgagctcggt

SEQ ID NO: 460367 - DNA, 30 bp, Artificial Sequence
  Synthetic oligonucleotide
tgtctcggtgtgctgtcacgctagctcggt

SEQ ID NO: 460368 - DNA, 30 bp, Artificial Sequence
  Synthetic oligonucleotide
atcagtgttgcataaagtcaccatctcggt

SEQ ID NO: 460369 - DNA, 30 bp, Artificial Sequence
  Synthetic oligonucleotide
acttaatctggttctggagatcctctcggt

SEQ ID NO: 460370 - DNA, 30 bp, Artificial Sequence
  Synthetic oligonucleotide
tttacatgtggggatttacattgtctcggt

SEQ ID NO: 460371 - DNA, 30 bp, Artificial Sequence
  Synthetic oligonucleotide
aggaaatgctgttttatttctgttctcggt

SEQ ID NO: 460372 - DNA, 30 bp, Artificial Sequence
  Synthetic oligonucleotide
gcacaaacggcaatgaaggcagcggtcggt

SEQ ID NO: 460373 - DNA, 30 bp, Artificial Sequence
  Synthetic oligonucleotide
gacctgatataatgtggtaaaaaattcggt

SEQ ID NO: 460374 - DNA, 30 bp, Artificial Sequence
  Synthetic oligonucleotide
tgctcccacaacatgacatccgtgttcggt

SEQ ID NO: 460375 - DNA, 30 bp, Artificial Sequence
  Synthetic oligonucleotide
aaaactcgatcgaaccgggattctttcggt

SEQ ID NO: 460376 - DNA, 30 bp, Artificial Sequence
  Synthetic oligonucleotide
cgaaactatcacctatggaatgaaaagggt

SEQ ID NO: 460377 - DNA, 30 bp, Artificial Sequence
  Synthetic oligonucleotide
cttctctaagtcagggattgccacaagggt

SEQ ID NO: 460378 - DNA, 30 bp, Artificial Sequence
  Synthetic oligonucleotide
caggtcataacgcggtcccgcaggaagggt

SEQ ID NO: 460379 - DNA, 30 bp, Artificial Sequence
  Synthetic oligonucleotide
gaagagctgatcatgaggacgcgtaagggt

SEQ ID NO: 460380 - DNA, 30 bp, Artificial Sequence
  Synthetic oligonucleotide
taagtaatacgacatgtaaatcttaagggt

SEQ ID NO: 460381 - DNA, 30 bp, Artificial Sequence
  Synthetic oligonucleotide
attaagttatccacgggaaccgttaagggt

SEQ ID NO: 460382 - DNA, 30 bp, Artificial Sequence
  Synthetic oligonucleotide
cttgaagttacgggacgaccactacagggt

SEQ ID NO: 460383 - DNA, 30 bp, Artificial Sequence
  Synthetic oligonucleotide
gaataaaggatgtcacgcttaaaccagggt

SEQ ID NO: 460384 - DNA, 30 bp, Artificial Sequence
  Synthetic oligonucleotide
attttaattataagcgtgttgcaccagggt

SEQ ID NO: 460385 - DNA, 30 bp, Artificial Sequence
  Synthetic oligonucleotide
aaatggaccggaggtgttgccacccagggt

SEQ ID NO: 460386 - DNA, 30 bp, Artificial Sequence
  Synthetic oligonucleotide
gagtagaaagctggggattgggcccagggt

SEQ ID NO: 460387 - DNA, 30 bp, Artificial Sequence
  Synthetic oligonucleotide
gccgcccatcacaactcatatttccagggt

SEQ ID NO: 460388 - DNA, 30 bp, Artificial Sequence
  Synthetic oligonucleotide
gggtggtacttgggggccgccaagcagggt

SEQ ID NO: 460389 - DNA, 30 bp, Artificial Sequence
  Synthetic oligonucleotide
gcgaacttgacctgcggcattttgcagggt

SEQ ID NO: 460390 - DNA, 30 bp, Artificial Sequence
  Synthetic oligonucleotide
gaagagctcatgatttttgccgttcagggt

SEQ ID NO: 460391 - DNA, 30 bp, Artificial Sequence
  Synthetic oligonucleotide
tgacaacagccacctactagggtagagggt

SEQ ID NO: 460392 - DNA, 30 bp, Artificial Sequence
  Synthetic oligonucleotide
ctaaattctattagtgaagggttcgagggt

SEQ ID NO: 460393 - DNA, 30 bp, Artificial Sequence
  Synthetic oligonucleotide
tgtcacccatgatcgacattcacggagggt

SEQ ID NO: 460394 - DNA, 30 bp, Artificial Sequence
  Synthetic oligonucleotide
tttcatctccacggaaggtggccggagggt

SEQ ID NO: 460395 - DNA, 30 bp, Artificial Sequence
  Synthetic oligonucleotide
ggggggagtgggtacgctgaatcggagggt

SEQ ID NO: 460396 - DNA, 30 bp, Artificial Sequence
  Synthetic oligonucleotide
ggacagctgttgggagggtagggggagggt

SEQ ID NO: 460397 - DNA, 30 bp, Artificial Sequence
  Synthetic oligonucleotide
ggaagcgaccgctgcattgtcaatgagggt

SEQ ID NO: 460398 - DNA, 30 bp, Artificial Sequence
  Synthetic oligonucleotide
ccaatctctatacgggtacagactgagggt

SEQ ID NO: 460399 - DNA, 30 bp, Artificial Sequence
  Synthetic oligonucleotide
ttggcagcgtttaaagacattcgtgagggt

SEQ ID NO: 460400 - DNA, 30 bp, Artificial Sequence
  Synthetic oligonucleotide
gacggttacccgtatcacagtctatagggt

SEQ ID NO: 460401 - DNA, 30 bp, Artificial Sequence
  Synthetic oligonucleotide
gcatctgtacattttggtaatatctagggt

SEQ ID NO: 460402 - DNA, 30 bp, Artificial Sequence
  Synthetic oligonucleotide
atgtaagatgatttaggcttcacgtagggt

SEQ ID NO: 460403 - DNA, 30 bp, Artificial Sequence
  Synthetic oligonucleotide
tcaaaacacagacgcgccaacgcgtagggt

SEQ ID NO: 460404 - DNA, 30 bp, Artificial Sequence
  Synthetic oligonucleotide
gttcaacgcgggcgcagttggcggtagggt

SEQ ID NO: 460405 - DNA, 30 bp, Artificial Sequence
  Synthetic oligonucleotide
aacatatacccagtccccggcgggtagggt

SEQ ID NO: 460406 - DNA, 30 bp, Artificial Sequence
  Synthetic oligonucleotide
gagccaaacttggcttattcactgtagggt

SEQ ID NO: 460407 - DNA, 30 bp, Artificial Sequence
  Synthetic oligonucleotide
cggaaggaaaaaaaagtaaacaattagggt

SEQ ID NO: 460408 - DNA, 30 bp, Artificial Sequence
  Synthetic oligonucleotide
taatcttgcatattctcgtgcacaacgggt

SEQ ID NO: 460409 - DNA, 30 bp, Artificial Sequence
  Synthetic oligonucleotide
ctattattcaatctacattaatcaacgggt

SEQ ID NO: 460410 - DNA, 30 bp, Artificial Sequence
  Synthetic oligonucleotide
aaaagacgatattcccgcgctagaacgggt

SEQ ID NO: 460411 - DNA, 30 bp, Artificial Sequence
  Synthetic oligonucleotide
atggagccgaagcagcccctcctcacgggt

SEQ ID NO: 460412 - DNA, 30 bp, Artificial Sequence
  Synthetic oligonucleotide
agcggtacatcccaagtagaagtcacgggt

SEQ ID NO: 460413 - DNA, 30 bp, Artificial Sequence
  Synthetic oligonucleotide
cccccgtttcctctcaaaggtatgacgggt

SEQ ID NO: 460414 - DNA, 30 bp, Artificial Sequence
  Synthetic oligonucleotide
tacattccctagggaggagcttttacgggt

SEQ ID NO: 460415 - DNA, 30 bp, Artificial Sequence
  Synthetic oligonucleotide
gaaaacgcagtcactgcaagcacaccgggt

SEQ ID NO: 460416 - DNA, 30 bp, Artificial Sequence
  Synthetic oligonucleotide
gcaactactatagctcactatacaccgggt

SEQ ID NO: 460417 - DNA, 30 bp, Artificial Sequence
  Synthetic oligonucleotide
ttgtaccttcgtcccaccattcgaccgggt

SEQ ID NO: 460418 - DNA, 30 bp, Artificial Sequence
  Synthetic oligonucleotide
gggtgattccgcgcagtgacgtccccgggt

SEQ ID NO: 460419 - DNA, 30 bp, Artificial Sequence
  Synthetic oligonucleotide
catagttcctagggcgcttagcgtccgggt

SEQ ID NO: 460420 - DNA, 30 bp, Artificial Sequence
  Synthetic oligonucleotide
gcagccggggcgtagcgaaaatgtccgggt

SEQ ID NO: 460421 - DNA, 30 bp, Artificial Sequence
  Synthetic oligonucleotide
cccaggtacaccggtcgaccctgtccgggt

SEQ ID NO: 460422 - DNA, 30 bp, Artificial Sequence
  Synthetic oligonucleotide
tatccgttggaccaagaaatttttccgggt

SEQ ID NO: 460423 - DNA, 30 bp, Artificial Sequence
  Synthetic oligonucleotide
aaattcggtaatgtagcaagaacagcgggt

SEQ ID NO: 460424 - DNA, 30 bp, Artificial Sequence
  Synthetic oligonucleotide
attaagccccgcacaaaaaccttagcgggt

SEQ ID NO: 460425 - DNA, 30 bp, Artificial Sequence
  Synthetic oligonucleotide
gcactaagacgtctattccacgtcgcgggt

SEQ ID NO: 460426 - DNA, 30 bp, Artificial Sequence
  Synthetic oligonucleotide
gctcaacaccacctaatattcaaggcgggt

SEQ ID NO: 460427 - DNA, 30 bp, Artificial Sequence
  Synthetic oligonucleotide
tcttctggctatttcggcgacccggcgggt

SEQ ID NO: 460428 - DNA, 30 bp, Artificial Sequence
  Synthetic oligonucleotide
ggacgctcaccttagccccagcgggcgggt

SEQ ID NO: 460429 - DNA, 31 bp, Artificial Sequence
  Synthetic oligonucleotide
agggagggcaagggcggtggtgggggcgggt

SEQ ID NO: 460430 - DNA, 30 bp, Artificial Sequence
  Synthetic oligonucleotide
ctaccactacagctcttccgacaatcgggt

SEQ ID NO: 460431 - DNA, 30 bp, Artificial Sequence
  Synthetic oligonucleotide
tttagacgtggacaggaatgttaatcgggt

SEQ ID NO: 460432 - DNA, 30 bp, Artificial Sequence
  Synthetic oligonucleotide
gttttgcagggccacgactaattatcgggt

SEQ ID NO: 460433 - DNA, 30 bp, Artificial Sequence
  Synthetic oligonucleotide
gcagcctgaaaatatcattatgactcgggt

SEQ ID NO: 460434 - DNA, 30 bp, Artificial Sequence
  Synthetic oligonucleotide
attgtctactgacccattaaattctcgggt

SEQ ID NO: 460435 - DNA, 30 bp, Artificial Sequence
  Synthetic oligonucleotide
ttggattggctgacccgcaattattcgggt

SEQ ID NO: 460436 - DNA, 30 bp, Artificial Sequence
  Synthetic oligonucleotide
gatatgcgagcgtgcgtccaatcttcgggt

SEQ ID NO: 460437 - DNA, 30 bp, Artificial Sequence
  Synthetic oligonucleotide
acgtcggcatagaatagccggtcttcgggt

SEQ ID NO: 460438 - DNA, 30 bp, Artificial Sequence
  Synthetic oligonucleotide
ggtcactccgagcgacccgtccaaaggggt

SEQ ID NO: 460439 - DNA, 30 bp, Artificial Sequence
  Synthetic oligonucleotide
tctttgatggcgtcaacaaaccgaaggggt

SEQ ID NO: 460440 - DNA, 30 bp, Artificial Sequence
  Synthetic oligonucleotide
tacgcgcgacaacagaagtccctaaggggt

SEQ ID NO: 460441 - DNA, 30 bp, Artificial Sequence
  Synthetic oligonucleotide
tttgaaactcttctgcctcgtaccaggggt

SEQ ID NO: 460442 - DNA, 30 bp, Artificial Sequence
  Synthetic oligonucleotide
gattacggtgcgcggaagttcgggaggggt

SEQ ID NO: 460443 - DNA, 30 bp, Artificial Sequence
  Synthetic oligonucleotide
tttttcggttttattttgggctggaggggt

SEQ ID NO: 460444 - DNA, 30 bp, Artificial Sequence
  Synthetic oligonucleotide
gtaacagtttgggtggggggtttgaggggt

SEQ ID NO: 460445 - DNA, 30 bp, Artificial Sequence
  Synthetic oligonucleotide
aatccgccaccagatcgtggaaaccggggt

SEQ ID NO: 460446 - DNA, 30 bp, Artificial Sequence
  Synthetic oligonucleotide
gttagagcatgtttgtccttagcgcggggt

SEQ ID NO: 460447 - DNA, 30 bp, Artificial Sequence
  Synthetic oligonucleotide
tcatgtattagtacgaggtgtgctcggggt

SEQ ID NO: 460448 - DNA, 30 bp, Artificial Sequence
  Synthetic oligonucleotide
ggtagacgcccgcctttattaggtcggggt

SEQ ID NO: 460449 - DNA, 30 bp, Artificial Sequence
  Synthetic oligonucleotide
aaagcccctaacagtacgtattgtcggggt

SEQ ID NO: 460450 - DNA, 30 bp, Artificial Sequence
  Synthetic oligonucleotide
ttccgtatagacaggggtcaccttcggggt

SEQ ID NO: 460451 - DNA, 30 bp, Artificial Sequence
  Synthetic oligonucleotide
agccgaaactgattaccaaacgcagggggt

SEQ ID NO: 460452 - DNA, 30 bp, Artificial Sequence
  Synthetic oligonucleotide
gcatttccttcggcgggggtacgagggggt

SEQ ID NO: 460453 - DNA, 29 bp, Artificial Sequence
  Synthetic oligonucleotide
gtaagcacctggtttgaccaggcgggggt

SEQ ID NO: 460454 - DNA, 30 bp, Artificial Sequence
  Synthetic oligonucleotide
ttatatataaattttcagtgtcaggggggt

SEQ ID NO: 460455 - DNA, 30 bp, Artificial Sequence
  Synthetic oligonucleotide
tccctttctctaggggagtacgaggggggt

SEQ ID NO: 460456 - DNA, 30 bp, Artificial Sequence
  Synthetic oligonucleotide
aacgatgatgtgagcagtaaagcggggggt

SEQ ID NO: 460457 - DNA, 30 bp, Artificial Sequence
  Synthetic oligonucleotide
attcatgtgatgattgctagtgcggggggt

SEQ ID NO: 460458 - DNA, 30 bp, Artificial Sequence
  Synthetic oligonucleotide
gggtgaggtagaccaccagcttaatggggt

SEQ ID NO: 460459 - DNA, 30 bp, Artificial Sequence
  Synthetic oligonucleotide
aaagttacactactattcatactctggggt

SEQ ID NO: 460460 - DNA, 30 bp, Artificial Sequence
  Synthetic oligonucleotide
atttgtggtagtccaaatggtgcgtggggt

SEQ ID NO: 460461 - DNA, 30 bp, Artificial Sequence
  Synthetic oligonucleotide
gttgggcaggcggcccggtttttgtggggt

SEQ ID NO: 460462 - DNA, 30 bp, Artificial Sequence
  Synthetic oligonucleotide
gactgcgcacgggcgtgataggcttggggt

SEQ ID NO: 460463 - DNA, 30 bp, Artificial Sequence
  Synthetic oligonucleotide
cggtttgccactgcgcagtataaaatgggt

SEQ ID NO: 460464 - DNA, 30 bp, Artificial Sequence
  Synthetic oligonucleotide
ctctcgccacaattaggcgcgataatgggt

SEQ ID NO: 460465 - DNA, 30 bp, Artificial Sequence
  Synthetic oligonucleotide
gacctctttttcgcaagaacagtaatgggt

SEQ ID NO: 460466 - DNA, 30 bp, Artificial Sequence
  Synthetic oligonucleotide
cgtcgcgtgccactgccattagacatgggt

SEQ ID NO: 460467 - DNA, 30 bp, Artificial Sequence
  Synthetic oligonucleotide
attattacgcttggtctgtatgagatgggt

SEQ ID NO: 460468 - DNA, 30 bp, Artificial Sequence
  Synthetic oligonucleotide
acaaatcatttgcataagtatgcgatgggt

SEQ ID NO: 460469 - DNA, 30 bp, Artificial Sequence
  Synthetic oligonucleotide
agtaatgactggctacttagggggatgggt

SEQ ID NO: 460470 - DNA, 30 bp, Artificial Sequence
  Synthetic oligonucleotide
cgcttaggcagctccgtatttctgatgggt

SEQ ID NO: 460471 - DNA, 30 bp, Artificial Sequence
  Synthetic oligonucleotide
ggcgtccgcgtttcggcttaggtgatgggt

SEQ ID NO: 460472 - DNA, 30 bp, Artificial Sequence
  Synthetic oligonucleotide
gttctcgttggccgcaaaactgtgatgggt

SEQ ID NO: 460473 - DNA, 30 bp, Artificial Sequence
  Synthetic oligonucleotide
aaattgtggaggcgttggtatactatgggt

SEQ ID NO: 460474 - DNA, 30 bp, Artificial Sequence
  Synthetic oligonucleotide
ataggttatgcaggtccgaactcactgggt

SEQ ID NO: 460475 - DNA, 30 bp, Artificial Sequence
  Synthetic oligonucleotide
gtccgacccggtccgtcgaacagactgggt

SEQ ID NO: 460476 - DNA, 30 bp, Artificial Sequence
  Synthetic oligonucleotide
ccgtaaagtattccccaattacgtctgggt

SEQ ID NO: 460477 - DNA, 30 bp, Artificial Sequence
  Synthetic oligonucleotide
gacaaatctggagtaggttcctgagtgggt

SEQ ID NO: 460478 - DNA, 30 bp, Artificial Sequence
  Synthetic oligonucleotide
tctgatcaaacactgaaggggttcgtgggt

SEQ ID NO: 460479 - DNA, 30 bp, Artificial Sequence
  Synthetic oligonucleotide
gtaaagacgcggcgatgtcccccggtgggt

SEQ ID NO: 460480 - DNA, 30 bp, Artificial Sequence
  Synthetic oligonucleotide
gaggtttagaatcccatgcgtcctgtgggt

SEQ ID NO: 460481 - DNA, 30 bp, Artificial Sequence
  Synthetic oligonucleotide
gtttacactagtacggacactgctgtgggt

SEQ ID NO: 460482 - DNA, 30 bp, Artificial Sequence
  Synthetic oligonucleotide
cgaagtcacggggttcttagcgacttgggt

SEQ ID NO: 460483 - DNA, 30 bp, Artificial Sequence
  Synthetic oligonucleotide
aaccgtaggctgacgatgttttccttgggt

SEQ ID NO: 460484 - DNA, 30 bp, Artificial Sequence
  Synthetic oligonucleotide
gtcaataataagcggagcagattcttgggt

SEQ ID NO: 460485 - DNA, 30 bp, Artificial Sequence
  Synthetic oligonucleotide
cttggtcctcaaaaggctggccagttgggt

SEQ ID NO: 460486 - DNA, 30 bp, Artificial Sequence
  Synthetic oligonucleotide
gagttgtcacaaggaggatccaggttgggt

SEQ ID NO: 460487 - DNA, 30 bp, Artificial Sequence
  Synthetic oligonucleotide
acaacacatgacagctatcatgctttgggt

SEQ ID NO: 460488 - DNA, 30 bp, Artificial Sequence
  Synthetic oligonucleotide
aagaacacggaggtttaacattctttgggt

SEQ ID NO: 460489 - DNA, 30 bp, Artificial Sequence
  Synthetic oligonucleotide
aatgactaacacgcccggcaggaaaatggt

SEQ ID NO: 460490 - DNA, 30 bp, Artificial Sequence
  Synthetic oligonucleotide
gctttctaagcgacgaagtcgtgaaatggt

SEQ ID NO: 460491 - DNA, 30 bp, Artificial Sequence
  Synthetic oligonucleotide
tgagacctaggcaatttgcagagcaatggt

SEQ ID NO: 460492 - DNA, 30 bp, Artificial Sequence
  Synthetic oligonucleotide
attcggttccgacgcccggacgtcaatggt

SEQ ID NO: 460493 - DNA, 30 bp, Artificial Sequence
  Synthetic oligonucleotide
ttaagctagcatgcgagtaacccacatggt

SEQ ID NO: 460494 - DNA, 30 bp, Artificial Sequence
  Synthetic oligonucleotide
ggtcccacaaaagtggacgccggacatggt

SEQ ID NO: 460495 - DNA, 30 bp, Artificial Sequence
  Synthetic oligonucleotide
cagcattcaaaaagcctcacgctacatggt

SEQ ID NO: 460496 - DNA, 30 bp, Artificial Sequence
  Synthetic oligonucleotide
accacgttcgtcttatgaaacaaccatggt

SEQ ID NO: 460497 - DNA, 30 bp, Artificial Sequence
  Synthetic oligonucleotide
tcttcttgctgccaaggtgagcaccatggt

SEQ ID NO: 460498 - DNA, 30 bp, Artificial Sequence
  Synthetic oligonucleotide
agcaactgcaacacactactgaatcatggt

SEQ ID NO: 460499 - DNA, 30 bp, Artificial Sequence
  Synthetic oligonucleotide
gtactcgatgggcggacaacagaagatggt

SEQ ID NO: 460500 - DNA, 30 bp, Artificial Sequence
  Synthetic oligonucleotide
aattagcataggatactgctcacagatggt

SEQ ID NO: 460501 - DNA, 30 bp, Artificial Sequence
  Synthetic oligonucleotide
accaccttgtataacttcaggtgagatggt

SEQ ID NO: 460502 - DNA, 30 bp, Artificial Sequence
  Synthetic oligonucleotide
atactaaagattagagcgactaccgatggt

SEQ ID NO: 460503 - DNA, 30 bp, Artificial Sequence
  Synthetic oligonucleotide
atggtctcaatgggagggtactgggatggt

SEQ ID NO: 460504 - DNA, 30 bp, Artificial Sequence
  Synthetic oligonucleotide
tcttatagtgtcctgtaaggttaatatggt

SEQ ID NO: 460505 - DNA, 30 bp, Artificial Sequence
  Synthetic oligonucleotide
gtatagtggaatactgtcctctgatatggt

SEQ ID NO: 460506 - DNA, 30 bp, Artificial Sequence
  Synthetic oligonucleotide
gatgcatttggcggcacgggtaactatggt

SEQ ID NO: 460507 - DNA, 30 bp, Artificial Sequence
  Synthetic oligonucleotide
ctatactgtggagcttgtagtgcctatggt

SEQ ID NO: 460508 - DNA, 30 bp, Artificial Sequence
  Synthetic oligonucleotide
atagcttttttatgttcatgcaggtatggt

SEQ ID NO: 460509 - DNA, 30 bp, Artificial Sequence
  Synthetic oligonucleotide
ttctagtatgacagatcaaaaacttatggt

SEQ ID NO: 460510 - DNA, 30 bp, Artificial Sequence
  Synthetic oligonucleotide
agtaactgacaacgcaaatagcaaactggt

SEQ ID NO: 460511 - DNA, 30 bp, Artificial Sequence
  Synthetic oligonucleotide
attaatattcctcgcgtcctaaagactggt

SEQ ID NO: 460512 - DNA, 30 bp, Artificial Sequence
  Synthetic oligonucleotide
ctggcgggttgggctgtggtattgactggt

SEQ ID NO: 460513 - DNA, 30 bp, Artificial Sequence
  Synthetic oligonucleotide
tcgggccctatttatttggggtttactggt

SEQ ID NO: 460514 - DNA, 30 bp, Artificial Sequence
  Synthetic oligonucleotide
ggtaacgagtagacctcagccaaccctggt

SEQ ID NO: 460515 - DNA, 30 bp, Artificial Sequence
  Synthetic oligonucleotide
ccttcgtctgccagttttgcagaccctggt

SEQ ID NO: 460516 - DNA, 30 bp, Artificial Sequence
  Synthetic oligonucleotide
ggccactcgccttgcagagcctaccctggt

SEQ ID NO: 460517 - DNA, 30 bp, Artificial Sequence
  Synthetic oligonucleotide
ggcattctccgtgaaaccgcgtgagctggt

SEQ ID NO: 460518 - DNA, 30 bp, Artificial Sequence
  Synthetic oligonucleotide
cttctccaaaatggccaattaaacgctggt

SEQ ID NO: 460519 - DNA, 30 bp, Artificial Sequence
  Synthetic oligonucleotide
aaagacctttgcattgttgtctccgctggt

SEQ ID NO: 460520 - DNA, 30 bp, Artificial Sequence
  Synthetic oligonucleotide
tattaggacttttacttagattgcgctggt

SEQ ID NO: 460521 - DNA, 30 bp, Artificial Sequence
  Synthetic oligonucleotide
atgtgtcggatgtactgttacgcgtctggt

SEQ ID NO: 460522 - DNA, 30 bp, Artificial Sequence
  Synthetic oligonucleotide
cctggtcgggtatccacgggatcgtctggt

SEQ ID NO: 460523 - DNA, 31 bp, Artificial Sequence
  Synthetic oligonucleotide
gctatcactcgcctagtactactattctggt

SEQ ID NO: 460524 - DNA, 30 bp, Artificial Sequence
  Synthetic oligonucleotide
gagcagcccgcaaagtctattacttctggt

SEQ ID NO: 460525 - DNA, 30 bp, Artificial Sequence
  Synthetic oligonucleotide
tcgctagagtgataaggattttgttctggt

SEQ ID NO: 460526 - DNA, 30 bp, Artificial Sequence
  Synthetic oligonucleotide
tctcacagccatcctgacgcctccagtggt

SEQ ID NO: 460527 - DNA, 30 bp, Artificial Sequence
  Synthetic oligonucleotide
tagcgcactcgggacgtggatcggagtggt

SEQ ID NO: 460528 - DNA, 30 bp, Artificial Sequence
  Synthetic oligonucleotide
ggtatccacacatctaaagcggtgagtggt

SEQ ID NO: 460529 - DNA, 30 bp, Artificial Sequence
  Synthetic oligonucleotide
gtccaatctaagaactagtttaatagtggt

SEQ ID NO: 460530 - DNA, 30 bp, Artificial Sequence
  Synthetic oligonucleotide
gctagttcgagctctactagttatagtggt

SEQ ID NO: 460531 - DNA, 38 bp, Artificial Sequence
  Synthetic oligonucleotide
cgatgaaagttcgcctcagagcagggtggactagtggt

SEQ ID NO: 460532 - DNA, 30 bp, Artificial Sequence
  Synthetic oligonucleotide
atccctctctaaaattcggcctctagtggt

SEQ ID NO: 460533 - DNA, 30 bp, Artificial Sequence
  Synthetic oligonucleotide
ccgcccacattcaactccagcggtagtggt

SEQ ID NO: 460534 - DNA, 30 bp, Artificial Sequence
  Synthetic oligonucleotide
ggagataagattccacgcgactcacgtggt

SEQ ID NO: 460535 - DNA, 30 bp, Artificial Sequence
  Synthetic oligonucleotide
gaggggcttaatcccggattcggacgtggt

SEQ ID NO: 460536 - DNA, 30 bp, Artificial Sequence
  Synthetic oligonucleotide
aattaatccgcgcaaaggtcaggccgtggt

SEQ ID NO: 460537 - DNA, 30 bp, Artificial Sequence
  Synthetic oligonucleotide
gtcgcagcgacgtggcaatacattcgtggt

SEQ ID NO: 460538 - DNA, 30 bp, Artificial Sequence
  Synthetic oligonucleotide
gagacaatgccactaaccctggaaggtggt

SEQ ID NO: 460539 - DNA, 30 bp, Artificial Sequence
  Synthetic oligonucleotide
tcccgcgaggccaatattctcgtaggtggt

SEQ ID NO: 460540 - DNA, 30 bp, Artificial Sequence
  Synthetic oligonucleotide
ttacggttccggatcttttaagtcggtggt

SEQ ID NO: 460541 - DNA, 30 bp, Artificial Sequence
  Synthetic oligonucleotide
accgtctgcaatgccacgaccgagggtggt

SEQ ID NO: 460542 - DNA, 30 bp, Artificial Sequence
  Synthetic oligonucleotide
aagcctgtgtatgcgggtacatagggtggt

SEQ ID NO: 460543 - DNA, 30 bp, Artificial Sequence
  Synthetic oligonucleotide
cactatgggttggaagtcgaggtgggtggt

SEQ ID NO: 460544 - DNA, 30 bp, Artificial Sequence
  Synthetic oligonucleotide
ttcatgagagacataggcctcaatggtggt

SEQ ID NO: 460545 - DNA, 30 bp, Artificial Sequence
  Synthetic oligonucleotide
catgatcatcttgcgccgcagaatggtggt

SEQ ID NO: 460546 - DNA, 30 bp, Artificial Sequence
  Synthetic oligonucleotide
tttgaatggatgtgtacacgagttggtggt

SEQ ID NO: 460547 - DNA, 30 bp, Artificial Sequence
  Synthetic oligonucleotide
gctctccacgacgatcactctcgatgtggt

SEQ ID NO: 460548 - DNA, 30 bp, Artificial Sequence
  Synthetic oligonucleotide
atccagtgcgaaggaagggctacctgtggt

SEQ ID NO: 460549 - DNA, 30 bp, Artificial Sequence
  Synthetic oligonucleotide
tatagcaataggacggttgaaatctgtggt

SEQ ID NO: 460550 - DNA, 30 bp, Artificial Sequence
  Synthetic oligonucleotide
atatagaaaattcctacgatgttctgtggt

SEQ ID NO: 460551 - DNA, 30 bp, Artificial Sequence
  Synthetic oligonucleotide
gttagacatagctggatgtgatcgtgtggt

SEQ ID NO: 460552 - DNA, 30 bp, Artificial Sequence
  Synthetic oligonucleotide
cgtgcacgcgttcatcgtagtccttgtggt

SEQ ID NO: 460553 - DNA, 30 bp, Artificial Sequence
  Synthetic oligonucleotide
ggcaaccgcgaccgggaacgcggttgtggt

SEQ ID NO: 460554 - DNA, 30 bp, Artificial Sequence
  Synthetic oligonucleotide
gagttggttagcaaatgttagtgttgtggt

SEQ ID NO: 460555 - DNA, 30 bp, Artificial Sequence
  Synthetic oligonucleotide
gaaatggttattgttatcgggcaaattggt

SEQ ID NO: 460556 - DNA, 30 bp, Artificial Sequence
  Synthetic oligonucleotide
agcatcgcgatgcttctgggttcaattggt

SEQ ID NO: 460557 - DNA, 30 bp, Artificial Sequence
  Synthetic oligonucleotide
tctgttaggtgattcatcttgggaattggt

SEQ ID NO: 460558 - DNA, 30 bp, Artificial Sequence
  Synthetic oligonucleotide
tctccaaaagaagcgcaaccagagattggt

SEQ ID NO: 460559 - DNA, 30 bp, Artificial Sequence
  Synthetic oligonucleotide
gtgggcatcgcggacaaaacgtagattggt

SEQ ID NO: 460560 - DNA, 30 bp, Artificial Sequence
  Synthetic oligonucleotide
gtgatgcataaccgaccatgtacgattggt

SEQ ID NO: 460561 - DNA, 30 bp, Artificial Sequence
  Synthetic oligonucleotide
gtaaaccccgttgaaggggtcgtgattggt

SEQ ID NO: 460562 - DNA, 30 bp, Artificial Sequence
  Synthetic oligonucleotide
gtccgggtgtaataacgtcccagtattggt

SEQ ID NO: 460563 - DNA, 30 bp, Artificial Sequence
  Synthetic oligonucleotide
tttaacgtggacgttcaatagattattggt

SEQ ID NO: 460564 - DNA, 30 bp, Artificial Sequence
  Synthetic oligonucleotide
acgcaccccagcaagcatcttggacttggt

SEQ ID NO: 460565 - DNA, 26 bp, Artificial Sequence
  Synthetic oligonucleotide
cggtgttcctgccaagctcccttggt

SEQ ID NO: 460566 - DNA, 30 bp, Artificial Sequence
  Synthetic oligonucleotide
tttggcgcaaaaagctgccatggccttggt

SEQ ID NO: 460567 - DNA, 30 bp, Artificial Sequence
  Synthetic oligonucleotide
ctcgctacaagcataactaagatgcttggt

SEQ ID NO: 460568 - DNA, 30 bp, Artificial Sequence
  Synthetic oligonucleotide
gtagacgttttgaggtattttttgcttggt

SEQ ID NO: 460569 - DNA, 30 bp, Artificial Sequence
  Synthetic oligonucleotide
tattgttcttctgaagttagtgatcttggt

SEQ ID NO: 460570 - DNA, 30 bp, Artificial Sequence
  Synthetic oligonucleotide
ttatcgcaggttatcgattgcattcttggt

SEQ ID NO: 460571 - DNA, 30 bp, Artificial Sequence
  Synthetic oligonucleotide
cggatcaacgcacttttgaacacagttggt

SEQ ID NO: 460572 - DNA, 30 bp, Artificial Sequence
  Synthetic oligonucleotide
aaaacagcttttacagtaagccgagttggt

SEQ ID NO: 460573 - DNA, 30 bp, Artificial Sequence
  Synthetic oligonucleotide
gcgaccgtttgggtaaaaggtcgagttggt

SEQ ID NO: 460574 - DNA, 30 bp, Artificial Sequence
  Synthetic oligonucleotide
taatccaataccggatgcatagtcgttggt

SEQ ID NO: 460575 - DNA, 30 bp, Artificial Sequence
  Synthetic oligonucleotide
aattagttttataccttgtaaggggttggt

SEQ ID NO: 460576 - DNA, 30 bp, Artificial Sequence
  Synthetic oligonucleotide
accatatacggtgcgtacgtactggttggt

SEQ ID NO: 460577 - DNA, 30 bp, Artificial Sequence
  Synthetic oligonucleotide
cacgcctaggacgcggttattttggttggt

SEQ ID NO: 460578 - DNA, 30 bp, Artificial Sequence
  Synthetic oligonucleotide
taacatcgaggccatcgaaagaatgttggt

SEQ ID NO: 460579 - DNA, 30 bp, Artificial Sequence
  Synthetic oligonucleotide
gtagcaggaaatagcttattgcctgttggt

SEQ ID NO: 460580 - DNA, 30 bp, Artificial Sequence
  Synthetic oligonucleotide
aaggacacattaatagtgggaagtgttggt

SEQ ID NO: 460581 - DNA, 30 bp, Artificial Sequence
  Synthetic oligonucleotide
gcaaaaatgttaggtacacacaaatttggt

SEQ ID NO: 460582 - DNA, 30 bp, Artificial Sequence
  Synthetic oligonucleotide
tggacagccggtgtgcatttattatttggt

SEQ ID NO: 460583 - DNA, 30 bp, Artificial Sequence
  Synthetic oligonucleotide
gtaacggccccatgcagtcccttatttggt

SEQ ID NO: 460584 - DNA, 30 bp, Artificial Sequence
  Synthetic oligonucleotide
aatggcaatcatggatgaacacactttggt

SEQ ID NO: 460585 - DNA, 30 bp, Artificial Sequence
  Synthetic oligonucleotide
gttgcattgctacagatccaactgtttggt

SEQ ID NO: 460586 - DNA, 30 bp, Artificial Sequence
  Synthetic oligonucleotide
acgaacgcaaattctaacctgttgtttggt

SEQ ID NO: 460587 - DNA, 30 bp, Artificial Sequence
  Synthetic oligonucleotide
gccaggaatgttaactcattaccttttggt

SEQ ID NO: 460588 - DNA, 30 bp, Artificial Sequence
  Synthetic oligonucleotide
gacctcttgctagaaaaggaggtttttggt

SEQ ID NO: 460589 - DNA, 30 bp, Artificial Sequence
  Synthetic oligonucleotide
cccatttagtaactggtgagacaaaaatgt

SEQ ID NO: 460590 - DNA, 30 bp, Artificial Sequence
  Synthetic oligonucleotide
caattcttaggaactctcaatgaaaaatgt

SEQ ID NO: 460591 - DNA, 30 bp, Artificial Sequence
  Synthetic oligonucleotide
tctccatcgtacaatatccaaccaaaatgt

SEQ ID NO: 460592 - DNA, 30 bp, Artificial Sequence
  Synthetic oligonucleotide
atccggtgacttttcgtggtgtcaaaatgt

SEQ ID NO: 460593 - DNA, 30 bp, Artificial Sequence
  Synthetic oligonucleotide
ctgcaacatttttggaatgtgcgaaaatgt

SEQ ID NO: 460594 - DNA, 30 bp, Artificial Sequence
  Synthetic oligonucleotide
taatagtcattccatcacacgctaaaatgt

SEQ ID NO: 460595 - DNA, 30 bp, Artificial Sequence
  Synthetic oligonucleotide
ggaatcatcgccctcagggcggagaaatgt

SEQ ID NO: 460596 - DNA, 30 bp, Artificial Sequence
  Synthetic oligonucleotide
taattataagttatacgactccataaatgt

SEQ ID NO: 460597 - DNA, 30 bp, Artificial Sequence
  Synthetic oligonucleotide
ctttactacgttcagcaaggaagtaaatgt

SEQ ID NO: 460598 - DNA, 30 bp, Artificial Sequence
  Synthetic oligonucleotide
acagcttattcagtatccgcaggtaaatgt

SEQ ID NO: 460599 - DNA, 30 bp, Artificial Sequence
  Synthetic oligonucleotide
tatgtttatatctgcgtattcagacaatgt

SEQ ID NO: 460600 - DNA, 30 bp, Artificial Sequence
  Synthetic oligonucleotide
ctagtctataccaacgcagccacccaatgt

SEQ ID NO: 460601 - DNA, 30 bp, Artificial Sequence
  Synthetic oligonucleotide
atctacaacctaacactatgaccgcaatgt

SEQ ID NO: 460602 - DNA, 30 bp, Artificial Sequence
  Synthetic oligonucleotide
aagaggtggggagaaaaatagtatcaatgt

SEQ ID NO: 460603 - DNA, 30 bp, Artificial Sequence
  Synthetic oligonucleotide
aacttcttaggctgtctatggcttcaatgt

SEQ ID NO: 460604 - DNA, 30 bp, Artificial Sequence
  Synthetic oligonucleotide
cgcgaaagaacgtctaggtgggaagaatgt

SEQ ID NO: 460605 - DNA, 30 bp, Artificial Sequence
  Synthetic oligonucleotide
cccgtggatattctcgcagcgacagaatgt

SEQ ID NO: 460606 - DNA, 30 bp, Artificial Sequence
  Synthetic oligonucleotide
aatctgtcggaactaggtcgagtagaatgt

SEQ ID NO: 460607 - DNA, 30 bp, Artificial Sequence
  Synthetic oligonucleotide
taaaaccataaggtcataggggccgaatgt

SEQ ID NO: 460608 - DNA, 30 bp, Artificial Sequence
  Synthetic oligonucleotide
tctgatgcagccctgggagctagcgaatgt

SEQ ID NO: 460609 - DNA, 30 bp, Artificial Sequence
  Synthetic oligonucleotide
ataccggttcggacatgtacggtggaatgt

SEQ ID NO: 460610 - DNA, 30 bp, Artificial Sequence
  Synthetic oligonucleotide
acaacggggcctcaacataataatgaatgt

SEQ ID NO: 460611 - DNA, 30 bp, Artificial Sequence
  Synthetic oligonucleotide
aatttataggttcagacaaaacaataatgt

SEQ ID NO: 460612 - DNA, 30 bp, Artificial Sequence
  Synthetic oligonucleotide
ttccattaatccggcgtatggcaataatgt

SEQ ID NO: 460613 - DNA, 30 bp, Artificial Sequence
  Synthetic oligonucleotide
gttacagcgactctcgcacagacataatgt

SEQ ID NO: 460614 - DNA, 30 bp, Artificial Sequence
  Synthetic oligonucleotide
acatatgtacgcgaatttttgggctaatgt

SEQ ID NO: 460615 - DNA, 30 bp, Artificial Sequence
  Synthetic oligonucleotide
taattactcttagagatgtgatgctaatgt

SEQ ID NO: 460616 - DNA, 30 bp, Artificial Sequence
  Synthetic oligonucleotide
ataacaggtgtactgtagaggcagtaatgt

SEQ ID NO: 460617 - DNA, 30 bp, Artificial Sequence
  Synthetic oligonucleotide
ttccatgtcctcacggattaagagtaatgt

SEQ ID NO: 460618 - DNA, 30 bp, Artificial Sequence
  Synthetic oligonucleotide
ttccgtacatttaagaccagtaggtaatgt

SEQ ID NO: 460619 - DNA, 30 bp, Artificial Sequence
  Synthetic oligonucleotide
ctttgggatatcggcaaagatctgtaatgt

SEQ ID NO: 460620 - DNA, 30 bp, Artificial Sequence
  Synthetic oligonucleotide
ccagcagcatcggcatcgatgaattaatgt

SEQ ID NO: 460621 - DNA, 30 bp, Artificial Sequence
  Synthetic oligonucleotide
acttatatgacacatccccgtaattaatgt

SEQ ID NO: 460622 - DNA, 30 bp, Artificial Sequence
  Synthetic oligonucleotide
attaagaattaatacggtgtctcttaatgt

SEQ ID NO: 460623 - DNA, 30 bp, Artificial Sequence
  Synthetic oligonucleotide
acattagtgttgatcatgcaattaacatgt

SEQ ID NO: 460624 - DNA, 30 bp, Artificial Sequence
  Synthetic oligonucleotide
gtacgactgttcgtggaactggccacatgt

SEQ ID NO: 460625 - DNA, 30 bp, Artificial Sequence
  Synthetic oligonucleotide
gccaaatagtttagtcggcaatgcacatgt

SEQ ID NO: 460626 - DNA, 30 bp, Artificial Sequence
  Synthetic oligonucleotide
agtcttagcttcgggacccacttcacatgt

SEQ ID NO: 460627 - DNA, 30 bp, Artificial Sequence
  Synthetic oligonucleotide
catgtcagaaatgtcccgggatcgacatgt

SEQ ID NO: 460628 - DNA, 30 bp, Artificial Sequence
  Synthetic oligonucleotide
gtttcggacgatcacatagcattgacatgt

SEQ ID NO: 460629 - DNA, 30 bp, Artificial Sequence
  Synthetic oligonucleotide
gtcgcaacgcaggggtctagacatacatgt

SEQ ID NO: 460630 - DNA, 30 bp, Artificial Sequence
  Synthetic oligonucleotide
gctttggacgacggtatttcagatacatgt

SEQ ID NO: 460631 - DNA, 30 bp, Artificial Sequence
  Synthetic oligonucleotide
aacggttcagctctggtgtcagaaccatgt

SEQ ID NO: 460632 - DNA, 30 bp, Artificial Sequence
  Synthetic oligonucleotide
ttgactaccagtttcatggcacgaccatgt

SEQ ID NO: 460633 - DNA, 30 bp, Artificial Sequence
  Synthetic oligonucleotide
ggccgtgcaagggtggtgcaaaccccatgt

SEQ ID NO: 460634 - DNA, 30 bp, Artificial Sequence
  Synthetic oligonucleotide
aaggttttcgtgccgcagtacgggccatgt

SEQ ID NO: 460635 - DNA, 30 bp, Artificial Sequence
  Synthetic oligonucleotide
caatacgccttcaggtatgtcgatccatgt

SEQ ID NO: 460636 - DNA, 30 bp, Artificial Sequence
  Synthetic oligonucleotide
tttcaactgctgaagctgcctggtccatgt

SEQ ID NO: 460637 - DNA, 30 bp, Artificial Sequence
  Synthetic oligonucleotide
ttttggtgcgggccacccccgtgtccatgt

SEQ ID NO: 460638 - DNA, 30 bp, Artificial Sequence
  Synthetic oligonucleotide
cgatcgcggttgagaccccgacaagcatgt

SEQ ID NO: 460639 - DNA, 30 bp, Artificial Sequence
  Synthetic oligonucleotide
gagcctatcaagtcgagacttgcagcatgt

SEQ ID NO: 460640 - DNA, 30 bp, Artificial Sequence
  Synthetic oligonucleotide
gctatcattaatcagatgcctggagcatgt

SEQ ID NO: 460641 - DNA, 30 bp, Artificial Sequence
  Synthetic oligonucleotide
cagactttatagcttcagattagcgcatgt

SEQ ID NO: 460642 - DNA, 30 bp, Artificial Sequence
  Synthetic oligonucleotide
agacggccctaatagttgtaaggcgcatgt

SEQ ID NO: 460643 - DNA, 30 bp, Artificial Sequence
  Synthetic oligonucleotide
acgcactgtatcgttagaggcctcgcatgt

SEQ ID NO: 460644 - DNA, 30 bp, Artificial Sequence
  Synthetic oligonucleotide
cgcggctacaggccaagctgtgaggcatgt

SEQ ID NO: 460645 - DNA, 30 bp, Artificial Sequence
  Synthetic oligonucleotide
cggctacccgactgttgcacgccggcatgt

SEQ ID NO: 460646 - DNA, 30 bp, Artificial Sequence
  Synthetic oligonucleotide
gccctcgcctgtgatatgattctggcatgt

SEQ ID NO: 460647 - DNA, 30 bp, Artificial Sequence
  Synthetic oligonucleotide
gagcatcctgacggcgcttgtaaatcatgt

SEQ ID NO: 460648 - DNA, 30 bp, Artificial Sequence
  Synthetic oligonucleotide
tcattcttaattatagcttgtacatcatgt

SEQ ID NO: 460649 - DNA, 30 bp, Artificial Sequence
  Synthetic oligonucleotide
atgcatctcgggtggatgtctatatcatgt

SEQ ID NO: 460650 - DNA, 30 bp, Artificial Sequence
  Synthetic oligonucleotide
gttactgcgagtagcaactgggtatcatgt

SEQ ID NO: 460651 - DNA, 30 bp, Artificial Sequence
  Synthetic oligonucleotide
ataactagaatctgcgaatgtttatcatgt

SEQ ID NO: 460652 - DNA, 30 bp, Artificial Sequence
  Synthetic oligonucleotide
tttccggcaaagtgaataacccgctcatgt

SEQ ID NO: 460653 - DNA, 30 bp, Artificial Sequence
  Synthetic oligonucleotide
cgagatggttcagcatgcatatagtcatgt

SEQ ID NO: 460654 - DNA, 30 bp, Artificial Sequence
  Synthetic oligonucleotide
gatggggtcttatataccagggtgtcatgt

SEQ ID NO: 460655 - DNA, 30 bp, Artificial Sequence
  Synthetic oligonucleotide
cagcctatcatggaaagctggccttcatgt

SEQ ID NO: 460656 - DNA, 30 bp, Artificial Sequence
  Synthetic oligonucleotide
cgccaatacgacccctcggaatcttcatgt

SEQ ID NO: 460657 - DNA, 30 bp, Artificial Sequence
  Synthetic oligonucleotide
actgggtaacggtactttcttgcaagatgt

SEQ ID NO: 460658 - DNA, 30 bp, Artificial Sequence
  Synthetic oligonucleotide
gagtctaacggactgtggacttccagatgt

SEQ ID NO: 460659 - DNA, 31 bp, Artificial Sequence
  Synthetic oligonucleotide
tgcaatcctgagtttttccaaacgcagatgt

SEQ ID NO: 460660 - DNA, 30 bp, Artificial Sequence
  Synthetic oligonucleotide
ttgagcaacaacatgtcgctagtcagatgt

SEQ ID NO: 460661 - DNA, 30 bp, Artificial Sequence
  Synthetic oligonucleotide
gaagcgtgtctgacaactagagcgagatgt

SEQ ID NO: 460662 - DNA, 30 bp, Artificial Sequence
  Synthetic oligonucleotide
ctgtcttcttgaaggaggcatggtagatgt

SEQ ID NO: 460663 - DNA, 30 bp, Artificial Sequence
  Synthetic oligonucleotide
gacatgaggagcccatcacatacccgatgt

SEQ ID NO: 460664 - DNA, 30 bp, Artificial Sequence
  Synthetic oligonucleotide
tagtgaggcttatcttggcgtacccgatgt

SEQ ID NO: 460665 - DNA, 30 bp, Artificial Sequence
  Synthetic oligonucleotide
tagcatacttgatgccccacagcccgatgt

SEQ ID NO: 460666 - DNA, 30 bp, Artificial Sequence
  Synthetic oligonucleotide
tacagtacttacgcctgttgccgccgatgt

SEQ ID NO: 460667 - DNA, 30 bp, Artificial Sequence
  Synthetic oligonucleotide
tgctctagtctaggcgaagcaattcgatgt

SEQ ID NO: 460668 - DNA, 30 bp, Artificial Sequence
  Synthetic oligonucleotide
ggagcacgcgtagcggcatcgattcgatgt

SEQ ID NO: 460669 - DNA, 30 bp, Artificial Sequence
  Synthetic oligonucleotide
aaagccgtccagacgacgagagttcgatgt

SEQ ID NO: 460670 - DNA, 30 bp, Artificial Sequence
  Synthetic oligonucleotide
gacgacccgcttattggacgtccaggatgt

SEQ ID NO: 460671 - DNA, 30 bp, Artificial Sequence
  Synthetic oligonucleotide
tggttcaatgcccggtcccgggacggatgt

SEQ ID NO: 460672 - DNA, 30 bp, Artificial Sequence
  Synthetic oligonucleotide
ttataaatttataaatagataaggggatgt

SEQ ID NO: 460673 - DNA, 30 bp, Artificial Sequence
  Synthetic oligonucleotide
tgtatttgcttgtctcccaccaatggatgt

SEQ ID NO: 460674 - DNA, 30 bp, Artificial Sequence
  Synthetic oligonucleotide
ccgcgcatagccacgtcatcagaatgatgt

SEQ ID NO: 460675 - DNA, 30 bp, Artificial Sequence
  Synthetic oligonucleotide
cagaccgtaatttatattgatcactgatgt

SEQ ID NO: 460676 - DNA, 30 bp, Artificial Sequence
  Synthetic oligonucleotide
gctgggcagatcctatctagcgcctgatgt

SEQ ID NO: 460677 - DNA, 30 bp, Artificial Sequence
  Synthetic oligonucleotide
gccccacaagtgaggacgcgcttctgatgt

SEQ ID NO: 460678 - DNA, 30 bp, Artificial Sequence
  Synthetic oligonucleotide
cgccgtagtaatcaccccttagcgtgatgt

SEQ ID NO: 460679 - DNA, 30 bp, Artificial Sequence
  Synthetic oligonucleotide
gtcagcgtggatcgcataggccattgatgt

SEQ ID NO: 460680 - DNA, 30 bp, Artificial Sequence
  Synthetic oligonucleotide
gcacaaaacgtcacgcgcggccattgatgt

SEQ ID NO: 460681 - DNA, 30 bp, Artificial Sequence
  Synthetic oligonucleotide
tactggactgtaggcgtaaatagttgatgt

SEQ ID NO: 460682 - DNA, 30 bp, Artificial Sequence
  Synthetic oligonucleotide
cgcggcctggagaatcccagaaaaatatgt

SEQ ID NO: 460683 - DNA, 30 bp, Artificial Sequence
  Synthetic oligonucleotide
ctcagatcaggaggaatctccgaaatatgt

SEQ ID NO: 460684 - DNA, 30 bp, Artificial Sequence
  Synthetic oligonucleotide
ataactgtcgtcacccttgcgacaatatgt

SEQ ID NO: 460685 - DNA, 30 bp, Artificial Sequence
  Synthetic oligonucleotide
gtatgcgatccctactatatcatcatatgt

SEQ ID NO: 460686 - DNA, 30 bp, Artificial Sequence
  Synthetic oligonucleotide
ccggagcggtgcctagccccgtagatatgt

SEQ ID NO: 460687 - DNA, 30 bp, Artificial Sequence
  Synthetic oligonucleotide
gattaagtgacagaatcttagtgtatatgt

SEQ ID NO: 460688 - DNA, 30 bp, Artificial Sequence
  Synthetic oligonucleotide
gctcaccccgccgaagtaatatgtctatgt

SEQ ID NO: 460689 - DNA, 30 bp, Artificial Sequence
  Synthetic oligonucleotide
aattgtatcacatctcataaaaaagtatgt

SEQ ID NO: 460690 - DNA, 30 bp, Artificial Sequence
  Synthetic oligonucleotide
gtgcctaccagtgtgtgggacacagtatgt

SEQ ID NO: 460691 - DNA, 30 bp, Artificial Sequence
  Synthetic oligonucleotide
aatgtagatgtatggaggtcattagtatgt

SEQ ID NO: 460692 - DNA, 30 bp, Artificial Sequence
  Synthetic oligonucleotide
aaattcgcccctgtgaaacaaaacgtatgt

SEQ ID NO: 460693 - DNA, 30 bp, Artificial Sequence
  Synthetic oligonucleotide
tttggctgcagctagggttctcgcgtatgt

SEQ ID NO: 460694 - DNA, 30 bp, Artificial Sequence
  Synthetic oligonucleotide
gatggcaggcaactacaaccagaggtatgt

SEQ ID NO: 460695 - DNA, 30 bp, Artificial Sequence
  Synthetic oligonucleotide
gtcagcagctgatgaacgcttcgtgtatgt

SEQ ID NO: 460696 - DNA, 30 bp, Artificial Sequence
  Synthetic oligonucleotide
tattaaaaatttaaattagttggattatgt

SEQ ID NO: 460697 - DNA, 30 bp, Artificial Sequence
  Synthetic oligonucleotide
gatctcgcaggccactctactcacttatgt

SEQ ID NO: 460698 - DNA, 30 bp, Artificial Sequence
  Synthetic oligonucleotide
cttatacgtgtgcctctgtctgggttatgt

SEQ ID NO: 460699 - DNA, 30 bp, Artificial Sequence
  Synthetic oligonucleotide
tagttctacatatggcatcacgatttatgt

SEQ ID NO: 460700 - DNA, 30 bp, Artificial Sequence
  Synthetic oligonucleotide
gggttagagaataaattcaacgttttatgt

SEQ ID NO: 460701 - DNA, 30 bp, Artificial Sequence
  Synthetic oligonucleotide
gccgttagggatttactgcactccaactgt

SEQ ID NO: 460702 - DNA, 30 bp, Artificial Sequence
  Synthetic oligonucleotide
cggggcggtaacactgcgcggcgcaactgt

SEQ ID NO: 460703 - DNA, 30 bp, Artificial Sequence
  Synthetic oligonucleotide
tgcttatatgggttctttaaactcaactgt

SEQ ID NO: 460704 - DNA, 30 bp, Artificial Sequence
  Synthetic oligonucleotide
ttctgtggacgttcaacagaccggaactgt

SEQ ID NO: 460705 - DNA, 30 bp, Artificial Sequence
  Synthetic oligonucleotide
agcgatggtaaccgatacgcttcacactgt

SEQ ID NO: 460706 - DNA, 30 bp, Artificial Sequence
  Synthetic oligonucleotide
gggcgttgccaaataggcaagcgacactgt

SEQ ID NO: 460707 - DNA, 30 bp, Artificial Sequence
  Synthetic oligonucleotide
gaacgtgagtaacgtctcttgttacactgt

SEQ ID NO: 460708 - DNA, 30 bp, Artificial Sequence
  Synthetic oligonucleotide
tggaataccacaatagttgtgttccactgt

SEQ ID NO: 460709 - DNA, 30 bp, Artificial Sequence
  Synthetic oligonucleotide
cccatatgccgacttggaggagatcactgt

SEQ ID NO: 460710 - DNA, 30 bp, Artificial Sequence
  Synthetic oligonucleotide
caggagttcagtaaatcgagaactcactgt

SEQ ID NO: 460711 - DNA, 30 bp, Artificial Sequence
  Synthetic oligonucleotide
ccctgagcgcaagacagtgatactcactgt

SEQ ID NO: 460712 - DNA, 30 bp, Artificial Sequence
  Synthetic oligonucleotide
cggttttggtctctaaatgaaagagactgt

SEQ ID NO: 460713 - DNA, 30 bp, Artificial Sequence
  Synthetic oligonucleotide
cccgtgccagcccagtgctttaaggactgt

SEQ ID NO: 460714 - DNA, 30 bp, Artificial Sequence
  Synthetic oligonucleotide
atgggacgtagtacaagacctccggactgt

SEQ ID NO: 460715 - DNA, 30 bp, Artificial Sequence
  Synthetic oligonucleotide
ccgacaggattaaaacagttgaaatactgt

SEQ ID NO: 460716 - DNA, 30 bp, Artificial Sequence
  Synthetic oligonucleotide
ttcggatcaattccgagttcaggatactgt

SEQ ID NO: 460717 - DNA, 30 bp, Artificial Sequence
  Synthetic oligonucleotide
gccttcgattggcaggtccatggatactgt

SEQ ID NO: 460718 - DNA, 30 bp, Artificial Sequence
  Synthetic oligonucleotide
ggtgggggcaccacacagatgcactactgt

SEQ ID NO: 460719 - DNA, 30 bp, Artificial Sequence
  Synthetic oligonucleotide
tcatgtcacagacccgttagtggctactgt

SEQ ID NO: 460720 - DNA, 30 bp, Artificial Sequence
  Synthetic oligonucleotide
cgtcgtagaaaatatttagacctctactgt

SEQ ID NO: 460721 - DNA, 30 bp, Artificial Sequence
  Synthetic oligonucleotide
gttgggttgctatcccgaacagtctactgt

SEQ ID NO: 460722 - DNA, 30 bp, Artificial Sequence
  Synthetic oligonucleotide
aatcaccctcctctccaagacgggtactgt

SEQ ID NO: 460723 - DNA, 30 bp, Artificial Sequence
  Synthetic oligonucleotide
ttatctcctgactcgctacgaaattactgt

SEQ ID NO: 460724 - DNA, 30 bp, Artificial Sequence
  Synthetic oligonucleotide
gaacgcgcatatttgcgttggaaaacctgt

SEQ ID NO: 460725 - DNA, 30 bp, Artificial Sequence
  Synthetic oligonucleotide
gatatctcgtgggcctgcggactaacctgt

SEQ ID NO: 460726 - DNA, 30 bp, Artificial Sequence
  Synthetic oligonucleotide
acagtataatggtttgcatgactaacctgt

SEQ ID NO: 460727 - DNA, 30 bp, Artificial Sequence
  Synthetic oligonucleotide
tttattccagtaggctggacaagcacctgt

SEQ ID NO: 460728 - DNA, 30 bp, Artificial Sequence
  Synthetic oligonucleotide
caacccttataactcgtaggctgcacctgt

SEQ ID NO: 460729 - DNA, 30 bp, Artificial Sequence
  Synthetic oligonucleotide
ttaagtcgcttgtaccttcccgtcacctgt

SEQ ID NO: 460730 - DNA, 30 bp, Artificial Sequence
  Synthetic oligonucleotide
gcagccagtatgcctaagatagagacctgt

SEQ ID NO: 460731 - DNA, 30 bp, Artificial Sequence
  Synthetic oligonucleotide
tagtcaggccagttcagtagcagtacctgt

SEQ ID NO: 460732 - DNA, 30 bp, Artificial Sequence
  Synthetic oligonucleotide
gtcgcttacttcattatgaatagtacctgt

SEQ ID NO: 460733 - DNA, 30 bp, Artificial Sequence
  Synthetic oligonucleotide
tgctttcaaggataaccaaccaccccctgt

SEQ ID NO: 460734 - DNA, 30 bp, Artificial Sequence
  Synthetic oligonucleotide
accatactatcactgcaccagtgcccctgt

SEQ ID NO: 460735 - DNA, 30 bp, Artificial Sequence
  Synthetic oligonucleotide
tggtagcgggactgtcccagtcagccctgt

SEQ ID NO: 460736 - DNA, 30 bp, Artificial Sequence
  Synthetic oligonucleotide
taagccattgttcccgtacggcgagcctgt

SEQ ID NO: 460737 - DNA, 30 bp, Artificial Sequence
  Synthetic oligonucleotide
gagaacgcaagggaaccgcttgaatcctgt

SEQ ID NO: 460738 - DNA, 30 bp, Artificial Sequence
  Synthetic oligonucleotide
caaaagtagaggaggccaacttaatcctgt

SEQ ID NO: 460739 - DNA, 30 bp, Artificial Sequence
  Synthetic oligonucleotide
aacggcctataacctgggttaaactcctgt

SEQ ID NO: 460740 - DNA, 30 bp, Artificial Sequence
  Synthetic oligonucleotide
gtgtcttatcagggaccacgtccctcctgt

SEQ ID NO: 460741 - DNA, 30 bp, Artificial Sequence
  Synthetic oligonucleotide
ttccactttcccttcgttgtattctcctgt

SEQ ID NO: 460742 - DNA, 30 bp, Artificial Sequence
  Synthetic oligonucleotide
agttttgtggggtagaacctcaggtcctgt

SEQ ID NO: 460743 - DNA, 30 bp, Artificial Sequence
  Synthetic oligonucleotide
caacaccagcatcgcagagcagattcctgt

SEQ ID NO: 460744 - DNA, 30 bp, Artificial Sequence
  Synthetic oligonucleotide
cgaaacgtattgtgggtgtaacgttcctgt

SEQ ID NO: 460745 - DNA, 30 bp, Artificial Sequence
  Synthetic oligonucleotide
ggaataggatatgtagaaacaggttcctgt

SEQ ID NO: 460746 - DNA, 30 bp, Artificial Sequence
  Synthetic oligonucleotide
tttaggcaaaaaggaatattttgttcctgt

SEQ ID NO: 460747 - DNA, 30 bp, Artificial Sequence
  Synthetic oligonucleotide
caataattccacgcacagccgataagctgt

SEQ ID NO: 460748 - DNA, 30 bp, Artificial Sequence
  Synthetic oligonucleotide
cggaatcaagaatttccttgtcacagctgt

SEQ ID NO: 460749 - DNA, 30 bp, Artificial Sequence
  Synthetic oligonucleotide
tcttactccgttgacatatgacatagctgt

SEQ ID NO: 460750 - DNA, 29 bp, Artificial Sequence
  Synthetic oligonucleotide
ccgtacggtatgggtagtatacacgctgt

SEQ ID NO: 460751 - DNA, 30 bp, Artificial Sequence
  Synthetic oligonucleotide
agttttagagcttgaattagtgagcgctgt

SEQ ID NO: 460752 - DNA, 30 bp, Artificial Sequence
  Synthetic oligonucleotide
aaaatgaggcgaacagcgaaccgtcgctgt

SEQ ID NO: 460753 - DNA, 30 bp, Artificial Sequence
  Synthetic oligonucleotide
tattcggttcttcggctctaagacggctgt

SEQ ID NO: 460754 - DNA, 30 bp, Artificial Sequence
  Synthetic oligonucleotide
atcgtcttatcgatgcgcctctacggctgt

SEQ ID NO: 460755 - DNA, 30 bp, Artificial Sequence
  Synthetic oligonucleotide
atgtacttcggggtcacatgaccgggctgt

SEQ ID NO: 460756 - DNA, 30 bp, Artificial Sequence
  Synthetic oligonucleotide
aagctcggggaacagcgccgcgtgggctgt

SEQ ID NO: 460757 - DNA, 30 bp, Artificial Sequence
  Synthetic oligonucleotide
tcacgcaacgcatcttatcgtgaatgctgt

SEQ ID NO: 460758 - DNA, 30 bp, Artificial Sequence
  Synthetic oligonucleotide
ttgccatgtgattagtatctcgactgctgt

SEQ ID NO: 460759 - DNA, 30 bp, Artificial Sequence
  Synthetic oligonucleotide
gtatccgtttaaatacgtggatcctgctgt

SEQ ID NO: 460760 - DNA, 30 bp, Artificial Sequence
  Synthetic oligonucleotide
cggtttctttacatttgcatacaaatctgt

SEQ ID NO: 460761 - DNA, 30 bp, Artificial Sequence
  Synthetic oligonucleotide
aaagtttccgatttcgtccgtgacatctgt

SEQ ID NO: 460762 - DNA, 30 bp, Artificial Sequence
  Synthetic oligonucleotide
gacatgcagcacgaagaatctaggatctgt

SEQ ID NO: 460763 - DNA, 30 bp, Artificial Sequence
  Synthetic oligonucleotide
tacatattcaaggtaatatagttgatctgt

SEQ ID NO: 460764 - DNA, 30 bp, Artificial Sequence
  Synthetic oligonucleotide
tcttgtgtgccgcgacagatgaatatctgt

SEQ ID NO: 460765 - DNA, 30 bp, Artificial Sequence
  Synthetic oligonucleotide
caggctctccccaatagcacatctatctgt

SEQ ID NO: 460766 - DNA, 30 bp, Artificial Sequence
  Synthetic oligonucleotide
gaccgcattcgattcgggcatgttatctgt

SEQ ID NO: 460767 - DNA, 30 bp, Artificial Sequence
  Synthetic oligonucleotide
aagagaggttaaacgcataacccactctgt

SEQ ID NO: 460768 - DNA, 30 bp, Artificial Sequence
  Synthetic oligonucleotide
attccacctgtgatatgatatatactctgt

SEQ ID NO: 460769 - DNA, 30 bp, Artificial Sequence
  Synthetic oligonucleotide
ccaggccttggtatgggttcagtcctctgt

SEQ ID NO: 460770 - DNA, 30 bp, Artificial Sequence
  Synthetic oligonucleotide
tattgaaggataggcttggcatggctctgt

SEQ ID NO: 460771 - DNA, 30 bp, Artificial Sequence
  Synthetic oligonucleotide
atatccggaagtcaacagaaaaatctctgt

SEQ ID NO: 460772 - DNA, 30 bp, Artificial Sequence
  Synthetic oligonucleotide
agttactgccgagcgtagcgagtagtctgt

SEQ ID NO: 460773 - DNA, 30 bp, Artificial Sequence
  Synthetic oligonucleotide
ctaacccgaaaggcctcggatcgtgtctgt

SEQ ID NO: 460774 - DNA, 30 bp, Artificial Sequence
  Synthetic oligonucleotide
tataggggtaatgctagttagtcattctgt

SEQ ID NO: 460775 - DNA, 30 bp, Artificial Sequence
  Synthetic oligonucleotide
acaccctaccaagaaatcgttcacttctgt

SEQ ID NO: 460776 - DNA, 30 bp, Artificial Sequence
  Synthetic oligonucleotide
tttccacatactacatcaagatagttctgt

SEQ ID NO: 460777 - DNA, 30 bp, Artificial Sequence
  Synthetic oligonucleotide
ggttctatcataggacattaagggttctgt

SEQ ID NO: 460778 - DNA, 30 bp, Artificial Sequence
  Synthetic oligonucleotide
taatatgtcatgtacctggtcttgttctgt

SEQ ID NO: 460779 - DNA, 30 bp, Artificial Sequence
  Synthetic oligonucleotide
ttcggggcgtactataattgggatttctgt

SEQ ID NO: 460780 - DNA, 30 bp, Artificial Sequence
  Synthetic oligonucleotide
cttacggcacaagtagactacagtttctgt

SEQ ID NO: 460781 - DNA, 30 bp, Artificial Sequence
  Synthetic oligonucleotide
cttaatcacggtcgttttttagccaagtgt

SEQ ID NO: 460782 - DNA, 30 bp, Artificial Sequence
  Synthetic oligonucleotide
ctccacgcaaccaatgcggagggcaagtgt

SEQ ID NO: 460783 - DNA, 30 bp, Artificial Sequence
  Synthetic oligonucleotide
accggctctttctgcaatcgtcagaagtgt

SEQ ID NO: 460784 - DNA, 30 bp, Artificial Sequence
  Synthetic oligonucleotide
atagtggcatttttttttactgcacagtgt

SEQ ID NO: 460785 - DNA, 30 bp, Artificial Sequence
  Synthetic oligonucleotide
aacttcattcccgcacaaggttgacagtgt

SEQ ID NO: 460786 - DNA, 30 bp, Artificial Sequence
  Synthetic oligonucleotide
attatggaaatacgacacgtcgtacagtgt

SEQ ID NO: 460787 - DNA, 30 bp, Artificial Sequence
  Synthetic oligonucleotide
gcagttctggacggtctctagcagcagtgt

SEQ ID NO: 460788 - DNA, 30 bp, Artificial Sequence
  Synthetic oligonucleotide
acccttcgctgaccgttgttcaggcagtgt

SEQ ID NO: 460789 - DNA, 30 bp, Artificial Sequence
  Synthetic oligonucleotide
ccagttggaattgacggttagaggcagtgt

SEQ ID NO: 460790 - DNA, 30 bp, Artificial Sequence
  Synthetic oligonucleotide
tttttatgggcaccgaaagaggggcagtgt

SEQ ID NO: 460791 - DNA, 30 bp, Artificial Sequence
  Synthetic oligonucleotide
ccccgttgcatctgatagatagatcagtgt

SEQ ID NO: 460792 - DNA, 30 bp, Artificial Sequence
  Synthetic oligonucleotide
tagcgttgaggccttttcgagcacgagtgt

SEQ ID NO: 460793 - DNA, 30 bp, Artificial Sequence
  Synthetic oligonucleotide
gcatgtagaagtgccgagactcaggagtgt

SEQ ID NO: 460794 - DNA, 30 bp, Artificial Sequence
  Synthetic oligonucleotide
agaaagtattttatccagtcacgtgagtgt

SEQ ID NO: 460795 - DNA, 30 bp, Artificial Sequence
  Synthetic oligonucleotide
ctgtttgataccgcgggtaagcgtgagtgt

SEQ ID NO: 460796 - DNA, 30 bp, Artificial Sequence
  Synthetic oligonucleotide
tattgcaatttcaacgcgcatgaatagtgt

SEQ ID NO: 460797 - DNA, 30 bp, Artificial Sequence
  Synthetic oligonucleotide
ctgaggaatgggctacggagatcatagtgt

SEQ ID NO: 460798 - DNA, 30 bp, Artificial Sequence
  Synthetic oligonucleotide
ccaggggcagagtactgtgtatactagtgt

SEQ ID NO: 460799 - DNA, 30 bp, Artificial Sequence
  Synthetic oligonucleotide
tcaaacgggtgcagccgaataccgtagtgt

SEQ ID NO: 460800 - DNA, 30 bp, Artificial Sequence
  Synthetic oligonucleotide
cttgccccgcctcaagactgctcgtagtgt

SEQ ID NO: 460801 - DNA, 30 bp, Artificial Sequence
  Synthetic oligonucleotide
gagaaaatgtcgacccgactatggtagtgt

SEQ ID NO: 460802 - DNA, 30 bp, Artificial Sequence
  Synthetic oligonucleotide
ttcaggtcccggcgtcactccgtgtagtgt

SEQ ID NO: 460803 - DNA, 30 bp, Artificial Sequence
  Synthetic oligonucleotide
aaacgcgctatgagatttatcagaacgtgt

SEQ ID NO: 460804 - DNA, 30 bp, Artificial Sequence
  Synthetic oligonucleotide
atgtgtaagactcgaagttgtatcacgtgt

SEQ ID NO: 460805 - DNA, 30 bp, Artificial Sequence
  Synthetic oligonucleotide
agtgtttgtaatcaaagatagaacccgtgt

SEQ ID NO: 460806 - DNA, 30 bp, Artificial Sequence
  Synthetic oligonucleotide
tgctgaaacggggtaagacgtaccccgtgt

SEQ ID NO: 460807 - DNA, 30 bp, Artificial Sequence
  Synthetic oligonucleotide
ttccggtccggggtcgaacgtcccccgtgt

SEQ ID NO: 460808 - DNA, 30 bp, Artificial Sequence
  Synthetic oligonucleotide
gactccctgagtagattgagagccccgtgt

SEQ ID NO: 460809 - DNA, 30 bp, Artificial Sequence
  Synthetic oligonucleotide
aaaggataatatgatcttcaggcgccgtgt

SEQ ID NO: 460810 - DNA, 30 bp, Artificial Sequence
  Synthetic oligonucleotide
cagatgctttaagagagtgcacctccgtgt

SEQ ID NO: 460811 - DNA, 30 bp, Artificial Sequence
  Synthetic oligonucleotide
tagcacgatcttagtcaccctaaagcgtgt

SEQ ID NO: 460812 - DNA, 30 bp, Artificial Sequence
  Synthetic oligonucleotide
gtatgcctacactaaggattacaagcgtgt

SEQ ID NO: 460813 - DNA, 30 bp, Artificial Sequence
  Synthetic oligonucleotide
agtagtacatttatggtggatcgagcgtgt

SEQ ID NO: 460814 - DNA, 30 bp, Artificial Sequence
  Synthetic oligonucleotide
tgcgcaggttctacctcacacgacgcgtgt

SEQ ID NO: 460815 - DNA, 30 bp, Artificial Sequence
  Synthetic oligonucleotide
acccgcatatgttactgggggacggcgtgt

SEQ ID NO: 460816 - DNA, 30 bp, Artificial Sequence
  Synthetic oligonucleotide
tccgtagacaagcccccgcattgtgcgtgt

SEQ ID NO: 460817 - DNA, 30 bp, Artificial Sequence
  Synthetic oligonucleotide
gatgcaataaaggggtcacacattgcgtgt

SEQ ID NO: 460818 - DNA, 30 bp, Artificial Sequence
  Synthetic oligonucleotide
aggccatttcgaagatccgcgcaatcgtgt

SEQ ID NO: 460819 - DNA, 30 bp, Artificial Sequence
  Synthetic oligonucleotide
gagctatgtaagcccagagccacctcgtgt

SEQ ID NO: 460820 - DNA, 30 bp, Artificial Sequence
  Synthetic oligonucleotide
cctatacatgctcatattaggcgctcgtgt

SEQ ID NO: 460821 - DNA, 30 bp, Artificial Sequence
  Synthetic oligonucleotide
ataggtacttttaaagcgctggtctcgtgt

SEQ ID NO: 460822 - DNA, 30 bp, Artificial Sequence
  Synthetic oligonucleotide
actgtacaatcaacttgttttttctcgtgt

SEQ ID NO: 460823 - DNA, 30 bp, Artificial Sequence
  Synthetic oligonucleotide
tagacccctcgacacaagggtcgttcgtgt

SEQ ID NO: 460824 - DNA, 30 bp, Artificial Sequence
  Synthetic oligonucleotide
gttctgatgtgattttataagatttcgtgt

SEQ ID NO: 460825 - DNA, 30 bp, Artificial Sequence
  Synthetic oligonucleotide
acggcctctactgttcgcttgtaaaggtgt

SEQ ID NO: 460826 - DNA, 30 bp, Artificial Sequence
  Synthetic oligonucleotide
tcattatcctaattaaaatatttaaggtgt

SEQ ID NO: 460827 - DNA, 30 bp, Artificial Sequence
  Synthetic oligonucleotide
taggacagcagtgtacctgttacgaggtgt

SEQ ID NO: 460828 - DNA, 30 bp, Artificial Sequence
  Synthetic oligonucleotide
caatgactccgtcatcttccgccgaggtgt

SEQ ID NO: 460829 - DNA, 30 bp, Artificial Sequence
  Synthetic oligonucleotide
agtcataacgtttgtagtttaactaggtgt

SEQ ID NO: 460830 - DNA, 30 bp, Artificial Sequence
  Synthetic oligonucleotide
acagcaactcgtcggaaactttctaggtgt

SEQ ID NO: 460831 - DNA, 30 bp, Artificial Sequence
  Synthetic oligonucleotide
cgtacggtggggccgtccacatgtaggtgt

SEQ ID NO: 460832 - DNA, 30 bp, Artificial Sequence
  Synthetic oligonucleotide
ttctgcgaggtctgcatgcaaattaggtgt

SEQ ID NO: 460833 - DNA, 30 bp, Artificial Sequence
  Synthetic oligonucleotide
gttgggggttctaacagtcatgttaggtgt

SEQ ID NO: 460834 - DNA, 30 bp, Artificial Sequence
  Synthetic oligonucleotide
tgatgagacattgatggttcccaacggtgt

SEQ ID NO: 460835 - DNA, 30 bp, Artificial Sequence
  Synthetic oligonucleotide
gcaaattgctttttcagcggctcacggtgt

SEQ ID NO: 460836 - DNA, 30 bp, Artificial Sequence
  Synthetic oligonucleotide
cacaagtaatttccccccgttagacggtgt

SEQ ID NO: 460837 - DNA, 30 bp, Artificial Sequence
  Synthetic oligonucleotide
gtccctcttacaagactgcccagccggtgt

SEQ ID NO: 460838 - DNA, 30 bp, Artificial Sequence
  Synthetic oligonucleotide
tcacatgccacactcggggttctccggtgt

SEQ ID NO: 460839 - DNA, 30 bp, Artificial Sequence
  Synthetic oligonucleotide
ccgccatccaaggcatgtgcggtgcggtgt

SEQ ID NO: 460840 - DNA, 30 bp, Artificial Sequence
  Synthetic oligonucleotide
gcaagagcggaacgtctccctggtcggtgt

SEQ ID NO: 460841 - DNA, 30 bp, Artificial Sequence
  Synthetic oligonucleotide
ttaaacccccttttcaaggagggagggtgt

SEQ ID NO: 460842 - DNA, 30 bp, Artificial Sequence
  Synthetic oligonucleotide
tggtaaggtagcccccttatcgacgggtgt

SEQ ID NO: 460843 - DNA, 30 bp, Artificial Sequence
  Synthetic oligonucleotide
aacgagatgtagtaccccttcgccgggtgt

SEQ ID NO: 460844 - DNA, 30 bp, Artificial Sequence
  Synthetic oligonucleotide
cgcgatgcaccgccacctttgagcgggtgt

SEQ ID NO: 460845 - DNA, 30 bp, Artificial Sequence
  Synthetic oligonucleotide
cgatggctgttagaatcacggccggggtgt

SEQ ID NO: 460846 - DNA, 30 bp, Artificial Sequence
  Synthetic oligonucleotide
ctgtatctcgataagcatggttgggggtgt

SEQ ID NO: 460847 - DNA, 30 bp, Artificial Sequence
  Synthetic oligonucleotide
acggtgccaaggaccaagaggctggggtgt

SEQ ID NO: 460848 - DNA, 30 bp, Artificial Sequence
  Synthetic oligonucleotide
aaatataaagccctccatttatgtgggtgt

SEQ ID NO: 460849 - DNA, 30 bp, Artificial Sequence
  Synthetic oligonucleotide
gacgttgtaggggagcagctctaatggtgt

SEQ ID NO: 460850 - DNA, 30 bp, Artificial Sequence
  Synthetic oligonucleotide
accgcccagtttacgcgcaagcactggtgt

SEQ ID NO: 460851 - DNA, 30 bp, Artificial Sequence
  Synthetic oligonucleotide
gagattgtagatattagtggagtctggtgt

SEQ ID NO: 460852 - DNA, 30 bp, Artificial Sequence
  Synthetic oligonucleotide
caggcagcatagtacgcggcatagtggtgt

SEQ ID NO: 460853 - DNA, 30 bp, Artificial Sequence
  Synthetic oligonucleotide
ggttactgtttttacctcgttaatatgtgt

SEQ ID NO: 460854 - DNA, 30 bp, Artificial Sequence
  Synthetic oligonucleotide
gaagcgttaggcgctatcaaggatatgtgt

SEQ ID NO: 460855 - DNA, 30 bp, Artificial Sequence
  Synthetic oligonucleotide
attcaaccaaacgccggaggcagactgtgt

SEQ ID NO: 460856 - DNA, 30 bp, Artificial Sequence
  Synthetic oligonucleotide
cacctgtgtcggccggcttgatgcctgtgt

SEQ ID NO: 460857 - DNA, 30 bp, Artificial Sequence
  Synthetic oligonucleotide
gacttcgttattcattgcattatcctgtgt

SEQ ID NO: 460858 - DNA, 30 bp, Artificial Sequence
  Synthetic oligonucleotide
ggaaatctaaactgtgcctggaatctgtgt

SEQ ID NO: 460859 - DNA, 30 bp, Artificial Sequence
  Synthetic oligonucleotide
tgatctctgcgtctatcgcacgctctgtgt

SEQ ID NO: 460860 - DNA, 30 bp, Artificial Sequence
  Synthetic oligonucleotide
aagccgccgcccgatctgggctgtctgtgt

SEQ ID NO: 460861 - DNA, 30 bp, Artificial Sequence
  Synthetic oligonucleotide
ggtttggtttgagcacgatattttctgtgt

SEQ ID NO: 460862 - DNA, 30 bp, Artificial Sequence
  Synthetic oligonucleotide
ttccgcaacgccaatggttaataagtgtgt

SEQ ID NO: 460863 - DNA, 30 bp, Artificial Sequence
  Synthetic oligonucleotide
cggtaaggctcttacaggtttgcagtgtgt

SEQ ID NO: 460864 - DNA, 30 bp, Artificial Sequence
  Synthetic oligonucleotide
cgctacatcttttacggtatgtccgtgtgt

SEQ ID NO: 460865 - DNA, 30 bp, Artificial Sequence
  Synthetic oligonucleotide
gttgattttagatcggggtgcatggtgtgt

SEQ ID NO: 460866 - DNA, 30 bp, Artificial Sequence
  Synthetic oligonucleotide
attagaccctagtcagccgtcaaattgtgt

SEQ ID NO: 460867 - DNA, 30 bp, Artificial Sequence
  Synthetic oligonucleotide
tcgggtcgatatataacttttaacttgtgt

SEQ ID NO: 460868 - DNA, 30 bp, Artificial Sequence
  Synthetic oligonucleotide
agcctttcatcgcgagtaacattcttgtgt

SEQ ID NO: 460869 - DNA, 30 bp, Artificial Sequence
  Synthetic oligonucleotide
tttcctaaagaggcagtaggaacgttgtgt

SEQ ID NO: 460870 - DNA, 30 bp, Artificial Sequence
  Synthetic oligonucleotide
atctggggctcggcttctccttggttgtgt

SEQ ID NO: 460871 - DNA, 31 bp, Artificial Sequence
  Synthetic oligonucleotide
cctttcgatctaaatccattgcctgttgtgt

SEQ ID NO: 460872 - DNA, 30 bp, Artificial Sequence
  Synthetic oligonucleotide
cctttttcaccgcctcgcggtggtttgtgt

SEQ ID NO: 460873 - DNA, 30 bp, Artificial Sequence
  Synthetic oligonucleotide
gggctgttaagagtagtggtttggaattgt

SEQ ID NO: 460874 - DNA, 30 bp, Artificial Sequence
  Synthetic oligonucleotide
cgtttttttgctattattatgttgaattgt

SEQ ID NO: 460875 - DNA, 30 bp, Artificial Sequence
  Synthetic oligonucleotide
aaaggccaggcagcaagacttgctaattgt

SEQ ID NO: 460876 - DNA, 30 bp, Artificial Sequence
  Synthetic oligonucleotide
ggtggaaactttgtttcgcggtctaattgt

SEQ ID NO: 460877 - DNA, 30 bp, Artificial Sequence
  Synthetic oligonucleotide
aatagactacctgcccgcctccgtaattgt

SEQ ID NO: 460878 - DNA, 30 bp, Artificial Sequence
  Synthetic oligonucleotide
attgggtgttggcatttggttttacattgt

SEQ ID NO: 460879 - DNA, 30 bp, Artificial Sequence
  Synthetic oligonucleotide
gggcagtttgctcggcagcagtcgcattgt

SEQ ID NO: 460880 - DNA, 30 bp, Artificial Sequence
  Synthetic oligonucleotide
gtccttattttcgcccatctgctgcattgt

SEQ ID NO: 460881 - DNA, 30 bp, Artificial Sequence
  Synthetic oligonucleotide
accccgaatatgttagttatcgatcattgt

SEQ ID NO: 460882 - DNA, 30 bp, Artificial Sequence
  Synthetic oligonucleotide
tttaagtcatctgttacagaacttcattgt

SEQ ID NO: 460883 - DNA, 30 bp, Artificial Sequence
  Synthetic oligonucleotide
gtttgcgacctaatccatatgtgagattgt

SEQ ID NO: 460884 - DNA, 30 bp, Artificial Sequence
  Synthetic oligonucleotide
tctgggtgggccgaaaagggaaatgattgt

SEQ ID NO: 460885 - DNA, 29 bp, Artificial Sequence
  Synthetic oligonucleotide
aaaattgaagtgcagagtagtgtgattgt

SEQ ID NO: 460886 - DNA, 30 bp, Artificial Sequence
  Synthetic oligonucleotide
aagtcgcatttgtaatcgacttaatattgt

SEQ ID NO: 460887 - DNA, 30 bp, Artificial Sequence
  Synthetic oligonucleotide
tcgaatcaagcgaactgactcggatattgt

SEQ ID NO: 460888 - DNA, 30 bp, Artificial Sequence
  Synthetic oligonucleotide
ccaggataagccacaatctgtttatattgt

SEQ ID NO: 460889 - DNA, 30 bp, Artificial Sequence
  Synthetic oligonucleotide
agttatgctcagggctcattttactattgt

SEQ ID NO: 460890 - DNA, 30 bp, Artificial Sequence
  Synthetic oligonucleotide
ctttgtggcatctttgatgcagtctattgt

SEQ ID NO: 460891 - DNA, 30 bp, Artificial Sequence
  Synthetic oligonucleotide
ggaaggatatttgcactagctcagtattgt

SEQ ID NO: 460892 - DNA, 30 bp, Artificial Sequence
  Synthetic oligonucleotide
acagaagcatttgtcgtccaaccgtattgt

SEQ ID NO: 460893 - DNA, 30 bp, Artificial Sequence
  Synthetic oligonucleotide
ttgttttttcaccgcgctcgtaggtattgt

SEQ ID NO: 460894 - DNA, 30 bp, Artificial Sequence
  Synthetic oligonucleotide
ggtcagccttcgtatgtgaggatttattgt

SEQ ID NO: 460895 - DNA, 30 bp, Artificial Sequence
  Synthetic oligonucleotide
cttccgactactggccgctggatttattgt

SEQ ID NO: 460896 - DNA, 30 bp, Artificial Sequence
  Synthetic oligonucleotide
ttttgtgcatagcgagtccgggtttattgt

SEQ ID NO: 460897 - DNA, 30 bp, Artificial Sequence
  Synthetic oligonucleotide
catgatcgcatggcgaggcagttttattgt

SEQ ID NO: 460898 - DNA, 30 bp, Artificial Sequence
  Synthetic oligonucleotide
aactccttgccattgttgggtggaacttgt

SEQ ID NO: 460899 - DNA, 30 bp, Artificial Sequence
  Synthetic oligonucleotide
ccttcattttcaatggagggttagacttgt

SEQ ID NO: 460900 - DNA, 30 bp, Artificial Sequence
  Synthetic oligonucleotide
gatccatttttattgcagtcagggacttgt

SEQ ID NO: 460901 - DNA, 30 bp, Artificial Sequence
  Synthetic oligonucleotide
tcgattgaggttcgtacctgacaaccttgt

SEQ ID NO: 460902 - DNA, 30 bp, Artificial Sequence
  Synthetic oligonucleotide
aaagtttatgaattgaccactccaccttgt

SEQ ID NO: 460903 - DNA, 30 bp, Artificial Sequence
  Synthetic oligonucleotide
aactttttagccagcactcatggaccttgt

SEQ ID NO: 460904 - DNA, 30 bp, Artificial Sequence
  Synthetic oligonucleotide
gttcatagtctaaaaggattgagcccttgt

SEQ ID NO: 460905 - DNA, 30 bp, Artificial Sequence
  Synthetic oligonucleotide
acatcacgcgtaactgatgatatcccttgt

SEQ ID NO: 460906 - DNA, 30 bp, Artificial Sequence
  Synthetic oligonucleotide
tatattaattctgtgggcctatagccttgt

SEQ ID NO: 460907 - DNA, 30 bp, Artificial Sequence
  Synthetic oligonucleotide
gtgatacccgtactgccgcaaaatccttgt

SEQ ID NO: 460908 - DNA, 30 bp, Artificial Sequence
  Synthetic oligonucleotide
tgatacgctgtcaacaaatttgctccttgt

SEQ ID NO: 460909 - DNA, 30 bp, Artificial Sequence
  Synthetic oligonucleotide
ggcacgtatccacttccggcactagcttgt

SEQ ID NO: 460910 - DNA, 30 bp, Artificial Sequence
  Synthetic oligonucleotide
gatacgacactaacctttgcttacgcttgt

SEQ ID NO: 460911 - DNA, 30 bp, Artificial Sequence
  Synthetic oligonucleotide
gagttataccacgaccccgccagcgcttgt

SEQ ID NO: 460912 - DNA, 30 bp, Artificial Sequence
  Synthetic oligonucleotide
attactgatttgctaagtactttcgcttgt

SEQ ID NO: 460913 - DNA, 30 bp, Artificial Sequence
  Synthetic oligonucleotide
tatagcagtcggctgccaacaaaggcttgt

SEQ ID NO: 460914 - DNA, 30 bp, Artificial Sequence
  Synthetic oligonucleotide
ttgagtgttttactcataaatagatcttgt

SEQ ID NO: 460915 - DNA, 30 bp, Artificial Sequence
  Synthetic oligonucleotide
ggactgtcagcgtcattctatcgatcttgt

SEQ ID NO: 460916 - DNA, 30 bp, Artificial Sequence
  Synthetic oligonucleotide
cggcgttggagcgactcagcaggctcttgt

SEQ ID NO: 460917 - DNA, 30 bp, Artificial Sequence
  Synthetic oligonucleotide
gagatttgttgtaaaagcggccagtcttgt

SEQ ID NO: 460918 - DNA, 30 bp, Artificial Sequence
  Synthetic oligonucleotide
gatggtgaacaagatatcataacgtcttgt

SEQ ID NO: 460919 - DNA, 30 bp, Artificial Sequence
  Synthetic oligonucleotide
aatgtacttggacagagtacaaggtcttgt

SEQ ID NO: 460920 - DNA, 30 bp, Artificial Sequence
  Synthetic oligonucleotide
tccaaaagctcctaagcggcctggtcttgt

SEQ ID NO: 460921 - DNA, 30 bp, Artificial Sequence
  Synthetic oligonucleotide
cagattcgtaggtttggaagcccttcttgt

SEQ ID NO: 460922 - DNA, 30 bp, Artificial Sequence
  Synthetic oligonucleotide
gttcacctttctacctagaaaggttcttgt

SEQ ID NO: 460923 - DNA, 30 bp, Artificial Sequence
  Synthetic oligonucleotide
agaacggttagttggatttgagacagttgt

SEQ ID NO: 460924 - DNA, 30 bp, Artificial Sequence
  Synthetic oligonucleotide
gttcacggaattgggcttctctacagttgt

SEQ ID NO: 460925 - DNA, 30 bp, Artificial Sequence
  Synthetic oligonucleotide
taacctgcgtgctatatgagatggagttgt

SEQ ID NO: 460926 - DNA, 30 bp, Artificial Sequence
  Synthetic oligonucleotide
acgacagggggtggtgggggttggagttgt

SEQ ID NO: 460927 - DNA, 30 bp, Artificial Sequence
  Synthetic oligonucleotide
gcatatgaattgaacgtattaatgagttgt

SEQ ID NO: 460928 - DNA, 30 bp, Artificial Sequence
  Synthetic oligonucleotide
gtcctttcttcacggtaagttcatagttgt

SEQ ID NO: 460929 - DNA, 30 bp, Artificial Sequence
  Synthetic oligonucleotide
ggtgggacggtgagtaataaggctagttgt

SEQ ID NO: 460930 - DNA, 30 bp, Artificial Sequence
  Synthetic oligonucleotide
ctggatgatgctcgcgtgaatagccgttgt

SEQ ID NO: 460931 - DNA, 30 bp, Artificial Sequence
  Synthetic oligonucleotide
aatccctccttggaaattatgttccgttgt

SEQ ID NO: 460932 - DNA, 30 bp, Artificial Sequence
  Synthetic oligonucleotide
gcagcgacagcgcaaattaaaaagcgttgt

SEQ ID NO: 460933 - DNA, 30 bp, Artificial Sequence
  Synthetic oligonucleotide
ggtccatcccgtctagtttgcaagcgttgt

SEQ ID NO: 460934 - DNA, 30 bp, Artificial Sequence
  Synthetic oligonucleotide
tttcatgtactgttcgttattaatcgttgt

SEQ ID NO: 460935 - DNA, 30 bp, Artificial Sequence
  Synthetic oligonucleotide
gttccgactcaacggccgcggcgtcgttgt

SEQ ID NO: 460936 - DNA, 30 bp, Artificial Sequence
  Synthetic oligonucleotide
aaaaccaacaacttacgatacattcgttgt

SEQ ID NO: 460937 - DNA, 30 bp, Artificial Sequence
  Synthetic oligonucleotide
cagtggtatgcgactactcgattaggttgt

SEQ ID NO: 460938 - DNA, 30 bp, Artificial Sequence
  Synthetic oligonucleotide
gagtatcgcgctcgcgatttattaggttgt

SEQ ID NO: 460939 - DNA, 30 bp, Artificial Sequence
  Synthetic oligonucleotide
tgttgaaaagtgacggccaaccgcggttgt

SEQ ID NO: 460940 - DNA, 30 bp, Artificial Sequence
  Synthetic oligonucleotide
cccgtgggcttagcgagaataacgggttgt

SEQ ID NO: 460941 - DNA, 30 bp, Artificial Sequence
  Synthetic oligonucleotide
tcgttgccatattgtaaaactattggttgt

SEQ ID NO: 460942 - DNA, 30 bp, Artificial Sequence
  Synthetic oligonucleotide
atcctcacatcattgtttctggttggttgt

SEQ ID NO: 460943 - DNA, 30 bp, Artificial Sequence
  Synthetic oligonucleotide
tccctgcgaagtgaacaccttaagtgttgt

SEQ ID NO: 460944 - DNA, 30 bp, Artificial Sequence
  Synthetic oligonucleotide
ccgtgagatgggcctatactcttgtgttgt

SEQ ID NO: 460945 - DNA, 30 bp, Artificial Sequence
  Synthetic oligonucleotide
ttctgctgcggtacacctcgccattgttgt

SEQ ID NO: 460946 - DNA, 30 bp, Artificial Sequence
  Synthetic oligonucleotide
gtttccaaaaaggcgcccatggattgttgt

SEQ ID NO: 460947 - DNA, 30 bp, Artificial Sequence
  Synthetic oligonucleotide
gtcccgggctaaccgggatgctaaatttgt

SEQ ID NO: 460948 - DNA, 30 bp, Artificial Sequence
  Synthetic oligonucleotide
gccaatttacgacgacgaaagcgaatttgt

SEQ ID NO: 460949 - DNA, 30 bp, Artificial Sequence
  Synthetic oligonucleotide
tttggcgcgagggtcgttcagcacatttgt

SEQ ID NO: 460950 - DNA, 30 bp, Artificial Sequence
  Synthetic oligonucleotide
tactctgtttgcgaacaaaccgccatttgt

SEQ ID NO: 460951 - DNA, 30 bp, Artificial Sequence
  Synthetic oligonucleotide
gttagggtcagcaatgctttcatcatttgt

SEQ ID NO: 460952 - DNA, 30 bp, Artificial Sequence
  Synthetic oligonucleotide
ctgaagtgatatcccgctgcgtagatttgt

SEQ ID NO: 460953 - DNA, 30 bp, Artificial Sequence
  Synthetic oligonucleotide
acggcttcaggttccaattttcggatttgt

SEQ ID NO: 460954 - DNA, 30 bp, Artificial Sequence
  Synthetic oligonucleotide
atgtatatcgagtggtgtacgatgatttgt

SEQ ID NO: 460955 - DNA, 30 bp, Artificial Sequence
  Synthetic oligonucleotide
atgcggtcgtacctttgataattgatttgt

SEQ ID NO: 460956 - DNA, 30 bp, Artificial Sequence
  Synthetic oligonucleotide
cggagctcacgtatcatgtgttctatttgt

SEQ ID NO: 460957 - DNA, 30 bp, Artificial Sequence
  Synthetic oligonucleotide
tagaccattccgtagacggactttatttgt

SEQ ID NO: 460958 - DNA, 30 bp, Artificial Sequence
  Synthetic oligonucleotide
gacttagatagggcattaaatccactttgt

SEQ ID NO: 460959 - DNA, 28 bp, Artificial Sequence
  Synthetic oligonucleotide
gcctattccctcgctttctcccctttgt

SEQ ID NO: 460960 - DNA, 30 bp, Artificial Sequence
  Synthetic oligonucleotide
gtaaggaaccgcggcaagcgttggctttgt

SEQ ID NO: 460961 - DNA, 30 bp, Artificial Sequence
  Synthetic oligonucleotide
ctccgtatctttttaagttacaatctttgt

SEQ ID NO: 460962 - DNA, 30 bp, Artificial Sequence
  Synthetic oligonucleotide
agcaaatgtcccactgccttaccagtttgt

SEQ ID NO: 460963 - DNA, 30 bp, Artificial Sequence
  Synthetic oligonucleotide
catcatagtccaataatgccaggagtttgt

SEQ ID NO: 460964 - DNA, 30 bp, Artificial Sequence
  Synthetic oligonucleotide
tataaaccacttatgtggtggaccgtttgt

SEQ ID NO: 460965 - DNA, 30 bp, Artificial Sequence
  Synthetic oligonucleotide
gacgatctggctgaatcgtaacccgtttgt

SEQ ID NO: 460966 - DNA, 30 bp, Artificial Sequence
  Synthetic oligonucleotide
tccgttcccgtgtataacgcttccgtttgt

SEQ ID NO: 460967 - DNA, 30 bp, Artificial Sequence
  Synthetic oligonucleotide
ttctgaaataccgcgacagacttcgtttgt

SEQ ID NO: 460968 - DNA, 30 bp, Artificial Sequence
  Synthetic oligonucleotide
gtaatctaaaaatgacgattacaggtttgt

SEQ ID NO: 460969 - DNA, 30 bp, Artificial Sequence
  Synthetic oligonucleotide
atcgtaaatctgggtccccggccggtttgt

SEQ ID NO: 460970 - DNA, 30 bp, Artificial Sequence
  Synthetic oligonucleotide
gagttaaaaacaattccctggggggtttgt

SEQ ID NO: 460971 - DNA, 30 bp, Artificial Sequence
  Synthetic oligonucleotide
atcttgaccaggaggcagacgaatgtttgt

SEQ ID NO: 460972 - DNA, 30 bp, Artificial Sequence
  Synthetic oligonucleotide
gataagtttaacggatataccattgtttgt

SEQ ID NO: 460973 - DNA, 30 bp, Artificial Sequence
  Synthetic oligonucleotide
ccggctttcggtgtagaggtttttgtttgt

SEQ ID NO: 460974 - DNA, 30 bp, Artificial Sequence
  Synthetic oligonucleotide
tagacccgtgttggtttatggtaattttgt

SEQ ID NO: 460975 - DNA, 30 bp, Artificial Sequence
  Synthetic oligonucleotide
cagtgattctggcggcgatcctcattttgt

SEQ ID NO: 460976 - DNA, 30 bp, Artificial Sequence
  Synthetic oligonucleotide
tccaacagataggtgtgcattcgattttgt

SEQ ID NO: 460977 - DNA, 30 bp, Artificial Sequence
  Synthetic oligonucleotide
tacaagagctggtttcactatatattttgt

SEQ ID NO: 460978 - DNA, 30 bp, Artificial Sequence
  Synthetic oligonucleotide
gccctattacctcgctttctccccttttgt

SEQ ID NO: 460979 - DNA, 30 bp, Artificial Sequence
  Synthetic oligonucleotide
gccctattccctctctttctccccttttgt

SEQ ID NO: 460980 - DNA, 30 bp, Artificial Sequence
  Synthetic oligonucleotide
ttcggaacactcgaaggactaagcttttgt

SEQ ID NO: 460981 - DNA, 30 bp, Artificial Sequence
  Synthetic oligonucleotide
catgctagtggtgtcatgaaaatcttttgt

SEQ ID NO: 460982 - DNA, 30 bp, Artificial Sequence
  Synthetic oligonucleotide
gtgtcatatgacataagtacagtcttttgt

SEQ ID NO: 460983 - DNA, 30 bp, Artificial Sequence
  Synthetic oligonucleotide
agaagactcttttaaaactcatagttttgt

SEQ ID NO: 460984 - DNA, 30 bp, Artificial Sequence
  Synthetic oligonucleotide
ctcgtagctcttattaaatgctggttttgt

SEQ ID NO: 460985 - DNA, 30 bp, Artificial Sequence
  Synthetic oligonucleotide
ttattcggaggtgttaataccctgttttgt

SEQ ID NO: 460986 - DNA, 30 bp, Artificial Sequence
  Synthetic oligonucleotide
cacgcgtccgccatcgtaacgtttttttgt

SEQ ID NO: 460987 - DNA, 30 bp, Artificial Sequence
  Synthetic oligonucleotide
tcccggcccatttcaagcctggaaaaaatt

SEQ ID NO: 460988 - DNA, 30 bp, Artificial Sequence
  Synthetic oligonucleotide
caatgcgcctgcccgtggaccggaaaaatt

SEQ ID NO: 460989 - DNA, 30 bp, Artificial Sequence
  Synthetic oligonucleotide
gtattcgcagatggattacgatccaaaatt

SEQ ID NO: 460990 - DNA, 30 bp, Artificial Sequence
  Synthetic oligonucleotide
acctgtataggcccttattgggtcaaaatt

SEQ ID NO: 460991 - DNA, 30 bp, Artificial Sequence
  Synthetic oligonucleotide
tattcagagacatcttaaggattcaaaatt

SEQ ID NO: 460992 - DNA, 30 bp, Artificial Sequence
  Synthetic oligonucleotide
atgcggtacaaattatcagactagaaaatt

SEQ ID NO: 460993 - DNA, 30 bp, Artificial Sequence
  Synthetic oligonucleotide
acaagcccgtttttagaaattatgaaaatt

SEQ ID NO: 460994 - DNA, 30 bp, Artificial Sequence
  Synthetic oligonucleotide
aatgccgatccgatgccgagaaataaaatt

SEQ ID NO: 460995 - DNA, 30 bp, Artificial Sequence
  Synthetic oligonucleotide
gaacttgccgtgatcctacggattaaaatt

SEQ ID NO: 460996 - DNA, 30 bp, Artificial Sequence
  Synthetic oligonucleotide
tggttagagcttcaatacctggttaaaatt

SEQ ID NO: 460997 - DNA, 30 bp, Artificial Sequence
  Synthetic oligonucleotide
actgtatggccgtaacggggctttaaaatt

SEQ ID NO: 460998 - DNA, 30 bp, Artificial Sequence
  Synthetic oligonucleotide
gactccactatgtctcatgatacacaaatt

SEQ ID NO: 460999 - DNA, 30 bp, Artificial Sequence
  Synthetic oligonucleotide
tatggacaattaggacgtcgtagacaaatt

SEQ ID NO: 461000 - DNA, 30 bp, Artificial Sequence
  Synthetic oligonucleotide
cccgtcttgtaaagttaatcgtgccaaatt

SEQ ID NO: 461001 - DNA, 30 bp, Artificial Sequence
  Synthetic oligonucleotide
agaatctttcttcgagatagggtccaaatt

SEQ ID NO: 461002 - DNA, 31 bp, Artificial Sequence
  Synthetic oligonucleotide
atccaacttacctgcacaattgttccaaatt

SEQ ID NO: 461003 - DNA, 30 bp, Artificial Sequence
  Synthetic oligonucleotide
ccttgccgcagtcataggttgacgcaaatt

SEQ ID NO: 461004 - DNA, 30 bp, Artificial Sequence
  Synthetic oligonucleotide
actttgtaaagcaatgctaagtcgcaaatt

SEQ ID NO: 461005 - DNA, 30 bp, Artificial Sequence
  Synthetic oligonucleotide
ttgtcagcctcgattgaggtatggcaaatt

SEQ ID NO: 461006 - DNA, 30 bp, Artificial Sequence
  Synthetic oligonucleotide
ctgcatgtttatcacctagggtggcaaatt

SEQ ID NO: 461007 - DNA, 30 bp, Artificial Sequence
  Synthetic oligonucleotide
catcaccgggcgtcttgttgtatgcaaatt

SEQ ID NO: 461008 - DNA, 30 bp, Artificial Sequence
  Synthetic oligonucleotide
tataaccaggtggggtagtcatgtcaaatt

SEQ ID NO: 461009 - DNA, 30 bp, Artificial Sequence
  Synthetic oligonucleotide
tatagcgttacgatcggttgagaagaaatt

SEQ ID NO: 461010 - DNA, 30 bp, Artificial Sequence
  Synthetic oligonucleotide
tagttcactcaaaccccgtcataagaaatt

SEQ ID NO: 461011 - DNA, 30 bp, Artificial Sequence
  Synthetic oligonucleotide
gcgatttgggtcgggtcttcgccagaaatt

SEQ ID NO: 461012 - DNA, 30 bp, Artificial Sequence
  Synthetic oligonucleotide
caaatcgaaaatatgaaattcagcgaaatt

SEQ ID NO: 461013 - DNA, 30 bp, Artificial Sequence
  Synthetic oligonucleotide
gcctgttttccactggacacataggaaatt

SEQ ID NO: 461014 - DNA, 30 bp, Artificial Sequence
  Synthetic oligonucleotide
tagatcatgccgagcaaagtttcggaaatt

SEQ ID NO: 461015 - DNA, 30 bp, Artificial Sequence
  Synthetic oligonucleotide
cgcagcccagttcgcggtaaaatggaaatt

SEQ ID NO: 461016 - DNA, 30 bp, Artificial Sequence
  Synthetic oligonucleotide
tctattttttaatcttaagtgcgtgaaatt

SEQ ID NO: 461017 - DNA, 30 bp, Artificial Sequence
  Synthetic oligonucleotide
atgcgataactgaaaaccgggtaataaatt

SEQ ID NO: 461018 - DNA, 30 bp, Artificial Sequence
  Synthetic oligonucleotide
aaaacggtgcctcccacggccatataaatt

SEQ ID NO: 461019 - DNA, 31 bp, Artificial Sequence
  Synthetic oligonucleotide
tgttcaaggggatgctatttttatataaatt

SEQ ID NO: 461020 - DNA, 30 bp, Artificial Sequence
  Synthetic oligonucleotide
gttaaatttctgaaccgggggtactaaatt

SEQ ID NO: 461021 - DNA, 30 bp, Artificial Sequence
  Synthetic oligonucleotide
acaattacatcggactagttacagtaaatt

SEQ ID NO: 461022 - DNA, 30 bp, Artificial Sequence
  Synthetic oligonucleotide
ttgtacgtcgcttaacctgctcgttaaatt

SEQ ID NO: 461023 - DNA, 30 bp, Artificial Sequence
  Synthetic oligonucleotide
tacctgatagttcggtcttatggaacaatt

SEQ ID NO: 461024 - DNA, 30 bp, Artificial Sequence
  Synthetic oligonucleotide
gtgtggtggattcacgagcattgcacaatt

SEQ ID NO: 461025 - DNA, 30 bp, Artificial Sequence
  Synthetic oligonucleotide
tttaggaaatcaaacgcgtttgtcacaatt

SEQ ID NO: 461026 - DNA, 30 bp, Artificial Sequence
  Synthetic oligonucleotide
gtggagtgggccatctctgaggggacaatt

SEQ ID NO: 461027 - DNA, 30 bp, Artificial Sequence
  Synthetic oligonucleotide
cagcctagcatagacgagcatgtgacaatt

SEQ ID NO: 461028 - DNA, 30 bp, Artificial Sequence
  Synthetic oligonucleotide
atgcatcacctgaacagtaatttgacaatt

SEQ ID NO: 461029 - DNA, 30 bp, Artificial Sequence
  Synthetic oligonucleotide
tcaagggagggtacaaatccatgtacaatt

SEQ ID NO: 461030 - DNA, 30 bp, Artificial Sequence
  Synthetic oligonucleotide
aactgggactttacgttggggtaaccaatt

SEQ ID NO: 461031 - DNA, 30 bp, Artificial Sequence
  Synthetic oligonucleotide
aattagatcgacctacgtagggccccaatt

SEQ ID NO: 461032 - DNA, 30 bp, Artificial Sequence
  Synthetic oligonucleotide
taccaagtgttgatattgttcagcccaatt

SEQ ID NO: 461033 - DNA, 30 bp, Artificial Sequence
  Synthetic oligonucleotide
aatcagtccccagggcaccgctttccaatt

SEQ ID NO: 461034 - DNA, 30 bp, Artificial Sequence
  Synthetic oligonucleotide
aggaaaatgcggtatcggggtccagcaatt

SEQ ID NO: 461035 - DNA, 30 bp, Artificial Sequence
  Synthetic oligonucleotide
ccaccgccttgatgatgtgttagcgcaatt

SEQ ID NO: 461036 - DNA, 30 bp, Artificial Sequence
  Synthetic oligonucleotide
attcagattatgtcggtcaatggcgcaatt

SEQ ID NO: 461037 - DNA, 30 bp, Artificial Sequence
  Synthetic oligonucleotide
aatgtggggttgacccgcgcctgggcaatt

SEQ ID NO: 461038 - DNA, 30 bp, Artificial Sequence
  Synthetic oligonucleotide
ggacgtgtaccgatagacgcactggcaatt

SEQ ID NO: 461039 - DNA, 30 bp, Artificial Sequence
  Synthetic oligonucleotide
caaatttaactagattagtcgttggcaatt

SEQ ID NO: 461040 - DNA, 30 bp, Artificial Sequence
  Synthetic oligonucleotide
gtcaattagccaatccaaatggatgcaatt

SEQ ID NO: 461041 - DNA, 30 bp, Artificial Sequence
  Synthetic oligonucleotide
acctcgtagcataggtgttaaccatcaatt

SEQ ID NO: 461042 - DNA, 30 bp, Artificial Sequence
  Synthetic oligonucleotide
caggtggtgatgtcttcgttctcatcaatt

SEQ ID NO: 461043 - DNA, 30 bp, Artificial Sequence
  Synthetic oligonucleotide
cgccactcccagcactcgataggatcaatt

SEQ ID NO: 461044 - DNA, 30 bp, Artificial Sequence
  Synthetic oligonucleotide
tggggaccgctgagctggataatatcaatt

SEQ ID NO: 461045 - DNA, 30 bp, Artificial Sequence
  Synthetic oligonucleotide
atattgttgtgacggttaaggcagtcaatt

SEQ ID NO: 461046 - DNA, 30 bp, Artificial Sequence
  Synthetic oligonucleotide
tgagggaacgggcgaattgtttcgtcaatt

SEQ ID NO: 461047 - DNA, 30 bp, Artificial Sequence
  Synthetic oligonucleotide
acaaatgatcgatatggcaaagggtcaatt

SEQ ID NO: 461048 - DNA, 30 bp, Artificial Sequence
  Synthetic oligonucleotide
aactgttagagggttcatactctgtcaatt

SEQ ID NO: 461049 - DNA, 30 bp, Artificial Sequence
  Synthetic oligonucleotide
tcgaattccgttccacgagctgaaagaatt

SEQ ID NO: 461050 - DNA, 30 bp, Artificial Sequence
  Synthetic oligonucleotide
cccagcatcttatggcctttcgcaagaatt

SEQ ID NO: 461051 - DNA, 30 bp, Artificial Sequence
  Synthetic oligonucleotide
catcgcttaaaagacactattttaagaatt

SEQ ID NO: 461052 - DNA, 30 bp, Artificial Sequence
  Synthetic oligonucleotide
tctactaatctttgaggtcggcccagaatt

SEQ ID NO: 461053 - DNA, 30 bp, Artificial Sequence
  Synthetic oligonucleotide
aacgtagcgtatcccaggattcgcagaatt

SEQ ID NO: 461054 - DNA, 30 bp, Artificial Sequence
  Synthetic oligonucleotide
agacaggatataacattgattgcgagaatt

SEQ ID NO: 461055 - DNA, 30 bp, Artificial Sequence
  Synthetic oligonucleotide
taatacgtagcttaatgagttgcgagaatt

SEQ ID NO: 461056 - DNA, 30 bp, Artificial Sequence
  Synthetic oligonucleotide
gttagtctggataatttatcggggagaatt

SEQ ID NO: 461057 - DNA, 30 bp, Artificial Sequence
  Synthetic oligonucleotide
tatttgtcacggagcgcgagcgtgagaatt

SEQ ID NO: 461058 - DNA, 30 bp, Artificial Sequence
  Synthetic oligonucleotide
tgacggatggacgcaattcgggaacgaatt

SEQ ID NO: 461059 - DNA, 30 bp, Artificial Sequence
  Synthetic oligonucleotide
tagcactccgtgtcgattaacgcacgaatt

SEQ ID NO: 461060 - DNA, 30 bp, Artificial Sequence
  Synthetic oligonucleotide
acattttccaaactcggatgtatacgaatt

SEQ ID NO: 461061 - DNA, 30 bp, Artificial Sequence
  Synthetic oligonucleotide
aaaatatagtagatggaagcagcccgaatt

SEQ ID NO: 461062 - DNA, 30 bp, Artificial Sequence
  Synthetic oligonucleotide
ccggattcggtgggcgcacgacagcgaatt

SEQ ID NO: 461063 - DNA, 30 bp, Artificial Sequence
  Synthetic oligonucleotide
tgcatctccgccgtcaagaggcggcgaatt

SEQ ID NO: 461064 - DNA, 30 bp, Artificial Sequence
  Synthetic oligonucleotide
tatgaggcagggaatctattatggcgaatt

SEQ ID NO: 461065 - DNA, 31 bp, Artificial Sequence
  Synthetic oligonucleotide
gatttaggccagtccggtcaggtggcgaatt

SEQ ID NO: 461066 - DNA, 30 bp, Artificial Sequence
  Synthetic oligonucleotide
tatgtggaggaattttggaccctgcgaatt

SEQ ID NO: 461067 - DNA, 30 bp, Artificial Sequence
  Synthetic oligonucleotide
ggtaatagtaggcagggaagcttgcgaatt

SEQ ID NO: 461068 - DNA, 30 bp, Artificial Sequence
  Synthetic oligonucleotide
caccttgcggtcacaaaacatgacggaatt

SEQ ID NO: 461069 - DNA, 30 bp, Artificial Sequence
  Synthetic oligonucleotide
ggcccgtgtaaaggataacggcccggaatt

SEQ ID NO: 461070 - DNA, 30 bp, Artificial Sequence
  Synthetic oligonucleotide
aattagtaacgacccgtaatgtgcggaatt

SEQ ID NO: 461071 - DNA, 30 bp, Artificial Sequence
  Synthetic oligonucleotide
tatcggagggttatggttaggctcggaatt

SEQ ID NO: 461072 - DNA, 30 bp, Artificial Sequence
  Synthetic oligonucleotide
agcggccccgagtgggggtcagtcggaatt

SEQ ID NO: 461073 - DNA, 30 bp, Artificial Sequence
  Synthetic oligonucleotide
atccctagcggtgttaagtatttcggaatt

SEQ ID NO: 461074 - DNA, 30 bp, Artificial Sequence
  Synthetic oligonucleotide
tttacctgccccgaggatgcgtagggaatt

SEQ ID NO: 461075 - DNA, 30 bp, Artificial Sequence
  Synthetic oligonucleotide
gctttacacaaataatgtttggggggaatt

SEQ ID NO: 461076 - DNA, 30 bp, Artificial Sequence
  Synthetic oligonucleotide
gccgttagaatgtcatggattattggaatt

SEQ ID NO: 461077 - DNA, 30 bp, Artificial Sequence
  Synthetic oligonucleotide
aagctctcgggttggaaatgccaatgaatt

SEQ ID NO: 461078 - DNA, 30 bp, Artificial Sequence
  Synthetic oligonucleotide
atgtctcggtctcgaccgcttacatgaatt

SEQ ID NO: 461079 - DNA, 30 bp, Artificial Sequence
  Synthetic oligonucleotide
aggacccttccaaggcccttgaactgaatt

SEQ ID NO: 461080 - DNA, 30 bp, Artificial Sequence
  Synthetic oligonucleotide
ctgttttgagtcttagctatgttctgaatt

SEQ ID NO: 461081 - DNA, 30 bp, Artificial Sequence
  Synthetic oligonucleotide
gcaaatcgataggcatccacctcgtgaatt

SEQ ID NO: 461082 - DNA, 30 bp, Artificial Sequence
  Synthetic oligonucleotide
gtaacgatctaatacccgtggaggtgaatt

SEQ ID NO: 461083 - DNA, 30 bp, Artificial Sequence
  Synthetic oligonucleotide
gtctcatcacccagacggcgtgtgtgaatt

SEQ ID NO: 461084 - DNA, 30 bp, Artificial Sequence
  Synthetic oligonucleotide
gcgacttaattcattaccgttttgtgaatt

SEQ ID NO: 461085 - DNA, 30 bp, Artificial Sequence
  Synthetic oligonucleotide
ccgtaagtagtctgcagtagaaattgaatt

SEQ ID NO: 461086 - DNA, 30 bp, Artificial Sequence
  Synthetic oligonucleotide
atagttcgaggggactaccccccttgaatt

SEQ ID NO: 461087 - DNA, 30 bp, Artificial Sequence
  Synthetic oligonucleotide
aatgatacaggatttatcaataaaataatt

SEQ ID NO: 461088 - DNA, 30 bp, Artificial Sequence
  Synthetic oligonucleotide
tcaagtcttcattcaaaagagcgaataatt

SEQ ID NO: 461089 - DNA, 30 bp, Artificial Sequence
  Synthetic oligonucleotide
gttagcagatagatgacattatgaataatt

SEQ ID NO: 461090 - DNA, 30 bp, Artificial Sequence
  Synthetic oligonucleotide
tagattgcactgttaaaccacgtaataatt

SEQ ID NO: 461091 - DNA, 30 bp, Artificial Sequence
  Synthetic oligonucleotide
ggcaatgggttaacccgccctgtaataatt

SEQ ID NO: 461092 - DNA, 30 bp, Artificial Sequence
  Synthetic oligonucleotide
tgtcacccgtagtgtcccttcctcataatt

SEQ ID NO: 461093 - DNA, 30 bp, Artificial Sequence
  Synthetic oligonucleotide
gaacgatatgatgtgcagcgtacgataatt

SEQ ID NO: 461094 - DNA, 30 bp, Artificial Sequence
  Synthetic oligonucleotide
gcctcgacgcgtcatcccattgatataatt

SEQ ID NO: 461095 - DNA, 30 bp, Artificial Sequence
  Synthetic oligonucleotide
gtgaatgatccgtaccgcgaagttataatt

SEQ ID NO: 461096 - DNA, 30 bp, Artificial Sequence
  Synthetic oligonucleotide
aagttccttgtggactcccgtaaactaatt

SEQ ID NO: 461097 - DNA, 30 bp, Artificial Sequence
  Synthetic oligonucleotide
aaaaacatttaacttgactgggcactaatt

SEQ ID NO: 461098 - DNA, 30 bp, Artificial Sequence
  Synthetic oligonucleotide
taatgcgcactagtgtttattcgactaatt

SEQ ID NO: 461099 - DNA, 30 bp, Artificial Sequence
  Synthetic oligonucleotide
gcgacgaacagcggaatattaagcctaatt

SEQ ID NO: 461100 - DNA, 30 bp, Artificial Sequence
  Synthetic oligonucleotide
acagggtaggaagggggcactggcctaatt

SEQ ID NO: 461101 - DNA, 30 bp, Artificial Sequence
  Synthetic oligonucleotide
gaactccgtcccgtctaagcaacgctaatt

SEQ ID NO: 461102 - DNA, 30 bp, Artificial Sequence
  Synthetic oligonucleotide
tttgatacccacactcgagtcccgctaatt

SEQ ID NO: 461103 - DNA, 30 bp, Artificial Sequence
  Synthetic oligonucleotide
caaatcaaagcttattgaagatggctaatt

SEQ ID NO: 461104 - DNA, 30 bp, Artificial Sequence
  Synthetic oligonucleotide
tcctcaaagttcagccgcgcacaggtaatt

SEQ ID NO: 461105 - DNA, 26 bp, Artificial Sequence
  Synthetic oligonucleotide
ttatggttaagtaaagccaggtaatt

SEQ ID NO: 461106 - DNA, 30 bp, Artificial Sequence
  Synthetic oligonucleotide
tgttatgttgattcatattaaagggtaatt

SEQ ID NO: 461107 - DNA, 30 bp, Artificial Sequence
  Synthetic oligonucleotide
gcacagttgccatattggtacgctgtaatt

SEQ ID NO: 461108 - DNA, 30 bp, Artificial Sequence
  Synthetic oligonucleotide
gatgactattaccaaccgctgcgtgtaatt

SEQ ID NO: 461109 - DNA, 30 bp, Artificial Sequence
  Synthetic oligonucleotide
ggcgaaatcattgtgattaagtaattaatt

SEQ ID NO: 461110 - DNA, 30 bp, Artificial Sequence
  Synthetic oligonucleotide
gaggctttcgcgttccttccgtaattaatt

SEQ ID NO: 461111 - DNA, 30 bp, Artificial Sequence
  Synthetic oligonucleotide
gtcagacgggcaggaatccttcgattaatt

SEQ ID NO: 461112 - DNA, 30 bp, Artificial Sequence
  Synthetic oligonucleotide
atgtgtcaaggtcggcagtataacttaatt

SEQ ID NO: 461113 - DNA, 30 bp, Artificial Sequence
  Synthetic oligonucleotide
ctattaagatcactgcgtgcccacttaatt

SEQ ID NO: 461114 - DNA, 30 bp, Artificial Sequence
  Synthetic oligonucleotide
aaccaataagggttttagagtggcttaatt

SEQ ID NO: 461115 - DNA, 30 bp, Artificial Sequence
  Synthetic oligonucleotide
ctttatggtaccgcttagttcctcttaatt

SEQ ID NO: 461116 - DNA, 30 bp, Artificial Sequence
  Synthetic oligonucleotide
cttgtgatctaatctatcgtcacgttaatt

SEQ ID NO: 461117 - DNA, 30 bp, Artificial Sequence
  Synthetic oligonucleotide
gttgtgagcctattcgcacactggttaatt

SEQ ID NO: 461118 - DNA, 30 bp, Artificial Sequence
  Synthetic oligonucleotide
ttctcattatcatcacaaaggtggttaatt

SEQ ID NO: 461119 - DNA, 30 bp, Artificial Sequence
  Synthetic oligonucleotide
tgtcagctcaggcaatcagaacctttaatt

SEQ ID NO: 461120 - DNA, 30 bp, Artificial Sequence
  Synthetic oligonucleotide
tttcaacaacgtggtggaacttctttaatt

SEQ ID NO: 461121 - DNA, 30 bp, Artificial Sequence
  Synthetic oligonucleotide
gaaaataagtaaccccgtcaaattttaatt

SEQ ID NO: 461122 - DNA, 30 bp, Artificial Sequence
  Synthetic oligonucleotide
tccaacgcacccagctggtcggttttaatt

SEQ ID NO: 461123 - DNA, 30 bp, Artificial Sequence
  Synthetic oligonucleotide
agcccttcaacttgcaggcagtaaaacatt

SEQ ID NO: 461124 - DNA, 30 bp, Artificial Sequence
  Synthetic oligonucleotide
atactggcatcacagcttctaaacaacatt

SEQ ID NO: 461125 - DNA, 30 bp, Artificial Sequence
  Synthetic oligonucleotide
aaagtaggaagcgttgtccaatccaacatt

SEQ ID NO: 461126 - DNA, 30 bp, Artificial Sequence
  Synthetic oligonucleotide
aggcagtcttcaagtattggtgtcaacatt

SEQ ID NO: 461127 - DNA, 30 bp, Artificial Sequence
  Synthetic oligonucleotide
tttaactgtaatagtcacctgccgaacatt

SEQ ID NO: 461128 - DNA, 31 bp, Artificial Sequence
  Synthetic oligonucleotide
catcagactataacgttgaagtaggaacatt

SEQ ID NO: 461129 - DNA, 30 bp, Artificial Sequence
  Synthetic oligonucleotide
ttcacttaggaaccgttttcggctaacatt

SEQ ID NO: 461130 - DNA, 30 bp, Artificial Sequence
  Synthetic oligonucleotide
atggtatgtaccgataactatagtaacatt

SEQ ID NO: 461131 - DNA, 30 bp, Artificial Sequence
  Synthetic oligonucleotide
aattcgaagtttctgggacgagaacacatt

SEQ ID NO: 461132 - DNA, 30 bp, Artificial Sequence
  Synthetic oligonucleotide
ccccgcacgcattcatctaaaagacacatt

SEQ ID NO: 461133 - DNA, 30 bp, Artificial Sequence
  Synthetic oligonucleotide
gaaaccgctggcttcgtgagtttacacatt

SEQ ID NO: 461134 - DNA, 30 bp, Artificial Sequence
  Synthetic oligonucleotide
tacggcaattggtttaccccaaaccacatt

SEQ ID NO: 461135 - DNA, 30 bp, Artificial Sequence
  Synthetic oligonucleotide
acttgaccgctgccccctacgaaccacatt

SEQ ID NO: 461136 - DNA, 30 bp, Artificial Sequence
  Synthetic oligonucleotide
atgacggtcacgtcccaggtagttcacatt

SEQ ID NO: 461137 - DNA, 30 bp, Artificial Sequence
  Synthetic oligonucleotide
gtgaacaaagtccgttgccactaagacatt

SEQ ID NO: 461138 - DNA, 30 bp, Artificial Sequence
  Synthetic oligonucleotide
tgcaagccatatagctgctgcggagacatt

SEQ ID NO: 461139 - DNA, 30 bp, Artificial Sequence
  Synthetic oligonucleotide
gattgataattaaaacctgggatagacatt

SEQ ID NO: 461140 - DNA, 30 bp, Artificial Sequence
  Synthetic oligonucleotide
tgtcttgcccgtcgtgagaccggcgacatt

SEQ ID NO: 461141 - DNA, 30 bp, Artificial Sequence
  Synthetic oligonucleotide
tatatttaactctaggggaacaatgacatt

SEQ ID NO: 461142 - DNA, 30 bp, Artificial Sequence
  Synthetic oligonucleotide
aatcagggtgttctgtttattgatgacatt

SEQ ID NO: 461143 - DNA, 30 bp, Artificial Sequence
  Synthetic oligonucleotide
aatctgatgggcatgacggcatatgacatt

SEQ ID NO: 461144 - DNA, 30 bp, Artificial Sequence
  Synthetic oligonucleotide
aacgtattggtctgcacaatgtatgacatt

SEQ ID NO: 461145 - DNA, 30 bp, Artificial Sequence
  Synthetic oligonucleotide
gcgctcgtatgggtttgatgtccatacatt

SEQ ID NO: 461146 - DNA, 30 bp, Artificial Sequence
  Synthetic oligonucleotide
gttgtgtagtggttactgcgagtatacatt

SEQ ID NO: 461147 - DNA, 30 bp, Artificial Sequence
  Synthetic oligonucleotide
tagcctcagggcagcccggtattctacatt

SEQ ID NO: 461148 - DNA, 30 bp, Artificial Sequence
  Synthetic oligonucleotide
aaaattgttaaagaaccagatgcgtacatt

SEQ ID NO: 461149 - DNA, 30 bp, Artificial Sequence
  Synthetic oligonucleotide
gttcaaggccttatggcacctcggtacatt

SEQ ID NO: 461150 - DNA, 30 bp, Artificial Sequence
  Synthetic oligonucleotide
ggccaggtaggaagtggccccgggtacatt

SEQ ID NO: 461151 - DNA, 30 bp, Artificial Sequence
  Synthetic oligonucleotide
tactaaatgtgtgcgcgataacgttacatt

SEQ ID NO: 461152 - DNA, 30 bp, Artificial Sequence
  Synthetic oligonucleotide
acacaactacgcagatcgttcgtttacatt

SEQ ID NO: 461153 - DNA, 30 bp, Artificial Sequence
  Synthetic oligonucleotide
ctaaaggctttaaaactgagccgaaccatt

SEQ ID NO: 461154 - DNA, 30 bp, Artificial Sequence
  Synthetic oligonucleotide
tctttgggcagaccactgctgcgaaccatt

SEQ ID NO: 461155 - DNA, 30 bp, Artificial Sequence
  Synthetic oligonucleotide
ccggagttacaccttctttacttcaccatt

SEQ ID NO: 461156 - DNA, 30 bp, Artificial Sequence
  Synthetic oligonucleotide
aggaaataagtcggacgtgattagaccatt

SEQ ID NO: 461157 - DNA, 30 bp, Artificial Sequence
  Synthetic oligonucleotide
ggggcgcccgttttattatgatggaccatt

SEQ ID NO: 461158 - DNA, 30 bp, Artificial Sequence
  Synthetic oligonucleotide
actaagctgcgttatgtcatagtgaccatt

SEQ ID NO: 461159 - DNA, 30 bp, Artificial Sequence
  Synthetic oligonucleotide
cgtgtggtgttggtcgccttggtgaccatt

SEQ ID NO: 461160 - DNA, 30 bp, Artificial Sequence
  Synthetic oligonucleotide
aggcaccggggagactacacatataccatt

SEQ ID NO: 461161 - DNA, 30 bp, Artificial Sequence
  Synthetic oligonucleotide
agtaacaccattaccgcctccggtaccatt

SEQ ID NO: 461162 - DNA, 30 bp, Artificial Sequence
  Synthetic oligonucleotide
atttggaaggtcagctaagcctcacccatt

SEQ ID NO: 461163 - DNA, 30 bp, Artificial Sequence
  Synthetic oligonucleotide
tagataaagtcgttgaaatttctccccatt

SEQ ID NO: 461164 - DNA, 30 bp, Artificial Sequence
  Synthetic oligonucleotide
tgcatcacctcaaggtctctacggcccatt

SEQ ID NO: 461165 - DNA, 30 bp, Artificial Sequence
  Synthetic oligonucleotide
caagcaaagcgagctggtttttatcccatt

SEQ ID NO: 461166 - DNA, 29 bp, Artificial Sequence
  Synthetic oligonucleotide
aatgttggtcatgcaagaaaactcccatt

SEQ ID NO: 461167 - DNA, 30 bp, Artificial Sequence
  Synthetic oligonucleotide
acctttcccgcagtcagatcgagagccatt

SEQ ID NO: 461168 - DNA, 30 bp, Artificial Sequence
  Synthetic oligonucleotide
gtctgggatctggttggtacccgagccatt

SEQ ID NO: 461169 - DNA, 30 bp, Artificial Sequence
  Synthetic oligonucleotide
tgaaatgggccgcataacgcttgcgccatt

SEQ ID NO: 461170 - DNA, 30 bp, Artificial Sequence
  Synthetic oligonucleotide
cattgctgaaggaaaaatacttcggccatt

SEQ ID NO: 461171 - DNA, 30 bp, Artificial Sequence
  Synthetic oligonucleotide
gagtgggatcattgccggactaatgccatt

SEQ ID NO: 461172 - DNA, 30 bp, Artificial Sequence
  Synthetic oligonucleotide
atggtagagggattttggcacggtgccatt

SEQ ID NO: 461173 - DNA, 30 bp, Artificial Sequence
  Synthetic oligonucleotide
aactcataagtcaccatacggaactccatt

SEQ ID NO: 461174 - DNA, 30 bp, Artificial Sequence
  Synthetic oligonucleotide
tccggcagaaatagatgcccgccctccatt

SEQ ID NO: 461175 - DNA, 30 bp, Artificial Sequence
  Synthetic oligonucleotide
tacaagcttacgccggttacatcctccatt

SEQ ID NO: 461176 - DNA, 30 bp, Artificial Sequence
  Synthetic oligonucleotide
ctgtatggacccctccaattgaagtccatt

SEQ ID NO: 461177 - DNA, 30 bp, Artificial Sequence
  Synthetic oligonucleotide
attgccctttaagaagggaacgggtccatt

SEQ ID NO: 461178 - DNA, 30 bp, Artificial Sequence
  Synthetic oligonucleotide
atggaaaaggtggactctgtcttttccatt

SEQ ID NO: 461179 - DNA, 30 bp, Artificial Sequence
  Synthetic oligonucleotide
gtctagacgcgagtagtttcctaaagcatt

SEQ ID NO: 461180 - DNA, 30 bp, Artificial Sequence
  Synthetic oligonucleotide
tcatacgatttgttggcaggggccagcatt

SEQ ID NO: 461181 - DNA, 30 bp, Artificial Sequence
  Synthetic oligonucleotide
gtcgtatttccatatcagtgcggcagcatt

SEQ ID NO: 461182 - DNA, 30 bp, Artificial Sequence
  Synthetic oligonucleotide
acccacgtaaaggcgattgacctcagcatt

SEQ ID NO: 461183 - DNA, 30 bp, Artificial Sequence
  Synthetic oligonucleotide
cagccctcatttaactgcggcaggagcatt

SEQ ID NO: 461184 - DNA, 30 bp, Artificial Sequence
  Synthetic oligonucleotide
gtagttctaccctgtccggaagaacgcatt

SEQ ID NO: 461185 - DNA, 30 bp, Artificial Sequence
  Synthetic oligonucleotide
cagcaagaggtgacaagtgtcggccgcatt

SEQ ID NO: 461186 - DNA, 30 bp, Artificial Sequence
  Synthetic oligonucleotide
actatttttcctgcgattcaatagcgcatt

SEQ ID NO: 461187 - DNA, 30 bp, Artificial Sequence
  Synthetic oligonucleotide
gcgccccgtgaccttagccttgatcgcatt

SEQ ID NO: 461188 - DNA, 30 bp, Artificial Sequence
  Synthetic oligonucleotide
ggccggctcaccctccatttaaaaggcatt

SEQ ID NO: 461189 - DNA, 30 bp, Artificial Sequence
  Synthetic oligonucleotide
aaaagggagctgaatcagacatgaggcatt

SEQ ID NO: 461190 - DNA, 30 bp, Artificial Sequence
  Synthetic oligonucleotide
actgttgttcagaagcatctacgcggcatt

SEQ ID NO: 461191 - DNA, 30 bp, Artificial Sequence
  Synthetic oligonucleotide
ttgatgagctagcaacccgcttgcggcatt

SEQ ID NO: 461192 - DNA, 30 bp, Artificial Sequence
  Synthetic oligonucleotide
agaacattgctatcaatagaagtcggcatt

SEQ ID NO: 461193 - DNA, 29 bp, Artificial Sequence
  Synthetic oligonucleotide
gagtttaaggcaaatagtacaggggcatt

SEQ ID NO: 461194 - DNA, 30 bp, Artificial Sequence
  Synthetic oligonucleotide
ttgtaatgcgccctcccgcagagtggcatt

SEQ ID NO: 461195 - DNA, 30 bp, Artificial Sequence
  Synthetic oligonucleotide
agattcatatgagtcgatacgtaatgcatt

SEQ ID NO: 461196 - DNA, 30 bp, Artificial Sequence
  Synthetic oligonucleotide
ttgggagacacaggtcaccggccatgcatt

SEQ ID NO: 461197 - DNA, 30 bp, Artificial Sequence
  Synthetic oligonucleotide
atgggctaaggttggcttcttttctgcatt

SEQ ID NO: 461198 - DNA, 30 bp, Artificial Sequence
  Synthetic oligonucleotide
ctcttagacatcctgtagcccaagtgcatt

SEQ ID NO: 461199 - DNA, 30 bp, Artificial Sequence
  Synthetic oligonucleotide
tgaccggtcccgagtactcctttgtgcatt

SEQ ID NO: 461200 - DNA, 30 bp, Artificial Sequence
  Synthetic oligonucleotide
gctagcgcggttggcgcagactgttgcatt

SEQ ID NO: 461201 - DNA, 30 bp, Artificial Sequence
  Synthetic oligonucleotide
atacgacacagttccctgatgctaatcatt

SEQ ID NO: 461202 - DNA, 30 bp, Artificial Sequence
  Synthetic oligonucleotide
agaagaatcttttcctgtttaaccatcatt

SEQ ID NO: 461203 - DNA, 30 bp, Artificial Sequence
  Synthetic oligonucleotide
gacttgtcaagagttcctgaagggatcatt

SEQ ID NO: 461204 - DNA, 30 bp, Artificial Sequence
  Synthetic oligonucleotide
cagtcagaggcagttgcgttttggatcatt

SEQ ID NO: 461205 - DNA, 30 bp, Artificial Sequence
  Synthetic oligonucleotide
ctacccattgataggtgaagcactatcatt

SEQ ID NO: 461206 - DNA, 30 bp, Artificial Sequence
  Synthetic oligonucleotide
atgaattggtggccccaaacccttatcatt

SEQ ID NO: 461207 - DNA, 30 bp, Artificial Sequence
  Synthetic oligonucleotide
aaagttgtgtttacggatccttcactcatt

SEQ ID NO: 461208 - DNA, 30 bp, Artificial Sequence
  Synthetic oligonucleotide
gtacactcgtctttacgcaaaatactcatt

SEQ ID NO: 461209 - DNA, 30 bp, Artificial Sequence
  Synthetic oligonucleotide
gttagtggtaagaacctattggtactcatt

SEQ ID NO: 461210 - DNA, 30 bp, Artificial Sequence
  Synthetic oligonucleotide
cattataggctctgattgtaattcctcatt

SEQ ID NO: 461211 - DNA, 30 bp, Artificial Sequence
  Synthetic oligonucleotide
ctattatagatgtcctgagtcaggctcatt

SEQ ID NO: 461212 - DNA, 30 bp, Artificial Sequence
  Synthetic oligonucleotide
cagtacactgcaacttccgcgttgctcatt

SEQ ID NO: 461213 - DNA, 30 bp, Artificial Sequence
  Synthetic oligonucleotide
caccgatagtgtagcaggtgggatctcatt

SEQ ID NO: 461214 - DNA, 30 bp, Artificial Sequence
  Synthetic oligonucleotide
gctgaatgcccagtattatctagtctcatt

SEQ ID NO: 461215 - DNA, 30 bp, Artificial Sequence
  Synthetic oligonucleotide
atgactaagtgctacctacggtgtctcatt

SEQ ID NO: 461216 - DNA, 30 bp, Artificial Sequence
  Synthetic oligonucleotide
gcaacttactcaaggtcccagattctcatt

SEQ ID NO: 461217 - DNA, 30 bp, Artificial Sequence
  Synthetic oligonucleotide
tttcatccttcttatccgtataccgtcatt

SEQ ID NO: 461218 - DNA, 30 bp, Artificial Sequence
  Synthetic oligonucleotide
ggctgcaaaagcaacagaacggaggtcatt

SEQ ID NO: 461219 - DNA, 30 bp, Artificial Sequence
  Synthetic oligonucleotide
gggtgggcaatctaaggctagagggtcatt

SEQ ID NO: 461220 - DNA, 30 bp, Artificial Sequence
  Synthetic oligonucleotide
gtccaacggacgacatgcattgtggtcatt

SEQ ID NO: 461221 - DNA, 30 bp, Artificial Sequence
  Synthetic oligonucleotide
gtagaagcgcgcggcctcacccgtgtcatt

SEQ ID NO: 461222 - DNA, 30 bp, Artificial Sequence
  Synthetic oligonucleotide
agtctacggcaatattggtctcttgtcatt

SEQ ID NO: 461223 - DNA, 30 bp, Artificial Sequence
  Synthetic oligonucleotide
aaagatggagcggaagaagactcattcatt

SEQ ID NO: 461224 - DNA, 30 bp, Artificial Sequence
  Synthetic oligonucleotide
ggaaaagcatttggtctcactatcttcatt

SEQ ID NO: 461225 - DNA, 30 bp, Artificial Sequence
  Synthetic oligonucleotide
ggtttgggtaaattataactattcttcatt

SEQ ID NO: 461226 - DNA, 30 bp, Artificial Sequence
  Synthetic oligonucleotide
cacacatcgcagtgatgcattcagttcatt

SEQ ID NO: 461227 - DNA, 30 bp, Artificial Sequence
  Synthetic oligonucleotide
ctcaaaagattctcttgaagtgtgttcatt

SEQ ID NO: 461228 - DNA, 30 bp, Artificial Sequence
  Synthetic oligonucleotide
aggtatcacatgatttacgcagatttcatt

SEQ ID NO: 461229 - DNA, 30 bp, Artificial Sequence
  Synthetic oligonucleotide
ttggtgtttttttattagacagctttcatt

SEQ ID NO: 461230 - DNA, 30 bp, Artificial Sequence
  Synthetic oligonucleotide
tgggttcctaacggactggtaattttcatt

SEQ ID NO: 461231 - DNA, 30 bp, Artificial Sequence
  Synthetic oligonucleotide
aacatatgtttcccataggaaaccaagatt

SEQ ID NO: 461232 - DNA, 30 bp, Artificial Sequence
  Synthetic oligonucleotide
ataaagtttagggagacgggaactaagatt

SEQ ID NO: 461233 - DNA, 30 bp, Artificial Sequence
  Synthetic oligonucleotide
ttaaaaattttcaacccgcaacgtaagatt

SEQ ID NO: 461234 - DNA, 30 bp, Artificial Sequence
  Synthetic oligonucleotide
gtttgcacgtcatgttgttagggtaagatt

SEQ ID NO: 461235 - DNA, 30 bp, Artificial Sequence
  Synthetic oligonucleotide
gacttgtgtgctgtacttgcgacacagatt

SEQ ID NO: 461236 - DNA, 30 bp, Artificial Sequence
  Synthetic oligonucleotide
gagtccgctccctctcccacgatagagatt

SEQ ID NO: 461237 - DNA, 30 bp, Artificial Sequence
  Synthetic oligonucleotide
gccttaatggattacgtggcctacgagatt

SEQ ID NO: 461238 - DNA, 30 bp, Artificial Sequence
  Synthetic oligonucleotide
ggcaaccgtgcagtgaggtgctccgagatt

SEQ ID NO: 461239 - DNA, 30 bp, Artificial Sequence
  Synthetic oligonucleotide
tccattacgttgcattaagacggcgagatt

SEQ ID NO: 461240 - DNA, 30 bp, Artificial Sequence
  Synthetic oligonucleotide
tttggatttgctttttgacctcaggagatt

SEQ ID NO: 461241 - DNA, 30 bp, Artificial Sequence
  Synthetic oligonucleotide
tctcctttgaggtctgagtctgaggagatt

SEQ ID NO: 461242 - DNA, 30 bp, Artificial Sequence
  Synthetic oligonucleotide
aattgtcgcccaatatcaatatgggagatt

SEQ ID NO: 461243 - DNA, 30 bp, Artificial Sequence
  Synthetic oligonucleotide
gggcagaatcttaggccgcggcatgagatt

SEQ ID NO: 461244 - DNA, 30 bp, Artificial Sequence
  Synthetic oligonucleotide
cagaaaataatacgcgtataggttgagatt

SEQ ID NO: 461245 - DNA, 30 bp, Artificial Sequence
  Synthetic oligonucleotide
cgttacttactatcattcccttttgagatt

SEQ ID NO: 461246 - DNA, 30 bp, Artificial Sequence
  Synthetic oligonucleotide
tcaaagccactgacgagagcaaactagatt

SEQ ID NO: 461247 - DNA, 30 bp, Artificial Sequence
  Synthetic oligonucleotide
gcaggaaaatatctgtctaaccactagatt

SEQ ID NO: 461248 - DNA, 30 bp, Artificial Sequence
  Synthetic oligonucleotide
tagtacgcgctttgggggtttacctagatt

SEQ ID NO: 461249 - DNA, 30 bp, Artificial Sequence
  Synthetic oligonucleotide
gtttgaacaaccgttcaagacgtctagatt

SEQ ID NO: 461250 - DNA, 30 bp, Artificial Sequence
  Synthetic oligonucleotide
gacggcggtgtaaacatgctaacgtagatt

SEQ ID NO: 461251 - DNA, 30 bp, Artificial Sequence
  Synthetic oligonucleotide
tcgtgttcttttccggttccatattagatt

SEQ ID NO: 461252 - DNA, 30 bp, Artificial Sequence
  Synthetic oligonucleotide
tacgctgcgattccaaccgggtgttagatt

SEQ ID NO: 461253 - DNA, 30 bp, Artificial Sequence
  Synthetic oligonucleotide
gttgcgtcgtttagcaccatattttagatt

SEQ ID NO: 461254 - DNA, 30 bp, Artificial Sequence
  Synthetic oligonucleotide
atcctcagaaaccgaggcactacaacgatt

SEQ ID NO: 461255 - DNA, 30 bp, Artificial Sequence
  Synthetic oligonucleotide
agaaagattttgaagtgtcactcaacgatt

SEQ ID NO: 461256 - DNA, 30 bp, Artificial Sequence
  Synthetic oligonucleotide
cttgtagagttgtgctggccctcaacgatt

SEQ ID NO: 461257 - DNA, 30 bp, Artificial Sequence
  Synthetic oligonucleotide
gctttctaatcgacgccgttccggacgatt

SEQ ID NO: 461258 - DNA, 30 bp, Artificial Sequence
  Synthetic oligonucleotide
aaaacttaactttaagtaattcatacgatt

SEQ ID NO: 461259 - DNA, 30 bp, Artificial Sequence
  Synthetic oligonucleotide
ttgtttagtcggggtgttgaaattacgatt

SEQ ID NO: 461260 - DNA, 30 bp, Artificial Sequence
  Synthetic oligonucleotide
gtgctgtgagcacctctacgacgaccgatt

SEQ ID NO: 461261 - DNA, 30 bp, Artificial Sequence
  Synthetic oligonucleotide
gcgatagagagtctgcgtacaagcccgatt

SEQ ID NO: 461262 - DNA, 30 bp, Artificial Sequence
  Synthetic oligonucleotide
ggtccggcccgtaaagttttatagccgatt

SEQ ID NO: 461263 - DNA, 30 bp, Artificial Sequence
  Synthetic oligonucleotide
ggtggactttagtggcgcctgacgccgatt

SEQ ID NO: 461264 - DNA, 30 bp, Artificial Sequence
  Synthetic oligonucleotide
attctgagccctggagtccgcgggccgatt

SEQ ID NO: 461265 - DNA, 30 bp, Artificial Sequence
  Synthetic oligonucleotide
aatccgagtactgtgtatacgtggccgatt

SEQ ID NO: 461266 - DNA, 31 bp, Artificial Sequence
  Synthetic oligonucleotide
cgaaagctacctgagtagctcgattccgatt

SEQ ID NO: 461267 - DNA, 30 bp, Artificial Sequence
  Synthetic oligonucleotide
tccaagtcaatggtaatacccgttccgatt

SEQ ID NO: 461268 - DNA, 30 bp, Artificial Sequence
  Synthetic oligonucleotide
tgcatcaaacgcgggagcctacgagcgatt

SEQ ID NO: 461269 - DNA, 30 bp, Artificial Sequence
  Synthetic oligonucleotide
atctagccgtcacaatagcataacgcgatt

SEQ ID NO: 461270 - DNA, 30 bp, Artificial Sequence
  Synthetic oligonucleotide
cgcgttcgcgctgaaaggaccgccgcgatt

SEQ ID NO: 461271 - DNA, 30 bp, Artificial Sequence
  Synthetic oligonucleotide
ctgtcgtgcacaacgctactgcaatcgatt

SEQ ID NO: 461272 - DNA, 30 bp, Artificial Sequence
  Synthetic oligonucleotide
cttttgcgttaccgcacagagtaatcgatt

SEQ ID NO: 461273 - DNA, 30 bp, Artificial Sequence
  Synthetic oligonucleotide
gaatatctgtgcacgtggatgcgatcgatt

SEQ ID NO: 461274 - DNA, 30 bp, Artificial Sequence
  Synthetic oligonucleotide
ccacgaggtgagagcccgtttggatcgatt

SEQ ID NO: 461275 - DNA, 30 bp, Artificial Sequence
  Synthetic oligonucleotide
taaaaatctttctagaacgtccactcgatt

SEQ ID NO: 461276 - DNA, 30 bp, Artificial Sequence
  Synthetic oligonucleotide
ggtttgctaatagttccgccaagctcgatt

SEQ ID NO: 461277 - DNA, 30 bp, Artificial Sequence
  Synthetic oligonucleotide
tctgtaaatcggatgtaaggtttctcgatt

SEQ ID NO: 461278 - DNA, 30 bp, Artificial Sequence
  Synthetic oligonucleotide
ccgtctctggggtcgccaacttggtcgatt

SEQ ID NO: 461279 - DNA, 30 bp, Artificial Sequence
  Synthetic oligonucleotide
ttttgattgctacacgatatccattcgatt

SEQ ID NO: 461280 - DNA, 30 bp, Artificial Sequence
  Synthetic oligonucleotide
ccccggtcgtttgctcttatcaacaggatt

SEQ ID NO: 461281 - DNA, 30 bp, Artificial Sequence
  Synthetic oligonucleotide
caactatttatgcatatggataacaggatt

SEQ ID NO: 461282 - DNA, 30 bp, Artificial Sequence
  Synthetic oligonucleotide
taaaccccaaaggacagcggttgcaggatt

SEQ ID NO: 461283 - DNA, 30 bp, Artificial Sequence
  Synthetic oligonucleotide
gcactcactcaggcgtcggcaaagaggatt

SEQ ID NO: 461284 - DNA, 30 bp, Artificial Sequence
  Synthetic oligonucleotide
gtcggcctcgcagcgtccgcgatgaggatt

SEQ ID NO: 461285 - DNA, 30 bp, Artificial Sequence
  Synthetic oligonucleotide
gaagtttgtaagtctgaccatttgaggatt

SEQ ID NO: 461286 - DNA, 30 bp, Artificial Sequence
  Synthetic oligonucleotide
aggcaggacaaaccctttagggataggatt

SEQ ID NO: 461287 - DNA, 30 bp, Artificial Sequence
  Synthetic oligonucleotide
caactatctatccatctgttacgtaggatt

SEQ ID NO: 461288 - DNA, 30 bp, Artificial Sequence
  Synthetic oligonucleotide
gttctcatcactaaggttctctgtaggatt

SEQ ID NO: 461289 - DNA, 30 bp, Artificial Sequence
  Synthetic oligonucleotide
cgtgcggcgaatcccttttgagaacggatt

SEQ ID NO: 461290 - DNA, 30 bp, Artificial Sequence
  Synthetic oligonucleotide
actaatataacgatgtgctagtaacggatt

SEQ ID NO: 461291 - DNA, 30 bp, Artificial Sequence
  Synthetic oligonucleotide
tggtgcctaaataggcggagtgcacggatt

SEQ ID NO: 461292 - DNA, 30 bp, Artificial Sequence
  Synthetic oligonucleotide
cagttttatggagcagtcgagtaccggatt

SEQ ID NO: 461293 - DNA, 30 bp, Artificial Sequence
  Synthetic oligonucleotide
gacataggctggcacgcccaatagcggatt

SEQ ID NO: 461294 - DNA, 30 bp, Artificial Sequence
  Synthetic oligonucleotide
acatagaatagcaagatatgggggcggatt

SEQ ID NO: 461295 - DNA, 30 bp, Artificial Sequence
  Synthetic oligonucleotide
atgggcttcaacagcggcatatgcgggatt

SEQ ID NO: 461296 - DNA, 30 bp, Artificial Sequence
  Synthetic oligonucleotide
ctgtgaattggttgcgcaagtgtcgggatt

SEQ ID NO: 461297 - DNA, 30 bp, Artificial Sequence
  Synthetic oligonucleotide
gtaggcaggtggcgaaaggtcacggggatt

SEQ ID NO: 461298 - DNA, 30 bp, Artificial Sequence
  Synthetic oligonucleotide
ggcctcgccgtcgcggaccgggcggggatt

SEQ ID NO: 461299 - DNA, 30 bp, Artificial Sequence
  Synthetic oligonucleotide
catggcgagatgcaacgggcgggggggatt

SEQ ID NO: 461300 - DNA, 30 bp, Artificial Sequence
  Synthetic oligonucleotide
accaaatagcacaccaggacagtggggatt

SEQ ID NO: 461301 - DNA, 30 bp, Artificial Sequence
  Synthetic oligonucleotide
aaaggttgcctgttagaagaagttgggatt

SEQ ID NO: 461302 - DNA, 30 bp, Artificial Sequence
  Synthetic oligonucleotide
ttccatggaccaaggcgtcgcacatggatt

SEQ ID NO: 461303 - DNA, 30 bp, Artificial Sequence
  Synthetic oligonucleotide
ttttaccagccattcgcgttggcatggatt

SEQ ID NO: 461304 - DNA, 30 bp, Artificial Sequence
  Synthetic oligonucleotide
tttctgccccgagccaccacttcatggatt

SEQ ID NO: 461305 - DNA, 30 bp, Artificial Sequence
  Synthetic oligonucleotide
aatagtcctcgtgtacacgacatatggatt

SEQ ID NO: 461306 - DNA, 30 bp, Artificial Sequence
  Synthetic oligonucleotide
aatgtaccggtattggtataggactggatt

SEQ ID NO: 461307 - DNA, 30 bp, Artificial Sequence
  Synthetic oligonucleotide
caatttcagtcgtttacactgtactggatt

SEQ ID NO: 461308 - DNA, 30 bp, Artificial Sequence
  Synthetic oligonucleotide
ggtcccagactgcacggtagggtctggatt

SEQ ID NO: 461309 - DNA, 30 bp, Artificial Sequence
  Synthetic oligonucleotide
cgaaatcctgtcttttcaacctagtggatt

SEQ ID NO: 461310 - DNA, 30 bp, Artificial Sequence
  Synthetic oligonucleotide
ctatcagtgacaagactggcgtagtggatt

SEQ ID NO: 461311 - DNA, 30 bp, Artificial Sequence
  Synthetic oligonucleotide
tactttgcacctgtattatgcacgtggatt

SEQ ID NO: 461312 - DNA, 30 bp, Artificial Sequence
  Synthetic oligonucleotide
tcaatatctctattttcaatggggtggatt

SEQ ID NO: 461313 - DNA, 30 bp, Artificial Sequence
  Synthetic oligonucleotide
atattagcctacaaagcgataaattggatt

SEQ ID NO: 461314 - DNA, 30 bp, Artificial Sequence
  Synthetic oligonucleotide
attgcaaggtcacagcaacttgattggatt

SEQ ID NO: 461315 - DNA, 30 bp, Artificial Sequence
  Synthetic oligonucleotide
gtgctagaccggacacagcgacgttggatt

SEQ ID NO: 461316 - DNA, 30 bp, Artificial Sequence
  Synthetic oligonucleotide
ccgtcaattgcttatagccattgttggatt

SEQ ID NO: 461317 - DNA, 30 bp, Artificial Sequence
  Synthetic oligonucleotide
aatgcgtcgagcgaaaaacatagaatgatt

SEQ ID NO: 461318 - DNA, 30 bp, Artificial Sequence
  Synthetic oligonucleotide
aaaaatgctcatgcttcgccatgaatgatt

SEQ ID NO: 461319 - DNA, 30 bp, Artificial Sequence
  Synthetic oligonucleotide
ggaattgatgaacactgtgcttgaatgatt

SEQ ID NO: 461320 - DNA, 30 bp, Artificial Sequence
  Synthetic oligonucleotide
cccgatcataagatcgtccagataatgatt

SEQ ID NO: 461321 - DNA, 30 bp, Artificial Sequence
  Synthetic oligonucleotide
cgtgctaaagatctatactttaggatgatt

SEQ ID NO: 461322 - DNA, 30 bp, Artificial Sequence
  Synthetic oligonucleotide
cttccgcgactagtgcctagtcctatgatt

SEQ ID NO: 461323 - DNA, 30 bp, Artificial Sequence
  Synthetic oligonucleotide
gcaagaccaatctcttttcgaattatgatt

SEQ ID NO: 461324 - DNA, 30 bp, Artificial Sequence
  Synthetic oligonucleotide
gaaatttatctacatagaagggttatgatt

SEQ ID NO: 461325 - DNA, 30 bp, Artificial Sequence
  Synthetic oligonucleotide
cagttcggtattcgggccttcacactgatt

SEQ ID NO: 461326 - DNA, 30 bp, Artificial Sequence
  Synthetic oligonucleotide
tacaaggatatgacttcggtagtactgatt

SEQ ID NO: 461327 - DNA, 30 bp, Artificial Sequence
  Synthetic oligonucleotide
aatgaaaatagtaagcttagtgtactgatt

SEQ ID NO: 461328 - DNA, 30 bp, Artificial Sequence
  Synthetic oligonucleotide
tacctccaaaggccttgcagatccctgatt

SEQ ID NO: 461329 - DNA, 30 bp, Artificial Sequence
  Synthetic oligonucleotide
cgtggagaatccaacccagaaatgctgatt

SEQ ID NO: 461330 - DNA, 30 bp, Artificial Sequence
  Synthetic oligonucleotide
gattgcgacaggcaacgccgccgtctgatt

SEQ ID NO: 461331 - DNA, 30 bp, Artificial Sequence
  Synthetic oligonucleotide
gctagttatggtttagtttctattctgatt

SEQ ID NO: 461332 - DNA, 30 bp, Artificial Sequence
  Synthetic oligonucleotide
gctttggcagcaaccttaggaccagtgatt

SEQ ID NO: 461333 - DNA, 30 bp, Artificial Sequence
  Synthetic oligonucleotide
tcccaatatggcctaacggaccgagtgatt

SEQ ID NO: 461334 - DNA, 30 bp, Artificial Sequence
  Synthetic oligonucleotide
tccccactgcatctgtaacaggacgtgatt

SEQ ID NO: 461335 - DNA, 30 bp, Artificial Sequence
  Synthetic oligonucleotide
tttacgcataaggcaccggtccaggtgatt

SEQ ID NO: 461336 - DNA, 30 bp, Artificial Sequence
  Synthetic oligonucleotide
catccaccggtgctgagtaatccggtgatt

SEQ ID NO: 461337 - DNA, 30 bp, Artificial Sequence
  Synthetic oligonucleotide
atacgaggttctcttagttatctggtgatt

SEQ ID NO: 461338 - DNA, 30 bp, Artificial Sequence
  Synthetic oligonucleotide
tctattgttgacgtcagacttaatgtgatt

SEQ ID NO: 461339 - DNA, 30 bp, Artificial Sequence
  Synthetic oligonucleotide
aagtgtattattgttttcactgatgtgatt

SEQ ID NO: 461340 - DNA, 30 bp, Artificial Sequence
  Synthetic oligonucleotide
taagaactattatatctagggggtgtgatt

SEQ ID NO: 461341 - DNA, 30 bp, Artificial Sequence
  Synthetic oligonucleotide
ctttcttcggaaagctggtctacattgatt

SEQ ID NO: 461342 - DNA, 30 bp, Artificial Sequence
  Synthetic oligonucleotide
aagcaatatcaaccatagtaccgcttgatt

SEQ ID NO: 461343 - DNA, 30 bp, Artificial Sequence
  Synthetic oligonucleotide
aatgctaactgtcagtacattcgcttgatt

SEQ ID NO: 461344 - DNA, 30 bp, Artificial Sequence
  Synthetic oligonucleotide
acattgactatggtttgaacgatcttgatt

SEQ ID NO: 461345 - DNA, 30 bp, Artificial Sequence
  Synthetic oligonucleotide
tgtctcacgcgcccttctgttgtcttgatt

SEQ ID NO: 461346 - DNA, 30 bp, Artificial Sequence
  Synthetic oligonucleotide
tgccacagttaggcaccagtaaggttgatt

SEQ ID NO: 461347 - DNA, 30 bp, Artificial Sequence
  Synthetic oligonucleotide
taggccgacgttattattctatggttgatt

SEQ ID NO: 461348 - DNA, 30 bp, Artificial Sequence
  Synthetic oligonucleotide
acaaatcaatagatcaattgttggttgatt

SEQ ID NO: 461349 - DNA, 30 bp, Artificial Sequence
  Synthetic oligonucleotide
ccggcgtatgtattttctagacatttgatt

SEQ ID NO: 461350 - DNA, 30 bp, Artificial Sequence
  Synthetic oligonucleotide
gctcccgcataacgagttgtctttttgatt

SEQ ID NO: 461351 - DNA, 30 bp, Artificial Sequence
  Synthetic oligonucleotide
tgtaaaccgtcggaagtcgccaaaaatatt

SEQ ID NO: 461352 - DNA, 30 bp, Artificial Sequence
  Synthetic oligonucleotide
tatgtcacggaggggtaatagtgaaatatt

SEQ ID NO: 461353 - DNA, 30 bp, Artificial Sequence
  Synthetic oligonucleotide
aaggagtgctccagttgccgcgacaatatt

SEQ ID NO: 461354 - DNA, 30 bp, Artificial Sequence
  Synthetic oligonucleotide
ttataaagcccggctatgatagcgaatatt

SEQ ID NO: 461355 - DNA, 30 bp, Artificial Sequence
  Synthetic oligonucleotide
gatagttaggctattataccccggaatatt

SEQ ID NO: 461356 - DNA, 30 bp, Artificial Sequence
  Synthetic oligonucleotide
ggttataagttctcaatacaaactaatatt

SEQ ID NO: 461357 - DNA, 30 bp, Artificial Sequence
  Synthetic oligonucleotide
taggacgcaggaatgttgtgtactaatatt

SEQ ID NO: 461358 - DNA, 30 bp, Artificial Sequence
  Synthetic oligonucleotide
ctttactctgaagtatcgagcgaacatatt

SEQ ID NO: 461359 - DNA, 30 bp, Artificial Sequence
  Synthetic oligonucleotide
tcgttaaatcttagtcgttcgtaacatatt

SEQ ID NO: 461360 - DNA, 30 bp, Artificial Sequence
  Synthetic oligonucleotide
taaggaaacatgtcattcgcaggacatatt

SEQ ID NO: 461361 - DNA, 30 bp, Artificial Sequence
  Synthetic oligonucleotide
acgttcgctgctcagtcgaggctacatatt

SEQ ID NO: 461362 - DNA, 30 bp, Artificial Sequence
  Synthetic oligonucleotide
tccgtgcttggcgaggtggccaaccatatt

SEQ ID NO: 461363 - DNA, 30 bp, Artificial Sequence
  Synthetic oligonucleotide
gcaaggtatgtcttgaataataaccatatt

SEQ ID NO: 461364 - DNA, 30 bp, Artificial Sequence
  Synthetic oligonucleotide
cgcgtttaaaaatttgaagatctccatatt

SEQ ID NO: 461365 - DNA, 30 bp, Artificial Sequence
  Synthetic oligonucleotide
ccaatttgacaatgatttacagtccatatt

SEQ ID NO: 461366 - DNA, 30 bp, Artificial Sequence
  Synthetic oligonucleotide
ttcagccacatttactggatttagcatatt

SEQ ID NO: 461367 - DNA, 30 bp, Artificial Sequence
  Synthetic oligonucleotide
tactccgccgtcttcttgtcaaaagatatt

SEQ ID NO: 461368 - DNA, 30 bp, Artificial Sequence
  Synthetic oligonucleotide
agatcatataataataattcctaagatatt

SEQ ID NO: 461369 - DNA, 30 bp, Artificial Sequence
  Synthetic oligonucleotide
ttacctggtctggaagtggtaccagatatt

SEQ ID NO: 461370 - DNA, 30 bp, Artificial Sequence
  Synthetic oligonucleotide
gtagccggtacttgggacatggtagatatt

SEQ ID NO: 461371 - DNA, 30 bp, Artificial Sequence
  Synthetic oligonucleotide
gtagcaatgtttgcgacgtagaacgatatt

SEQ ID NO: 461372 - DNA, 30 bp, Artificial Sequence
  Synthetic oligonucleotide
gttatacgtaaaatctgcacatacgatatt

SEQ ID NO: 461373 - DNA, 30 bp, Artificial Sequence
  Synthetic oligonucleotide
aatctcaactcgagtggatacagcgatatt

SEQ ID NO: 461374 - DNA, 30 bp, Artificial Sequence
  Synthetic oligonucleotide
cgcatttatcgcgcctggtaggtcgatatt

SEQ ID NO: 461375 - DNA, 30 bp, Artificial Sequence
  Synthetic oligonucleotide
attttatgactacatttgttttcggatatt

SEQ ID NO: 461376 - DNA, 30 bp, Artificial Sequence
  Synthetic oligonucleotide
atgtcggagactgactacctgcatgatatt

SEQ ID NO: 461377 - DNA, 30 bp, Artificial Sequence
  Synthetic oligonucleotide
gacagtgctgcaaagtcgccctatgatatt

SEQ ID NO: 461378 - DNA, 30 bp, Artificial Sequence
  Synthetic oligonucleotide
gataatctattatcagatgaacgtgatatt

SEQ ID NO: 461379 - DNA, 30 bp, Artificial Sequence
  Synthetic oligonucleotide
gcggctgcggttcgtgcagccattgatatt

SEQ ID NO: 461380 - DNA, 30 bp, Artificial Sequence
  Synthetic oligonucleotide
gaggtctgcaacccccagcatattgatatt

SEQ ID NO: 461381 - DNA, 30 bp, Artificial Sequence
  Synthetic oligonucleotide
cgaaacgcagtacagcaacagcttgatatt

SEQ ID NO: 461382 - DNA, 30 bp, Artificial Sequence
  Synthetic oligonucleotide
catcctgaggcttctcccactggatatatt

SEQ ID NO: 461383 - DNA, 30 bp, Artificial Sequence
  Synthetic oligonucleotide
ggcatcccaattagacgggtaatatatatt

SEQ ID NO: 461384 - DNA, 30 bp, Artificial Sequence
  Synthetic oligonucleotide
agaccacgattcggaatagatttatatatt

SEQ ID NO: 461385 - DNA, 30 bp, Artificial Sequence
  Synthetic oligonucleotide
cggtatagtcaagcctcgagtaagtatatt

SEQ ID NO: 461386 - DNA, 30 bp, Artificial Sequence
  Synthetic oligonucleotide
tacacttgatgataagtcggtaattatatt

SEQ ID NO: 461387 - DNA, 30 bp, Artificial Sequence
  Synthetic oligonucleotide
atggcattagtttctagtctcacttatatt

SEQ ID NO: 461388 - DNA, 30 bp, Artificial Sequence
  Synthetic oligonucleotide
cggttgtttactccgacaaacatttatatt

SEQ ID NO: 461389 - DNA, 30 bp, Artificial Sequence
  Synthetic oligonucleotide
ccaatttcccctggtggatccatttatatt

SEQ ID NO: 461390 - DNA, 30 bp, Artificial Sequence
  Synthetic oligonucleotide
cggaaataaataccgtaggaactttatatt

SEQ ID NO: 461391 - DNA, 30 bp, Artificial Sequence
  Synthetic oligonucleotide
cccttaacgtgagtttatacactttatatt

SEQ ID NO: 461392 - DNA, 30 bp, Artificial Sequence
  Synthetic oligonucleotide
aacctaggaacgttgagagcactttatatt

SEQ ID NO: 461393 - DNA, 30 bp, Artificial Sequence
  Synthetic oligonucleotide
agaatccgaatctgagtatcgttttatatt

SEQ ID NO: 461394 - DNA, 30 bp, Artificial Sequence
  Synthetic oligonucleotide
atcatctgtaatcgtattatatcaactatt

SEQ ID NO: 461395 - DNA, 30 bp, Artificial Sequence
  Synthetic oligonucleotide
ataaggtgtgtatagcagacctcaactatt

SEQ ID NO: 461396 - DNA, 30 bp, Artificial Sequence
  Synthetic oligonucleotide
cactccaccagcggattactagccactatt

SEQ ID NO: 461397 - DNA, 31 bp, Artificial Sequence
  Synthetic oligonucleotide
ccttcctatctaggcagagatcatcactatt

SEQ ID NO: 461398 - DNA, 30 bp, Artificial Sequence
  Synthetic oligonucleotide
gatatagcgactcggtcacatgggactatt

SEQ ID NO: 461399 - DNA, 30 bp, Artificial Sequence
  Synthetic oligonucleotide
aatagtaattggggtcgcatgagtactatt

SEQ ID NO: 461400 - DNA, 30 bp, Artificial Sequence
  Synthetic oligonucleotide
gataggtgacggggtctccgttcccctatt

SEQ ID NO: 461401 - DNA, 30 bp, Artificial Sequence
  Synthetic oligonucleotide
tgtaaggtcccattgcaagatggccctatt

SEQ ID NO: 461402 - DNA, 30 bp, Artificial Sequence
  Synthetic oligonucleotide
tgggtccccgacccaggcgcatgccctatt

SEQ ID NO: 461403 - DNA, 30 bp, Artificial Sequence
  Synthetic oligonucleotide
gctcaaactcagagctggacgctccctatt

SEQ ID NO: 461404 - DNA, 30 bp, Artificial Sequence
  Synthetic oligonucleotide
cccgcgatctatcaatgtgatgtgcctatt

SEQ ID NO: 461405 - DNA, 30 bp, Artificial Sequence
  Synthetic oligonucleotide
gacagttcattactttatccagatcctatt

SEQ ID NO: 461406 - DNA, 30 bp, Artificial Sequence
  Synthetic oligonucleotide
tcacagcataggtggtcatcggttcctatt

SEQ ID NO: 461407 - DNA, 30 bp, Artificial Sequence
  Synthetic oligonucleotide
aaagtagctttattgacggataaagctatt

SEQ ID NO: 461408 - DNA, 30 bp, Artificial Sequence
  Synthetic oligonucleotide
ttggttctaaatccacatttgtgagctatt

SEQ ID NO: 461409 - DNA, 30 bp, Artificial Sequence
  Synthetic oligonucleotide
cagggcgtacgatacaggtccgtagctatt

SEQ ID NO: 461410 - DNA, 30 bp, Artificial Sequence
  Synthetic oligonucleotide
tgatctaatacgggggcaattgtcgctatt

SEQ ID NO: 461411 - DNA, 30 bp, Artificial Sequence
  Synthetic oligonucleotide
attaccatgggctcctattgttaggctatt

SEQ ID NO: 461412 - DNA, 30 bp, Artificial Sequence
  Synthetic oligonucleotide
ttattaaataaaaaaaatctattggctatt

SEQ ID NO: 461413 - DNA, 30 bp, Artificial Sequence
  Synthetic oligonucleotide
cctgattgcacatcatctagtactgctatt

SEQ ID NO: 461414 - DNA, 30 bp, Artificial Sequence
  Synthetic oligonucleotide
tcacaacaaagttgagcgtgttctgctatt

SEQ ID NO: 461415 - DNA, 30 bp, Artificial Sequence
  Synthetic oligonucleotide
tagttcgtcccatgaactacccttgctatt

SEQ ID NO: 461416 - DNA, 30 bp, Artificial Sequence
  Synthetic oligonucleotide
tttcgtaaaggcccccaggcggttgctatt

SEQ ID NO: 461417 - DNA, 30 bp, Artificial Sequence
  Synthetic oligonucleotide
aaagaaatccgtaatgatataaaatctatt

SEQ ID NO: 461418 - DNA, 30 bp, Artificial Sequence
  Synthetic oligonucleotide
ggtcttgtacgacattttcacaagtctatt

SEQ ID NO: 461419 - DNA, 30 bp, Artificial Sequence
  Synthetic oligonucleotide
gcaagcttcgtaagtgcggatgagtctatt

SEQ ID NO: 461420 - DNA, 30 bp, Artificial Sequence
  Synthetic oligonucleotide
ctgtcccgaacagttctcacatagtctatt

SEQ ID NO: 461421 - DNA, 30 bp, Artificial Sequence
  Synthetic oligonucleotide
gcatactacttatgtaaggagcggtctatt

SEQ ID NO: 461422 - DNA, 30 bp, Artificial Sequence
  Synthetic oligonucleotide
cgatcgggaacctcttatgggatgtctatt

SEQ ID NO: 461423 - DNA, 30 bp, Artificial Sequence
  Synthetic oligonucleotide
gagaacacttcctccgcataactttctatt

SEQ ID NO: 461424 - DNA, 30 bp, Artificial Sequence
  Synthetic oligonucleotide
gaataggagattgcgtggcgcgtttctatt

SEQ ID NO: 461425 - DNA, 30 bp, Artificial Sequence
  Synthetic oligonucleotide
ttgagggggtttcaacgaagcaaaagtatt

SEQ ID NO: 461426 - DNA, 30 bp, Artificial Sequence
  Synthetic oligonucleotide
tacgtagcaggagtaagaatccaaagtatt

SEQ ID NO: 461427 - DNA, 30 bp, Artificial Sequence
  Synthetic oligonucleotide
acaggcctcaatcgtgaacccccaagtatt

SEQ ID NO: 461428 - DNA, 30 bp, Artificial Sequence
  Synthetic oligonucleotide
gaccgattcgcagtatctacgccaagtatt

SEQ ID NO: 461429 - DNA, 30 bp, Artificial Sequence
  Synthetic oligonucleotide
cttccgttaaataaaatagcgagaagtatt

SEQ ID NO: 461430 - DNA, 30 bp, Artificial Sequence
  Synthetic oligonucleotide
atataaagccagcaaaaaccgataagtatt

SEQ ID NO: 461431 - DNA, 30 bp, Artificial Sequence
  Synthetic oligonucleotide
attccgatgtcaggcctctgaaccagtatt

SEQ ID NO: 461432 - DNA, 30 bp, Artificial Sequence
  Synthetic oligonucleotide
ggtcctaaatacggcaagataaccagtatt

SEQ ID NO: 461433 - DNA, 30 bp, Artificial Sequence
  Synthetic oligonucleotide
acgagattacaggattttacaacgagtatt

SEQ ID NO: 461434 - DNA, 30 bp, Artificial Sequence
  Synthetic oligonucleotide
aatcgctgcagtaagggcgccccgagtatt

SEQ ID NO: 461435 - DNA, 30 bp, Artificial Sequence
  Synthetic oligonucleotide
agggttagggagtaggagggtaggagtatt

SEQ ID NO: 461436 - DNA, 30 bp, Artificial Sequence
  Synthetic oligonucleotide
gaataaggtgaatagccaagacggagtatt

SEQ ID NO: 461437 - DNA, 30 bp, Artificial Sequence
  Synthetic oligonucleotide
gcccattatgacatagggaccatgagtatt

SEQ ID NO: 461438 - DNA, 30 bp, Artificial Sequence
  Synthetic oligonucleotide
cagcttagccattattacgtatctagtatt

SEQ ID NO: 461439 - DNA, 30 bp, Artificial Sequence
  Synthetic oligonucleotide
tatttcgaaaatgctacccgcaaacgtatt

SEQ ID NO: 461440 - DNA, 30 bp, Artificial Sequence
  Synthetic oligonucleotide
atttggtaactaatggcgtttgcccgtatt

SEQ ID NO: 461441 - DNA, 30 bp, Artificial Sequence
  Synthetic oligonucleotide
gtagtaacgcgcaaaactcgtgtccgtatt

SEQ ID NO: 461442 - DNA, 30 bp, Artificial Sequence
  Synthetic oligonucleotide
acttgatcgctctggtcatcgcagcgtatt

SEQ ID NO: 461443 - DNA, 30 bp, Artificial Sequence
  Synthetic oligonucleotide
gcagctagactcgtaggtcaagggcgtatt

SEQ ID NO: 461444 - DNA, 30 bp, Artificial Sequence
  Synthetic oligonucleotide
tgcttcttccatttgttagggaatcgtatt

SEQ ID NO: 461445 - DNA, 30 bp, Artificial Sequence
  Synthetic oligonucleotide
cattgagcgatagcatataaacatcgtatt

SEQ ID NO: 461446 - DNA, 30 bp, Artificial Sequence
  Synthetic oligonucleotide
ttggtatcaggcaagccgcgacatcgtatt

SEQ ID NO: 461447 - DNA, 30 bp, Artificial Sequence
  Synthetic oligonucleotide
aacatacccgtgtaagcgagagatcgtatt

SEQ ID NO: 461448 - DNA, 30 bp, Artificial Sequence
  Synthetic oligonucleotide
aagcatcgacatggccgtacggatcgtatt

SEQ ID NO: 461449 - DNA, 30 bp, Artificial Sequence
  Synthetic oligonucleotide
atttgcggctgcggtctatcacgaggtatt

SEQ ID NO: 461450 - DNA, 30 bp, Artificial Sequence
  Synthetic oligonucleotide
tatacggccaggtttcgtgtcaccggtatt

SEQ ID NO: 461451 - DNA, 30 bp, Artificial Sequence
  Synthetic oligonucleotide
gataggcccagatcgtcattatagggtatt

SEQ ID NO: 461452 - DNA, 30 bp, Artificial Sequence
  Synthetic oligonucleotide
tgcgtcccattacaccagtataggggtatt

SEQ ID NO: 461453 - DNA, 30 bp, Artificial Sequence
  Synthetic oligonucleotide
gacctcagcaaccatgaagcatggggtatt

SEQ ID NO: 461454 - DNA, 30 bp, Artificial Sequence
  Synthetic oligonucleotide
tgaacatagcagccactactgctgggtatt

SEQ ID NO: 461455 - DNA, 30 bp, Artificial Sequence
  Synthetic oligonucleotide
ccaaacaaatctagatataaattgggtatt

SEQ ID NO: 461456 - DNA, 30 bp, Artificial Sequence
  Synthetic oligonucleotide
gcgagggtgaaccgtcggccaaatggtatt

SEQ ID NO: 461457 - DNA, 30 bp, Artificial Sequence
  Synthetic oligonucleotide
ctcgactcaccaccaggctgtaaatgtatt

SEQ ID NO: 461458 - DNA, 30 bp, Artificial Sequence
  Synthetic oligonucleotide
acacgatccatctcggcaagtagatgtatt

SEQ ID NO: 461459 - DNA, 30 bp, Artificial Sequence
  Synthetic oligonucleotide
cggtgctggccacaacttctgagctgtatt

SEQ ID NO: 461460 - DNA, 30 bp, Artificial Sequence
  Synthetic oligonucleotide
ccaggaatcatgctccgtagttcgtgtatt

SEQ ID NO: 461461 - DNA, 30 bp, Artificial Sequence
  Synthetic oligonucleotide
atgatctttctgagaacttatgtgtgtatt

SEQ ID NO: 461462 - DNA, 30 bp, Artificial Sequence
  Synthetic oligonucleotide
attttgtgccattcgatcaaattgtgtatt

SEQ ID NO: 461463 - DNA, 30 bp, Artificial Sequence
  Synthetic oligonucleotide
ctacatgtttcatacagaatcttttgtatt

SEQ ID NO: 461464 - DNA, 30 bp, Artificial Sequence
  Synthetic oligonucleotide
ttcgaaacatcgaggttctagagaattatt

SEQ ID NO: 461465 - DNA, 30 bp, Artificial Sequence
  Synthetic oligonucleotide
gggaactattctacgacgttcctaattatt

SEQ ID NO: 461466 - DNA, 30 bp, Artificial Sequence
  Synthetic oligonucleotide
gatcatctttattcagtaacagtcattatt

SEQ ID NO: 461467 - DNA, 30 bp, Artificial Sequence
  Synthetic oligonucleotide
tgcatatatatagtacgctcgtggattatt

SEQ ID NO: 461468 - DNA, 30 bp, Artificial Sequence
  Synthetic oligonucleotide
gccaatgtgaacagctggggatgtattatt

SEQ ID NO: 461469 - DNA, 30 bp, Artificial Sequence
  Synthetic oligonucleotide
taggcagtttattagagatgcaaacttatt

SEQ ID NO: 461470 - DNA, 30 bp, Artificial Sequence
  Synthetic oligonucleotide
tctcgccctagtaaagggtccgcacttatt

SEQ ID NO: 461471 - DNA, 30 bp, Artificial Sequence
  Synthetic oligonucleotide
ataaacaattgtccttggtgcatacttatt

SEQ ID NO: 461472 - DNA, 30 bp, Artificial Sequence
  Synthetic oligonucleotide
gtataaattgtataaggtaaggtacttatt

SEQ ID NO: 461473 - DNA, 30 bp, Artificial Sequence
  Synthetic oligonucleotide
tggatatcactacgttgattccaccttatt

SEQ ID NO: 461474 - DNA, 30 bp, Artificial Sequence
  Synthetic oligonucleotide
tgtaagatagtggacaaaaaatcgcttatt

SEQ ID NO: 461475 - DNA, 30 bp, Artificial Sequence
  Synthetic oligonucleotide
ttaatttgcttctacagagatgtgcttatt

SEQ ID NO: 461476 - DNA, 30 bp, Artificial Sequence
  Synthetic oligonucleotide
gtgtaataataacggcggaaacatcttatt

SEQ ID NO: 461477 - DNA, 30 bp, Artificial Sequence
  Synthetic oligonucleotide
agtcccgcggcattagccgtagaagttatt

SEQ ID NO: 461478 - DNA, 26 bp, Artificial Sequence
  Synthetic oligonucleotide
ttcgtactgcagtgcacacagttatt

SEQ ID NO: 461479 - DNA, 30 bp, Artificial Sequence
  Synthetic oligonucleotide
agatatcgtttgacggagcctccagttatt

SEQ ID NO: 461480 - DNA, 30 bp, Artificial Sequence
  Synthetic oligonucleotide
acaatatgtttaaattaaatatacgttatt

SEQ ID NO: 461481 - DNA, 30 bp, Artificial Sequence
  Synthetic oligonucleotide
cgttcagggaatgggtacccatccgttatt

SEQ ID NO: 461482 - DNA, 30 bp, Artificial Sequence
  Synthetic oligonucleotide
gcaacggtgttgattatgtacggcgttatt

SEQ ID NO: 461483 - DNA, 30 bp, Artificial Sequence
  Synthetic oligonucleotide
ccggtctccgagaactgttcaaatgttatt

SEQ ID NO: 461484 - DNA, 30 bp, Artificial Sequence
  Synthetic oligonucleotide
cccgagttgttcatcaaaacagctgttatt

SEQ ID NO: 461485 - DNA, 30 bp, Artificial Sequence
  Synthetic oligonucleotide
ttattgtaaaagcaatattcgggtgttatt

SEQ ID NO: 461486 - DNA, 29 bp, Artificial Sequence
  Synthetic oligonucleotide
tgtcacgcattaatttttggggtgttatt

SEQ ID NO: 461487 - DNA, 30 bp, Artificial Sequence
  Synthetic oligonucleotide
agtagggaccccaaaggcacggttgttatt

SEQ ID NO: 461488 - DNA, 30 bp, Artificial Sequence
  Synthetic oligonucleotide
tgcgcctttgtcaaagtgattagatttatt

SEQ ID NO: 461489 - DNA, 30 bp, Artificial Sequence
  Synthetic oligonucleotide
tctcactgatgagtagtaaggtactttatt

SEQ ID NO: 461490 - DNA, 30 bp, Artificial Sequence
  Synthetic oligonucleotide
attctggtccgactatgcccgggctttatt

SEQ ID NO: 461491 - DNA, 30 bp, Artificial Sequence
  Synthetic oligonucleotide
ttccgatacagggacgttaatatctttatt

SEQ ID NO: 461492 - DNA, 30 bp, Artificial Sequence
  Synthetic oligonucleotide
caaatagctcaattcgttgcctagtttatt

SEQ ID NO: 461493 - DNA, 30 bp, Artificial Sequence
  Synthetic oligonucleotide
ggcagggaccacagtccgtcgtggtttatt

SEQ ID NO: 461494 - DNA, 30 bp, Artificial Sequence
  Synthetic oligonucleotide
agacctcttactagtcacaatctgtttatt

SEQ ID NO: 461495 - DNA, 30 bp, Artificial Sequence
  Synthetic oligonucleotide
gaaacttgccaactgagcaagtattttatt

SEQ ID NO: 461496 - DNA, 30 bp, Artificial Sequence
  Synthetic oligonucleotide
ttgttatcaaggtgcgaattgcgttttatt

SEQ ID NO: 461497 - DNA, 30 bp, Artificial Sequence
  Synthetic oligonucleotide
gatacccgttgaactataaatctttttatt

SEQ ID NO: 461498 - DNA, 30 bp, Artificial Sequence
  Synthetic oligonucleotide
tacgacatatagtcgcttaggttttttatt

SEQ ID NO: 461499 - DNA, 30 bp, Artificial Sequence
  Synthetic oligonucleotide
atccggaagccgctttgatcggcaaaactt

SEQ ID NO: 461500 - DNA, 30 bp, Artificial Sequence
  Synthetic oligonucleotide
cgcgtaaaggtgtattggtgatttaaactt

SEQ ID NO: 461501 - DNA, 30 bp, Artificial Sequence
  Synthetic oligonucleotide
tcgggaacaaagtagggcatttgacaactt

SEQ ID NO: 461502 - DNA, 30 bp, Artificial Sequence
  Synthetic oligonucleotide
gccctttcaatatagtgtttaaaccaactt

SEQ ID NO: 461503 - DNA, 30 bp, Artificial Sequence
  Synthetic oligonucleotide
cgtccggtgaatttgttaaaagggcaactt

SEQ ID NO: 461504 - DNA, 30 bp, Artificial Sequence
  Synthetic oligonucleotide
cagagagttaattattgctcgaatcaactt

SEQ ID NO: 461505 - DNA, 30 bp, Artificial Sequence
  Synthetic oligonucleotide
ctatagttaaattggcgtactcgagaactt

SEQ ID NO: 461506 - DNA, 30 bp, Artificial Sequence
  Synthetic oligonucleotide
caatagaatggtgttttcaacatagaactt

SEQ ID NO: 461507 - DNA, 30 bp, Artificial Sequence
  Synthetic oligonucleotide
caatagttgggagaagttaaattagaactt

SEQ ID NO: 461508 - DNA, 30 bp, Artificial Sequence
  Synthetic oligonucleotide
atgtatgaacggcgcaaccgcgacgaactt

SEQ ID NO: 461509 - DNA, 30 bp, Artificial Sequence
  Synthetic oligonucleotide
gtcccgcacacactgactctcttcgaactt

SEQ ID NO: 461510 - DNA, 31 bp, Artificial Sequence
  Synthetic oligonucleotide
ttcgcgccacgacgcggtcgtaaaggaactt

SEQ ID NO: 461511 - DNA, 30 bp, Artificial Sequence
  Synthetic oligonucleotide
tagccccggctttcaacgtgaggggaactt

SEQ ID NO: 461512 - DNA, 30 bp, Artificial Sequence
  Synthetic oligonucleotide
tggatctttacgcaacctgggattgaactt

SEQ ID NO: 461513 - DNA, 30 bp, Artificial Sequence
  Synthetic oligonucleotide
atcagagttttgtgttatcacatttaactt

SEQ ID NO: 461514 - DNA, 30 bp, Artificial Sequence
  Synthetic oligonucleotide
catgtgcacgcaagcaagcccctttaactt

SEQ ID NO: 461515 - DNA, 30 bp, Artificial Sequence
  Synthetic oligonucleotide
gtttggaatcgggacgaatactaaacactt

SEQ ID NO: 461516 - DNA, 30 bp, Artificial Sequence
  Synthetic oligonucleotide
tatttcaagagggattaaattacaacactt

SEQ ID NO: 461517 - DNA, 30 bp, Artificial Sequence
  Synthetic oligonucleotide
ttagtttagatgggtcgccagctaacactt

SEQ ID NO: 461518 - DNA, 30 bp, Artificial Sequence
  Synthetic oligonucleotide
ctaagttgttcttaggggtagcgcacactt

SEQ ID NO: 461519 - DNA, 30 bp, Artificial Sequence
  Synthetic oligonucleotide
gtgggcgatttcaggagccctcagacactt

SEQ ID NO: 461520 - DNA, 30 bp, Artificial Sequence
  Synthetic oligonucleotide
acaagcgattggcctacacgtgatacactt

SEQ ID NO: 461521 - DNA, 30 bp, Artificial Sequence
  Synthetic oligonucleotide
ttaacattttttcaacgaagacgtacactt

SEQ ID NO: 461522 - DNA, 30 bp, Artificial Sequence
  Synthetic oligonucleotide
gtggttttgcatattcacgaatcaccactt

SEQ ID NO: 461523 - DNA, 30 bp, Artificial Sequence
  Synthetic oligonucleotide
tagttacggccgatgagcttggatccactt

SEQ ID NO: 461524 - DNA, 30 bp, Artificial Sequence
  Synthetic oligonucleotide
cgatttgggtcggggactactgtagcactt

SEQ ID NO: 461525 - DNA, 30 bp, Artificial Sequence
  Synthetic oligonucleotide
ttagatttatggtgggtcgacggcgcactt

SEQ ID NO: 461526 - DNA, 30 bp, Artificial Sequence
  Synthetic oligonucleotide
gaccccgctccgagactccaacgtgcactt

SEQ ID NO: 461527 - DNA, 30 bp, Artificial Sequence
  Synthetic oligonucleotide
acttatggtgcgaatccctgcgcatcactt

SEQ ID NO: 461528 - DNA, 30 bp, Artificial Sequence
  Synthetic oligonucleotide
tcttttatcgtgaaattatcgctatcactt

SEQ ID NO: 461529 - DNA, 30 bp, Artificial Sequence
  Synthetic oligonucleotide
gtaagcaagttattcatagacttatcactt

SEQ ID NO: 461530 - DNA, 30 bp, Artificial Sequence
  Synthetic oligonucleotide
tggatactcagcatttactataactcactt

SEQ ID NO: 461531 - DNA, 30 bp, Artificial Sequence
  Synthetic oligonucleotide
cggtaccaaaggggctcctttgaaagactt

SEQ ID NO: 461532 - DNA, 30 bp, Artificial Sequence
  Synthetic oligonucleotide
ccacttccgaccataagcattagaagactt

SEQ ID NO: 461533 - DNA, 25 bp, Artificial Sequence
  Synthetic oligonucleotide
ggcgccgcatatctattacagactt

SEQ ID NO: 461534 - DNA, 30 bp, Artificial Sequence
  Synthetic oligonucleotide
gtccatacgcacgggatggagcgcagactt

SEQ ID NO: 461535 - DNA, 30 bp, Artificial Sequence
  Synthetic oligonucleotide
ttctttttacaagtagcaggggagagactt

SEQ ID NO: 461536 - DNA, 30 bp, Artificial Sequence
  Synthetic oligonucleotide
caacaggtctttagtctaacctagagactt

SEQ ID NO: 461537 - DNA, 30 bp, Artificial Sequence
  Synthetic oligonucleotide
gttatctagaagatgactgacgtgagactt

SEQ ID NO: 461538 - DNA, 30 bp, Artificial Sequence
  Synthetic oligonucleotide
tacacagactcgtcaagccacttgagactt

SEQ ID NO: 461539 - DNA, 30 bp, Artificial Sequence
  Synthetic oligonucleotide
ggagatcttacctcgagatttgctagactt

SEQ ID NO: 461540 - DNA, 30 bp, Artificial Sequence
  Synthetic oligonucleotide
ctgctagctcagagcttcgattttagactt

SEQ ID NO: 461541 - DNA, 29 bp, Artificial Sequence
  Synthetic oligonucleotide
aggttgaagtcgaatgttgataacgactt

SEQ ID NO: 461542 - DNA, 30 bp, Artificial Sequence
  Synthetic oligonucleotide
actaaaaaaaactcttccctaacacgactt

SEQ ID NO: 461543 - DNA, 30 bp, Artificial Sequence
  Synthetic oligonucleotide
gcccatgacaaggccgtcgtgctacgactt

SEQ ID NO: 461544 - DNA, 30 bp, Artificial Sequence
  Synthetic oligonucleotide
ggtgcaaaatcgttcgcggtagtccgactt

SEQ ID NO: 461545 - DNA, 30 bp, Artificial Sequence
  Synthetic oligonucleotide
atccaacggttccacacgaagttccgactt

SEQ ID NO: 461546 - DNA, 30 bp, Artificial Sequence
  Synthetic oligonucleotide
agtcaatttcgatttgcaggaaagcgactt

SEQ ID NO: 461547 - DNA, 30 bp, Artificial Sequence
  Synthetic oligonucleotide
aatcttgacccctgcatgtcgacgcgactt

SEQ ID NO: 461548 - DNA, 30 bp, Artificial Sequence
  Synthetic oligonucleotide
gctaaggtttgatcgcgtttataaggactt

SEQ ID NO: 461549 - DNA, 30 bp, Artificial Sequence
  Synthetic oligonucleotide
gattgacgctaatttacccattcaggactt

SEQ ID NO: 461550 - DNA, 30 bp, Artificial Sequence
  Synthetic oligonucleotide
agtctattagcttcatcgtgttccggactt

SEQ ID NO: 461551 - DNA, 30 bp, Artificial Sequence
  Synthetic oligonucleotide
ttaactgttgaagtgcgtatcaagggactt

SEQ ID NO: 461552 - DNA, 30 bp, Artificial Sequence
  Synthetic oligonucleotide
catccatcttcgcaagacgttacgggactt

SEQ ID NO: 461553 - DNA, 30 bp, Artificial Sequence
  Synthetic oligonucleotide
cagcaattccgtagagatctaaatggactt

SEQ ID NO: 461554 - DNA, 30 bp, Artificial Sequence
  Synthetic oligonucleotide
tccctaagatcaattgagcattaatgactt

SEQ ID NO: 461555 - DNA, 30 bp, Artificial Sequence
  Synthetic oligonucleotide
tcgaagcctggcaggcagcctaggtgactt

SEQ ID NO: 461556 - DNA, 30 bp, Artificial Sequence
  Synthetic oligonucleotide
gggaaaccctatctcaataggcccatactt

SEQ ID NO: 461557 - DNA, 30 bp, Artificial Sequence
  Synthetic oligonucleotide
aagttagcggcatagtcttcgtggatactt

SEQ ID NO: 461558 - DNA, 30 bp, Artificial Sequence
  Synthetic oligonucleotide
agtagactgcatagcatctttaatatactt

SEQ ID NO: 461559 - DNA, 30 bp, Artificial Sequence
  Synthetic oligonucleotide
tttctttgctgtgctctcttatatatactt

SEQ ID NO: 461560 - DNA, 30 bp, Artificial Sequence
  Synthetic oligonucleotide
gaaggtgtgataggcgtgctttctatactt

SEQ ID NO: 461561 - DNA, 30 bp, Artificial Sequence
  Synthetic oligonucleotide
agtaagcggctagcatacgaaagtatactt

SEQ ID NO: 461562 - DNA, 30 bp, Artificial Sequence
  Synthetic oligonucleotide
cggtaagtttttatttatactcgtatactt

SEQ ID NO: 461563 - DNA, 30 bp, Artificial Sequence
  Synthetic oligonucleotide
caaattctgcattctcgtctctgtatactt

SEQ ID NO: 461564 - DNA, 30 bp, Artificial Sequence
  Synthetic oligonucleotide
ggctatattatggcacagacggttatactt

SEQ ID NO: 461565 - DNA, 30 bp, Artificial Sequence
  Synthetic oligonucleotide
atcaagttgcaaggcaaagactcactactt

SEQ ID NO: 461566 - DNA, 30 bp, Artificial Sequence
  Synthetic oligonucleotide
aatggttgactggcccgagtagagctactt

SEQ ID NO: 461567 - DNA, 30 bp, Artificial Sequence
  Synthetic oligonucleotide
aaactccgtgaaatacgtcctcctctactt

SEQ ID NO: 461568 - DNA, 30 bp, Artificial Sequence
  Synthetic oligonucleotide
ttttaggtgggaagggtatcgccggtactt

SEQ ID NO: 461569 - DNA, 30 bp, Artificial Sequence
  Synthetic oligonucleotide
ctaacttattttattcgattccatgtactt

SEQ ID NO: 461570 - DNA, 30 bp, Artificial Sequence
  Synthetic oligonucleotide
caactgcctttgcgctctttcagtgtactt

SEQ ID NO: 461571 - DNA, 30 bp, Artificial Sequence
  Synthetic oligonucleotide
aatccggaattatgcggctctcgtgtactt

SEQ ID NO: 461572 - DNA, 30 bp, Artificial Sequence
  Synthetic oligonucleotide
ctcccgttgcccggttcgtaaattgtactt

SEQ ID NO: 461573 - DNA, 30 bp, Artificial Sequence
  Synthetic oligonucleotide
agaaaatatggatggtttctcattgtactt

SEQ ID NO: 461574 - DNA, 30 bp, Artificial Sequence
  Synthetic oligonucleotide
atttgtgacgagatgtttgggcttgtactt

SEQ ID NO: 461575 - DNA, 30 bp, Artificial Sequence
  Synthetic oligonucleotide
caaacgttagtacaatggttggaattactt

SEQ ID NO: 461576 - DNA, 30 bp, Artificial Sequence
  Synthetic oligonucleotide
catactatgaaggtaatgactacattactt

SEQ ID NO: 461577 - DNA, 30 bp, Artificial Sequence
  Synthetic oligonucleotide
atttagaaattggttcatgcgggcttactt

SEQ ID NO: 461578 - DNA, 30 bp, Artificial Sequence
  Synthetic oligonucleotide
atgtagcgctcccacggaccagggttactt

SEQ ID NO: 461579 - DNA, 30 bp, Artificial Sequence
  Synthetic oligonucleotide
atctgagatggcctccgcgactatttactt

SEQ ID NO: 461580 - DNA, 30 bp, Artificial Sequence
  Synthetic oligonucleotide
tcatatttctcttcatacgcgcctttactt

SEQ ID NO: 461581 - DNA, 40 bp, Artificial Sequence
  Synthetic oligonucleotide
ttccttactcatgtccttcttcaggctttcttttttactt

SEQ ID NO: 461582 - DNA, 30 bp, Artificial Sequence
  Synthetic oligonucleotide
agccctccgaacaggagcttgatcaacctt

SEQ ID NO: 461583 - DNA, 30 bp, Artificial Sequence
  Synthetic oligonucleotide
ggggcgacagtgggtgtacgtttcaacctt

SEQ ID NO: 461584 - DNA, 30 bp, Artificial Sequence
  Synthetic oligonucleotide
ttgtccatggatgcttggatacagaacctt

SEQ ID NO: 461585 - DNA, 30 bp, Artificial Sequence
  Synthetic oligonucleotide
tgtcccggccagacggctcttacgaacctt

SEQ ID NO: 461586 - DNA, 30 bp, Artificial Sequence
  Synthetic oligonucleotide
gtcaaaccttttataaatccggtgaacctt

SEQ ID NO: 461587 - DNA, 30 bp, Artificial Sequence
  Synthetic oligonucleotide
cctgtccagggacaaatttgaaataacctt

SEQ ID NO: 461588 - DNA, 30 bp, Artificial Sequence
  Synthetic oligonucleotide
gttattgccaaggcagcactgtcacacctt

SEQ ID NO: 461589 - DNA, 30 bp, Artificial Sequence
  Synthetic oligonucleotide
ggtgaactatgagtataggggagacacctt

SEQ ID NO: 461590 - DNA, 30 bp, Artificial Sequence
  Synthetic oligonucleotide
gttcctatcgctagattaggagtacacctt

SEQ ID NO: 461591 - DNA, 30 bp, Artificial Sequence
  Synthetic oligonucleotide
tatccaggtcttaggggccgccaccacctt

SEQ ID NO: 461592 - DNA, 30 bp, Artificial Sequence
  Synthetic oligonucleotide
gtgggcactacccggtggctgggccacctt

SEQ ID NO: 461593 - DNA, 30 bp, Artificial Sequence
  Synthetic oligonucleotide
ctgaggttaattggtcgattcgtccacctt

SEQ ID NO: 461594 - DNA, 30 bp, Artificial Sequence
  Synthetic oligonucleotide
agatgacgaagcagatgtactttccacctt

SEQ ID NO: 461595 - DNA, 30 bp, Artificial Sequence
  Synthetic oligonucleotide
gtcgcagtaataactcacagttaagacctt

SEQ ID NO: 461596 - DNA, 30 bp, Artificial Sequence
  Synthetic oligonucleotide
ctgttactttgggaatgggcttgagacctt

SEQ ID NO: 461597 - DNA, 30 bp, Artificial Sequence
  Synthetic oligonucleotide
agctcaaagccactcactgttttagacctt

SEQ ID NO: 461598 - DNA, 30 bp, Artificial Sequence
  Synthetic oligonucleotide
tcaagcgcgatatcggatagaatcgacctt

SEQ ID NO: 461599 - DNA, 30 bp, Artificial Sequence
  Synthetic oligonucleotide
agttcttagggtataaggtccatggacctt

SEQ ID NO: 461600 - DNA, 30 bp, Artificial Sequence
  Synthetic oligonucleotide
cctcttcatatagacttcatgattgacctt

SEQ ID NO: 461601 - DNA, 30 bp, Artificial Sequence
  Synthetic oligonucleotide
gtggctttaataaggagcttgcaatacctt

SEQ ID NO: 461602 - DNA, 30 bp, Artificial Sequence
  Synthetic oligonucleotide
agcggtgtgcatcgacaccgtcactacctt

SEQ ID NO: 461603 - DNA, 30 bp, Artificial Sequence
  Synthetic oligonucleotide
ctttgggaaggggtatcttcacagtacctt

SEQ ID NO: 461604 - DNA, 30 bp, Artificial Sequence
  Synthetic oligonucleotide
tattctttcttacgggctgtgtagtacctt

SEQ ID NO: 461605 - DNA, 30 bp, Artificial Sequence
  Synthetic oligonucleotide
cgaattttcgacgggttttggtaaaccctt

SEQ ID NO: 461606 - DNA, 30 bp, Artificial Sequence
  Synthetic oligonucleotide
tagtgggagagacggattttatgaaccctt

SEQ ID NO: 461607 - DNA, 30 bp, Artificial Sequence
  Synthetic oligonucleotide
gcatcaggggccattccaaaacccaccctt

SEQ ID NO: 461608 - DNA, 30 bp, Artificial Sequence
  Synthetic oligonucleotide
cgcataccgcacaagagaagggccaccctt

SEQ ID NO: 461609 - DNA, 30 bp, Artificial Sequence
  Synthetic oligonucleotide
ttcggtcacaattaagtctaagagaccctt

SEQ ID NO: 461610 - DNA, 30 bp, Artificial Sequence
  Synthetic oligonucleotide
agtgcggagaagacgccaatgaggaccctt

SEQ ID NO: 461611 - DNA, 30 bp, Artificial Sequence
  Synthetic oligonucleotide
ttcaaaacattgacgacagccatgaccctt

SEQ ID NO: 461612 - DNA, 30 bp, Artificial Sequence
  Synthetic oligonucleotide
taagtcactttccgatctggtaataccctt

SEQ ID NO: 461613 - DNA, 30 bp, Artificial Sequence
  Synthetic oligonucleotide
aaatttcaggacctaatagaatcacccctt

SEQ ID NO: 461614 - DNA, 30 bp, Artificial Sequence
  Synthetic oligonucleotide
tttccccacctgaccaggaaaagacccctt

SEQ ID NO: 461615 - DNA, 30 bp, Artificial Sequence
  Synthetic oligonucleotide
ggcataaggacaacttgaaagaggcccctt

SEQ ID NO: 461616 - DNA, 30 bp, Artificial Sequence
  Synthetic oligonucleotide
cagcgcaaacggctatccgacgggcccctt

SEQ ID NO: 461617 - DNA, 30 bp, Artificial Sequence
  Synthetic oligonucleotide
atgtagctcccctattacggctgtcccctt

SEQ ID NO: 461618 - DNA, 30 bp, Artificial Sequence
  Synthetic oligonucleotide
catcagccctgtccaggataacttcccctt

SEQ ID NO: 461619 - DNA, 30 bp, Artificial Sequence
  Synthetic oligonucleotide
gagcattcatttatgatgtagctagccctt

SEQ ID NO: 461620 - DNA, 30 bp, Artificial Sequence
  Synthetic oligonucleotide
aggtctatggtaactcgcaggtacgccctt

SEQ ID NO: 461621 - DNA, 30 bp, Artificial Sequence
  Synthetic oligonucleotide
agccccccgatttccgttgttcgcgccctt

SEQ ID NO: 461622 - DNA, 30 bp, Artificial Sequence
  Synthetic oligonucleotide
ggtgaggccttattaaaggccatcgccctt

SEQ ID NO: 461623 - DNA, 30 bp, Artificial Sequence
  Synthetic oligonucleotide
attcatttgatgtcgcgagctgtcgccctt

SEQ ID NO: 461624 - DNA, 30 bp, Artificial Sequence
  Synthetic oligonucleotide
ataactggggcggacctgatagcggccctt

SEQ ID NO: 461625 - DNA, 30 bp, Artificial Sequence
  Synthetic oligonucleotide
ccaatttcacaaggtcccatcgcggccctt

SEQ ID NO: 461626 - DNA, 30 bp, Artificial Sequence
  Synthetic oligonucleotide
gcttaaggagcttcgcttccaatctccctt

SEQ ID NO: 461627 - DNA, 30 bp, Artificial Sequence
  Synthetic oligonucleotide
ctaggttgctgttacggtaagctttccctt

SEQ ID NO: 461628 - DNA, 30 bp, Artificial Sequence
  Synthetic oligonucleotide
caagaattctatattataacggccagcctt

SEQ ID NO: 461629 - DNA, 30 bp, Artificial Sequence
  Synthetic oligonucleotide
ataaggaacagaaggcgttgagtcagcctt

SEQ ID NO: 461630 - DNA, 30 bp, Artificial Sequence
  Synthetic oligonucleotide
atcaacagcatagattagcgtcagagcctt

SEQ ID NO: 461631 - DNA, 30 bp, Artificial Sequence
  Synthetic oligonucleotide
ccgcagggttcgcattgaaacgggagcctt

SEQ ID NO: 461632 - DNA, 30 bp, Artificial Sequence
  Synthetic oligonucleotide
ggccggttctccagcaacgccctgagcctt

SEQ ID NO: 461633 - DNA, 30 bp, Artificial Sequence
  Synthetic oligonucleotide
ggatacacctcattgatgagaactagcctt

SEQ ID NO: 461634 - DNA, 30 bp, Artificial Sequence
  Synthetic oligonucleotide
ggactaaaagatcggtatagaggtagcctt

SEQ ID NO: 461635 - DNA, 30 bp, Artificial Sequence
  Synthetic oligonucleotide
tgtactcgttggagactgttaggtagcctt

SEQ ID NO: 461636 - DNA, 30 bp, Artificial Sequence
  Synthetic oligonucleotide
taagggtaggacttataattttaccgcctt

SEQ ID NO: 461637 - DNA, 30 bp, Artificial Sequence
  Synthetic oligonucleotide
accttggagtcccgtttcggtgggcgcctt

SEQ ID NO: 461638 - DNA, 30 bp, Artificial Sequence
  Synthetic oligonucleotide
aaactagtctataattagtttcttcgcctt

SEQ ID NO: 461639 - DNA, 30 bp, Artificial Sequence
  Synthetic oligonucleotide
cgccggtatacagcgtcattaagcggcctt

SEQ ID NO: 461640 - DNA, 30 bp, Artificial Sequence
  Synthetic oligonucleotide
gtcccggcaagttagtgggaaatgggcctt

SEQ ID NO: 461641 - DNA, 30 bp, Artificial Sequence
  Synthetic oligonucleotide
gaacgagccgccagtaagccggatggcctt

SEQ ID NO: 461642 - DNA, 30 bp, Artificial Sequence
  Synthetic oligonucleotide
gtgagggttaggggatatttgcgtggcctt

SEQ ID NO: 461643 - DNA, 30 bp, Artificial Sequence
  Synthetic oligonucleotide
cgtcaaacgtgtctagctgcgggtggcctt

SEQ ID NO: 461644 - DNA, 30 bp, Artificial Sequence
  Synthetic oligonucleotide
tgcatcggtaatcggatttagacatgcctt

SEQ ID NO: 461645 - DNA, 30 bp, Artificial Sequence
  Synthetic oligonucleotide
gtatctggaagcgctatacttttatgcctt

SEQ ID NO: 461646 - DNA, 30 bp, Artificial Sequence
  Synthetic oligonucleotide
ttaccagcagcggcacgctgccactgcctt

SEQ ID NO: 461647 - DNA, 30 bp, Artificial Sequence
  Synthetic oligonucleotide
cacgtttatatcaattgtcacgactgcctt

SEQ ID NO: 461648 - DNA, 30 bp, Artificial Sequence
  Synthetic oligonucleotide
tctccatctactgacccagtttagtgcctt

SEQ ID NO: 461649 - DNA, 30 bp, Artificial Sequence
  Synthetic oligonucleotide
tctttgaaaacattcttgtttccgtgcctt

SEQ ID NO: 461650 - DNA, 30 bp, Artificial Sequence
  Synthetic oligonucleotide
tcatgttactatagataatgtaatatcctt

SEQ ID NO: 461651 - DNA, 30 bp, Artificial Sequence
  Synthetic oligonucleotide
cctgaacgcgtactgagaactatactcctt

SEQ ID NO: 461652 - DNA, 30 bp, Artificial Sequence
  Synthetic oligonucleotide
atgctctgttcgggatggatctgcctcctt

SEQ ID NO: 461653 - DNA, 30 bp, Artificial Sequence
  Synthetic oligonucleotide
agcgcggcctagccgcggacacagctcctt

SEQ ID NO: 461654 - DNA, 30 bp, Artificial Sequence
  Synthetic oligonucleotide
tggctacgtagtgcgcgattggggctcctt

SEQ ID NO: 461655 - DNA, 30 bp, Artificial Sequence
  Synthetic oligonucleotide
gaccgtttgagactcaataccggtctcctt

SEQ ID NO: 461656 - DNA, 30 bp, Artificial Sequence
  Synthetic oligonucleotide
tgtcatggttaattgcaacatgaagtcctt

SEQ ID NO: 461657 - DNA, 30 bp, Artificial Sequence
  Synthetic oligonucleotide
caacctcaatagggtactgtttaagtcctt

SEQ ID NO: 461658 - DNA, 30 bp, Artificial Sequence
  Synthetic oligonucleotide
tgtagaattgatacgctgtctatagtcctt

SEQ ID NO: 461659 - DNA, 30 bp, Artificial Sequence
  Synthetic oligonucleotide
ggggggccagaacctgcggatagggtcctt

SEQ ID NO: 461660 - DNA, 30 bp, Artificial Sequence
  Synthetic oligonucleotide
gtctcgcagcaccataatgatcttgtcctt

SEQ ID NO: 461661 - DNA, 30 bp, Artificial Sequence
  Synthetic oligonucleotide
atgcccgaagcacgcaaattgcacttcctt

SEQ ID NO: 461662 - DNA, 30 bp, Artificial Sequence
  Synthetic oligonucleotide
tagaatagaatctagctcccttagttcctt

SEQ ID NO: 461663 - DNA, 30 bp, Artificial Sequence
  Synthetic oligonucleotide
cttatttctcgtacgagaacgcctttcctt

SEQ ID NO: 461664 - DNA, 30 bp, Artificial Sequence
  Synthetic oligonucleotide
ctattcctctttagttagtttacaaagctt

SEQ ID NO: 461665 - DNA, 30 bp, Artificial Sequence
  Synthetic oligonucleotide
atcctgggaggttggagagatgtaaagctt

SEQ ID NO: 461666 - DNA, 30 bp, Artificial Sequence
  Synthetic oligonucleotide
tgacgactgatccatttcacgcacaagctt

SEQ ID NO: 461667 - DNA, 30 bp, Artificial Sequence
  Synthetic oligonucleotide
aatagtgttggcaccggtgacttcaagctt

SEQ ID NO: 461668 - DNA, 30 bp, Artificial Sequence
  Synthetic oligonucleotide
agtcgctttcgcaagcaggtgcagaagctt

SEQ ID NO: 461669 - DNA, 30 bp, Artificial Sequence
  Synthetic oligonucleotide
gggacgacgctagagaggccgaggaagctt

SEQ ID NO: 461670 - DNA, 30 bp, Artificial Sequence
  Synthetic oligonucleotide
ctccgatatttcagattgccgctgaagctt

SEQ ID NO: 461671 - DNA, 30 bp, Artificial Sequence
  Synthetic oligonucleotide
tgcggagatccttcttttgcaccacagctt

SEQ ID NO: 461672 - DNA, 30 bp, Artificial Sequence
  Synthetic oligonucleotide
ggaattgggccacggcaagtcaaccagctt

SEQ ID NO: 461673 - DNA, 30 bp, Artificial Sequence
  Synthetic oligonucleotide
ctcgttcccggtggaatatattcccagctt

SEQ ID NO: 461674 - DNA, 30 bp, Artificial Sequence
  Synthetic oligonucleotide
ccgtcgtcgtcgcgaacggttctgcagctt

SEQ ID NO: 461675 - DNA, 30 bp, Artificial Sequence
  Synthetic oligonucleotide
ggaggttatagacctcacgagaatcagctt

SEQ ID NO: 461676 - DNA, 30 bp, Artificial Sequence
  Synthetic oligonucleotide
aaaattgtatcggggcgtgctacagagctt

SEQ ID NO: 461677 - DNA, 30 bp, Artificial Sequence
  Synthetic oligonucleotide
ccacaacgacagcaggtttagaacgagctt

SEQ ID NO: 461678 - DNA, 30 bp, Artificial Sequence
  Synthetic oligonucleotide
gaacacttctagggatatcatagcgagctt

SEQ ID NO: 461679 - DNA, 30 bp, Artificial Sequence
  Synthetic oligonucleotide
cttgaatctgattggggtatgaaggagctt

SEQ ID NO: 461680 - DNA, 30 bp, Artificial Sequence
  Synthetic oligonucleotide
cagaatacaatccatgacgcctatgagctt

SEQ ID NO: 461681 - DNA, 28 bp, Artificial Sequence
  Synthetic oligonucleotide
gaaatatagataatcctatggtgagctt

SEQ ID NO: 461682 - DNA, 30 bp, Artificial Sequence
  Synthetic oligonucleotide
gactatcatgccacggtctgtgttgagctt

SEQ ID NO: 461683 - DNA, 30 bp, Artificial Sequence
  Synthetic oligonucleotide
ttacataattcaaattagcccaactagctt

SEQ ID NO: 461684 - DNA, 30 bp, Artificial Sequence
  Synthetic oligonucleotide
actaattactctttcggctggcactagctt

SEQ ID NO: 461685 - DNA, 30 bp, Artificial Sequence
  Synthetic oligonucleotide
gactatacctctgattttccgaattagctt

SEQ ID NO: 461686 - DNA, 30 bp, Artificial Sequence
  Synthetic oligonucleotide
tgaattcggggggcggaaacctattagctt

SEQ ID NO: 461687 - DNA, 30 bp, Artificial Sequence
  Synthetic oligonucleotide
ggtattaaatcttttgtccttcagacgctt

SEQ ID NO: 461688 - DNA, 30 bp, Artificial Sequence
  Synthetic oligonucleotide
tatccgcaggctccggtaagaaggacgctt

SEQ ID NO: 461689 - DNA, 30 bp, Artificial Sequence
  Synthetic oligonucleotide
actcagcaaaacagtcttagccatacgctt

SEQ ID NO: 461690 - DNA, 30 bp, Artificial Sequence
  Synthetic oligonucleotide
atctaggaccgaccacggcttttcccgctt

SEQ ID NO: 461691 - DNA, 30 bp, Artificial Sequence
  Synthetic oligonucleotide
ccggcagtcggtctataccagacgccgctt

SEQ ID NO: 461692 - DNA, 30 bp, Artificial Sequence
  Synthetic oligonucleotide
aaaggcgccgggaaaggaccaaggccgctt

SEQ ID NO: 461693 - DNA, 30 bp, Artificial Sequence
  Synthetic oligonucleotide
tgttcctacaatgttagacaatggccgctt

SEQ ID NO: 461694 - DNA, 30 bp, Artificial Sequence
  Synthetic oligonucleotide
gtattattccatggcgaaaggtaagcgctt

SEQ ID NO: 461695 - DNA, 30 bp, Artificial Sequence
  Synthetic oligonucleotide
aataccagggctgccaggcttacagcgctt

SEQ ID NO: 461696 - DNA, 30 bp, Artificial Sequence
  Synthetic oligonucleotide
aagcggcgtcaacagggggtctacgcgctt

SEQ ID NO: 461697 - DNA, 30 bp, Artificial Sequence
  Synthetic oligonucleotide
ccgtacgatttgttcaacttctccgcgctt

SEQ ID NO: 461698 - DNA, 30 bp, Artificial Sequence
  Synthetic oligonucleotide
gaagtagttccacaaccgattgtggcgctt

SEQ ID NO: 461699 - DNA, 30 bp, Artificial Sequence
  Synthetic oligonucleotide
cgcgtacaagggcgctagatgtatgcgctt

SEQ ID NO: 461700 - DNA, 30 bp, Artificial Sequence
  Synthetic oligonucleotide
actactttgctacagatagttggatcgctt

SEQ ID NO: 461701 - DNA, 30 bp, Artificial Sequence
  Synthetic oligonucleotide
aataccgttctctctgattgaatatcgctt

SEQ ID NO: 461702 - DNA, 30 bp, Artificial Sequence
  Synthetic oligonucleotide
gaagacccagaaaagggtattgtatcgctt

SEQ ID NO: 461703 - DNA, 31 bp, Artificial Sequence
  Synthetic oligonucleotide
gttgtacattaaaccgatggaaggctcgctt

SEQ ID NO: 461704 - DNA, 30 bp, Artificial Sequence
  Synthetic oligonucleotide
gggctaaatggccataatacttgctcgctt

SEQ ID NO: 461705 - DNA, 30 bp, Artificial Sequence
  Synthetic oligonucleotide
acaccccgccttggggttaatcggtcgctt

SEQ ID NO: 461706 - DNA, 30 bp, Artificial Sequence
  Synthetic oligonucleotide
tgaacgatgcatccgttcattctgtcgctt

SEQ ID NO: 461707 - DNA, 30 bp, Artificial Sequence
  Synthetic oligonucleotide
actagcacaggtctcccttggcattcgctt

SEQ ID NO: 461708 - DNA, 30 bp, Artificial Sequence
  Synthetic oligonucleotide
atagcaagcccgtcaggcggttattcgctt

SEQ ID NO: 461709 - DNA, 30 bp, Artificial Sequence
  Synthetic oligonucleotide
atttgagagtttatggaggatggttcgctt

SEQ ID NO: 461710 - DNA, 30 bp, Artificial Sequence
  Synthetic oligonucleotide
agctatctgactggctcaaatttgaggctt

SEQ ID NO: 461711 - DNA, 30 bp, Artificial Sequence
  Synthetic oligonucleotide
aacggaagactgtaacttggacgtaggctt

SEQ ID NO: 461712 - DNA, 30 bp, Artificial Sequence
  Synthetic oligonucleotide
cgaccactttggtcacaccggcttaggctt

SEQ ID NO: 461713 - DNA, 30 bp, Artificial Sequence
  Synthetic oligonucleotide
cgccagtcgcctcccggtgcaacacggctt

SEQ ID NO: 461714 - DNA, 30 bp, Artificial Sequence
  Synthetic oligonucleotide
cccgaatggcttaactgtattgcacggctt

SEQ ID NO: 461715 - DNA, 30 bp, Artificial Sequence
  Synthetic oligonucleotide
ctagtgtatgtggctagtgcgtaccggctt

SEQ ID NO: 461716 - DNA, 30 bp, Artificial Sequence
  Synthetic oligonucleotide
aaaatgtaaacggggcacgatgcccggctt

SEQ ID NO: 461717 - DNA, 30 bp, Artificial Sequence
  Synthetic oligonucleotide
gacgactatttatcgtgccgactccggctt

SEQ ID NO: 461718 - DNA, 30 bp, Artificial Sequence
  Synthetic oligonucleotide
taatgtgctcatacaggcaaaccgcggctt

SEQ ID NO: 461719 - DNA, 30 bp, Artificial Sequence
  Synthetic oligonucleotide
aggtggcgtcggccgcctgccatgcggctt

SEQ ID NO: 461720 - DNA, 30 bp, Artificial Sequence
  Synthetic oligonucleotide
gcaaatattagaacaaatatacatcggctt

SEQ ID NO: 461721 - DNA, 30 bp, Artificial Sequence
  Synthetic oligonucleotide
ggtgaggggttctcaagagacactcggctt

SEQ ID NO: 461722 - DNA, 30 bp, Artificial Sequence
  Synthetic oligonucleotide
cgaaacctcaatcgccacggcgtagggctt

SEQ ID NO: 461723 - DNA, 30 bp, Artificial Sequence
  Synthetic oligonucleotide
gccggtcgtatagttcagaaaaccgggctt

SEQ ID NO: 461724 - DNA, 30 bp, Artificial Sequence
  Synthetic oligonucleotide
tgcgactgccacaagcgggatcgcgggctt

SEQ ID NO: 461725 - DNA, 30 bp, Artificial Sequence
  Synthetic oligonucleotide
cggctggggagtaacgttcaggtcgggctt

SEQ ID NO: 461726 - DNA, 30 bp, Artificial Sequence
  Synthetic oligonucleotide
gtgttaaacatttggcggttcgctgggctt

SEQ ID NO: 461727 - DNA, 30 bp, Artificial Sequence
  Synthetic oligonucleotide
aatgagcgttggtccgcctcgtgtgggctt

SEQ ID NO: 461728 - DNA, 30 bp, Artificial Sequence
  Synthetic oligonucleotide
gcgaagttaatggtcccgttacttgggctt

SEQ ID NO: 461729 - DNA, 30 bp, Artificial Sequence
  Synthetic oligonucleotide
atttttaattagcatagatgagaatggctt

SEQ ID NO: 461730 - DNA, 30 bp, Artificial Sequence
  Synthetic oligonucleotide
gctagacgggcctatgcctgaaggtggctt

SEQ ID NO: 461731 - DNA, 30 bp, Artificial Sequence
  Synthetic oligonucleotide
caccttcccgagacggcatattcttggctt

SEQ ID NO: 461732 - DNA, 30 bp, Artificial Sequence
  Synthetic oligonucleotide
gcaagactcgctctcgtatggatttggctt

SEQ ID NO: 461733 - DNA, 30 bp, Artificial Sequence
  Synthetic oligonucleotide
cgctgtgcatacttaatcatagtcatgctt

SEQ ID NO: 461734 - DNA, 30 bp, Artificial Sequence
  Synthetic oligonucleotide
tgtttacaaacacgaggctgaccgatgctt

SEQ ID NO: 461735 - DNA, 30 bp, Artificial Sequence
  Synthetic oligonucleotide
gatgttacctgcaagccaaatgcgatgctt

SEQ ID NO: 461736 - DNA, 30 bp, Artificial Sequence
  Synthetic oligonucleotide
tcttgtgatattcctagtcgatcgatgctt

SEQ ID NO: 461737 - DNA, 30 bp, Artificial Sequence
  Synthetic oligonucleotide
atggtctgctgattcgctgttgggatgctt

SEQ ID NO: 461738 - DNA, 30 bp, Artificial Sequence
  Synthetic oligonucleotide
tcaaggaatttgcaacaattcttgatgctt

SEQ ID NO: 461739 - DNA, 30 bp, Artificial Sequence
  Synthetic oligonucleotide
atagtgcacgagactctgcaagatatgctt

SEQ ID NO: 461740 - DNA, 30 bp, Artificial Sequence
  Synthetic oligonucleotide
aaatctcataaaaagtgcatgggtatgctt

SEQ ID NO: 461741 - DNA, 30 bp, Artificial Sequence
  Synthetic oligonucleotide
tataatgtgaagaaatggcacgttatgctt

SEQ ID NO: 461742 - DNA, 30 bp, Artificial Sequence
  Synthetic oligonucleotide
ttacggtataaagtgctttataacctgctt

SEQ ID NO: 461743 - DNA, 30 bp, Artificial Sequence
  Synthetic oligonucleotide
ggagtttcaaccgcaattagttttctgctt

SEQ ID NO: 461744 - DNA, 30 bp, Artificial Sequence
  Synthetic oligonucleotide
gatagcactcggatgctccgatcagtgctt

SEQ ID NO: 461745 - DNA, 30 bp, Artificial Sequence
  Synthetic oligonucleotide
gtaatgtgccacattcttattgtagtgctt

SEQ ID NO: 461746 - DNA, 30 bp, Artificial Sequence
  Synthetic oligonucleotide
agctagtggacggaccacgctaacgtgctt

SEQ ID NO: 461747 - DNA, 30 bp, Artificial Sequence
  Synthetic oligonucleotide
tgttcaagctggacgttgatcaaggtgctt

SEQ ID NO: 461748 - DNA, 30 bp, Artificial Sequence
  Synthetic oligonucleotide
aagagcgtggcctgaatgtcacaggtgctt

SEQ ID NO: 461749 - DNA, 30 bp, Artificial Sequence
  Synthetic oligonucleotide
tctaggctgggcctctaaaggtcggtgctt

SEQ ID NO: 461750 - DNA, 30 bp, Artificial Sequence
  Synthetic oligonucleotide
ccacataatatttaggtcggtagggtgctt

SEQ ID NO: 461751 - DNA, 30 bp, Artificial Sequence
  Synthetic oligonucleotide
ttctagttgtcaatgtaccgcgttgtgctt

SEQ ID NO: 461752 - DNA, 30 bp, Artificial Sequence
  Synthetic oligonucleotide
tgtgggcaagcaaccaaagtaaacttgctt

SEQ ID NO: 461753 - DNA, 30 bp, Artificial Sequence
  Synthetic oligonucleotide
aacaggatttttggagaaaccgtcttgctt

SEQ ID NO: 461754 - DNA, 30 bp, Artificial Sequence
  Synthetic oligonucleotide
gacctgggagcgcccccgggtgtgttgctt

SEQ ID NO: 461755 - DNA, 30 bp, Artificial Sequence
  Synthetic oligonucleotide
cccctgggtccatccctaagccacaatctt

SEQ ID NO: 461756 - DNA, 30 bp, Artificial Sequence
  Synthetic oligonucleotide
aatcagtgacagttcaccttcaccaatctt

SEQ ID NO: 461757 - DNA, 28 bp, Artificial Sequence
  Synthetic oligonucleotide
cgcatatagggtttagaaggtgaatctt

SEQ ID NO: 461758 - DNA, 30 bp, Artificial Sequence
  Synthetic oligonucleotide
ttccgtgtgaaaaaaacgcgagctaatctt

SEQ ID NO: 461759 - DNA, 30 bp, Artificial Sequence
  Synthetic oligonucleotide
gaaaccctcgagtcctgggcgcgccatctt

SEQ ID NO: 461760 - DNA, 30 bp, Artificial Sequence
  Synthetic oligonucleotide
cgtcgagcacgaatgggcaccgtccatctt

SEQ ID NO: 461761 - DNA, 30 bp, Artificial Sequence
  Synthetic oligonucleotide
taagcagaaagtgagatgacgaagcatctt

SEQ ID NO: 461762 - DNA, 30 bp, Artificial Sequence
  Synthetic oligonucleotide
actacgaacaatggtatttaacagcatctt

SEQ ID NO: 461763 - DNA, 30 bp, Artificial Sequence
  Synthetic oligonucleotide
gaggtggtttgagcccgcgcaggtcatctt

SEQ ID NO: 461764 - DNA, 30 bp, Artificial Sequence
  Synthetic oligonucleotide
tgtctggtttctatgagtacctcagatctt

SEQ ID NO: 461765 - DNA, 30 bp, Artificial Sequence
  Synthetic oligonucleotide
aagatcaattaaataatctggtaggatctt

SEQ ID NO: 461766 - DNA, 30 bp, Artificial Sequence
  Synthetic oligonucleotide
agcgaccagatgaacagatggttatatctt

SEQ ID NO: 461767 - DNA, 30 bp, Artificial Sequence
  Synthetic oligonucleotide
aagtggttaatgcatagctaaaactatctt

SEQ ID NO: 461768 - DNA, 30 bp, Artificial Sequence
  Synthetic oligonucleotide
taatgagccgggcaatccaggaggtatctt

SEQ ID NO: 461769 - DNA, 30 bp, Artificial Sequence
  Synthetic oligonucleotide
gctaaccggttcttttgatcgtggtatctt

SEQ ID NO: 461770 - DNA, 30 bp, Artificial Sequence
  Synthetic oligonucleotide
tcaaggctgttataatggtttccttatctt

SEQ ID NO: 461771 - DNA, 30 bp, Artificial Sequence
  Synthetic oligonucleotide
aggtaccctccgggtcaacttgcttatctt

SEQ ID NO: 461772 - DNA, 30 bp, Artificial Sequence
  Synthetic oligonucleotide
aaagcaacgggtaaactcgagtgttatctt

SEQ ID NO: 461773 - DNA, 30 bp, Artificial Sequence
  Synthetic oligonucleotide
agacgtagagtcgatttatgggtttatctt

SEQ ID NO: 461774 - DNA, 30 bp, Artificial Sequence
  Synthetic oligonucleotide
ggcaaagaatctcatacttgtggaactctt

SEQ ID NO: 461775 - DNA, 30 bp, Artificial Sequence
  Synthetic oligonucleotide
gtgcacacttaaggtcacccatacactctt

SEQ ID NO: 461776 - DNA, 30 bp, Artificial Sequence
  Synthetic oligonucleotide
ctagcctcctaacgcaaggatgatactctt

SEQ ID NO: 461777 - DNA, 30 bp, Artificial Sequence
  Synthetic oligonucleotide
ggatatctttgaaacgcgctagttactctt

SEQ ID NO: 461778 - DNA, 30 bp, Artificial Sequence
  Synthetic oligonucleotide
gggtcataggtaattttatatacacctctt

SEQ ID NO: 461779 - DNA, 30 bp, Artificial Sequence
  Synthetic oligonucleotide
tatagaaggagatgctgggccccgcctctt

SEQ ID NO: 461780 - DNA, 30 bp, Artificial Sequence
  Synthetic oligonucleotide
gaccgaggctatacaattccgaggcctctt

SEQ ID NO: 461781 - DNA, 30 bp, Artificial Sequence
  Synthetic oligonucleotide
tgttgataaaagaactcttgtaggcctctt

SEQ ID NO: 461782 - DNA, 30 bp, Artificial Sequence
  Synthetic oligonucleotide
gggacctccattggagagggccatcctctt

SEQ ID NO: 461783 - DNA, 30 bp, Artificial Sequence
  Synthetic oligonucleotide
tatactgctaatgaagaggtcgatcctctt

SEQ ID NO: 461784 - DNA, 30 bp, Artificial Sequence
  Synthetic oligonucleotide
tatgggaatgacttgttagtcgaagctctt

SEQ ID NO: 461785 - DNA, 30 bp, Artificial Sequence
  Synthetic oligonucleotide
taaatacagtgccctacggcagtagctctt

SEQ ID NO: 461786 - DNA, 30 bp, Artificial Sequence
  Synthetic oligonucleotide
aatgttcgatccatggagatcgtagctctt

SEQ ID NO: 461787 - DNA, 30 bp, Artificial Sequence
  Synthetic oligonucleotide
aagggtctgtggtcggtggctaacgctctt

SEQ ID NO: 461788 - DNA, 30 bp, Artificial Sequence
  Synthetic oligonucleotide
cataggattcctctcattaggcacgctctt

SEQ ID NO: 461789 - DNA, 30 bp, Artificial Sequence
  Synthetic oligonucleotide
taggcagtgtagtatttggtacgcgctctt

SEQ ID NO: 461790 - DNA, 30 bp, Artificial Sequence
  Synthetic oligonucleotide
agagctgtaatgttcacacaccgcgctctt

SEQ ID NO: 461791 - DNA, 30 bp, Artificial Sequence
  Synthetic oligonucleotide
agtactatttgaatggtgattgcggctctt

SEQ ID NO: 461792 - DNA, 29 bp, Artificial Sequence
  Synthetic oligonucleotide
ggaatttccgcaccccaggtgttgctctt

SEQ ID NO: 461793 - DNA, 30 bp, Artificial Sequence
  Synthetic oligonucleotide
attgtcaggtcgtgcacataataatctctt

SEQ ID NO: 461794 - DNA, 30 bp, Artificial Sequence
  Synthetic oligonucleotide
gtaagatctgtccagacaagaaaaagtctt

SEQ ID NO: 461795 - DNA, 30 bp, Artificial Sequence
  Synthetic oligonucleotide
gctattagttgggtacggttgccaagtctt

SEQ ID NO: 461796 - DNA, 30 bp, Artificial Sequence
  Synthetic oligonucleotide
aaatgtcaagccaatgagagtccaagtctt

SEQ ID NO: 461797 - DNA, 30 bp, Artificial Sequence
  Synthetic oligonucleotide
gcctctgttctcgtagttggaagaagtctt

SEQ ID NO: 461798 - DNA, 30 bp, Artificial Sequence
  Synthetic oligonucleotide
gtctcgtgatgtgctttgcattgaagtctt

SEQ ID NO: 461799 - DNA, 30 bp, Artificial Sequence
  Synthetic oligonucleotide
ggcaaatagcctctgtagacatccagtctt

SEQ ID NO: 461800 - DNA, 30 bp, Artificial Sequence
  Synthetic oligonucleotide
ggattacgaattttagtacctagcagtctt

SEQ ID NO: 461801 - DNA, 30 bp, Artificial Sequence
  Synthetic oligonucleotide
gagggacttatgtttcttgtcccgagtctt

SEQ ID NO: 461802 - DNA, 30 bp, Artificial Sequence
  Synthetic oligonucleotide
aacccaatgctcaatagcgatgctagtctt

SEQ ID NO: 461803 - DNA, 30 bp, Artificial Sequence
  Synthetic oligonucleotide
gcaatctgagtaaagattccgtttagtctt

SEQ ID NO: 461804 - DNA, 31 bp, Artificial Sequence
  Synthetic oligonucleotide
ctattcttaacaaaattgcaccagacgtctt

SEQ ID NO: 461805 - DNA, 30 bp, Artificial Sequence
  Synthetic oligonucleotide
cttgggaaggtggttgacgaagaccgtctt

SEQ ID NO: 461806 - DNA, 30 bp, Artificial Sequence
  Synthetic oligonucleotide
aatagtgcgggcttggtgaattaccgtctt

SEQ ID NO: 461807 - DNA, 30 bp, Artificial Sequence
  Synthetic oligonucleotide
gattgattaacgtaaagggtgacccgtctt

SEQ ID NO: 461808 - DNA, 30 bp, Artificial Sequence
  Synthetic oligonucleotide
agaagtatccagcacctgaacccccgtctt

SEQ ID NO: 461809 - DNA, 30 bp, Artificial Sequence
  Synthetic oligonucleotide
gccttgtctaggtgaggtcggtgccgtctt

SEQ ID NO: 461810 - DNA, 30 bp, Artificial Sequence
  Synthetic oligonucleotide
agcaaagatatccttttattggtgcgtctt

SEQ ID NO: 461811 - DNA, 30 bp, Artificial Sequence
  Synthetic oligonucleotide
ctcgagtcaaagggctttactggaggtctt

SEQ ID NO: 461812 - DNA, 30 bp, Artificial Sequence
  Synthetic oligonucleotide
ccagttaaatatggaatccgagacggtctt

SEQ ID NO: 461813 - DNA, 30 bp, Artificial Sequence
  Synthetic oligonucleotide
gatgcaaagaagtttataataaccggtctt

SEQ ID NO: 461814 - DNA, 30 bp, Artificial Sequence
  Synthetic oligonucleotide
aaatagagccatggcccttagacatgtctt

SEQ ID NO: 461815 - DNA, 30 bp, Artificial Sequence
  Synthetic oligonucleotide
tggtcatcgagcggttgtctcccatgtctt

SEQ ID NO: 461816 - DNA, 30 bp, Artificial Sequence
  Synthetic oligonucleotide
tcatggagcgttttttcaattgactgtctt

SEQ ID NO: 461817 - DNA, 31 bp, Artificial Sequence
  Synthetic oligonucleotide
attgcaatcgggggtaatttagtactgtctt

SEQ ID NO: 461818 - DNA, 30 bp, Artificial Sequence
  Synthetic oligonucleotide
actgcccctgttaaggagactcggtgtctt

SEQ ID NO: 461819 - DNA, 30 bp, Artificial Sequence
  Synthetic oligonucleotide
ggtttggaacacgatgcatgcgggtgtctt

SEQ ID NO: 461820 - DNA, 30 bp, Artificial Sequence
  Synthetic oligonucleotide
actgtggccggtacccgtcgggggtgtctt

SEQ ID NO: 461821 - DNA, 30 bp, Artificial Sequence
  Synthetic oligonucleotide
catatatgcgccagatcaattgcttgtctt

SEQ ID NO: 461822 - DNA, 30 bp, Artificial Sequence
  Synthetic oligonucleotide
gagttccgttccaatctaattgtttgtctt

SEQ ID NO: 461823 - DNA, 30 bp, Artificial Sequence
  Synthetic oligonucleotide
tgacacagtgtacggggatctttttgtctt

SEQ ID NO: 461824 - DNA, 30 bp, Artificial Sequence
  Synthetic oligonucleotide
ttaacatttgtcatcgagacagcaattctt

SEQ ID NO: 461825 - DNA, 30 bp, Artificial Sequence
  Synthetic oligonucleotide
gatgatcacctatagcaagccgcaattctt

SEQ ID NO: 461826 - DNA, 30 bp, Artificial Sequence
  Synthetic oligonucleotide
gtgtagtctttggggcactcgataattctt

SEQ ID NO: 461827 - DNA, 30 bp, Artificial Sequence
  Synthetic oligonucleotide
gcatgcattcggaggcagaaacggattctt

SEQ ID NO: 461828 - DNA, 30 bp, Artificial Sequence
  Synthetic oligonucleotide
tccaatgacacgtcattgacaggtattctt

SEQ ID NO: 461829 - DNA, 30 bp, Artificial Sequence
  Synthetic oligonucleotide
ataaagaggatttgatcatagggtattctt

SEQ ID NO: 461830 - DNA, 29 bp, Artificial Sequence
  Synthetic oligonucleotide
cttcttatccagattgcccctttattctt

SEQ ID NO: 461831 - DNA, 30 bp, Artificial Sequence
  Synthetic oligonucleotide
gggaattttaacggtaaaggcaaccttctt

SEQ ID NO: 461832 - DNA, 30 bp, Artificial Sequence
  Synthetic oligonucleotide
tccccgtatagcgttcagctaatccttctt

SEQ ID NO: 461833 - DNA, 30 bp, Artificial Sequence
  Synthetic oligonucleotide
ggtgcgcgcgacaaggaggtgttccttctt

SEQ ID NO: 461834 - DNA, 30 bp, Artificial Sequence
  Synthetic oligonucleotide
atggtagagaaatggaaagttcttcttctt

SEQ ID NO: 461835 - DNA, 30 bp, Artificial Sequence
  Synthetic oligonucleotide
cgtttagatattaatgccgagcacgttctt

SEQ ID NO: 461836 - DNA, 30 bp, Artificial Sequence
  Synthetic oligonucleotide
acttaggccagcagccctctaatggttctt

SEQ ID NO: 461837 - DNA, 30 bp, Artificial Sequence
  Synthetic oligonucleotide
gggtcttaatattcatattctaatgttctt

SEQ ID NO: 461838 - DNA, 30 bp, Artificial Sequence
  Synthetic oligonucleotide
atgagtgttgagaggctgaaagatgttctt

SEQ ID NO: 461839 - DNA, 30 bp, Artificial Sequence
  Synthetic oligonucleotide
gtgttacataaacgtttcattgttgttctt

SEQ ID NO: 461840 - DNA, 30 bp, Artificial Sequence
  Synthetic oligonucleotide
gtttatggcgaggcaacgtcggcatttctt

SEQ ID NO: 461841 - DNA, 30 bp, Artificial Sequence
  Synthetic oligonucleotide
ctcggccatctgtgtcctgggatatttctt

SEQ ID NO: 461842 - DNA, 30 bp, Artificial Sequence
  Synthetic oligonucleotide
aagttgagtcccgcataccgattctttctt

SEQ ID NO: 461843 - DNA, 30 bp, Artificial Sequence
  Synthetic oligonucleotide
aagcgaggtatggggatccatagttttctt

SEQ ID NO: 461844 - DNA, 30 bp, Artificial Sequence
  Synthetic oligonucleotide
gcgaaccgtgcgtacggccgtatttttctt

SEQ ID NO: 461845 - DNA, 30 bp, Artificial Sequence
  Synthetic oligonucleotide
tatccgaattgcagtctcggttaaaaagtt

SEQ ID NO: 461846 - DNA, 30 bp, Artificial Sequence
  Synthetic oligonucleotide
acgtggcttttcgtcgtgtgcttaaaagtt

SEQ ID NO: 461847 - DNA, 30 bp, Artificial Sequence
  Synthetic oligonucleotide
ttgccgtgtaagggcaatgcagacaaagtt

SEQ ID NO: 461848 - DNA, 30 bp, Artificial Sequence
  Synthetic oligonucleotide
gtaaacgcccaggataagtgggccaaagtt

SEQ ID NO: 461849 - DNA, 30 bp, Artificial Sequence
  Synthetic oligonucleotide
acgcatcctaataatttgcctgccaaagtt

SEQ ID NO: 461850 - DNA, 30 bp, Artificial Sequence
  Synthetic oligonucleotide
gactccagggcagatgaaatccgcaaagtt

SEQ ID NO: 461851 - DNA, 30 bp, Artificial Sequence
  Synthetic oligonucleotide
taccctgacgctagaccggtgggcaaagtt

SEQ ID NO: 461852 - DNA, 30 bp, Artificial Sequence
  Synthetic oligonucleotide
acctaatgctgcctttaattcaagaaagtt

SEQ ID NO: 461853 - DNA, 30 bp, Artificial Sequence
  Synthetic oligonucleotide
gcggctcgtccctcgtgagacgagaaagtt

SEQ ID NO: 461854 - DNA, 30 bp, Artificial Sequence
  Synthetic oligonucleotide
aattagagaaagtgggcctagaggaaagtt

SEQ ID NO: 461855 - DNA, 30 bp, Artificial Sequence
  Synthetic oligonucleotide
cttcccgtcggtcataggtgttcacaagtt

SEQ ID NO: 461856 - DNA, 30 bp, Artificial Sequence
  Synthetic oligonucleotide
tacccatgtgcatcgcataatacccaagtt

SEQ ID NO: 461857 - DNA, 30 bp, Artificial Sequence
  Synthetic oligonucleotide
tgtataatctaagtccattcagagcaagtt

SEQ ID NO: 461858 - DNA, 30 bp, Artificial Sequence
  Synthetic oligonucleotide
cagccgaatatcatgtaattgaggcaagtt

SEQ ID NO: 461859 - DNA, 30 bp, Artificial Sequence
  Synthetic oligonucleotide
aggccagagcgtcacggtcaatggcaagtt

SEQ ID NO: 461860 - DNA, 30 bp, Artificial Sequence
  Synthetic oligonucleotide
ttcggtaaatcttcaaggctcttgcaagtt

SEQ ID NO: 461861 - DNA, 30 bp, Artificial Sequence
  Synthetic oligonucleotide
ctaacggggcacaagacgggtcccgaagtt

SEQ ID NO: 461862 - DNA, 30 bp, Artificial Sequence
  Synthetic oligonucleotide
tgatctcaccacgcaggccgcctcgaagtt

SEQ ID NO: 461863 - DNA, 30 bp, Artificial Sequence
  Synthetic oligonucleotide
aatttcgtaaagggtcattgtgatgaagtt

SEQ ID NO: 461864 - DNA, 30 bp, Artificial Sequence
  Synthetic oligonucleotide
ttttggagagaattgcggaggccctaagtt

SEQ ID NO: 461865 - DNA, 30 bp, Artificial Sequence
  Synthetic oligonucleotide
ttctgatgagtcccacgaagggggtaagtt

SEQ ID NO: 461866 - DNA, 30 bp, Artificial Sequence
  Synthetic oligonucleotide
gcaactaagttagtgaaactagtgtaagtt

SEQ ID NO: 461867 - DNA, 30 bp, Artificial Sequence
  Synthetic oligonucleotide
tactaatatcatgcgaatgaaacttaagtt

SEQ ID NO: 461868 - DNA, 30 bp, Artificial Sequence
  Synthetic oligonucleotide
ataagatgcggattaccgtcttcttaagtt

SEQ ID NO: 461869 - DNA, 30 bp, Artificial Sequence
  Synthetic oligonucleotide
acgcttgcgttttatgcggcctccacagtt

SEQ ID NO: 461870 - DNA, 30 bp, Artificial Sequence
  Synthetic oligonucleotide
gttatgtttgttgtggacttacgcacagtt

SEQ ID NO: 461871 - DNA, 30 bp, Artificial Sequence
  Synthetic oligonucleotide
gccggttagactgtatgcacttgcacagtt

SEQ ID NO: 461872 - DNA, 30 bp, Artificial Sequence
  Synthetic oligonucleotide
tataactaatccacccgcacattcacagtt

SEQ ID NO: 461873 - DNA, 29 bp, Artificial Sequence
  Synthetic oligonucleotide
taattattgggtcgaaggacgcgacagtt

SEQ ID NO: 461874 - DNA, 30 bp, Artificial Sequence
  Synthetic oligonucleotide
gtgattaaacatcgactctgaatgacagtt

SEQ ID NO: 461875 - DNA, 30 bp, Artificial Sequence
  Synthetic oligonucleotide
cgagtgcactatttcggcacgctgacagtt

SEQ ID NO: 461876 - DNA, 30 bp, Artificial Sequence
  Synthetic oligonucleotide
cccactattgctgcccgccatttgacagtt

SEQ ID NO: 461877 - DNA, 30 bp, Artificial Sequence
  Synthetic oligonucleotide
atgtagcgacatggcattctagttccagtt

SEQ ID NO: 461878 - DNA, 30 bp, Artificial Sequence
  Synthetic oligonucleotide
catttaaacttggggtttcgcgaagcagtt

SEQ ID NO: 461879 - DNA, 30 bp, Artificial Sequence
  Synthetic oligonucleotide
tgaagctcaaggattagaacctgagcagtt

SEQ ID NO: 461880 - DNA, 30 bp, Artificial Sequence
  Synthetic oligonucleotide
aaaatagtattaagcccagtatccgcagtt

SEQ ID NO: 461881 - DNA, 30 bp, Artificial Sequence
  Synthetic oligonucleotide
cagccataattactgagacgcatggcagtt

SEQ ID NO: 461882 - DNA, 30 bp, Artificial Sequence
  Synthetic oligonucleotide
gaggttattacttgacgcgctctggcagtt

SEQ ID NO: 461883 - DNA, 30 bp, Artificial Sequence
  Synthetic oligonucleotide
ctatgcccatgtcaaagcctacctgcagtt

SEQ ID NO: 461884 - DNA, 30 bp, Artificial Sequence
  Synthetic oligonucleotide
atcgttgagtgtcaaccaacctgatcagtt

SEQ ID NO: 461885 - DNA, 31 bp, Artificial Sequence
  Synthetic oligonucleotide
tgtgccttataacattctggggtactcagtt

SEQ ID NO: 461886 - DNA, 30 bp, Artificial Sequence
  Synthetic oligonucleotide
aagaacctctctgtaggtatccgctcagtt

SEQ ID NO: 461887 - DNA, 30 bp, Artificial Sequence
  Synthetic oligonucleotide
gggcctctgttcacggttttggtctcagtt

SEQ ID NO: 461888 - DNA, 30 bp, Artificial Sequence
  Synthetic oligonucleotide
gtcggactcgacaaaggcgaagagtcagtt

SEQ ID NO: 461889 - DNA, 30 bp, Artificial Sequence
  Synthetic oligonucleotide
gcctatcttcgctttcttgtacggtcagtt

SEQ ID NO: 461890 - DNA, 30 bp, Artificial Sequence
  Synthetic oligonucleotide
cccttattaaggtatggtcagaaaagagtt

SEQ ID NO: 461891 - DNA, 30 bp, Artificial Sequence
  Synthetic oligonucleotide
atttccctttatcttagcgggttaagagtt

SEQ ID NO: 461892 - DNA, 30 bp, Artificial Sequence
  Synthetic oligonucleotide
tatgtaactcgggagactggtttaagagtt

SEQ ID NO: 461893 - DNA, 30 bp, Artificial Sequence
  Synthetic oligonucleotide
atattgcagtatccatcggcatagagagtt

SEQ ID NO: 461894 - DNA, 30 bp, Artificial Sequence
  Synthetic oligonucleotide
caccaaactgctcaggtcgaccttagagtt

SEQ ID NO: 461895 - DNA, 30 bp, Artificial Sequence
  Synthetic oligonucleotide
ctttgtggttacctatttccttttagagtt

SEQ ID NO: 461896 - DNA, 30 bp, Artificial Sequence
  Synthetic oligonucleotide
ctgcccgtggggctgaacttagaacgagtt

SEQ ID NO: 461897 - DNA, 30 bp, Artificial Sequence
  Synthetic oligonucleotide
cgatattgtatttttgcatccctacgagtt

SEQ ID NO: 461898 - DNA, 30 bp, Artificial Sequence
  Synthetic oligonucleotide
attatatttggcggctggaaaaaccgagtt

SEQ ID NO: 461899 - DNA, 30 bp, Artificial Sequence
  Synthetic oligonucleotide
aaacctccaccgcgtcaaggcttccgagtt

SEQ ID NO: 461900 - DNA, 30 bp, Artificial Sequence
  Synthetic oligonucleotide
accggagccggtttgacaccgaatcgagtt

SEQ ID NO: 461901 - DNA, 30 bp, Artificial Sequence
  Synthetic oligonucleotide
acaggtaacagcctaagtaccgcaggagtt

SEQ ID NO: 461902 - DNA, 30 bp, Artificial Sequence
  Synthetic oligonucleotide
ttgggggattctttcagcccgtccggagtt

SEQ ID NO: 461903 - DNA, 30 bp, Artificial Sequence
  Synthetic oligonucleotide
caattgtgctttcctgctgacgggggagtt

SEQ ID NO: 461904 - DNA, 30 bp, Artificial Sequence
  Synthetic oligonucleotide
ttattagttatactggtaatgaatggagtt

SEQ ID NO: 461905 - DNA, 30 bp, Artificial Sequence
  Synthetic oligonucleotide
tggcagtttttcataaattacactggagtt

SEQ ID NO: 461906 - DNA, 30 bp, Artificial Sequence
  Synthetic oligonucleotide
gcgcgagtgttcgggggcgggtttggagtt

SEQ ID NO: 461907 - DNA, 30 bp, Artificial Sequence
  Synthetic oligonucleotide
tactggttgctgcggcgcgtttcatgagtt

SEQ ID NO: 461908 - DNA, 30 bp, Artificial Sequence
  Synthetic oligonucleotide
ttccattattgtagtaccgttaggtgagtt

SEQ ID NO: 461909 - DNA, 30 bp, Artificial Sequence
  Synthetic oligonucleotide
taaaatcggcggctaggttatccttgagtt

SEQ ID NO: 461910 - DNA, 30 bp, Artificial Sequence
  Synthetic oligonucleotide
gcaaagcacgtcaagtgtttcatttgagtt

SEQ ID NO: 461911 - DNA, 30 bp, Artificial Sequence
  Synthetic oligonucleotide
tgtagtagacctatacaaaaattttgagtt

SEQ ID NO: 461912 - DNA, 30 bp, Artificial Sequence
  Synthetic oligonucleotide
cttcggcaccgaaagactgccgaaatagtt

SEQ ID NO: 461913 - DNA, 30 bp, Artificial Sequence
  Synthetic oligonucleotide
tcgtagtagctcacttaccggagaatagtt

SEQ ID NO: 461914 - DNA, 30 bp, Artificial Sequence
  Synthetic oligonucleotide
agaacttaagggaccgtagtgcccatagtt

SEQ ID NO: 461915 - DNA, 30 bp, Artificial Sequence
  Synthetic oligonucleotide
gcaacgcagcagttggactacctgatagtt

SEQ ID NO: 461916 - DNA, 30 bp, Artificial Sequence
  Synthetic oligonucleotide
aatcaacaggtagctgctatcttactagtt

SEQ ID NO: 461917 - DNA, 30 bp, Artificial Sequence
  Synthetic oligonucleotide
aggttggtcaggcgctgcaggttactagtt

SEQ ID NO: 461918 - DNA, 30 bp, Artificial Sequence
  Synthetic oligonucleotide
gagtggggcggagttactgtatacctagtt

SEQ ID NO: 461919 - DNA, 30 bp, Artificial Sequence
  Synthetic oligonucleotide
gctccactacaaaccctactggccctagtt

SEQ ID NO: 461920 - DNA, 30 bp, Artificial Sequence
  Synthetic oligonucleotide
gctactcgactacgttcaccgcagctagtt

SEQ ID NO: 461921 - DNA, 30 bp, Artificial Sequence
  Synthetic oligonucleotide
tccggatccgacaggggtctctagctagtt

SEQ ID NO: 461922 - DNA, 30 bp, Artificial Sequence
  Synthetic oligonucleotide
gtgattcactacttcgggtttgttctagtt

SEQ ID NO: 461923 - DNA, 30 bp, Artificial Sequence
  Synthetic oligonucleotide
ccctacaatggattcagctgactagtagtt

SEQ ID NO: 461924 - DNA, 30 bp, Artificial Sequence
  Synthetic oligonucleotide
gacagcctacagctcaaggtgctagtagtt

SEQ ID NO: 461925 - DNA, 30 bp, Artificial Sequence
  Synthetic oligonucleotide
accccatgtggagttctgtagttagtagtt

SEQ ID NO: 461926 - DNA, 30 bp, Artificial Sequence
  Synthetic oligonucleotide
ctcctgcgcgcttcgtattctcaggtagtt

SEQ ID NO: 461927 - DNA, 30 bp, Artificial Sequence
  Synthetic oligonucleotide
ccagcctataaatggtgtgttccggtagtt

SEQ ID NO: 461928 - DNA, 30 bp, Artificial Sequence
  Synthetic oligonucleotide
taagtgtttgttggactgctcctggtagtt

SEQ ID NO: 461929 - DNA, 30 bp, Artificial Sequence
  Synthetic oligonucleotide
taactgatatttttttgttagaatgtagtt

SEQ ID NO: 461930 - DNA, 30 bp, Artificial Sequence
  Synthetic oligonucleotide
acgtttaacagtgtccggaataatgtagtt

SEQ ID NO: 461931 - DNA, 30 bp, Artificial Sequence
  Synthetic oligonucleotide
gtgttaccgcctacatatgaaattgtagtt

SEQ ID NO: 461932 - DNA, 30 bp, Artificial Sequence
  Synthetic oligonucleotide
gtctctgatccacttattcagtaattagtt

SEQ ID NO: 461933 - DNA, 30 bp, Artificial Sequence
  Synthetic oligonucleotide
ataaattctagtcggggtccgtcattagtt

SEQ ID NO: 461934 - DNA, 30 bp, Artificial Sequence
  Synthetic oligonucleotide
aatccgggtaatataacgaggtgattagtt

SEQ ID NO: 461935 - DNA, 30 bp, Artificial Sequence
  Synthetic oligonucleotide
aggtgactttattttagcaattacttagtt

SEQ ID NO: 461936 - DNA, 30 bp, Artificial Sequence
  Synthetic oligonucleotide
ggtaaattggtctgaaaggggctcttagtt

SEQ ID NO: 461937 - DNA, 30 bp, Artificial Sequence
  Synthetic oligonucleotide
aatgacgttttactaatccgccggttagtt

SEQ ID NO: 461938 - DNA, 30 bp, Artificial Sequence
  Synthetic oligonucleotide
atggcagctcgactatataaggttttagtt

SEQ ID NO: 461939 - DNA, 30 bp, Artificial Sequence
  Synthetic oligonucleotide
ctcgcacggccgagagacgcgttaaacgtt

SEQ ID NO: 461940 - DNA, 30 bp, Artificial Sequence
  Synthetic oligonucleotide
gtgcggggcgtaagagcgtagcttaacgtt

SEQ ID NO: 461941 - DNA, 31 bp, Artificial Sequence
  Synthetic oligonucleotide
tatagtagctcagtaggttctatgacacgtt

SEQ ID NO: 461942 - DNA, 30 bp, Artificial Sequence
  Synthetic oligonucleotide
gtacgatagtcagaggcggcaagccacgtt

SEQ ID NO: 461943 - DNA, 30 bp, Artificial Sequence
  Synthetic oligonucleotide
cgagtgtagattttgtttgacaagcacgtt

SEQ ID NO: 461944 - DNA, 30 bp, Artificial Sequence
  Synthetic oligonucleotide
actgtggtaagctctcttacatagcacgtt

SEQ ID NO: 461945 - DNA, 30 bp, Artificial Sequence
  Synthetic oligonucleotide
ccggggtggttagggcctgcgtcgcacgtt

SEQ ID NO: 461946 - DNA, 30 bp, Artificial Sequence
  Synthetic oligonucleotide
atactctgctgtagggtagtcatgcacgtt

SEQ ID NO: 461947 - DNA, 30 bp, Artificial Sequence
  Synthetic oligonucleotide
ctctttggacgccatggtctcctgcacgtt

SEQ ID NO: 461948 - DNA, 30 bp, Artificial Sequence
  Synthetic oligonucleotide
ggtcttaggcggctcccgccattgcacgtt

SEQ ID NO: 461949 - DNA, 30 bp, Artificial Sequence
  Synthetic oligonucleotide
agacacacgttatcggatggtagtcacgtt

SEQ ID NO: 461950 - DNA, 30 bp, Artificial Sequence
  Synthetic oligonucleotide
ttaataggaccgccaaggatccgtcacgtt

SEQ ID NO: 461951 - DNA, 30 bp, Artificial Sequence
  Synthetic oligonucleotide
acagcagtcgagatgcctatgcgtcacgtt

SEQ ID NO: 461952 - DNA, 30 bp, Artificial Sequence
  Synthetic oligonucleotide
gttacggcgcagataagatgcaaggacgtt

SEQ ID NO: 461953 - DNA, 30 bp, Artificial Sequence
  Synthetic oligonucleotide
ggtaattaagttcggaagatacaggacgtt

SEQ ID NO: 461954 - DNA, 30 bp, Artificial Sequence
  Synthetic oligonucleotide
gatctgagtaacgccgaaacagatgacgtt

SEQ ID NO: 461955 - DNA, 30 bp, Artificial Sequence
  Synthetic oligonucleotide
tagactgtcgacaaaaacatgggatacgtt

SEQ ID NO: 461956 - DNA, 30 bp, Artificial Sequence
  Synthetic oligonucleotide
acagtaagatttacgcttggctgatacgtt

SEQ ID NO: 461957 - DNA, 30 bp, Artificial Sequence
  Synthetic oligonucleotide
tcaaatgtgcatggtgtttcgagctacgtt

SEQ ID NO: 461958 - DNA, 30 bp, Artificial Sequence
  Synthetic oligonucleotide
ccactgaactctgcaatgcccgtgtacgtt

SEQ ID NO: 461959 - DNA, 30 bp, Artificial Sequence
  Synthetic oligonucleotide
cgatccggaactttcgcctgcacttacgtt

SEQ ID NO: 461960 - DNA, 30 bp, Artificial Sequence
  Synthetic oligonucleotide
taaataggaataggcctactaggttacgtt

SEQ ID NO: 461961 - DNA, 30 bp, Artificial Sequence
  Synthetic oligonucleotide
gctgcatgtgtttggtcatatagaaccgtt

SEQ ID NO: 461962 - DNA, 30 bp, Artificial Sequence
  Synthetic oligonucleotide
tgagctgtgacaacaattgaaaacaccgtt

SEQ ID NO: 461963 - DNA, 30 bp, Artificial Sequence
  Synthetic oligonucleotide
agctgcaactttagtttgactcggaccgtt

SEQ ID NO: 461964 - DNA, 30 bp, Artificial Sequence
  Synthetic oligonucleotide
agtctggagacaacggagtttggtaccgtt

SEQ ID NO: 461965 - DNA, 30 bp, Artificial Sequence
  Synthetic oligonucleotide
gtgttatgtagcacatatctacaacccgtt

SEQ ID NO: 461966 - DNA, 30 bp, Artificial Sequence
  Synthetic oligonucleotide
aaactgattgtaaatgcaacgcaacccgtt

SEQ ID NO: 461967 - DNA, 30 bp, Artificial Sequence
  Synthetic oligonucleotide
gacgcaagagtggaccccgtggaacccgtt

SEQ ID NO: 461968 - DNA, 30 bp, Artificial Sequence
  Synthetic oligonucleotide
taacagatatatagcttctgaccccccgtt

SEQ ID NO: 461969 - DNA, 30 bp, Artificial Sequence
  Synthetic oligonucleotide
taattttgcttgatcttgcttcgccccgtt

SEQ ID NO: 461970 - DNA, 30 bp, Artificial Sequence
  Synthetic oligonucleotide
ctgatcgtcattccagttcgctagcccgtt

SEQ ID NO: 461971 - DNA, 30 bp, Artificial Sequence
  Synthetic oligonucleotide
agcaatcttaggctttgatttacgcccgtt

SEQ ID NO: 461972 - DNA, 30 bp, Artificial Sequence
  Synthetic oligonucleotide
cctgtcctacatgacatcggggcgcccgtt

SEQ ID NO: 461973 - DNA, 30 bp, Artificial Sequence
  Synthetic oligonucleotide
ggacgcctgagtcgatggtcctatcccgtt

SEQ ID NO: 461974 - DNA, 30 bp, Artificial Sequence
  Synthetic oligonucleotide
cccgctcactagtcactaatacgagccgtt

SEQ ID NO: 461975 - DNA, 30 bp, Artificial Sequence
  Synthetic oligonucleotide
tgacgctgcaaccaactagttttcgccgtt

SEQ ID NO: 461976 - DNA, 30 bp, Artificial Sequence
  Synthetic oligonucleotide
aggcccgcctattaggagtactgggccgtt

SEQ ID NO: 461977 - DNA, 30 bp, Artificial Sequence
  Synthetic oligonucleotide
tcaaatatgtactgtcgcgaccgtgccgtt

SEQ ID NO: 461978 - DNA, 30 bp, Artificial Sequence
  Synthetic oligonucleotide
aaataagttgtaaaattatgacaatccgtt

SEQ ID NO: 461979 - DNA, 30 bp, Artificial Sequence
  Synthetic oligonucleotide
atgtagtaacgggcggccgggtgctccgtt

SEQ ID NO: 461980 - DNA, 30 bp, Artificial Sequence
  Synthetic oligonucleotide
gaaggcagggagcaaacatagtgttccgtt

SEQ ID NO: 461981 - DNA, 30 bp, Artificial Sequence
  Synthetic oligonucleotide
gtgcagcatataggactatgtagaagcgtt

SEQ ID NO: 461982 - DNA, 30 bp, Artificial Sequence
  Synthetic oligonucleotide
taggcttgcacaaactctgccggaagcgtt

SEQ ID NO: 461983 - DNA, 30 bp, Artificial Sequence
  Synthetic oligonucleotide
ttgtgttctgacaccttgttaggcagcgtt

SEQ ID NO: 461984 - DNA, 30 bp, Artificial Sequence
  Synthetic oligonucleotide
actatttgctaccgtgtgggttgcagcgtt

SEQ ID NO: 461985 - DNA, 30 bp, Artificial Sequence
  Synthetic oligonucleotide
tcggctcggccgagacggggaccgagcgtt

SEQ ID NO: 461986 - DNA, 30 bp, Artificial Sequence
  Synthetic oligonucleotide
aggtatagggaataggggtcaagtagcgtt

SEQ ID NO: 461987 - DNA, 30 bp, Artificial Sequence
  Synthetic oligonucleotide
gattgtcgttcgctgaagggaaagcgcgtt

SEQ ID NO: 461988 - DNA, 30 bp, Artificial Sequence
  Synthetic oligonucleotide
ttcagtcttcctgtccggggcgaaggcgtt

SEQ ID NO: 461989 - DNA, 30 bp, Artificial Sequence
  Synthetic oligonucleotide
tattggaacccatagcaaggtccaggcgtt

SEQ ID NO: 461990 - DNA, 30 bp, Artificial Sequence
  Synthetic oligonucleotide
tgattctctgtatgaagagattgaggcgtt

SEQ ID NO: 461991 - DNA, 30 bp, Artificial Sequence
  Synthetic oligonucleotide
gcgtggtcgctgttcaacacactaggcgtt

SEQ ID NO: 461992 - DNA, 30 bp, Artificial Sequence
  Synthetic oligonucleotide
tggctgcttacacgccatccgtagggcgtt

SEQ ID NO: 461993 - DNA, 30 bp, Artificial Sequence
  Synthetic oligonucleotide
ggcttgagtcacagttgcgtttagggcgtt

SEQ ID NO: 461994 - DNA, 30 bp, Artificial Sequence
  Synthetic oligonucleotide
ccaaataaatgttagtttttcaggggcgtt

SEQ ID NO: 461995 - DNA, 30 bp, Artificial Sequence
  Synthetic oligonucleotide
ccaaggcgccacggcggggggactggcgtt

SEQ ID NO: 461996 - DNA, 30 bp, Artificial Sequence
  Synthetic oligonucleotide
cacttgtctcagcaatgttttgtatgcgtt

SEQ ID NO: 461997 - DNA, 30 bp, Artificial Sequence
  Synthetic oligonucleotide
tgcgtctcggttaagtattgagactgcgtt

SEQ ID NO: 461998 - DNA, 30 bp, Artificial Sequence
  Synthetic oligonucleotide
tacggggtctgtgatggacgattctgcgtt

SEQ ID NO: 461999 - DNA, 30 bp, Artificial Sequence
  Synthetic oligonucleotide
gtacagacgggcggtgtgacgacgtgcgtt

SEQ ID NO: 462000 - DNA, 30 bp, Artificial Sequence
  Synthetic oligonucleotide
aatactgctcttaggcgtatggtgtgcgtt

SEQ ID NO: 462001 - DNA, 30 bp, Artificial Sequence
  Synthetic oligonucleotide
agagtcttgtcattgcgagggaattgcgtt

SEQ ID NO: 462002 - DNA, 30 bp, Artificial Sequence
  Synthetic oligonucleotide
ttaacgtccgtttgcagattatcttgcgtt

SEQ ID NO: 462003 - DNA, 30 bp, Artificial Sequence
  Synthetic oligonucleotide
catgaaagtcgcccatacatacgttgcgtt

SEQ ID NO: 462004 - DNA, 30 bp, Artificial Sequence
  Synthetic oligonucleotide
caacatttaattgacactatgctttgcgtt

SEQ ID NO: 462005 - DNA, 30 bp, Artificial Sequence
  Synthetic oligonucleotide
tgtagtgtggcgaaatcgaaaacaatcgtt

SEQ ID NO: 462006 - DNA, 30 bp, Artificial Sequence
  Synthetic oligonucleotide
atccaggaaaggttgtacccttccatcgtt

SEQ ID NO: 462007 - DNA, 30 bp, Artificial Sequence
  Synthetic oligonucleotide
catagctcagaaattttcgcaggcatcgtt

SEQ ID NO: 462008 - DNA, 30 bp, Artificial Sequence
  Synthetic oligonucleotide
cccgtgtcgacaccactgatgcagatcgtt

SEQ ID NO: 462009 - DNA, 30 bp, Artificial Sequence
  Synthetic oligonucleotide
ctcacaagatgggtcacatatatgatcgtt

SEQ ID NO: 462010 - DNA, 30 bp, Artificial Sequence
  Synthetic oligonucleotide
gagtttagtcgtcttactactaaactcgtt

SEQ ID NO: 462011 - DNA, 30 bp, Artificial Sequence
  Synthetic oligonucleotide
gggaatacaaggtgtgaatccatactcgtt

SEQ ID NO: 462012 - DNA, 30 bp, Artificial Sequence
  Synthetic oligonucleotide
gagactaggttccagcttagcatactcgtt

SEQ ID NO: 462013 - DNA, 30 bp, Artificial Sequence
  Synthetic oligonucleotide
ctaccacctactcagctaccgtacctcgtt

SEQ ID NO: 462014 - DNA, 30 bp, Artificial Sequence
  Synthetic oligonucleotide
acttctttcgggcaaaatgaagtcctcgtt

SEQ ID NO: 462015 - DNA, 30 bp, Artificial Sequence
  Synthetic oligonucleotide
ccctgcttagtgtgggtgatccggctcgtt

SEQ ID NO: 462016 - DNA, 30 bp, Artificial Sequence
  Synthetic oligonucleotide
atagcagctgacattgactcggtgctcgtt

SEQ ID NO: 462017 - DNA, 30 bp, Artificial Sequence
  Synthetic oligonucleotide
attccagggcggttgttattacctctcgtt

SEQ ID NO: 462018 - DNA, 30 bp, Artificial Sequence
  Synthetic oligonucleotide
gcacagctcaccgggcttccggcagtcgtt

SEQ ID NO: 462019 - DNA, 30 bp, Artificial Sequence
  Synthetic oligonucleotide
aggtcctgtgataaccgagatgcagtcgtt

SEQ ID NO: 462020 - DNA, 30 bp, Artificial Sequence
  Synthetic oligonucleotide
tattaccggaccatcgtgctagtagtcgtt

SEQ ID NO: 462021 - DNA, 30 bp, Artificial Sequence
  Synthetic oligonucleotide
cggatcaggtccaaggaaacggtcgtcgtt

SEQ ID NO: 462022 - DNA, 30 bp, Artificial Sequence
  Synthetic oligonucleotide
gcagagtcacgagcttattatatggtcgtt

SEQ ID NO: 462023 - DNA, 30 bp, Artificial Sequence
  Synthetic oligonucleotide
gatttgttgttccgtatgaatttggtcgtt

SEQ ID NO: 462024 - DNA, 25 bp, Artificial Sequence
  Synthetic oligonucleotide
actgttttatgaagattctgtcgtt

SEQ ID NO: 462025 - DNA, 30 bp, Artificial Sequence
  Synthetic oligonucleotide
cgcaaagcgtacacgagacttggtgtcgtt

SEQ ID NO: 462026 - DNA, 30 bp, Artificial Sequence
  Synthetic oligonucleotide
tataaccgttctctaactcaatgtgtcgtt

SEQ ID NO: 462027 - DNA, 30 bp, Artificial Sequence
  Synthetic oligonucleotide
tgttttaaggtgaaagtactccttgtcgtt

SEQ ID NO: 462028 - DNA, 30 bp, Artificial Sequence
  Synthetic oligonucleotide
cattcagcttagtcgtgtatagaattcgtt

SEQ ID NO: 462029 - DNA, 30 bp, Artificial Sequence
  Synthetic oligonucleotide
caatacgtactccgtatatcgggattcgtt

SEQ ID NO: 462030 - DNA, 30 bp, Artificial Sequence
  Synthetic oligonucleotide
attcaactgaaagtcctaaatggcttcgtt

SEQ ID NO: 462031 - DNA, 30 bp, Artificial Sequence
  Synthetic oligonucleotide
ggaatgccatacggctattgccagttcgtt

SEQ ID NO: 462032 - DNA, 30 bp, Artificial Sequence
  Synthetic oligonucleotide
gcgcgctgcaacaccgctagctgtttcgtt

SEQ ID NO: 462033 - DNA, 30 bp, Artificial Sequence
  Synthetic oligonucleotide
aggctataaacaccgaaagtcggaaaggtt

SEQ ID NO: 462034 - DNA, 30 bp, Artificial Sequence
  Synthetic oligonucleotide
cgactttcggcctcctgctccataaaggtt

SEQ ID NO: 462035 - DNA, 30 bp, Artificial Sequence
  Synthetic oligonucleotide
acgctattttgaacacacgtgaagaaggtt

SEQ ID NO: 462036 - DNA, 30 bp, Artificial Sequence
  Synthetic oligonucleotide
attatgcggtacaactcttcacagaaggtt

SEQ ID NO: 462037 - DNA, 30 bp, Artificial Sequence
  Synthetic oligonucleotide
ttctagtacacagataattatacgaaggtt

SEQ ID NO: 462038 - DNA, 30 bp, Artificial Sequence
  Synthetic oligonucleotide
gtgacgcttatcatcaaaggagtgaaggtt

SEQ ID NO: 462039 - DNA, 30 bp, Artificial Sequence
  Synthetic oligonucleotide
ggtgggggaatactgggttcgagtaaggtt

SEQ ID NO: 462040 - DNA, 30 bp, Artificial Sequence
  Synthetic oligonucleotide
aacaagcttcttgggtagtacattaaggtt

SEQ ID NO: 462041 - DNA, 30 bp, Artificial Sequence
  Synthetic oligonucleotide
ggcggaaaggtcgggggggataaacaggtt

SEQ ID NO: 462042 - DNA, 30 bp, Artificial Sequence
  Synthetic oligonucleotide
tgatccaaaagtatatgcagggaacaggtt

SEQ ID NO: 462043 - DNA, 30 bp, Artificial Sequence
  Synthetic oligonucleotide
cacacgaacggaacgggccaatcacaggtt

SEQ ID NO: 462044 - DNA, 30 bp, Artificial Sequence
  Synthetic oligonucleotide
ttggtaatcggctcttaaatatgacaggtt

SEQ ID NO: 462045 - DNA, 30 bp, Artificial Sequence
  Synthetic oligonucleotide
agcttccaattgagtagatttatacaggtt

SEQ ID NO: 462046 - DNA, 30 bp, Artificial Sequence
  Synthetic oligonucleotide
ggtccggagtggtctggtgactagcaggtt

SEQ ID NO: 462047 - DNA, 30 bp, Artificial Sequence
  Synthetic oligonucleotide
caagagaattagtacggttggccgcaggtt

SEQ ID NO: 462048 - DNA, 30 bp, Artificial Sequence
  Synthetic oligonucleotide
agaatttttggggatttaatcctgcaggtt

SEQ ID NO: 462049 - DNA, 30 bp, Artificial Sequence
  Synthetic oligonucleotide
gatcaactcagatttagcgagattcaggtt

SEQ ID NO: 462050 - DNA, 30 bp, Artificial Sequence
  Synthetic oligonucleotide
gcgggcatacccttcaagggagaagaggtt

SEQ ID NO: 462051 - DNA, 30 bp, Artificial Sequence
  Synthetic oligonucleotide
tactgtattaattcgtagagtgaagaggtt

SEQ ID NO: 462052 - DNA, 30 bp, Artificial Sequence
  Synthetic oligonucleotide
attctccatgtcctacggcaaggagaggtt

SEQ ID NO: 462053 - DNA, 30 bp, Artificial Sequence
  Synthetic oligonucleotide
actacgtctaacgcacagtctggagaggtt

SEQ ID NO: 462054 - DNA, 30 bp, Artificial Sequence
  Synthetic oligonucleotide
atgtattctttgctctgtcaaatcgaggtt

SEQ ID NO: 462055 - DNA, 30 bp, Artificial Sequence
  Synthetic oligonucleotide
atacgggcacctcacgggccccaggaggtt

SEQ ID NO: 462056 - DNA, 30 bp, Artificial Sequence
  Synthetic oligonucleotide
ggtttatctaaaatgtccgaatcggaggtt

SEQ ID NO: 462057 - DNA, 30 bp, Artificial Sequence
  Synthetic oligonucleotide
ttgcacgccaggcgtttaaacagggaggtt

SEQ ID NO: 462058 - DNA, 30 bp, Artificial Sequence
  Synthetic oligonucleotide
gttacaaagtcttttaagctatcataggtt

SEQ ID NO: 462059 - DNA, 30 bp, Artificial Sequence
  Synthetic oligonucleotide
cggtaactttttatgggtgtcagataggtt

SEQ ID NO: 462060 - DNA, 30 bp, Artificial Sequence
  Synthetic oligonucleotide
aagtaactttcgtattggaatgcctaggtt

SEQ ID NO: 462061 - DNA, 30 bp, Artificial Sequence
  Synthetic oligonucleotide
agtactattctataagaatgggagtaggtt

SEQ ID NO: 462062 - DNA, 30 bp, Artificial Sequence
  Synthetic oligonucleotide
tcagacccaattaaggcggtaacgtaggtt

SEQ ID NO: 462063 - DNA, 30 bp, Artificial Sequence
  Synthetic oligonucleotide
gatgaccacgcgcaaaacattctgtaggtt

SEQ ID NO: 462064 - DNA, 30 bp, Artificial Sequence
  Synthetic oligonucleotide
gcaatggcgtgcattttacgccattaggtt

SEQ ID NO: 462065 - DNA, 30 bp, Artificial Sequence
  Synthetic oligonucleotide
atgggcgcttcgaattttttcctttaggtt

SEQ ID NO: 462066 - DNA, 30 bp, Artificial Sequence
  Synthetic oligonucleotide
caaacgttgcccttaataggcaaaacggtt

SEQ ID NO: 462067 - DNA, 30 bp, Artificial Sequence
  Synthetic oligonucleotide
caaattcctttctaccgttgataaacggtt

SEQ ID NO: 462068 - DNA, 30 bp, Artificial Sequence
  Synthetic oligonucleotide
cagtattactaccataggtagataacggtt

SEQ ID NO: 462069 - DNA, 30 bp, Artificial Sequence
  Synthetic oligonucleotide
tccatcacgaatggtttaatctccacggtt

SEQ ID NO: 462070 - DNA, 30 bp, Artificial Sequence
  Synthetic oligonucleotide
agagggatggctcgcaaggtgagcacggtt

SEQ ID NO: 462071 - DNA, 30 bp, Artificial Sequence
  Synthetic oligonucleotide
gatatcggttcataaaggcccgagacggtt

SEQ ID NO: 462072 - DNA, 30 bp, Artificial Sequence
  Synthetic oligonucleotide
agatggtcgggtcctaagcatcggacggtt

SEQ ID NO: 462073 - DNA, 30 bp, Artificial Sequence
  Synthetic oligonucleotide
cccttcatgtatgccgagtctatgacggtt

SEQ ID NO: 462074 - DNA, 30 bp, Artificial Sequence
  Synthetic oligonucleotide
gctcagaaagcatctttacctgctacggtt

SEQ ID NO: 462075 - DNA, 30 bp, Artificial Sequence
  Synthetic oligonucleotide
gaacaggtcagtgacgcacccagtacggtt

SEQ ID NO: 462076 - DNA, 30 bp, Artificial Sequence
  Synthetic oligonucleotide
gtactggcacaaagtggcccagttacggtt

SEQ ID NO: 462077 - DNA, 30 bp, Artificial Sequence
  Synthetic oligonucleotide
agggttgaagtcggggaagtccccccggtt

SEQ ID NO: 462078 - DNA, 30 bp, Artificial Sequence
  Synthetic oligonucleotide
tccgccgtggggtcggttgagttcccggtt

SEQ ID NO: 462079 - DNA, 30 bp, Artificial Sequence
  Synthetic oligonucleotide
ttgatatatgaatgtgtatatgcgccggtt

SEQ ID NO: 462080 - DNA, 30 bp, Artificial Sequence
  Synthetic oligonucleotide
agttccttagtctgtagcaagcatccggtt

SEQ ID NO: 462081 - DNA, 30 bp, Artificial Sequence
  Synthetic oligonucleotide
actattttatggtgacctgttcgtccggtt

SEQ ID NO: 462082 - DNA, 30 bp, Artificial Sequence
  Synthetic oligonucleotide
gtttagtctagcaacatggatgaagcggtt

SEQ ID NO: 462083 - DNA, 30 bp, Artificial Sequence
  Synthetic oligonucleotide
cgtggattttatagatggttacgagcggtt

SEQ ID NO: 462084 - DNA, 30 bp, Artificial Sequence
  Synthetic oligonucleotide
tttccctacagttacactctcggcgcggtt

SEQ ID NO: 462085 - DNA, 30 bp, Artificial Sequence
  Synthetic oligonucleotide
ctagggatctcaatacttgtgcaggcggtt

SEQ ID NO: 462086 - DNA, 30 bp, Artificial Sequence
  Synthetic oligonucleotide
ctcctgtgagcgttctccgcacgggcggtt

SEQ ID NO: 462087 - DNA, 30 bp, Artificial Sequence
  Synthetic oligonucleotide
tggtgtgggtaatcagccctcggtgcggtt

SEQ ID NO: 462088 - DNA, 30 bp, Artificial Sequence
  Synthetic oligonucleotide
cttcaccaccctttaatgcagggtgcggtt

SEQ ID NO: 462089 - DNA, 30 bp, Artificial Sequence
  Synthetic oligonucleotide
tttacaatgtatatccgaaatggtgcggtt

SEQ ID NO: 462090 - DNA, 30 bp, Artificial Sequence
  Synthetic oligonucleotide
gtgtgcagctactagctttgcacatcggtt

SEQ ID NO: 462091 - DNA, 30 bp, Artificial Sequence
  Synthetic oligonucleotide
gaagttaaaatcggatctccagcatcggtt

SEQ ID NO: 462092 - DNA, 30 bp, Artificial Sequence
  Synthetic oligonucleotide
tgaaatcctgtattgagacagatctcggtt

SEQ ID NO: 462093 - DNA, 30 bp, Artificial Sequence
  Synthetic oligonucleotide
aagaagctattggtggatccccggtcggtt

SEQ ID NO: 462094 - DNA, 30 bp, Artificial Sequence
  Synthetic oligonucleotide
atcggatacgccaataccgaatggtcggtt

SEQ ID NO: 462095 - DNA, 30 bp, Artificial Sequence
  Synthetic oligonucleotide
gctgggagcgccttggcacttttgtcggtt

SEQ ID NO: 462096 - DNA, 30 bp, Artificial Sequence
  Synthetic oligonucleotide
ctgtcgtgatttactgttaattattcggtt

SEQ ID NO: 462097 - DNA, 30 bp, Artificial Sequence
  Synthetic oligonucleotide
tggtataaaatccggggttctttttcggtt

SEQ ID NO: 462098 - DNA, 30 bp, Artificial Sequence
  Synthetic oligonucleotide
gagggctcccaaaatgcctacacaagggtt

SEQ ID NO: 462099 - DNA, 30 bp, Artificial Sequence
  Synthetic oligonucleotide
caccgaacatatacgttgtccgcaagggtt

SEQ ID NO: 462100 - DNA, 30 bp, Artificial Sequence
  Synthetic oligonucleotide
tcataacaaggaccggccattgcaagggtt

SEQ ID NO: 462101 - DNA, 30 bp, Artificial Sequence
  Synthetic oligonucleotide
aacttgacggcatatattgccagcagggtt

SEQ ID NO: 462102 - DNA, 30 bp, Artificial Sequence
  Synthetic oligonucleotide
agatggagacgaccccgcttaatcagggtt

SEQ ID NO: 462103 - DNA, 30 bp, Artificial Sequence
  Synthetic oligonucleotide
ttgtgccctgttcgactaataacgagggtt

SEQ ID NO: 462104 - DNA, 30 bp, Artificial Sequence
  Synthetic oligonucleotide
gaactcttatgaaaataccaagcgagggtt

SEQ ID NO: 462105 - DNA, 30 bp, Artificial Sequence
  Synthetic oligonucleotide
atttttgggagcaggcgtagtgcgagggtt

SEQ ID NO: 462106 - DNA, 30 bp, Artificial Sequence
  Synthetic oligonucleotide
acaagacggtccgatcgagttcggagggtt

SEQ ID NO: 462107 - DNA, 30 bp, Artificial Sequence
  Synthetic oligonucleotide
tactctctagtagtgggccacgggagggtt

SEQ ID NO: 462108 - DNA, 30 bp, Artificial Sequence
  Synthetic oligonucleotide
tcggaggaggctctagagccttttagggtt

SEQ ID NO: 462109 - DNA, 30 bp, Artificial Sequence
  Synthetic oligonucleotide
gtgatgtgacggatccaagcagaacgggtt

SEQ ID NO: 462110 - DNA, 30 bp, Artificial Sequence
  Synthetic oligonucleotide
tctcagaaacagcggtaacgcttacgggtt

SEQ ID NO: 462111 - DNA, 30 bp, Artificial Sequence
  Synthetic oligonucleotide
gcatacgtaattgctaaatcctaccgggtt

SEQ ID NO: 462112 - DNA, 30 bp, Artificial Sequence
  Synthetic oligonucleotide
attattgacgatctccgagaaatccgggtt

SEQ ID NO: 462113 - DNA, 30 bp, Artificial Sequence
  Synthetic oligonucleotide
gcacacgctctcgtgtatttcttccgggtt

SEQ ID NO: 462114 - DNA, 30 bp, Artificial Sequence
  Synthetic oligonucleotide
cccggacccgtaatcttaggctagcgggtt

SEQ ID NO: 462115 - DNA, 30 bp, Artificial Sequence
  Synthetic oligonucleotide
aaatattagctttgcagatagttgcgggtt

SEQ ID NO: 462116 - DNA, 30 bp, Artificial Sequence
  Synthetic oligonucleotide
tccttagacttccgaaagcagtaaggggtt

SEQ ID NO: 462117 - DNA, 30 bp, Artificial Sequence
  Synthetic oligonucleotide
tcgccggagttattgctcgtgggaggggtt

SEQ ID NO: 462118 - DNA, 30 bp, Artificial Sequence
  Synthetic oligonucleotide
taatgcctgataaccgggtggataggggtt

SEQ ID NO: 462119 - DNA, 30 bp, Artificial Sequence
  Synthetic oligonucleotide
tgaaccgtacctgcgtacgcaatcggggtt

SEQ ID NO: 462120 - DNA, 30 bp, Artificial Sequence
  Synthetic oligonucleotide
tatttagcaggtcgtttctgattcggggtt

SEQ ID NO: 462121 - DNA, 30 bp, Artificial Sequence
  Synthetic oligonucleotide
caatcatgggcctgcgtgtcctagggggtt

SEQ ID NO: 462122 - DNA, 30 bp, Artificial Sequence
  Synthetic oligonucleotide
attggcgggtattgtccggcaacgggggtt

SEQ ID NO: 462123 - DNA, 30 bp, Artificial Sequence
  Synthetic oligonucleotide
tctggaccttgtagcttttcaaggggggtt

SEQ ID NO: 462124 - DNA, 30 bp, Artificial Sequence
  Synthetic oligonucleotide
gtagttatccccaatcagttcgggggggtt

SEQ ID NO: 462125 - DNA, 30 bp, Artificial Sequence
  Synthetic oligonucleotide
tgaggacctcaagcggtgctggatggggtt

SEQ ID NO: 462126 - DNA, 30 bp, Artificial Sequence
  Synthetic oligonucleotide
ggctccgtatgcagttcatttcgtggggtt

SEQ ID NO: 462127 - DNA, 30 bp, Artificial Sequence
  Synthetic oligonucleotide
taagtcgttctaagattacatggtggggtt

SEQ ID NO: 462128 - DNA, 30 bp, Artificial Sequence
  Synthetic oligonucleotide
agactgaagcaaattacctttcgctgggtt

SEQ ID NO: 462129 - DNA, 30 bp, Artificial Sequence
  Synthetic oligonucleotide
gagtgaaaactcaactcggtatagtgggtt

SEQ ID NO: 462130 - DNA, 30 bp, Artificial Sequence
  Synthetic oligonucleotide
cgcaagcgcgtggctagggagaattgggtt

SEQ ID NO: 462131 - DNA, 30 bp, Artificial Sequence
  Synthetic oligonucleotide
tttctattatgcaaagatagctattgggtt

SEQ ID NO: 462132 - DNA, 30 bp, Artificial Sequence
  Synthetic oligonucleotide
attatgaaaaaaggcacatttccttgggtt

SEQ ID NO: 462133 - DNA, 30 bp, Artificial Sequence
  Synthetic oligonucleotide
ctcaggtatttagaacacaattcttgggtt

SEQ ID NO: 462134 - DNA, 30 bp, Artificial Sequence
  Synthetic oligonucleotide
tttacagcgggaagtgaggcttgttgggtt

SEQ ID NO: 462135 - DNA, 30 bp, Artificial Sequence
  Synthetic oligonucleotide
ctaaagttaccaccctgtagctgcatggtt

SEQ ID NO: 462136 - DNA, 30 bp, Artificial Sequence
  Synthetic oligonucleotide
cgtagacactgtcttggttaaaagatggtt

SEQ ID NO: 462137 - DNA, 30 bp, Artificial Sequence
  Synthetic oligonucleotide
gctggcgcttcggctggaggtacgatggtt

SEQ ID NO: 462138 - DNA, 30 bp, Artificial Sequence
  Synthetic oligonucleotide
tatgcttctgaaaaataggatcctatggtt

SEQ ID NO: 462139 - DNA, 30 bp, Artificial Sequence
  Synthetic oligonucleotide
cgtggggcttttgctcatggcgagctggtt

SEQ ID NO: 462140 - DNA, 30 bp, Artificial Sequence
  Synthetic oligonucleotide
atcaacccattgtttttcctttatctggtt

SEQ ID NO: 462141 - DNA, 30 bp, Artificial Sequence
  Synthetic oligonucleotide
accggtaacacatggtcggtcgaagtggtt

SEQ ID NO: 462142 - DNA, 30 bp, Artificial Sequence
  Synthetic oligonucleotide
aggttttatctagccgggcgcctagtggtt

SEQ ID NO: 462143 - DNA, 30 bp, Artificial Sequence
  Synthetic oligonucleotide
gtactaacatttgacaatacacacgtggtt

SEQ ID NO: 462144 - DNA, 30 bp, Artificial Sequence
  Synthetic oligonucleotide
tgcttgtgacaatgtgagctttgcgtggtt

SEQ ID NO: 462145 - DNA, 30 bp, Artificial Sequence
  Synthetic oligonucleotide
tgactatctttctcttcacctgcggtggtt

SEQ ID NO: 462146 - DNA, 30 bp, Artificial Sequence
  Synthetic oligonucleotide
acctacgccgaagtatgattccctgtggtt

SEQ ID NO: 462147 - DNA, 30 bp, Artificial Sequence
  Synthetic oligonucleotide
gctaagactcccctcgcgagtcgattggtt

SEQ ID NO: 462148 - DNA, 30 bp, Artificial Sequence
  Synthetic oligonucleotide
gggttcatgtcacggtaccggtccttggtt

SEQ ID NO: 462149 - DNA, 29 bp, Artificial Sequence
  Synthetic oligonucleotide
gcgtttaatgcgtttatggagtcttggtt

SEQ ID NO: 462150 - DNA, 30 bp, Artificial Sequence
  Synthetic oligonucleotide
aatgatggcgatttgccttctgtcttggtt

SEQ ID NO: 462151 - DNA, 30 bp, Artificial Sequence
  Synthetic oligonucleotide
atcataaattggacacgatatcggttggtt

SEQ ID NO: 462152 - DNA, 30 bp, Artificial Sequence
  Synthetic oligonucleotide
cagacactcgggggtcatcactctttggtt

SEQ ID NO: 462153 - DNA, 30 bp, Artificial Sequence
  Synthetic oligonucleotide
agtagtactgaccacttttggagtttggtt

SEQ ID NO: 462154 - DNA, 30 bp, Artificial Sequence
  Synthetic oligonucleotide
ttgggagtattcaaaggtacctttttggtt

SEQ ID NO: 462155 - DNA, 30 bp, Artificial Sequence
  Synthetic oligonucleotide
acggtgctgttaacctccgagaaaaatgtt

SEQ ID NO: 462156 - DNA, 30 bp, Artificial Sequence
  Synthetic oligonucleotide
gcctatcttgaataaactcttggaaatgtt

SEQ ID NO: 462157 - DNA, 30 bp, Artificial Sequence
  Synthetic oligonucleotide
gctacgcgcggccggccggcggccaatgtt

SEQ ID NO: 462158 - DNA, 30 bp, Artificial Sequence
  Synthetic oligonucleotide
tccgctggagaatcagtaatttagaatgtt

SEQ ID NO: 462159 - DNA, 30 bp, Artificial Sequence
  Synthetic oligonucleotide
ccagagggccctattgaggacatgaatgtt

SEQ ID NO: 462160 - DNA, 30 bp, Artificial Sequence
  Synthetic oligonucleotide
gtgctcagctactgaggagatttgaatgtt

SEQ ID NO: 462161 - DNA, 30 bp, Artificial Sequence
  Synthetic oligonucleotide
ggatagttgggtagcccgcaatcacatgtt

SEQ ID NO: 462162 - DNA, 30 bp, Artificial Sequence
  Synthetic oligonucleotide
gaggcaggttccccgccatttagccatgtt

SEQ ID NO: 462163 - DNA, 30 bp, Artificial Sequence
  Synthetic oligonucleotide
catccttttatctgtccttgacagcatgtt

SEQ ID NO: 462164 - DNA, 30 bp, Artificial Sequence
  Synthetic oligonucleotide
aacactctactggagctatacgcgcatgtt

SEQ ID NO: 462165 - DNA, 30 bp, Artificial Sequence
  Synthetic oligonucleotide
tcggagcccatactactctatatgcatgtt

SEQ ID NO: 462166 - DNA, 30 bp, Artificial Sequence
  Synthetic oligonucleotide
aagtatccctctaagatacaacgtcatgtt

SEQ ID NO: 462167 - DNA, 30 bp, Artificial Sequence
  Synthetic oligonucleotide
aggtacgtgggaatgccaagtcgtcatgtt

SEQ ID NO: 462168 - DNA, 30 bp, Artificial Sequence
  Synthetic oligonucleotide
gtaattctgatatagtaatactgtcatgtt

SEQ ID NO: 462169 - DNA, 30 bp, Artificial Sequence
  Synthetic oligonucleotide
ggggcccgtgccgagtaacgccttcatgtt

SEQ ID NO: 462170 - DNA, 30 bp, Artificial Sequence
  Synthetic oligonucleotide
catctttctttctgaggtagtgttcatgtt

SEQ ID NO: 462171 - DNA, 30 bp, Artificial Sequence
  Synthetic oligonucleotide
ccagaacaaaggtaaaccattgttcatgtt

SEQ ID NO: 462172 - DNA, 30 bp, Artificial Sequence
  Synthetic oligonucleotide
tactattcattacgctctcaatttcatgtt

SEQ ID NO: 462173 - DNA, 30 bp, Artificial Sequence
  Synthetic oligonucleotide
atttaatgacagtaactgctaccatatgtt

SEQ ID NO: 462174 - DNA, 30 bp, Artificial Sequence
  Synthetic oligonucleotide
gtcttataatgggaacattaatcctatgtt

SEQ ID NO: 462175 - DNA, 30 bp, Artificial Sequence
  Synthetic oligonucleotide
gaactgacggggcatacaaagatctatgtt

SEQ ID NO: 462176 - DNA, 30 bp, Artificial Sequence
  Synthetic oligonucleotide
atctacgggccccgtgttgttcattatgtt

SEQ ID NO: 462177 - DNA, 30 bp, Artificial Sequence
  Synthetic oligonucleotide
aacgcaacaggctccaccggactttatgtt

SEQ ID NO: 462178 - DNA, 30 bp, Artificial Sequence
  Synthetic oligonucleotide
aagggcgtgccatctttgtacaacactgtt

SEQ ID NO: 462179 - DNA, 30 bp, Artificial Sequence
  Synthetic oligonucleotide
acagtgacggaactgtttacggagactgtt

SEQ ID NO: 462180 - DNA, 30 bp, Artificial Sequence
  Synthetic oligonucleotide
gtcaatgcaggtttcaattcgtatactgtt

SEQ ID NO: 462181 - DNA, 30 bp, Artificial Sequence
  Synthetic oligonucleotide
gtctcgtttcgctcttatgcctaccctgtt

SEQ ID NO: 462182 - DNA, 30 bp, Artificial Sequence
  Synthetic oligonucleotide
ctcaatatcccctgatactagacgcctgtt

SEQ ID NO: 462183 - DNA, 30 bp, Artificial Sequence
  Synthetic oligonucleotide
gtcattgcttttctggtgccaaggcctgtt

SEQ ID NO: 462184 - DNA, 30 bp, Artificial Sequence
  Synthetic oligonucleotide
atacaactggatgatgaccagacagctgtt

SEQ ID NO: 462185 - DNA, 30 bp, Artificial Sequence
  Synthetic oligonucleotide
attacgcgatcggtcttgagactcgctgtt

SEQ ID NO: 462186 - DNA, 30 bp, Artificial Sequence
  Synthetic oligonucleotide
aaaagttccgtctaaggagcctaggctgtt

SEQ ID NO: 462187 - DNA, 30 bp, Artificial Sequence
  Synthetic oligonucleotide
gtatctaaagatagcgcatatacggctgtt

SEQ ID NO: 462188 - DNA, 30 bp, Artificial Sequence
  Synthetic oligonucleotide
acccaaataagttgggaatactatgctgtt

SEQ ID NO: 462189 - DNA, 30 bp, Artificial Sequence
  Synthetic oligonucleotide
gcgaccccggatcgttatgtaactgctgtt

SEQ ID NO: 462190 - DNA, 30 bp, Artificial Sequence
  Synthetic oligonucleotide
agtgtacacgcactagatatcccatctgtt

SEQ ID NO: 462191 - DNA, 30 bp, Artificial Sequence
  Synthetic oligonucleotide
ggggaataaatttacattgtcgactctgtt

SEQ ID NO: 462192 - DNA, 30 bp, Artificial Sequence
  Synthetic oligonucleotide
tcaattgatataaccgcggtgtgctctgtt

SEQ ID NO: 462193 - DNA, 30 bp, Artificial Sequence
  Synthetic oligonucleotide
tggaaaacttggtttctataccagtctgtt

SEQ ID NO: 462194 - DNA, 30 bp, Artificial Sequence
  Synthetic oligonucleotide
aaccgtagacttgcacagatcgcgtctgtt

SEQ ID NO: 462195 - DNA, 30 bp, Artificial Sequence
  Synthetic oligonucleotide
gttaatgaatcgcgtgtttcggtgtctgtt

SEQ ID NO: 462196 - DNA, 30 bp, Artificial Sequence
  Synthetic oligonucleotide
tgctcaacttcctccctatagacttctgtt

SEQ ID NO: 462197 - DNA, 30 bp, Artificial Sequence
  Synthetic oligonucleotide
agactcttccctactgatgcgccttctgtt

SEQ ID NO: 462198 - DNA, 30 bp, Artificial Sequence
  Synthetic oligonucleotide
gactgctaaccctctaattgtagttctgtt

SEQ ID NO: 462199 - DNA, 30 bp, Artificial Sequence
  Synthetic oligonucleotide
agcgacacccagcaagggcggggttctgtt

SEQ ID NO: 462200 - DNA, 30 bp, Artificial Sequence
  Synthetic oligonucleotide
cgcctatagattataaacttgtcaagtgtt

SEQ ID NO: 462201 - DNA, 30 bp, Artificial Sequence
  Synthetic oligonucleotide
acctatcggctattcctcgggtgaagtgtt

SEQ ID NO: 462202 - DNA, 30 bp, Artificial Sequence
  Synthetic oligonucleotide
ttatcggtgtctgcgcctgataacagtgtt

SEQ ID NO: 462203 - DNA, 30 bp, Artificial Sequence
  Synthetic oligonucleotide
tttatgtggaagtatacagttaacagtgtt

SEQ ID NO: 462204 - DNA, 30 bp, Artificial Sequence
  Synthetic oligonucleotide
cacattgttactcatcgcacacccagtgtt

SEQ ID NO: 462205 - DNA, 30 bp, Artificial Sequence
  Synthetic oligonucleotide
gaattggggacagaggtcactggcagtgtt

SEQ ID NO: 462206 - DNA, 30 bp, Artificial Sequence
  Synthetic oligonucleotide
tatcgtgaactacgccttcaacagagtgtt

SEQ ID NO: 462207 - DNA, 30 bp, Artificial Sequence
  Synthetic oligonucleotide
gtctacacagtgccatcccataggagtgtt

SEQ ID NO: 462208 - DNA, 30 bp, Artificial Sequence
  Synthetic oligonucleotide
cgtaggttattcgggccaccggatagtgtt

SEQ ID NO: 462209 - DNA, 30 bp, Artificial Sequence
  Synthetic oligonucleotide
gtccggtaccatagttttggttctagtgtt

SEQ ID NO: 462210 - DNA, 30 bp, Artificial Sequence
  Synthetic oligonucleotide
aaatccacgacacgtgcaagctttagtgtt

SEQ ID NO: 462211 - DNA, 30 bp, Artificial Sequence
  Synthetic oligonucleotide
gaaacattacccaataagatcccacgtgtt

SEQ ID NO: 462212 - DNA, 30 bp, Artificial Sequence
  Synthetic oligonucleotide
aagtaaagatctggtaacgtcgtacgtgtt

SEQ ID NO: 462213 - DNA, 30 bp, Artificial Sequence
  Synthetic oligonucleotide
atgacatcccatacaagcgccgatcgtgtt

SEQ ID NO: 462214 - DNA, 30 bp, Artificial Sequence
  Synthetic oligonucleotide
ttaagtcgtgtccatcatcgtccaggtgtt

SEQ ID NO: 462215 - DNA, 30 bp, Artificial Sequence
  Synthetic oligonucleotide
taacattgcttgctacctacaggcggtgtt

SEQ ID NO: 462216 - DNA, 30 bp, Artificial Sequence
  Synthetic oligonucleotide
gtagttatcatcatggcaggaggcggtgtt

SEQ ID NO: 462217 - DNA, 30 bp, Artificial Sequence
  Synthetic oligonucleotide
cctatgtggactattctatgatgcggtgtt

SEQ ID NO: 462218 - DNA, 30 bp, Artificial Sequence
  Synthetic oligonucleotide
ggcaggaatagttcacggtcgttgggtgtt

SEQ ID NO: 462219 - DNA, 30 bp, Artificial Sequence
  Synthetic oligonucleotide
tcgaggggcttcgcgtcgctccatggtgtt

SEQ ID NO: 462220 - DNA, 30 bp, Artificial Sequence
  Synthetic oligonucleotide
tattagtatggtaccggctgtcatggtgtt

SEQ ID NO: 462221 - DNA, 30 bp, Artificial Sequence
  Synthetic oligonucleotide
caaacaaagtcattttagtgacgatgtgtt

SEQ ID NO: 462222 - DNA, 30 bp, Artificial Sequence
  Synthetic oligonucleotide
cgttgtcgtggcatgcgccgctactgtgtt

SEQ ID NO: 462223 - DNA, 30 bp, Artificial Sequence
  Synthetic oligonucleotide
cctattgaggccggcactacaagctgtgtt

SEQ ID NO: 462224 - DNA, 30 bp, Artificial Sequence
  Synthetic oligonucleotide
aacaacttggaaggacaactaggctgtgtt

SEQ ID NO: 462225 - DNA, 30 bp, Artificial Sequence
  Synthetic oligonucleotide
accgtaactgcattaatcaattgctgtgtt

SEQ ID NO: 462226 - DNA, 30 bp, Artificial Sequence
  Synthetic oligonucleotide
tgccgcgcctagtagaacgcagagtgtgtt

SEQ ID NO: 462227 - DNA, 29 bp, Artificial Sequence
  Synthetic oligonucleotide
ctcaccttccgctgaaagtactttgtgtt

SEQ ID NO: 462228 - DNA, 30 bp, Artificial Sequence
  Synthetic oligonucleotide
gcatatactcgtgcaaatggccgaattgtt

SEQ ID NO: 462229 - DNA, 30 bp, Artificial Sequence
  Synthetic oligonucleotide
tctgtaatcacatatgcgcctcacattgtt

SEQ ID NO: 462230 - DNA, 30 bp, Artificial Sequence
  Synthetic oligonucleotide
gctggcaatctaccgcgtgttcggattgtt

SEQ ID NO: 462231 - DNA, 30 bp, Artificial Sequence
  Synthetic oligonucleotide
agcaatatgatctgaggccacaatattgtt

SEQ ID NO: 462232 - DNA, 30 bp, Artificial Sequence
  Synthetic oligonucleotide
ttcaaagggtgcctggattgacttattgtt

SEQ ID NO: 462233 - DNA, 30 bp, Artificial Sequence
  Synthetic oligonucleotide
tgtgcgcttggtcggtctagtagacttgtt

SEQ ID NO: 462234 - DNA, 30 bp, Artificial Sequence
  Synthetic oligonucleotide
tagcatgatactgcctgcaatctacttgtt

SEQ ID NO: 462235 - DNA, 30 bp, Artificial Sequence
  Synthetic oligonucleotide
cacaaatcatcgtcctggatgtaccttgtt

SEQ ID NO: 462236 - DNA, 30 bp, Artificial Sequence
  Synthetic oligonucleotide
catggccgtatgcaatccagcagccttgtt

SEQ ID NO: 462237 - DNA, 30 bp, Artificial Sequence
  Synthetic oligonucleotide
ccggtggaagctattgggtcgttccttgtt

SEQ ID NO: 462238 - DNA, 30 bp, Artificial Sequence
  Synthetic oligonucleotide
gtggtggccgcggtaagtgctttgcttgtt

SEQ ID NO: 462239 - DNA, 30 bp, Artificial Sequence
  Synthetic oligonucleotide
gactgctaggtttctattgttcatcttgtt

SEQ ID NO: 462240 - DNA, 30 bp, Artificial Sequence
  Synthetic oligonucleotide
aatcttggtctaatctgagtcggtcttgtt

SEQ ID NO: 462241 - DNA, 30 bp, Artificial Sequence
  Synthetic oligonucleotide
catgtatggcgcagtcgggattgtcttgtt

SEQ ID NO: 462242 - DNA, 30 bp, Artificial Sequence
  Synthetic oligonucleotide
gagatgaagtagcgcgtatatcaagttgtt

SEQ ID NO: 462243 - DNA, 30 bp, Artificial Sequence
  Synthetic oligonucleotide
gtaaacgtgagttttgcgttataagttgtt

SEQ ID NO: 462244 - DNA, 30 bp, Artificial Sequence
  Synthetic oligonucleotide
attatgacaagtgtttactaaaccgttgtt

SEQ ID NO: 462245 - DNA, 30 bp, Artificial Sequence
  Synthetic oligonucleotide
ggcaggtgcagcatacttataacggttgtt

SEQ ID NO: 462246 - DNA, 30 bp, Artificial Sequence
  Synthetic oligonucleotide
atacttccggatttgtgctactcggttgtt

SEQ ID NO: 462247 - DNA, 30 bp, Artificial Sequence
  Synthetic oligonucleotide
agagcgatgatagtaggaacaactgttgtt

SEQ ID NO: 462248 - DNA, 29 bp, Artificial Sequence
  Synthetic oligonucleotide
taccatggatgactaccgatcctgttgtt

SEQ ID NO: 462249 - DNA, 30 bp, Artificial Sequence
  Synthetic oligonucleotide
taggtatgaaatgcaaatcgctaatttgtt

SEQ ID NO: 462250 - DNA, 30 bp, Artificial Sequence
  Synthetic oligonucleotide
aatccacgttaaccgtgtagatgatttgtt

SEQ ID NO: 462251 - DNA, 30 bp, Artificial Sequence
  Synthetic oligonucleotide
atcgactggggtctaacccgaatatttgtt

SEQ ID NO: 462252 - DNA, 30 bp, Artificial Sequence
  Synthetic oligonucleotide
ggtctcaccaaattatggccagcctttgtt

SEQ ID NO: 462253 - DNA, 30 bp, Artificial Sequence
  Synthetic oligonucleotide
gccagctaacccccaagttgtgtctttgtt

SEQ ID NO: 462254 - DNA, 30 bp, Artificial Sequence
  Synthetic oligonucleotide
gagcagtggcacttctcgcacaagtttgtt

SEQ ID NO: 462255 - DNA, 30 bp, Artificial Sequence
  Synthetic oligonucleotide
tatacctcgctgggcacgctcaagtttgtt

SEQ ID NO: 462256 - DNA, 30 bp, Artificial Sequence
  Synthetic oligonucleotide
catcacctataggtcaggccgcagtttgtt

SEQ ID NO: 462257 - DNA, 30 bp, Artificial Sequence
  Synthetic oligonucleotide
agatagataggataatcagacccgtttgtt

SEQ ID NO: 462258 - DNA, 30 bp, Artificial Sequence
  Synthetic oligonucleotide
gatcacctgacgaacgtgggggggtttgtt

SEQ ID NO: 462259 - DNA, 30 bp, Artificial Sequence
  Synthetic oligonucleotide
tgcaataagccatctataacaatgtttgtt

SEQ ID NO: 462260 - DNA, 30 bp, Artificial Sequence
  Synthetic oligonucleotide
aagtacggtatatgtgccatcctgtttgtt

SEQ ID NO: 462261 - DNA, 30 bp, Artificial Sequence
  Synthetic oligonucleotide
cgcacaataggttacaattgcgattttgtt

SEQ ID NO: 462262 - DNA, 30 bp, Artificial Sequence
  Synthetic oligonucleotide
gacaagggccgcccgtggaaagtttttgtt

SEQ ID NO: 462263 - DNA, 30 bp, Artificial Sequence
  Synthetic oligonucleotide
tccagctttgcgcggtagtcggaaaaattt

SEQ ID NO: 462264 - DNA, 30 bp, Artificial Sequence
  Synthetic oligonucleotide
ctagggttattacgcaaaacaggcaaattt

SEQ ID NO: 462265 - DNA, 30 bp, Artificial Sequence
  Synthetic oligonucleotide
cagaaaaaaccaggcgcggtggtcaaattt

SEQ ID NO: 462266 - DNA, 30 bp, Artificial Sequence
  Synthetic oligonucleotide
aaacaactctgtacagtggcgttcaaattt

SEQ ID NO: 462267 - DNA, 30 bp, Artificial Sequence
  Synthetic oligonucleotide
tcaataggtagtcgcacttgcaagaaattt

SEQ ID NO: 462268 - DNA, 30 bp, Artificial Sequence
  Synthetic oligonucleotide
ctgattcggtcgcgcgttgtcaagaaattt

SEQ ID NO: 462269 - DNA, 30 bp, Artificial Sequence
  Synthetic oligonucleotide
gattgcgtgggggcgttcactcggaaattt

SEQ ID NO: 462270 - DNA, 30 bp, Artificial Sequence
  Synthetic oligonucleotide
accagcggcatacattccttcactaaattt

SEQ ID NO: 462271 - DNA, 30 bp, Artificial Sequence
  Synthetic oligonucleotide
accttgttaaacacggtagactcccaattt

SEQ ID NO: 462272 - DNA, 30 bp, Artificial Sequence
  Synthetic oligonucleotide
ctctacgatgtttagaggtaacgccaattt

SEQ ID NO: 462273 - DNA, 30 bp, Artificial Sequence
  Synthetic oligonucleotide
taggggattaagggcgtttcaggccaattt

SEQ ID NO: 462274 - DNA, 30 bp, Artificial Sequence
  Synthetic oligonucleotide
cattcggtatatacagatacggagcaattt

SEQ ID NO: 462275 - DNA, 30 bp, Artificial Sequence
  Synthetic oligonucleotide
gaactttgtcactcacattttacgcaattt

SEQ ID NO: 462276 - DNA, 30 bp, Artificial Sequence
  Synthetic oligonucleotide
agggccctacagcaatggagaatgcaattt

SEQ ID NO: 462277 - DNA, 30 bp, Artificial Sequence
  Synthetic oligonucleotide
gtgttagagatggctgactgtctgcaattt

SEQ ID NO: 462278 - DNA, 30 bp, Artificial Sequence
  Synthetic oligonucleotide
tcagggaatgtacccaagaccgctcaattt

SEQ ID NO: 462279 - DNA, 30 bp, Artificial Sequence
  Synthetic oligonucleotide
atccacatcaagtatcatatacttcaattt

SEQ ID NO: 462280 - DNA, 30 bp, Artificial Sequence
  Synthetic oligonucleotide
ggtggctgcctccagatattagcagaattt

SEQ ID NO: 462281 - DNA, 30 bp, Artificial Sequence
  Synthetic oligonucleotide
gtaatataaatatatgagtgggcagaattt

SEQ ID NO: 462282 - DNA, 31 bp, Artificial Sequence
  Synthetic oligonucleotide
acaccttgttatttcgtcaaagcgagaattt

SEQ ID NO: 462283 - DNA, 30 bp, Artificial Sequence
  Synthetic oligonucleotide
ggcagcactgggaattctcccggagaattt

SEQ ID NO: 462284 - DNA, 30 bp, Artificial Sequence
  Synthetic oligonucleotide
aagctcttcgaagtatctttcatagaattt

SEQ ID NO: 462285 - DNA, 30 bp, Artificial Sequence
  Synthetic oligonucleotide
agaagtcataacacttctcgcaacgaattt

SEQ ID NO: 462286 - DNA, 30 bp, Artificial Sequence
  Synthetic oligonucleotide
ttatagacctaccagttgtagtccgaattt

SEQ ID NO: 462287 - DNA, 30 bp, Artificial Sequence
  Synthetic oligonucleotide
ggatacctggcaaggtagagtgtcgaattt

SEQ ID NO: 462288 - DNA, 30 bp, Artificial Sequence
  Synthetic oligonucleotide
gagtgcctatccgccaaagaaagggaattt

SEQ ID NO: 462289 - DNA, 30 bp, Artificial Sequence
  Synthetic oligonucleotide
ctatcgcaggataaatcgagcaatgaattt

SEQ ID NO: 462290 - DNA, 30 bp, Artificial Sequence
  Synthetic oligonucleotide
tgatctagagttgctgatacttatgaattt

SEQ ID NO: 462291 - DNA, 30 bp, Artificial Sequence
  Synthetic oligonucleotide
catttaagcgtgactacgttttaataattt

SEQ ID NO: 462292 - DNA, 30 bp, Artificial Sequence
  Synthetic oligonucleotide
cgtctgaccgttaggcaggaaacataattt

SEQ ID NO: 462293 - DNA, 30 bp, Artificial Sequence
  Synthetic oligonucleotide
tgccccgcggttaatggagtaacataattt

SEQ ID NO: 462294 - DNA, 30 bp, Artificial Sequence
  Synthetic oligonucleotide
aaacactccttgtccaaagagacataattt

SEQ ID NO: 462295 - DNA, 30 bp, Artificial Sequence
  Synthetic oligonucleotide
tgatgcttgtcatacggcctggcataattt

SEQ ID NO: 462296 - DNA, 30 bp, Artificial Sequence
  Synthetic oligonucleotide
gtaccgggtaacgctgccttctgataattt

SEQ ID NO: 462297 - DNA, 30 bp, Artificial Sequence
  Synthetic oligonucleotide
gaagcctaaattatgagccgactataattt

SEQ ID NO: 462298 - DNA, 30 bp, Artificial Sequence
  Synthetic oligonucleotide
tagatataaacatgagtacacttctaattt

SEQ ID NO: 462299 - DNA, 30 bp, Artificial Sequence
  Synthetic oligonucleotide
ttccagtcaaaacgagtagaacggtaattt

SEQ ID NO: 462300 - DNA, 30 bp, Artificial Sequence
  Synthetic oligonucleotide
gtagactgggactaacaggcgaattaattt

SEQ ID NO: 462301 - DNA, 30 bp, Artificial Sequence
  Synthetic oligonucleotide
tgtgtttgagagtctgcatatgattaattt

SEQ ID NO: 462302 - DNA, 30 bp, Artificial Sequence
  Synthetic oligonucleotide
gtcggcgcgcaaacaatcggtccttaattt

SEQ ID NO: 462303 - DNA, 30 bp, Artificial Sequence
  Synthetic oligonucleotide
cgccccctgccttccattattccttaattt

SEQ ID NO: 462304 - DNA, 30 bp, Artificial Sequence
  Synthetic oligonucleotide
ctttaacttaagtttcttcttgcttaattt

SEQ ID NO: 462305 - DNA, 29 bp, Artificial Sequence
  Synthetic oligonucleotide
agataggacgtccaagcaccgagacattt

SEQ ID NO: 462306 - DNA, 30 bp, Artificial Sequence
  Synthetic oligonucleotide
atttaggtgctgccttaacacctgacattt

SEQ ID NO: 462307 - DNA, 30 bp, Artificial Sequence
  Synthetic oligonucleotide
gataggatgactgcgtaagctttgacattt

SEQ ID NO: 462308 - DNA, 30 bp, Artificial Sequence
  Synthetic oligonucleotide
cgccgatttacaaagtataaatatacattt

SEQ ID NO: 462309 - DNA, 30 bp, Artificial Sequence
  Synthetic oligonucleotide
gactgtacctccgtgaacatacctacattt

SEQ ID NO: 462310 - DNA, 30 bp, Artificial Sequence
  Synthetic oligonucleotide
agtccccggggtggagcgccgggtacattt

SEQ ID NO: 462311 - DNA, 30 bp, Artificial Sequence
  Synthetic oligonucleotide
tcatttgggttaacgttgcagcttacattt

SEQ ID NO: 462312 - DNA, 30 bp, Artificial Sequence
  Synthetic oligonucleotide
ggaaatggcttcctttggttcaaaccattt

SEQ ID NO: 462313 - DNA, 30 bp, Artificial Sequence
  Synthetic oligonucleotide
caaagtgcagtacctccgacttgcccattt

SEQ ID NO: 462314 - DNA, 30 bp, Artificial Sequence
  Synthetic oligonucleotide
cagatgtaaagcctcttaaggtagccattt

SEQ ID NO: 462315 - DNA, 30 bp, Artificial Sequence
  Synthetic oligonucleotide
cattcggggccctgcagaagcttgccattt

SEQ ID NO: 462316 - DNA, 30 bp, Artificial Sequence
  Synthetic oligonucleotide
ccccataggcatcatgagaactgtccattt

SEQ ID NO: 462317 - DNA, 30 bp, Artificial Sequence
  Synthetic oligonucleotide
agacaggcaataaaaatcgtttttccattt

SEQ ID NO: 462318 - DNA, 30 bp, Artificial Sequence
  Synthetic oligonucleotide
agtcatttttgccctggattaaaagcattt

SEQ ID NO: 462319 - DNA, 30 bp, Artificial Sequence
  Synthetic oligonucleotide
ccccacgcgggggtgggtgtccccgcattt

SEQ ID NO: 462320 - DNA, 30 bp, Artificial Sequence
  Synthetic oligonucleotide
gtaccgctacggtttcctggcacggcattt

SEQ ID NO: 462321 - DNA, 30 bp, Artificial Sequence
  Synthetic oligonucleotide
aggccggcctcttccgatctattggcattt

SEQ ID NO: 462322 - DNA, 30 bp, Artificial Sequence
  Synthetic oligonucleotide
cagctaaatggactggggttgttggcattt

SEQ ID NO: 462323 - DNA, 30 bp, Artificial Sequence
  Synthetic oligonucleotide
tagtatgagtaatctcagaccaaatcattt

SEQ ID NO: 462324 - DNA, 30 bp, Artificial Sequence
  Synthetic oligonucleotide
ttattgcagccgaagaggaaggcatcattt

SEQ ID NO: 462325 - DNA, 30 bp, Artificial Sequence
  Synthetic oligonucleotide
gtatttcgaagtcttaactactgatcattt

SEQ ID NO: 462326 - DNA, 30 bp, Artificial Sequence
  Synthetic oligonucleotide
aatgaaggataattgtacgggtactcattt

SEQ ID NO: 462327 - DNA, 30 bp, Artificial Sequence
  Synthetic oligonucleotide
aataggattcggttacgatggacgtcattt

SEQ ID NO: 462328 - DNA, 30 bp, Artificial Sequence
  Synthetic oligonucleotide
tcactgccccgcattgtgaattattcattt

SEQ ID NO: 462329 - DNA, 30 bp, Artificial Sequence
  Synthetic oligonucleotide
ggaagtcgtttgcgtgagcgtggttcattt

SEQ ID NO: 462330 - DNA, 30 bp, Artificial Sequence
  Synthetic oligonucleotide
gccggaaccaccgggggggaaaaaagattt

SEQ ID NO: 462331 - DNA, 30 bp, Artificial Sequence
  Synthetic oligonucleotide
agcagtttgggcggatcgcctgaaagattt

SEQ ID NO: 462332 - DNA, 30 bp, Artificial Sequence
  Synthetic oligonucleotide
ttggaccatctagcgacggtggcaagattt

SEQ ID NO: 462333 - DNA, 30 bp, Artificial Sequence
  Synthetic oligonucleotide
ctcaattctttcgtgagaaggagtagattt

SEQ ID NO: 462334 - DNA, 30 bp, Artificial Sequence
  Synthetic oligonucleotide
agagatgtaaatcaaaattgcggtagattt

SEQ ID NO: 462335 - DNA, 30 bp, Artificial Sequence
  Synthetic oligonucleotide
tgagcggtattttgcgccaggccacgattt

SEQ ID NO: 462336 - DNA, 30 bp, Artificial Sequence
  Synthetic oligonucleotide
gggtgggggatcggcgggcgtgtacgattt

SEQ ID NO: 462337 - DNA, 30 bp, Artificial Sequence
  Synthetic oligonucleotide
ggcttgggttaataccgacagaatcgattt

SEQ ID NO: 462338 - DNA, 30 bp, Artificial Sequence
  Synthetic oligonucleotide
tgattaagccctatgggactacatcgattt

SEQ ID NO: 462339 - DNA, 30 bp, Artificial Sequence
  Synthetic oligonucleotide
gacagaagcagtcgtagtttaggaggattt

SEQ ID NO: 462340 - DNA, 30 bp, Artificial Sequence
  Synthetic oligonucleotide
tacggttatcgagaacaaagtaacggattt

SEQ ID NO: 462341 - DNA, 30 bp, Artificial Sequence
  Synthetic oligonucleotide
catcataatcctgttataacgtacggattt

SEQ ID NO: 462342 - DNA, 30 bp, Artificial Sequence
  Synthetic oligonucleotide
gtaggcggaatttgtcgctatatcggattt

SEQ ID NO: 462343 - DNA, 30 bp, Artificial Sequence
  Synthetic oligonucleotide
caaacgaaaccttgtcattgcaagggattt

SEQ ID NO: 462344 - DNA, 30 bp, Artificial Sequence
  Synthetic oligonucleotide
atctcatgtcggcgtaatcaacggggattt

SEQ ID NO: 462345 - DNA, 30 bp, Artificial Sequence
  Synthetic oligonucleotide
catctcgccgttgttgacctcaatggattt

SEQ ID NO: 462346 - DNA, 30 bp, Artificial Sequence
  Synthetic oligonucleotide
catagcctaaactatcctactcatggattt

SEQ ID NO: 462347 - DNA, 30 bp, Artificial Sequence
  Synthetic oligonucleotide
acattatcatcctcgttaggaactggattt

SEQ ID NO: 462348 - DNA, 30 bp, Artificial Sequence
  Synthetic oligonucleotide
atagggcaggcgaataaagagcctggattt

SEQ ID NO: 462349 - DNA, 30 bp, Artificial Sequence
  Synthetic oligonucleotide
ctgaagcttaatccacaacggcgtggattt

SEQ ID NO: 462350 - DNA, 30 bp, Artificial Sequence
  Synthetic oligonucleotide
aattgagagtgtcagacggataaatgattt

SEQ ID NO: 462351 - DNA, 30 bp, Artificial Sequence
  Synthetic oligonucleotide
cattcgggcgggaactgtatcagatgattt

SEQ ID NO: 462352 - DNA, 30 bp, Artificial Sequence
  Synthetic oligonucleotide
aaatggtaaaatcgcataagacgatgattt

SEQ ID NO: 462353 - DNA, 30 bp, Artificial Sequence
  Synthetic oligonucleotide
gaaaagcagtcgatggactaaatatgattt

SEQ ID NO: 462354 - DNA, 30 bp, Artificial Sequence
  Synthetic oligonucleotide
cgcctgtagggactgcaccggtactgattt

SEQ ID NO: 462355 - DNA, 30 bp, Artificial Sequence
  Synthetic oligonucleotide
ttgtagttattcgagccgcctcgctgattt

SEQ ID NO: 462356 - DNA, 30 bp, Artificial Sequence
  Synthetic oligonucleotide
agcactctatatgcgacaaccggctgattt

SEQ ID NO: 462357 - DNA, 30 bp, Artificial Sequence
  Synthetic oligonucleotide
gctacaacagggtatttcgtggcttgattt

SEQ ID NO: 462358 - DNA, 30 bp, Artificial Sequence
  Synthetic oligonucleotide
ttgcaaggtaatatctagaaactttgattt

SEQ ID NO: 462359 - DNA, 30 bp, Artificial Sequence
  Synthetic oligonucleotide
tccctcctattaaactatacgaaaatattt

SEQ ID NO: 462360 - DNA, 30 bp, Artificial Sequence
  Synthetic oligonucleotide
actgtctgtatgcagtatggagacatattt

SEQ ID NO: 462361 - DNA, 30 bp, Artificial Sequence
  Synthetic oligonucleotide
ggagtattcggtagcggattcaggatattt

SEQ ID NO: 462362 - DNA, 30 bp, Artificial Sequence
  Synthetic oligonucleotide
atttcaaagcaccttatttagctgatattt

SEQ ID NO: 462363 - DNA, 30 bp, Artificial Sequence
  Synthetic oligonucleotide
gagtcaacacggggagttatgaatatattt

SEQ ID NO: 462364 - DNA, 30 bp, Artificial Sequence
  Synthetic oligonucleotide
gttgcgtgaaacggtttctagaaactattt

SEQ ID NO: 462365 - DNA, 30 bp, Artificial Sequence
  Synthetic oligonucleotide
ctctacaatctaggttgcactaaactattt

SEQ ID NO: 462366 - DNA, 30 bp, Artificial Sequence
  Synthetic oligonucleotide
ttgccgaaccgatttccccttacactattt

SEQ ID NO: 462367 - DNA, 30 bp, Artificial Sequence
  Synthetic oligonucleotide
cgcccatcggctggttttaacgcactattt

SEQ ID NO: 462368 - DNA, 30 bp, Artificial Sequence
  Synthetic oligonucleotide
cttttctgccccaatgctctaggactattt

SEQ ID NO: 462369 - DNA, 30 bp, Artificial Sequence
  Synthetic oligonucleotide
cactacactatagtatgcaaactcctattt

SEQ ID NO: 462370 - DNA, 30 bp, Artificial Sequence
  Synthetic oligonucleotide
catggtaccgcccgtctgttgtagctattt

SEQ ID NO: 462371 - DNA, 30 bp, Artificial Sequence
  Synthetic oligonucleotide
tagcctatactcatgcgcccttgtctattt

SEQ ID NO: 462372 - DNA, 30 bp, Artificial Sequence
  Synthetic oligonucleotide
gctctatgataccaattcaccacagtattt

SEQ ID NO: 462373 - DNA, 30 bp, Artificial Sequence
  Synthetic oligonucleotide
actatcagtgagtactggaccggagtattt

SEQ ID NO: 462374 - DNA, 30 bp, Artificial Sequence
  Synthetic oligonucleotide
atgcccacaatcgctttccgtttcgtattt

SEQ ID NO: 462375 - DNA, 30 bp, Artificial Sequence
  Synthetic oligonucleotide
ggacaaacatacctgtgcataaaggtattt

SEQ ID NO: 462376 - DNA, 30 bp, Artificial Sequence
  Synthetic oligonucleotide
tactgaccatgcctacctggcttggtattt

SEQ ID NO: 462377 - DNA, 30 bp, Artificial Sequence
  Synthetic oligonucleotide
agttgaattatatgtacaatgtatgtattt

SEQ ID NO: 462378 - DNA, 30 bp, Artificial Sequence
  Synthetic oligonucleotide
ttggtagattctatttgcagatcattattt

SEQ ID NO: 462379 - DNA, 30 bp, Artificial Sequence
  Synthetic oligonucleotide
tcgtgttttcctattttcttatcattattt

SEQ ID NO: 462380 - DNA, 30 bp, Artificial Sequence
  Synthetic oligonucleotide
tgagctgaccccgaatcgcacagcttattt

SEQ ID NO: 462381 - DNA, 30 bp, Artificial Sequence
  Synthetic oligonucleotide
tacataagagttgcacggttacgcttattt

SEQ ID NO: 462382 - DNA, 30 bp, Artificial Sequence
  Synthetic oligonucleotide
tttttttgctacttatgggtacagttattt

SEQ ID NO: 462383 - DNA, 30 bp, Artificial Sequence
  Synthetic oligonucleotide
cgtattttatccgctatcgaggagttattt

SEQ ID NO: 462384 - DNA, 30 bp, Artificial Sequence
  Synthetic oligonucleotide
tccaggctggaccataggatgccgttattt

SEQ ID NO: 462385 - DNA, 31 bp, Artificial Sequence
  Synthetic oligonucleotide
gtgctgccacaagaatgaacgcttgttattt

SEQ ID NO: 462386 - DNA, 30 bp, Artificial Sequence
  Synthetic oligonucleotide
cctataataggggggataagtactttattt

SEQ ID NO: 462387 - DNA, 30 bp, Artificial Sequence
  Synthetic oligonucleotide
tgcaacgaaattaggcctgggtctttattt

SEQ ID NO: 462388 - DNA, 30 bp, Artificial Sequence
  Synthetic oligonucleotide
tgaagatatttcagactgcgtagtttattt

SEQ ID NO: 462389 - DNA, 30 bp, Artificial Sequence
  Synthetic oligonucleotide
tggaggtcgcccacggactggcttttattt

SEQ ID NO: 462390 - DNA, 30 bp, Artificial Sequence
  Synthetic oligonucleotide
gcgaccgaagctagaaagtgagcaaacttt

SEQ ID NO: 462391 - DNA, 30 bp, Artificial Sequence
  Synthetic oligonucleotide
ggacgcgacctacgcagggacaacaacttt

SEQ ID NO: 462392 - DNA, 30 bp, Artificial Sequence
  Synthetic oligonucleotide
ggagagtctagactctcaaaggtcaacttt

SEQ ID NO: 462393 - DNA, 30 bp, Artificial Sequence
  Synthetic oligonucleotide
atcatacaagcaaatcgtggtttgaacttt

SEQ ID NO: 462394 - DNA, 30 bp, Artificial Sequence
  Synthetic oligonucleotide
ctaaacatgtacatggtataaacacacttt

SEQ ID NO: 462395 - DNA, 30 bp, Artificial Sequence
  Synthetic oligonucleotide
gtcttagaattgcagggtttctgacacttt

SEQ ID NO: 462396 - DNA, 30 bp, Artificial Sequence
  Synthetic oligonucleotide
gtagtgtgataagataatttagtacacttt

SEQ ID NO: 462397 - DNA, 30 bp, Artificial Sequence
  Synthetic oligonucleotide
acttttgttccatgcatcacctatcacttt

SEQ ID NO: 462398 - DNA, 30 bp, Artificial Sequence
  Synthetic oligonucleotide
gtccatgcgatactcaaaacttgtcacttt

SEQ ID NO: 462399 - DNA, 30 bp, Artificial Sequence
  Synthetic oligonucleotide
cctggggtagcatataatttctttcacttt

SEQ ID NO: 462400 - DNA, 30 bp, Artificial Sequence
  Synthetic oligonucleotide
tgtctcctagacgagatcaactgagacttt

SEQ ID NO: 462401 - DNA, 30 bp, Artificial Sequence
  Synthetic oligonucleotide
gtttacgctgcgaaaggtgaacgggacttt

SEQ ID NO: 462402 - DNA, 30 bp, Artificial Sequence
  Synthetic oligonucleotide
caatcgcgtatatggttaacgattgacttt

SEQ ID NO: 462403 - DNA, 30 bp, Artificial Sequence
  Synthetic oligonucleotide
attgagcccggtatggcagcacagtacttt

SEQ ID NO: 462404 - DNA, 30 bp, Artificial Sequence
  Synthetic oligonucleotide
ccgtgaaagtacagaaaaaccccgtacttt

SEQ ID NO: 462405 - DNA, 30 bp, Artificial Sequence
  Synthetic oligonucleotide
ccagtatgctgacttggcatagggtacttt

SEQ ID NO: 462406 - DNA, 30 bp, Artificial Sequence
  Synthetic oligonucleotide
tccgctagagtagcataatgaaattacttt

SEQ ID NO: 462407 - DNA, 30 bp, Artificial Sequence
  Synthetic oligonucleotide
taccagatgctcgatcaatgatcttacttt

SEQ ID NO: 462408 - DNA, 30 bp, Artificial Sequence
  Synthetic oligonucleotide
gcaatcgcacgtgcagtattgggttacttt

SEQ ID NO: 462409 - DNA, 30 bp, Artificial Sequence
  Synthetic oligonucleotide
attaaccggtaaatgagtgtttgttacttt

SEQ ID NO: 462410 - DNA, 30 bp, Artificial Sequence
  Synthetic oligonucleotide
ggcatggggagcccgggtgaagcaaccttt

SEQ ID NO: 462411 - DNA, 30 bp, Artificial Sequence
  Synthetic oligonucleotide
tgccgcggggcactatcattagcaaccttt

SEQ ID NO: 462412 - DNA, 30 bp, Artificial Sequence
  Synthetic oligonucleotide
tggtatggaccgccccatatttgaaccttt

SEQ ID NO: 462413 - DNA, 30 bp, Artificial Sequence
  Synthetic oligonucleotide
gaaaagagatcatttactagtctaaccttt

SEQ ID NO: 462414 - DNA, 30 bp, Artificial Sequence
  Synthetic oligonucleotide
atcttgtgtcctatacggacaaagaccttt

SEQ ID NO: 462415 - DNA, 30 bp, Artificial Sequence
  Synthetic oligonucleotide
ggttcgttatgcgtgcaacggccgaccttt

SEQ ID NO: 462416 - DNA, 30 bp, Artificial Sequence
  Synthetic oligonucleotide
aggattcaggttctcagtgatacacccttt

SEQ ID NO: 462417 - DNA, 30 bp, Artificial Sequence
  Synthetic oligonucleotide
ggcagcgccacctggaagtcgagccccttt

SEQ ID NO: 462418 - DNA, 30 bp, Artificial Sequence
  Synthetic oligonucleotide
ccacgtctacgatttaacccgcagcccttt

SEQ ID NO: 462419 - DNA, 30 bp, Artificial Sequence
  Synthetic oligonucleotide
catctggctaaagcaccgcctgagcccttt

SEQ ID NO: 462420 - DNA, 30 bp, Artificial Sequence
  Synthetic oligonucleotide
gaactacgctgcctggaaagccggcccttt

SEQ ID NO: 462421 - DNA, 30 bp, Artificial Sequence
  Synthetic oligonucleotide
tgttgttcccaatgaatggtgtaagccttt

SEQ ID NO: 462422 - DNA, 30 bp, Artificial Sequence
  Synthetic oligonucleotide
ttctgtcagaggcggcaccacacagccttt

SEQ ID NO: 462423 - DNA, 30 bp, Artificial Sequence
  Synthetic oligonucleotide
gataacaacggctgtggaatcggagccttt

SEQ ID NO: 462424 - DNA, 30 bp, Artificial Sequence
  Synthetic oligonucleotide
ctatatactttgttgtagctaggcgccttt

SEQ ID NO: 462425 - DNA, 30 bp, Artificial Sequence
  Synthetic oligonucleotide
ggcgcaagcactacgttaagtttggccttt

SEQ ID NO: 462426 - DNA, 30 bp, Artificial Sequence
  Synthetic oligonucleotide
cattgggttgcgtttactcgcgaatccttt

SEQ ID NO: 462427 - DNA, 30 bp, Artificial Sequence
  Synthetic oligonucleotide
tccgtctggacagggaaagctccatccttt

SEQ ID NO: 462428 - DNA, 30 bp, Artificial Sequence
  Synthetic oligonucleotide
ccccaaacgcccacgcctttaatatccttt

SEQ ID NO: 462429 - DNA, 30 bp, Artificial Sequence
  Synthetic oligonucleotide
gatcaaatctggttaattacggtatccttt

SEQ ID NO: 462430 - DNA, 30 bp, Artificial Sequence
  Synthetic oligonucleotide
tctggtcgttagtctagtcaaaactccttt

SEQ ID NO: 462431 - DNA, 30 bp, Artificial Sequence
  Synthetic oligonucleotide
gcctaaaggagctctgttagagactccttt

SEQ ID NO: 462432 - DNA, 30 bp, Artificial Sequence
  Synthetic oligonucleotide
ttccacgttcccttcgttgtattctccttt

SEQ ID NO: 462433 - DNA, 30 bp, Artificial Sequence
  Synthetic oligonucleotide
ttccactttcccttctttgtattctccttt

SEQ ID NO: 462434 - DNA, 30 bp, Artificial Sequence
  Synthetic oligonucleotide
tgccagggggaatgccgttcctagtccttt

SEQ ID NO: 462435 - DNA, 30 bp, Artificial Sequence
  Synthetic oligonucleotide
tgtggtaacgacaaaagtttccgttccttt

SEQ ID NO: 462436 - DNA, 30 bp, Artificial Sequence
  Synthetic oligonucleotide
tggacgaccttttaagagtttcgttccttt

SEQ ID NO: 462437 - DNA, 30 bp, Artificial Sequence
  Synthetic oligonucleotide
ggggaacggaatacccgggtctgttccttt

SEQ ID NO: 462438 - DNA, 30 bp, Artificial Sequence
  Synthetic oligonucleotide
ccggatttatatatcctggacatttccttt

SEQ ID NO: 462439 - DNA, 30 bp, Artificial Sequence
  Synthetic oligonucleotide
gaaacctttggtgataaggctgaaagcttt

SEQ ID NO: 462440 - DNA, 30 bp, Artificial Sequence
  Synthetic oligonucleotide
tgttgcacagccagcaagcatgcaagcttt

SEQ ID NO: 462441 - DNA, 30 bp, Artificial Sequence
  Synthetic oligonucleotide
gaatgcggaatgtcccatgctttaagcttt

SEQ ID NO: 462442 - DNA, 30 bp, Artificial Sequence
  Synthetic oligonucleotide
caggcacaagtacgcacggtgcgcagcttt

SEQ ID NO: 462443 - DNA, 30 bp, Artificial Sequence
  Synthetic oligonucleotide
acggtggaccccagatattgggtcagcttt

SEQ ID NO: 462444 - DNA, 30 bp, Artificial Sequence
  Synthetic oligonucleotide
catacttcgattaaaagatatacgagcttt

SEQ ID NO: 462445 - DNA, 30 bp, Artificial Sequence
  Synthetic oligonucleotide
atgtgaggccaactacttttgaatagcttt

SEQ ID NO: 462446 - DNA, 30 bp, Artificial Sequence
  Synthetic oligonucleotide
atgagatctatgcgacaagactctagcttt

SEQ ID NO: 462447 - DNA, 30 bp, Artificial Sequence
  Synthetic oligonucleotide
caaagttgcgcgcagatttggaaacgcttt

SEQ ID NO: 462448 - DNA, 30 bp, Artificial Sequence
  Synthetic oligonucleotide
cttacgttgtatggtggacgtatacgcttt

SEQ ID NO: 462449 - DNA, 30 bp, Artificial Sequence
  Synthetic oligonucleotide
gcggattaaagtgcgcagcgaaagcgcttt

SEQ ID NO: 462450 - DNA, 30 bp, Artificial Sequence
  Synthetic oligonucleotide
atgtctcgggggggctaagggtagcgcttt

SEQ ID NO: 462451 - DNA, 30 bp, Artificial Sequence
  Synthetic oligonucleotide
tgactgtatagggacagacccccgcgcttt

SEQ ID NO: 462452 - DNA, 30 bp, Artificial Sequence
  Synthetic oligonucleotide
ctttcagaccttatagcaacctggcgcttt

SEQ ID NO: 462453 - DNA, 30 bp, Artificial Sequence
  Synthetic oligonucleotide
actgtctcttagagtcggcgtattcgcttt

SEQ ID NO: 462454 - DNA, 30 bp, Artificial Sequence
  Synthetic oligonucleotide
gggcgacggcctcgcgtataaagaggcttt

SEQ ID NO: 462455 - DNA, 30 bp, Artificial Sequence
  Synthetic oligonucleotide
gggttacaaagtcacccgccacgaggcttt

SEQ ID NO: 462456 - DNA, 30 bp, Artificial Sequence
  Synthetic oligonucleotide
agggaggccaaactgtataggtgcggcttt

SEQ ID NO: 462457 - DNA, 30 bp, Artificial Sequence
  Synthetic oligonucleotide
ttgcgcagagtgaatctgccaaagggcttt

SEQ ID NO: 462458 - DNA, 30 bp, Artificial Sequence
  Synthetic oligonucleotide
ggcggaaccactccattttgggcgggcttt

SEQ ID NO: 462459 - DNA, 30 bp, Artificial Sequence
  Synthetic oligonucleotide
gcaataagatgcggagtgttgtcgggcttt

SEQ ID NO: 462460 - DNA, 30 bp, Artificial Sequence
  Synthetic oligonucleotide
tacccggatcttgtgcttgccatgggcttt

SEQ ID NO: 462461 - DNA, 30 bp, Artificial Sequence
  Synthetic oligonucleotide
ctctgcttagcggaattgacgtctggcttt

SEQ ID NO: 462462 - DNA, 30 bp, Artificial Sequence
  Synthetic oligonucleotide
cagtagcccagcaccctagggtgtggcttt

SEQ ID NO: 462463 - DNA, 30 bp, Artificial Sequence
  Synthetic oligonucleotide
gcaattttctctaagcccactaaatgcttt

SEQ ID NO: 462464 - DNA, 30 bp, Artificial Sequence
  Synthetic oligonucleotide
ctctagacagacccccttacaggatgcttt

SEQ ID NO: 462465 - DNA, 30 bp, Artificial Sequence
  Synthetic oligonucleotide
ttaactgggccgtcctgcgcagactgcttt

SEQ ID NO: 462466 - DNA, 30 bp, Artificial Sequence
  Synthetic oligonucleotide
tgtcaaggataatcaaccgatacctgcttt

SEQ ID NO: 462467 - DNA, 30 bp, Artificial Sequence
  Synthetic oligonucleotide
aattatagaccttgaaaccgcggctgcttt

SEQ ID NO: 462468 - DNA, 30 bp, Artificial Sequence
  Synthetic oligonucleotide
tgattggtctattcttgaggttgctgcttt

SEQ ID NO: 462469 - DNA, 30 bp, Artificial Sequence
  Synthetic oligonucleotide
tatgtttgcataccttcatccatctgcttt

SEQ ID NO: 462470 - DNA, 30 bp, Artificial Sequence
  Synthetic oligonucleotide
actactgaatggcgccaaaagttctgcttt

SEQ ID NO: 462471 - DNA, 30 bp, Artificial Sequence
  Synthetic oligonucleotide
atggatgaatgccttcgccaactgtgcttt

SEQ ID NO: 462472 - DNA, 30 bp, Artificial Sequence
  Synthetic oligonucleotide
acctctgtcgtaggagagcggtattgcttt

SEQ ID NO: 462473 - DNA, 30 bp, Artificial Sequence
  Synthetic oligonucleotide
gttcgtaaacatataccgcctacttgcttt

SEQ ID NO: 462474 - DNA, 30 bp, Artificial Sequence
  Synthetic oligonucleotide
gtgtggggacgacagactggcatttgcttt

SEQ ID NO: 462475 - DNA, 30 bp, Artificial Sequence
  Synthetic oligonucleotide
accccgtaagggatcatatcgcgaatcttt

SEQ ID NO: 462476 - DNA, 30 bp, Artificial Sequence
  Synthetic oligonucleotide
agtatgcagggtcagagatacttcatcttt

SEQ ID NO: 462477 - DNA, 30 bp, Artificial Sequence
  Synthetic oligonucleotide
tgtcccagccctggatcgatagtgatcttt

SEQ ID NO: 462478 - DNA, 30 bp, Artificial Sequence
  Synthetic oligonucleotide
tatcatccgtatgccatctgaggactcttt

SEQ ID NO: 462479 - DNA, 30 bp, Artificial Sequence
  Synthetic oligonucleotide
actctaagcttgataagctcttgcctcttt

SEQ ID NO: 462480 - DNA, 30 bp, Artificial Sequence
  Synthetic oligonucleotide
cgcgtattccggttcgggcataagctcttt

SEQ ID NO: 462481 - DNA, 30 bp, Artificial Sequence
  Synthetic oligonucleotide
ggttttaagatcggctcggttttgctcttt

SEQ ID NO: 462482 - DNA, 30 bp, Artificial Sequence
  Synthetic oligonucleotide
gctactacctatgcgcgcccttaggtcttt

SEQ ID NO: 462483 - DNA, 30 bp, Artificial Sequence
  Synthetic oligonucleotide
gctagaaaacgccttccgtctatggtcttt

SEQ ID NO: 462484 - DNA, 30 bp, Artificial Sequence
  Synthetic oligonucleotide
gatcgaagcgctaggataaaagatgtcttt

SEQ ID NO: 462485 - DNA, 30 bp, Artificial Sequence
  Synthetic oligonucleotide
agaaggagcgttacgctacggagtgtcttt

SEQ ID NO: 462486 - DNA, 30 bp, Artificial Sequence
  Synthetic oligonucleotide
atccagcagaaggaccaggttagtgtcttt

SEQ ID NO: 462487 - DNA, 30 bp, Artificial Sequence
  Synthetic oligonucleotide
agtttatgaaaaagcaagctcattgtcttt

SEQ ID NO: 462488 - DNA, 30 bp, Artificial Sequence
  Synthetic oligonucleotide
gaacaccatttcaggtggataacattcttt

SEQ ID NO: 462489 - DNA, 30 bp, Artificial Sequence
  Synthetic oligonucleotide
accgatcgcggttcgtctctaccattcttt

SEQ ID NO: 462490 - DNA, 30 bp, Artificial Sequence
  Synthetic oligonucleotide
cacagattgtacgatatagaagacttcttt

SEQ ID NO: 462491 - DNA, 30 bp, Artificial Sequence
  Synthetic oligonucleotide
agtttagaaaaacaacgatcagccttcttt

SEQ ID NO: 462492 - DNA, 30 bp, Artificial Sequence
  Synthetic oligonucleotide
gtcgcatggtcagaactaattgcgttcttt

SEQ ID NO: 462493 - DNA, 30 bp, Artificial Sequence
  Synthetic oligonucleotide
agtcatacaaattcgtggcgtaggttcttt

SEQ ID NO: 462494 - DNA, 30 bp, Artificial Sequence
  Synthetic oligonucleotide
gaacaactaccttcagtagtttggttcttt

SEQ ID NO: 462495 - DNA, 30 bp, Artificial Sequence
  Synthetic oligonucleotide
ccaagattgttccccttaaactttttcttt

SEQ ID NO: 462496 - DNA, 30 bp, Artificial Sequence
  Synthetic oligonucleotide
agcacctccgtagcccttcgacaaaagttt

SEQ ID NO: 462497 - DNA, 30 bp, Artificial Sequence
  Synthetic oligonucleotide
acagggggactttgggaactccaaaagttt

SEQ ID NO: 462498 - DNA, 30 bp, Artificial Sequence
  Synthetic oligonucleotide
tagcagggctgcctagcgtaaaacaagttt

SEQ ID NO: 462499 - DNA, 30 bp, Artificial Sequence
  Synthetic oligonucleotide
taatctcacccatatccgcagttcaagttt

SEQ ID NO: 462500 - DNA, 30 bp, Artificial Sequence
  Synthetic oligonucleotide
ggggtcccagcttaaagcgctttcaagttt

SEQ ID NO: 462501 - DNA, 30 bp, Artificial Sequence
  Synthetic oligonucleotide
gacatgacgaggttcccaccgttgaagttt

SEQ ID NO: 462502 - DNA, 30 bp, Artificial Sequence
  Synthetic oligonucleotide
taattatcgtccgcagtggtagttaagttt

SEQ ID NO: 462503 - DNA, 30 bp, Artificial Sequence
  Synthetic oligonucleotide
aattggtacagatacgccgagctacagttt

SEQ ID NO: 462504 - DNA, 30 bp, Artificial Sequence
  Synthetic oligonucleotide
cgcgtcttaattctaataatgccccagttt

SEQ ID NO: 462505 - DNA, 30 bp, Artificial Sequence
  Synthetic oligonucleotide
aaaccgtcgggtcttaaaccctcccagttt

SEQ ID NO: 462506 - DNA, 30 bp, Artificial Sequence
  Synthetic oligonucleotide
agtcgccgtcggcgtttattttcccagttt

SEQ ID NO: 462507 - DNA, 30 bp, Artificial Sequence
  Synthetic oligonucleotide
atcgcttgacatagctacggctcgcagttt

SEQ ID NO: 462508 - DNA, 30 bp, Artificial Sequence
  Synthetic oligonucleotide
gctatcgtagccatcaccacgttgcagttt

SEQ ID NO: 462509 - DNA, 30 bp, Artificial Sequence
  Synthetic oligonucleotide
acaagtaattctcgtggtccatctcagttt

SEQ ID NO: 462510 - DNA, 30 bp, Artificial Sequence
  Synthetic oligonucleotide
cctcctataggccgggatcctgtcgagttt

SEQ ID NO: 462511 - DNA, 30 bp, Artificial Sequence
  Synthetic oligonucleotide
tagctcccgactgtacccccaggggagttt

SEQ ID NO: 462512 - DNA, 30 bp, Artificial Sequence
  Synthetic oligonucleotide
ctatggttagaacaggcctgtatggagttt

SEQ ID NO: 462513 - DNA, 30 bp, Artificial Sequence
  Synthetic oligonucleotide
gtcagtttgctgatcaagcaaaatgagttt

SEQ ID NO: 462514 - DNA, 30 bp, Artificial Sequence
  Synthetic oligonucleotide
ttattaagttacttatagagttatgagttt

SEQ ID NO: 462515 - DNA, 30 bp, Artificial Sequence
  Synthetic oligonucleotide
aattaaaaaaacaattggtaaggtgagttt

SEQ ID NO: 462516 - DNA, 30 bp, Artificial Sequence
  Synthetic oligonucleotide
ggcgaccagcattactcgatctttgagttt

SEQ ID NO: 462517 - DNA, 30 bp, Artificial Sequence
  Synthetic oligonucleotide
ctgtttttaaaatttatcaagaaatagttt

SEQ ID NO: 462518 - DNA, 30 bp, Artificial Sequence
  Synthetic oligonucleotide
ccaagcgctcttcgggagcctcaatagttt

SEQ ID NO: 462519 - DNA, 30 bp, Artificial Sequence
  Synthetic oligonucleotide
acttcaaaatactctccttcaggatagttt

SEQ ID NO: 462520 - DNA, 30 bp, Artificial Sequence
  Synthetic oligonucleotide
attgctctcgcgtcacgaaacagctagttt

SEQ ID NO: 462521 - DNA, 30 bp, Artificial Sequence
  Synthetic oligonucleotide
gtatgggctaatcttatgttgagctagttt

SEQ ID NO: 462522 - DNA, 30 bp, Artificial Sequence
  Synthetic oligonucleotide
taagatgggtttacgcactagatctagttt

SEQ ID NO: 462523 - DNA, 30 bp, Artificial Sequence
  Synthetic oligonucleotide
aaagttactgtaaatcagggtatctagttt

SEQ ID NO: 462524 - DNA, 30 bp, Artificial Sequence
  Synthetic oligonucleotide
taggttttataagccttggattattagttt

SEQ ID NO: 462525 - DNA, 30 bp, Artificial Sequence
  Synthetic oligonucleotide
tttttagtcagtcataaccaatgttagttt

SEQ ID NO: 462526 - DNA, 30 bp, Artificial Sequence
  Synthetic oligonucleotide
ccccaacgcttattgtaggggttttagttt

SEQ ID NO: 462527 - DNA, 30 bp, Artificial Sequence
  Synthetic oligonucleotide
atctacgtttaagtagacacaaaaacgttt

SEQ ID NO: 462528 - DNA, 30 bp, Artificial Sequence
  Synthetic oligonucleotide
tattctgggctcggacctggagaaacgttt

SEQ ID NO: 462529 - DNA, 30 bp, Artificial Sequence
  Synthetic oligonucleotide
tcacgtttggttaacccaggattaacgttt

SEQ ID NO: 462530 - DNA, 30 bp, Artificial Sequence
  Synthetic oligonucleotide
aactgcaaaaatgctaccatccccacgttt

SEQ ID NO: 462531 - DNA, 30 bp, Artificial Sequence
  Synthetic oligonucleotide
gtggagtggcacttggttttagccacgttt

SEQ ID NO: 462532 - DNA, 30 bp, Artificial Sequence
  Synthetic oligonucleotide
tataccgcagtctaagaacacatgacgttt

SEQ ID NO: 462533 - DNA, 30 bp, Artificial Sequence
  Synthetic oligonucleotide
tctagttacgcgactgtaatggtgacgttt

SEQ ID NO: 462534 - DNA, 30 bp, Artificial Sequence
  Synthetic oligonucleotide
gaatactgctgtggagtgtgcaatacgttt

SEQ ID NO: 462535 - DNA, 30 bp, Artificial Sequence
  Synthetic oligonucleotide
ttatgctgcaagatcccgaatggtacgttt

SEQ ID NO: 462536 - DNA, 30 bp, Artificial Sequence
  Synthetic oligonucleotide
tatataaattcaaggagcctaggaccgttt

SEQ ID NO: 462537 - DNA, 30 bp, Artificial Sequence
  Synthetic oligonucleotide
caagtcctgaacatggctcaaacgccgttt

SEQ ID NO: 462538 - DNA, 30 bp, Artificial Sequence
  Synthetic oligonucleotide
acagattaatacaatcgaccccggccgttt

SEQ ID NO: 462539 - DNA, 30 bp, Artificial Sequence
  Synthetic oligonucleotide
ggccgcacaaagtaccgctgctttccgttt

SEQ ID NO: 462540 - DNA, 31 bp, Artificial Sequence
  Synthetic oligonucleotide
atatgatcgtatacttgcgaacgaagcgttt

SEQ ID NO: 462541 - DNA, 30 bp, Artificial Sequence
  Synthetic oligonucleotide
tgtccctcaccagtaatcctataagcgttt

SEQ ID NO: 462542 - DNA, 30 bp, Artificial Sequence
  Synthetic oligonucleotide
tcatacagtgcttagaatttcgtagcgttt

SEQ ID NO: 462543 - DNA, 30 bp, Artificial Sequence
  Synthetic oligonucleotide
tgggtagtccgacggtgcagcaccgcgttt

SEQ ID NO: 462544 - DNA, 30 bp, Artificial Sequence
  Synthetic oligonucleotide
tcgaatcgtccctaaaagacgcgcgcgttt

SEQ ID NO: 462545 - DNA, 30 bp, Artificial Sequence
  Synthetic oligonucleotide
cggaagcctgttgtatgccggggcgcgttt

SEQ ID NO: 462546 - DNA, 30 bp, Artificial Sequence
  Synthetic oligonucleotide
atacaattaattaacaaacgcggtgcgttt

SEQ ID NO: 462547 - DNA, 30 bp, Artificial Sequence
  Synthetic oligonucleotide
ttcggaggtcggatcagtaaatgtgcgttt

SEQ ID NO: 462548 - DNA, 30 bp, Artificial Sequence
  Synthetic oligonucleotide
gttaatagcgttcctggtcgtgcatcgttt

SEQ ID NO: 462549 - DNA, 30 bp, Artificial Sequence
  Synthetic oligonucleotide
gttatgggtacaacgataagtaactcgttt

SEQ ID NO: 462550 - DNA, 30 bp, Artificial Sequence
  Synthetic oligonucleotide
gaccagctgaacgacgggacatactcgttt

SEQ ID NO: 462551 - DNA, 30 bp, Artificial Sequence
  Synthetic oligonucleotide
gatcgcttcatctaaacgcacggctcgttt

SEQ ID NO: 462552 - DNA, 30 bp, Artificial Sequence
  Synthetic oligonucleotide
agtatctcgggagcagccgtactttcgttt

SEQ ID NO: 462553 - DNA, 30 bp, Artificial Sequence
  Synthetic oligonucleotide
cggtttcccataataccttaggaaaggttt

SEQ ID NO: 462554 - DNA, 30 bp, Artificial Sequence
  Synthetic oligonucleotide
cccaaaggactttggagcgctggaaggttt

SEQ ID NO: 462555 - DNA, 30 bp, Artificial Sequence
  Synthetic oligonucleotide
cccgagaatttcactgggggaataaggttt

SEQ ID NO: 462556 - DNA, 30 bp, Artificial Sequence
  Synthetic oligonucleotide
ggtcgtattgctgccccctttataaggttt

SEQ ID NO: 462557 - DNA, 30 bp, Artificial Sequence
  Synthetic oligonucleotide
aagttaagatcaccggccccactaaggttt

SEQ ID NO: 462558 - DNA, 30 bp, Artificial Sequence
  Synthetic oligonucleotide
gtgtgtatattagctcccaagatcaggttt

SEQ ID NO: 462559 - DNA, 30 bp, Artificial Sequence
  Synthetic oligonucleotide
agtggacgattaaatcttgctctcaggttt

SEQ ID NO: 462560 - DNA, 30 bp, Artificial Sequence
  Synthetic oligonucleotide
tcctctgcagccatctatgttttcaggttt

SEQ ID NO: 462561 - DNA, 30 bp, Artificial Sequence
  Synthetic oligonucleotide
cgttctatatatgaaacgttcaggaggttt

SEQ ID NO: 462562 - DNA, 30 bp, Artificial Sequence
  Synthetic oligonucleotide
ggggcctcggagcaggacggtaggaggttt

SEQ ID NO: 462563 - DNA, 30 bp, Artificial Sequence
  Synthetic oligonucleotide
gtaaatccgtattgattattcctgaggttt

SEQ ID NO: 462564 - DNA, 30 bp, Artificial Sequence
  Synthetic oligonucleotide
ataatcttccctaggagttcttgtaggttt

SEQ ID NO: 462565 - DNA, 35 bp, Artificial Sequence
  Synthetic oligonucleotide
gtgcctcgtgcgacgtgatgggcagtccacggttt

SEQ ID NO: 462566 - DNA, 30 bp, Artificial Sequence
  Synthetic oligonucleotide
cagtcttgcgcagaattggaatgacggttt

SEQ ID NO: 462567 - DNA, 30 bp, Artificial Sequence
  Synthetic oligonucleotide
ccagccacaatactgccgtctagccggttt

SEQ ID NO: 462568 - DNA, 30 bp, Artificial Sequence
  Synthetic oligonucleotide
gagcccaagttcgccagtaccctccggttt

SEQ ID NO: 462569 - DNA, 30 bp, Artificial Sequence
  Synthetic oligonucleotide
ctattggcctgatttcaataatcgcggttt

SEQ ID NO: 462570 - DNA, 30 bp, Artificial Sequence
  Synthetic oligonucleotide
gtacgtctcgtttagattctctggcggttt

SEQ ID NO: 462571 - DNA, 30 bp, Artificial Sequence
  Synthetic oligonucleotide
cctagtatggtgactccctcgccagggttt

SEQ ID NO: 462572 - DNA, 30 bp, Artificial Sequence
  Synthetic oligonucleotide
ttattagtacgttatcctaaggtagggttt

SEQ ID NO: 462573 - DNA, 30 bp, Artificial Sequence
  Synthetic oligonucleotide
tttcttctttgtatagtacaagtcgggttt

SEQ ID NO: 462574 - DNA, 30 bp, Artificial Sequence
  Synthetic oligonucleotide
tactcgttatgtattggtcaagtggggttt

SEQ ID NO: 462575 - DNA, 25 bp, Artificial Sequence
  Synthetic oligonucleotide
taatgaggcatagtcagtggggttt

SEQ ID NO: 462576 - DNA, 30 bp, Artificial Sequence
  Synthetic oligonucleotide
ttaccatcgttttttctttgctctgggttt

SEQ ID NO: 462577 - DNA, 30 bp, Artificial Sequence
  Synthetic oligonucleotide
tacaagctccatcggaacattcgtgggttt

SEQ ID NO: 462578 - DNA, 30 bp, Artificial Sequence
  Synthetic oligonucleotide
actcacagcaatgggacgaatattgggttt

SEQ ID NO: 462579 - DNA, 30 bp, Artificial Sequence
  Synthetic oligonucleotide
tgaagttaggattacgacggaagatggttt

SEQ ID NO: 462580 - DNA, 30 bp, Artificial Sequence
  Synthetic oligonucleotide
tcccgtgatctgggtgtattattctggttt

SEQ ID NO: 462581 - DNA, 30 bp, Artificial Sequence
  Synthetic oligonucleotide
ggctaatgctcggaccttttgaggtggttt

SEQ ID NO: 462582 - DNA, 30 bp, Artificial Sequence
  Synthetic oligonucleotide
atcttccgcccggtcgcacattggtggttt

SEQ ID NO: 462583 - DNA, 30 bp, Artificial Sequence
  Synthetic oligonucleotide
gggcggtccgggttgtttttagattggttt

SEQ ID NO: 462584 - DNA, 29 bp, Artificial Sequence
  Synthetic oligonucleotide
tattcgttggacagagaagcacttggttt

SEQ ID NO: 462585 - DNA, 30 bp, Artificial Sequence
  Synthetic oligonucleotide
ccgcaggcagctcgtaatgcattttggttt

SEQ ID NO: 462586 - DNA, 30 bp, Artificial Sequence
  Synthetic oligonucleotide
aattaaaacgggcggtcccaacaaatgttt

SEQ ID NO: 462587 - DNA, 30 bp, Artificial Sequence
  Synthetic oligonucleotide
attttggatgtagaatgataaggaatgttt

SEQ ID NO: 462588 - DNA, 30 bp, Artificial Sequence
  Synthetic oligonucleotide
gagctcggtgcatggagtcatgtaatgttt

SEQ ID NO: 462589 - DNA, 30 bp, Artificial Sequence
  Synthetic oligonucleotide
gccattactagcttggagtcgcccatgttt

SEQ ID NO: 462590 - DNA, 30 bp, Artificial Sequence
  Synthetic oligonucleotide
agtgttttgcacaaagcgagaactatgttt

SEQ ID NO: 462591 - DNA, 30 bp, Artificial Sequence
  Synthetic oligonucleotide
aaggaagtcacgatgggagtggcactgttt

SEQ ID NO: 462592 - DNA, 30 bp, Artificial Sequence
  Synthetic oligonucleotide
cactacatctgggcttcaaagttactgttt

SEQ ID NO: 462593 - DNA, 30 bp, Artificial Sequence
  Synthetic oligonucleotide
tatgtttcgtagacagttgggaccctgttt

SEQ ID NO: 462594 - DNA, 30 bp, Artificial Sequence
  Synthetic oligonucleotide
ggtactgttgtaggctgccatgccctgttt

SEQ ID NO: 462595 - DNA, 30 bp, Artificial Sequence
  Synthetic oligonucleotide
tgccgtatccgttttgtgtattccctgttt

SEQ ID NO: 462596 - DNA, 30 bp, Artificial Sequence
  Synthetic oligonucleotide
tcacacctatgtgagagccaaacgctgttt

SEQ ID NO: 462597 - DNA, 30 bp, Artificial Sequence
  Synthetic oligonucleotide
agacaaagcaaaaataaggcgcggctgttt

SEQ ID NO: 462598 - DNA, 30 bp, Artificial Sequence
  Synthetic oligonucleotide
ttcccgacatggtgaatgcgactgctgttt

SEQ ID NO: 462599 - DNA, 30 bp, Artificial Sequence
  Synthetic oligonucleotide
tccggtatatgcagccgtcatctgctgttt

SEQ ID NO: 462600 - DNA, 30 bp, Artificial Sequence
  Synthetic oligonucleotide
tgtagccagtacagcgcagtcaatctgttt

SEQ ID NO: 462601 - DNA, 30 bp, Artificial Sequence
  Synthetic oligonucleotide
gcccagtaacgtaggtgttaccttctgttt

SEQ ID NO: 462602 - DNA, 30 bp, Artificial Sequence
  Synthetic oligonucleotide
tcaaattatttgcgctctttgtttctgttt

SEQ ID NO: 462603 - DNA, 30 bp, Artificial Sequence
  Synthetic oligonucleotide
ccgcaagcgcagctctggcgcgcagtgttt

SEQ ID NO: 462604 - DNA, 30 bp, Artificial Sequence
  Synthetic oligonucleotide
tttccaagctgatactgtctacacgtgttt

SEQ ID NO: 462605 - DNA, 30 bp, Artificial Sequence
  Synthetic oligonucleotide
agaaacctcgactagaactttgaggtgttt

SEQ ID NO: 462606 - DNA, 31 bp, Artificial Sequence
  Synthetic oligonucleotide
ggctgacacaatgtgcaggtctcctgtgttt

SEQ ID NO: 462607 - DNA, 30 bp, Artificial Sequence
  Synthetic oligonucleotide
atgaagtatggggtgcttaaaggattgttt

SEQ ID NO: 462608 - DNA, 30 bp, Artificial Sequence
  Synthetic oligonucleotide
gcattcgcgcgcacgaaactggcgttgttt

SEQ ID NO: 462609 - DNA, 30 bp, Artificial Sequence
  Synthetic oligonucleotide
aactgcccttatcattccggtaggttgttt

SEQ ID NO: 462610 - DNA, 30 bp, Artificial Sequence
  Synthetic oligonucleotide
gaccataaggccccgaaattgtggttgttt

SEQ ID NO: 462611 - DNA, 30 bp, Artificial Sequence
  Synthetic oligonucleotide
caatgaccctcgtccgttatgttgttgttt

SEQ ID NO: 462612 - DNA, 30 bp, Artificial Sequence
  Synthetic oligonucleotide
ctgctgcgatatttttgtactttgttgttt

SEQ ID NO: 462613 - DNA, 30 bp, Artificial Sequence
  Synthetic oligonucleotide
ggtcagtgtcggcaaccctatgatttgttt

SEQ ID NO: 462614 - DNA, 30 bp, Artificial Sequence
  Synthetic oligonucleotide
aggtgttctgcgtcccggtaggaaaatttt

SEQ ID NO: 462615 - DNA, 30 bp, Artificial Sequence
  Synthetic oligonucleotide
cgacgttaacagtttttgtggccaaatttt

SEQ ID NO: 462616 - DNA, 30 bp, Artificial Sequence
  Synthetic oligonucleotide
ctagtctgtctccagcacaagttcaatttt

SEQ ID NO: 462617 - DNA, 30 bp, Artificial Sequence
  Synthetic oligonucleotide
cagggctatatgtcacttattccgaatttt

SEQ ID NO: 462618 - DNA, 30 bp, Artificial Sequence
  Synthetic oligonucleotide
ggatcgttcagggagcatatctcgaatttt

SEQ ID NO: 462619 - DNA, 30 bp, Artificial Sequence
  Synthetic oligonucleotide
atctagggtttcttgagcgggctgaatttt

SEQ ID NO: 462620 - DNA, 30 bp, Artificial Sequence
  Synthetic oligonucleotide
tcacttcgctagagtaatagcgctaatttt

SEQ ID NO: 462621 - DNA, 30 bp, Artificial Sequence
  Synthetic oligonucleotide
tacggtgagccgagtcaaggggttaatttt

SEQ ID NO: 462622 - DNA, 30 bp, Artificial Sequence
  Synthetic oligonucleotide
cccattccggaccggcgggaaaaacatttt

SEQ ID NO: 462623 - DNA, 30 bp, Artificial Sequence
  Synthetic oligonucleotide
ccggcgctaatatgggtcggcccccatttt

SEQ ID NO: 462624 - DNA, 30 bp, Artificial Sequence
  Synthetic oligonucleotide
gacagtatcaaggacgctggaaagcatttt

SEQ ID NO: 462625 - DNA, 30 bp, Artificial Sequence
  Synthetic oligonucleotide
gtctgtccttaggatgggagagagcatttt

SEQ ID NO: 462626 - DNA, 30 bp, Artificial Sequence
  Synthetic oligonucleotide
tatggatctcaagttgggcacgcgcatttt

SEQ ID NO: 462627 - DNA, 30 bp, Artificial Sequence
  Synthetic oligonucleotide
cttcagttacgagggagactctggcatttt

SEQ ID NO: 462628 - DNA, 31 bp, Artificial Sequence
  Synthetic oligonucleotide
ttatgctgtggatagatcacgtttagatttt

SEQ ID NO: 462629 - DNA, 30 bp, Artificial Sequence
  Synthetic oligonucleotide
tcctactgaaagtgaactatcgccgatttt

SEQ ID NO: 462630 - DNA, 30 bp, Artificial Sequence
  Synthetic oligonucleotide
cactcttcgcgtagacactttagcgatttt

SEQ ID NO: 462631 - DNA, 30 bp, Artificial Sequence
  Synthetic oligonucleotide
ctcgactgcagacgatcagtcgaggatttt

SEQ ID NO: 462632 - DNA, 30 bp, Artificial Sequence
  Synthetic oligonucleotide
ctttatgtacaataaaagccaagggatttt

SEQ ID NO: 462633 - DNA, 30 bp, Artificial Sequence
  Synthetic oligonucleotide
tttaatgcatcccgatagagccgatatttt

SEQ ID NO: 462634 - DNA, 30 bp, Artificial Sequence
  Synthetic oligonucleotide
acattttaggtagttgtgttctgatatttt

SEQ ID NO: 462635 - DNA, 30 bp, Artificial Sequence
  Synthetic oligonucleotide
ctccgtatccggcgttccaaaacctatttt

SEQ ID NO: 462636 - DNA, 30 bp, Artificial Sequence
  Synthetic oligonucleotide
ataagcacaaaacacgctcggccctatttt

SEQ ID NO: 462637 - DNA, 30 bp, Artificial Sequence
  Synthetic oligonucleotide
tgtaccactattaaagcgaccgcctatttt

SEQ ID NO: 462638 - DNA, 30 bp, Artificial Sequence
  Synthetic oligonucleotide
atcagatcgcgcataaggccaatctatttt

SEQ ID NO: 462639 - DNA, 30 bp, Artificial Sequence
  Synthetic oligonucleotide
atcattaagggcctgcccgagtggtatttt

SEQ ID NO: 462640 - DNA, 30 bp, Artificial Sequence
  Synthetic oligonucleotide
gggcccgcagatacgaaccgcttgtatttt

SEQ ID NO: 462641 - DNA, 30 bp, Artificial Sequence
  Synthetic oligonucleotide
gagatactgtaggcatacgtggattatttt

SEQ ID NO: 462642 - DNA, 30 bp, Artificial Sequence
  Synthetic oligonucleotide
acatgttgctggtttccttagtcttatttt

SEQ ID NO: 462643 - DNA, 30 bp, Artificial Sequence
  Synthetic oligonucleotide
tgtctttgggattatgtcactgaaactttt

SEQ ID NO: 462644 - DNA, 30 bp, Artificial Sequence
  Synthetic oligonucleotide
agtcgctctataatcaagtcgtaaactttt

SEQ ID NO: 462645 - DNA, 30 bp, Artificial Sequence
  Synthetic oligonucleotide
tgcgtccagaagcactatggcctaactttt

SEQ ID NO: 462646 - DNA, 30 bp, Artificial Sequence
  Synthetic oligonucleotide
caaccgatacatcggttcaataacactttt

SEQ ID NO: 462647 - DNA, 30 bp, Artificial Sequence
  Synthetic oligonucleotide
gctcagcttacggtattcacagtgactttt

SEQ ID NO: 462648 - DNA, 30 bp, Artificial Sequence
  Synthetic oligonucleotide
gcattatcacagtctataactttgactttt

SEQ ID NO: 462649 - DNA, 30 bp, Artificial Sequence
  Synthetic oligonucleotide
gataactaaagaccatcttgaagtactttt

SEQ ID NO: 462650 - DNA, 30 bp, Artificial Sequence
  Synthetic oligonucleotide
aattattggactcagatgcgggaacctttt

SEQ ID NO: 462651 - DNA, 30 bp, Artificial Sequence
  Synthetic oligonucleotide
cttagcgaaaacaaccatttgcgacctttt

SEQ ID NO: 462652 - DNA, 30 bp, Artificial Sequence
  Synthetic oligonucleotide
cgaaaccctctcgctaagtatgtacctttt

SEQ ID NO: 462653 - DNA, 30 bp, Artificial Sequence
  Synthetic oligonucleotide
gcgaggcgttggaggtttacgaagcctttt

SEQ ID NO: 462654 - DNA, 30 bp, Artificial Sequence
  Synthetic oligonucleotide
tataatagcgttaggaggtcttctcctttt

SEQ ID NO: 462655 - DNA, 30 bp, Artificial Sequence
  Synthetic oligonucleotide
atgacaaattcatggcgctgtggtcctttt

SEQ ID NO: 462656 - DNA, 30 bp, Artificial Sequence
  Synthetic oligonucleotide
ttttatagggtgcattcgtgataagctttt

SEQ ID NO: 462657 - DNA, 30 bp, Artificial Sequence
  Synthetic oligonucleotide
aagttaagggcttgagcgttgacagctttt

SEQ ID NO: 462658 - DNA, 30 bp, Artificial Sequence
  Synthetic oligonucleotide
ttagagtggaaagtgcagtatccagctttt

SEQ ID NO: 462659 - DNA, 30 bp, Artificial Sequence
  Synthetic oligonucleotide
atgtgctgctaagctggtcccatagctttt

SEQ ID NO: 462660 - DNA, 30 bp, Artificial Sequence
  Synthetic oligonucleotide
cccgtaacaagtcaagtaggggacgctttt

SEQ ID NO: 462661 - DNA, 30 bp, Artificial Sequence
  Synthetic oligonucleotide
aaaggactatggaggactagcagcgctttt

SEQ ID NO: 462662 - DNA, 30 bp, Artificial Sequence
  Synthetic oligonucleotide
ttacgctccgaggggtggacccgcgctttt

SEQ ID NO: 462663 - DNA, 30 bp, Artificial Sequence
  Synthetic oligonucleotide
tctcggtacatgactgtttacggcgctttt

SEQ ID NO: 462664 - DNA, 30 bp, Artificial Sequence
  Synthetic oligonucleotide
acgcagtctatggggagttgttaggctttt

SEQ ID NO: 462665 - DNA, 30 bp, Artificial Sequence
  Synthetic oligonucleotide
cgtcaacgtgatgacactcgtttggctttt

SEQ ID NO: 462666 - DNA, 30 bp, Artificial Sequence
  Synthetic oligonucleotide
cccgacgttcttcgaccgagcaatgctttt

SEQ ID NO: 462667 - DNA, 30 bp, Artificial Sequence
  Synthetic oligonucleotide
ggtatggaaatggagaagtcgaatgctttt

SEQ ID NO: 462668 - DNA, 30 bp, Artificial Sequence
  Synthetic oligonucleotide
gcgacttgtctaaatcaatgaagtgctttt

SEQ ID NO: 462669 - DNA, 30 bp, Artificial Sequence
  Synthetic oligonucleotide
caggcaggataggcaattagtattgctttt

SEQ ID NO: 462670 - DNA, 30 bp, Artificial Sequence
  Synthetic oligonucleotide
cagtggaagtgactccggcctcttgctttt

SEQ ID NO: 462671 - DNA, 30 bp, Artificial Sequence
  Synthetic oligonucleotide
ggcaagcgctcgtctgagttctttgctttt

SEQ ID NO: 462672 - DNA, 30 bp, Artificial Sequence
  Synthetic oligonucleotide
gaatctgactttcaccattaggaatctttt

SEQ ID NO: 462673 - DNA, 30 bp, Artificial Sequence
  Synthetic oligonucleotide
ttggctatatcataatttataatttctttt

SEQ ID NO: 462674 - DNA, 30 bp, Artificial Sequence
  Synthetic oligonucleotide
gaatatggactgaacggtgacctaagtttt

SEQ ID NO: 462675 - DNA, 30 bp, Artificial Sequence
  Synthetic oligonucleotide
agggtaaaagtgttagctggctccagtttt

SEQ ID NO: 462676 - DNA, 30 bp, Artificial Sequence
  Synthetic oligonucleotide
gaggcatttttgtctgaagcggagagtttt

SEQ ID NO: 462677 - DNA, 30 bp, Artificial Sequence
  Synthetic oligonucleotide
cctttgcaactcgaattgttaacgagtttt

SEQ ID NO: 462678 - DNA, 30 bp, Artificial Sequence
  Synthetic oligonucleotide
acagcgactggacgcgttgtaagtagtttt

SEQ ID NO: 462679 - DNA, 30 bp, Artificial Sequence
  Synthetic oligonucleotide
ctcagtagcctaagaagctgttgtagtttt

SEQ ID NO: 462680 - DNA, 30 bp, Artificial Sequence
  Synthetic oligonucleotide
tggccgcgacgtttaaaacagcaacgtttt

SEQ ID NO: 462681 - DNA, 30 bp, Artificial Sequence
  Synthetic oligonucleotide
tctgacatatgcatatcagaattacgtttt

SEQ ID NO: 462682 - DNA, 30 bp, Artificial Sequence
  Synthetic oligonucleotide
gtctgtccatatgtcagcattgtgcgtttt

SEQ ID NO: 462683 - DNA, 30 bp, Artificial Sequence
  Synthetic oligonucleotide
taggagggcggggcgttagcgggaggtttt

SEQ ID NO: 462684 - DNA, 30 bp, Artificial Sequence
  Synthetic oligonucleotide
gcgtcttgatcgcaaggctaattaggtttt

SEQ ID NO: 462685 - DNA, 30 bp, Artificial Sequence
  Synthetic oligonucleotide
tcaaatcatcagaccagtgtcttaggtttt

SEQ ID NO: 462686 - DNA, 30 bp, Artificial Sequence
  Synthetic oligonucleotide
ttcacccagggaccatcccgtttaggtttt

SEQ ID NO: 462687 - DNA, 30 bp, Artificial Sequence
  Synthetic oligonucleotide
ttcgcgtgctagtggggatgtaagggtttt

SEQ ID NO: 462688 - DNA, 30 bp, Artificial Sequence
  Synthetic oligonucleotide
atagagataaattatgatacgtagggtttt

SEQ ID NO: 462689 - DNA, 30 bp, Artificial Sequence
  Synthetic oligonucleotide
atttgcaaagagtaaaaactctggggtttt

SEQ ID NO: 462690 - DNA, 30 bp, Artificial Sequence
  Synthetic oligonucleotide
ttgtggagcatacaattctaacatggtttt

SEQ ID NO: 462691 - DNA, 30 bp, Artificial Sequence
  Synthetic oligonucleotide
cgtaactgccgacaagcccgtcttggtttt

SEQ ID NO: 462692 - DNA, 30 bp, Artificial Sequence
  Synthetic oligonucleotide
tgagagcacccacattggatgtaatgtttt

SEQ ID NO: 462693 - DNA, 30 bp, Artificial Sequence
  Synthetic oligonucleotide
actgtgtgttgcttccgggtccgatgtttt

SEQ ID NO: 462694 - DNA, 30 bp, Artificial Sequence
  Synthetic oligonucleotide
ggttcaaaaaagttacgggcgggatgtttt

SEQ ID NO: 462695 - DNA, 30 bp, Artificial Sequence
  Synthetic oligonucleotide
tggatgttggtaaactctccgatatgtttt

SEQ ID NO: 462696 - DNA, 30 bp, Artificial Sequence
  Synthetic oligonucleotide
gtattgagttagactcatagtatatgtttt

SEQ ID NO: 462697 - DNA, 30 bp, Artificial Sequence
  Synthetic oligonucleotide
tttaagtggatgtgtagggaaacctgtttt

SEQ ID NO: 462698 - DNA, 30 bp, Artificial Sequence
  Synthetic oligonucleotide
ggattaacgttcgagcatctcacttgtttt

SEQ ID NO: 462699 - DNA, 30 bp, Artificial Sequence
  Synthetic oligonucleotide
gttcaaagcttaagacgtcgggaaattttt

SEQ ID NO: 462700 - DNA, 30 bp, Artificial Sequence
  Synthetic oligonucleotide
gtagttcgttgaaaggttattgaaattttt

SEQ ID NO: 462701 - DNA, 30 bp, Artificial Sequence
  Synthetic oligonucleotide
gagcagtgaagaacgtttaggtaaattttt

SEQ ID NO: 462702 - DNA, 30 bp, Artificial Sequence
  Synthetic oligonucleotide
aaataatcgtatgtagcgttaacaattttt

SEQ ID NO: 462703 - DNA, 30 bp, Artificial Sequence
  Synthetic oligonucleotide
gtaggagtatgggttagcccaggaattttt

SEQ ID NO: 462704 - DNA, 30 bp, Artificial Sequence
  Synthetic oligonucleotide
ctttttaacgtttatctataaaacattttt

SEQ ID NO: 462705 - DNA, 30 bp, Artificial Sequence
  Synthetic oligonucleotide
gttaataataaagttttttcaggcattttt

SEQ ID NO: 462706 - DNA, 30 bp, Artificial Sequence
  Synthetic oligonucleotide
agcaacccaatgtataagccctgcattttt

SEQ ID NO: 462707 - DNA, 30 bp, Artificial Sequence
  Synthetic oligonucleotide
gtcagattaaatgagattcaggagattttt

SEQ ID NO: 462708 - DNA, 30 bp, Artificial Sequence
  Synthetic oligonucleotide
gaggagctacgcgctatgtatgcgattttt

SEQ ID NO: 462709 - DNA, 30 bp, Artificial Sequence
  Synthetic oligonucleotide
ccatttgtatcggcagcagtcgtgattttt

SEQ ID NO: 462710 - DNA, 30 bp, Artificial Sequence
  Synthetic oligonucleotide
cctcccgacaaacatctgccaaatattttt

SEQ ID NO: 462711 - DNA, 30 bp, Artificial Sequence
  Synthetic oligonucleotide
tcgaaggtggctccctagagtaatattttt

SEQ ID NO: 462712 - DNA, 30 bp, Artificial Sequence
  Synthetic oligonucleotide
tgactgagttcgtttatagtcactattttt

SEQ ID NO: 462713 - DNA, 30 bp, Artificial Sequence
  Synthetic oligonucleotide
tctccttatgtagaaggtggatctattttt

SEQ ID NO: 462714 - DNA, 30 bp, Artificial Sequence
  Synthetic oligonucleotide
gagtatactctgtaaggttgaagtattttt

SEQ ID NO: 462715 - DNA, 30 bp, Artificial Sequence
  Synthetic oligonucleotide
ccagaaatgaccagtttcttaagacttttt

SEQ ID NO: 462716 - DNA, 30 bp, Artificial Sequence
  Synthetic oligonucleotide
gtaaaggagctatggcggctagcccttttt

SEQ ID NO: 462717 - DNA, 30 bp, Artificial Sequence
  Synthetic oligonucleotide
gcattgagccgcaaccggttcgtccttttt

SEQ ID NO: 462718 - DNA, 30 bp, Artificial Sequence
  Synthetic oligonucleotide
agggaattgacgtgcaatcatgctcttttt

SEQ ID NO: 462719 - DNA, 30 bp, Artificial Sequence
  Synthetic oligonucleotide
gtaattctgtctaaataacatcttcttttt

SEQ ID NO: 462720 - DNA, 30 bp, Artificial Sequence
  Synthetic oligonucleotide
acgtataaagctcaggtttgagaagttttt

SEQ ID NO: 462721 - DNA, 30 bp, Artificial Sequence
  Synthetic oligonucleotide
agacagttttatgggcggacggacgttttt

SEQ ID NO: 462722 - DNA, 30 bp, Artificial Sequence
  Synthetic oligonucleotide
tacgtaactaggaccgccacaaccgttttt

SEQ ID NO: 462723 - DNA, 30 bp, Artificial Sequence
  Synthetic oligonucleotide
gttgattataatgccgtgttttccgttttt

SEQ ID NO: 462724 - DNA, 30 bp, Artificial Sequence
  Synthetic oligonucleotide
agcttgttttcgatagcctgaaaggttttt

SEQ ID NO: 462725 - DNA, 30 bp, Artificial Sequence
  Synthetic oligonucleotide
atctgcgtaaagcgtgcccaaacggttttt

SEQ ID NO: 462726 - DNA, 30 bp, Artificial Sequence
  Synthetic oligonucleotide
gctcaattttgagttgtccgaacggttttt

SEQ ID NO: 462727 - DNA, 30 bp, Artificial Sequence
  Synthetic oligonucleotide
gcacgcttatgttcgatcggtgcggttttt

SEQ ID NO: 462728 - DNA, 30 bp, Artificial Sequence
  Synthetic oligonucleotide
tgaagcatgtaggtagttacactggttttt

SEQ ID NO: 462729 - DNA, 30 bp, Artificial Sequence
  Synthetic oligonucleotide
tagtacttgtgtagtcgctgagtggttttt

SEQ ID NO: 462730 - DNA, 30 bp, Artificial Sequence
  Synthetic oligonucleotide
aaacaggttcataaattagaccgtgttttt

SEQ ID NO: 462731 - DNA, 30 bp, Artificial Sequence
  Synthetic oligonucleotide
tggtcgcaaggttcgagtaaagaatttttt

SEQ ID NO: 462732 - DNA, 30 bp, Artificial Sequence
  Synthetic oligonucleotide
ctgggaagaagcagcggaattcgatttttt

SEQ ID NO: 462733 - DNA, 30 bp, Artificial Sequence
  Synthetic oligonucleotide
caaagaaggtgaagaaatcctggatttttt

SEQ ID NO: 462734 - DNA, 30 bp, Artificial Sequence
  Synthetic oligonucleotide
tccggagacacgcttagaatttcctttttt

SEQ ID NO: 462735 - DNA, 30 bp, Artificial Sequence
  Synthetic oligonucleotide
tgtatgtgcccgtccataccgctgtttttt

SEQ ID NO: 462736 - DNA, 30 bp, Artificial Sequence
  Synthetic oligonucleotide
aaggagtactggaaaaatgtacattttttt

SEQ ID NO: 462737 - DNA, 30 bp, Artificial Sequence
  Synthetic oligonucleotide
acaaacgcagttacggactccctttttttt

SEQ ID NO: 462738 - DNA, 30 bp, Artificial Sequence
  Synthetic oligonucleotide
atatggccatctcttattaaagtttttttt

SEQ ID NO: 462739 - DNA, 30 bp, Artificial Sequence
  Synthetic oligonucleotide
atagagagtccaacatcggcgtaaaaaaaa

SEQ ID NO: 462740 - DNA, 30 bp, Artificial Sequence
  Synthetic oligonucleotide
aagctataaacacgcgcggggtcaaaaaaa

SEQ ID NO: 462741 - DNA, 30 bp, Artificial Sequence
  Synthetic oligonucleotide
agcgcatttctctgatgatgaggaaaaaaa

SEQ ID NO: 462742 - DNA, 30 bp, Artificial Sequence
  Synthetic oligonucleotide
ttgagtgcagcgggtgtgcaatgaaaaaaa

SEQ ID NO: 462743 - DNA, 30 bp, Artificial Sequence
  Synthetic oligonucleotide
tttgtgtgtttgtgcgttgaacacaaaaaa

SEQ ID NO: 462744 - DNA, 30 bp, Artificial Sequence
  Synthetic oligonucleotide
ttttagcaccacactccaggtgacaaaaaa

SEQ ID NO: 462745 - DNA, 30 bp, Artificial Sequence
  Synthetic oligonucleotide
ggacccgcgtcctggagtcggtacaaaaaa

SEQ ID NO: 462746 - DNA, 30 bp, Artificial Sequence
  Synthetic oligonucleotide
gagtcgagtcggcagaagtttaccaaaaaa

SEQ ID NO: 462747 - DNA, 30 bp, Artificial Sequence
  Synthetic oligonucleotide
aaactactaatcgtcgcgtccatcaaaaaa

SEQ ID NO: 462748 - DNA, 30 bp, Artificial Sequence
  Synthetic oligonucleotide
atcacccatttatctcgattgatcaaaaaa

SEQ ID NO: 462749 - DNA, 30 bp, Artificial Sequence
  Synthetic oligonucleotide
atagacctcccggtaggctctttcaaaaaa

SEQ ID NO: 462750 - DNA, 30 bp, Artificial Sequence
  Synthetic oligonucleotide
atataatgctcattagcctgtcagaaaaaa

SEQ ID NO: 462751 - DNA, 30 bp, Artificial Sequence
  Synthetic oligonucleotide
agcaatccttctagtttcgtcgcgaaaaaa

SEQ ID NO: 462752 - DNA, 30 bp, Artificial Sequence
  Synthetic oligonucleotide
tctagatcagctctagaccaacataaaaaa

SEQ ID NO: 462753 - DNA, 30 bp, Artificial Sequence
  Synthetic oligonucleotide
gccgtactcacaaaactctgggataaaaaa

SEQ ID NO: 462754 - DNA, 30 bp, Artificial Sequence
  Synthetic oligonucleotide
ctctggagcgcggagagcgatcctaaaaaa

SEQ ID NO: 462755 - DNA, 30 bp, Artificial Sequence
  Synthetic oligonucleotide
gccgaggttcttgtataagatgctaaaaaa

SEQ ID NO: 462756 - DNA, 30 bp, Artificial Sequence
  Synthetic oligonucleotide
taagacgatatctgtactgattttaaaaaa

SEQ ID NO: 462757 - DNA, 30 bp, Artificial Sequence
  Synthetic oligonucleotide
tataaggaaagcccactatggccacaaaaa

SEQ ID NO: 462758 - DNA, 30 bp, Artificial Sequence
  Synthetic oligonucleotide
gggtatccccacggtatttttttacaaaaa

SEQ ID NO: 462759 - DNA, 30 bp, Artificial Sequence
  Synthetic oligonucleotide
gggggatttttcattaggcaggcccaaaaa

SEQ ID NO: 462760 - DNA, 30 bp, Artificial Sequence
  Synthetic oligonucleotide
tgttacccaggggcacccgaagtccaaaaa

SEQ ID NO: 462761 - DNA, 30 bp, Artificial Sequence
  Synthetic oligonucleotide
ttatttatcactatgagccttgggcaaaaa

SEQ ID NO: 462762 - DNA, 30 bp, Artificial Sequence
  Synthetic oligonucleotide
tcggtctgccatatgtaaaatcttcaaaaa

SEQ ID NO: 462763 - DNA, 30 bp, Artificial Sequence
  Synthetic oligonucleotide
agcggccgtgttgcttaccttggagaaaaa

SEQ ID NO: 462764 - DNA, 30 bp, Artificial Sequence
  Synthetic oligonucleotide
tctgttgttatccaactgacaaacgaaaaa

SEQ ID NO: 462765 - DNA, 30 bp, Artificial Sequence
  Synthetic oligonucleotide
accctcgcataaagggtgagtgtggaaaaa

SEQ ID NO: 462766 - DNA, 30 bp, Artificial Sequence
  Synthetic oligonucleotide
ttactcctggttgaacgtttgagtgaaaaa

SEQ ID NO: 462767 - DNA, 30 bp, Artificial Sequence
  Synthetic oligonucleotide
tagggttctttttctcgacagattgaaaaa

SEQ ID NO: 462768 - DNA, 30 bp, Artificial Sequence
  Synthetic oligonucleotide
tttagaacagtctaggctcagatataaaaa

SEQ ID NO: 462769 - DNA, 30 bp, Artificial Sequence
  Synthetic oligonucleotide
gttcagtttttacgttatgctctctaaaaa

SEQ ID NO: 462770 - DNA, 30 bp, Artificial Sequence
  Synthetic oligonucleotide
aagttcacctagttactaatggagtaaaaa

SEQ ID NO: 462771 - DNA, 30 bp, Artificial Sequence
  Synthetic oligonucleotide
agcgttctacggaaccctcgtgcgtaaaaa

SEQ ID NO: 462772 - DNA, 30 bp, Artificial Sequence
  Synthetic oligonucleotide
agctccctcctttctggatgaacttaaaaa

SEQ ID NO: 462773 - DNA, 30 bp, Artificial Sequence
  Synthetic oligonucleotide
gcgcagcggaactgctgtgaagcttaaaaa

SEQ ID NO: 462774 - DNA, 30 bp, Artificial Sequence
  Synthetic oligonucleotide
gaatatttcaagcgtgactggacaacaaaa

SEQ ID NO: 462775 - DNA, 30 bp, Artificial Sequence
  Synthetic oligonucleotide
taccccagcgctatagactccggaacaaaa

SEQ ID NO: 462776 - DNA, 30 bp, Artificial Sequence
  Synthetic oligonucleotide
atgcaaatttcagagcatttctgaacaaaa

SEQ ID NO: 462777 - DNA, 30 bp, Artificial Sequence
  Synthetic oligonucleotide
ttatcctgctgttctacgggtactacaaaa

SEQ ID NO: 462778 - DNA, 30 bp, Artificial Sequence
  Synthetic oligonucleotide
ctactcatactcgattttcttcgtacaaaa

SEQ ID NO: 462779 - DNA, 30 bp, Artificial Sequence
  Synthetic oligonucleotide
cggtgggtcggcagaagtttcaaaccaaaa

SEQ ID NO: 462780 - DNA, 30 bp, Artificial Sequence
  Synthetic oligonucleotide
tatagctccatactcaatggtatcccaaaa

SEQ ID NO: 462781 - DNA, 30 bp, Artificial Sequence
  Synthetic oligonucleotide
cttgagttgttgttgcaggagaggccaaaa

SEQ ID NO: 462782 - DNA, 30 bp, Artificial Sequence
  Synthetic oligonucleotide
cacccctggatttagtgttcagggccaaaa

SEQ ID NO: 462783 - DNA, 30 bp, Artificial Sequence
  Synthetic oligonucleotide
agtgacagagctattttatattctccaaaa

SEQ ID NO: 462784 - DNA, 30 bp, Artificial Sequence
  Synthetic oligonucleotide
ggtggttcacatataggtgcatcagcaaaa

SEQ ID NO: 462785 - DNA, 30 bp, Artificial Sequence
  Synthetic oligonucleotide
tagtatgcattacggagcacacgagcaaaa

SEQ ID NO: 462786 - DNA, 30 bp, Artificial Sequence
  Synthetic oligonucleotide
cgcagcgccccaactcactacgatgcaaaa

SEQ ID NO: 462787 - DNA, 30 bp, Artificial Sequence
  Synthetic oligonucleotide
gaagtgcatctgatactttgcgactcaaaa

SEQ ID NO: 462788 - DNA, 30 bp, Artificial Sequence
  Synthetic oligonucleotide
aatcgggtcgctttatgacttgactcaaaa

SEQ ID NO: 462789 - DNA, 30 bp, Artificial Sequence
  Synthetic oligonucleotide
attagcaaaatttcacaggcgcgctcaaaa

SEQ ID NO: 462790 - DNA, 30 bp, Artificial Sequence
  Synthetic oligonucleotide
tattgcaaacattgtcggcggcgctcaaaa

SEQ ID NO: 462791 - DNA, 30 bp, Artificial Sequence
  Synthetic oligonucleotide
ctatgtgaagctctacatgtaggctcaaaa

SEQ ID NO: 462792 - DNA, 29 bp, Artificial Sequence
  Synthetic oligonucleotide
cgttctgcgttctccgcaacatctcaaaa

SEQ ID NO: 462793 - DNA, 30 bp, Artificial Sequence
  Synthetic oligonucleotide
caattttgtagtgcagtacctttctcaaaa

SEQ ID NO: 462794 - DNA, 30 bp, Artificial Sequence
  Synthetic oligonucleotide
aaaagcgtccttttccctacccattcaaaa

SEQ ID NO: 462795 - DNA, 30 bp, Artificial Sequence
  Synthetic oligonucleotide
ttgagtgaccatatgcattgttcttcaaaa

SEQ ID NO: 462796 - DNA, 30 bp, Artificial Sequence
  Synthetic oligonucleotide
ggatcgcgccagcgttgagagagttcaaaa

SEQ ID NO: 462797 - DNA, 30 bp, Artificial Sequence
  Synthetic oligonucleotide
ccggtccgagaggtattacgtagaagaaaa

SEQ ID NO: 462798 - DNA, 30 bp, Artificial Sequence
  Synthetic oligonucleotide
ggagatagggcttgactatttcgaagaaaa

SEQ ID NO: 462799 - DNA, 30 bp, Artificial Sequence
  Synthetic oligonucleotide
ttttctgaccgtaaggtaaaatacagaaaa

SEQ ID NO: 462800 - DNA, 30 bp, Artificial Sequence
  Synthetic oligonucleotide
cacaatgctttggtccaaggtttcagaaaa

SEQ ID NO: 462801 - DNA, 30 bp, Artificial Sequence
  Synthetic oligonucleotide
tgctaggcgaaggtgggaagtaagagaaaa

SEQ ID NO: 462802 - DNA, 30 bp, Artificial Sequence
  Synthetic oligonucleotide
agcgaaagtatggatagaacacgtagaaaa

SEQ ID NO: 462803 - DNA, 30 bp, Artificial Sequence
  Synthetic oligonucleotide
gatcgatggcagacgattctatgtagaaaa

SEQ ID NO: 462804 - DNA, 30 bp, Artificial Sequence
  Synthetic oligonucleotide
gactttaagggcatatagtggcttagaaaa

SEQ ID NO: 462805 - DNA, 30 bp, Artificial Sequence
  Synthetic oligonucleotide
actttttcaaagtggagaggtgttagaaaa

SEQ ID NO: 462806 - DNA, 30 bp, Artificial Sequence
  Synthetic oligonucleotide
tctcaagagtgttcgatgatttttagaaaa

SEQ ID NO: 462807 - DNA, 30 bp, Artificial Sequence
  Synthetic oligonucleotide
gatttgccgacgcaggcccgagtccgaaaa

SEQ ID NO: 462808 - DNA, 30 bp, Artificial Sequence
  Synthetic oligonucleotide
gttcgttaactctgactaagtttccgaaaa

SEQ ID NO: 462809 - DNA, 30 bp, Artificial Sequence
  Synthetic oligonucleotide
ccatatgcatcgcagtaattctagcgaaaa

SEQ ID NO: 462810 - DNA, 30 bp, Artificial Sequence
  Synthetic oligonucleotide
gctgatttatgcagcgtttgcacgcgaaaa

SEQ ID NO: 462811 - DNA, 30 bp, Artificial Sequence
  Synthetic oligonucleotide
atcgtagtgaggggagatgaggggcgaaaa

SEQ ID NO: 462812 - DNA, 30 bp, Artificial Sequence
  Synthetic oligonucleotide
ctatacgcgtgtgtactcctcctgcgaaaa

SEQ ID NO: 462813 - DNA, 30 bp, Artificial Sequence
  Synthetic oligonucleotide
ttactatctacctgtttggtgagtcgaaaa

SEQ ID NO: 462814 - DNA, 30 bp, Artificial Sequence
  Synthetic oligonucleotide
gcaaatggctcgcttacttgttttcgaaaa

SEQ ID NO: 462815 - DNA, 30 bp, Artificial Sequence
  Synthetic oligonucleotide
gcacacgtcggacagaatacacaaggaaaa

SEQ ID NO: 462816 - DNA, 30 bp, Artificial Sequence
  Synthetic oligonucleotide
tttgtaaggcctgtttccttcgaaggaaaa

SEQ ID NO: 462817 - DNA, 31 bp, Artificial Sequence
  Synthetic oligonucleotide
gtcacgcagctaatcttgaaaataaggaaaa

SEQ ID NO: 462818 - DNA, 30 bp, Artificial Sequence
  Synthetic oligonucleotide
gaaaacatcttatccacggcataaggaaaa

SEQ ID NO: 462819 - DNA, 30 bp, Artificial Sequence
  Synthetic oligonucleotide
ctgataggcgcggaagttcggtcaggaaaa

SEQ ID NO: 462820 - DNA, 30 bp, Artificial Sequence
  Synthetic oligonucleotide
tacggcctttatcatacttttgtaggaaaa

SEQ ID NO: 462821 - DNA, 30 bp, Artificial Sequence
  Synthetic oligonucleotide
tcgaagtttgtctccaaggtgttaggaaaa

SEQ ID NO: 462822 - DNA, 30 bp, Artificial Sequence
  Synthetic oligonucleotide
gatatgctgtatatgagaactttaggaaaa

SEQ ID NO: 462823 - DNA, 30 bp, Artificial Sequence
  Synthetic oligonucleotide
acagttgttccgcgtcagggggacggaaaa

SEQ ID NO: 462824 - DNA, 30 bp, Artificial Sequence
  Synthetic oligonucleotide
acgtgatggagtcggataacattgggaaaa

SEQ ID NO: 462825 - DNA, 30 bp, Artificial Sequence
  Synthetic oligonucleotide
tgtatacgcccgtgttttcctcctggaaaa

SEQ ID NO: 462826 - DNA, 30 bp, Artificial Sequence
  Synthetic oligonucleotide
attagcgtccttagccgatagcactgaaaa

SEQ ID NO: 462827 - DNA, 30 bp, Artificial Sequence
  Synthetic oligonucleotide
tctgcgtatgggcacggttccagctgaaaa

SEQ ID NO: 462828 - DNA, 30 bp, Artificial Sequence
  Synthetic oligonucleotide
gacaattctttagttaagaggcgctgaaaa

SEQ ID NO: 462829 - DNA, 30 bp, Artificial Sequence
  Synthetic oligonucleotide
aactcagctctgcaccgcaatatgtgaaaa

SEQ ID NO: 462830 - DNA, 30 bp, Artificial Sequence
  Synthetic oligonucleotide
tgcaaagaaatatggaccgtttgttgaaaa

SEQ ID NO: 462831 - DNA, 30 bp, Artificial Sequence
  Synthetic oligonucleotide
catcagtcaattctcaccgcgccaataaaa

SEQ ID NO: 462832 - DNA, 30 bp, Artificial Sequence
  Synthetic oligonucleotide
ccattcgtgtttgctcgagttgacataaaa

SEQ ID NO: 462833 - DNA, 30 bp, Artificial Sequence
  Synthetic oligonucleotide
ctgggtatcacgctgagagcagccataaaa

SEQ ID NO: 462834 - DNA, 30 bp, Artificial Sequence
  Synthetic oligonucleotide
tcttggtacctacttggggtcagcataaaa

SEQ ID NO: 462835 - DNA, 30 bp, Artificial Sequence
  Synthetic oligonucleotide
gattcctaataacgctttatgctcataaaa

SEQ ID NO: 462836 - DNA, 30 bp, Artificial Sequence
  Synthetic oligonucleotide
atctcggggcttaactgtacacagataaaa

SEQ ID NO: 462837 - DNA, 30 bp, Artificial Sequence
  Synthetic oligonucleotide
aacctcgtcaactaatggcatacgataaaa

SEQ ID NO: 462838 - DNA, 30 bp, Artificial Sequence
  Synthetic oligonucleotide
tcccccgaggccttatttatagtgataaaa

SEQ ID NO: 462839 - DNA, 30 bp, Artificial Sequence
  Synthetic oligonucleotide
gtttacgaaactgctcggagacatataaaa

SEQ ID NO: 462840 - DNA, 30 bp, Artificial Sequence
  Synthetic oligonucleotide
tactgctaccgaaccgcattagatataaaa

SEQ ID NO: 462841 - DNA, 30 bp, Artificial Sequence
  Synthetic oligonucleotide
cggcatgtgttgatattaagttatataaaa

SEQ ID NO: 462842 - DNA, 30 bp, Artificial Sequence
  Synthetic oligonucleotide
atatatctgaattatgttccacctataaaa

SEQ ID NO: 462843 - DNA, 30 bp, Artificial Sequence
  Synthetic oligonucleotide
aaagaaacgtgagtgtaaaagcctataaaa

SEQ ID NO: 462844 - DNA, 30 bp, Artificial Sequence
  Synthetic oligonucleotide
ggaatgcggcgagggtacctcgctataaaa

SEQ ID NO: 462845 - DNA, 30 bp, Artificial Sequence
  Synthetic oligonucleotide
atcatttcctcttagtatttaattataaaa

SEQ ID NO: 462846 - DNA, 30 bp, Artificial Sequence
  Synthetic oligonucleotide
tttaatatttggtatatcggtcttataaaa

SEQ ID NO: 462847 - DNA, 30 bp, Artificial Sequence
  Synthetic oligonucleotide
ggctaggactacctgtctagtatactaaaa

SEQ ID NO: 462848 - DNA, 30 bp, Artificial Sequence
  Synthetic oligonucleotide
cctttagtaccagtaagatagtccctaaaa

SEQ ID NO: 462849 - DNA, 30 bp, Artificial Sequence
  Synthetic oligonucleotide
tagaaaccgatacaaacattaggcctaaaa

SEQ ID NO: 462850 - DNA, 30 bp, Artificial Sequence
  Synthetic oligonucleotide
tggccaatcgacgcagtacgttagctaaaa

SEQ ID NO: 462851 - DNA, 30 bp, Artificial Sequence
  Synthetic oligonucleotide
cttagcccgtatcgacatggcgggctaaaa

SEQ ID NO: 462852 - DNA, 30 bp, Artificial Sequence
  Synthetic oligonucleotide
ccaagacacagaggaatttccctgctaaaa

SEQ ID NO: 462853 - DNA, 30 bp, Artificial Sequence
  Synthetic oligonucleotide
atccaggagtttagcatagtaaatctaaaa

SEQ ID NO: 462854 - DNA, 30 bp, Artificial Sequence
  Synthetic oligonucleotide
tgactcttatagttaagctcagatctaaaa

SEQ ID NO: 462855 - DNA, 30 bp, Artificial Sequence
  Synthetic oligonucleotide
aaagctatccgctgaaaaatatcagtaaaa

SEQ ID NO: 462856 - DNA, 30 bp, Artificial Sequence
  Synthetic oligonucleotide
aatgggatgagtccgtacggctaggtaaaa

SEQ ID NO: 462857 - DNA, 30 bp, Artificial Sequence
  Synthetic oligonucleotide
ggtttacaatgctgcgttccttatgtaaaa

SEQ ID NO: 462858 - DNA, 30 bp, Artificial Sequence
  Synthetic oligonucleotide
aagattatcagccaattcccccgtgtaaaa

SEQ ID NO: 462859 - DNA, 30 bp, Artificial Sequence
  Synthetic oligonucleotide
ataactttgtcacgcttgtagcgtgtaaaa

SEQ ID NO: 462860 - DNA, 30 bp, Artificial Sequence
  Synthetic oligonucleotide
aatttcgcaatggcgtggacgcgtgtaaaa

SEQ ID NO: 462861 - DNA, 30 bp, Artificial Sequence
  Synthetic oligonucleotide
ttcttaagaattctatattttgttgtaaaa

SEQ ID NO: 462862 - DNA, 30 bp, Artificial Sequence
  Synthetic oligonucleotide
agctgctttgtagtcttcggtacattaaaa

SEQ ID NO: 462863 - DNA, 30 bp, Artificial Sequence
  Synthetic oligonucleotide
cgtatttgtagttcgctatgcccattaaaa

SEQ ID NO: 462864 - DNA, 30 bp, Artificial Sequence
  Synthetic oligonucleotide
ttagttggccatgtcgtagcttcattaaaa

SEQ ID NO: 462865 - DNA, 30 bp, Artificial Sequence
  Synthetic oligonucleotide
cttggcccaattcttaaccgcaccttaaaa

SEQ ID NO: 462866 - DNA, 30 bp, Artificial Sequence
  Synthetic oligonucleotide
aaacgtgtgaccagggagggtagcttaaaa

SEQ ID NO: 462867 - DNA, 30 bp, Artificial Sequence
  Synthetic oligonucleotide
ggagttccttacattgaggtgctcttaaaa

SEQ ID NO: 462868 - DNA, 30 bp, Artificial Sequence
  Synthetic oligonucleotide
ttttaactctccgtttttttggagttaaaa

SEQ ID NO: 462869 - DNA, 30 bp, Artificial Sequence
  Synthetic oligonucleotide
agtccttggacacaaagagctgttttaaaa

SEQ ID NO: 462870 - DNA, 30 bp, Artificial Sequence
  Synthetic oligonucleotide
ttgaaggcaattcggcgaatgccaaacaaa

SEQ ID NO: 462871 - DNA, 30 bp, Artificial Sequence
  Synthetic oligonucleotide
gtcttgtttacggcaagtccggagaacaaa

SEQ ID NO: 462872 - DNA, 30 bp, Artificial Sequence
  Synthetic oligonucleotide
ctattgctgcccataactaatgagaacaaa

SEQ ID NO: 462873 - DNA, 30 bp, Artificial Sequence
  Synthetic oligonucleotide
agttgatggccatctatatcttggaacaaa

SEQ ID NO: 462874 - DNA, 30 bp, Artificial Sequence
  Synthetic oligonucleotide
tagtgaggtagtaggtttttctataacaaa

SEQ ID NO: 462875 - DNA, 30 bp, Artificial Sequence
  Synthetic oligonucleotide
cagtaattgtaaccctcgggcgaccacaaa

SEQ ID NO: 462876 - DNA, 30 bp, Artificial Sequence
  Synthetic oligonucleotide
atgtggccgtaaccttctctactccacaaa

SEQ ID NO: 462877 - DNA, 30 bp, Artificial Sequence
  Synthetic oligonucleotide
ggccccgacatttccaatgatacgcacaaa

SEQ ID NO: 462878 - DNA, 30 bp, Artificial Sequence
  Synthetic oligonucleotide
aatcagacggaccgcagtatacttcacaaa

SEQ ID NO: 462879 - DNA, 30 bp, Artificial Sequence
  Synthetic oligonucleotide
gattgcgcgactgcaggtggctaagacaaa

SEQ ID NO: 462880 - DNA, 30 bp, Artificial Sequence
  Synthetic oligonucleotide
agtcgatttcggtcgccagtcaatgacaaa

SEQ ID NO: 462881 - DNA, 31 bp, Artificial Sequence
  Synthetic oligonucleotide
gtgcctgcaatgtatctagttaaaatacaaa

SEQ ID NO: 462882 - DNA, 30 bp, Artificial Sequence
  Synthetic oligonucleotide
cgtattcagtgaagggatttacgatacaaa

SEQ ID NO: 462883 - DNA, 30 bp, Artificial Sequence
  Synthetic oligonucleotide
gaaggacgcggtgctggtagcttatacaaa

SEQ ID NO: 462884 - DNA, 30 bp, Artificial Sequence
  Synthetic oligonucleotide
aacaaatgagttgtgctcttgcgctacaaa

SEQ ID NO: 462885 - DNA, 30 bp, Artificial Sequence
  Synthetic oligonucleotide
agtagctgatctattgggcctgtctacaaa

SEQ ID NO: 462886 - DNA, 30 bp, Artificial Sequence
  Synthetic oligonucleotide
ttcgggaagccagccgatttagtgtacaaa

SEQ ID NO: 462887 - DNA, 30 bp, Artificial Sequence
  Synthetic oligonucleotide
tctgtttgccaatggacgtaagtttacaaa

SEQ ID NO: 462888 - DNA, 30 bp, Artificial Sequence
  Synthetic oligonucleotide
gacgcatattacaacgagttggaaaccaaa

SEQ ID NO: 462889 - DNA, 30 bp, Artificial Sequence
  Synthetic oligonucleotide
tgtgttttagaagcatcgtaccacaccaaa

SEQ ID NO: 462890 - DNA, 30 bp, Artificial Sequence
  Synthetic oligonucleotide
ttgttttttccccggccaggagccaccaaa

SEQ ID NO: 462891 - DNA, 30 bp, Artificial Sequence
  Synthetic oligonucleotide
cttcctttgtacttaggtggcatccccaaa

SEQ ID NO: 462892 - DNA, 30 bp, Artificial Sequence
  Synthetic oligonucleotide
actttaaacttccattgttaacagcccaaa

SEQ ID NO: 462893 - DNA, 30 bp, Artificial Sequence
  Synthetic oligonucleotide
cgtgggcagaatcagaagtaatggcccaaa

SEQ ID NO: 462894 - DNA, 30 bp, Artificial Sequence
  Synthetic oligonucleotide
tggtgctttgagttttatctgcaagccaaa

SEQ ID NO: 462895 - DNA, 31 bp, Artificial Sequence
  Synthetic oligonucleotide
aatacttttgctttggaaaaatctagccaaa

SEQ ID NO: 462896 - DNA, 30 bp, Artificial Sequence
  Synthetic oligonucleotide
gattatttgtcccgcaaacacaccgccaaa

SEQ ID NO: 462897 - DNA, 30 bp, Artificial Sequence
  Synthetic oligonucleotide
tgttttgatagattatggctgatggccaaa

SEQ ID NO: 462898 - DNA, 30 bp, Artificial Sequence
  Synthetic oligonucleotide
ttggacagttccgctgtcaatactgccaaa

SEQ ID NO: 462899 - DNA, 30 bp, Artificial Sequence
  Synthetic oligonucleotide
ttactacctctcagtcccatccctgccaaa

SEQ ID NO: 462900 - DNA, 30 bp, Artificial Sequence
  Synthetic oligonucleotide
gcccatgttcatcgatggtataaatccaaa

SEQ ID NO: 462901 - DNA, 30 bp, Artificial Sequence
  Synthetic oligonucleotide
tttggcacttgcatttcggcagaatccaaa

SEQ ID NO: 462902 - DNA, 30 bp, Artificial Sequence
  Synthetic oligonucleotide
tgaaatttgtctgatctgcccgcatccaaa

SEQ ID NO: 462903 - DNA, 30 bp, Artificial Sequence
  Synthetic oligonucleotide
tttgaattgacggtaacgtccttatccaaa

SEQ ID NO: 462904 - DNA, 30 bp, Artificial Sequence
  Synthetic oligonucleotide
atttaatgcaagaaccccttttgctccaaa

SEQ ID NO: 462905 - DNA, 30 bp, Artificial Sequence
  Synthetic oligonucleotide
tatttatacgattaatggcgagtctccaaa

SEQ ID NO: 462906 - DNA, 30 bp, Artificial Sequence
  Synthetic oligonucleotide
aaagtgtatgaggtaaagactaagtccaaa

SEQ ID NO: 462907 - DNA, 30 bp, Artificial Sequence
  Synthetic oligonucleotide
cttcgtcgctttttctttcttcagtccaaa

SEQ ID NO: 462908 - DNA, 30 bp, Artificial Sequence
  Synthetic oligonucleotide
gagaatatagttattgagacgcattccaaa

SEQ ID NO: 462909 - DNA, 30 bp, Artificial Sequence
  Synthetic oligonucleotide
gaaaactttacaccgagatgcggaagcaaa

SEQ ID NO: 462910 - DNA, 30 bp, Artificial Sequence
  Synthetic oligonucleotide
atgtggagggaagtggcgggttgaagcaaa

SEQ ID NO: 462911 - DNA, 30 bp, Artificial Sequence
  Synthetic oligonucleotide
caatttagcctataggtggcattaagcaaa

SEQ ID NO: 462912 - DNA, 30 bp, Artificial Sequence
  Synthetic oligonucleotide
gtagtttgaaccaagcgacggaacagcaaa

SEQ ID NO: 462913 - DNA, 30 bp, Artificial Sequence
  Synthetic oligonucleotide
ctggatgtcgcagtcctcgatcacagcaaa

SEQ ID NO: 462914 - DNA, 30 bp, Artificial Sequence
  Synthetic oligonucleotide
gaaacccgttccaaattttcatcgagcaaa

SEQ ID NO: 462915 - DNA, 30 bp, Artificial Sequence
  Synthetic oligonucleotide
gcgcaatggggacgtgaatacggacgcaaa

SEQ ID NO: 462916 - DNA, 30 bp, Artificial Sequence
  Synthetic oligonucleotide
caacaaacagccattacctcagtacgcaaa

SEQ ID NO: 462917 - DNA, 30 bp, Artificial Sequence
  Synthetic oligonucleotide
ctatcttttccgtaaaagtaattacgcaaa

SEQ ID NO: 462918 - DNA, 30 bp, Artificial Sequence
  Synthetic oligonucleotide
tcctcggttacccgattgagtttacgcaaa

SEQ ID NO: 462919 - DNA, 30 bp, Artificial Sequence
  Synthetic oligonucleotide
ataattcaggagcattccaactgccgcaaa

SEQ ID NO: 462920 - DNA, 30 bp, Artificial Sequence
  Synthetic oligonucleotide
ggctctttcaatgcgtcatgttcgcgcaaa

SEQ ID NO: 462921 - DNA, 30 bp, Artificial Sequence
  Synthetic oligonucleotide
atgttcttggtctcgtactttaggcgcaaa

SEQ ID NO: 462922 - DNA, 30 bp, Artificial Sequence
  Synthetic oligonucleotide
gccctctaatccgaagaaagtgggcgcaaa

SEQ ID NO: 462923 - DNA, 30 bp, Artificial Sequence
  Synthetic oligonucleotide
ccgcaagacccggagcctgcgaaaggcaaa

SEQ ID NO: 462924 - DNA, 30 bp, Artificial Sequence
  Synthetic oligonucleotide
gcctgccgttgcctgcgcgatacaggcaaa

SEQ ID NO: 462925 - DNA, 30 bp, Artificial Sequence
  Synthetic oligonucleotide
gaatcggggagtgttttggctcacggcaaa

SEQ ID NO: 462926 - DNA, 30 bp, Artificial Sequence
  Synthetic oligonucleotide
aaatagttctatggacccagtgggggcaaa

SEQ ID NO: 462927 - DNA, 30 bp, Artificial Sequence
  Synthetic oligonucleotide
aaatgctactcaccctagcgatggggcaaa

SEQ ID NO: 462928 - DNA, 30 bp, Artificial Sequence
  Synthetic oligonucleotide
cgttataaccattccgctccgtatggcaaa

SEQ ID NO: 462929 - DNA, 30 bp, Artificial Sequence
  Synthetic oligonucleotide
gttaaaaaaaggatttattggcgatgcaaa

SEQ ID NO: 462930 - DNA, 30 bp, Artificial Sequence
  Synthetic oligonucleotide
aacaatggtttgctactttttatgtgcaaa

SEQ ID NO: 462931 - DNA, 30 bp, Artificial Sequence
  Synthetic oligonucleotide
gagtacgtagctctatcatcggtgtgcaaa

SEQ ID NO: 462932 - DNA, 30 bp, Artificial Sequence
  Synthetic oligonucleotide
aatatcgaagagtgcaagatttcttgcaaa

SEQ ID NO: 462933 - DNA, 30 bp, Artificial Sequence
  Synthetic oligonucleotide
atgacgcccatcatcagtattatttgcaaa

SEQ ID NO: 462934 - DNA, 30 bp, Artificial Sequence
  Synthetic oligonucleotide
ctaagactgccggggcggcatacaatcaaa

SEQ ID NO: 462935 - DNA, 30 bp, Artificial Sequence
  Synthetic oligonucleotide
acgtacaccggtgtctcccgctgaatcaaa

SEQ ID NO: 462936 - DNA, 30 bp, Artificial Sequence
  Synthetic oligonucleotide
aatggtatgcacttccggcgtcccatcaaa

SEQ ID NO: 462937 - DNA, 30 bp, Artificial Sequence
  Synthetic oligonucleotide
accatattgaaggagctattcctcatcaaa

SEQ ID NO: 462938 - DNA, 30 bp, Artificial Sequence
  Synthetic oligonucleotide
tattaaggccctgttgtagttacgatcaaa

SEQ ID NO: 462939 - DNA, 30 bp, Artificial Sequence
  Synthetic oligonucleotide
ctataagtctaatgcacgtgcccgatcaaa

SEQ ID NO: 462940 - DNA, 30 bp, Artificial Sequence
  Synthetic oligonucleotide
gggttcagttaatataagtaggcgatcaaa

SEQ ID NO: 462941 - DNA, 30 bp, Artificial Sequence
  Synthetic oligonucleotide
ccgcccgtgttttaggttcatcggatcaaa

SEQ ID NO: 462942 - DNA, 30 bp, Artificial Sequence
  Synthetic oligonucleotide
cgcagcttaatcaacaccaggccactcaaa

SEQ ID NO: 462943 - DNA, 30 bp, Artificial Sequence
  Synthetic oligonucleotide
attttccgataccacaaacacgccctcaaa

SEQ ID NO: 462944 - DNA, 30 bp, Artificial Sequence
  Synthetic oligonucleotide
ggacgctattcgataaggacccggctcaaa

SEQ ID NO: 462945 - DNA, 30 bp, Artificial Sequence
  Synthetic oligonucleotide
cagcttatggtggtgcacaagcatctcaaa

SEQ ID NO: 462946 - DNA, 30 bp, Artificial Sequence
  Synthetic oligonucleotide
ctttcgtgctcttagccggccggtctcaaa

SEQ ID NO: 462947 - DNA, 30 bp, Artificial Sequence
  Synthetic oligonucleotide
ccccgaagctatacgctgtaaatcgtcaaa

SEQ ID NO: 462948 - DNA, 30 bp, Artificial Sequence
  Synthetic oligonucleotide
tgtgctattacgacgccaattatggtcaaa

SEQ ID NO: 462949 - DNA, 30 bp, Artificial Sequence
  Synthetic oligonucleotide
taaatactcggtggtccgccaggtgtcaaa

SEQ ID NO: 462950 - DNA, 30 bp, Artificial Sequence
  Synthetic oligonucleotide
gaagagagtgctctttcagtgggtgtcaaa

SEQ ID NO: 462951 - DNA, 30 bp, Artificial Sequence
  Synthetic oligonucleotide
taatccccgaccgggtttggtggattcaaa

SEQ ID NO: 462952 - DNA, 30 bp, Artificial Sequence
  Synthetic oligonucleotide
aatgaacgcggacacgattgatccttcaaa

SEQ ID NO: 462953 - DNA, 30 bp, Artificial Sequence
  Synthetic oligonucleotide
taagtttaagtctattagtcgtgcttcaaa

SEQ ID NO: 462954 - DNA, 30 bp, Artificial Sequence
  Synthetic oligonucleotide
cctacattggattggtacaagttcttcaaa

SEQ ID NO: 462955 - DNA, 30 bp, Artificial Sequence
  Synthetic oligonucleotide
gtgctccgagcatttggtagtctgttcaaa

SEQ ID NO: 462956 - DNA, 30 bp, Artificial Sequence
  Synthetic oligonucleotide
cccgggtggtagaatgggagcaatttcaaa

SEQ ID NO: 462957 - DNA, 30 bp, Artificial Sequence
  Synthetic oligonucleotide
caaaactgttataaagtaggggctttcaaa

SEQ ID NO: 462958 - DNA, 30 bp, Artificial Sequence
  Synthetic oligonucleotide
tccatctccctacttccagaacgtttcaaa

SEQ ID NO: 462959 - DNA, 30 bp, Artificial Sequence
  Synthetic oligonucleotide
gagataacagtgcgtatgcagcgtttcaaa

SEQ ID NO: 462960 - DNA, 30 bp, Artificial Sequence
  Synthetic oligonucleotide
cgtatgtgggcagcatttagtacaaagaaa

SEQ ID NO: 462961 - DNA, 30 bp, Artificial Sequence
  Synthetic oligonucleotide
gtgcacgtcacagccgattcttgaaagaaa

SEQ ID NO: 462962 - DNA, 30 bp, Artificial Sequence
  Synthetic oligonucleotide
gttagccccaaaccccccacgcacaagaaa

SEQ ID NO: 462963 - DNA, 30 bp, Artificial Sequence
  Synthetic oligonucleotide
ctcgcagtgcatgcggagggccgcaagaaa

SEQ ID NO: 462964 - DNA, 30 bp, Artificial Sequence
  Synthetic oligonucleotide
gtgtgatattctgggtccctgctcaagaaa

SEQ ID NO: 462965 - DNA, 30 bp, Artificial Sequence
  Synthetic oligonucleotide
tccaatatgcacaaatgacacatgaagaaa

SEQ ID NO: 462966 - DNA, 30 bp, Artificial Sequence
  Synthetic oligonucleotide
agtttgcgtcagggtcgatcagtgaagaaa

SEQ ID NO: 462967 - DNA, 30 bp, Artificial Sequence
  Synthetic oligonucleotide
ttacccatctattcatagcatgctaagaaa

SEQ ID NO: 462968 - DNA, 30 bp, Artificial Sequence
  Synthetic oligonucleotide
tgttgtcttgcgcaatgcaacattaagaaa

SEQ ID NO: 462969 - DNA, 30 bp, Artificial Sequence
  Synthetic oligonucleotide
gggttataacgtagagttatacaacagaaa

SEQ ID NO: 462970 - DNA, 30 bp, Artificial Sequence
  Synthetic oligonucleotide
tggccactcgctgggaacctaacacagaaa

SEQ ID NO: 462971 - DNA, 30 bp, Artificial Sequence
  Synthetic oligonucleotide
aacaccgacaggggcaaattgtcacagaaa

SEQ ID NO: 462972 - DNA, 30 bp, Artificial Sequence
  Synthetic oligonucleotide
gcccttagtggctggaattaacgccagaaa

SEQ ID NO: 462973 - DNA, 30 bp, Artificial Sequence
  Synthetic oligonucleotide
atcccggttgcctagtcgtcgctccagaaa

SEQ ID NO: 462974 - DNA, 30 bp, Artificial Sequence
  Synthetic oligonucleotide
gcgaactcaacatcaagaaaattccagaaa

SEQ ID NO: 462975 - DNA, 30 bp, Artificial Sequence
  Synthetic oligonucleotide
gggtcattataaccgttgtcggtgcagaaa

SEQ ID NO: 462976 - DNA, 30 bp, Artificial Sequence
  Synthetic oligonucleotide
tagtttacgcgtttatgcacgaatcagaaa

SEQ ID NO: 462977 - DNA, 30 bp, Artificial Sequence
  Synthetic oligonucleotide
caatgatcggccagcaaatactatcagaaa

SEQ ID NO: 462978 - DNA, 30 bp, Artificial Sequence
  Synthetic oligonucleotide
tcacggccttgcagagtgaacagagagaaa

SEQ ID NO: 462979 - DNA, 30 bp, Artificial Sequence
  Synthetic oligonucleotide
aagcatgcttctcatggagctctagagaaa

SEQ ID NO: 462980 - DNA, 30 bp, Artificial Sequence
  Synthetic oligonucleotide
ctatataagtaccatttgttgttagagaaa

SEQ ID NO: 462981 - DNA, 30 bp, Artificial Sequence
  Synthetic oligonucleotide
catggcagtatctgtagtacagccgagaaa

SEQ ID NO: 462982 - DNA, 30 bp, Artificial Sequence
  Synthetic oligonucleotide
gctaggcgcctaggcggttaaggggagaaa

SEQ ID NO: 462983 - DNA, 30 bp, Artificial Sequence
  Synthetic oligonucleotide
tatatgcgattagtactttcaggggagaaa

SEQ ID NO: 462984 - DNA, 30 bp, Artificial Sequence
  Synthetic oligonucleotide
cccaactaccttgaatagaatggatagaaa

SEQ ID NO: 462985 - DNA, 30 bp, Artificial Sequence
  Synthetic oligonucleotide
agcaagacttagctgcacgcaatctagaaa

SEQ ID NO: 462986 - DNA, 30 bp, Artificial Sequence
  Synthetic oligonucleotide
tacccttcgctccactatggcctctagaaa

SEQ ID NO: 462987 - DNA, 29 bp, Artificial Sequence
  Synthetic oligonucleotide
tggtcccaccttgtaaggaatggtagaaa

SEQ ID NO: 462988 - DNA, 30 bp, Artificial Sequence
  Synthetic oligonucleotide
ttctcattggccagatttctaatgtagaaa

SEQ ID NO: 462989 - DNA, 30 bp, Artificial Sequence
  Synthetic oligonucleotide
ttagtacccgggccaagcccccattagaaa

SEQ ID NO: 462990 - DNA, 30 bp, Artificial Sequence
  Synthetic oligonucleotide
tctaagattatctcgaacaaatcttagaaa

SEQ ID NO: 462991 - DNA, 30 bp, Artificial Sequence
  Synthetic oligonucleotide
aattatgtcgcttacgtacaaagttagaaa

SEQ ID NO: 462992 - DNA, 30 bp, Artificial Sequence
  Synthetic oligonucleotide
aaaaccagcaactccagtcgtgcaacgaaa

SEQ ID NO: 462993 - DNA, 30 bp, Artificial Sequence
  Synthetic oligonucleotide
ttgtcatttaataaacttaaatgaacgaaa

SEQ ID NO: 462994 - DNA, 30 bp, Artificial Sequence
  Synthetic oligonucleotide
tgacggagaaacagaagttcagttacgaaa

SEQ ID NO: 462995 - DNA, 30 bp, Artificial Sequence
  Synthetic oligonucleotide
aattaactctcgggataccagtggccgaaa

SEQ ID NO: 462996 - DNA, 30 bp, Artificial Sequence
  Synthetic oligonucleotide
gtgaagccttttcggtgatacatagcgaaa

SEQ ID NO: 462997 - DNA, 30 bp, Artificial Sequence
  Synthetic oligonucleotide
tggccacagatccgcgccacccgcgcgaaa

SEQ ID NO: 462998 - DNA, 30 bp, Artificial Sequence
  Synthetic oligonucleotide
caacactttaggaggtagcaacgggcgaaa

SEQ ID NO: 462999 - DNA, 30 bp, Artificial Sequence
  Synthetic oligonucleotide
ttctatctcatccggccccatgtggcgaaa

SEQ ID NO: 463000 - DNA, 30 bp, Artificial Sequence
  Synthetic oligonucleotide
tgagtatgagctgctctacgagctgcgaaa

SEQ ID NO: 463001 - DNA, 30 bp, Artificial Sequence
  Synthetic oligonucleotide
agatacctgatgtaaacaggtagtgcgaaa

SEQ ID NO: 463002 - DNA, 30 bp, Artificial Sequence
  Synthetic oligonucleotide
tgttatccgctagcgagcacagtatcgaaa

SEQ ID NO: 463003 - DNA, 30 bp, Artificial Sequence
  Synthetic oligonucleotide
atttttaagactcggagaagtatctcgaaa

SEQ ID NO: 463004 - DNA, 30 bp, Artificial Sequence
  Synthetic oligonucleotide
atctaggcgcaactagtagacttctcgaaa

SEQ ID NO: 463005 - DNA, 30 bp, Artificial Sequence
  Synthetic oligonucleotide
ccccttgcgtgattgaagcacacaaggaaa

SEQ ID NO: 463006 - DNA, 30 bp, Artificial Sequence
  Synthetic oligonucleotide
tcccgattggctgaaatacaagcaaggaaa

SEQ ID NO: 463007 - DNA, 30 bp, Artificial Sequence
  Synthetic oligonucleotide
aaactaaataccagctaaattctaaggaaa

SEQ ID NO: 463008 - DNA, 30 bp, Artificial Sequence
  Synthetic oligonucleotide
aacgcgatataagtagttcgggtgaggaaa

SEQ ID NO: 463009 - DNA, 30 bp, Artificial Sequence
  Synthetic oligonucleotide
ccatcttacacgttgccagaacgtaggaaa

SEQ ID NO: 463010 - DNA, 30 bp, Artificial Sequence
  Synthetic oligonucleotide
catataaaaggttccctattaattaggaaa

SEQ ID NO: 463011 - DNA, 29 bp, Artificial Sequence
  Synthetic oligonucleotide
tccatcgtgtcgtaccgagttttaggaaa

SEQ ID NO: 463012 - DNA, 30 bp, Artificial Sequence
  Synthetic oligonucleotide
ggtgtgaccttattgttagaaggacggaaa

SEQ ID NO: 463013 - DNA, 30 bp, Artificial Sequence
  Synthetic oligonucleotide
ggttacgaagcacgtccggtgggccggaaa

SEQ ID NO: 463014 - DNA, 30 bp, Artificial Sequence
  Synthetic oligonucleotide
cggaaacttacagaaattgctcctcggaaa

SEQ ID NO: 463015 - DNA, 30 bp, Artificial Sequence
  Synthetic oligonucleotide
gtcctacctatgtttgttttctttcggaaa

SEQ ID NO: 463016 - DNA, 30 bp, Artificial Sequence
  Synthetic oligonucleotide
aatactcataaataatgaaggcccgggaaa

SEQ ID NO: 463017 - DNA, 30 bp, Artificial Sequence
  Synthetic oligonucleotide
tctattaacagcctctgacagcgcgggaaa

SEQ ID NO: 463018 - DNA, 30 bp, Artificial Sequence
  Synthetic oligonucleotide
gctccgagctagctcccgttactcgggaaa

SEQ ID NO: 463019 - DNA, 30 bp, Artificial Sequence
  Synthetic oligonucleotide
gcaagcaagtatatcagataagcggggaaa

SEQ ID NO: 463020 - DNA, 30 bp, Artificial Sequence
  Synthetic oligonucleotide
ctcaggtcggaacagacttttggggggaaa

SEQ ID NO: 463021 - DNA, 30 bp, Artificial Sequence
  Synthetic oligonucleotide
aaccttcgacttacccacgctaatgggaaa

SEQ ID NO: 463022 - DNA, 30 bp, Artificial Sequence
  Synthetic oligonucleotide
gaaaggtgaaagcacacagatcatgggaaa

SEQ ID NO: 463023 - DNA, 30 bp, Artificial Sequence
  Synthetic oligonucleotide
atggggggacagagtgtgtttgctgggaaa

SEQ ID NO: 463024 - DNA, 30 bp, Artificial Sequence
  Synthetic oligonucleotide
acgatgggaatacgggcgacggcatggaaa

SEQ ID NO: 463025 - DNA, 30 bp, Artificial Sequence
  Synthetic oligonucleotide
attcacagcatcacgccttaccgatggaaa

SEQ ID NO: 463026 - DNA, 30 bp, Artificial Sequence
  Synthetic oligonucleotide
gctttatgaatacctaacctgcgatggaaa

SEQ ID NO: 463027 - DNA, 30 bp, Artificial Sequence
  Synthetic oligonucleotide
gcggctgtcccagcagcagtcctatggaaa

SEQ ID NO: 463028 - DNA, 30 bp, Artificial Sequence
  Synthetic oligonucleotide
ttgggccctaaggccgcccctatctggaaa

SEQ ID NO: 463029 - DNA, 30 bp, Artificial Sequence
  Synthetic oligonucleotide
aagtctcggaatgagactcggacgtggaaa

SEQ ID NO: 463030 - DNA, 30 bp, Artificial Sequence
  Synthetic oligonucleotide
ccggccattagcgtatctggcccgtggaaa

SEQ ID NO: 463031 - DNA, 30 bp, Artificial Sequence
  Synthetic oligonucleotide
acccttccgaccaggaccccgtcgtggaaa

SEQ ID NO: 463032 - DNA, 30 bp, Artificial Sequence
  Synthetic oligonucleotide
gataatatatgttcttacgcttcttggaaa

SEQ ID NO: 463033 - DNA, 30 bp, Artificial Sequence
  Synthetic oligonucleotide
gggggtaatacggtcgagtttttaatgaaa

SEQ ID NO: 463034 - DNA, 30 bp, Artificial Sequence
  Synthetic oligonucleotide
agatctccttaccaccgacggaacatgaaa

SEQ ID NO: 463035 - DNA, 30 bp, Artificial Sequence
  Synthetic oligonucleotide
taccgcaacaatagaactgtagtgatgaaa

SEQ ID NO: 463036 - DNA, 30 bp, Artificial Sequence
  Synthetic oligonucleotide
gctcgtattctcttccgggtaaaactgaaa

SEQ ID NO: 463037 - DNA, 30 bp, Artificial Sequence
  Synthetic oligonucleotide
tagtttactcaatagtccgcggcactgaaa

SEQ ID NO: 463038 - DNA, 30 bp, Artificial Sequence
  Synthetic oligonucleotide
ggagcgcaacgatctggtcgcatactgaaa

SEQ ID NO: 463039 - DNA, 30 bp, Artificial Sequence
  Synthetic oligonucleotide
aaaaatatggtccgcgtcaggagcctgaaa

SEQ ID NO: 463040 - DNA, 30 bp, Artificial Sequence
  Synthetic oligonucleotide
taatttcatgcttggtttagaatcctgaaa

SEQ ID NO: 463041 - DNA, 30 bp, Artificial Sequence
  Synthetic oligonucleotide
cttgaaatctttatgaaccaaaatctgaaa

SEQ ID NO: 463042 - DNA, 30 bp, Artificial Sequence
  Synthetic oligonucleotide
tctacctgtaggtgcaagaagggagtgaaa

SEQ ID NO: 463043 - DNA, 30 bp, Artificial Sequence
  Synthetic oligonucleotide
tataacttcggtgcttcgagcaacgtgaaa

SEQ ID NO: 463044 - DNA, 30 bp, Artificial Sequence
  Synthetic oligonucleotide
tctctagctccagcggctctcaacgtgaaa

SEQ ID NO: 463045 - DNA, 30 bp, Artificial Sequence
  Synthetic oligonucleotide
aaggtaaaaatatagtgctttgacgtgaaa

SEQ ID NO: 463046 - DNA, 30 bp, Artificial Sequence
  Synthetic oligonucleotide
ctacgcctggatgcttagtgcctcgtgaaa

SEQ ID NO: 463047 - DNA, 30 bp, Artificial Sequence
  Synthetic oligonucleotide
tcgtttcaacgtgtatttcagtcggtgaaa

SEQ ID NO: 463048 - DNA, 30 bp, Artificial Sequence
  Synthetic oligonucleotide
ctgcttgcgaacgtttactgacttgtgaaa

SEQ ID NO: 463049 - DNA, 30 bp, Artificial Sequence
  Synthetic oligonucleotide
acctgtttttggtcgcgcttggtattgaaa

SEQ ID NO: 463050 - DNA, 30 bp, Artificial Sequence
  Synthetic oligonucleotide
tgtgtatacaataaacggacgcgcttgaaa

SEQ ID NO: 463051 - DNA, 30 bp, Artificial Sequence
  Synthetic oligonucleotide
ttcgctacggacgtcatacatgtcttgaaa

SEQ ID NO: 463052 - DNA, 30 bp, Artificial Sequence
  Synthetic oligonucleotide
cagttttaattgattctctgagagttgaaa

SEQ ID NO: 463053 - DNA, 30 bp, Artificial Sequence
  Synthetic oligonucleotide
agcttacgttattcgtggcaatcgttgaaa

SEQ ID NO: 463054 - DNA, 30 bp, Artificial Sequence
  Synthetic oligonucleotide
aaatggcaggttagtgggtcttggttgaaa

SEQ ID NO: 463055 - DNA, 30 bp, Artificial Sequence
  Synthetic oligonucleotide
gccgcttcaacctaaaaataaatgttgaaa

SEQ ID NO: 463056 - DNA, 30 bp, Artificial Sequence
  Synthetic oligonucleotide
accgttcttattatgctcctgaatttgaaa

SEQ ID NO: 463057 - DNA, 30 bp, Artificial Sequence
  Synthetic oligonucleotide
ttaggtatttgcggggctattcatttgaaa

SEQ ID NO: 463058 - DNA, 30 bp, Artificial Sequence
  Synthetic oligonucleotide
gctgggcattatcgatattactatttgaaa

SEQ ID NO: 463059 - DNA, 30 bp, Artificial Sequence
  Synthetic oligonucleotide
ttagcgatttgaggaaacggcggtttgaaa

SEQ ID NO: 463060 - DNA, 30 bp, Artificial Sequence
  Synthetic oligonucleotide
gaccaattcaccgaggtttcagttttgaaa

SEQ ID NO: 463061 - DNA, 30 bp, Artificial Sequence
  Synthetic oligonucleotide
ccgctatatacgtagccttcggaaaataaa

SEQ ID NO: 463062 - DNA, 30 bp, Artificial Sequence
  Synthetic oligonucleotide
catttatggttggatcatgcatcaaataaa

SEQ ID NO: 463063 - DNA, 30 bp, Artificial Sequence
  Synthetic oligonucleotide
cagaatgaacgtttccctatggacaataaa

SEQ ID NO: 463064 - DNA, 30 bp, Artificial Sequence
  Synthetic oligonucleotide
gattgcgggatgcaggtttgatacaataaa

SEQ ID NO: 463065 - DNA, 30 bp, Artificial Sequence
  Synthetic oligonucleotide
cctacattctatttcgtcgtatagaataaa

SEQ ID NO: 463066 - DNA, 30 bp, Artificial Sequence
  Synthetic oligonucleotide
attcctctcactcaagggacactgaataaa

SEQ ID NO: 463067 - DNA, 30 bp, Artificial Sequence
  Synthetic oligonucleotide
aacaccccgtactatattatatataataaa

SEQ ID NO: 463068 - DNA, 30 bp, Artificial Sequence
  Synthetic oligonucleotide
gcatcttgcaaatatctaactagtaataaa

SEQ ID NO: 463069 - DNA, 30 bp, Artificial Sequence
  Synthetic oligonucleotide
gagagctcacagcatgcaccctcacataaa

SEQ ID NO: 463070 - DNA, 30 bp, Artificial Sequence
  Synthetic oligonucleotide
acctaggggagtcgttagactacccataaa

SEQ ID NO: 463071 - DNA, 30 bp, Artificial Sequence
  Synthetic oligonucleotide
tatttttaaggcactgtggtttatcataaa

SEQ ID NO: 463072 - DNA, 30 bp, Artificial Sequence
  Synthetic oligonucleotide
ggggttgtcgattccaaataacaagataaa

SEQ ID NO: 463073 - DNA, 30 bp, Artificial Sequence
  Synthetic oligonucleotide
cccgaagagaccctccgggtaagagataaa

SEQ ID NO: 463074 - DNA, 30 bp, Artificial Sequence
  Synthetic oligonucleotide
cccctttggaccagtgcataacacgataaa

SEQ ID NO: 463075 - DNA, 30 bp, Artificial Sequence
  Synthetic oligonucleotide
acgttatttagggttgtatgtcgcgataaa

SEQ ID NO: 463076 - DNA, 30 bp, Artificial Sequence
  Synthetic oligonucleotide
ttacttgttccattctgccctgcggataaa

SEQ ID NO: 463077 - DNA, 30 bp, Artificial Sequence
  Synthetic oligonucleotide
ggctattgctctcctcgagagctggataaa

SEQ ID NO: 463078 - DNA, 30 bp, Artificial Sequence
  Synthetic oligonucleotide
ttgttttgaacccgccaaacggctgataaa

SEQ ID NO: 463079 - DNA, 30 bp, Artificial Sequence
  Synthetic oligonucleotide
gtataagtagagcccgtcgaccaatataaa

SEQ ID NO: 463080 - DNA, 30 bp, Artificial Sequence
  Synthetic oligonucleotide
aaaaacggacttagcttcggttaatataaa

SEQ ID NO: 463081 - DNA, 28 bp, Artificial Sequence
  Synthetic oligonucleotide
ttgttgtgtaggtttactcccatataaa

SEQ ID NO: 463082 - DNA, 30 bp, Artificial Sequence
  Synthetic oligonucleotide
gatagtaatgagcaaccgaggtcatataaa

SEQ ID NO: 463083 - DNA, 30 bp, Artificial Sequence
  Synthetic oligonucleotide
atcctaagatacgaccatacgtcctataaa

SEQ ID NO: 463084 - DNA, 30 bp, Artificial Sequence
  Synthetic oligonucleotide
catcgcacctggctggactacatctataaa

SEQ ID NO: 463085 - DNA, 29 bp, Artificial Sequence
  Synthetic oligonucleotide
tttgttgtgtaggtttacccccgtataaa

SEQ ID NO: 463086 - DNA, 29 bp, Artificial Sequence
  Synthetic oligonucleotide
gttgttgtgtaggtttactcccgtataaa

SEQ ID NO: 463087 - DNA, 29 bp, Artificial Sequence
  Synthetic oligonucleotide
ttttttgtgtaggtttactcccgtataaa

SEQ ID NO: 463088 - DNA, 30 bp, Artificial Sequence
  Synthetic oligonucleotide
gggtagtatcaactgctttaatcgtataaa

SEQ ID NO: 463089 - DNA, 30 bp, Artificial Sequence
  Synthetic oligonucleotide
attaagcgggttttgctcgcatattataaa

SEQ ID NO: 463090 - DNA, 30 bp, Artificial Sequence
  Synthetic oligonucleotide
aatcacgtactattatacgacgcttataaa

SEQ ID NO: 463091 - DNA, 30 bp, Artificial Sequence
  Synthetic oligonucleotide
ggggtgacgcgagaactacttccaactaaa

SEQ ID NO: 463092 - DNA, 30 bp, Artificial Sequence
  Synthetic oligonucleotide
taccacggtacatcaccagacgcaactaaa

SEQ ID NO: 463093 - DNA, 30 bp, Artificial Sequence
  Synthetic oligonucleotide
aagtttagcatgctctttagagacactaaa

SEQ ID NO: 463094 - DNA, 30 bp, Artificial Sequence
  Synthetic oligonucleotide
ctcccaccgatgaagccgatttagactaaa

SEQ ID NO: 463095 - DNA, 30 bp, Artificial Sequence
  Synthetic oligonucleotide
acatattgagatagcgggatattgactaaa

SEQ ID NO: 463096 - DNA, 30 bp, Artificial Sequence
  Synthetic oligonucleotide
attgtgataatcaggactattgatactaaa

SEQ ID NO: 463097 - DNA, 30 bp, Artificial Sequence
  Synthetic oligonucleotide
tcttccatgaaaagtccttgatatactaaa

SEQ ID NO: 463098 - DNA, 30 bp, Artificial Sequence
  Synthetic oligonucleotide
tactggagcggacaagctgtgtaacctaaa

SEQ ID NO: 463099 - DNA, 30 bp, Artificial Sequence
  Synthetic oligonucleotide
tatggtctattgatagtcaaatcacctaaa

SEQ ID NO: 463100 - DNA, 30 bp, Artificial Sequence
  Synthetic oligonucleotide
ttactatagtaggtacactatatacctaaa

SEQ ID NO: 463101 - DNA, 30 bp, Artificial Sequence
  Synthetic oligonucleotide
aaccttacgagacgttagccctcccctaaa

SEQ ID NO: 463102 - DNA, 30 bp, Artificial Sequence
  Synthetic oligonucleotide
tgcatagtagcattcttgacgatccctaaa

SEQ ID NO: 463103 - DNA, 30 bp, Artificial Sequence
  Synthetic oligonucleotide
gaatacgatgaaggtctttaggtccctaaa

SEQ ID NO: 463104 - DNA, 30 bp, Artificial Sequence
  Synthetic oligonucleotide
gtttcagtccggatccgtttttagcctaaa

SEQ ID NO: 463105 - DNA, 30 bp, Artificial Sequence
  Synthetic oligonucleotide
ctatctgtgcatgttataccagcgcctaaa

SEQ ID NO: 463106 - DNA, 30 bp, Artificial Sequence
  Synthetic oligonucleotide
tatacacccctatggatcccaatagctaaa

SEQ ID NO: 463107 - DNA, 30 bp, Artificial Sequence
  Synthetic oligonucleotide
ctttcgccggggtaaactgtacacgctaaa

SEQ ID NO: 463108 - DNA, 30 bp, Artificial Sequence
  Synthetic oligonucleotide
agttttcaaggtgttggaggcgacgctaaa

SEQ ID NO: 463109 - DNA, 30 bp, Artificial Sequence
  Synthetic oligonucleotide
cctcagaaacccgggagccactaggctaaa

SEQ ID NO: 463110 - DNA, 30 bp, Artificial Sequence
  Synthetic oligonucleotide
taaaagcgacactagacagtcaatgctaaa

SEQ ID NO: 463111 - DNA, 30 bp, Artificial Sequence
  Synthetic oligonucleotide
gagagcatgattttagcatgctgtgctaaa

SEQ ID NO: 463112 - DNA, 30 bp, Artificial Sequence
  Synthetic oligonucleotide
ttatcttaattaactgaagacattgctaaa

SEQ ID NO: 463113 - DNA, 30 bp, Artificial Sequence
  Synthetic oligonucleotide
ctggaacttgcttttgctccgttatctaaa

SEQ ID NO: 463114 - DNA, 30 bp, Artificial Sequence
  Synthetic oligonucleotide
ttcatgaacgcatatagaataagctctaaa

SEQ ID NO: 463115 - DNA, 30 bp, Artificial Sequence
  Synthetic oligonucleotide
gcactcagaactgacgccgtaagctctaaa

SEQ ID NO: 463116 - DNA, 30 bp, Artificial Sequence
  Synthetic oligonucleotide
tgctacttagaatgccccatagagtctaaa

SEQ ID NO: 463117 - DNA, 30 bp, Artificial Sequence
  Synthetic oligonucleotide
gtgggtgattcctgtcggcgctagtctaaa

SEQ ID NO: 463118 - DNA, 30 bp, Artificial Sequence
  Synthetic oligonucleotide
gttattgaaataaggccgcagtcgtctaaa

SEQ ID NO: 463119 - DNA, 30 bp, Artificial Sequence
  Synthetic oligonucleotide
accataaatggccaaaggttcaggtctaaa

SEQ ID NO: 463120 - DNA, 30 bp, Artificial Sequence
  Synthetic oligonucleotide
acagccccccgatgcaaggagttgtctaaa

SEQ ID NO: 463121 - DNA, 30 bp, Artificial Sequence
  Synthetic oligonucleotide
agatcgttatgttggtatctttattctaaa

SEQ ID NO: 463122 - DNA, 30 bp, Artificial Sequence
  Synthetic oligonucleotide
cacagtcgggtcgtagctttttattctaaa

SEQ ID NO: 463123 - DNA, 30 bp, Artificial Sequence
  Synthetic oligonucleotide
gaaattagacttgaatagccggaaagtaaa

SEQ ID NO: 463124 - DNA, 30 bp, Artificial Sequence
  Synthetic oligonucleotide
ctggttcatgtagtttcaataataagtaaa

SEQ ID NO: 463125 - DNA, 30 bp, Artificial Sequence
  Synthetic oligonucleotide
cctgctatgattggggatcggagcagtaaa

SEQ ID NO: 463126 - DNA, 30 bp, Artificial Sequence
  Synthetic oligonucleotide
aaagcaacacctcttcccagcaatagtaaa

SEQ ID NO: 463127 - DNA, 30 bp, Artificial Sequence
  Synthetic oligonucleotide
tttaaggtccgggtagccgacagtagtaaa

SEQ ID NO: 463128 - DNA, 30 bp, Artificial Sequence
  Synthetic oligonucleotide
ctgcaggctattcacttgtcaacacgtaaa

SEQ ID NO: 463129 - DNA, 30 bp, Artificial Sequence
  Synthetic oligonucleotide
cgggctccactgtcggccataagacgtaaa

SEQ ID NO: 463130 - DNA, 30 bp, Artificial Sequence
  Synthetic oligonucleotide
attacatatcgctggatattccaccgtaaa

SEQ ID NO: 463131 - DNA, 30 bp, Artificial Sequence
  Synthetic oligonucleotide
gagagacttataagcatgtatctgcgtaaa

SEQ ID NO: 463132 - DNA, 30 bp, Artificial Sequence
  Synthetic oligonucleotide
gcaaccgtttcacggtgggccttgcgtaaa

SEQ ID NO: 463133 - DNA, 30 bp, Artificial Sequence
  Synthetic oligonucleotide
cctaaaggtcactaacgcaacaatcgtaaa

SEQ ID NO: 463134 - DNA, 30 bp, Artificial Sequence
  Synthetic oligonucleotide
ctggtgatgggaagcggcgagagaggtaaa

SEQ ID NO: 463135 - DNA, 30 bp, Artificial Sequence
  Synthetic oligonucleotide
gcagtagtctgctcgggtcgtatgggtaaa

SEQ ID NO: 463136 - DNA, 30 bp, Artificial Sequence
  Synthetic oligonucleotide
agtgggcttcaaacaatccggtttggtaaa

SEQ ID NO: 463137 - DNA, 30 bp, Artificial Sequence
  Synthetic oligonucleotide
ttcaggactgttgatgctggttcatgtaaa

SEQ ID NO: 463138 - DNA, 30 bp, Artificial Sequence
  Synthetic oligonucleotide
gttaggctcggaccgcaccgcatatgtaaa

SEQ ID NO: 463139 - DNA, 30 bp, Artificial Sequence
  Synthetic oligonucleotide
cttattgatgacaagggtattttatgtaaa

SEQ ID NO: 463140 - DNA, 30 bp, Artificial Sequence
  Synthetic oligonucleotide
tgcttttgtgtttttcgggcgaactgtaaa

SEQ ID NO: 463141 - DNA, 30 bp, Artificial Sequence
  Synthetic oligonucleotide
atttgggtcggtacctctggtacctgtaaa

SEQ ID NO: 463142 - DNA, 30 bp, Artificial Sequence
  Synthetic oligonucleotide
tgcgttttctaaaatcttagcccctgtaaa

SEQ ID NO: 463143 - DNA, 30 bp, Artificial Sequence
  Synthetic oligonucleotide
taaaagagacgtgcactggcgccctgtaaa

SEQ ID NO: 463144 - DNA, 30 bp, Artificial Sequence
  Synthetic oligonucleotide
aaacaataccattctagttgatgctgtaaa

SEQ ID NO: 463145 - DNA, 30 bp, Artificial Sequence
  Synthetic oligonucleotide
atattcacgtttgcctcgagacggtgtaaa

SEQ ID NO: 463146 - DNA, 30 bp, Artificial Sequence
  Synthetic oligonucleotide
gccaggaattccgtagagtggtggtgtaaa

SEQ ID NO: 463147 - DNA, 30 bp, Artificial Sequence
  Synthetic oligonucleotide
tgccgagtatattcccgttgcctgtgtaaa

SEQ ID NO: 463148 - DNA, 30 bp, Artificial Sequence
  Synthetic oligonucleotide
aaccgataatagcactcaatcccttgtaaa

SEQ ID NO: 463149 - DNA, 30 bp, Artificial Sequence
  Synthetic oligonucleotide
agcccgtagtatgtgtaaaactgttgtaaa

SEQ ID NO: 463150 - DNA, 30 bp, Artificial Sequence
  Synthetic oligonucleotide
agtaggcacgtttttttaatcagaattaaa

SEQ ID NO: 463151 - DNA, 30 bp, Artificial Sequence
  Synthetic oligonucleotide
acctttttagcggctgcagggtgaattaaa

SEQ ID NO: 463152 - DNA, 30 bp, Artificial Sequence
  Synthetic oligonucleotide
gagcctgttattgtagggtacctaattaaa

SEQ ID NO: 463153 - DNA, 28 bp, Artificial Sequence
  Synthetic oligonucleotide
ttctatggcaagtttgcacgacattaaa

SEQ ID NO: 463154 - DNA, 30 bp, Artificial Sequence
  Synthetic oligonucleotide
gctttatttattacgagtctaaccattaaa

SEQ ID NO: 463155 - DNA, 30 bp, Artificial Sequence
  Synthetic oligonucleotide
ggcgtgatcggccacgcccaagccattaaa

SEQ ID NO: 463156 - DNA, 30 bp, Artificial Sequence
  Synthetic oligonucleotide
gaaattaattagtgctaagactcgattaaa

SEQ ID NO: 463157 - DNA, 30 bp, Artificial Sequence
  Synthetic oligonucleotide
tcgctaacttaaaggcgatagctgattaaa

SEQ ID NO: 463158 - DNA, 30 bp, Artificial Sequence
  Synthetic oligonucleotide
tccgcgcaaatattttcactgttgattaaa

SEQ ID NO: 463159 - DNA, 30 bp, Artificial Sequence
  Synthetic oligonucleotide
ctcccaactaggctaagagcaaatattaaa

SEQ ID NO: 463160 - DNA, 30 bp, Artificial Sequence
  Synthetic oligonucleotide
gtcgctcgtcatggggggctccatattaaa

SEQ ID NO: 463161 - DNA, 30 bp, Artificial Sequence
  Synthetic oligonucleotide
atatggctttctgtctacaaactacttaaa

SEQ ID NO: 463162 - DNA, 30 bp, Artificial Sequence
  Synthetic oligonucleotide
aactactgggaactcggtgcatcccttaaa

SEQ ID NO: 463163 - DNA, 30 bp, Artificial Sequence
  Synthetic oligonucleotide
aaaagttccttgcctataaggggccttaaa

SEQ ID NO: 463164 - DNA, 30 bp, Artificial Sequence
  Synthetic oligonucleotide
attgcggcgcgcgttgataaactccttaaa

SEQ ID NO: 463165 - DNA, 30 bp, Artificial Sequence
  Synthetic oligonucleotide
gcaattaagaggtgatctcaatcgcttaaa

SEQ ID NO: 463166 - DNA, 30 bp, Artificial Sequence
  Synthetic oligonucleotide
gaacccgtatcaggttgacaacggcttaaa

SEQ ID NO: 463167 - DNA, 30 bp, Artificial Sequence
  Synthetic oligonucleotide
taataccttgggtttgcacatatgcttaaa

SEQ ID NO: 463168 - DNA, 30 bp, Artificial Sequence
  Synthetic oligonucleotide
ttctcgggaaatctaaaggtaggtcttaaa

SEQ ID NO: 463169 - DNA, 30 bp, Artificial Sequence
  Synthetic oligonucleotide
agtttagtttctcactgcgtagcagttaaa

SEQ ID NO: 463170 - DNA, 30 bp, Artificial Sequence
  Synthetic oligonucleotide
gggtttcatatgcttgagctgctagttaaa

SEQ ID NO: 463171 - DNA, 30 bp, Artificial Sequence
  Synthetic oligonucleotide
gaatccacatgcacagaagcagtagttaaa

SEQ ID NO: 463172 - DNA, 30 bp, Artificial Sequence
  Synthetic oligonucleotide
ggaccaaacctgggagcttttgacgttaaa

SEQ ID NO: 463173 - DNA, 30 bp, Artificial Sequence
  Synthetic oligonucleotide
cggtttttgtttcactggttcatcgttaaa

SEQ ID NO: 463174 - DNA, 30 bp, Artificial Sequence
  Synthetic oligonucleotide
cgtgtcgctgcgggaattaactaggttaaa

SEQ ID NO: 463175 - DNA, 30 bp, Artificial Sequence
  Synthetic oligonucleotide
tattgcaaacgttgccggacagcggttaaa

SEQ ID NO: 463176 - DNA, 30 bp, Artificial Sequence
  Synthetic oligonucleotide
tgctgcaactccagggccgtatgggttaaa

SEQ ID NO: 463177 - DNA, 30 bp, Artificial Sequence
  Synthetic oligonucleotide
ctattacgcaaaaagcatagactggttaaa

SEQ ID NO: 463178 - DNA, 30 bp, Artificial Sequence
  Synthetic oligonucleotide
atgtcattgaacttgttcgcggtggttaaa

SEQ ID NO: 463179 - DNA, 30 bp, Artificial Sequence
  Synthetic oligonucleotide
caagggcgtcttatatacttgcatgttaaa

SEQ ID NO: 463180 - DNA, 30 bp, Artificial Sequence
  Synthetic oligonucleotide
agtatcctttcgtttgataggactgttaaa

SEQ ID NO: 463181 - DNA, 30 bp, Artificial Sequence
  Synthetic oligonucleotide
tcacatatcgtacttgaccgcgaatttaaa

SEQ ID NO: 463182 - DNA, 30 bp, Artificial Sequence
  Synthetic oligonucleotide
atatatcacttatagatcagagcatttaaa

SEQ ID NO: 463183 - DNA, 30 bp, Artificial Sequence
  Synthetic oligonucleotide
gaagtttaaaaaaaagtggtgtcctttaaa

SEQ ID NO: 463184 - DNA, 30 bp, Artificial Sequence
  Synthetic oligonucleotide
actgtagagatattcgataacctctttaaa

SEQ ID NO: 463185 - DNA, 30 bp, Artificial Sequence
  Synthetic oligonucleotide
tgttagcctgaacgggcatgcaagtttaaa

SEQ ID NO: 463186 - DNA, 30 bp, Artificial Sequence
  Synthetic oligonucleotide
cttctcagggctaagcgcgcatagtttaaa

SEQ ID NO: 463187 - DNA, 30 bp, Artificial Sequence
  Synthetic oligonucleotide
gagtgtaatcaattcgcacacacgtttaaa

SEQ ID NO: 463188 - DNA, 30 bp, Artificial Sequence
  Synthetic oligonucleotide
atgcccggtcattagctgcgaaattttaaa

SEQ ID NO: 463189 - DNA, 30 bp, Artificial Sequence
  Synthetic oligonucleotide
ttgagaattaagtgttgcgcattaaaacaa

SEQ ID NO: 463190 - DNA, 30 bp, Artificial Sequence
  Synthetic oligonucleotide
tgcttggtcgcgagtcattactagaaacaa

SEQ ID NO: 463191 - DNA, 30 bp, Artificial Sequence
  Synthetic oligonucleotide
cttttctcgggacagggcacatgtaaacaa

SEQ ID NO: 463192 - DNA, 30 bp, Artificial Sequence
  Synthetic oligonucleotide
agttaacacacgatcagtcgcgttaaacaa

SEQ ID NO: 463193 - DNA, 30 bp, Artificial Sequence
  Synthetic oligonucleotide
ttacggccagctaacccttctagacaacaa

SEQ ID NO: 463194 - DNA, 30 bp, Artificial Sequence
  Synthetic oligonucleotide
agtaagtccggccgctaaggcggacaacaa

SEQ ID NO: 463195 - DNA, 35 bp, Artificial Sequence
  Synthetic oligonucleotide
atagactgcccacgacgtcagtaatgcaccaacaa

SEQ ID NO: 463196 - DNA, 30 bp, Artificial Sequence
  Synthetic oligonucleotide
gtagatacatggcgacgggacatgcaacaa

SEQ ID NO: 463197 - DNA, 30 bp, Artificial Sequence
  Synthetic oligonucleotide
tgcttgaaggcgctccagggcagtcaacaa

SEQ ID NO: 463198 - DNA, 30 bp, Artificial Sequence
  Synthetic oligonucleotide
atacaagggcccacaggagtagttcaacaa

SEQ ID NO: 463199 - DNA, 30 bp, Artificial Sequence
  Synthetic oligonucleotide
atttgacatcgttccctgggattagaacaa

SEQ ID NO: 463200 - DNA, 30 bp, Artificial Sequence
  Synthetic oligonucleotide
attttgggggtccgttgcggcttagaacaa

SEQ ID NO: 463201 - DNA, 30 bp, Artificial Sequence
  Synthetic oligonucleotide
aaacgggttgtcgcgcttagtttagaacaa

SEQ ID NO: 463202 - DNA, 30 bp, Artificial Sequence
  Synthetic oligonucleotide
tttctggtttctagaaacctcaaggaacaa

SEQ ID NO: 463203 - DNA, 30 bp, Artificial Sequence
  Synthetic oligonucleotide
gttcacgccctgtaagggacttcggaacaa

SEQ ID NO: 463204 - DNA, 26 bp, Artificial Sequence
  Synthetic oligonucleotide
tgcaagcaactacgaacaaataacaa

SEQ ID NO: 463205 - DNA, 30 bp, Artificial Sequence
  Synthetic oligonucleotide
gagggacggtgaccattgcgccactaacaa

SEQ ID NO: 463206 - DNA, 30 bp, Artificial Sequence
  Synthetic oligonucleotide
ctcgctagcggacacatagtgtcctaacaa

SEQ ID NO: 463207 - DNA, 30 bp, Artificial Sequence
  Synthetic oligonucleotide
atgcttgttagattcatcgtctcgtaacaa

SEQ ID NO: 463208 - DNA, 30 bp, Artificial Sequence
  Synthetic oligonucleotide
ggattcggaggttccatggccaaaacacaa

SEQ ID NO: 463209 - DNA, 30 bp, Artificial Sequence
  Synthetic oligonucleotide
tatatgtagattggtatggatgcaacacaa

SEQ ID NO: 463210 - DNA, 30 bp, Artificial Sequence
  Synthetic oligonucleotide
ttcccgggttatacgtattggggtacacaa

SEQ ID NO: 463211 - DNA, 30 bp, Artificial Sequence
  Synthetic oligonucleotide
cttaacctgtacaggaagggttcaccacaa

SEQ ID NO: 463212 - DNA, 30 bp, Artificial Sequence
  Synthetic oligonucleotide
gtagaatgtcggctattggatagaccacaa

SEQ ID NO: 463213 - DNA, 30 bp, Artificial Sequence
  Synthetic oligonucleotide
tagtggccccgggtctgttatggaccacaa

SEQ ID NO: 463214 - DNA, 30 bp, Artificial Sequence
  Synthetic oligonucleotide
cgtgtccgctggtgaactcgtggaccacaa

SEQ ID NO: 463215 - DNA, 30 bp, Artificial Sequence
  Synthetic oligonucleotide
aatttgtcgtcagtcgtgaatgacccacaa

SEQ ID NO: 463216 - DNA, 30 bp, Artificial Sequence
  Synthetic oligonucleotide
ataccactgaaagagcgattcaatccacaa

SEQ ID NO: 463217 - DNA, 30 bp, Artificial Sequence
  Synthetic oligonucleotide
gtctatgatacacgggacgcacttccacaa

SEQ ID NO: 463218 - DNA, 30 bp, Artificial Sequence
  Synthetic oligonucleotide
aatgttggaactcaatttgtccacgcacaa

SEQ ID NO: 463219 - DNA, 30 bp, Artificial Sequence
  Synthetic oligonucleotide
gagttacagtagtagagaaacgacgcacaa

SEQ ID NO: 463220 - DNA, 30 bp, Artificial Sequence
  Synthetic oligonucleotide
aaatacgcaaaacggttagacccggcacaa

SEQ ID NO: 463221 - DNA, 30 bp, Artificial Sequence
  Synthetic oligonucleotide
aataaaatatctccggataacgcggcacaa

SEQ ID NO: 463222 - DNA, 30 bp, Artificial Sequence
  Synthetic oligonucleotide
cacaagcaccttcacgttcgtcgggcacaa

SEQ ID NO: 463223 - DNA, 30 bp, Artificial Sequence
  Synthetic oligonucleotide
gaaaatgtagcgtattttaatactgcacaa

SEQ ID NO: 463224 - DNA, 30 bp, Artificial Sequence
  Synthetic oligonucleotide
gtttgcgcccgtgaataagccggtgcacaa

SEQ ID NO: 463225 - DNA, 30 bp, Artificial Sequence
  Synthetic oligonucleotide
ctgtttttaatcagatttttataatcacaa

SEQ ID NO: 463226 - DNA, 30 bp, Artificial Sequence
  Synthetic oligonucleotide
ccttaggcgttaggaattccagagtcacaa

SEQ ID NO: 463227 - DNA, 30 bp, Artificial Sequence
  Synthetic oligonucleotide
gagtgagacgaagctttaaccacaagacaa

SEQ ID NO: 463228 - DNA, 30 bp, Artificial Sequence
  Synthetic oligonucleotide
acttcccgtgggtaggttccactaagacaa

SEQ ID NO: 463229 - DNA, 30 bp, Artificial Sequence
  Synthetic oligonucleotide
gttacgactgcgttatagttctttagacaa

SEQ ID NO: 463230 - DNA, 30 bp, Artificial Sequence
  Synthetic oligonucleotide
ggaatggccttggcagattcagtacgacaa

SEQ ID NO: 463231 - DNA, 30 bp, Artificial Sequence
  Synthetic oligonucleotide
gacgagcctatcactacataggcccgacaa

SEQ ID NO: 463232 - DNA, 30 bp, Artificial Sequence
  Synthetic oligonucleotide
ccaaacctccatatactctgggagcgacaa

SEQ ID NO: 463233 - DNA, 30 bp, Artificial Sequence
  Synthetic oligonucleotide
ccaactctgaaacggtgcagcaaaggacaa

SEQ ID NO: 463234 - DNA, 30 bp, Artificial Sequence
  Synthetic oligonucleotide
atctcgctccaaatgccgccgataggacaa

SEQ ID NO: 463235 - DNA, 30 bp, Artificial Sequence
  Synthetic oligonucleotide
gggccgcaccgcaccggcaagacgggacaa

SEQ ID NO: 463236 - DNA, 30 bp, Artificial Sequence
  Synthetic oligonucleotide
taaattcgtctaaggcctctctggggacaa

SEQ ID NO: 463237 - DNA, 30 bp, Artificial Sequence
  Synthetic oligonucleotide
gcgtaacgttcgcgacaacgttgatgacaa

SEQ ID NO: 463238 - DNA, 30 bp, Artificial Sequence
  Synthetic oligonucleotide
aagtgtagattcaaaagcgaattatgacaa

SEQ ID NO: 463239 - DNA, 30 bp, Artificial Sequence
  Synthetic oligonucleotide
caattctaacattactgtgaggactgacaa

SEQ ID NO: 463240 - DNA, 30 bp, Artificial Sequence
  Synthetic oligonucleotide
tgcagtagtcctgaaccttcgtactgacaa

SEQ ID NO: 463241 - DNA, 30 bp, Artificial Sequence
  Synthetic oligonucleotide
ttcgggagcctatcattatgaacctgacaa

SEQ ID NO: 463242 - DNA, 30 bp, Artificial Sequence
  Synthetic oligonucleotide
aggcacagcgtcaatcgaaaaggttgacaa

SEQ ID NO: 463243 - DNA, 30 bp, Artificial Sequence
  Synthetic oligonucleotide
tttggtgcacattggatggggtaaatacaa

SEQ ID NO: 463244 - DNA, 31 bp, Artificial Sequence
  Synthetic oligonucleotide
acaaacggccctctgccagagtggaatacaa

SEQ ID NO: 463245 - DNA, 30 bp, Artificial Sequence
  Synthetic oligonucleotide
aattatgtgtcgggttgcaacgtaatacaa

SEQ ID NO: 463246 - DNA, 30 bp, Artificial Sequence
  Synthetic oligonucleotide
tgtatcctgcagctattgagggatatacaa

SEQ ID NO: 463247 - DNA, 30 bp, Artificial Sequence
  Synthetic oligonucleotide
gtaaagttccatccgattactggtatacaa

SEQ ID NO: 463248 - DNA, 30 bp, Artificial Sequence
  Synthetic oligonucleotide
acccaataccattgcgcttatgagctacaa

SEQ ID NO: 463249 - DNA, 30 bp, Artificial Sequence
  Synthetic oligonucleotide
aattatctgagccagctgtgaattctacaa

SEQ ID NO: 463250 - DNA, 30 bp, Artificial Sequence
  Synthetic oligonucleotide
ttgagctaggagtcagatcggtttctacaa

SEQ ID NO: 463251 - DNA, 30 bp, Artificial Sequence
  Synthetic oligonucleotide
atttcaacactcggtgcgatatgagtacaa

SEQ ID NO: 463252 - DNA, 30 bp, Artificial Sequence
  Synthetic oligonucleotide
ctgcttcagactgcttgttgactagtacaa

SEQ ID NO: 463253 - DNA, 30 bp, Artificial Sequence
  Synthetic oligonucleotide
gaaaccgatctgtgtgtcgacttagtacaa

SEQ ID NO: 463254 - DNA, 30 bp, Artificial Sequence
  Synthetic oligonucleotide
gcatgtactgcgcctagacgttaggtacaa

SEQ ID NO: 463255 - DNA, 30 bp, Artificial Sequence
  Synthetic oligonucleotide
gctcaaacgaaggatgcactttaggtacaa

SEQ ID NO: 463256 - DNA, 30 bp, Artificial Sequence
  Synthetic oligonucleotide
gggcgtggaaggttacactgcatggtacaa

SEQ ID NO: 463257 - DNA, 30 bp, Artificial Sequence
  Synthetic oligonucleotide
ggggacattgttgcgcctttgggcttacaa

SEQ ID NO: 463258 - DNA, 30 bp, Artificial Sequence
  Synthetic oligonucleotide
tctgggcttgatgtatactggtggttacaa

SEQ ID NO: 463259 - DNA, 30 bp, Artificial Sequence
  Synthetic oligonucleotide
tatttagtcttcgaaacttttgaaaaccaa

SEQ ID NO: 463260 - DNA, 30 bp, Artificial Sequence
  Synthetic oligonucleotide
ttaggattgcggctcaacccgccaaaccaa

SEQ ID NO: 463261 - DNA, 30 bp, Artificial Sequence
  Synthetic oligonucleotide
ccatagtttggatatatttccataaaccaa

SEQ ID NO: 463262 - DNA, 30 bp, Artificial Sequence
  Synthetic oligonucleotide
ggagcggataacgcttgttatcgcaaccaa

SEQ ID NO: 463263 - DNA, 30 bp, Artificial Sequence
  Synthetic oligonucleotide
atcgccgcagacaggtggacccataaccaa

SEQ ID NO: 463264 - DNA, 30 bp, Artificial Sequence
  Synthetic oligonucleotide
attggccttctctagactgatggtaaccaa

SEQ ID NO: 463265 - DNA, 30 bp, Artificial Sequence
  Synthetic oligonucleotide
gtccctctaattccagtcgcggtacaccaa

SEQ ID NO: 463266 - DNA, 30 bp, Artificial Sequence
  Synthetic oligonucleotide
acccattgcctgcggatctttatccaccaa

SEQ ID NO: 463267 - DNA, 30 bp, Artificial Sequence
  Synthetic oligonucleotide
cttgctccgaatgctcttgtcatgcaccaa

SEQ ID NO: 463268 - DNA, 30 bp, Artificial Sequence
  Synthetic oligonucleotide
ccattggtgaagatatatcgtttgcaccaa

SEQ ID NO: 463269 - DNA, 30 bp, Artificial Sequence
  Synthetic oligonucleotide
ccgccttccaacgccactttaagagaccaa

SEQ ID NO: 463270 - DNA, 30 bp, Artificial Sequence
  Synthetic oligonucleotide
ggtcattggcctaagggtcatcccgaccaa

SEQ ID NO: 463271 - DNA, 30 bp, Artificial Sequence
  Synthetic oligonucleotide
gatgtatttaatagtcagggcggcgaccaa

SEQ ID NO: 463272 - DNA, 30 bp, Artificial Sequence
  Synthetic oligonucleotide
ttacgccggaaataggcaccattcgaccaa

SEQ ID NO: 463273 - DNA, 30 bp, Artificial Sequence
  Synthetic oligonucleotide
attcattccactctgaactgtttggaccaa

SEQ ID NO: 463274 - DNA, 30 bp, Artificial Sequence
  Synthetic oligonucleotide
ctttaaggtcgttgagacccaatataccaa

SEQ ID NO: 463275 - DNA, 30 bp, Artificial Sequence
  Synthetic oligonucleotide
aaaaatgagccggcagaatggctataccaa

SEQ ID NO: 463276 - DNA, 30 bp, Artificial Sequence
  Synthetic oligonucleotide
gaaaagctaactgatacgggatcctaccaa

SEQ ID NO: 463277 - DNA, 30 bp, Artificial Sequence
  Synthetic oligonucleotide
gggcccaccgatcccgtagttctctaccaa

SEQ ID NO: 463278 - DNA, 30 bp, Artificial Sequence
  Synthetic oligonucleotide
ggactgatctggtttcttaacccgtaccaa

SEQ ID NO: 463279 - DNA, 30 bp, Artificial Sequence
  Synthetic oligonucleotide
ggatccgacctgtggtacgccatcacccaa

SEQ ID NO: 463280 - DNA, 30 bp, Artificial Sequence
  Synthetic oligonucleotide
gtccgtactatgatgaaatcgcagacccaa

SEQ ID NO: 463281 - DNA, 30 bp, Artificial Sequence
  Synthetic oligonucleotide
ccaaagctcggtataacagcttagacccaa

SEQ ID NO: 463282 - DNA, 30 bp, Artificial Sequence
  Synthetic oligonucleotide
tttgctatggcggttggatgtaggacccaa

SEQ ID NO: 463283 - DNA, 30 bp, Artificial Sequence
  Synthetic oligonucleotide
ggcgttttgctagaaccacacgctacccaa

SEQ ID NO: 463284 - DNA, 30 bp, Artificial Sequence
  Synthetic oligonucleotide
atcctagctctatttatgactcttacccaa

SEQ ID NO: 463285 - DNA, 30 bp, Artificial Sequence
  Synthetic oligonucleotide
tagtgttgattcgtagcatgtagaccccaa

SEQ ID NO: 463286 - DNA, 30 bp, Artificial Sequence
  Synthetic oligonucleotide
gaactacaaatgcttgtatggttaccccaa

SEQ ID NO: 463287 - DNA, 30 bp, Artificial Sequence
  Synthetic oligonucleotide
aatcccacaggtattgtttcgtgcccccaa

SEQ ID NO: 463288 - DNA, 30 bp, Artificial Sequence
  Synthetic oligonucleotide
gtcaacatgactttttcgacaaatccccaa

SEQ ID NO: 463289 - DNA, 30 bp, Artificial Sequence
  Synthetic oligonucleotide
gatgtatagggcgggcaaaagggtccccaa

SEQ ID NO: 463290 - DNA, 30 bp, Artificial Sequence
  Synthetic oligonucleotide
tacggatgattcatcacggtttgtccccaa

SEQ ID NO: 463291 - DNA, 30 bp, Artificial Sequence
  Synthetic oligonucleotide
actattggcggcgcggggcttaaagcccaa

SEQ ID NO: 463292 - DNA, 30 bp, Artificial Sequence
  Synthetic oligonucleotide
aaactggcagaattattgttgccagcccaa

SEQ ID NO: 463293 - DNA, 30 bp, Artificial Sequence
  Synthetic oligonucleotide
acactgctgtgtccgcacatcaacgcccaa

SEQ ID NO: 463294 - DNA, 30 bp, Artificial Sequence
  Synthetic oligonucleotide
gcgtcttatctgtacacccgctccgcccaa

SEQ ID NO: 463295 - DNA, 30 bp, Artificial Sequence
  Synthetic oligonucleotide
tgcggtcagcgttagttcttcggcgcccaa

SEQ ID NO: 463296 - DNA, 30 bp, Artificial Sequence
  Synthetic oligonucleotide
gcggcttgtgattcgttcacgcaggcccaa

SEQ ID NO: 463297 - DNA, 30 bp, Artificial Sequence
  Synthetic oligonucleotide
atctggacgacggctcgccaggttgcccaa

SEQ ID NO: 463298 - DNA, 30 bp, Artificial Sequence
  Synthetic oligonucleotide
aacggccatagcactggcattgttgcccaa

SEQ ID NO: 463299 - DNA, 30 bp, Artificial Sequence
  Synthetic oligonucleotide
agccgtctgccgccaatgggacaatcccaa

SEQ ID NO: 463300 - DNA, 30 bp, Artificial Sequence
  Synthetic oligonucleotide
ctctcctccatataagcttaagcctcccaa

SEQ ID NO: 463301 - DNA, 30 bp, Artificial Sequence
  Synthetic oligonucleotide
tatgcattgaggttcgggataccgtcccaa

SEQ ID NO: 463302 - DNA, 30 bp, Artificial Sequence
  Synthetic oligonucleotide
aaatgccccgcagatgcagacatgtcccaa

SEQ ID NO: 463303 - DNA, 30 bp, Artificial Sequence
  Synthetic oligonucleotide
ttggtatccctgagtgtccaggaaagccaa

SEQ ID NO: 463304 - DNA, 30 bp, Artificial Sequence
  Synthetic oligonucleotide
aatgatcacagcaaattcccggcacgccaa

SEQ ID NO: 463305 - DNA, 30 bp, Artificial Sequence
  Synthetic oligonucleotide
tcccactttcatatcgggctttgacgccaa

SEQ ID NO: 463306 - DNA, 30 bp, Artificial Sequence
  Synthetic oligonucleotide
cgcagtatattctcgcatttacaccgccaa

SEQ ID NO: 463307 - DNA, 30 bp, Artificial Sequence
  Synthetic oligonucleotide
ccatcgtagggggaagtcactgaccgccaa

SEQ ID NO: 463308 - DNA, 30 bp, Artificial Sequence
  Synthetic oligonucleotide
aaccacttgcatttagtgtcaagtcgccaa

SEQ ID NO: 463309 - DNA, 30 bp, Artificial Sequence
  Synthetic oligonucleotide
caacgagtcactgatgcatgcaaaggccaa

SEQ ID NO: 463310 - DNA, 30 bp, Artificial Sequence
  Synthetic oligonucleotide
tttagttcacaatagtcacttacaggccaa

SEQ ID NO: 463311 - DNA, 30 bp, Artificial Sequence
  Synthetic oligonucleotide
gtattctggcatggggtatgacccggccaa

SEQ ID NO: 463312 - DNA, 30 bp, Artificial Sequence
  Synthetic oligonucleotide
aaatacttcggtggggggttccccggccaa

SEQ ID NO: 463313 - DNA, 30 bp, Artificial Sequence
  Synthetic oligonucleotide
gctaggttccgaacttctagttgcggccaa

SEQ ID NO: 463314 - DNA, 30 bp, Artificial Sequence
  Synthetic oligonucleotide
gtctaatgtaacattcaggtcttcggccaa

SEQ ID NO: 463315 - DNA, 30 bp, Artificial Sequence
  Synthetic oligonucleotide
caaaattactgcagaagttatgtgtgccaa

SEQ ID NO: 463316 - DNA, 30 bp, Artificial Sequence
  Synthetic oligonucleotide
ataaattaataagacctgctcgcaatccaa

SEQ ID NO: 463317 - DNA, 30 bp, Artificial Sequence
  Synthetic oligonucleotide
gacctctaggtgactcggaaaataatccaa

SEQ ID NO: 463318 - DNA, 30 bp, Artificial Sequence
  Synthetic oligonucleotide
tacaggggtcgcaaatggttctgcatccaa

SEQ ID NO: 463319 - DNA, 30 bp, Artificial Sequence
  Synthetic oligonucleotide
gtatactccaagtagatgacgtgcatccaa

SEQ ID NO: 463320 - DNA, 30 bp, Artificial Sequence
  Synthetic oligonucleotide
actccttacattaaagtcagaatgatccaa

SEQ ID NO: 463321 - DNA, 30 bp, Artificial Sequence
  Synthetic oligonucleotide
aatgaagtatgtactgttgacagtatccaa

SEQ ID NO: 463322 - DNA, 30 bp, Artificial Sequence
  Synthetic oligonucleotide
gtttgtatactgaagtacactgttatccaa

SEQ ID NO: 463323 - DNA, 30 bp, Artificial Sequence
  Synthetic oligonucleotide
tgaactagggacccgtaatctatcctccaa

SEQ ID NO: 463324 - DNA, 30 bp, Artificial Sequence
  Synthetic oligonucleotide
gtgtggacatctgactatatttggctccaa

SEQ ID NO: 463325 - DNA, 30 bp, Artificial Sequence
  Synthetic oligonucleotide
gcaattatataaaaattatgattgctccaa

SEQ ID NO: 463326 - DNA, 30 bp, Artificial Sequence
  Synthetic oligonucleotide
actaattggagacaatgtactggtctccaa

SEQ ID NO: 463327 - DNA, 30 bp, Artificial Sequence
  Synthetic oligonucleotide
gccagtattagccggaaatgttttctccaa

SEQ ID NO: 463328 - DNA, 30 bp, Artificial Sequence
  Synthetic oligonucleotide
gcagaggtaggtgttccgtggggagtccaa

SEQ ID NO: 463329 - DNA, 30 bp, Artificial Sequence
  Synthetic oligonucleotide
gagtatatttaatgagtaggttgagtccaa

SEQ ID NO: 463330 - DNA, 30 bp, Artificial Sequence
  Synthetic oligonucleotide
acttttcaactttaaggcaaatccgtccaa

SEQ ID NO: 463331 - DNA, 30 bp, Artificial Sequence
  Synthetic oligonucleotide
gaacaacatatgcaattgagtcatgtccaa

SEQ ID NO: 463332 - DNA, 30 bp, Artificial Sequence
  Synthetic oligonucleotide
ctcgtcattcgcgagtcgcaagctgtccaa

SEQ ID NO: 463333 - DNA, 30 bp, Artificial Sequence
  Synthetic oligonucleotide
tctatatgggagcagttattcatattccaa

SEQ ID NO: 463334 - DNA, 30 bp, Artificial Sequence
  Synthetic oligonucleotide
cgaggcaggatactgctgttttccttccaa

SEQ ID NO: 463335 - DNA, 30 bp, Artificial Sequence
  Synthetic oligonucleotide
cactccgtggtgatgtacggagtgttccaa

SEQ ID NO: 463336 - DNA, 30 bp, Artificial Sequence
  Synthetic oligonucleotide
tttcggactgcaggttttacagaaaagcaa

SEQ ID NO: 463337 - DNA, 30 bp, Artificial Sequence
  Synthetic oligonucleotide
atataggcttcaagagttgaatataagcaa

SEQ ID NO: 463338 - DNA, 30 bp, Artificial Sequence
  Synthetic oligonucleotide
gttaaggcgtacaccctgatacctaagcaa

SEQ ID NO: 463339 - DNA, 30 bp, Artificial Sequence
  Synthetic oligonucleotide
cccaccgttgccctggagcgagaacagcaa

SEQ ID NO: 463340 - DNA, 30 bp, Artificial Sequence
  Synthetic oligonucleotide
atatttaccagtgcgggccataaccagcaa

SEQ ID NO: 463341 - DNA, 30 bp, Artificial Sequence
  Synthetic oligonucleotide
tagcgaacggagcgctgaggacaccagcaa

SEQ ID NO: 463342 - DNA, 30 bp, Artificial Sequence
  Synthetic oligonucleotide
tggttcagtgtcaggggtttataccagcaa

SEQ ID NO: 463343 - DNA, 30 bp, Artificial Sequence
  Synthetic oligonucleotide
caaatcaggcaatccctgtcaccccagcaa

SEQ ID NO: 463344 - DNA, 30 bp, Artificial Sequence
  Synthetic oligonucleotide
agatttattaggactggaaacctccagcaa

SEQ ID NO: 463345 - DNA, 30 bp, Artificial Sequence
  Synthetic oligonucleotide
attaaaatgccatacctttagcttcagcaa

SEQ ID NO: 463346 - DNA, 30 bp, Artificial Sequence
  Synthetic oligonucleotide
tatatagtgatacgcttttgtaccgagcaa

SEQ ID NO: 463347 - DNA, 30 bp, Artificial Sequence
  Synthetic oligonucleotide
tgcatgtgtgctcttttcggccccgagcaa

SEQ ID NO: 463348 - DNA, 30 bp, Artificial Sequence
  Synthetic oligonucleotide
gtaagcctctcgtcagacttgttcgagcaa

SEQ ID NO: 463349 - DNA, 30 bp, Artificial Sequence
  Synthetic oligonucleotide
agcttgacaaagctccgcacgcaggagcaa

SEQ ID NO: 463350 - DNA, 30 bp, Artificial Sequence
  Synthetic oligonucleotide
attctagataaaggttgtgtccactagcaa

SEQ ID NO: 463351 - DNA, 30 bp, Artificial Sequence
  Synthetic oligonucleotide
tttatttggcctccccagtcgggctagcaa

SEQ ID NO: 463352 - DNA, 30 bp, Artificial Sequence
  Synthetic oligonucleotide
tagaaacatagccatgcaaagacgtagcaa

SEQ ID NO: 463353 - DNA, 30 bp, Artificial Sequence
  Synthetic oligonucleotide
tcagatcagcaggttcgccagacgtagcaa

SEQ ID NO: 463354 - DNA, 30 bp, Artificial Sequence
  Synthetic oligonucleotide
gctacgcgagcctcagtctaatggtagcaa

SEQ ID NO: 463355 - DNA, 30 bp, Artificial Sequence
  Synthetic oligonucleotide
cctagtatttcgctataatttccttagcaa

SEQ ID NO: 463356 - DNA, 30 bp, Artificial Sequence
  Synthetic oligonucleotide
tctgtgatacttagtgagcggctttagcaa

SEQ ID NO: 463357 - DNA, 30 bp, Artificial Sequence
  Synthetic oligonucleotide
tgaccccagcaaccgcgaccgaaaacgcaa

SEQ ID NO: 463358 - DNA, 30 bp, Artificial Sequence
  Synthetic oligonucleotide
cgcctgctaactgtgtgacatgaaacgcaa

SEQ ID NO: 463359 - DNA, 30 bp, Artificial Sequence
  Synthetic oligonucleotide
tcgtctatgtaaatctagtgctgaacgcaa

SEQ ID NO: 463360 - DNA, 30 bp, Artificial Sequence
  Synthetic oligonucleotide
tatccatcgatggaggtatgggacacgcaa

SEQ ID NO: 463361 - DNA, 30 bp, Artificial Sequence
  Synthetic oligonucleotide
gtggaggctcctcctcttcggtacacgcaa

SEQ ID NO: 463362 - DNA, 30 bp, Artificial Sequence
  Synthetic oligonucleotide
atctcaaagtgcgctagacgatgcacgcaa

SEQ ID NO: 463363 - DNA, 30 bp, Artificial Sequence
  Synthetic oligonucleotide
agagaaactcgcctttttattgtcacgcaa

SEQ ID NO: 463364 - DNA, 30 bp, Artificial Sequence
  Synthetic oligonucleotide
cgtggaaatggcagcacattgaagacgcaa

SEQ ID NO: 463365 - DNA, 30 bp, Artificial Sequence
  Synthetic oligonucleotide
tcttttaccgtgtttttactgcggacgcaa

SEQ ID NO: 463366 - DNA, 30 bp, Artificial Sequence
  Synthetic oligonucleotide
actgcccacagtgctttatactgtacgcaa

SEQ ID NO: 463367 - DNA, 30 bp, Artificial Sequence
  Synthetic oligonucleotide
cttaccagcagcgtatggatctgtacgcaa

SEQ ID NO: 463368 - DNA, 30 bp, Artificial Sequence
  Synthetic oligonucleotide
ctaaacgccaacgggcctccaaaaccgcaa

SEQ ID NO: 463369 - DNA, 28 bp, Artificial Sequence
  Synthetic oligonucleotide
ggttcaactcgagacacaggtaccgcaa

SEQ ID NO: 463370 - DNA, 30 bp, Artificial Sequence
  Synthetic oligonucleotide
atcctatattacacatatactaaagcgcaa

SEQ ID NO: 463371 - DNA, 30 bp, Artificial Sequence
  Synthetic oligonucleotide
ttatagacctctgaaaccggttaagcgcaa

SEQ ID NO: 463372 - DNA, 30 bp, Artificial Sequence
  Synthetic oligonucleotide
ggttcaggcgcacaggtaagtaacgcgcaa

SEQ ID NO: 463373 - DNA, 30 bp, Artificial Sequence
  Synthetic oligonucleotide
cgatttggctcttttgtcaaaggcgcgcaa

SEQ ID NO: 463374 - DNA, 30 bp, Artificial Sequence
  Synthetic oligonucleotide
aattacaggtataggagagggatcgcgcaa

SEQ ID NO: 463375 - DNA, 30 bp, Artificial Sequence
  Synthetic oligonucleotide
aaaatttctaatttgagctgaaaggcgcaa

SEQ ID NO: 463376 - DNA, 30 bp, Artificial Sequence
  Synthetic oligonucleotide
cactatcactgttagtccatctgggcgcaa

SEQ ID NO: 463377 - DNA, 30 bp, Artificial Sequence
  Synthetic oligonucleotide
acagttgaccatatgccagcacttgcgcaa

SEQ ID NO: 463378 - DNA, 30 bp, Artificial Sequence
  Synthetic oligonucleotide
ataatagctgagtgggtgaatacgtcgcaa

SEQ ID NO: 463379 - DNA, 30 bp, Artificial Sequence
  Synthetic oligonucleotide
tttcttgtaactagtgcaattaggtcgcaa

SEQ ID NO: 463380 - DNA, 30 bp, Artificial Sequence
  Synthetic oligonucleotide
atctcatacgactaacgttctatgtcgcaa

SEQ ID NO: 463381 - DNA, 30 bp, Artificial Sequence
  Synthetic oligonucleotide
ccttgctcaggaggctatggcgtgtcgcaa

SEQ ID NO: 463382 - DNA, 30 bp, Artificial Sequence
  Synthetic oligonucleotide
ctcgtgctactaggagccgttttttcgcaa

SEQ ID NO: 463383 - DNA, 30 bp, Artificial Sequence
  Synthetic oligonucleotide
aggagcctggcctgtgatggtcacaggcaa

SEQ ID NO: 463384 - DNA, 30 bp, Artificial Sequence
  Synthetic oligonucleotide
gaatcggctggtaaaggccctaccaggcaa

SEQ ID NO: 463385 - DNA, 30 bp, Artificial Sequence
  Synthetic oligonucleotide
ttcttctaatccgttgattatcgcaggcaa

SEQ ID NO: 463386 - DNA, 30 bp, Artificial Sequence
  Synthetic oligonucleotide
gtacccctatggcgaggaagcggcaggcaa

SEQ ID NO: 463387 - DNA, 30 bp, Artificial Sequence
  Synthetic oligonucleotide
gacgactcaaggaagaacaggggcaggcaa

SEQ ID NO: 463388 - DNA, 30 bp, Artificial Sequence
  Synthetic oligonucleotide
atcttcttatggacatacgtacggaggcaa

SEQ ID NO: 463389 - DNA, 30 bp, Artificial Sequence
  Synthetic oligonucleotide
tcttggacatgttttgcttttgataggcaa

SEQ ID NO: 463390 - DNA, 30 bp, Artificial Sequence
  Synthetic oligonucleotide
gccttgttggattaataacgcagtaggcaa

SEQ ID NO: 463391 - DNA, 30 bp, Artificial Sequence
  Synthetic oligonucleotide
agtactgatgcacttctcaagcaacggcaa

SEQ ID NO: 463392 - DNA, 30 bp, Artificial Sequence
  Synthetic oligonucleotide
acgaatggtaactttggccgcttccggcaa

SEQ ID NO: 463393 - DNA, 30 bp, Artificial Sequence
  Synthetic oligonucleotide
aatactcgagcgtttgactgtttccggcaa

SEQ ID NO: 463394 - DNA, 30 bp, Artificial Sequence
  Synthetic oligonucleotide
cttaggctcgaagtatcggagtggcggcaa

SEQ ID NO: 463395 - DNA, 30 bp, Artificial Sequence
  Synthetic oligonucleotide
gaggaaaaacatgctacgcaagtgcggcaa

SEQ ID NO: 463396 - DNA, 30 bp, Artificial Sequence
  Synthetic oligonucleotide
gcattgaggcccatcagggcatatcggcaa

SEQ ID NO: 463397 - DNA, 30 bp, Artificial Sequence
  Synthetic oligonucleotide
tctttcgaaaataggtaatgcggtcggcaa

SEQ ID NO: 463398 - DNA, 30 bp, Artificial Sequence
  Synthetic oligonucleotide
tttatggagctggtggcacacaaagggcaa

SEQ ID NO: 463399 - DNA, 30 bp, Artificial Sequence
  Synthetic oligonucleotide
ttatgtttaaggtcatttgtgacagggcaa

SEQ ID NO: 463400 - DNA, 30 bp, Artificial Sequence
  Synthetic oligonucleotide
gacaagcggctaggtagggctctcgggcaa

SEQ ID NO: 463401 - DNA, 30 bp, Artificial Sequence
  Synthetic oligonucleotide
aaatttcttctagaaacgtggaaggggcaa

SEQ ID NO: 463402 - DNA, 30 bp, Artificial Sequence
  Synthetic oligonucleotide
aagcagctaagtcgattataataggggcaa

SEQ ID NO: 463403 - DNA, 29 bp, Artificial Sequence
  Synthetic oligonucleotide
gccgggagtgtttgaacccgggggggcaa

SEQ ID NO: 463404 - DNA, 30 bp, Artificial Sequence
  Synthetic oligonucleotide
gtttatggagggcggcaaccatatgggcaa

SEQ ID NO: 463405 - DNA, 30 bp, Artificial Sequence
  Synthetic oligonucleotide
gtgtgcgcattcaagttattggcaatgcaa

SEQ ID NO: 463406 - DNA, 30 bp, Artificial Sequence
  Synthetic oligonucleotide
ttaagcaattgtagtgcagtggtaatgcaa

SEQ ID NO: 463407 - DNA, 30 bp, Artificial Sequence
  Synthetic oligonucleotide
gagccctgtggatcgactcggcacatgcaa

SEQ ID NO: 463408 - DNA, 30 bp, Artificial Sequence
  Synthetic oligonucleotide
tatggtcacggggcgcgtgagtacatgcaa

SEQ ID NO: 463409 - DNA, 30 bp, Artificial Sequence
  Synthetic oligonucleotide
tatatcgctaaagggttcgggtacatgcaa

SEQ ID NO: 463410 - DNA, 30 bp, Artificial Sequence
  Synthetic oligonucleotide
agcattcctgtcgatttggttggcatgcaa

SEQ ID NO: 463411 - DNA, 30 bp, Artificial Sequence
  Synthetic oligonucleotide
gagccacggtgtactaagggtgagatgcaa

SEQ ID NO: 463412 - DNA, 30 bp, Artificial Sequence
  Synthetic oligonucleotide
gagcgaccagtggtaagaattacgatgcaa

SEQ ID NO: 463413 - DNA, 30 bp, Artificial Sequence
  Synthetic oligonucleotide
ccttcacataaccctatgatctgtatgcaa

SEQ ID NO: 463414 - DNA, 30 bp, Artificial Sequence
  Synthetic oligonucleotide
accgggtcggggtcatccccttttatgcaa

SEQ ID NO: 463415 - DNA, 30 bp, Artificial Sequence
  Synthetic oligonucleotide
tctttcgactatcacggatagacactgcaa

SEQ ID NO: 463416 - DNA, 30 bp, Artificial Sequence
  Synthetic oligonucleotide
tttttgagtccaatccatggcagactgcaa

SEQ ID NO: 463417 - DNA, 30 bp, Artificial Sequence
  Synthetic oligonucleotide
gtggcccctcactggccactgagactgcaa

SEQ ID NO: 463418 - DNA, 30 bp, Artificial Sequence
  Synthetic oligonucleotide
aggagggccatcgccttttcgacgctgcaa

SEQ ID NO: 463419 - DNA, 30 bp, Artificial Sequence
  Synthetic oligonucleotide
tcgggttttctccgaaagtgacctctgcaa

SEQ ID NO: 463420 - DNA, 30 bp, Artificial Sequence
  Synthetic oligonucleotide
caggtacgctgtaaattcatgtacgtgcaa

SEQ ID NO: 463421 - DNA, 30 bp, Artificial Sequence
  Synthetic oligonucleotide
ggatagggatgggttcaataacccgtgcaa

SEQ ID NO: 463422 - DNA, 30 bp, Artificial Sequence
  Synthetic oligonucleotide
aatacaattcgcgcggtcgcacgggtgcaa

SEQ ID NO: 463423 - DNA, 30 bp, Artificial Sequence
  Synthetic oligonucleotide
ggtagcgtttctatttaggttggggtgcaa

SEQ ID NO: 463424 - DNA, 30 bp, Artificial Sequence
  Synthetic oligonucleotide
cgggcgcggttttaggttatgactgtgcaa

SEQ ID NO: 463425 - DNA, 30 bp, Artificial Sequence
  Synthetic oligonucleotide
cccaatagtacaagcggatagggattgcaa

SEQ ID NO: 463426 - DNA, 30 bp, Artificial Sequence
  Synthetic oligonucleotide
catattttggggatctaactttgattgcaa

SEQ ID NO: 463427 - DNA, 30 bp, Artificial Sequence
  Synthetic oligonucleotide
gaattaattttagtaacaggcaacttgcaa

SEQ ID NO: 463428 - DNA, 30 bp, Artificial Sequence
  Synthetic oligonucleotide
tttctgcgacacagtgccagatggttgcaa

SEQ ID NO: 463429 - DNA, 30 bp, Artificial Sequence
  Synthetic oligonucleotide
tgaaaggatccgtgagcaatctggttgcaa

SEQ ID NO: 463430 - DNA, 30 bp, Artificial Sequence
  Synthetic oligonucleotide
agaagttcatgatttcgactatatttgcaa

SEQ ID NO: 463431 - DNA, 30 bp, Artificial Sequence
  Synthetic oligonucleotide
gctagtggatagattatagtttttttgcaa

SEQ ID NO: 463432 - DNA, 30 bp, Artificial Sequence
  Synthetic oligonucleotide
cgcgtatttatcagtacgggataaaatcaa

SEQ ID NO: 463433 - DNA, 30 bp, Artificial Sequence
  Synthetic oligonucleotide
cctgaatattctttgtccaagtccaatcaa

SEQ ID NO: 463434 - DNA, 30 bp, Artificial Sequence
  Synthetic oligonucleotide
gcgagagttctattaggtatgcgcaatcaa

SEQ ID NO: 463435 - DNA, 30 bp, Artificial Sequence
  Synthetic oligonucleotide
agtgtaatgcgcgcactgtatgagaatcaa

SEQ ID NO: 463436 - DNA, 30 bp, Artificial Sequence
  Synthetic oligonucleotide
cgttttccaataaggccgacctataatcaa

SEQ ID NO: 463437 - DNA, 30 bp, Artificial Sequence
  Synthetic oligonucleotide
ttgttataggtaatttgttagactaatcaa

SEQ ID NO: 463438 - DNA, 30 bp, Artificial Sequence
  Synthetic oligonucleotide
gattgagatggggagagtagcattaatcaa

SEQ ID NO: 463439 - DNA, 30 bp, Artificial Sequence
  Synthetic oligonucleotide
cgaaacgtccagatgccagcttgacatcaa

SEQ ID NO: 463440 - DNA, 30 bp, Artificial Sequence
  Synthetic oligonucleotide
tgtcgaccaccgcaggccattacgcatcaa

SEQ ID NO: 463441 - DNA, 30 bp, Artificial Sequence
  Synthetic oligonucleotide
actactctctaatgtgcgaggtcgcatcaa

SEQ ID NO: 463442 - DNA, 30 bp, Artificial Sequence
  Synthetic oligonucleotide
aacgccccaggcgagtcaagttcgcatcaa

SEQ ID NO: 463443 - DNA, 30 bp, Artificial Sequence
  Synthetic oligonucleotide
gtacgacattgatcgtaactgcggcatcaa

SEQ ID NO: 463444 - DNA, 30 bp, Artificial Sequence
  Synthetic oligonucleotide
cgctgtccgagatcaccttcgtggcatcaa

SEQ ID NO: 463445 - DNA, 30 bp, Artificial Sequence
  Synthetic oligonucleotide
caactatgtgccagtgacggagttcatcaa

SEQ ID NO: 463446 - DNA, 30 bp, Artificial Sequence
  Synthetic oligonucleotide
aattgtgagggaggtctgacacgagatcaa

SEQ ID NO: 463447 - DNA, 30 bp, Artificial Sequence
  Synthetic oligonucleotide
aaatggtgccctgttttcgcatgagatcaa

SEQ ID NO: 463448 - DNA, 30 bp, Artificial Sequence
  Synthetic oligonucleotide
tctcaattggtggggccctccatggatcaa

SEQ ID NO: 463449 - DNA, 30 bp, Artificial Sequence
  Synthetic oligonucleotide
cctttcgaaatgccggtgggaggtgatcaa

SEQ ID NO: 463450 - DNA, 30 bp, Artificial Sequence
  Synthetic oligonucleotide
ccttcgaactccccgaaggtacttgatcaa

SEQ ID NO: 463451 - DNA, 30 bp, Artificial Sequence
  Synthetic oligonucleotide
caactatgtgaatgcgtgtacatatatcaa

SEQ ID NO: 463452 - DNA, 30 bp, Artificial Sequence
  Synthetic oligonucleotide
atttttgaggacggtttacacttatatcaa

SEQ ID NO: 463453 - DNA, 30 bp, Artificial Sequence
  Synthetic oligonucleotide
tgagcccgcacaataatcactcactatcaa

SEQ ID NO: 463454 - DNA, 30 bp, Artificial Sequence
  Synthetic oligonucleotide
tccaggagcctatcgacctacgattatcaa

SEQ ID NO: 463455 - DNA, 30 bp, Artificial Sequence
  Synthetic oligonucleotide
ctcgtacgataagctcgtttctaaactcaa

SEQ ID NO: 463456 - DNA, 30 bp, Artificial Sequence
  Synthetic oligonucleotide
aaatcacgcttttccgatatgagaactcaa

SEQ ID NO: 463457 - DNA, 30 bp, Artificial Sequence
  Synthetic oligonucleotide
caattaatacagcagttagtgctgactcaa

SEQ ID NO: 463458 - DNA, 30 bp, Artificial Sequence
  Synthetic oligonucleotide
cgcttcgccatataggtattcacccctcaa

SEQ ID NO: 463459 - DNA, 30 bp, Artificial Sequence
  Synthetic oligonucleotide
ggcctccttcattctagctaatcccctcaa

SEQ ID NO: 463460 - DNA, 30 bp, Artificial Sequence
  Synthetic oligonucleotide
cgcagcacggatctgggaaatcgccctcaa

SEQ ID NO: 463461 - DNA, 30 bp, Artificial Sequence
  Synthetic oligonucleotide
agcagtatatgcagaggttcccggcctcaa

SEQ ID NO: 463462 - DNA, 30 bp, Artificial Sequence
  Synthetic oligonucleotide
gagtaattaggggctgctggtctgcctcaa

SEQ ID NO: 463463 - DNA, 30 bp, Artificial Sequence
  Synthetic oligonucleotide
agatccggtagcatttgtagctcagctcaa

SEQ ID NO: 463464 - DNA, 30 bp, Artificial Sequence
  Synthetic oligonucleotide
aattctatctgtaattgcgcggtagctcaa

SEQ ID NO: 463465 - DNA, 30 bp, Artificial Sequence
  Synthetic oligonucleotide
gctggagaaggcaagccggaattagctcaa

SEQ ID NO: 463466 - DNA, 30 bp, Artificial Sequence
  Synthetic oligonucleotide
gttaccgccacaggtctatccggcgctcaa

SEQ ID NO: 463467 - DNA, 30 bp, Artificial Sequence
  Synthetic oligonucleotide
cagcctaggaatttacgtatttgcgctcaa

SEQ ID NO: 463468 - DNA, 30 bp, Artificial Sequence
  Synthetic oligonucleotide
actgctatattcaagtttggcctcgctcaa

SEQ ID NO: 463469 - DNA, 30 bp, Artificial Sequence
  Synthetic oligonucleotide
aaacatgaatgtgctaaatgtaaggctcaa

SEQ ID NO: 463470 - DNA, 30 bp, Artificial Sequence
  Synthetic oligonucleotide
tattgacaggttgggattatggaggctcaa

SEQ ID NO: 463471 - DNA, 30 bp, Artificial Sequence
  Synthetic oligonucleotide
ttaggatggtcttctagttcggtggctcaa

SEQ ID NO: 463472 - DNA, 30 bp, Artificial Sequence
  Synthetic oligonucleotide
ggtttcatcaagacgattgatttggctcaa

SEQ ID NO: 463473 - DNA, 30 bp, Artificial Sequence
  Synthetic oligonucleotide
tcattttaaaaggccagcttgacgtctcaa

SEQ ID NO: 463474 - DNA, 30 bp, Artificial Sequence
  Synthetic oligonucleotide
agctttcgactttggctattattttctcaa

SEQ ID NO: 463475 - DNA, 30 bp, Artificial Sequence
  Synthetic oligonucleotide
acttccaggaatattgcttttttttctcaa

SEQ ID NO: 463476 - DNA, 30 bp, Artificial Sequence
  Synthetic oligonucleotide
ggtttctattgggacacttgcggaagtcaa

SEQ ID NO: 463477 - DNA, 30 bp, Artificial Sequence
  Synthetic oligonucleotide
cgcttggcaccaacaggctatcgcagtcaa

SEQ ID NO: 463478 - DNA, 30 bp, Artificial Sequence
  Synthetic oligonucleotide
gtattagtcggatctgcgatcccgagtcaa

SEQ ID NO: 463479 - DNA, 30 bp, Artificial Sequence
  Synthetic oligonucleotide
aattccgtgccctgtccgatgaggagtcaa

SEQ ID NO: 463480 - DNA, 30 bp, Artificial Sequence
  Synthetic oligonucleotide
tatttcagttggagtatagtgttgagtcaa

SEQ ID NO: 463481 - DNA, 30 bp, Artificial Sequence
  Synthetic oligonucleotide
ttcacttttggacagccattccctagtcaa

SEQ ID NO: 463482 - DNA, 30 bp, Artificial Sequence
  Synthetic oligonucleotide
gttggtaatttcgattgtagttttagtcaa

SEQ ID NO: 463483 - DNA, 30 bp, Artificial Sequence
  Synthetic oligonucleotide
aggcctaacacgctcctcgaatgacgtcaa

SEQ ID NO: 463484 - DNA, 30 bp, Artificial Sequence
  Synthetic oligonucleotide
gcaagtatttttcgccaatagatacgtcaa

SEQ ID NO: 463485 - DNA, 30 bp, Artificial Sequence
  Synthetic oligonucleotide
gtgaccgcgggccgtcacagatcccgtcaa

SEQ ID NO: 463486 - DNA, 30 bp, Artificial Sequence
  Synthetic oligonucleotide
gcagccagatagatttacgagtctcgtcaa

SEQ ID NO: 463487 - DNA, 30 bp, Artificial Sequence
  Synthetic oligonucleotide
tgttgtatgtcagaattcacgggtcgtcaa

SEQ ID NO: 463488 - DNA, 30 bp, Artificial Sequence
  Synthetic oligonucleotide
ctcttgagagtgataattttgtgaggtcaa

SEQ ID NO: 463489 - DNA, 30 bp, Artificial Sequence
  Synthetic oligonucleotide
ttgggccccatgcgaccaagcaacggtcaa

SEQ ID NO: 463490 - DNA, 30 bp, Artificial Sequence
  Synthetic oligonucleotide
tgacaatactgcgcgttaaattacggtcaa

SEQ ID NO: 463491 - DNA, 30 bp, Artificial Sequence
  Synthetic oligonucleotide
taacaggtggcttcccggtcccgcggtcaa

SEQ ID NO: 463492 - DNA, 30 bp, Artificial Sequence
  Synthetic oligonucleotide
catcttctgcagccccctgttccgggtcaa

SEQ ID NO: 463493 - DNA, 30 bp, Artificial Sequence
  Synthetic oligonucleotide
aaaaagttcgggcttatgcgagggggtcaa

SEQ ID NO: 463494 - DNA, 30 bp, Artificial Sequence
  Synthetic oligonucleotide
aactcgtattgctttgcggggtggggtcaa

SEQ ID NO: 463495 - DNA, 30 bp, Artificial Sequence
  Synthetic oligonucleotide
tttcgaacataggggcctatgccatgtcaa

SEQ ID NO: 463496 - DNA, 30 bp, Artificial Sequence
  Synthetic oligonucleotide
gaacacgcttggtcggggcgacgctgtcaa

SEQ ID NO: 463497 - DNA, 30 bp, Artificial Sequence
  Synthetic oligonucleotide
ttcagataaagagctagtcgtatctgtcaa

SEQ ID NO: 463498 - DNA, 30 bp, Artificial Sequence
  Synthetic oligonucleotide
ggtcttttagttgttccaatgcagtgtcaa

SEQ ID NO: 463499 - DNA, 30 bp, Artificial Sequence
  Synthetic oligonucleotide
tgatatcctgctatatatccgctttgtcaa

SEQ ID NO: 463500 - DNA, 30 bp, Artificial Sequence
  Synthetic oligonucleotide
cgcgcgcagttgaaaaggtcctgaattcaa

SEQ ID NO: 463501 - DNA, 30 bp, Artificial Sequence
  Synthetic oligonucleotide
tatatctcgattggcaaattgtgaattcaa

SEQ ID NO: 463502 - DNA, 30 bp, Artificial Sequence
  Synthetic oligonucleotide
gaatcactatcggctagattccggattcaa

SEQ ID NO: 463503 - DNA, 30 bp, Artificial Sequence
  Synthetic oligonucleotide
gctggcggctttcagttggcgttgattcaa

SEQ ID NO: 463504 - DNA, 30 bp, Artificial Sequence
  Synthetic oligonucleotide
tactaattacattggtgaacacgtattcaa

SEQ ID NO: 463505 - DNA, 30 bp, Artificial Sequence
  Synthetic oligonucleotide
cactaatgtgttctcactattaggcttcaa

SEQ ID NO: 463506 - DNA, 30 bp, Artificial Sequence
  Synthetic oligonucleotide
tggctggtggcctcccactgggggcttcaa

SEQ ID NO: 463507 - DNA, 30 bp, Artificial Sequence
  Synthetic oligonucleotide
tagcataattcatccccgaagatgcttcaa

SEQ ID NO: 463508 - DNA, 30 bp, Artificial Sequence
  Synthetic oligonucleotide
gtgtcgattttaaacctaggtcatcttcaa

SEQ ID NO: 463509 - DNA, 30 bp, Artificial Sequence
  Synthetic oligonucleotide
gctcctcgaacagcctatcaacgagttcaa

SEQ ID NO: 463510 - DNA, 30 bp, Artificial Sequence
  Synthetic oligonucleotide
cagtattgggcggttattaaacacgttcaa

SEQ ID NO: 463511 - DNA, 30 bp, Artificial Sequence
  Synthetic oligonucleotide
gtatcttcttctgaactactaaccgttcaa

SEQ ID NO: 463512 - DNA, 30 bp, Artificial Sequence
  Synthetic oligonucleotide
ggaatgattagtcggtttgctcgcgttcaa

SEQ ID NO: 463513 - DNA, 30 bp, Artificial Sequence
  Synthetic oligonucleotide
tgttagcagggcattaattgcaaggttcaa

SEQ ID NO: 463514 - DNA, 30 bp, Artificial Sequence
  Synthetic oligonucleotide
aattctagttcgtaagcggttcaggttcaa

SEQ ID NO: 463515 - DNA, 30 bp, Artificial Sequence
  Synthetic oligonucleotide
tttcgtgttacagcatggggtcctgttcaa

SEQ ID NO: 463516 - DNA, 30 bp, Artificial Sequence
  Synthetic oligonucleotide
caatttgttgcgaaggaggagcaatttcaa

SEQ ID NO: 463517 - DNA, 30 bp, Artificial Sequence
  Synthetic oligonucleotide
tttgaattgtcagttataagatcatttcaa

SEQ ID NO: 463518 - DNA, 30 bp, Artificial Sequence
  Synthetic oligonucleotide
ggattctattgcgcctcatcggactttcaa

SEQ ID NO: 463519 - DNA, 30 bp, Artificial Sequence
  Synthetic oligonucleotide
taaaagttagataaggccgcacgctttcaa

SEQ ID NO: 463520 - DNA, 30 bp, Artificial Sequence
  Synthetic oligonucleotide
tcgaacaacttttatttttgcatctttcaa

SEQ ID NO: 463521 - DNA, 30 bp, Artificial Sequence
  Synthetic oligonucleotide
caggataagcgcggagcatagatctttcaa

SEQ ID NO: 463522 - DNA, 30 bp, Artificial Sequence
  Synthetic oligonucleotide
gaatttgggttgatagctggctcgtttcaa

SEQ ID NO: 463523 - DNA, 30 bp, Artificial Sequence
  Synthetic oligonucleotide
atgacctggaggcgtaacccaaggtttcaa

SEQ ID NO: 463524 - DNA, 30 bp, Artificial Sequence
  Synthetic oligonucleotide
cttggccattgtatgatacaacattttcaa

SEQ ID NO: 463525 - DNA, 30 bp, Artificial Sequence
  Synthetic oligonucleotide
gtttcataaaccaagacggtgacttttcaa

SEQ ID NO: 463526 - DNA, 30 bp, Artificial Sequence
  Synthetic oligonucleotide
ttgtatcgatgaggtttttgcgtttttcaa

SEQ ID NO: 463527 - DNA, 30 bp, Artificial Sequence
  Synthetic oligonucleotide
cgttcttgtcaatcacggagcaaaaaagaa

SEQ ID NO: 463528 - DNA, 30 bp, Artificial Sequence
  Synthetic oligonucleotide
gcacttataatttcaaatatggaaaaagaa

SEQ ID NO: 463529 - DNA, 30 bp, Artificial Sequence
  Synthetic oligonucleotide
ttcaattagtgccgtggagactcaaaagaa

SEQ ID NO: 463530 - DNA, 30 bp, Artificial Sequence
  Synthetic oligonucleotide
gggggtattcaaggtcaaaatccgaaagaa

SEQ ID NO: 463531 - DNA, 30 bp, Artificial Sequence
  Synthetic oligonucleotide
taaccgaggagcgccgccatggcgaaagaa

SEQ ID NO: 463532 - DNA, 30 bp, Artificial Sequence
  Synthetic oligonucleotide
attcttgtgtttacggagaattggaaagaa

SEQ ID NO: 463533 - DNA, 30 bp, Artificial Sequence
  Synthetic oligonucleotide
tagtcgatccgcagaacggtatataaagaa

SEQ ID NO: 463534 - DNA, 30 bp, Artificial Sequence
  Synthetic oligonucleotide
ttcccttcaaccggacctgttgctaaagaa

SEQ ID NO: 463535 - DNA, 30 bp, Artificial Sequence
  Synthetic oligonucleotide
caatggcaaaccgaaataaggtctaaagaa

SEQ ID NO: 463536 - DNA, 30 bp, Artificial Sequence
  Synthetic oligonucleotide
gcttggtggtcacatgacccagtacaagaa

SEQ ID NO: 463537 - DNA, 30 bp, Artificial Sequence
  Synthetic oligonucleotide
tatactggatgtagcgatcaggcataagaa

SEQ ID NO: 463538 - DNA, 30 bp, Artificial Sequence
  Synthetic oligonucleotide
atgattcaaaaccttagggcgttctaagaa

SEQ ID NO: 463539 - DNA, 30 bp, Artificial Sequence
  Synthetic oligonucleotide
acttaatactgttaattaagtttgtaagaa

SEQ ID NO: 463540 - DNA, 30 bp, Artificial Sequence
  Synthetic oligonucleotide
tttacgttgtatcaggataaccattaagaa

SEQ ID NO: 463541 - DNA, 30 bp, Artificial Sequence
  Synthetic oligonucleotide
agtattatttgatcgctaaatggttaagaa

SEQ ID NO: 463542 - DNA, 30 bp, Artificial Sequence
  Synthetic oligonucleotide
ttactttgtgccgctgttcgagaaacagaa

SEQ ID NO: 463543 - DNA, 30 bp, Artificial Sequence
  Synthetic oligonucleotide
atttcagacgtttctatcctggacacagaa

SEQ ID NO: 463544 - DNA, 30 bp, Artificial Sequence
  Synthetic oligonucleotide
aatctacacatcgtggaacactggacagaa

SEQ ID NO: 463545 - DNA, 30 bp, Artificial Sequence
  Synthetic oligonucleotide
aatagtcgtggaccgctggcacttacagaa

SEQ ID NO: 463546 - DNA, 30 bp, Artificial Sequence
  Synthetic oligonucleotide
tttaaatatacgagtattatggggccagaa

SEQ ID NO: 463547 - DNA, 29 bp, Artificial Sequence
  Synthetic oligonucleotide
gtatcattccgcgccagttccgtccagaa

SEQ ID NO: 463548 - DNA, 30 bp, Artificial Sequence
  Synthetic oligonucleotide
cccgtggtgcctgtttattcagaagcagaa

SEQ ID NO: 463549 - DNA, 30 bp, Artificial Sequence
  Synthetic oligonucleotide
tgaggtaaccggcgtatcgctgcagcagaa

SEQ ID NO: 463550 - DNA, 30 bp, Artificial Sequence
  Synthetic oligonucleotide
ccttggctaccccttttggttcgcgcagaa

SEQ ID NO: 463551 - DNA, 30 bp, Artificial Sequence
  Synthetic oligonucleotide
cgtatgtcttgtaggcacgatgttgcagaa

SEQ ID NO: 463552 - DNA, 30 bp, Artificial Sequence
  Synthetic oligonucleotide
gtcaaaattcttatactctttaactcagaa

SEQ ID NO: 463553 - DNA, 30 bp, Artificial Sequence
  Synthetic oligonucleotide
acttgaagaaatttttacctttactcagaa

SEQ ID NO: 463554 - DNA, 30 bp, Artificial Sequence
  Synthetic oligonucleotide
cacaatcagatccggggctttctctcagaa

SEQ ID NO: 463555 - DNA, 30 bp, Artificial Sequence
  Synthetic oligonucleotide
gttttgtataaattagctgggccgtcagaa

SEQ ID NO: 463556 - DNA, 30 bp, Artificial Sequence
  Synthetic oligonucleotide
aagtttttgatgtttcccatcgattcagaa

SEQ ID NO: 463557 - DNA, 30 bp, Artificial Sequence
  Synthetic oligonucleotide
ggttcaagattcgcaatggccttttcagaa

SEQ ID NO: 463558 - DNA, 30 bp, Artificial Sequence
  Synthetic oligonucleotide
agggtatggattagttgtgtgaacagagaa

SEQ ID NO: 463559 - DNA, 30 bp, Artificial Sequence
  Synthetic oligonucleotide
ggtcccggatgagcaggcatcggcagagaa

SEQ ID NO: 463560 - DNA, 30 bp, Artificial Sequence
  Synthetic oligonucleotide
aggcacgtttgtcatgtcccaacgagagaa

SEQ ID NO: 463561 - DNA, 30 bp, Artificial Sequence
  Synthetic oligonucleotide
gagttcagtaatttcgaatgcacgcgagaa

SEQ ID NO: 463562 - DNA, 30 bp, Artificial Sequence
  Synthetic oligonucleotide
atacgctgacacgcgacgcgttcgcgagaa

SEQ ID NO: 463563 - DNA, 30 bp, Artificial Sequence
  Synthetic oligonucleotide
tcgtcatgcagggctccgatttcgcgagaa

SEQ ID NO: 463564 - DNA, 30 bp, Artificial Sequence
  Synthetic oligonucleotide
aactgtgacttctttacgtcagtgcgagaa

SEQ ID NO: 463565 - DNA, 30 bp, Artificial Sequence
  Synthetic oligonucleotide
tctacctcactattacgtcgcgacggagaa

SEQ ID NO: 463566 - DNA, 30 bp, Artificial Sequence
  Synthetic oligonucleotide
ttggtagaaactagtcaaacatacggagaa

SEQ ID NO: 463567 - DNA, 30 bp, Artificial Sequence
  Synthetic oligonucleotide
aagccaagttgggaccttggtaccggagaa

SEQ ID NO: 463568 - DNA, 30 bp, Artificial Sequence
  Synthetic oligonucleotide
ccgcggtttatattcgccgggcccggagaa

SEQ ID NO: 463569 - DNA, 30 bp, Artificial Sequence
  Synthetic oligonucleotide
atctatagccgcatatacataggcggagaa

SEQ ID NO: 463570 - DNA, 30 bp, Artificial Sequence
  Synthetic oligonucleotide
ggttgctcttctgaaagcttagagggagaa

SEQ ID NO: 463571 - DNA, 30 bp, Artificial Sequence
  Synthetic oligonucleotide
aaactagaccaaatatctactctgggagaa

SEQ ID NO: 463572 - DNA, 30 bp, Artificial Sequence
  Synthetic oligonucleotide
tcggaacttgctatcggtggcttgggagaa

SEQ ID NO: 463573 - DNA, 30 bp, Artificial Sequence
  Synthetic oligonucleotide
gatcaaagcaccgacgctaatttgggagaa

SEQ ID NO: 463574 - DNA, 30 bp, Artificial Sequence
  Synthetic oligonucleotide
cgcccttcagcgggtgagtccgctggagaa

SEQ ID NO: 463575 - DNA, 30 bp, Artificial Sequence
  Synthetic oligonucleotide
ccacatggttcaatggtattaattggagaa

SEQ ID NO: 463576 - DNA, 31 bp, Artificial Sequence
  Synthetic oligonucleotide
aaatcgcgtgtggcaccgaatggcatgagaa

SEQ ID NO: 463577 - DNA, 30 bp, Artificial Sequence
  Synthetic oligonucleotide
tctcatacgtataagaatgggcgatgagaa

SEQ ID NO: 463578 - DNA, 30 bp, Artificial Sequence
  Synthetic oligonucleotide
gcaatctgctgcgtgtagcatccgtgagaa

SEQ ID NO: 463579 - DNA, 30 bp, Artificial Sequence
  Synthetic oligonucleotide
ttgattgaaagcgagctctataaaatagaa

SEQ ID NO: 463580 - DNA, 30 bp, Artificial Sequence
  Synthetic oligonucleotide
actggatgttacttccgacgcataatagaa

SEQ ID NO: 463581 - DNA, 30 bp, Artificial Sequence
  Synthetic oligonucleotide
ccgacggatttccaccagagtctaatagaa

SEQ ID NO: 463582 - DNA, 30 bp, Artificial Sequence
  Synthetic oligonucleotide
gctccctcctcggttggtggaaggatagaa

SEQ ID NO: 463583 - DNA, 30 bp, Artificial Sequence
  Synthetic oligonucleotide
gcttccagtgtatttctaatcagtatagaa

SEQ ID NO: 463584 - DNA, 30 bp, Artificial Sequence
  Synthetic oligonucleotide
tcgctttttatcaggaacaacacgctagaa

SEQ ID NO: 463585 - DNA, 30 bp, Artificial Sequence
  Synthetic oligonucleotide
agtatgaatgtacggattagcttgctagaa

SEQ ID NO: 463586 - DNA, 30 bp, Artificial Sequence
  Synthetic oligonucleotide
attttttcaggtaagaacgcccttctagaa

SEQ ID NO: 463587 - DNA, 30 bp, Artificial Sequence
  Synthetic oligonucleotide
gccttcatgtctcaaaagacggaagtagaa

SEQ ID NO: 463588 - DNA, 30 bp, Artificial Sequence
  Synthetic oligonucleotide
ccagacccgatccgacgaagcatagtagaa

SEQ ID NO: 463589 - DNA, 30 bp, Artificial Sequence
  Synthetic oligonucleotide
gaaggcttcccgtttgatgctatagtagaa

SEQ ID NO: 463590 - DNA, 30 bp, Artificial Sequence
  Synthetic oligonucleotide
gacctcgagttgagctgggaatacgtagaa

SEQ ID NO: 463591 - DNA, 30 bp, Artificial Sequence
  Synthetic oligonucleotide
ggtgtcgtcatttttcttaacggcgtagaa

SEQ ID NO: 463592 - DNA, 30 bp, Artificial Sequence
  Synthetic oligonucleotide
ccgtagacgtaacatgcttcgctcgtagaa

SEQ ID NO: 463593 - DNA, 30 bp, Artificial Sequence
  Synthetic oligonucleotide
aatctacatagaatgggccgccgggtagaa

SEQ ID NO: 463594 - DNA, 30 bp, Artificial Sequence
  Synthetic oligonucleotide
ctccctatcttttttcaatcattggtagaa

SEQ ID NO: 463595 - DNA, 30 bp, Artificial Sequence
  Synthetic oligonucleotide
catgttcgacgtcagctacgcggattagaa

SEQ ID NO: 463596 - DNA, 30 bp, Artificial Sequence
  Synthetic oligonucleotide
gaatagtctacacagggtcatggattagaa

SEQ ID NO: 463597 - DNA, 30 bp, Artificial Sequence
  Synthetic oligonucleotide
gtcccaggatcacggtattactgattagaa

SEQ ID NO: 463598 - DNA, 30 bp, Artificial Sequence
  Synthetic oligonucleotide
gggctcaggaaggccccaaacttcttagaa

SEQ ID NO: 463599 - DNA, 30 bp, Artificial Sequence
  Synthetic oligonucleotide
agacgaagcagctatcgagcatgaaacgaa

SEQ ID NO: 463600 - DNA, 30 bp, Artificial Sequence
  Synthetic oligonucleotide
gacaccttatatcgaccacggagcaacgaa

SEQ ID NO: 463601 - DNA, 30 bp, Artificial Sequence
  Synthetic oligonucleotide
gacctatgggggttagtacgcttcaacgaa

SEQ ID NO: 463602 - DNA, 30 bp, Artificial Sequence
  Synthetic oligonucleotide
gacttaaccgatgcgggttataagaacgaa

SEQ ID NO: 463603 - DNA, 30 bp, Artificial Sequence
  Synthetic oligonucleotide
agtcgccccggactcccgggtacgaacgaa

SEQ ID NO: 463604 - DNA, 30 bp, Artificial Sequence
  Synthetic oligonucleotide
tagggggacgtacaatgcgaccataacgaa

SEQ ID NO: 463605 - DNA, 30 bp, Artificial Sequence
  Synthetic oligonucleotide
cctactgttccgggtcctctgtataacgaa

SEQ ID NO: 463606 - DNA, 30 bp, Artificial Sequence
  Synthetic oligonucleotide
atgcgtcgtaagacttcccgctctaacgaa

SEQ ID NO: 463607 - DNA, 30 bp, Artificial Sequence
  Synthetic oligonucleotide
gctgcggtacactttgagcttcgtaacgaa

SEQ ID NO: 463608 - DNA, 30 bp, Artificial Sequence
  Synthetic oligonucleotide
gtcccgtagtcgaagcctgatggtaacgaa

SEQ ID NO: 463609 - DNA, 30 bp, Artificial Sequence
  Synthetic oligonucleotide
ccgctattttgcttcggtaaacaacacgaa

SEQ ID NO: 463610 - DNA, 30 bp, Artificial Sequence
  Synthetic oligonucleotide
tccttctttgcaagctccacctaacacgaa

SEQ ID NO: 463611 - DNA, 30 bp, Artificial Sequence
  Synthetic oligonucleotide
attatccgttttgcgtgaggtgtacacgaa

SEQ ID NO: 463612 - DNA, 30 bp, Artificial Sequence
  Synthetic oligonucleotide
ggcgcctgcattgtcgaactaatccacgaa

SEQ ID NO: 463613 - DNA, 30 bp, Artificial Sequence
  Synthetic oligonucleotide
aatttcagtatggcttatcccctccacgaa

SEQ ID NO: 463614 - DNA, 30 bp, Artificial Sequence
  Synthetic oligonucleotide
gaatgttataggcggatggacgcgcacgaa

SEQ ID NO: 463615 - DNA, 30 bp, Artificial Sequence
  Synthetic oligonucleotide
tagcgggctagaggctggcgggctcacgaa

SEQ ID NO: 463616 - DNA, 30 bp, Artificial Sequence
  Synthetic oligonucleotide
aattgtgagtttgagcaaaactttcacgaa

SEQ ID NO: 463617 - DNA, 30 bp, Artificial Sequence
  Synthetic oligonucleotide
cagggtcgtttatagtaaacaccagacgaa

SEQ ID NO: 463618 - DNA, 30 bp, Artificial Sequence
  Synthetic oligonucleotide
aatagaatgggtgatagaccagcagacgaa

SEQ ID NO: 463619 - DNA, 30 bp, Artificial Sequence
  Synthetic oligonucleotide
cggtttttcacaacttttttccgagacgaa

SEQ ID NO: 463620 - DNA, 30 bp, Artificial Sequence
  Synthetic oligonucleotide
gctttggggtgaaatgataaatgagacgaa

SEQ ID NO: 463621 - DNA, 30 bp, Artificial Sequence
  Synthetic oligonucleotide
agctgtttaacacctttcatgtaggacgaa

SEQ ID NO: 463622 - DNA, 30 bp, Artificial Sequence
  Synthetic oligonucleotide
gtagcgttgttccacccgtctcttgacgaa

SEQ ID NO: 463623 - DNA, 30 bp, Artificial Sequence
  Synthetic oligonucleotide
gtaccgaacggcgtagccgatttatacgaa

SEQ ID NO: 463624 - DNA, 30 bp, Artificial Sequence
  Synthetic oligonucleotide
tgcatcgttcccatcgcgtaagcgtacgaa

SEQ ID NO: 463625 - DNA, 30 bp, Artificial Sequence
  Synthetic oligonucleotide
tttggtatgaaccatttttcccggtacgaa

SEQ ID NO: 463626 - DNA, 30 bp, Artificial Sequence
  Synthetic oligonucleotide
ccgtctaacgcattcaaggatgtttacgaa

SEQ ID NO: 463627 - DNA, 30 bp, Artificial Sequence
  Synthetic oligonucleotide
gcccctacatcagtaggcgtataaaccgaa

SEQ ID NO: 463628 - DNA, 30 bp, Artificial Sequence
  Synthetic oligonucleotide
gggaggacggtccgcaacttggacaccgaa

SEQ ID NO: 463629 - DNA, 30 bp, Artificial Sequence
  Synthetic oligonucleotide
attccagggcttctgagcgttctcaccgaa

SEQ ID NO: 463630 - DNA, 30 bp, Artificial Sequence
  Synthetic oligonucleotide
atcgtcgtcatggatcttatgttcaccgaa

SEQ ID NO: 463631 - DNA, 30 bp, Artificial Sequence
  Synthetic oligonucleotide
tcgttgcaacagcaaaaaggtacacccgaa

SEQ ID NO: 463632 - DNA, 30 bp, Artificial Sequence
  Synthetic oligonucleotide
catggggagtctagggcgttggcgcccgaa

SEQ ID NO: 463633 - DNA, 30 bp, Artificial Sequence
  Synthetic oligonucleotide
cagctgaaatagccgatcagtccggccgaa

SEQ ID NO: 463634 - DNA, 30 bp, Artificial Sequence
  Synthetic oligonucleotide
gaccggggccgggtcgggttgatggccgaa

SEQ ID NO: 463635 - DNA, 30 bp, Artificial Sequence
  Synthetic oligonucleotide
aggtggtgctaacgcactataggatccgaa

SEQ ID NO: 463636 - DNA, 30 bp, Artificial Sequence
  Synthetic oligonucleotide
cccctggtatagtgcgacttaatatccgaa

SEQ ID NO: 463637 - DNA, 30 bp, Artificial Sequence
  Synthetic oligonucleotide
cggatttctatattcggccctgtctccgaa

SEQ ID NO: 463638 - DNA, 30 bp, Artificial Sequence
  Synthetic oligonucleotide
cagtgggctcggggctgcgatcggtccgaa

SEQ ID NO: 463639 - DNA, 30 bp, Artificial Sequence
  Synthetic oligonucleotide
tattccattgttccaatataggtgtccgaa

SEQ ID NO: 463640 - DNA, 30 bp, Artificial Sequence
  Synthetic oligonucleotide
atttgtcgcgctcaggtggaggaaagcgaa

SEQ ID NO: 463641 - DNA, 30 bp, Artificial Sequence
  Synthetic oligonucleotide
atttagacatgcgtggatgtcgccagcgaa

SEQ ID NO: 463642 - DNA, 30 bp, Artificial Sequence
  Synthetic oligonucleotide
cacatccgttgagggtagtctctcagcgaa

SEQ ID NO: 463643 - DNA, 30 bp, Artificial Sequence
  Synthetic oligonucleotide
ggggagagcagtcccctatgatagagcgaa

SEQ ID NO: 463644 - DNA, 30 bp, Artificial Sequence
  Synthetic oligonucleotide
tcctcgagacagcatacgttgctgagcgaa

SEQ ID NO: 463645 - DNA, 30 bp, Artificial Sequence
  Synthetic oligonucleotide
ggactccgggtaattcgctagcatagcgaa

SEQ ID NO: 463646 - DNA, 30 bp, Artificial Sequence
  Synthetic oligonucleotide
aattcttacgtcgaactgatcagacgcgaa

SEQ ID NO: 463647 - DNA, 30 bp, Artificial Sequence
  Synthetic oligonucleotide
agcctagaccatgcaccatgtggacgcgaa

SEQ ID NO: 463648 - DNA, 30 bp, Artificial Sequence
  Synthetic oligonucleotide
gctgtttcagtcggcctggtgtgccgcgaa

SEQ ID NO: 463649 - DNA, 30 bp, Artificial Sequence
  Synthetic oligonucleotide
gttcggtatggattctgattcttccgcgaa

SEQ ID NO: 463650 - DNA, 30 bp, Artificial Sequence
  Synthetic oligonucleotide
tatatgggcagctgcgcaaactcgcgcgaa

SEQ ID NO: 463651 - DNA, 30 bp, Artificial Sequence
  Synthetic oligonucleotide
acactgcgtgaaattcgcctcaaaggcgaa

SEQ ID NO: 463652 - DNA, 30 bp, Artificial Sequence
  Synthetic oligonucleotide
agggcgtaaaacatctgtgggccaggcgaa

SEQ ID NO: 463653 - DNA, 30 bp, Artificial Sequence
  Synthetic oligonucleotide
agctgtgttccactcccagtgtggggcgaa

SEQ ID NO: 463654 - DNA, 30 bp, Artificial Sequence
  Synthetic oligonucleotide
tattactgttgaggactcctttggggcgaa

SEQ ID NO: 463655 - DNA, 30 bp, Artificial Sequence
  Synthetic oligonucleotide
tatgagttgtgcataatatcagttggcgaa

SEQ ID NO: 463656 - DNA, 30 bp, Artificial Sequence
  Synthetic oligonucleotide
ttagaaagaggatcgtttgggccttgcgaa

SEQ ID NO: 463657 - DNA, 30 bp, Artificial Sequence
  Synthetic oligonucleotide
gggtcggattgctcttatagccgttgcgaa

SEQ ID NO: 463658 - DNA, 30 bp, Artificial Sequence
  Synthetic oligonucleotide
ttttcctgaccgtgtgatatactttgcgaa

SEQ ID NO: 463659 - DNA, 30 bp, Artificial Sequence
  Synthetic oligonucleotide
attagtctaacatacatttagcaaatcgaa

SEQ ID NO: 463660 - DNA, 30 bp, Artificial Sequence
  Synthetic oligonucleotide
ggggtaaccctattcgtttttgtaatcgaa

SEQ ID NO: 463661 - DNA, 30 bp, Artificial Sequence
  Synthetic oligonucleotide
ggagtctgtgtaataggaacccatatcgaa

SEQ ID NO: 463662 - DNA, 30 bp, Artificial Sequence
  Synthetic oligonucleotide
gtcaatggtatttcgtacctgcatatcgaa

SEQ ID NO: 463663 - DNA, 30 bp, Artificial Sequence
  Synthetic oligonucleotide
gcgttcgcttctgagtggggcgctatcgaa

SEQ ID NO: 463664 - DNA, 30 bp, Artificial Sequence
  Synthetic oligonucleotide
ttataatattacgagagtccaatactcgaa

SEQ ID NO: 463665 - DNA, 30 bp, Artificial Sequence
  Synthetic oligonucleotide
gtatagaatattataggtctaatactcgaa

SEQ ID NO: 463666 - DNA, 30 bp, Artificial Sequence
  Synthetic oligonucleotide
ttcccatgctagtagatacgaccgctcgaa

SEQ ID NO: 463667 - DNA, 30 bp, Artificial Sequence
  Synthetic oligonucleotide
tagttgagggtatgatgaatatctctcgaa

SEQ ID NO: 463668 - DNA, 30 bp, Artificial Sequence
  Synthetic oligonucleotide
tggattgaattgcggcgtacctcggtcgaa

SEQ ID NO: 463669 - DNA, 30 bp, Artificial Sequence
  Synthetic oligonucleotide
tgtctaaacagtcttgtggttagggtcgaa

SEQ ID NO: 463670 - DNA, 30 bp, Artificial Sequence
  Synthetic oligonucleotide
cgtcgcagaccctcagcttcgcctgtcgaa

SEQ ID NO: 463671 - DNA, 30 bp, Artificial Sequence
  Synthetic oligonucleotide
atactatcccaattgaagaagtctgtcgaa

SEQ ID NO: 463672 - DNA, 30 bp, Artificial Sequence
  Synthetic oligonucleotide
gggaaaagtaattcttcgattctattcgaa

SEQ ID NO: 463673 - DNA, 30 bp, Artificial Sequence
  Synthetic oligonucleotide
tatctgtgtaaacggggggtcgtattcgaa

SEQ ID NO: 463674 - DNA, 30 bp, Artificial Sequence
  Synthetic oligonucleotide
tagtacaatacatgatagtgtcagttcgaa

SEQ ID NO: 463675 - DNA, 30 bp, Artificial Sequence
  Synthetic oligonucleotide
gaagtcaccatcatggaatcagcgttcgaa

SEQ ID NO: 463676 - DNA, 30 bp, Artificial Sequence
  Synthetic oligonucleotide
catcctttcagtccgggttccggtttcgaa

SEQ ID NO: 463677 - DNA, 30 bp, Artificial Sequence
  Synthetic oligonucleotide
gacccagcttcgagatcacttccaaaggaa

SEQ ID NO: 463678 - DNA, 30 bp, Artificial Sequence
  Synthetic oligonucleotide
ggcgcatttgtgtggtctcccataaaggaa

SEQ ID NO: 463679 - DNA, 30 bp, Artificial Sequence
  Synthetic oligonucleotide
tggagtggtaattgccgcggtcttaaggaa

SEQ ID NO: 463680 - DNA, 30 bp, Artificial Sequence
  Synthetic oligonucleotide
gcgaccgggatagaaagcccggtacaggaa

SEQ ID NO: 463681 - DNA, 30 bp, Artificial Sequence
  Synthetic oligonucleotide
attgcaagaacgttcggcgcagcccaggaa

SEQ ID NO: 463682 - DNA, 30 bp, Artificial Sequence
  Synthetic oligonucleotide
atcccgatacctcggcgccctgcccaggaa

SEQ ID NO: 463683 - DNA, 30 bp, Artificial Sequence
  Synthetic oligonucleotide
ctacagggtattaacactctgggccaggaa

SEQ ID NO: 463684 - DNA, 30 bp, Artificial Sequence
  Synthetic oligonucleotide
ggcttaacaataataagctaagcgcaggaa

SEQ ID NO: 463685 - DNA, 30 bp, Artificial Sequence
  Synthetic oligonucleotide
gttctaactgccttgactcagaggcaggaa

SEQ ID NO: 463686 - DNA, 30 bp, Artificial Sequence
  Synthetic oligonucleotide
cgattcgagaaagtgtgtgtaggtcaggaa

SEQ ID NO: 463687 - DNA, 30 bp, Artificial Sequence
  Synthetic oligonucleotide
acctatgtcagcgcctcaggagttcaggaa

SEQ ID NO: 463688 - DNA, 30 bp, Artificial Sequence
  Synthetic oligonucleotide
tgcaatgcaactcagacaaaggcagaggaa

SEQ ID NO: 463689 - DNA, 30 bp, Artificial Sequence
  Synthetic oligonucleotide
catccatcagcgggtctctctccggaggaa

SEQ ID NO: 463690 - DNA, 30 bp, Artificial Sequence
  Synthetic oligonucleotide
ttaaaacccgttctggggtcttcggaggaa

SEQ ID NO: 463691 - DNA, 30 bp, Artificial Sequence
  Synthetic oligonucleotide
tttcatttgacgccgggaggtcatgaggaa

SEQ ID NO: 463692 - DNA, 30 bp, Artificial Sequence
  Synthetic oligonucleotide
acgcattcctgggcacccttagcataggaa

SEQ ID NO: 463693 - DNA, 30 bp, Artificial Sequence
  Synthetic oligonucleotide
attaaaacactataggggcacgcataggaa

SEQ ID NO: 463694 - DNA, 30 bp, Artificial Sequence
  Synthetic oligonucleotide
taacgtgtagatgggcgtctgtcataggaa

SEQ ID NO: 463695 - DNA, 30 bp, Artificial Sequence
  Synthetic oligonucleotide
gcgataccaagtagcggtacactataggaa

SEQ ID NO: 463696 - DNA, 31 bp, Artificial Sequence
  Synthetic oligonucleotide
tagtttgttacgtagaaaagaacactaggaa

SEQ ID NO: 463697 - DNA, 30 bp, Artificial Sequence
  Synthetic oligonucleotide
ccgcccctcccccgatcacaagtctaggaa

SEQ ID NO: 463698 - DNA, 30 bp, Artificial Sequence
  Synthetic oligonucleotide
gtctcttacaaatgctagagggtctaggaa

SEQ ID NO: 463699 - DNA, 29 bp, Artificial Sequence
  Synthetic oligonucleotide
acgatttcgaatgggtcgcagggtaggaa

SEQ ID NO: 463700 - DNA, 30 bp, Artificial Sequence
  Synthetic oligonucleotide
ttagctgcgctgttcgagggtccttaggaa

SEQ ID NO: 463701 - DNA, 30 bp, Artificial Sequence
  Synthetic oligonucleotide
tcgcacactcttacggtggttccttaggaa

SEQ ID NO: 463702 - DNA, 30 bp, Artificial Sequence
  Synthetic oligonucleotide
tgtccgccgcgaggcagaagtccaacggaa

SEQ ID NO: 463703 - DNA, 30 bp, Artificial Sequence
  Synthetic oligonucleotide
caaaccgtgggagaaagacagataacggaa

SEQ ID NO: 463704 - DNA, 30 bp, Artificial Sequence
  Synthetic oligonucleotide
tagtacggtgggccgcacatgtccacggaa

SEQ ID NO: 463705 - DNA, 30 bp, Artificial Sequence
  Synthetic oligonucleotide
ggggtggttatgcccaatgccttcacggaa

SEQ ID NO: 463706 - DNA, 30 bp, Artificial Sequence
  Synthetic oligonucleotide
cggtaacaagaaacttaacttcagacggaa

SEQ ID NO: 463707 - DNA, 30 bp, Artificial Sequence
  Synthetic oligonucleotide
tccggcataccgcgcacataaaggacggaa

SEQ ID NO: 463708 - DNA, 30 bp, Artificial Sequence
  Synthetic oligonucleotide
tcctagtaagatttcagcgacttgacggaa

SEQ ID NO: 463709 - DNA, 30 bp, Artificial Sequence
  Synthetic oligonucleotide
ctagatcctcgacgtcacatgttgacggaa

SEQ ID NO: 463710 - DNA, 30 bp, Artificial Sequence
  Synthetic oligonucleotide
tgaatcgtactggcgcaatgcggtacggaa

SEQ ID NO: 463711 - DNA, 30 bp, Artificial Sequence
  Synthetic oligonucleotide
atgggaacggcacattcacctgttacggaa

SEQ ID NO: 463712 - DNA, 30 bp, Artificial Sequence
  Synthetic oligonucleotide
ccgtatatattctatagttgttcaccggaa

SEQ ID NO: 463713 - DNA, 30 bp, Artificial Sequence
  Synthetic oligonucleotide
gattatgctaaatgagtattcgcgccggaa

SEQ ID NO: 463714 - DNA, 30 bp, Artificial Sequence
  Synthetic oligonucleotide
ccgcagcaactcctaccgataaggccggaa

SEQ ID NO: 463715 - DNA, 30 bp, Artificial Sequence
  Synthetic oligonucleotide
aagatgactctacgcaggtgaagagcggaa

SEQ ID NO: 463716 - DNA, 30 bp, Artificial Sequence
  Synthetic oligonucleotide
atttgaccgaccgcaccatatatcgcggaa

SEQ ID NO: 463717 - DNA, 30 bp, Artificial Sequence
  Synthetic oligonucleotide
tccgctgagtgtaactcgtgtccggcggaa

SEQ ID NO: 463718 - DNA, 30 bp, Artificial Sequence
  Synthetic oligonucleotide
gagccgttgatatacctacagctggcggaa

SEQ ID NO: 463719 - DNA, 30 bp, Artificial Sequence
  Synthetic oligonucleotide
aagggcttgccctttgaagaagtggcggaa

SEQ ID NO: 463720 - DNA, 30 bp, Artificial Sequence
  Synthetic oligonucleotide
gctcattccctactctgattgcttgcggaa

SEQ ID NO: 463721 - DNA, 30 bp, Artificial Sequence
  Synthetic oligonucleotide
ccactttcgtgtgattccgcccgatcggaa

SEQ ID NO: 463722 - DNA, 30 bp, Artificial Sequence
  Synthetic oligonucleotide
accaataagggggaagacagcttctcggaa

SEQ ID NO: 463723 - DNA, 30 bp, Artificial Sequence
  Synthetic oligonucleotide
aatcttttaatgtaaatgtcacgttcggaa

SEQ ID NO: 463724 - DNA, 30 bp, Artificial Sequence
  Synthetic oligonucleotide
gacatctctagggctgcgaggcaaagggaa

SEQ ID NO: 463725 - DNA, 30 bp, Artificial Sequence
  Synthetic oligonucleotide
accgacgagcgaccgcgaaatgtaagggaa

SEQ ID NO: 463726 - DNA, 30 bp, Artificial Sequence
  Synthetic oligonucleotide
tgaggttgtaagatgtatagaatcagggaa

SEQ ID NO: 463727 - DNA, 30 bp, Artificial Sequence
  Synthetic oligonucleotide
gctgtgtggttcaatgttctggtcagggaa

SEQ ID NO: 463728 - DNA, 30 bp, Artificial Sequence
  Synthetic oligonucleotide
gtagcaaaaccgggcatgcagcagagggaa

SEQ ID NO: 463729 - DNA, 30 bp, Artificial Sequence
  Synthetic oligonucleotide
caactagtaccctccctaaaggagagggaa

SEQ ID NO: 463730 - DNA, 30 bp, Artificial Sequence
  Synthetic oligonucleotide
ttcaacattgcttagggtcgggcgagggaa

SEQ ID NO: 463731 - DNA, 30 bp, Artificial Sequence
  Synthetic oligonucleotide
atcaaatccgtaatagtgtcagggagggaa

SEQ ID NO: 463732 - DNA, 30 bp, Artificial Sequence
  Synthetic oligonucleotide
gtttcgacaacgggacattcggggagggaa

SEQ ID NO: 463733 - DNA, 30 bp, Artificial Sequence
  Synthetic oligonucleotide
cttaggtatgtgcagcctgtggggagggaa

SEQ ID NO: 463734 - DNA, 30 bp, Artificial Sequence
  Synthetic oligonucleotide
ttggctttatttggttgtggaacacgggaa

SEQ ID NO: 463735 - DNA, 30 bp, Artificial Sequence
  Synthetic oligonucleotide
tgtataaatcttgtggataattcgcgggaa

SEQ ID NO: 463736 - DNA, 30 bp, Artificial Sequence
  Synthetic oligonucleotide
ataatgcgggtatagagttttttgcgggaa

SEQ ID NO: 463737 - DNA, 30 bp, Artificial Sequence
  Synthetic oligonucleotide
cgcaagatttcacggtctctagttcgggaa

SEQ ID NO: 463738 - DNA, 30 bp, Artificial Sequence
  Synthetic oligonucleotide
atgagtaccagacgggtggtgtgaggggaa

SEQ ID NO: 463739 - DNA, 30 bp, Artificial Sequence
  Synthetic oligonucleotide
gtgtgtcggatgtcggttggcttaggggaa

SEQ ID NO: 463740 - DNA, 30 bp, Artificial Sequence
  Synthetic oligonucleotide
gaattttcccttgctaagatacacggggaa

SEQ ID NO: 463741 - DNA, 30 bp, Artificial Sequence
  Synthetic oligonucleotide
tggagtggcaagaaggcaaggcacggggaa

SEQ ID NO: 463742 - DNA, 30 bp, Artificial Sequence
  Synthetic oligonucleotide
ataggcatctatcagacttatcttggggaa

SEQ ID NO: 463743 - DNA, 30 bp, Artificial Sequence
  Synthetic oligonucleotide
ccgcaacggtacaccgtgttaacatgggaa

SEQ ID NO: 463744 - DNA, 30 bp, Artificial Sequence
  Synthetic oligonucleotide
actaccgcacaaccaagatctagatgggaa

SEQ ID NO: 463745 - DNA, 30 bp, Artificial Sequence
  Synthetic oligonucleotide
ggaattcacctggccattgacagctgggaa

SEQ ID NO: 463746 - DNA, 30 bp, Artificial Sequence
  Synthetic oligonucleotide
ataccgaagctgcccgcacgttagtgggaa

SEQ ID NO: 463747 - DNA, 30 bp, Artificial Sequence
  Synthetic oligonucleotide
atgcaccaactaagaagggtagattgggaa

SEQ ID NO: 463748 - DNA, 30 bp, Artificial Sequence
  Synthetic oligonucleotide
gcctcttcaatagtactcgtagcttgggaa

SEQ ID NO: 463749 - DNA, 30 bp, Artificial Sequence
  Synthetic oligonucleotide
ggggtagacaactacagtaaccgttgggaa

SEQ ID NO: 463750 - DNA, 30 bp, Artificial Sequence
  Synthetic oligonucleotide
tgcgacctcagtacacggaggcgttgggaa

SEQ ID NO: 463751 - DNA, 30 bp, Artificial Sequence
  Synthetic oligonucleotide
aaaattcgatggtacaggatctgttgggaa

SEQ ID NO: 463752 - DNA, 30 bp, Artificial Sequence
  Synthetic oligonucleotide
tatgttatggtacggagctatatttgggaa

SEQ ID NO: 463753 - DNA, 30 bp, Artificial Sequence
  Synthetic oligonucleotide
tgaggcttcccatggattcttgtttgggaa

SEQ ID NO: 463754 - DNA, 30 bp, Artificial Sequence
  Synthetic oligonucleotide
gccggggggattcggttggcgtctatggaa

SEQ ID NO: 463755 - DNA, 30 bp, Artificial Sequence
  Synthetic oligonucleotide
tcgaaagctgtagaccgacaggcactggaa

SEQ ID NO: 463756 - DNA, 30 bp, Artificial Sequence
  Synthetic oligonucleotide
gcttcttagtagcaatccgaacgcctggaa

SEQ ID NO: 463757 - DNA, 30 bp, Artificial Sequence
  Synthetic oligonucleotide
agggtccctcctgaactggtggagctggaa

SEQ ID NO: 463758 - DNA, 30 bp, Artificial Sequence
  Synthetic oligonucleotide
atttaccgacacagtaacgcggggctggaa

SEQ ID NO: 463759 - DNA, 30 bp, Artificial Sequence
  Synthetic oligonucleotide
acccttgtgggtgcccggcctatgctggaa

SEQ ID NO: 463760 - DNA, 30 bp, Artificial Sequence
  Synthetic oligonucleotide
agcgatcaatctttccagcgcctgctggaa

SEQ ID NO: 463761 - DNA, 30 bp, Artificial Sequence
  Synthetic oligonucleotide
ggcgtaataggttcttacgaggtgctggaa

SEQ ID NO: 463762 - DNA, 30 bp, Artificial Sequence
  Synthetic oligonucleotide
ccagggcaagatcctacctgccaagtggaa

SEQ ID NO: 463763 - DNA, 30 bp, Artificial Sequence
  Synthetic oligonucleotide
aaattaaggccgtccacgaggcacgtggaa

SEQ ID NO: 463764 - DNA, 30 bp, Artificial Sequence
  Synthetic oligonucleotide
ggccgcgtggactgccactgtcaggtggaa

SEQ ID NO: 463765 - DNA, 30 bp, Artificial Sequence
  Synthetic oligonucleotide
tgtacatcttcaggatcaaatgatgtggaa

SEQ ID NO: 463766 - DNA, 30 bp, Artificial Sequence
  Synthetic oligonucleotide
tcccacgtagcttgcggtggaggcttggaa

SEQ ID NO: 463767 - DNA, 30 bp, Artificial Sequence
  Synthetic oligonucleotide
gggttggtgttgggatttggggtcttggaa

SEQ ID NO: 463768 - DNA, 30 bp, Artificial Sequence
  Synthetic oligonucleotide
ttatttatattaaatgtcggagatttggaa

SEQ ID NO: 463769 - DNA, 30 bp, Artificial Sequence
  Synthetic oligonucleotide
aaacggttaagttaactcatttatttggaa

SEQ ID NO: 463770 - DNA, 30 bp, Artificial Sequence
  Synthetic oligonucleotide
ggtgatatcctgcgattaaaaggtttggaa

SEQ ID NO: 463771 - DNA, 30 bp, Artificial Sequence
  Synthetic oligonucleotide
atcaaatatcctgtagaccctcccaatgaa

SEQ ID NO: 463772 - DNA, 30 bp, Artificial Sequence
  Synthetic oligonucleotide
gttcgcgggcatgggagggcttggaatgaa

SEQ ID NO: 463773 - DNA, 30 bp, Artificial Sequence
  Synthetic oligonucleotide
ttatatcgacggcttgagatgaataatgaa

SEQ ID NO: 463774 - DNA, 30 bp, Artificial Sequence
  Synthetic oligonucleotide
acagattccatactctgaagttgccatgaa

SEQ ID NO: 463775 - DNA, 30 bp, Artificial Sequence
  Synthetic oligonucleotide
gggatgctgttcaaaacgcggcagcatgaa

SEQ ID NO: 463776 - DNA, 30 bp, Artificial Sequence
  Synthetic oligonucleotide
ctaagtataccttggacggccgcagatgaa

SEQ ID NO: 463777 - DNA, 30 bp, Artificial Sequence
  Synthetic oligonucleotide
cttgacgtaaatatctcgagggcagatgaa

SEQ ID NO: 463778 - DNA, 30 bp, Artificial Sequence
  Synthetic oligonucleotide
attctctccggtgtggctctgcgagatgaa

SEQ ID NO: 463779 - DNA, 30 bp, Artificial Sequence
  Synthetic oligonucleotide
cttgttcagtagatgccagttttagatgaa

SEQ ID NO: 463780 - DNA, 30 bp, Artificial Sequence
  Synthetic oligonucleotide
ttattgcacccgcaaacagcgaccgatgaa

SEQ ID NO: 463781 - DNA, 30 bp, Artificial Sequence
  Synthetic oligonucleotide
cgtagagatcgaatctgtccagaggatgaa

SEQ ID NO: 463782 - DNA, 30 bp, Artificial Sequence
  Synthetic oligonucleotide
aaaaaagcatgatgtaaaagtgaggatgaa

SEQ ID NO: 463783 - DNA, 30 bp, Artificial Sequence
  Synthetic oligonucleotide
ggttacggtcaaattggcggatcggatgaa

SEQ ID NO: 463784 - DNA, 30 bp, Artificial Sequence
  Synthetic oligonucleotide
gcctcgtacgtcgattagagctcggatgaa

SEQ ID NO: 463785 - DNA, 30 bp, Artificial Sequence
  Synthetic oligonucleotide
gattactacgtcgtgcgggatctggatgaa

SEQ ID NO: 463786 - DNA, 30 bp, Artificial Sequence
  Synthetic oligonucleotide
ctaatatttggtatcgtgagtattgatgaa

SEQ ID NO: 463787 - DNA, 30 bp, Artificial Sequence
  Synthetic oligonucleotide
gcatgtaaggatcgggaatgtaaatatgaa

SEQ ID NO: 463788 - DNA, 30 bp, Artificial Sequence
  Synthetic oligonucleotide
ccgggtaacagataaccggagtgatatgaa

SEQ ID NO: 463789 - DNA, 30 bp, Artificial Sequence
  Synthetic oligonucleotide
gaagtggctttagggacccattgatatgaa

SEQ ID NO: 463790 - DNA, 30 bp, Artificial Sequence
  Synthetic oligonucleotide
tctgctaaagttgactaaaaaagctatgaa

SEQ ID NO: 463791 - DNA, 30 bp, Artificial Sequence
  Synthetic oligonucleotide
tctgttttctgtttcactgcccggtatgaa

SEQ ID NO: 463792 - DNA, 30 bp, Artificial Sequence
  Synthetic oligonucleotide
aaccttctatgttacaacgagatgtatgaa

SEQ ID NO: 463793 - DNA, 30 bp, Artificial Sequence
  Synthetic oligonucleotide
cccctaggctagattcgttaggtaactgaa

SEQ ID NO: 463794 - DNA, 30 bp, Artificial Sequence
  Synthetic oligonucleotide
cttgaaattcaatagatttctggcactgaa

SEQ ID NO: 463795 - DNA, 30 bp, Artificial Sequence
  Synthetic oligonucleotide
tccgtgacgtgtctgtagcgatgcactgaa

SEQ ID NO: 463796 - DNA, 30 bp, Artificial Sequence
  Synthetic oligonucleotide
gcttcctgatgcgttttatgctaacctgaa

SEQ ID NO: 463797 - DNA, 30 bp, Artificial Sequence
  Synthetic oligonucleotide
cataggaccggtccttcagtctaacctgaa

SEQ ID NO: 463798 - DNA, 30 bp, Artificial Sequence
  Synthetic oligonucleotide
aaactagcatgctgtgacatgacacctgaa

SEQ ID NO: 463799 - DNA, 30 bp, Artificial Sequence
  Synthetic oligonucleotide
tggacgctgttatgatatataccacctgaa

SEQ ID NO: 463800 - DNA, 30 bp, Artificial Sequence
  Synthetic oligonucleotide
agcaattcggttagccgataggaccctgaa

SEQ ID NO: 463801 - DNA, 30 bp, Artificial Sequence
  Synthetic oligonucleotide
aggtctggctggctcagggcgcgccctgaa

SEQ ID NO: 463802 - DNA, 30 bp, Artificial Sequence
  Synthetic oligonucleotide
acctcggtaggcttgttgcccgcagctgaa

SEQ ID NO: 463803 - DNA, 30 bp, Artificial Sequence
  Synthetic oligonucleotide
gattcagcgtcgcacagcttactagctgaa

SEQ ID NO: 463804 - DNA, 30 bp, Artificial Sequence
  Synthetic oligonucleotide
cgtggtaaatccgcattgcttgcggctgaa

SEQ ID NO: 463805 - DNA, 30 bp, Artificial Sequence
  Synthetic oligonucleotide
cgcaggatcaaggagcttataggggctgaa

SEQ ID NO: 463806 - DNA, 30 bp, Artificial Sequence
  Synthetic oligonucleotide
agcttttcggcttctgggcctggatctgaa

SEQ ID NO: 463807 - DNA, 30 bp, Artificial Sequence
  Synthetic oligonucleotide
tcgccccagtgattgaaatcagtatctgaa

SEQ ID NO: 463808 - DNA, 30 bp, Artificial Sequence
  Synthetic oligonucleotide
aaaagttgagaacctcttctccactctgaa

SEQ ID NO: 463809 - DNA, 30 bp, Artificial Sequence
  Synthetic oligonucleotide
tcttgcccgcgatctcggggtcgctctgaa

SEQ ID NO: 463810 - DNA, 30 bp, Artificial Sequence
  Synthetic oligonucleotide
gactcggatcgcgtgcaaacagcttctgaa

SEQ ID NO: 463811 - DNA, 30 bp, Artificial Sequence
  Synthetic oligonucleotide
ataaaatttcaatagcagtcagcttctgaa

SEQ ID NO: 463812 - DNA, 30 bp, Artificial Sequence
  Synthetic oligonucleotide
aatagtactcgccccacatgagcttctgaa

SEQ ID NO: 463813 - DNA, 31 bp, Artificial Sequence
  Synthetic oligonucleotide
tttcctctgaaaaccgccattgggttctgaa

SEQ ID NO: 463814 - DNA, 30 bp, Artificial Sequence
  Synthetic oligonucleotide
tcgttgtggtcttacgtcgttgacagtgaa

SEQ ID NO: 463815 - DNA, 30 bp, Artificial Sequence
  Synthetic oligonucleotide
atgtcgtgtcatacgcaaggcaccagtgaa

SEQ ID NO: 463816 - DNA, 30 bp, Artificial Sequence
  Synthetic oligonucleotide
ttgagtcgacgcctgacgtcggccagtgaa

SEQ ID NO: 463817 - DNA, 30 bp, Artificial Sequence
  Synthetic oligonucleotide
tttttagcggcatatcactatggcagtgaa

SEQ ID NO: 463818 - DNA, 30 bp, Artificial Sequence
  Synthetic oligonucleotide
gccggcgttatcaggatcgccctcagtgaa

SEQ ID NO: 463819 - DNA, 30 bp, Artificial Sequence
  Synthetic oligonucleotide
gaatctggttagttccgtaatgttagtgaa

SEQ ID NO: 463820 - DNA, 30 bp, Artificial Sequence
  Synthetic oligonucleotide
tgctattgtgagacagcaagatttagtgaa

SEQ ID NO: 463821 - DNA, 30 bp, Artificial Sequence
  Synthetic oligonucleotide
gtatccggtccgccactcgagcgccgtgaa

SEQ ID NO: 463822 - DNA, 30 bp, Artificial Sequence
  Synthetic oligonucleotide
ccatggatctatatgggcgatacgcgtgaa

SEQ ID NO: 463823 - DNA, 30 bp, Artificial Sequence
  Synthetic oligonucleotide
ccagttaattagctccgcacatctcgtgaa

SEQ ID NO: 463824 - DNA, 30 bp, Artificial Sequence
  Synthetic oligonucleotide
acactgtggttcgcgtccgcttttcgtgaa

SEQ ID NO: 463825 - DNA, 30 bp, Artificial Sequence
  Synthetic oligonucleotide
aagcatacttgttatcacgagataggtgaa

SEQ ID NO: 463826 - DNA, 30 bp, Artificial Sequence
  Synthetic oligonucleotide
ggagaccgcggcatagggtgtttcggtgaa

SEQ ID NO: 463827 - DNA, 30 bp, Artificial Sequence
  Synthetic oligonucleotide
taatttcactagatggggacacgctgtgaa

SEQ ID NO: 463828 - DNA, 30 bp, Artificial Sequence
  Synthetic oligonucleotide
ttatccatgtccacgcttaccttctgtgaa

SEQ ID NO: 463829 - DNA, 30 bp, Artificial Sequence
  Synthetic oligonucleotide
gattctcctaagaggcttagcaattgtgaa

SEQ ID NO: 463830 - DNA, 30 bp, Artificial Sequence
  Synthetic oligonucleotide
ggataagcttttaatcaattttaaattgaa

SEQ ID NO: 463831 - DNA, 30 bp, Artificial Sequence
  Synthetic oligonucleotide
tacctatgacggtccgaaccagcaattgaa

SEQ ID NO: 463832 - DNA, 30 bp, Artificial Sequence
  Synthetic oligonucleotide
gtatggttctgctagtcgtgctgcattgaa

SEQ ID NO: 463833 - DNA, 30 bp, Artificial Sequence
  Synthetic oligonucleotide
ctcactattcatacaggcacatagattgaa

SEQ ID NO: 463834 - DNA, 30 bp, Artificial Sequence
  Synthetic oligonucleotide
acccagcgttccctggaggcgccgattgaa

SEQ ID NO: 463835 - DNA, 30 bp, Artificial Sequence
  Synthetic oligonucleotide
cagcctccataggaacaagtaaatattgaa

SEQ ID NO: 463836 - DNA, 30 bp, Artificial Sequence
  Synthetic oligonucleotide
gcgcttgttgtagcatccgtacgtattgaa

SEQ ID NO: 463837 - DNA, 30 bp, Artificial Sequence
  Synthetic oligonucleotide
cgggttccgaccgtgcgttcatgtattgaa

SEQ ID NO: 463838 - DNA, 30 bp, Artificial Sequence
  Synthetic oligonucleotide
caacattaaacagtaggagtctgtattgaa

SEQ ID NO: 463839 - DNA, 30 bp, Artificial Sequence
  Synthetic oligonucleotide
gcccctgtgcaagcttgagcctttattgaa

SEQ ID NO: 463840 - DNA, 30 bp, Artificial Sequence
  Synthetic oligonucleotide
cagccacttgccttgcgaagggtacttgaa

SEQ ID NO: 463841 - DNA, 30 bp, Artificial Sequence
  Synthetic oligonucleotide
tgcatatgtagacaagctttaagccttgaa

SEQ ID NO: 463842 - DNA, 30 bp, Artificial Sequence
  Synthetic oligonucleotide
attcgggtattttttttctgtgtccttgaa

SEQ ID NO: 463843 - DNA, 30 bp, Artificial Sequence
  Synthetic oligonucleotide
tgtattacattcccgcctgcccatcttgaa

SEQ ID NO: 463844 - DNA, 30 bp, Artificial Sequence
  Synthetic oligonucleotide
tgtaggcatgtagcacctgcgtaagttgaa

SEQ ID NO: 463845 - DNA, 30 bp, Artificial Sequence
  Synthetic oligonucleotide
tgttaggtattcggttcgccaggagttgaa

SEQ ID NO: 463846 - DNA, 30 bp, Artificial Sequence
  Synthetic oligonucleotide
gtcactctcatacgcttcgttggagttgaa

SEQ ID NO: 463847 - DNA, 30 bp, Artificial Sequence
  Synthetic oligonucleotide
gaccactcacggtacgaagcttccgttgaa

SEQ ID NO: 463848 - DNA, 30 bp, Artificial Sequence
  Synthetic oligonucleotide
ttcatccgctacacagttactatcgttgaa

SEQ ID NO: 463849 - DNA, 30 bp, Artificial Sequence
  Synthetic oligonucleotide
cttatcgaaactaattcgtgccaggttgaa

SEQ ID NO: 463850 - DNA, 30 bp, Artificial Sequence
  Synthetic oligonucleotide
tactgatatcccctcgtgtaccgggttgaa

SEQ ID NO: 463851 - DNA, 30 bp, Artificial Sequence
  Synthetic oligonucleotide
ttcaagtgagccaaccaagtaatggttgaa

SEQ ID NO: 463852 - DNA, 30 bp, Artificial Sequence
  Synthetic oligonucleotide
tctgcgattccttgtggttgaattgttgaa

SEQ ID NO: 463853 - DNA, 30 bp, Artificial Sequence
  Synthetic oligonucleotide
aaccgttgcgtattcctggccgtatttgaa

SEQ ID NO: 463854 - DNA, 30 bp, Artificial Sequence
  Synthetic oligonucleotide
agactgcctgcttgcttgggtcagtttgaa

SEQ ID NO: 463855 - DNA, 30 bp, Artificial Sequence
  Synthetic oligonucleotide
cccctttcgcaccgcaaagcggagtttgaa

SEQ ID NO: 463856 - DNA, 30 bp, Artificial Sequence
  Synthetic oligonucleotide
cagactgttttatcggtgtcgttgtttgaa

SEQ ID NO: 463857 - DNA, 30 bp, Artificial Sequence
  Synthetic oligonucleotide
atgcgaacccgctaagactgtcattttgaa

SEQ ID NO: 463858 - DNA, 30 bp, Artificial Sequence
  Synthetic oligonucleotide
ctcaggccggcagatatattggattttgaa

SEQ ID NO: 463859 - DNA, 30 bp, Artificial Sequence
  Synthetic oligonucleotide
gacttaaagggtgctataagtgattttgaa

SEQ ID NO: 463860 - DNA, 30 bp, Artificial Sequence
  Synthetic oligonucleotide
caattggatcgagtcccagcattttttgaa

SEQ ID NO: 463861 - DNA, 30 bp, Artificial Sequence
  Synthetic oligonucleotide
ggcttcatttgattgaggaatagaaaataa

SEQ ID NO: 463862 - DNA, 30 bp, Artificial Sequence
  Synthetic oligonucleotide
gcccggagccattttggggaagtaaaataa

SEQ ID NO: 463863 - DNA, 30 bp, Artificial Sequence
  Synthetic oligonucleotide
cttatgtcgatatgtatcactcgcaaataa

SEQ ID NO: 463864 - DNA, 30 bp, Artificial Sequence
  Synthetic oligonucleotide
acatttcatcgacggcgtacgatcaaataa

SEQ ID NO: 463865 - DNA, 30 bp, Artificial Sequence
  Synthetic oligonucleotide
ataagcccggtttactccttgaataaataa

SEQ ID NO: 463866 - DNA, 30 bp, Artificial Sequence
  Synthetic oligonucleotide
tgtcttgtatgcgtgaataacggtaaataa

SEQ ID NO: 463867 - DNA, 30 bp, Artificial Sequence
  Synthetic oligonucleotide
tttacgctgaaggcggttgcgtttaaataa

SEQ ID NO: 463868 - DNA, 30 bp, Artificial Sequence
  Synthetic oligonucleotide
tcctgctcaggggagtgtggccgccaataa

SEQ ID NO: 463869 - DNA, 30 bp, Artificial Sequence
  Synthetic oligonucleotide
cgacttacaaaggtctaatgtgtccaataa

SEQ ID NO: 463870 - DNA, 30 bp, Artificial Sequence
  Synthetic oligonucleotide
tttggcgatacaatcctggcaaggcaataa

SEQ ID NO: 463871 - DNA, 30 bp, Artificial Sequence
  Synthetic oligonucleotide
tccttatcacgtttctcagatcacgaataa

SEQ ID NO: 463872 - DNA, 30 bp, Artificial Sequence
  Synthetic oligonucleotide
gctgttgcacattttatgtacaccgaataa

SEQ ID NO: 463873 - DNA, 30 bp, Artificial Sequence
  Synthetic oligonucleotide
gttgagcctccctcgcgaaagagcgaataa

SEQ ID NO: 463874 - DNA, 30 bp, Artificial Sequence
  Synthetic oligonucleotide
ttacggtggttgcgccgcaaccaggaataa

SEQ ID NO: 463875 - DNA, 30 bp, Artificial Sequence
  Synthetic oligonucleotide
tttaaaccattgccctgtaggacataataa

SEQ ID NO: 463876 - DNA, 30 bp, Artificial Sequence
  Synthetic oligonucleotide
gcagtagtgaccccctaggcgggataataa

SEQ ID NO: 463877 - DNA, 30 bp, Artificial Sequence
  Synthetic oligonucleotide
cagaacgctgcagttcaaaccctataataa

SEQ ID NO: 463878 - DNA, 30 bp, Artificial Sequence
  Synthetic oligonucleotide
cgcttaaatatggttagctttttataataa

SEQ ID NO: 463879 - DNA, 30 bp, Artificial Sequence
  Synthetic oligonucleotide
tgttggtggcgtcgctggcctccctaataa

SEQ ID NO: 463880 - DNA, 30 bp, Artificial Sequence
  Synthetic oligonucleotide
gaacccgccttctgtaataagggctaataa

SEQ ID NO: 463881 - DNA, 30 bp, Artificial Sequence
  Synthetic oligonucleotide
acttacttgatgttttcacggaagtaataa

SEQ ID NO: 463882 - DNA, 30 bp, Artificial Sequence
  Synthetic oligonucleotide
ataggtctggtggtaggccctcggtaataa

SEQ ID NO: 463883 - DNA, 31 bp, Artificial Sequence
  Synthetic oligonucleotide
aactggtactgaccgcgaatattggtaataa

SEQ ID NO: 463884 - DNA, 30 bp, Artificial Sequence
  Synthetic oligonucleotide
aagacacactgccggaggctagattaataa

SEQ ID NO: 463885 - DNA, 30 bp, Artificial Sequence
  Synthetic oligonucleotide
acttgaagtgaatatcgacaggattaataa

SEQ ID NO: 463886 - DNA, 30 bp, Artificial Sequence
  Synthetic oligonucleotide
tgggcttaaaaatctattatctattaataa

SEQ ID NO: 463887 - DNA, 30 bp, Artificial Sequence
  Synthetic oligonucleotide
aaagaatacaaacactttaacgtttaataa

SEQ ID NO: 463888 - DNA, 30 bp, Artificial Sequence
  Synthetic oligonucleotide
cgtccacccgataccttaatgaccacataa

SEQ ID NO: 463889 - DNA, 30 bp, Artificial Sequence
  Synthetic oligonucleotide
ccaccaagcttgtaggcatgcgccacataa

SEQ ID NO: 463890 - DNA, 30 bp, Artificial Sequence
  Synthetic oligonucleotide
gctacgacggtctgcagacctaggacataa

SEQ ID NO: 463891 - DNA, 30 bp, Artificial Sequence
  Synthetic oligonucleotide
ctacctgtccagtaggacgcctggacataa

SEQ ID NO: 463892 - DNA, 30 bp, Artificial Sequence
  Synthetic oligonucleotide
ttatccgcaaaagagacgtagattacataa

SEQ ID NO: 463893 - DNA, 30 bp, Artificial Sequence
  Synthetic oligonucleotide
ggcacgcgtatggtccacagagacccataa

SEQ ID NO: 463894 - DNA, 30 bp, Artificial Sequence
  Synthetic oligonucleotide
taaagatcgcattatggattaaagccataa

SEQ ID NO: 463895 - DNA, 30 bp, Artificial Sequence
  Synthetic oligonucleotide
tgagcccggtcatcctgaaaacggccataa

SEQ ID NO: 463896 - DNA, 30 bp, Artificial Sequence
  Synthetic oligonucleotide
gaactgtaatgctactgcagcatgccataa

SEQ ID NO: 463897 - DNA, 30 bp, Artificial Sequence
  Synthetic oligonucleotide
acttataatcgcatcatactttttccataa

SEQ ID NO: 463898 - DNA, 30 bp, Artificial Sequence
  Synthetic oligonucleotide
acttgccgcaggcaacttgctcaagcataa

SEQ ID NO: 463899 - DNA, 30 bp, Artificial Sequence
  Synthetic oligonucleotide
ataggcttctttataaggacatcagcataa

SEQ ID NO: 463900 - DNA, 30 bp, Artificial Sequence
  Synthetic oligonucleotide
acgcggtctgtgttagagcatatcgcataa

SEQ ID NO: 463901 - DNA, 30 bp, Artificial Sequence
  Synthetic oligonucleotide
gcccatggattggagaggtctatcgcataa

SEQ ID NO: 463902 - DNA, 30 bp, Artificial Sequence
  Synthetic oligonucleotide
gtataaggcttagtttacccgctcgcataa

SEQ ID NO: 463903 - DNA, 30 bp, Artificial Sequence
  Synthetic oligonucleotide
ttgagttctgtaactaattaaacggcataa

SEQ ID NO: 463904 - DNA, 30 bp, Artificial Sequence
  Synthetic oligonucleotide
gttggggtcattcacgtcccaagggcataa

SEQ ID NO: 463905 - DNA, 30 bp, Artificial Sequence
  Synthetic oligonucleotide
ttagtccgctactattctaacggggcataa

SEQ ID NO: 463906 - DNA, 30 bp, Artificial Sequence
  Synthetic oligonucleotide
attgggccttggacatagtgattggcataa

SEQ ID NO: 463907 - DNA, 30 bp, Artificial Sequence
  Synthetic oligonucleotide
gtgtcgtgggcatgcaacacatatgcataa

SEQ ID NO: 463908 - DNA, 30 bp, Artificial Sequence
  Synthetic oligonucleotide
ttctatcataacaagaggctggttgcataa

SEQ ID NO: 463909 - DNA, 30 bp, Artificial Sequence
  Synthetic oligonucleotide
gccctattcgtgtatgtttcagaatcataa

SEQ ID NO: 463910 - DNA, 30 bp, Artificial Sequence
  Synthetic oligonucleotide
aacaacggtatttaataagggggatcataa

SEQ ID NO: 463911 - DNA, 30 bp, Artificial Sequence
  Synthetic oligonucleotide
tgaggcatattttgggattcccactcataa

SEQ ID NO: 463912 - DNA, 30 bp, Artificial Sequence
  Synthetic oligonucleotide
cactgctggtgcagccagaaatcctcataa

SEQ ID NO: 463913 - DNA, 30 bp, Artificial Sequence
  Synthetic oligonucleotide
tggaattattggggtccttcagattcataa

SEQ ID NO: 463914 - DNA, 30 bp, Artificial Sequence
  Synthetic oligonucleotide
catacagtttcggcgcttttgtattcataa

SEQ ID NO: 463915 - DNA, 30 bp, Artificial Sequence
  Synthetic oligonucleotide
gaattcaccggcaggttctctggaagataa

SEQ ID NO: 463916 - DNA, 30 bp, Artificial Sequence
  Synthetic oligonucleotide
gcagtcggtctgggacaaccccagagataa

SEQ ID NO: 463917 - DNA, 30 bp, Artificial Sequence
  Synthetic oligonucleotide
gcttttgcgagagtggtaggatatagataa

SEQ ID NO: 463918 - DNA, 30 bp, Artificial Sequence
  Synthetic oligonucleotide
ctacccgttatgcgaagctagggtagataa

SEQ ID NO: 463919 - DNA, 30 bp, Artificial Sequence
  Synthetic oligonucleotide
cgcgcgcaagggggtggtccccttagataa

SEQ ID NO: 463920 - DNA, 30 bp, Artificial Sequence
  Synthetic oligonucleotide
cgttctgcatatcgctagatcgtacgataa

SEQ ID NO: 463921 - DNA, 30 bp, Artificial Sequence
  Synthetic oligonucleotide
gtaatatttggggctctgccagcccgataa

SEQ ID NO: 463922 - DNA, 30 bp, Artificial Sequence
  Synthetic oligonucleotide
tggtgcccatttagcccttgatggcgataa

SEQ ID NO: 463923 - DNA, 30 bp, Artificial Sequence
  Synthetic oligonucleotide
caattctcctaatcgcctagtctgcgataa

SEQ ID NO: 463924 - DNA, 30 bp, Artificial Sequence
  Synthetic oligonucleotide
tagttcaagggcaaatgtcgggatcgataa

SEQ ID NO: 463925 - DNA, 31 bp, Artificial Sequence
  Synthetic oligonucleotide
cgaccaccacccgcaggcatatcctcgataa

SEQ ID NO: 463926 - DNA, 30 bp, Artificial Sequence
  Synthetic oligonucleotide
cggcctataaggatgcacggggcaggataa

SEQ ID NO: 463927 - DNA, 30 bp, Artificial Sequence
  Synthetic oligonucleotide
tcgaacgccaatgtaatgtcatcaggataa

SEQ ID NO: 463928 - DNA, 30 bp, Artificial Sequence
  Synthetic oligonucleotide
tggttccgtccattcgcttccccgggataa

SEQ ID NO: 463929 - DNA, 30 bp, Artificial Sequence
  Synthetic oligonucleotide
gtggaccagctggggtttatatcgggataa

SEQ ID NO: 463930 - DNA, 30 bp, Artificial Sequence
  Synthetic oligonucleotide
ccagttttgtgggcaggttcagcatgataa

SEQ ID NO: 463931 - DNA, 30 bp, Artificial Sequence
  Synthetic oligonucleotide
aagggtgttgtgctcggcttcttctgataa

SEQ ID NO: 463932 - DNA, 30 bp, Artificial Sequence
  Synthetic oligonucleotide
cattggattacaaccgttaaggggtgataa

SEQ ID NO: 463933 - DNA, 30 bp, Artificial Sequence
  Synthetic oligonucleotide
atgcaacaaaacgattgttttgggtgataa

SEQ ID NO: 463934 - DNA, 30 bp, Artificial Sequence
  Synthetic oligonucleotide
atccgaggacgcgtaacaatacgttgataa

SEQ ID NO: 463935 - DNA, 30 bp, Artificial Sequence
  Synthetic oligonucleotide
atgctccccgcatttcatctgcaaatataa

SEQ ID NO: 463936 - DNA, 30 bp, Artificial Sequence
  Synthetic oligonucleotide
ctacacacggtgacagagatagcaatataa

SEQ ID NO: 463937 - DNA, 30 bp, Artificial Sequence
  Synthetic oligonucleotide
cttggtcgctcgctgagctgtgtaatataa

SEQ ID NO: 463938 - DNA, 30 bp, Artificial Sequence
  Synthetic oligonucleotide
tacggggtcacggtcatgcgtagcatataa

SEQ ID NO: 463939 - DNA, 30 bp, Artificial Sequence
  Synthetic oligonucleotide
ccgcgatattttatgccccggcgcatataa

SEQ ID NO: 463940 - DNA, 30 bp, Artificial Sequence
  Synthetic oligonucleotide
gcactcgacagcgttttgctagtcatataa

SEQ ID NO: 463941 - DNA, 30 bp, Artificial Sequence
  Synthetic oligonucleotide
ctatatttaacccggagcacctagatataa

SEQ ID NO: 463942 - DNA, 30 bp, Artificial Sequence
  Synthetic oligonucleotide
aattagcggagaatcaggtcgctgatataa

SEQ ID NO: 463943 - DNA, 30 bp, Artificial Sequence
  Synthetic oligonucleotide
tggcacctacgacacagaattttgatataa

SEQ ID NO: 463944 - DNA, 30 bp, Artificial Sequence
  Synthetic oligonucleotide
ataatgtatctaggccgcaaacttatataa

SEQ ID NO: 463945 - DNA, 30 bp, Artificial Sequence
  Synthetic oligonucleotide
gactttgatttataacataggcgactataa

SEQ ID NO: 463946 - DNA, 30 bp, Artificial Sequence
  Synthetic oligonucleotide
gggaagatgtagggagcatgggccctataa

SEQ ID NO: 463947 - DNA, 30 bp, Artificial Sequence
  Synthetic oligonucleotide
tctttccagtggtgtcgtcgcaagctataa

SEQ ID NO: 463948 - DNA, 30 bp, Artificial Sequence
  Synthetic oligonucleotide
cggtctaaaagcaaaagatctattctataa

SEQ ID NO: 463949 - DNA, 30 bp, Artificial Sequence
  Synthetic oligonucleotide
aagtgtggctgcatgtttggatttctataa

SEQ ID NO: 463950 - DNA, 30 bp, Artificial Sequence
  Synthetic oligonucleotide
caagccacgtcgccttcgctggcagtataa

SEQ ID NO: 463951 - DNA, 30 bp, Artificial Sequence
  Synthetic oligonucleotide
aaattgacaacgtacgtcctttgagtataa

SEQ ID NO: 463952 - DNA, 30 bp, Artificial Sequence
  Synthetic oligonucleotide
acgtctgtccggccatgacgcgtagtataa

SEQ ID NO: 463953 - DNA, 30 bp, Artificial Sequence
  Synthetic oligonucleotide
ctaatgaatcttccttgtggccacgtataa

SEQ ID NO: 463954 - DNA, 30 bp, Artificial Sequence
  Synthetic oligonucleotide
tttcgatgagtggatttttttatcgtataa

SEQ ID NO: 463955 - DNA, 30 bp, Artificial Sequence
  Synthetic oligonucleotide
agctccccctatcgcatcatagcggtataa

SEQ ID NO: 463956 - DNA, 30 bp, Artificial Sequence
  Synthetic oligonucleotide
atttgcttgggtccgcgtagcggggtataa

SEQ ID NO: 463957 - DNA, 30 bp, Artificial Sequence
  Synthetic oligonucleotide
ctcgaccgcaaaccccgaagtatggtataa

SEQ ID NO: 463958 - DNA, 30 bp, Artificial Sequence
  Synthetic oligonucleotide
ctcgttcctacgaagcagcgtgctgtataa

SEQ ID NO: 463959 - DNA, 30 bp, Artificial Sequence
  Synthetic oligonucleotide
gcaaaaagggtcccagggttcaaattataa

SEQ ID NO: 463960 - DNA, 30 bp, Artificial Sequence
  Synthetic oligonucleotide
tatataagggacgattcgcccacattataa

SEQ ID NO: 463961 - DNA, 30 bp, Artificial Sequence
  Synthetic oligonucleotide
tagcatacactcgacaatgtcgcattataa

SEQ ID NO: 463962 - DNA, 29 bp, Artificial Sequence
  Synthetic oligonucleotide
gcttctaattgttttaagttaccttataa

SEQ ID NO: 463963 - DNA, 30 bp, Artificial Sequence
  Synthetic oligonucleotide
atcattagcatcacagctccacccttataa

SEQ ID NO: 463964 - DNA, 30 bp, Artificial Sequence
  Synthetic oligonucleotide
ggtttggattttaagggtcaggccttataa

SEQ ID NO: 463965 - DNA, 30 bp, Artificial Sequence
  Synthetic oligonucleotide
atcgcgagcatgtgttgtggttcgttataa

SEQ ID NO: 463966 - DNA, 30 bp, Artificial Sequence
  Synthetic oligonucleotide
aacgataaccgggccgtggttcggttataa

SEQ ID NO: 463967 - DNA, 30 bp, Artificial Sequence
  Synthetic oligonucleotide
aactgaataatacatttaaggtggttataa

SEQ ID NO: 463968 - DNA, 30 bp, Artificial Sequence
  Synthetic oligonucleotide
tatggggacgtgaataggcagcatttataa

SEQ ID NO: 463969 - DNA, 30 bp, Artificial Sequence
  Synthetic oligonucleotide
gatgacaccgttcgatggggtaataactaa

SEQ ID NO: 463970 - DNA, 30 bp, Artificial Sequence
  Synthetic oligonucleotide
ttgtttatgacaaaaaatgtcactaactaa

SEQ ID NO: 463971 - DNA, 30 bp, Artificial Sequence
  Synthetic oligonucleotide
ccgaagcccggtagacacgcccctaactaa

SEQ ID NO: 463972 - DNA, 31 bp, Artificial Sequence
  Synthetic oligonucleotide
gcacttaagagcttatcaaggttctaactaa

SEQ ID NO: 463973 - DNA, 30 bp, Artificial Sequence
  Synthetic oligonucleotide
acgtttttaacccggaggatgaggcactaa

SEQ ID NO: 463974 - DNA, 30 bp, Artificial Sequence
  Synthetic oligonucleotide
ctggtactgtttcgtgggagacttcactaa

SEQ ID NO: 463975 - DNA, 30 bp, Artificial Sequence
  Synthetic oligonucleotide
tgtcccgacgaaagcctagaactagactaa

SEQ ID NO: 463976 - DNA, 30 bp, Artificial Sequence
  Synthetic oligonucleotide
gttcatattgaataagcgacacgcgactaa

SEQ ID NO: 463977 - DNA, 30 bp, Artificial Sequence
  Synthetic oligonucleotide
gcagatattgcattagcaccagcggactaa

SEQ ID NO: 463978 - DNA, 30 bp, Artificial Sequence
  Synthetic oligonucleotide
ccgattcagcctacatgctcacatgactaa

SEQ ID NO: 463979 - DNA, 30 bp, Artificial Sequence
  Synthetic oligonucleotide
cgacgcaccgaacaacgccatgctgactaa

SEQ ID NO: 463980 - DNA, 30 bp, Artificial Sequence
  Synthetic oligonucleotide
tgtttatgaccaacccagttccttgactaa

SEQ ID NO: 463981 - DNA, 31 bp, Artificial Sequence
  Synthetic oligonucleotide
attcgtagaaatgcttgtgggttttgactaa

SEQ ID NO: 463982 - DNA, 30 bp, Artificial Sequence
  Synthetic oligonucleotide
ttagaggatgaagcagaatcgtgatactaa

SEQ ID NO: 463983 - DNA, 30 bp, Artificial Sequence
  Synthetic oligonucleotide
gtatttttttttatccttgtgacctactaa

SEQ ID NO: 463984 - DNA, 30 bp, Artificial Sequence
  Synthetic oligonucleotide
acttctctttgcacttatcggagctactaa

SEQ ID NO: 463985 - DNA, 30 bp, Artificial Sequence
  Synthetic oligonucleotide
ctgaaaggattggtttcacggggctactaa

SEQ ID NO: 463986 - DNA, 30 bp, Artificial Sequence
  Synthetic oligonucleotide
accttcttgcgccttagatctggctactaa

SEQ ID NO: 463987 - DNA, 29 bp, Artificial Sequence
  Synthetic oligonucleotide
aagaagcataggaggcaggcatctactaa

SEQ ID NO: 463988 - DNA, 30 bp, Artificial Sequence
  Synthetic oligonucleotide
aattatgggcacgcgaaaaatgggtactaa

SEQ ID NO: 463989 - DNA, 30 bp, Artificial Sequence
  Synthetic oligonucleotide
ggcagcaatatgcaccaacctgtgtactaa

SEQ ID NO: 463990 - DNA, 30 bp, Artificial Sequence
  Synthetic oligonucleotide
gtcaagatggcataccgttaggattactaa

SEQ ID NO: 463991 - DNA, 30 bp, Artificial Sequence
  Synthetic oligonucleotide
gagttattaggtaaggccctgggttactaa

SEQ ID NO: 463992 - DNA, 30 bp, Artificial Sequence
  Synthetic oligonucleotide
agggttgttctagcggctgtcgagacctaa

SEQ ID NO: 463993 - DNA, 30 bp, Artificial Sequence
  Synthetic oligonucleotide
tcacatgcatttcatgtcaactggacctaa

SEQ ID NO: 463994 - DNA, 30 bp, Artificial Sequence
  Synthetic oligonucleotide
gttgttcagtatgagcagtcgcatacctaa

SEQ ID NO: 463995 - DNA, 30 bp, Artificial Sequence
  Synthetic oligonucleotide
gaccttagcttaaaattcccatatacctaa

SEQ ID NO: 463996 - DNA, 30 bp, Artificial Sequence
  Synthetic oligonucleotide
acaagttgtgtttgcatcttagacccctaa

SEQ ID NO: 463997 - DNA, 30 bp, Artificial Sequence
  Synthetic oligonucleotide
cctaatcaagacggcggtacgttcccctaa

SEQ ID NO: 463998 - DNA, 30 bp, Artificial Sequence
  Synthetic oligonucleotide
aagtcgagtcaactagggcttaagccctaa

SEQ ID NO: 463999 - DNA, 30 bp, Artificial Sequence
  Synthetic oligonucleotide
aatgcggagggcctttctaaggagccctaa

SEQ ID NO: 464000 - DNA, 30 bp, Artificial Sequence
  Synthetic oligonucleotide
cttgagtaacaatgggcgtgtgatccctaa

SEQ ID NO: 464001 - DNA, 30 bp, Artificial Sequence
  Synthetic oligonucleotide
tatacaattgaaagttacccaggtccctaa

SEQ ID NO: 464002 - DNA, 30 bp, Artificial Sequence
  Synthetic oligonucleotide
tgggagtgcgcgcacattccgcgtgcctaa

SEQ ID NO: 464003 - DNA, 30 bp, Artificial Sequence
  Synthetic oligonucleotide
attgcaatagacgcccggattcgtgcctaa

SEQ ID NO: 464004 - DNA, 30 bp, Artificial Sequence
  Synthetic oligonucleotide
gacttgattctaaaggcgacaggatcctaa

SEQ ID NO: 464005 - DNA, 31 bp, Artificial Sequence
  Synthetic oligonucleotide
gatgattaatccttggagcgattcctcctaa

SEQ ID NO: 464006 - DNA, 30 bp, Artificial Sequence
  Synthetic oligonucleotide
cgaattctgaggcaaaagggggtgtcctaa

SEQ ID NO: 464007 - DNA, 30 bp, Artificial Sequence
  Synthetic oligonucleotide
ctcaattcgacgtcgttgggactttcctaa

SEQ ID NO: 464008 - DNA, 30 bp, Artificial Sequence
  Synthetic oligonucleotide
gttatgtggggagttctcctgttttcctaa

SEQ ID NO: 464009 - DNA, 30 bp, Artificial Sequence
  Synthetic oligonucleotide
ttgttcgatgtcattggagcaaaaagctaa

SEQ ID NO: 464010 - DNA, 30 bp, Artificial Sequence
  Synthetic oligonucleotide
atttagtcccccccccgtgcgtaaagctaa

SEQ ID NO: 464011 - DNA, 30 bp, Artificial Sequence
  Synthetic oligonucleotide
ccgtgcgactacaagctatcggcaagctaa

SEQ ID NO: 464012 - DNA, 30 bp, Artificial Sequence
  Synthetic oligonucleotide
gctcgtaaaagcctctcttgttatagctaa

SEQ ID NO: 464013 - DNA, 30 bp, Artificial Sequence
  Synthetic oligonucleotide
tgttccttcgacccgtaggtcactagctaa

SEQ ID NO: 464014 - DNA, 31 bp, Artificial Sequence
  Synthetic oligonucleotide
tgcatacgcataatatgagatttgtagctaa

SEQ ID NO: 464015 - DNA, 30 bp, Artificial Sequence
  Synthetic oligonucleotide
cagacctgactacttctgtgttttagctaa

SEQ ID NO: 464016 - DNA, 30 bp, Artificial Sequence
  Synthetic oligonucleotide
tggaagctggacccttctttaccacgctaa

SEQ ID NO: 464017 - DNA, 30 bp, Artificial Sequence
  Synthetic oligonucleotide
ctgtcgtacggcagcagcagtatccgctaa

SEQ ID NO: 464018 - DNA, 30 bp, Artificial Sequence
  Synthetic oligonucleotide
gctcgtttcaaatatctgagtttccgctaa

SEQ ID NO: 464019 - DNA, 30 bp, Artificial Sequence
  Synthetic oligonucleotide
agcgccactagcgccataccaatgcgctaa

SEQ ID NO: 464020 - DNA, 30 bp, Artificial Sequence
  Synthetic oligonucleotide
catgttgattgcttaatgtcgctgcgctaa

SEQ ID NO: 464021 - DNA, 30 bp, Artificial Sequence
  Synthetic oligonucleotide
tacgacagcgtttacgtagggaatcgctaa

SEQ ID NO: 464022 - DNA, 30 bp, Artificial Sequence
  Synthetic oligonucleotide
tcattctatcagacagtgcttggtcgctaa

SEQ ID NO: 464023 - DNA, 30 bp, Artificial Sequence
  Synthetic oligonucleotide
cagtatagcgttgggccgtatcaaggctaa

SEQ ID NO: 464024 - DNA, 30 bp, Artificial Sequence
  Synthetic oligonucleotide
cgttctaaaccgctcgggtgttaaggctaa

SEQ ID NO: 464025 - DNA, 30 bp, Artificial Sequence
  Synthetic oligonucleotide
tgccgccggggaaatagaacttgaggctaa

SEQ ID NO: 464026 - DNA, 30 bp, Artificial Sequence
  Synthetic oligonucleotide
atcgcttacgcgctaataatccacggctaa

SEQ ID NO: 464027 - DNA, 30 bp, Artificial Sequence
  Synthetic oligonucleotide
tacgggttatgaagtgtaatgggcggctaa

SEQ ID NO: 464028 - DNA, 30 bp, Artificial Sequence
  Synthetic oligonucleotide
tctggctctcaggagtattttggcggctaa

SEQ ID NO: 464029 - DNA, 30 bp, Artificial Sequence
  Synthetic oligonucleotide
gtattatgttgttaatcggcttgcggctaa

SEQ ID NO: 464030 - DNA, 30 bp, Artificial Sequence
  Synthetic oligonucleotide
ataaacttgttttcaacgtttctcggctaa

SEQ ID NO: 464031 - DNA, 30 bp, Artificial Sequence
  Synthetic oligonucleotide
atcattcttcagtttatcgcagtcggctaa

SEQ ID NO: 464032 - DNA, 30 bp, Artificial Sequence
  Synthetic oligonucleotide
gtagggtctcggaccggggcattgggctaa

SEQ ID NO: 464033 - DNA, 30 bp, Artificial Sequence
  Synthetic oligonucleotide
ggacgctggatcggtcaagggcaatgctaa

SEQ ID NO: 464034 - DNA, 30 bp, Artificial Sequence
  Synthetic oligonucleotide
gacgaacgcttagggtcggattaatgctaa

SEQ ID NO: 464035 - DNA, 30 bp, Artificial Sequence
  Synthetic oligonucleotide
ctttaactagttggggcattgccatgctaa

SEQ ID NO: 464036 - DNA, 30 bp, Artificial Sequence
  Synthetic oligonucleotide
ttggcgacaagccgcggatatgtctgctaa

SEQ ID NO: 464037 - DNA, 30 bp, Artificial Sequence
  Synthetic oligonucleotide
gtccgccagaccttccagctaaggtgctaa

SEQ ID NO: 464038 - DNA, 30 bp, Artificial Sequence
  Synthetic oligonucleotide
gttctcggtgctctttagctgaattgctaa

SEQ ID NO: 464039 - DNA, 30 bp, Artificial Sequence
  Synthetic oligonucleotide
tgggaagccttagtgatcgtagattgctaa

SEQ ID NO: 464040 - DNA, 30 bp, Artificial Sequence
  Synthetic oligonucleotide
tattgtgagctcatcacacgtttttgctaa

SEQ ID NO: 464041 - DNA, 30 bp, Artificial Sequence
  Synthetic oligonucleotide
cagcactagaacgtcgctttctaaatctaa

SEQ ID NO: 464042 - DNA, 30 bp, Artificial Sequence
  Synthetic oligonucleotide
gcattgcatagacagctggaattaatctaa

SEQ ID NO: 464043 - DNA, 30 bp, Artificial Sequence
  Synthetic oligonucleotide
gttctgagttgcctggttacttgcatctaa

SEQ ID NO: 464044 - DNA, 30 bp, Artificial Sequence
  Synthetic oligonucleotide
ggtcgcgaaatatcgttaactacgatctaa

SEQ ID NO: 464045 - DNA, 30 bp, Artificial Sequence
  Synthetic oligonucleotide
cagcatggatagcctcgccgactactctaa

SEQ ID NO: 464046 - DNA, 30 bp, Artificial Sequence
  Synthetic oligonucleotide
ggggttctaacaggctcggcgctactctaa

SEQ ID NO: 464047 - DNA, 30 bp, Artificial Sequence
  Synthetic oligonucleotide
tcatttctcaaaaagcctttgcatctctaa

SEQ ID NO: 464048 - DNA, 30 bp, Artificial Sequence
  Synthetic oligonucleotide
agagggggtttcccacctcggtctctctaa

SEQ ID NO: 464049 - DNA, 30 bp, Artificial Sequence
  Synthetic oligonucleotide
ttctaggctaaatcccggctaggagtctaa

SEQ ID NO: 464050 - DNA, 30 bp, Artificial Sequence
  Synthetic oligonucleotide
atttgaccatgcaatttgctatgagtctaa

SEQ ID NO: 464051 - DNA, 30 bp, Artificial Sequence
  Synthetic oligonucleotide
taagaccgcagccgatggatggacgtctaa

SEQ ID NO: 464052 - DNA, 30 bp, Artificial Sequence
  Synthetic oligonucleotide
aacccccgtgggattgttcaatatgtctaa

SEQ ID NO: 464053 - DNA, 30 bp, Artificial Sequence
  Synthetic oligonucleotide
tagattggtcgcctcttattcagtgtctaa

SEQ ID NO: 464054 - DNA, 30 bp, Artificial Sequence
  Synthetic oligonucleotide
gctctaacgcaattacttcacgaattctaa

SEQ ID NO: 464055 - DNA, 30 bp, Artificial Sequence
  Synthetic oligonucleotide
actacacgggccaattcggtcgaattctaa

SEQ ID NO: 464056 - DNA, 30 bp, Artificial Sequence
  Synthetic oligonucleotide
ttcaattttcacactggaaagctattctaa

SEQ ID NO: 464057 - DNA, 30 bp, Artificial Sequence
  Synthetic oligonucleotide
tgcccagtaataaaggcggttgtattctaa

SEQ ID NO: 464058 - DNA, 30 bp, Artificial Sequence
  Synthetic oligonucleotide
ccaccagttgcagtcagacaactgttctaa

SEQ ID NO: 464059 - DNA, 30 bp, Artificial Sequence
  Synthetic oligonucleotide
tcctttattatgctccatgtagtgttctaa

SEQ ID NO: 464060 - DNA, 31 bp, Artificial Sequence
  Synthetic oligonucleotide
tgcagctgaaaggtcgtaggtcgctttctaa

SEQ ID NO: 464061 - DNA, 30 bp, Artificial Sequence
  Synthetic oligonucleotide
gcactaaatatgatggcacggtctttctaa

SEQ ID NO: 464062 - DNA, 30 bp, Artificial Sequence
  Synthetic oligonucleotide
tttctaaaggctcattattaagttttctaa

SEQ ID NO: 464063 - DNA, 30 bp, Artificial Sequence
  Synthetic oligonucleotide
cttctcccagtgcagaaactcacaaagtaa

SEQ ID NO: 464064 - DNA, 30 bp, Artificial Sequence
  Synthetic oligonucleotide
gatatacccgtcactccgaaatcaaagtaa

SEQ ID NO: 464065 - DNA, 30 bp, Artificial Sequence
  Synthetic oligonucleotide
aaccccggaattccgcagctttcaaagtaa

SEQ ID NO: 464066 - DNA, 30 bp, Artificial Sequence
  Synthetic oligonucleotide
gatttgaggtggcgagaaaaaataaagtaa

SEQ ID NO: 464067 - DNA, 30 bp, Artificial Sequence
  Synthetic oligonucleotide
ctattccaggtttgccagttgttaaagtaa

SEQ ID NO: 464068 - DNA, 30 bp, Artificial Sequence
  Synthetic oligonucleotide
aagtctgggcgtaggggcttgcacaagtaa

SEQ ID NO: 464069 - DNA, 30 bp, Artificial Sequence
  Synthetic oligonucleotide
tattccaatcggctaacgctgggcaagtaa

SEQ ID NO: 464070 - DNA, 30 bp, Artificial Sequence
  Synthetic oligonucleotide
acggctttttttgggcttccagcgaagtaa

SEQ ID NO: 464071 - DNA, 30 bp, Artificial Sequence
  Synthetic oligonucleotide
aggttgaaagtattctgactgtggaagtaa

SEQ ID NO: 464072 - DNA, 30 bp, Artificial Sequence
  Synthetic oligonucleotide
attgttgggtatgaccacgggatgaagtaa

SEQ ID NO: 464073 - DNA, 30 bp, Artificial Sequence
  Synthetic oligonucleotide
ctaccctttgcggttttacaagataagtaa

SEQ ID NO: 464074 - DNA, 30 bp, Artificial Sequence
  Synthetic oligonucleotide
tttaaattcagtcctgggcgttaacagtaa

SEQ ID NO: 464075 - DNA, 30 bp, Artificial Sequence
  Synthetic oligonucleotide
taatccaggaccatttggacgtgacagtaa

SEQ ID NO: 464076 - DNA, 30 bp, Artificial Sequence
  Synthetic oligonucleotide
accatggttcgggtaatattattacagtaa

SEQ ID NO: 464077 - DNA, 30 bp, Artificial Sequence
  Synthetic oligonucleotide
tttaatgagtaatcagcctcgggccagtaa

SEQ ID NO: 464078 - DNA, 30 bp, Artificial Sequence
  Synthetic oligonucleotide
cctttcgaccacgctgtggatctccagtaa

SEQ ID NO: 464079 - DNA, 30 bp, Artificial Sequence
  Synthetic oligonucleotide
cttttttggagacacgacaaattagagtaa

SEQ ID NO: 464080 - DNA, 30 bp, Artificial Sequence
  Synthetic oligonucleotide
tagttactttttcgtgattgctcggagtaa

SEQ ID NO: 464081 - DNA, 30 bp, Artificial Sequence
  Synthetic oligonucleotide
tttgttagtagacctcgatagttggagtaa

SEQ ID NO: 464082 - DNA, 30 bp, Artificial Sequence
  Synthetic oligonucleotide
gccgctcactggagacgcccgggtgagtaa

SEQ ID NO: 464083 - DNA, 30 bp, Artificial Sequence
  Synthetic oligonucleotide
agatccggatttcaggcgctagcatagtaa

SEQ ID NO: 464084 - DNA, 30 bp, Artificial Sequence
  Synthetic oligonucleotide
atttacttagacaagtctaactagtagtaa

SEQ ID NO: 464085 - DNA, 30 bp, Artificial Sequence
  Synthetic oligonucleotide
ttttacacgttctggcaatacaattagtaa

SEQ ID NO: 464086 - DNA, 30 bp, Artificial Sequence
  Synthetic oligonucleotide
ttataggtggagcatctcccgtattagtaa

SEQ ID NO: 464087 - DNA, 30 bp, Artificial Sequence
  Synthetic oligonucleotide
taacagcgtataggctcacattgttagtaa

SEQ ID NO: 464088 - DNA, 30 bp, Artificial Sequence
  Synthetic oligonucleotide
tcccattatgctattatggccctaacgtaa

SEQ ID NO: 464089 - DNA, 30 bp, Artificial Sequence
  Synthetic oligonucleotide
aactcgtatcgacgcgtggtatccacgtaa

SEQ ID NO: 464090 - DNA, 30 bp, Artificial Sequence
  Synthetic oligonucleotide
ccacgcttgcctttcgtccgtatcacgtaa

SEQ ID NO: 464091 - DNA, 30 bp, Artificial Sequence
  Synthetic oligonucleotide
ttgcgaacgtggtaaagtccgcagacgtaa

SEQ ID NO: 464092 - DNA, 30 bp, Artificial Sequence
  Synthetic oligonucleotide
ctaaccgtcattgaatatgctaggacgtaa

SEQ ID NO: 464093 - DNA, 30 bp, Artificial Sequence
  Synthetic oligonucleotide
ggactatgtgaccgataaagtttgacgtaa

SEQ ID NO: 464094 - DNA, 30 bp, Artificial Sequence
  Synthetic oligonucleotide
atttggggaacgtaggtttgaactacgtaa

SEQ ID NO: 464095 - DNA, 30 bp, Artificial Sequence
  Synthetic oligonucleotide
tccggcatgcgtggataaaagagtacgtaa

SEQ ID NO: 464096 - DNA, 30 bp, Artificial Sequence
  Synthetic oligonucleotide
tttacatctaaaataccgatgggtacgtaa

SEQ ID NO: 464097 - DNA, 30 bp, Artificial Sequence
  Synthetic oligonucleotide
ttaatgaacttcttgggggcataaccgtaa

SEQ ID NO: 464098 - DNA, 30 bp, Artificial Sequence
  Synthetic oligonucleotide
caacaccgccagaattagtgggacccgtaa

SEQ ID NO: 464099 - DNA, 30 bp, Artificial Sequence
  Synthetic oligonucleotide
acatttggtttagagactgaaatgccgtaa

SEQ ID NO: 464100 - DNA, 30 bp, Artificial Sequence
  Synthetic oligonucleotide
gtcttaccacggatcggacctaaagcgtaa

SEQ ID NO: 464101 - DNA, 30 bp, Artificial Sequence
  Synthetic oligonucleotide
tgacggtatatccccctgcgccaagcgtaa

SEQ ID NO: 464102 - DNA, 30 bp, Artificial Sequence
  Synthetic oligonucleotide
aactccgtgttggaggatgttgacgcgtaa

SEQ ID NO: 464103 - DNA, 30 bp, Artificial Sequence
  Synthetic oligonucleotide
cacgggtagtaggttaatagtgccgcgtaa

SEQ ID NO: 464104 - DNA, 30 bp, Artificial Sequence
  Synthetic oligonucleotide
ctaattggcagctatattaagcgcgcgtaa

SEQ ID NO: 464105 - DNA, 30 bp, Artificial Sequence
  Synthetic oligonucleotide
cgaagaggtgacggttagagataggcgtaa

SEQ ID NO: 464106 - DNA, 30 bp, Artificial Sequence
  Synthetic oligonucleotide
tgcattacgcgtgctgaaatacgggcgtaa

SEQ ID NO: 464107 - DNA, 30 bp, Artificial Sequence
  Synthetic oligonucleotide
ggtagtacctaggcctagtactgggcgtaa

SEQ ID NO: 464108 - DNA, 30 bp, Artificial Sequence
  Synthetic oligonucleotide
aaacgatcggtgaacaaagacagctcgtaa

SEQ ID NO: 464109 - DNA, 30 bp, Artificial Sequence
  Synthetic oligonucleotide
cactcttaagctgaaaggtaagagtcgtaa

SEQ ID NO: 464110 - DNA, 30 bp, Artificial Sequence
  Synthetic oligonucleotide
tgtgaactcagttccaaatgcaccaggtaa

SEQ ID NO: 464111 - DNA, 30 bp, Artificial Sequence
  Synthetic oligonucleotide
aagaggaccgattgttctgcacccaggtaa

SEQ ID NO: 464112 - DNA, 31 bp, Artificial Sequence
  Synthetic oligonucleotide
atctgtaaggtgagaaaaccgccccaggtaa

SEQ ID NO: 464113 - DNA, 30 bp, Artificial Sequence
  Synthetic oligonucleotide
cgcatatatgtaatagttttcgccaggtaa

SEQ ID NO: 464114 - DNA, 30 bp, Artificial Sequence
  Synthetic oligonucleotide
tgggtaagaggcctggtgctttccaggtaa

SEQ ID NO: 464115 - DNA, 30 bp, Artificial Sequence
  Synthetic oligonucleotide
gcattgtcaatacccatgccgcggaggtaa

SEQ ID NO: 464116 - DNA, 30 bp, Artificial Sequence
  Synthetic oligonucleotide
gtggcttagccagatctattggtgaggtaa

SEQ ID NO: 464117 - DNA, 30 bp, Artificial Sequence
  Synthetic oligonucleotide
tttgggtgatatgtaagaaaacgtaggtaa

SEQ ID NO: 464118 - DNA, 30 bp, Artificial Sequence
  Synthetic oligonucleotide
tgaatataggagcatagaacggttaggtaa

SEQ ID NO: 464119 - DNA, 30 bp, Artificial Sequence
  Synthetic oligonucleotide
ccggaagggcggcccaaccgggaacggtaa

SEQ ID NO: 464120 - DNA, 30 bp, Artificial Sequence
  Synthetic oligonucleotide
actacgactgttttgtaagtaacacggtaa

SEQ ID NO: 464121 - DNA, 30 bp, Artificial Sequence
  Synthetic oligonucleotide
aacattaaatgattccatcactcacggtaa

SEQ ID NO: 464122 - DNA, 30 bp, Artificial Sequence
  Synthetic oligonucleotide
gcgctggcaaacccgcgtagacaccggtaa

SEQ ID NO: 464123 - DNA, 30 bp, Artificial Sequence
  Synthetic oligonucleotide
aaagataaaatgtcttagtcgctccggtaa

SEQ ID NO: 464124 - DNA, 30 bp, Artificial Sequence
  Synthetic oligonucleotide
tataatgaggcccagtgcagtttgcggtaa

SEQ ID NO: 464125 - DNA, 30 bp, Artificial Sequence
  Synthetic oligonucleotide
cctacaatcaaaagcgctttgtttcggtaa

SEQ ID NO: 464126 - DNA, 30 bp, Artificial Sequence
  Synthetic oligonucleotide
tttcaaaacattcaagtttgtgcagggtaa

SEQ ID NO: 464127 - DNA, 30 bp, Artificial Sequence
  Synthetic oligonucleotide
gaatctccactataccttacgtccgggtaa

SEQ ID NO: 464128 - DNA, 30 bp, Artificial Sequence
  Synthetic oligonucleotide
agtaccgtttcatcgtcgttctcggggtaa

SEQ ID NO: 464129 - DNA, 30 bp, Artificial Sequence
  Synthetic oligonucleotide
gtgtgtttagcaccgggccgcagggggtaa

SEQ ID NO: 464130 - DNA, 30 bp, Artificial Sequence
  Synthetic oligonucleotide
caagatactacgataacgcagactgggtaa

SEQ ID NO: 464131 - DNA, 30 bp, Artificial Sequence
  Synthetic oligonucleotide
tagagacctaattgtgcgatttgtgggtaa

SEQ ID NO: 464132 - DNA, 30 bp, Artificial Sequence
  Synthetic oligonucleotide
ttaatctagaaatatctgtccattgggtaa

SEQ ID NO: 464133 - DNA, 30 bp, Artificial Sequence
  Synthetic oligonucleotide
ctaacacggcctcccaaagtcttatggtaa

SEQ ID NO: 464134 - DNA, 30 bp, Artificial Sequence
  Synthetic oligonucleotide
agcgctaactacctcgtagaaaactggtaa

SEQ ID NO: 464135 - DNA, 30 bp, Artificial Sequence
  Synthetic oligonucleotide
cggagctcttggttgctagggggctggtaa

SEQ ID NO: 464136 - DNA, 30 bp, Artificial Sequence
  Synthetic oligonucleotide
cttttggaggtcgcacgacagttctggtaa

SEQ ID NO: 464137 - DNA, 30 bp, Artificial Sequence
  Synthetic oligonucleotide
ctagtttgcatgaatgcggtcccgtggtaa

SEQ ID NO: 464138 - DNA, 30 bp, Artificial Sequence
  Synthetic oligonucleotide
ccataactatacggggatcgggggtggtaa

SEQ ID NO: 464139 - DNA, 30 bp, Artificial Sequence
  Synthetic oligonucleotide
aaaatatcatagtacggcgcgtgttggtaa

SEQ ID NO: 464140 - DNA, 30 bp, Artificial Sequence
  Synthetic oligonucleotide
aacttatcgggccgcgctacggaaatgtaa

SEQ ID NO: 464141 - DNA, 30 bp, Artificial Sequence
  Synthetic oligonucleotide
atcccgcgttcttactaacacgtaatgtaa

SEQ ID NO: 464142 - DNA, 30 bp, Artificial Sequence
  Synthetic oligonucleotide
aaccgtatctctttggtgaactacatgtaa

SEQ ID NO: 464143 - DNA, 30 bp, Artificial Sequence
  Synthetic oligonucleotide
gttttcatttcagccaagaggtgcatgtaa

SEQ ID NO: 464144 - DNA, 30 bp, Artificial Sequence
  Synthetic oligonucleotide
acggaacagcaaagcttaatttgcatgtaa

SEQ ID NO: 464145 - DNA, 30 bp, Artificial Sequence
  Synthetic oligonucleotide
tttgcgatatgcttaagtacttagatgtaa

SEQ ID NO: 464146 - DNA, 30 bp, Artificial Sequence
  Synthetic oligonucleotide
acaatgaggctgcagttccgtgatatgtaa

SEQ ID NO: 464147 - DNA, 30 bp, Artificial Sequence
  Synthetic oligonucleotide
gatcttaacgtgtttccgtagtctatgtaa

SEQ ID NO: 464148 - DNA, 30 bp, Artificial Sequence
  Synthetic oligonucleotide
atatctgggttacgctataagtttatgtaa

SEQ ID NO: 464149 - DNA, 30 bp, Artificial Sequence
  Synthetic oligonucleotide
catcccgtcacccgggtactcaaactgtaa

SEQ ID NO: 464150 - DNA, 30 bp, Artificial Sequence
  Synthetic oligonucleotide
aatcagcgtttgtattccgagaaactgtaa

SEQ ID NO: 464151 - DNA, 30 bp, Artificial Sequence
  Synthetic oligonucleotide
ttagtcgtaccagctccagtagaactgtaa

SEQ ID NO: 464152 - DNA, 30 bp, Artificial Sequence
  Synthetic oligonucleotide
atcccctattaattaatggatacactgtaa

SEQ ID NO: 464153 - DNA, 30 bp, Artificial Sequence
  Synthetic oligonucleotide
atagcttgggcttcattggagcgactgtaa

SEQ ID NO: 464154 - DNA, 30 bp, Artificial Sequence
  Synthetic oligonucleotide
gacaaatggctctgtgaacaaggactgtaa

SEQ ID NO: 464155 - DNA, 30 bp, Artificial Sequence
  Synthetic oligonucleotide
tttaattcaggacaactggggacgctgtaa

SEQ ID NO: 464156 - DNA, 30 bp, Artificial Sequence
  Synthetic oligonucleotide
ttaggttggctccggtgtggtacgctgtaa

SEQ ID NO: 464157 - DNA, 30 bp, Artificial Sequence
  Synthetic oligonucleotide
atacattatttatacaagtgccaagtgtaa

SEQ ID NO: 464158 - DNA, 30 bp, Artificial Sequence
  Synthetic oligonucleotide
gacttcatctccgatcagccggcagtgtaa

SEQ ID NO: 464159 - DNA, 30 bp, Artificial Sequence
  Synthetic oligonucleotide
attttgagagcctgtcattggatagtgtaa

SEQ ID NO: 464160 - DNA, 30 bp, Artificial Sequence
  Synthetic oligonucleotide
cgtcattatcgatgctgttgcgacgtgtaa

SEQ ID NO: 464161 - DNA, 30 bp, Artificial Sequence
  Synthetic oligonucleotide
ttaaagtatttccccaaacgacatgtgtaa

SEQ ID NO: 464162 - DNA, 30 bp, Artificial Sequence
  Synthetic oligonucleotide
acagtgttgaaacaccgttttcgtgtgtaa

SEQ ID NO: 464163 - DNA, 30 bp, Artificial Sequence
  Synthetic oligonucleotide
tcttatctgttgtgttttcctcttgtgtaa

SEQ ID NO: 464164 - DNA, 30 bp, Artificial Sequence
  Synthetic oligonucleotide
ctttgtacgtgagatgatcgcaacttgtaa

SEQ ID NO: 464165 - DNA, 30 bp, Artificial Sequence
  Synthetic oligonucleotide
tgctaacttcggttttccgtttacttgtaa

SEQ ID NO: 464166 - DNA, 30 bp, Artificial Sequence
  Synthetic oligonucleotide
ggggggcaaggaaatcgggcctggttgtaa

SEQ ID NO: 464167 - DNA, 30 bp, Artificial Sequence
  Synthetic oligonucleotide
ttcgttcaaaagaacgctgaaatgttgtaa

SEQ ID NO: 464168 - DNA, 30 bp, Artificial Sequence
  Synthetic oligonucleotide
taatgtttaatctttgctccgatgttgtaa

SEQ ID NO: 464169 - DNA, 30 bp, Artificial Sequence
  Synthetic oligonucleotide
gacgtggggcgtctaacttaatctttgtaa

SEQ ID NO: 464170 - DNA, 30 bp, Artificial Sequence
  Synthetic oligonucleotide
ctacttctggacgccagggcctcaaattaa

SEQ ID NO: 464171 - DNA, 30 bp, Artificial Sequence
  Synthetic oligonucleotide
tgtaggcttttcaacatgagttgaaattaa

SEQ ID NO: 464172 - DNA, 30 bp, Artificial Sequence
  Synthetic oligonucleotide
ccactagcatagcgccagcctataaattaa

SEQ ID NO: 464173 - DNA, 30 bp, Artificial Sequence
  Synthetic oligonucleotide
gcatcgagcttaagttaagcgttaaattaa

SEQ ID NO: 464174 - DNA, 30 bp, Artificial Sequence
  Synthetic oligonucleotide
acaatctagttgcaataacgtagcaattaa

SEQ ID NO: 464175 - DNA, 30 bp, Artificial Sequence
  Synthetic oligonucleotide
gcttagcatactttttatggaggcaattaa

SEQ ID NO: 464176 - DNA, 30 bp, Artificial Sequence
  Synthetic oligonucleotide
aaaatctcagttgttcccttatagaattaa

SEQ ID NO: 464177 - DNA, 30 bp, Artificial Sequence
  Synthetic oligonucleotide
tagtacttggcgattgtattgtcgaattaa

SEQ ID NO: 464178 - DNA, 30 bp, Artificial Sequence
  Synthetic oligonucleotide
aaatttatatgcatgaacaatcggaattaa

SEQ ID NO: 464179 - DNA, 30 bp, Artificial Sequence
  Synthetic oligonucleotide
gcagtctcagaatttctgggtcataattaa

SEQ ID NO: 464180 - DNA, 30 bp, Artificial Sequence
  Synthetic oligonucleotide
attcaacgtcgtgcgtattgtactaattaa

SEQ ID NO: 464181 - DNA, 30 bp, Artificial Sequence
  Synthetic oligonucleotide
ggccgggttaataagctattggctaattaa

SEQ ID NO: 464182 - DNA, 30 bp, Artificial Sequence
  Synthetic oligonucleotide
atgtttggacgattttaattaagtaattaa

SEQ ID NO: 464183 - DNA, 30 bp, Artificial Sequence
  Synthetic oligonucleotide
gcctaatagtgctgttatacaattaattaa

SEQ ID NO: 464184 - DNA, 30 bp, Artificial Sequence
  Synthetic oligonucleotide
aactgggccaacgtcattggtattaattaa

SEQ ID NO: 464185 - DNA, 30 bp, Artificial Sequence
  Synthetic oligonucleotide
ctagtaattttggatcgctgttttaattaa

SEQ ID NO: 464186 - DNA, 30 bp, Artificial Sequence
  Synthetic oligonucleotide
tggaagccttttcaggatcgataacattaa

SEQ ID NO: 464187 - DNA, 30 bp, Artificial Sequence
  Synthetic oligonucleotide
gtagggtcacgcacatgcttggcacattaa

SEQ ID NO: 464188 - DNA, 30 bp, Artificial Sequence
  Synthetic oligonucleotide
atgtcgatgcccgttcaaatattacattaa

SEQ ID NO: 464189 - DNA, 30 bp, Artificial Sequence
  Synthetic oligonucleotide
gttgctccttaggcgatcattacccattaa

SEQ ID NO: 464190 - DNA, 30 bp, Artificial Sequence
  Synthetic oligonucleotide
ggctgtacggttgcagttttaaagcattaa

SEQ ID NO: 464191 - DNA, 30 bp, Artificial Sequence
  Synthetic oligonucleotide
atctcctatgctgatatcatggggcattaa

SEQ ID NO: 464192 - DNA, 30 bp, Artificial Sequence
  Synthetic oligonucleotide
agcatacacagacgttaagagtaagattaa

SEQ ID NO: 464193 - DNA, 30 bp, Artificial Sequence
  Synthetic oligonucleotide
ggtcggatgggatacttctcgccagattaa

SEQ ID NO: 464194 - DNA, 30 bp, Artificial Sequence
  Synthetic oligonucleotide
tagagacaacgaggcgatattatagattaa

SEQ ID NO: 464195 - DNA, 30 bp, Artificial Sequence
  Synthetic oligonucleotide
tctaggtcctgttatctacatagcgattaa

SEQ ID NO: 464196 - DNA, 30 bp, Artificial Sequence
  Synthetic oligonucleotide
actatgggcgccggattacacggcgattaa

SEQ ID NO: 464197 - DNA, 30 bp, Artificial Sequence
  Synthetic oligonucleotide
gtgtgtccacatacagcgtaataatattaa

SEQ ID NO: 464198 - DNA, 30 bp, Artificial Sequence
  Synthetic oligonucleotide
atgtgattttggcgagaaacttaatattaa

SEQ ID NO: 464199 - DNA, 30 bp, Artificial Sequence
  Synthetic oligonucleotide
ggttttcttcccgttaattaccgatattaa

SEQ ID NO: 464200 - DNA, 30 bp, Artificial Sequence
  Synthetic oligonucleotide
tgaatattcgtcatggtgtagcgatattaa

SEQ ID NO: 464201 - DNA, 30 bp, Artificial Sequence
  Synthetic oligonucleotide
aaattccttggtccagtggtcggatattaa

SEQ ID NO: 464202 - DNA, 30 bp, Artificial Sequence
  Synthetic oligonucleotide
aaagacctacccggacagactttatattaa

SEQ ID NO: 464203 - DNA, 30 bp, Artificial Sequence
  Synthetic oligonucleotide
tctttggccaacagatatgcagactattaa

SEQ ID NO: 464204 - DNA, 30 bp, Artificial Sequence
  Synthetic oligonucleotide
acggggcaccccggctcgggggcgtattaa

SEQ ID NO: 464205 - DNA, 30 bp, Artificial Sequence
  Synthetic oligonucleotide
tgttcgacttgtggtaatcaagggtattaa

SEQ ID NO: 464206 - DNA, 30 bp, Artificial Sequence
  Synthetic oligonucleotide
aatgtcttgcctttacgtttcatgtattaa

SEQ ID NO: 464207 - DNA, 30 bp, Artificial Sequence
  Synthetic oligonucleotide
tattaggagtaagtaacctataattattaa

SEQ ID NO: 464208 - DNA, 30 bp, Artificial Sequence
  Synthetic oligonucleotide
ggaaaaacttccgcttacactgcttattaa

SEQ ID NO: 464209 - DNA, 30 bp, Artificial Sequence
  Synthetic oligonucleotide
tcaacacaggatgtgacagttttttattaa

SEQ ID NO: 464210 - DNA, 30 bp, Artificial Sequence
  Synthetic oligonucleotide
tgagttatccaattagagattcgcacttaa

SEQ ID NO: 464211 - DNA, 30 bp, Artificial Sequence
  Synthetic oligonucleotide
aggctttcttgtcactacggagcgacttaa

SEQ ID NO: 464212 - DNA, 30 bp, Artificial Sequence
  Synthetic oligonucleotide
tagtgaatcgcagtgctcatagctacttaa

SEQ ID NO: 464213 - DNA, 30 bp, Artificial Sequence
  Synthetic oligonucleotide
tctcgatagtgtcgaagtgtaaaaccttaa

SEQ ID NO: 464214 - DNA, 30 bp, Artificial Sequence
  Synthetic oligonucleotide
atggcagaattcagggggttgacgccttaa

SEQ ID NO: 464215 - DNA, 30 bp, Artificial Sequence
  Synthetic oligonucleotide
ttgtatcggcccgttaccaaaaggccttaa

SEQ ID NO: 464216 - DNA, 30 bp, Artificial Sequence
  Synthetic oligonucleotide
acacctgcgactgcagctgcaactccttaa

SEQ ID NO: 464217 - DNA, 30 bp, Artificial Sequence
  Synthetic oligonucleotide
aaacatctaccatgcggctaatttccttaa

SEQ ID NO: 464218 - DNA, 30 bp, Artificial Sequence
  Synthetic oligonucleotide
ttttgtcgagggattttcaacaaagcttaa

SEQ ID NO: 464219 - DNA, 30 bp, Artificial Sequence
  Synthetic oligonucleotide
aaaatgtgagttgtccagggctaagcttaa

SEQ ID NO: 464220 - DNA, 30 bp, Artificial Sequence
  Synthetic oligonucleotide
tcagtcgtctccattggctatatagcttaa

SEQ ID NO: 464221 - DNA, 30 bp, Artificial Sequence
  Synthetic oligonucleotide
gctcagtggggcagttttcgagccgcttaa

SEQ ID NO: 464222 - DNA, 30 bp, Artificial Sequence
  Synthetic oligonucleotide
tgttatctagagtggcatagggccgcttaa

SEQ ID NO: 464223 - DNA, 30 bp, Artificial Sequence
  Synthetic oligonucleotide
cacctccgggtaatatcagctctggcttaa

SEQ ID NO: 464224 - DNA, 30 bp, Artificial Sequence
  Synthetic oligonucleotide
cacacggtgacgcacccctccgatgcttaa

SEQ ID NO: 464225 - DNA, 30 bp, Artificial Sequence
  Synthetic oligonucleotide
ctaccgttacatgtactagtgtatgcttaa

SEQ ID NO: 464226 - DNA, 30 bp, Artificial Sequence
  Synthetic oligonucleotide
ttcggatatgatcggcactctagtgcttaa

SEQ ID NO: 464227 - DNA, 30 bp, Artificial Sequence
  Synthetic oligonucleotide
ctcccctttgggtgtactcaaggtgcttaa

SEQ ID NO: 464228 - DNA, 30 bp, Artificial Sequence
  Synthetic oligonucleotide
cgccatcattccagctgacgctgtgcttaa

SEQ ID NO: 464229 - DNA, 30 bp, Artificial Sequence
  Synthetic oligonucleotide
gaattgtgtcactagagttggtaatcttaa

SEQ ID NO: 464230 - DNA, 30 bp, Artificial Sequence
  Synthetic oligonucleotide
tgtaacgcaaagcgttacgggggatcttaa

SEQ ID NO: 464231 - DNA, 30 bp, Artificial Sequence
  Synthetic oligonucleotide
tctagtagttggcgacgccccggctcttaa

SEQ ID NO: 464232 - DNA, 30 bp, Artificial Sequence
  Synthetic oligonucleotide
attttgggtgggatatgcgtctcgtcttaa

SEQ ID NO: 464233 - DNA, 30 bp, Artificial Sequence
  Synthetic oligonucleotide
gatctcacgtcagtgctgccattgtcttaa

SEQ ID NO: 464234 - DNA, 30 bp, Artificial Sequence
  Synthetic oligonucleotide
caggtattcgacctagcttaacattcttaa

SEQ ID NO: 464235 - DNA, 30 bp, Artificial Sequence
  Synthetic oligonucleotide
ttcatacaaaggacacggacggattcttaa

SEQ ID NO: 464236 - DNA, 30 bp, Artificial Sequence
  Synthetic oligonucleotide
ggcgcactgactgtcacgtccgtttcttaa

SEQ ID NO: 464237 - DNA, 30 bp, Artificial Sequence
  Synthetic oligonucleotide
aacctttggaaaggtgtaccggcaagttaa

SEQ ID NO: 464238 - DNA, 30 bp, Artificial Sequence
  Synthetic oligonucleotide
accacggtgccaagtcattgcagaagttaa

SEQ ID NO: 464239 - DNA, 30 bp, Artificial Sequence
  Synthetic oligonucleotide
ggccattcagggcgcagagtactaagttaa

SEQ ID NO: 464240 - DNA, 30 bp, Artificial Sequence
  Synthetic oligonucleotide
atcagggaatcttacggcgcagacagttaa

SEQ ID NO: 464241 - DNA, 30 bp, Artificial Sequence
  Synthetic oligonucleotide
aatactgattggcgcggcacagccagttaa

SEQ ID NO: 464242 - DNA, 30 bp, Artificial Sequence
  Synthetic oligonucleotide
gaaattcaggatgcttagtcctccagttaa

SEQ ID NO: 464243 - DNA, 30 bp, Artificial Sequence
  Synthetic oligonucleotide
aggttacctgcgagcgaacgtagcagttaa

SEQ ID NO: 464244 - DNA, 30 bp, Artificial Sequence
  Synthetic oligonucleotide
gagagactcatatggacaagagtcagttaa

SEQ ID NO: 464245 - DNA, 30 bp, Artificial Sequence
  Synthetic oligonucleotide
attttggttaatggagatgtaccgagttaa

SEQ ID NO: 464246 - DNA, 30 bp, Artificial Sequence
  Synthetic oligonucleotide
tctgagtcccggagagggttagggagttaa

SEQ ID NO: 464247 - DNA, 30 bp, Artificial Sequence
  Synthetic oligonucleotide
aagtaccagctgcaggcttacttgagttaa

SEQ ID NO: 464248 - DNA, 30 bp, Artificial Sequence
  Synthetic oligonucleotide
taaagcaaaaaggcgatgatgcatagttaa

SEQ ID NO: 464249 - DNA, 30 bp, Artificial Sequence
  Synthetic oligonucleotide
tgcatgactgctagcctacgctcacgttaa

SEQ ID NO: 464250 - DNA, 30 bp, Artificial Sequence
  Synthetic oligonucleotide
ttatacttggctgcggttattatgcgttaa

SEQ ID NO: 464251 - DNA, 30 bp, Artificial Sequence
  Synthetic oligonucleotide
attctggcaacgcgttaagttaatcgttaa

SEQ ID NO: 464252 - DNA, 30 bp, Artificial Sequence
  Synthetic oligonucleotide
ttgaccgaagaatgttgtccgattcgttaa

SEQ ID NO: 464253 - DNA, 30 bp, Artificial Sequence
  Synthetic oligonucleotide
gctgtcagggcttacgtggcaaaaggttaa

SEQ ID NO: 464254 - DNA, 30 bp, Artificial Sequence
  Synthetic oligonucleotide
gttctatactacttaatttacgcaggttaa

SEQ ID NO: 464255 - DNA, 30 bp, Artificial Sequence
  Synthetic oligonucleotide
aggtcggcgcagctacaccaaataggttaa

SEQ ID NO: 464256 - DNA, 30 bp, Artificial Sequence
  Synthetic oligonucleotide
tcctcaaatgcgaagtggtccataggttaa

SEQ ID NO: 464257 - DNA, 30 bp, Artificial Sequence
  Synthetic oligonucleotide
ttccggtagcgtcagcagccggacggttaa

SEQ ID NO: 464258 - DNA, 30 bp, Artificial Sequence
  Synthetic oligonucleotide
gctgggctgacggggggtccaacgggttaa

SEQ ID NO: 464259 - DNA, 31 bp, Artificial Sequence
  Synthetic oligonucleotide
gctaaagggaaatgaggacttgccgggttaa

SEQ ID NO: 464260 - DNA, 30 bp, Artificial Sequence
  Synthetic oligonucleotide
ggacttttgacgtgagttatgctgggttaa

SEQ ID NO: 464261 - DNA, 30 bp, Artificial Sequence
  Synthetic oligonucleotide
ctcgcgtaggtagggtcactcactggttaa

SEQ ID NO: 464262 - DNA, 30 bp, Artificial Sequence
  Synthetic oligonucleotide
gcccgcggatataggcccgcccttggttaa

SEQ ID NO: 464263 - DNA, 30 bp, Artificial Sequence
  Synthetic oligonucleotide
taatatacccgctagatactagttggttaa

SEQ ID NO: 464264 - DNA, 30 bp, Artificial Sequence
  Synthetic oligonucleotide
gaagaggctacatgacgcacttttggttaa

SEQ ID NO: 464265 - DNA, 30 bp, Artificial Sequence
  Synthetic oligonucleotide
aaccgctcgctctcatgaattaaatgttaa

SEQ ID NO: 464266 - DNA, 30 bp, Artificial Sequence
  Synthetic oligonucleotide
ttcggaaaacctccgtacgagctatgttaa

SEQ ID NO: 464267 - DNA, 30 bp, Artificial Sequence
  Synthetic oligonucleotide
acccacattctggccataaatcactgttaa

SEQ ID NO: 464268 - DNA, 30 bp, Artificial Sequence
  Synthetic oligonucleotide
aatttaattgtcaggcaggttcactgttaa

SEQ ID NO: 464269 - DNA, 30 bp, Artificial Sequence
  Synthetic oligonucleotide
ggatgcaaataaacgactggctagtgttaa

SEQ ID NO: 464270 - DNA, 30 bp, Artificial Sequence
  Synthetic oligonucleotide
tattggatatcctagcgacgcgcttgttaa

SEQ ID NO: 464271 - DNA, 30 bp, Artificial Sequence
  Synthetic oligonucleotide
gtctcatgggcgtgtaagacatgttgttaa

SEQ ID NO: 464272 - DNA, 30 bp, Artificial Sequence
  Synthetic oligonucleotide
gagtatcgacttcacattggagcaatttaa

SEQ ID NO: 464273 - DNA, 30 bp, Artificial Sequence
  Synthetic oligonucleotide
agtccaagggctacttcgccacacatttaa

SEQ ID NO: 464274 - DNA, 30 bp, Artificial Sequence
  Synthetic oligonucleotide
agcagcgcgagcgagatacagggcatttaa

SEQ ID NO: 464275 - DNA, 30 bp, Artificial Sequence
  Synthetic oligonucleotide
gttgggcaaggccagcttcggttcatttaa

SEQ ID NO: 464276 - DNA, 30 bp, Artificial Sequence
  Synthetic oligonucleotide
gttgtatgtatgacggattcggagatttaa

SEQ ID NO: 464277 - DNA, 30 bp, Artificial Sequence
  Synthetic oligonucleotide
tttgtaccgcgtcgggcgaagtggatttaa

SEQ ID NO: 464278 - DNA, 30 bp, Artificial Sequence
  Synthetic oligonucleotide
gtgcttgtagttgcacgcggaactatttaa

SEQ ID NO: 464279 - DNA, 30 bp, Artificial Sequence
  Synthetic oligonucleotide
tgggcgcttctgcgctgatatagtatttaa

SEQ ID NO: 464280 - DNA, 30 bp, Artificial Sequence
  Synthetic oligonucleotide
gcagaagcccggcataaggcgggtatttaa

SEQ ID NO: 464281 - DNA, 30 bp, Artificial Sequence
  Synthetic oligonucleotide
aggaaccgcatccatcctgctcttatttaa

SEQ ID NO: 464282 - DNA, 30 bp, Artificial Sequence
  Synthetic oligonucleotide
gagtgggggtttgtacggggtgttatttaa

SEQ ID NO: 464283 - DNA, 30 bp, Artificial Sequence
  Synthetic oligonucleotide
gagatcgagcaaacaacgtcgtaactttaa

SEQ ID NO: 464284 - DNA, 30 bp, Artificial Sequence
  Synthetic oligonucleotide
ccattgattaatacatgttaggcactttaa

SEQ ID NO: 464285 - DNA, 30 bp, Artificial Sequence
  Synthetic oligonucleotide
gactcggtcggtatttcattgcgactttaa

SEQ ID NO: 464286 - DNA, 30 bp, Artificial Sequence
  Synthetic oligonucleotide
ctgcaaacgggtatatacgtgacgctttaa

SEQ ID NO: 464287 - DNA, 30 bp, Artificial Sequence
  Synthetic oligonucleotide
taaagaaaaatgttctaaagacatctttaa

SEQ ID NO: 464288 - DNA, 30 bp, Artificial Sequence
  Synthetic oligonucleotide
taggggatatgtagttgcctggctctttaa

SEQ ID NO: 464289 - DNA, 30 bp, Artificial Sequence
  Synthetic oligonucleotide
tgattcacatgggttgacccttctctttaa

SEQ ID NO: 464290 - DNA, 30 bp, Artificial Sequence
  Synthetic oligonucleotide
atcagccgcaaattctacaattgtctttaa

SEQ ID NO: 464291 - DNA, 30 bp, Artificial Sequence
  Synthetic oligonucleotide
ccatcgataaactaatatcaaaaagtttaa

SEQ ID NO: 464292 - DNA, 30 bp, Artificial Sequence
  Synthetic oligonucleotide
tcaatgacggtacgctggtttacagtttaa

SEQ ID NO: 464293 - DNA, 30 bp, Artificial Sequence
  Synthetic oligonucleotide
tcaatagcctgtgcctagtgcgcagtttaa

SEQ ID NO: 464294 - DNA, 30 bp, Artificial Sequence
  Synthetic oligonucleotide
gtagaagttcatttagacggtgcagtttaa

SEQ ID NO: 464295 - DNA, 30 bp, Artificial Sequence
  Synthetic oligonucleotide
ttacattacgtaaccgtaaaagacgtttaa

SEQ ID NO: 464296 - DNA, 30 bp, Artificial Sequence
  Synthetic oligonucleotide
gcagcccccatgcgagccttgtacgtttaa

SEQ ID NO: 464297 - DNA, 30 bp, Artificial Sequence
  Synthetic oligonucleotide
gatttatatcgtggagacctggtcgtttaa

SEQ ID NO: 464298 - DNA, 30 bp, Artificial Sequence
  Synthetic oligonucleotide
agaaccgcagatgcgcagcctgtcgtttaa

SEQ ID NO: 464299 - DNA, 30 bp, Artificial Sequence
  Synthetic oligonucleotide
ctaaaacattttcatgaggggttcgtttaa

SEQ ID NO: 464300 - DNA, 30 bp, Artificial Sequence
  Synthetic oligonucleotide
atcggacacatcggtccgctttcggtttaa

SEQ ID NO: 464301 - DNA, 30 bp, Artificial Sequence
  Synthetic oligonucleotide
tgaccgccgtgagtgctagttatggtttaa

SEQ ID NO: 464302 - DNA, 30 bp, Artificial Sequence
  Synthetic oligonucleotide
aaaacttatactcgctcgggcaatgtttaa

SEQ ID NO: 464303 - DNA, 30 bp, Artificial Sequence
  Synthetic oligonucleotide
gcatttaacggcgcattgacgaatgtttaa

SEQ ID NO: 464304 - DNA, 30 bp, Artificial Sequence
  Synthetic oligonucleotide
attatcctatatcgtggtacaagtgtttaa

SEQ ID NO: 464305 - DNA, 30 bp, Artificial Sequence
  Synthetic oligonucleotide
aaagtggccaagccgccggcccaattttaa

SEQ ID NO: 464306 - DNA, 30 bp, Artificial Sequence
  Synthetic oligonucleotide
cttcaaagtttcttatagctccacttttaa

SEQ ID NO: 464307 - DNA, 30 bp, Artificial Sequence
  Synthetic oligonucleotide
agatatgagtatctccggatttggttttaa

SEQ ID NO: 464308 - DNA, 30 bp, Artificial Sequence
  Synthetic oligonucleotide
cagcagggaccctcatggtctgtgttttaa

SEQ ID NO: 464309 - DNA, 30 bp, Artificial Sequence
  Synthetic oligonucleotide
gctatctgtcatttctctcgtgtgttttaa

SEQ ID NO: 464310 - DNA, 30 bp, Artificial Sequence
  Synthetic oligonucleotide
actgttttgcgttggggtgctcatttttaa

SEQ ID NO: 464311 - DNA, 30 bp, Artificial Sequence
  Synthetic oligonucleotide
acgcccatgggccacatttgacgtttttaa

SEQ ID NO: 464312 - DNA, 30 bp, Artificial Sequence
  Synthetic oligonucleotide
tggctcaggacagagtcacaaggtttttaa

SEQ ID NO: 464313 - DNA, 30 bp, Artificial Sequence
  Synthetic oligonucleotide
tttcaagggttcgggtcatctattttttaa

SEQ ID NO: 464314 - DNA, 30 bp, Artificial Sequence
  Synthetic oligonucleotide
acgtcgtcgtagcatgacaaccttttttaa

SEQ ID NO: 464315 - DNA, 30 bp, Artificial Sequence
  Synthetic oligonucleotide
cacttgtagcacgctgaaacccgaaaaaca

SEQ ID NO: 464316 - DNA, 30 bp, Artificial Sequence
  Synthetic oligonucleotide
gaggattcggtccgcggctgttcgaaaaca

SEQ ID NO: 464317 - DNA, 30 bp, Artificial Sequence
  Synthetic oligonucleotide
caccgcacatgtgcccctattgataaaaca

SEQ ID NO: 464318 - DNA, 30 bp, Artificial Sequence
  Synthetic oligonucleotide
caccgttctataaatgtatctggtaaaaca

SEQ ID NO: 464319 - DNA, 30 bp, Artificial Sequence
  Synthetic oligonucleotide
ggtcaactgcaggtacatgtatgtaaaaca

SEQ ID NO: 464320 - DNA, 30 bp, Artificial Sequence
  Synthetic oligonucleotide
aaccataatccgcgggtcgcgcttaaaaca

SEQ ID NO: 464321 - DNA, 30 bp, Artificial Sequence
  Synthetic oligonucleotide
gccagcaatatagtagacgcagaacaaaca

SEQ ID NO: 464322 - DNA, 30 bp, Artificial Sequence
  Synthetic oligonucleotide
ttctgcattctcgcggacctcccacaaaca

SEQ ID NO: 464323 - DNA, 30 bp, Artificial Sequence
  Synthetic oligonucleotide
cgtatcacgcctggaatatgggtacaaaca

SEQ ID NO: 464324 - DNA, 30 bp, Artificial Sequence
  Synthetic oligonucleotide
gaactagacgcatacccatagaaccaaaca

SEQ ID NO: 464325 - DNA, 30 bp, Artificial Sequence
  Synthetic oligonucleotide
aatcaggtgggcgcctcttcgcagcaaaca

SEQ ID NO: 464326 - DNA, 30 bp, Artificial Sequence
  Synthetic oligonucleotide
cgttctaattgtgagaagctgatgcaaaca

SEQ ID NO: 464327 - DNA, 30 bp, Artificial Sequence
  Synthetic oligonucleotide
gtaaccttactctttgggggaccagaaaca

SEQ ID NO: 464328 - DNA, 30 bp, Artificial Sequence
  Synthetic oligonucleotide
cgaagcagaaaaagtttaacgccggaaaca

SEQ ID NO: 464329 - DNA, 30 bp, Artificial Sequence
  Synthetic oligonucleotide
ggcatgctcgtttcttgggttcgggaaaca

SEQ ID NO: 464330 - DNA, 30 bp, Artificial Sequence
  Synthetic oligonucleotide
gaaatgggaatagcgactacccatgaaaca

SEQ ID NO: 464331 - DNA, 30 bp, Artificial Sequence
  Synthetic oligonucleotide
aaaatactttgcgaagccaaatatgaaaca

SEQ ID NO: 464332 - DNA, 30 bp, Artificial Sequence
  Synthetic oligonucleotide
cagacgcaccttccatgctcaagtgaaaca

SEQ ID NO: 464333 - DNA, 30 bp, Artificial Sequence
  Synthetic oligonucleotide
tgccgatacgaagcgtaaacgcttgaaaca

SEQ ID NO: 464334 - DNA, 30 bp, Artificial Sequence
  Synthetic oligonucleotide
gactatatactgttttatagaaaataaaca

SEQ ID NO: 464335 - DNA, 30 bp, Artificial Sequence
  Synthetic oligonucleotide
ggtgttgatttcctattcgatccataaaca

SEQ ID NO: 464336 - DNA, 30 bp, Artificial Sequence
  Synthetic oligonucleotide
acataaggagcgctcggtcagggataaaca

SEQ ID NO: 464337 - DNA, 30 bp, Artificial Sequence
  Synthetic oligonucleotide
tttagttagggtcagcataactgataaaca

SEQ ID NO: 464338 - DNA, 30 bp, Artificial Sequence
  Synthetic oligonucleotide
ccatcaacttgctccgtaaaggtataaaca

SEQ ID NO: 464339 - DNA, 30 bp, Artificial Sequence
  Synthetic oligonucleotide
agagtatattagcaaaatgccgcctaaaca

SEQ ID NO: 464340 - DNA, 30 bp, Artificial Sequence
  Synthetic oligonucleotide
acttttgagtagtacgacagtgtctaaaca

SEQ ID NO: 464341 - DNA, 30 bp, Artificial Sequence
  Synthetic oligonucleotide
ttttggataagctgacggtaattctaaaca

SEQ ID NO: 464342 - DNA, 30 bp, Artificial Sequence
  Synthetic oligonucleotide
gcttgttgagatactagtagattctaaaca

SEQ ID NO: 464343 - DNA, 30 bp, Artificial Sequence
  Synthetic oligonucleotide
atcgtcagtggccggtcgattcagtaaaca

SEQ ID NO: 464344 - DNA, 30 bp, Artificial Sequence
  Synthetic oligonucleotide
gaaacagatgcgcgaacgcgacattaaaca

SEQ ID NO: 464345 - DNA, 30 bp, Artificial Sequence
  Synthetic oligonucleotide
gtgtacttggttttgcagatccattaaaca

SEQ ID NO: 464346 - DNA, 30 bp, Artificial Sequence
  Synthetic oligonucleotide
aagagtcggtatattgttgagacttaaaca

SEQ ID NO: 464347 - DNA, 30 bp, Artificial Sequence
  Synthetic oligonucleotide
agttcggaattcacactcctgacttaaaca

SEQ ID NO: 464348 - DNA, 30 bp, Artificial Sequence
  Synthetic oligonucleotide
atagttacgaggacttaggcggtttaaaca

SEQ ID NO: 464349 - DNA, 30 bp, Artificial Sequence
  Synthetic oligonucleotide
ctcactccgtgccacagcctattttaaaca

SEQ ID NO: 464350 - DNA, 30 bp, Artificial Sequence
  Synthetic oligonucleotide
ggacctgcctatagtcctggccaaacaaca

SEQ ID NO: 464351 - DNA, 30 bp, Artificial Sequence
  Synthetic oligonucleotide
ttttcccctgcgtgacttaaaatcacaaca

SEQ ID NO: 464352 - DNA, 30 bp, Artificial Sequence
  Synthetic oligonucleotide
ggcctgtcaactccagatagactgacaaca

SEQ ID NO: 464353 - DNA, 30 bp, Artificial Sequence
  Synthetic oligonucleotide
gtgcccgtacgcaccatgggtagtacaaca

SEQ ID NO: 464354 - DNA, 30 bp, Artificial Sequence
  Synthetic oligonucleotide
gaaacctactaattgtatccggctccaaca

SEQ ID NO: 464355 - DNA, 30 bp, Artificial Sequence
  Synthetic oligonucleotide
ggcactgtgcatgcatcttcgtctccaaca

SEQ ID NO: 464356 - DNA, 30 bp, Artificial Sequence
  Synthetic oligonucleotide
aaagacgtccgggcattaatgaaagcaaca

SEQ ID NO: 464357 - DNA, 30 bp, Artificial Sequence
  Synthetic oligonucleotide
ggagcccagaactgcacgacgcaagcaaca

SEQ ID NO: 464358 - DNA, 30 bp, Artificial Sequence
  Synthetic oligonucleotide
aacaagtggaggtgtatgatctcagcaaca

SEQ ID NO: 464359 - DNA, 30 bp, Artificial Sequence
  Synthetic oligonucleotide
acgctgtttgatatacttgacggagcaaca

SEQ ID NO: 464360 - DNA, 30 bp, Artificial Sequence
  Synthetic oligonucleotide
gtgcagtatcgcagtttgcggggagcaaca

SEQ ID NO: 464361 - DNA, 30 bp, Artificial Sequence
  Synthetic oligonucleotide
aaaatagccgatgtgagggagcacgcaaca

SEQ ID NO: 464362 - DNA, 30 bp, Artificial Sequence
  Synthetic oligonucleotide
atcacgcaaacgtcgcaactccgcgcaaca

SEQ ID NO: 464363 - DNA, 30 bp, Artificial Sequence
  Synthetic oligonucleotide
tgaaccacggtgaggcagggagaggcaaca

SEQ ID NO: 464364 - DNA, 30 bp, Artificial Sequence
  Synthetic oligonucleotide
gatactattggggcacatgcaacggcaaca

SEQ ID NO: 464365 - DNA, 30 bp, Artificial Sequence
  Synthetic oligonucleotide
ctctctcttggagcggcgtgtggggcaaca

SEQ ID NO: 464366 - DNA, 30 bp, Artificial Sequence
  Synthetic oligonucleotide
gcgtatataattccttcgtatgtggcaaca

SEQ ID NO: 464367 - DNA, 30 bp, Artificial Sequence
  Synthetic oligonucleotide
aaattaccaacggattcttaacatgcaaca

SEQ ID NO: 464368 - DNA, 30 bp, Artificial Sequence
  Synthetic oligonucleotide
ggatgtggtgctcgccttgtctatgcaaca

SEQ ID NO: 464369 - DNA, 30 bp, Artificial Sequence
  Synthetic oligonucleotide
cttaaagtgcccgcttcgagaggtgcaaca

SEQ ID NO: 464370 - DNA, 30 bp, Artificial Sequence
  Synthetic oligonucleotide
acccatcagccgggccttttatgtgcaaca

SEQ ID NO: 464371 - DNA, 30 bp, Artificial Sequence
  Synthetic oligonucleotide
gaggtttagccgtaatcagcttaatcaaca

SEQ ID NO: 464372 - DNA, 30 bp, Artificial Sequence
  Synthetic oligonucleotide
cataagactcgggcggctatactatcaaca

SEQ ID NO: 464373 - DNA, 30 bp, Artificial Sequence
  Synthetic oligonucleotide
aattgtcaggacttggctgtgttatcaaca

SEQ ID NO: 464374 - DNA, 30 bp, Artificial Sequence
  Synthetic oligonucleotide
ataccggttacggacttgttttactcaaca

SEQ ID NO: 464375 - DNA, 30 bp, Artificial Sequence
  Synthetic oligonucleotide
ggccgccaggatgtaaatagctcgtcaaca

SEQ ID NO: 464376 - DNA, 30 bp, Artificial Sequence
  Synthetic oligonucleotide
gctgcagaagcgaggcgggaggcaagaaca

SEQ ID NO: 464377 - DNA, 30 bp, Artificial Sequence
  Synthetic oligonucleotide
cgcggcacatacgcgccggatgcaagaaca

SEQ ID NO: 464378 - DNA, 30 bp, Artificial Sequence
  Synthetic oligonucleotide
cagcatctcaatagcgccgattgaagaaca

SEQ ID NO: 464379 - DNA, 30 bp, Artificial Sequence
  Synthetic oligonucleotide
ttttgggtgcttgatgcagcccacagaaca

SEQ ID NO: 464380 - DNA, 30 bp, Artificial Sequence
  Synthetic oligonucleotide
aacgcgtgcgagtacgtacaccagagaaca

SEQ ID NO: 464381 - DNA, 30 bp, Artificial Sequence
  Synthetic oligonucleotide
ataccaatacgaagccgcagccagagaaca

SEQ ID NO: 464382 - DNA, 30 bp, Artificial Sequence
  Synthetic oligonucleotide
ccgtgtacgcggtacctcgaaccgagaaca

SEQ ID NO: 464383 - DNA, 30 bp, Artificial Sequence
  Synthetic oligonucleotide
ggggcgcatcattgcttcaggcggagaaca

SEQ ID NO: 464384 - DNA, 30 bp, Artificial Sequence
  Synthetic oligonucleotide
cccccggtgctgatcgagttggctagaaca

SEQ ID NO: 464385 - DNA, 30 bp, Artificial Sequence
  Synthetic oligonucleotide
tcactaaaggtattcgactcaattagaaca

SEQ ID NO: 464386 - DNA, 30 bp, Artificial Sequence
  Synthetic oligonucleotide
taaatttgataatgtttacgtccacgaaca

SEQ ID NO: 464387 - DNA, 30 bp, Artificial Sequence
  Synthetic oligonucleotide
tcacgccgactcgcgtcctatctccgaaca

SEQ ID NO: 464388 - DNA, 30 bp, Artificial Sequence
  Synthetic oligonucleotide
gtaaaaatctatgctcgagaggggcgaaca

SEQ ID NO: 464389 - DNA, 30 bp, Artificial Sequence
  Synthetic oligonucleotide
cggatgcatagtcgacatttttgtcgaaca

SEQ ID NO: 464390 - DNA, 30 bp, Artificial Sequence
  Synthetic oligonucleotide
tgagaagagtagtgaggaagcggaggaaca

SEQ ID NO: 464391 - DNA, 30 bp, Artificial Sequence
  Synthetic oligonucleotide
agccggcagcctaagagtccatgaggaaca

SEQ ID NO: 464392 - DNA, 30 bp, Artificial Sequence
  Synthetic oligonucleotide
gcaacccaaattcttgtatgtttaggaaca

SEQ ID NO: 464393 - DNA, 30 bp, Artificial Sequence
  Synthetic oligonucleotide
taatccagcatccagcaacaaagcggaaca

SEQ ID NO: 464394 - DNA, 30 bp, Artificial Sequence
  Synthetic oligonucleotide
ggggggtggcgtacgggcgcgtgcggaaca

SEQ ID NO: 464395 - DNA, 30 bp, Artificial Sequence
  Synthetic oligonucleotide
gttcgcaggaaattctggcatctcggaaca

SEQ ID NO: 464396 - DNA, 30 bp, Artificial Sequence
  Synthetic oligonucleotide
aaagcatgcgcgcagtgcgtggtcggaaca

SEQ ID NO: 464397 - DNA, 30 bp, Artificial Sequence
  Synthetic oligonucleotide
aatgttaatcggccctgaccattcggaaca

SEQ ID NO: 464398 - DNA, 30 bp, Artificial Sequence
  Synthetic oligonucleotide
gtattacgctcttttaaaagctcgggaaca

SEQ ID NO: 464399 - DNA, 30 bp, Artificial Sequence
  Synthetic oligonucleotide
actgtgttttaaagcggtcagaactgaaca

SEQ ID NO: 464400 - DNA, 30 bp, Artificial Sequence
  Synthetic oligonucleotide
ttgagtgtccacgggggacgtccgtgaaca

SEQ ID NO: 464401 - DNA, 30 bp, Artificial Sequence
  Synthetic oligonucleotide
agataggcggtttacaaggacaggtgaaca

SEQ ID NO: 464402 - DNA, 30 bp, Artificial Sequence
  Synthetic oligonucleotide
gccattagcagcagtgtcccccattgaaca

SEQ ID NO: 464403 - DNA, 30 bp, Artificial Sequence
  Synthetic oligonucleotide
gtgttcgcatccacatggcaatattgaaca

SEQ ID NO: 464404 - DNA, 30 bp, Artificial Sequence
  Synthetic oligonucleotide
tcatacgtgcttcgctcgttttattgaaca

SEQ ID NO: 464405 - DNA, 30 bp, Artificial Sequence
  Synthetic oligonucleotide
tgtttaggcaaggtacttgccctttgaaca

SEQ ID NO: 464406 - DNA, 30 bp, Artificial Sequence
  Synthetic oligonucleotide
gcagtttgccgttatttaattccactaaca

SEQ ID NO: 464407 - DNA, 30 bp, Artificial Sequence
  Synthetic oligonucleotide
atatccgtgatagagagggtgcccctaaca

SEQ ID NO: 464408 - DNA, 30 bp, Artificial Sequence
  Synthetic oligonucleotide
gttccagatttagtatatcccctcctaaca

SEQ ID NO: 464409 - DNA, 30 bp, Artificial Sequence
  Synthetic oligonucleotide
atcaccccgacgctttagtttcggctaaca

SEQ ID NO: 464410 - DNA, 30 bp, Artificial Sequence
  Synthetic oligonucleotide
aatcggcagtcgcgcgctttatcagtaaca

SEQ ID NO: 464411 - DNA, 30 bp, Artificial Sequence
  Synthetic oligonucleotide
tgtcacatccaacggtttcgacgagtaaca

SEQ ID NO: 464412 - DNA, 30 bp, Artificial Sequence
  Synthetic oligonucleotide
gcatctgcaatcatatccggcggagtaaca

SEQ ID NO: 464413 - DNA, 30 bp, Artificial Sequence
  Synthetic oligonucleotide
attgctgagtagtgctgcgacgtagtaaca

SEQ ID NO: 464414 - DNA, 30 bp, Artificial Sequence
  Synthetic oligonucleotide
cccaagcgttaatattagcgcaacgtaaca

SEQ ID NO: 464415 - DNA, 30 bp, Artificial Sequence
  Synthetic oligonucleotide
acccctagtctatgaatcataagcgtaaca

SEQ ID NO: 464416 - DNA, 30 bp, Artificial Sequence
  Synthetic oligonucleotide
catgccgcggtgcctgcagcaaaggtaaca

SEQ ID NO: 464417 - DNA, 30 bp, Artificial Sequence
  Synthetic oligonucleotide
gcgctcggcggtagcaacgcgaaggtaaca

SEQ ID NO: 464418 - DNA, 30 bp, Artificial Sequence
  Synthetic oligonucleotide
actccggagtcatgttggcagcatgtaaca

SEQ ID NO: 464419 - DNA, 30 bp, Artificial Sequence
  Synthetic oligonucleotide
ttttgcaggactgtgggtttctctgtaaca

SEQ ID NO: 464420 - DNA, 29 bp, Artificial Sequence
  Synthetic oligonucleotide
cattcttattttcatcgaaataattaaca

SEQ ID NO: 464421 - DNA, 30 bp, Artificial Sequence
  Synthetic oligonucleotide
gagttttgtcaaccagccgacacattaaca

SEQ ID NO: 464422 - DNA, 30 bp, Artificial Sequence
  Synthetic oligonucleotide
tcgttttgcgcgtgcattggtacattaaca

SEQ ID NO: 464423 - DNA, 30 bp, Artificial Sequence
  Synthetic oligonucleotide
aaataaacggtttatctacgggccttaaca

SEQ ID NO: 464424 - DNA, 30 bp, Artificial Sequence
  Synthetic oligonucleotide
agtggtgcagtctgtagactggtcttaaca

SEQ ID NO: 464425 - DNA, 30 bp, Artificial Sequence
  Synthetic oligonucleotide
tattagggcaggacagtcatatcgttaaca

SEQ ID NO: 464426 - DNA, 30 bp, Artificial Sequence
  Synthetic oligonucleotide
gaaacgtgtaaacgtcgcatgaggttaaca

SEQ ID NO: 464427 - DNA, 30 bp, Artificial Sequence
  Synthetic oligonucleotide
atccgagtacgaattaatcaggctttaaca

SEQ ID NO: 464428 - DNA, 30 bp, Artificial Sequence
  Synthetic oligonucleotide
tctcgaggtagaccggacgagtctttaaca

SEQ ID NO: 464429 - DNA, 30 bp, Artificial Sequence
  Synthetic oligonucleotide
cgcagatttgcggattacttgtgtttaaca

SEQ ID NO: 464430 - DNA, 30 bp, Artificial Sequence
  Synthetic oligonucleotide
ttcaagccacatgtccacaaccttttaaca

SEQ ID NO: 464431 - DNA, 30 bp, Artificial Sequence
  Synthetic oligonucleotide
gggagttacgctcagcagatgagaaacaca

SEQ ID NO: 464432 - DNA, 30 bp, Artificial Sequence
  Synthetic oligonucleotide
aaagttctgctggtatgcatgtgaaacaca

SEQ ID NO: 464433 - DNA, 30 bp, Artificial Sequence
  Synthetic oligonucleotide
ctaaaaattaatcgcattgaatccaacaca

SEQ ID NO: 464434 - DNA, 31 bp, Artificial Sequence
  Synthetic oligonucleotide
tactttgcgtgtgtgtaataaattcaacaca

SEQ ID NO: 464435 - DNA, 30 bp, Artificial Sequence
  Synthetic oligonucleotide
cgcgcaggtcgtgcatcagtttagaacaca

SEQ ID NO: 464436 - DNA, 30 bp, Artificial Sequence
  Synthetic oligonucleotide
tatagactcgtttgacgaggtacgaacaca

SEQ ID NO: 464437 - DNA, 30 bp, Artificial Sequence
  Synthetic oligonucleotide
cccgcctagctttggtgtagtatgaacaca

SEQ ID NO: 464438 - DNA, 30 bp, Artificial Sequence
  Synthetic oligonucleotide
gctcccgagaccgtcatagttcataacaca

SEQ ID NO: 464439 - DNA, 30 bp, Artificial Sequence
  Synthetic oligonucleotide
gattttacagttttgaatagaggtaacaca

SEQ ID NO: 464440 - DNA, 30 bp, Artificial Sequence
  Synthetic oligonucleotide
attctccgggcgtcttactagagacacaca

SEQ ID NO: 464441 - DNA, 30 bp, Artificial Sequence
  Synthetic oligonucleotide
ctctaataaccggcaaatttaggacacaca

SEQ ID NO: 464442 - DNA, 30 bp, Artificial Sequence
  Synthetic oligonucleotide
tttcgaattgtccctgtgggggggcacaca

SEQ ID NO: 464443 - DNA, 30 bp, Artificial Sequence
  Synthetic oligonucleotide
tgacgcatgattgtgtgaaaaaatcacaca

SEQ ID NO: 464444 - DNA, 30 bp, Artificial Sequence
  Synthetic oligonucleotide
ccggagaaaactacggcttttggtcacaca

SEQ ID NO: 464445 - DNA, 30 bp, Artificial Sequence
  Synthetic oligonucleotide
ttagctccgcaggttcccatgtgtcacaca

SEQ ID NO: 464446 - DNA, 30 bp, Artificial Sequence
  Synthetic oligonucleotide
gagctcaggagcggaggtttacgagacaca

SEQ ID NO: 464447 - DNA, 30 bp, Artificial Sequence
  Synthetic oligonucleotide
cggtcttgaggaagtagagtttccgacaca

SEQ ID NO: 464448 - DNA, 30 bp, Artificial Sequence
  Synthetic oligonucleotide
ttcgcatcttcttcatggaccatggacaca

SEQ ID NO: 464449 - DNA, 30 bp, Artificial Sequence
  Synthetic oligonucleotide
tctgtcactccgatttagattgtggacaca

SEQ ID NO: 464450 - DNA, 30 bp, Artificial Sequence
  Synthetic oligonucleotide
actgtccgcccggccggttagtctgacaca

SEQ ID NO: 464451 - DNA, 30 bp, Artificial Sequence
  Synthetic oligonucleotide
gagctttctaactcgaacacgggtgacaca

SEQ ID NO: 464452 - DNA, 30 bp, Artificial Sequence
  Synthetic oligonucleotide
ggtcctattaaattccctacgggatacaca

SEQ ID NO: 464453 - DNA, 27 bp, Artificial Sequence
  Synthetic oligonucleotide
cgagcgaactatgcagcagtatacaca

SEQ ID NO: 464454 - DNA, 30 bp, Artificial Sequence
  Synthetic oligonucleotide
cttttaaaggtctgtattacggactacaca

SEQ ID NO: 464455 - DNA, 30 bp, Artificial Sequence
  Synthetic oligonucleotide
tggtaagtagaacgctttttcacctacaca

SEQ ID NO: 464456 - DNA, 30 bp, Artificial Sequence
  Synthetic oligonucleotide
taaaccagacatgtatatactggctacaca

SEQ ID NO: 464457 - DNA, 30 bp, Artificial Sequence
  Synthetic oligonucleotide
aataaggtcagttttgccaaaaagtacaca

SEQ ID NO: 464458 - DNA, 30 bp, Artificial Sequence
  Synthetic oligonucleotide
cccggtaacccataagggaccgggtacaca

SEQ ID NO: 464459 - DNA, 30 bp, Artificial Sequence
  Synthetic oligonucleotide
ttatcttaataagcatgtgagtattacaca

SEQ ID NO: 464460 - DNA, 30 bp, Artificial Sequence
  Synthetic oligonucleotide
aaatgtcatgtgttaacttcagtttacaca

SEQ ID NO: 464461 - DNA, 30 bp, Artificial Sequence
  Synthetic oligonucleotide
ccgcctgcagaggtgttgggtagcaccaca

SEQ ID NO: 464462 - DNA, 30 bp, Artificial Sequence
  Synthetic oligonucleotide
cagtgtcgtccttcacgaccctggaccaca

SEQ ID NO: 464463 - DNA, 30 bp, Artificial Sequence
  Synthetic oligonucleotide
gtctaagaggtatgtatcttccataccaca

SEQ ID NO: 464464 - DNA, 30 bp, Artificial Sequence
  Synthetic oligonucleotide
cctcccttccgtttagcccaatataccaca

SEQ ID NO: 464465 - DNA, 30 bp, Artificial Sequence
  Synthetic oligonucleotide
ttcttcgtacctcccagggtatctaccaca

SEQ ID NO: 464466 - DNA, 30 bp, Artificial Sequence
  Synthetic oligonucleotide
gctttgtcccggctaggtcggtttaccaca

SEQ ID NO: 464467 - DNA, 30 bp, Artificial Sequence
  Synthetic oligonucleotide
tgcagtttgcactcgcggagaacacccaca

SEQ ID NO: 464468 - DNA, 30 bp, Artificial Sequence
  Synthetic oligonucleotide
gacaggcacacgttagcatttcaccccaca

SEQ ID NO: 464469 - DNA, 30 bp, Artificial Sequence
  Synthetic oligonucleotide
cccatgacgagaccttgtttgctccccaca

SEQ ID NO: 464470 - DNA, 30 bp, Artificial Sequence
  Synthetic oligonucleotide
gacttaagaccagctgatgggaagcccaca

SEQ ID NO: 464471 - DNA, 30 bp, Artificial Sequence
  Synthetic oligonucleotide
tcagccacgcactcgaccaaggttcccaca

SEQ ID NO: 464472 - DNA, 30 bp, Artificial Sequence
  Synthetic oligonucleotide
cgggaattatgtgtcgattctttcgccaca

SEQ ID NO: 464473 - DNA, 30 bp, Artificial Sequence
  Synthetic oligonucleotide
ttggcatatcacccactcagactggccaca

SEQ ID NO: 464474 - DNA, 30 bp, Artificial Sequence
  Synthetic oligonucleotide
ttgtggggttaactgaaaacctctgccaca

SEQ ID NO: 464475 - DNA, 27 bp, Artificial Sequence
  Synthetic oligonucleotide
gcttgatgcgtccttttggactccaca

SEQ ID NO: 464476 - DNA, 30 bp, Artificial Sequence
  Synthetic oligonucleotide
gtcgagcaaaaaatgagggcagcgtccaca

SEQ ID NO: 464477 - DNA, 30 bp, Artificial Sequence
  Synthetic oligonucleotide
gttcagttcgcgggatgtaggtcgtccaca

SEQ ID NO: 464478 - DNA, 30 bp, Artificial Sequence
  Synthetic oligonucleotide
ttattcgtgtctcactcacacctaagcaca

SEQ ID NO: 464479 - DNA, 30 bp, Artificial Sequence
  Synthetic oligonucleotide
gagacatttatgcattcttacgtcagcaca

SEQ ID NO: 464480 - DNA, 30 bp, Artificial Sequence
  Synthetic oligonucleotide
tgcgtagtactcggttgcgcacatagcaca

SEQ ID NO: 464481 - DNA, 30 bp, Artificial Sequence
  Synthetic oligonucleotide
tccggaactcacaaggccgtcactagcaca

SEQ ID NO: 464482 - DNA, 30 bp, Artificial Sequence
  Synthetic oligonucleotide
ccatacgagtgcctaccggacgttagcaca

SEQ ID NO: 464483 - DNA, 30 bp, Artificial Sequence
  Synthetic oligonucleotide
cattttgtagatttggcattgtttagcaca

SEQ ID NO: 464484 - DNA, 30 bp, Artificial Sequence
  Synthetic oligonucleotide
gctagaacatcgtatcaggaagcacgcaca

SEQ ID NO: 464485 - DNA, 30 bp, Artificial Sequence
  Synthetic oligonucleotide
catatgtcaggcaccaaccacagacgcaca

SEQ ID NO: 464486 - DNA, 30 bp, Artificial Sequence
  Synthetic oligonucleotide
ttgaatgtctcaaacacgggtcgacgcaca

SEQ ID NO: 464487 - DNA, 30 bp, Artificial Sequence
  Synthetic oligonucleotide
ggaggcacttcccgatgatctggacgcaca

SEQ ID NO: 464488 - DNA, 30 bp, Artificial Sequence
  Synthetic oligonucleotide
gataatcaaatattcggtcgctgacgcaca

SEQ ID NO: 464489 - DNA, 30 bp, Artificial Sequence
  Synthetic oligonucleotide
tacttgggagaatctcagtctatacgcaca

SEQ ID NO: 464490 - DNA, 30 bp, Artificial Sequence
  Synthetic oligonucleotide
gcataccataggcatcattatttacgcaca

SEQ ID NO: 464491 - DNA, 30 bp, Artificial Sequence
  Synthetic oligonucleotide
taaggtctataacggtaatcggcccgcaca

SEQ ID NO: 464492 - DNA, 30 bp, Artificial Sequence
  Synthetic oligonucleotide
aacggttcagttcaagggaggaatcgcaca

SEQ ID NO: 464493 - DNA, 30 bp, Artificial Sequence
  Synthetic oligonucleotide
tcaccgaatatattccccacgtatcgcaca

SEQ ID NO: 464494 - DNA, 30 bp, Artificial Sequence
  Synthetic oligonucleotide
ttctgatcaaaccgtgattattctcgcaca

SEQ ID NO: 464495 - DNA, 30 bp, Artificial Sequence
  Synthetic oligonucleotide
atgttctaagggaccgggcaacgtcgcaca

SEQ ID NO: 464496 - DNA, 30 bp, Artificial Sequence
  Synthetic oligonucleotide
ctgagagttatatttttgggtggtcgcaca

SEQ ID NO: 464497 - DNA, 30 bp, Artificial Sequence
  Synthetic oligonucleotide
aggctgtggcgtgtaggcgcgacaggcaca

SEQ ID NO: 464498 - DNA, 30 bp, Artificial Sequence
  Synthetic oligonucleotide
gccggtgtctttattagacggttaggcaca

SEQ ID NO: 464499 - DNA, 30 bp, Artificial Sequence
  Synthetic oligonucleotide
actagacttgcggctcttgatcacggcaca

SEQ ID NO: 464500 - DNA, 30 bp, Artificial Sequence
  Synthetic oligonucleotide
aagcactcgcattacgtgcattggggcaca

SEQ ID NO: 464501 - DNA, 30 bp, Artificial Sequence
  Synthetic oligonucleotide
tgtcccgagcaactgcctcgaatgggcaca

SEQ ID NO: 464502 - DNA, 29 bp, Artificial Sequence
  Synthetic oligonucleotide
gagcaaaagggtaatcagtattgggcaca

SEQ ID NO: 464503 - DNA, 30 bp, Artificial Sequence
  Synthetic oligonucleotide
ccaaatctaggggtactcttgggatgcaca

SEQ ID NO: 464504 - DNA, 30 bp, Artificial Sequence
  Synthetic oligonucleotide
gggtacctacgcgtgcgttacacctgcaca

SEQ ID NO: 464505 - DNA, 30 bp, Artificial Sequence
  Synthetic oligonucleotide
attgagctcctccgacagcggatgtgcaca

SEQ ID NO: 464506 - DNA, 30 bp, Artificial Sequence
  Synthetic oligonucleotide
aaatcgacctaatgctagtcttgaatcaca

SEQ ID NO: 464507 - DNA, 30 bp, Artificial Sequence
  Synthetic oligonucleotide
ggtattttagtcagtctaactcagatcaca

SEQ ID NO: 464508 - DNA, 30 bp, Artificial Sequence
  Synthetic oligonucleotide
tcgcctcctttaatgacaggcacgatcaca

SEQ ID NO: 464509 - DNA, 30 bp, Artificial Sequence
  Synthetic oligonucleotide
aaagcttagcatattttagaatctatcaca

SEQ ID NO: 464510 - DNA, 30 bp, Artificial Sequence
  Synthetic oligonucleotide
aagtcccacggcgacgacggtcgtatcaca

SEQ ID NO: 464511 - DNA, 30 bp, Artificial Sequence
  Synthetic oligonucleotide
gcgggaaagattcaaagggccgcactcaca

SEQ ID NO: 464512 - DNA, 30 bp, Artificial Sequence
  Synthetic oligonucleotide
gaccgactgttaagagtgttttcactcaca

SEQ ID NO: 464513 - DNA, 30 bp, Artificial Sequence
  Synthetic oligonucleotide
cggatgtcagtcgcggacgcacgactcaca

SEQ ID NO: 464514 - DNA, 30 bp, Artificial Sequence
  Synthetic oligonucleotide
gtaacgagccgtcttcgctatgtactcaca

SEQ ID NO: 464515 - DNA, 31 bp, Artificial Sequence
  Synthetic oligonucleotide
agtctcgcgtgttaccacgagagtgctcaca

SEQ ID NO: 464516 - DNA, 30 bp, Artificial Sequence
  Synthetic oligonucleotide
atcgggtgaatctttttcttatcagtcaca

SEQ ID NO: 464517 - DNA, 30 bp, Artificial Sequence
  Synthetic oligonucleotide
gtttttttcgaggggggtctagtagtcaca

SEQ ID NO: 464518 - DNA, 30 bp, Artificial Sequence
  Synthetic oligonucleotide
taacgagccgcatgttgggtatcggtcaca

SEQ ID NO: 464519 - DNA, 30 bp, Artificial Sequence
  Synthetic oligonucleotide
gcccacgcttcgtgtcttctaagggtcaca

SEQ ID NO: 464520 - DNA, 30 bp, Artificial Sequence
  Synthetic oligonucleotide
aattcagagtcaatagcctaatatgtcaca

SEQ ID NO: 464521 - DNA, 30 bp, Artificial Sequence
  Synthetic oligonucleotide
atagtattgaggacttctctgtatgtcaca

SEQ ID NO: 464522 - DNA, 30 bp, Artificial Sequence
  Synthetic oligonucleotide
gatggtgactcgcgcccaaagcgtgtcaca

SEQ ID NO: 464523 - DNA, 30 bp, Artificial Sequence
  Synthetic oligonucleotide
caaacagcttcacaagctgcttaattcaca

SEQ ID NO: 464524 - DNA, 30 bp, Artificial Sequence
  Synthetic oligonucleotide
gccagctaatttttgataatacgattcaca

SEQ ID NO: 464525 - DNA, 30 bp, Artificial Sequence
  Synthetic oligonucleotide
tgtatgtgggcgccgaaggcccgattcaca

SEQ ID NO: 464526 - DNA, 30 bp, Artificial Sequence
  Synthetic oligonucleotide
tacggagcatagtttataattcagttcaca

SEQ ID NO: 464527 - DNA, 30 bp, Artificial Sequence
  Synthetic oligonucleotide
cacgctaccatttacatcgaaatgttcaca

SEQ ID NO: 464528 - DNA, 30 bp, Artificial Sequence
  Synthetic oligonucleotide
aatgtgtattaagagcataaaggaaagaca

SEQ ID NO: 464529 - DNA, 30 bp, Artificial Sequence
  Synthetic oligonucleotide
cgctgactatgggtacgctcgcccaagaca

SEQ ID NO: 464530 - DNA, 30 bp, Artificial Sequence
  Synthetic oligonucleotide
tcaaacagcatgcgtgaactattcaagaca

SEQ ID NO: 464531 - DNA, 30 bp, Artificial Sequence
  Synthetic oligonucleotide
tacctaggtaagtctgacacacagaagaca

SEQ ID NO: 464532 - DNA, 30 bp, Artificial Sequence
  Synthetic oligonucleotide
ggttgtaacgggtttaggatcactaagaca

SEQ ID NO: 464533 - DNA, 30 bp, Artificial Sequence
  Synthetic oligonucleotide
tcctcctgatctgtcagaaggctgcagaca

SEQ ID NO: 464534 - DNA, 30 bp, Artificial Sequence
  Synthetic oligonucleotide
ctcgtgtcggcaagctctcagggagagaca

SEQ ID NO: 464535 - DNA, 31 bp, Artificial Sequence
  Synthetic oligonucleotide
ctttcagatgggatatatatcagacgagaca

SEQ ID NO: 464536 - DNA, 30 bp, Artificial Sequence
  Synthetic oligonucleotide
atgcattgcctccaggcgccttaggagaca

SEQ ID NO: 464537 - DNA, 30 bp, Artificial Sequence
  Synthetic oligonucleotide
ctttgatgattctgctgtgtcacggagaca

SEQ ID NO: 464538 - DNA, 30 bp, Artificial Sequence
  Synthetic oligonucleotide
gtccaccaacagtactacgttgtggagaca

SEQ ID NO: 464539 - DNA, 30 bp, Artificial Sequence
  Synthetic oligonucleotide
cagcatttcgaacagcgttttaaatagaca

SEQ ID NO: 464540 - DNA, 30 bp, Artificial Sequence
  Synthetic oligonucleotide
caaccccctatgcttcgcacagaatagaca

SEQ ID NO: 464541 - DNA, 30 bp, Artificial Sequence
  Synthetic oligonucleotide
ggttgctatgaccggccagagtaatagaca

SEQ ID NO: 464542 - DNA, 30 bp, Artificial Sequence
  Synthetic oligonucleotide
ctcagcagggcgggtatgcgactatagaca

SEQ ID NO: 464543 - DNA, 30 bp, Artificial Sequence
  Synthetic oligonucleotide
ggggggtgaccagtggcctctctatagaca

SEQ ID NO: 464544 - DNA, 30 bp, Artificial Sequence
  Synthetic oligonucleotide
acaggtggctcggtggatcttggctagaca

SEQ ID NO: 464545 - DNA, 30 bp, Artificial Sequence
  Synthetic oligonucleotide
cagagacgtgaaagtaaccgacagtagaca

SEQ ID NO: 464546 - DNA, 30 bp, Artificial Sequence
  Synthetic oligonucleotide
ttttctaaggtgttgggtatgcagtagaca

SEQ ID NO: 464547 - DNA, 30 bp, Artificial Sequence
  Synthetic oligonucleotide
aattgcgacgaggtttgctaccgttagaca

SEQ ID NO: 464548 - DNA, 30 bp, Artificial Sequence
  Synthetic oligonucleotide
ctctagcctcacgctgggacggtttagaca

SEQ ID NO: 464549 - DNA, 30 bp, Artificial Sequence
  Synthetic oligonucleotide
ttctcggagacttagttatgtctaacgaca

SEQ ID NO: 464550 - DNA, 30 bp, Artificial Sequence
  Synthetic oligonucleotide
cgatcgatattggattttttcgacacgaca

SEQ ID NO: 464551 - DNA, 30 bp, Artificial Sequence
  Synthetic oligonucleotide
cagtctttcaattttcgtgggaccacgaca

SEQ ID NO: 464552 - DNA, 30 bp, Artificial Sequence
  Synthetic oligonucleotide
ctaccccgacgcttcttattcaagacgaca

SEQ ID NO: 464553 - DNA, 30 bp, Artificial Sequence
  Synthetic oligonucleotide
attattccggagattatgggggagacgaca

SEQ ID NO: 464554 - DNA, 30 bp, Artificial Sequence
  Synthetic oligonucleotide
gaggcgggacatggcgtagccaggacgaca

SEQ ID NO: 464555 - DNA, 30 bp, Artificial Sequence
  Synthetic oligonucleotide
gcttatgaccagcgtcgtccagatacgaca

SEQ ID NO: 464556 - DNA, 30 bp, Artificial Sequence
  Synthetic oligonucleotide
taaagccgatgttcgctgcttggtacgaca

SEQ ID NO: 464557 - DNA, 30 bp, Artificial Sequence
  Synthetic oligonucleotide
aagggttccctttagctcccggttacgaca

SEQ ID NO: 464558 - DNA, 30 bp, Artificial Sequence
  Synthetic oligonucleotide
cagtaccctgaaggcaggtaataaccgaca

SEQ ID NO: 464559 - DNA, 30 bp, Artificial Sequence
  Synthetic oligonucleotide
gtaactagcctactttctaccacaccgaca

SEQ ID NO: 464560 - DNA, 30 bp, Artificial Sequence
  Synthetic oligonucleotide
ttcttagtctggtggagtggtccaccgaca

SEQ ID NO: 464561 - DNA, 30 bp, Artificial Sequence
  Synthetic oligonucleotide
tgtaacttggctgacaacgaacttccgaca

SEQ ID NO: 464562 - DNA, 30 bp, Artificial Sequence
  Synthetic oligonucleotide
aatgcgggatattaaggtacgttggcgaca

SEQ ID NO: 464563 - DNA, 30 bp, Artificial Sequence
  Synthetic oligonucleotide
ctccgatgccagacaagcaatcaatcgaca

SEQ ID NO: 464564 - DNA, 30 bp, Artificial Sequence
  Synthetic oligonucleotide
cgcaaccaatctgttattttctattcgaca

SEQ ID NO: 464565 - DNA, 30 bp, Artificial Sequence
  Synthetic oligonucleotide
gtaatgcactcagtatctctggaaaggaca

SEQ ID NO: 464566 - DNA, 30 bp, Artificial Sequence
  Synthetic oligonucleotide
aaaaatgtctgcaagcggtgaacaaggaca

SEQ ID NO: 464567 - DNA, 30 bp, Artificial Sequence
  Synthetic oligonucleotide
aagtaaatttgattagttcaatacaggaca

SEQ ID NO: 464568 - DNA, 30 bp, Artificial Sequence
  Synthetic oligonucleotide
tagtgatccggtctttgattcagcaggaca

SEQ ID NO: 464569 - DNA, 30 bp, Artificial Sequence
  Synthetic oligonucleotide
tgggttttaacgagagccttcgtcaggaca

SEQ ID NO: 464570 - DNA, 30 bp, Artificial Sequence
  Synthetic oligonucleotide
ttgggttggaaaagccgcaacccacggaca

SEQ ID NO: 464571 - DNA, 30 bp, Artificial Sequence
  Synthetic oligonucleotide
gtgtgatttatgtctggatcgtcccggaca

SEQ ID NO: 464572 - DNA, 30 bp, Artificial Sequence
  Synthetic oligonucleotide
gtcattcctgcgcgcactatcctccggaca

SEQ ID NO: 464573 - DNA, 30 bp, Artificial Sequence
  Synthetic oligonucleotide
gccgctgatctataagaacgtttccggaca

SEQ ID NO: 464574 - DNA, 30 bp, Artificial Sequence
  Synthetic oligonucleotide
atataagaattttaaaaattaaatcggaca

SEQ ID NO: 464575 - DNA, 30 bp, Artificial Sequence
  Synthetic oligonucleotide
ggaagtattgactccgtgctcgctcggaca

SEQ ID NO: 464576 - DNA, 30 bp, Artificial Sequence
  Synthetic oligonucleotide
attcccttggtgcattttgctgcagggaca

SEQ ID NO: 464577 - DNA, 30 bp, Artificial Sequence
  Synthetic oligonucleotide
tttatcttcgaacaaattgcgagagggaca

SEQ ID NO: 464578 - DNA, 30 bp, Artificial Sequence
  Synthetic oligonucleotide
ttagtgaacgcgaggttaaacctagggaca

SEQ ID NO: 464579 - DNA, 30 bp, Artificial Sequence
  Synthetic oligonucleotide
ctagcgcacaggcctccaaacgtagggaca

SEQ ID NO: 464580 - DNA, 30 bp, Artificial Sequence
  Synthetic oligonucleotide
aacacagtcatggtcgcgcggatggggaca

SEQ ID NO: 464581 - DNA, 30 bp, Artificial Sequence
  Synthetic oligonucleotide
ggtggcgcagagaggcaataggctgggaca

SEQ ID NO: 464582 - DNA, 30 bp, Artificial Sequence
  Synthetic oligonucleotide
caggccgacggtgtgcatgtaattgggaca

SEQ ID NO: 464583 - DNA, 30 bp, Artificial Sequence
  Synthetic oligonucleotide
tggaataccgttagtcatcggccatggaca

SEQ ID NO: 464584 - DNA, 30 bp, Artificial Sequence
  Synthetic oligonucleotide
ctttacaacttatctagatggggatggaca

SEQ ID NO: 464585 - DNA, 30 bp, Artificial Sequence
  Synthetic oligonucleotide
aattcgggctaggcctccaatgcctggaca

SEQ ID NO: 464586 - DNA, 30 bp, Artificial Sequence
  Synthetic oligonucleotide
agacgaacagtgtgttaatgactgtggaca

SEQ ID NO: 464587 - DNA, 30 bp, Artificial Sequence
  Synthetic oligonucleotide
cgccattatggttgcactctgctgtggaca

SEQ ID NO: 464588 - DNA, 30 bp, Artificial Sequence
  Synthetic oligonucleotide
gatatacccttctatatgtgtctgtggaca

SEQ ID NO: 464589 - DNA, 30 bp, Artificial Sequence
  Synthetic oligonucleotide
tagggtatgcacatgtgcagattgtggaca

SEQ ID NO: 464590 - DNA, 30 bp, Artificial Sequence
  Synthetic oligonucleotide
tacatgcacgctttaggtattaattggaca

SEQ ID NO: 464591 - DNA, 30 bp, Artificial Sequence
  Synthetic oligonucleotide
acttcctatgcccacatagtgcattggaca

SEQ ID NO: 464592 - DNA, 30 bp, Artificial Sequence
  Synthetic oligonucleotide
aagcagctcttattcggttaccaaatgaca

SEQ ID NO: 464593 - DNA, 30 bp, Artificial Sequence
  Synthetic oligonucleotide
ttgaagtctgctctggatcgtacaatgaca

SEQ ID NO: 464594 - DNA, 30 bp, Artificial Sequence
  Synthetic oligonucleotide
ggaccccatatatatcccctgataatgaca

SEQ ID NO: 464595 - DNA, 30 bp, Artificial Sequence
  Synthetic oligonucleotide
atattgtgatagtataagaggcagatgaca

SEQ ID NO: 464596 - DNA, 30 bp, Artificial Sequence
  Synthetic oligonucleotide
gcgaagttagcccacttacgagcgatgaca

SEQ ID NO: 464597 - DNA, 30 bp, Artificial Sequence
  Synthetic oligonucleotide
aacagctaacttgagtggaggtatatgaca

SEQ ID NO: 464598 - DNA, 30 bp, Artificial Sequence
  Synthetic oligonucleotide
gaaaccgtttcgattctgtcctcactgaca

SEQ ID NO: 464599 - DNA, 30 bp, Artificial Sequence
  Synthetic oligonucleotide
tcccaactaaggtctaggtattgactgaca

SEQ ID NO: 464600 - DNA, 30 bp, Artificial Sequence
  Synthetic oligonucleotide
tttagtgttcggccagggtaccagctgaca

SEQ ID NO: 464601 - DNA, 30 bp, Artificial Sequence
  Synthetic oligonucleotide
gttaggcattattttgccaggtatctgaca

SEQ ID NO: 464602 - DNA, 30 bp, Artificial Sequence
  Synthetic oligonucleotide
ggagatgaagcggtctgacacggtctgaca

SEQ ID NO: 464603 - DNA, 30 bp, Artificial Sequence
  Synthetic oligonucleotide
cctgcttttgaggggctctgaattctgaca

SEQ ID NO: 464604 - DNA, 30 bp, Artificial Sequence
  Synthetic oligonucleotide
aatagcgggtggaatcgaactcaagtgaca

SEQ ID NO: 464605 - DNA, 30 bp, Artificial Sequence
  Synthetic oligonucleotide
ttatcccaagggttaggtaccctagtgaca

SEQ ID NO: 464606 - DNA, 30 bp, Artificial Sequence
  Synthetic oligonucleotide
cattagtgaaccgtgagcgcacaggtgaca

SEQ ID NO: 464607 - DNA, 30 bp, Artificial Sequence
  Synthetic oligonucleotide
tttctagcacaggtagtcgagcaattgaca

SEQ ID NO: 464608 - DNA, 30 bp, Artificial Sequence
  Synthetic oligonucleotide
gggttcaatagggtcccttcagaattgaca

SEQ ID NO: 464609 - DNA, 30 bp, Artificial Sequence
  Synthetic oligonucleotide
cgacacgactggtcaagcttccgcttgaca

SEQ ID NO: 464610 - DNA, 30 bp, Artificial Sequence
  Synthetic oligonucleotide
gcccagcgactgtagcagtacaatttgaca

SEQ ID NO: 464611 - DNA, 30 bp, Artificial Sequence
  Synthetic oligonucleotide
aattcagtacaaaacgggaaccgtttgaca

SEQ ID NO: 464612 - DNA, 30 bp, Artificial Sequence
  Synthetic oligonucleotide
aaagacgtgattgagcgataaccaaataca

SEQ ID NO: 464613 - DNA, 30 bp, Artificial Sequence
  Synthetic oligonucleotide
tgaccggcaatagtttgaagtgcaaataca

SEQ ID NO: 464614 - DNA, 30 bp, Artificial Sequence
  Synthetic oligonucleotide
ggaatgcacgacataatgcccataaataca

SEQ ID NO: 464615 - DNA, 30 bp, Artificial Sequence
  Synthetic oligonucleotide
ttctctaagacaaggacactccacaataca

SEQ ID NO: 464616 - DNA, 30 bp, Artificial Sequence
  Synthetic oligonucleotide
gaataataataattccttagcggcaataca

SEQ ID NO: 464617 - DNA, 30 bp, Artificial Sequence
  Synthetic oligonucleotide
gaaagggatacgtggtggtgtttcaataca

SEQ ID NO: 464618 - DNA, 30 bp, Artificial Sequence
  Synthetic oligonucleotide
atgagctaaatttgagccagatagaataca

SEQ ID NO: 464619 - DNA, 30 bp, Artificial Sequence
  Synthetic oligonucleotide
ttcgaccttgccaaagtactgacgaataca

SEQ ID NO: 464620 - DNA, 30 bp, Artificial Sequence
  Synthetic oligonucleotide
gagatcatgattaaggcgcaggggaataca

SEQ ID NO: 464621 - DNA, 30 bp, Artificial Sequence
  Synthetic oligonucleotide
tgttatcgcagcctcgagtgtgggaataca

SEQ ID NO: 464622 - DNA, 30 bp, Artificial Sequence
  Synthetic oligonucleotide
gcgcacttaatgcgatacgcgcttaataca

SEQ ID NO: 464623 - DNA, 30 bp, Artificial Sequence
  Synthetic oligonucleotide
caatgtcatgccgcgtcacactttaataca

SEQ ID NO: 464624 - DNA, 29 bp, Artificial Sequence
  Synthetic oligonucleotide
attcgcaagggttggggcaaccccataca

SEQ ID NO: 464625 - DNA, 30 bp, Artificial Sequence
  Synthetic oligonucleotide
gcagccgtggcgctacagttatcccataca

SEQ ID NO: 464626 - DNA, 30 bp, Artificial Sequence
  Synthetic oligonucleotide
actctagcggcccagctgaccaggcataca

SEQ ID NO: 464627 - DNA, 30 bp, Artificial Sequence
  Synthetic oligonucleotide
gttgcctacattttaggcgaggttcataca

SEQ ID NO: 464628 - DNA, 30 bp, Artificial Sequence
  Synthetic oligonucleotide
gcctttttacgcgcctgtgctttagataca

SEQ ID NO: 464629 - DNA, 30 bp, Artificial Sequence
  Synthetic oligonucleotide
agagtcccgccgtatactgtttacgataca

SEQ ID NO: 464630 - DNA, 30 bp, Artificial Sequence
  Synthetic oligonucleotide
ttatttttgactcccagcgcggaggataca

SEQ ID NO: 464631 - DNA, 30 bp, Artificial Sequence
  Synthetic oligonucleotide
gtgtgtcaagtctggcacctttatgataca

SEQ ID NO: 464632 - DNA, 30 bp, Artificial Sequence
  Synthetic oligonucleotide
gggtgacccgtgtgggtgcctgttgataca

SEQ ID NO: 464633 - DNA, 30 bp, Artificial Sequence
  Synthetic oligonucleotide
cccctacggggaaaggaacacaaatataca

SEQ ID NO: 464634 - DNA, 30 bp, Artificial Sequence
  Synthetic oligonucleotide
ttcacttacgggcatggtattcactataca

SEQ ID NO: 464635 - DNA, 30 bp, Artificial Sequence
  Synthetic oligonucleotide
aagtaatattcaatccagccgttctataca

SEQ ID NO: 464636 - DNA, 30 bp, Artificial Sequence
  Synthetic oligonucleotide
tggatccccatttagcggggtaggtataca

SEQ ID NO: 464637 - DNA, 30 bp, Artificial Sequence
  Synthetic oligonucleotide
tggcccttgggcgggtcgattttgtataca

SEQ ID NO: 464638 - DNA, 30 bp, Artificial Sequence
  Synthetic oligonucleotide
atagggtccactatcaggctaaattataca

SEQ ID NO: 464639 - DNA, 30 bp, Artificial Sequence
  Synthetic oligonucleotide
ttatcttagttatgaatttattcttataca

SEQ ID NO: 464640 - DNA, 30 bp, Artificial Sequence
  Synthetic oligonucleotide
gttctgccacgcaggagaatcaaaactaca

SEQ ID NO: 464641 - DNA, 30 bp, Artificial Sequence
  Synthetic oligonucleotide
aatcgatcttggggcacgtactagactaca

SEQ ID NO: 464642 - DNA, 30 bp, Artificial Sequence
  Synthetic oligonucleotide
taagacagtagccggtcaaatgcgactaca

SEQ ID NO: 464643 - DNA, 30 bp, Artificial Sequence
  Synthetic oligonucleotide
agttcttaggacttgttgggcaggactaca

SEQ ID NO: 464644 - DNA, 30 bp, Artificial Sequence
  Synthetic oligonucleotide
ctaattggtaatcgggcagacatgactaca

SEQ ID NO: 464645 - DNA, 30 bp, Artificial Sequence
  Synthetic oligonucleotide
accgagcatgactctctcgtcagtactaca

SEQ ID NO: 464646 - DNA, 30 bp, Artificial Sequence
  Synthetic oligonucleotide
agaggttttctcttgcacacagttactaca

SEQ ID NO: 464647 - DNA, 30 bp, Artificial Sequence
  Synthetic oligonucleotide
gtgtttgagcagcttaccggacaccctaca

SEQ ID NO: 464648 - DNA, 30 bp, Artificial Sequence
  Synthetic oligonucleotide
gagtgttacattacggatggagaccctaca

SEQ ID NO: 464649 - DNA, 30 bp, Artificial Sequence
  Synthetic oligonucleotide
ttgcccaattgctgcgttatggaccctaca

SEQ ID NO: 464650 - DNA, 30 bp, Artificial Sequence
  Synthetic oligonucleotide
gaacttgtcagcgatagaatgaggcctaca

SEQ ID NO: 464651 - DNA, 30 bp, Artificial Sequence
  Synthetic oligonucleotide
gcatatttacgagttccccagtaggctaca

SEQ ID NO: 464652 - DNA, 30 bp, Artificial Sequence
  Synthetic oligonucleotide
cgacgtgacgatgaccagagtgttgctaca

SEQ ID NO: 464653 - DNA, 30 bp, Artificial Sequence
  Synthetic oligonucleotide
ttgccctatgctatagacggcctatctaca

SEQ ID NO: 464654 - DNA, 30 bp, Artificial Sequence
  Synthetic oligonucleotide
ctcttccgccaatctgatcaaacctctaca

SEQ ID NO: 464655 - DNA, 30 bp, Artificial Sequence
  Synthetic oligonucleotide
ggaggtagtattcaaaactggaagtctaca

SEQ ID NO: 464656 - DNA, 30 bp, Artificial Sequence
  Synthetic oligonucleotide
gtaactttttgactgtacaaaacgtctaca

SEQ ID NO: 464657 - DNA, 30 bp, Artificial Sequence
  Synthetic oligonucleotide
cttatgccattccgccgcgggccgtctaca

SEQ ID NO: 464658 - DNA, 30 bp, Artificial Sequence
  Synthetic oligonucleotide
tgtagattgattttacaggggatgtctaca

SEQ ID NO: 464659 - DNA, 30 bp, Artificial Sequence
  Synthetic oligonucleotide
gttaacattcgcatattactgaattctaca

SEQ ID NO: 464660 - DNA, 30 bp, Artificial Sequence
  Synthetic oligonucleotide
aaatttaaaccgtgcaagttagattctaca

SEQ ID NO: 464661 - DNA, 30 bp, Artificial Sequence
  Synthetic oligonucleotide
aagcactatggtgaacgccccgattctaca

SEQ ID NO: 464662 - DNA, 30 bp, Artificial Sequence
  Synthetic oligonucleotide
agaggtctgtcacgggcatagcgttctaca

SEQ ID NO: 464663 - DNA, 30 bp, Artificial Sequence
  Synthetic oligonucleotide
tagatgtaatgcgatccgtatgaaagtaca

SEQ ID NO: 464664 - DNA, 30 bp, Artificial Sequence
  Synthetic oligonucleotide
gagattaatatagtagtccatacaagtaca

SEQ ID NO: 464665 - DNA, 30 bp, Artificial Sequence
  Synthetic oligonucleotide
tccgtcgtcaatacgaactattgaagtaca

SEQ ID NO: 464666 - DNA, 30 bp, Artificial Sequence
  Synthetic oligonucleotide
atgaaacggcgcaattcttagataagtaca

SEQ ID NO: 464667 - DNA, 30 bp, Artificial Sequence
  Synthetic oligonucleotide
cataccgtttggcctgggaaacccagtaca

SEQ ID NO: 464668 - DNA, 30 bp, Artificial Sequence
  Synthetic oligonucleotide
tggggtgtcatcacgcggctcatcagtaca

SEQ ID NO: 464669 - DNA, 30 bp, Artificial Sequence
  Synthetic oligonucleotide
tcaagaccaatagaaggttttttcagtaca

SEQ ID NO: 464670 - DNA, 30 bp, Artificial Sequence
  Synthetic oligonucleotide
aaagtgttggcgcagtgccacggacgtaca

SEQ ID NO: 464671 - DNA, 30 bp, Artificial Sequence
  Synthetic oligonucleotide
agtgaagcagacgcagaaagtgtccgtaca

SEQ ID NO: 464672 - DNA, 30 bp, Artificial Sequence
  Synthetic oligonucleotide
aataccttcatataaacgccgtagcgtaca

SEQ ID NO: 464673 - DNA, 30 bp, Artificial Sequence
  Synthetic oligonucleotide
ggttccttatctaggatatgaaatcgtaca

SEQ ID NO: 464674 - DNA, 30 bp, Artificial Sequence
  Synthetic oligonucleotide
aatatatcgtccccggctaggagaggtaca

SEQ ID NO: 464675 - DNA, 30 bp, Artificial Sequence
  Synthetic oligonucleotide
ggcagatccagcgacgcggatgacggtaca

SEQ ID NO: 464676 - DNA, 30 bp, Artificial Sequence
  Synthetic oligonucleotide
agagatgcttaccgtcgtatccagggtaca

SEQ ID NO: 464677 - DNA, 30 bp, Artificial Sequence
  Synthetic oligonucleotide
acctgcgtcttagaacatggctaatgtaca

SEQ ID NO: 464678 - DNA, 30 bp, Artificial Sequence
  Synthetic oligonucleotide
tgcacctagggttatggaaaggtatgtaca

SEQ ID NO: 464679 - DNA, 30 bp, Artificial Sequence
  Synthetic oligonucleotide
ggtggtgtggatacccacgtcgcctgtaca

SEQ ID NO: 464680 - DNA, 30 bp, Artificial Sequence
  Synthetic oligonucleotide
ttcctaaattgcttcaaagtacgctgtaca

SEQ ID NO: 464681 - DNA, 30 bp, Artificial Sequence
  Synthetic oligonucleotide
ctatctacgcgcatacggtacgtctgtaca

SEQ ID NO: 464682 - DNA, 30 bp, Artificial Sequence
  Synthetic oligonucleotide
gttccccaggggctaccggccacgtgtaca

SEQ ID NO: 464683 - DNA, 30 bp, Artificial Sequence
  Synthetic oligonucleotide
tgccattatagtgtttgcagtcggtgtaca

SEQ ID NO: 464684 - DNA, 30 bp, Artificial Sequence
  Synthetic oligonucleotide
gtggattgacactcttattctatttgtaca

SEQ ID NO: 464685 - DNA, 30 bp, Artificial Sequence
  Synthetic oligonucleotide
caagtgttctatcctctataactttgtaca

SEQ ID NO: 464686 - DNA, 30 bp, Artificial Sequence
  Synthetic oligonucleotide
ggcaatttactccgttcattttaaattaca

SEQ ID NO: 464687 - DNA, 30 bp, Artificial Sequence
  Synthetic oligonucleotide
gaacctgatagatcagggttctgaattaca

SEQ ID NO: 464688 - DNA, 30 bp, Artificial Sequence
  Synthetic oligonucleotide
atttagtctcgcctaggaaaaaacattaca

SEQ ID NO: 464689 - DNA, 30 bp, Artificial Sequence
  Synthetic oligonucleotide
gaaaacaacttcgttcgattgcacattaca

SEQ ID NO: 464690 - DNA, 30 bp, Artificial Sequence
  Synthetic oligonucleotide
tattggtgctaaaataggtttctcattaca

SEQ ID NO: 464691 - DNA, 30 bp, Artificial Sequence
  Synthetic oligonucleotide
atatgtgtccctggatgccagaagattaca

SEQ ID NO: 464692 - DNA, 30 bp, Artificial Sequence
  Synthetic oligonucleotide
tttggaccagaagtatgggggaagattaca

SEQ ID NO: 464693 - DNA, 30 bp, Artificial Sequence
  Synthetic oligonucleotide
acgggactatccggtgtttgcgatattaca

SEQ ID NO: 464694 - DNA, 30 bp, Artificial Sequence
  Synthetic oligonucleotide
ttggattcctccacatccccccctattaca

SEQ ID NO: 464695 - DNA, 30 bp, Artificial Sequence
  Synthetic oligonucleotide
ggcagcggactctggtccggtaaacttaca

SEQ ID NO: 464696 - DNA, 30 bp, Artificial Sequence
  Synthetic oligonucleotide
aaaaacgacagccggcgtttactacttaca

SEQ ID NO: 464697 - DNA, 30 bp, Artificial Sequence
  Synthetic oligonucleotide
ccagcctcgcaatgtaagacaagccttaca

SEQ ID NO: 464698 - DNA, 30 bp, Artificial Sequence
  Synthetic oligonucleotide
ccacctatgaagggcttcatgagccttaca

SEQ ID NO: 464699 - DNA, 30 bp, Artificial Sequence
  Synthetic oligonucleotide
actttttttacccgatagtggggccttaca

SEQ ID NO: 464700 - DNA, 30 bp, Artificial Sequence
  Synthetic oligonucleotide
tctttactagctggcaacgggcagcttaca

SEQ ID NO: 464701 - DNA, 30 bp, Artificial Sequence
  Synthetic oligonucleotide
cagagacacgaggcagcattttatcttaca

SEQ ID NO: 464702 - DNA, 30 bp, Artificial Sequence
  Synthetic oligonucleotide
gctgtaggtagcagcgataggagtcttaca

SEQ ID NO: 464703 - DNA, 30 bp, Artificial Sequence
  Synthetic oligonucleotide
gttgcacccgctaatgaacggaaagttaca

SEQ ID NO: 464704 - DNA, 30 bp, Artificial Sequence
  Synthetic oligonucleotide
gagttaagtcacatgagttgccaagttaca

SEQ ID NO: 464705 - DNA, 30 bp, Artificial Sequence
  Synthetic oligonucleotide
ggttcgtcgcatttatacccgcaagttaca

SEQ ID NO: 464706 - DNA, 30 bp, Artificial Sequence
  Synthetic oligonucleotide
accgtaaataacatttgtagggccgttaca

SEQ ID NO: 464707 - DNA, 30 bp, Artificial Sequence
  Synthetic oligonucleotide
gcctcgctaactagtgctggcagcgttaca

SEQ ID NO: 464708 - DNA, 30 bp, Artificial Sequence
  Synthetic oligonucleotide
gcctgtacagcagttatggtcgaggttaca

SEQ ID NO: 464709 - DNA, 30 bp, Artificial Sequence
  Synthetic oligonucleotide
gagaacatggcctgttccatttcggttaca

SEQ ID NO: 464710 - DNA, 30 bp, Artificial Sequence
  Synthetic oligonucleotide
tataggtccacaactctaatctatgttaca

SEQ ID NO: 464711 - DNA, 30 bp, Artificial Sequence
  Synthetic oligonucleotide
ggagttttttctcgagcgtaaactgttaca

SEQ ID NO: 464712 - DNA, 30 bp, Artificial Sequence
  Synthetic oligonucleotide
ctattaggtatgtacaacgcaactgttaca

SEQ ID NO: 464713 - DNA, 30 bp, Artificial Sequence
  Synthetic oligonucleotide
ttttgatgttgatagtgaaagccatttaca

SEQ ID NO: 464714 - DNA, 30 bp, Artificial Sequence
  Synthetic oligonucleotide
tggattttggaagctacagggttatttaca

SEQ ID NO: 464715 - DNA, 30 bp, Artificial Sequence
  Synthetic oligonucleotide
gaggcgcggtaatgtatagtcccctttaca

SEQ ID NO: 464716 - DNA, 30 bp, Artificial Sequence
  Synthetic oligonucleotide
gccattgggcgaagaccaatacagtttaca

SEQ ID NO: 464717 - DNA, 30 bp, Artificial Sequence
  Synthetic oligonucleotide
ttgtctggttatgaggatcccgagtttaca

SEQ ID NO: 464718 - DNA, 30 bp, Artificial Sequence
  Synthetic oligonucleotide
aaagatgtccttacttcgcgaaggtttaca

SEQ ID NO: 464719 - DNA, 30 bp, Artificial Sequence
  Synthetic oligonucleotide
tgctgaacccttattggtccacggtttaca

SEQ ID NO: 464720 - DNA, 30 bp, Artificial Sequence
  Synthetic oligonucleotide
ggtttgctatgccattctgtggtttttaca

SEQ ID NO: 464721 - DNA, 30 bp, Artificial Sequence
  Synthetic oligonucleotide
aagtttgattatggactcgatataaaacca

SEQ ID NO: 464722 - DNA, 30 bp, Artificial Sequence
  Synthetic oligonucleotide
actgagcttgatactttagctataaaacca

SEQ ID NO: 464723 - DNA, 30 bp, Artificial Sequence
  Synthetic oligonucleotide
gttaagctcaggtagtccaggcctaaacca

SEQ ID NO: 464724 - DNA, 30 bp, Artificial Sequence
  Synthetic oligonucleotide
aaagttgaattgcgatgatgggtacaacca

SEQ ID NO: 464725 - DNA, 30 bp, Artificial Sequence
  Synthetic oligonucleotide
ttggagctctgcatcatttggtgccaacca

SEQ ID NO: 464726 - DNA, 30 bp, Artificial Sequence
  Synthetic oligonucleotide
aaaggcgtgtaggcatggctggtccaacca

SEQ ID NO: 464727 - DNA, 30 bp, Artificial Sequence
  Synthetic oligonucleotide
gccttttatggatcatacgttacgcaacca

SEQ ID NO: 464728 - DNA, 30 bp, Artificial Sequence
  Synthetic oligonucleotide
aggtctctattaggcaatacatggcaacca

SEQ ID NO: 464729 - DNA, 30 bp, Artificial Sequence
  Synthetic oligonucleotide
atctgatacaagtaggtagtctgtcaacca

SEQ ID NO: 464730 - DNA, 30 bp, Artificial Sequence
  Synthetic oligonucleotide
atatgtgaccgatgtttcaagattcaacca

SEQ ID NO: 464731 - DNA, 30 bp, Artificial Sequence
  Synthetic oligonucleotide
cgaggcactattgaatgacgtcaggaacca

SEQ ID NO: 464732 - DNA, 30 bp, Artificial Sequence
  Synthetic oligonucleotide
attgagctacgttgtctggttactgaacca

SEQ ID NO: 464733 - DNA, 30 bp, Artificial Sequence
  Synthetic oligonucleotide
ccgactaccggatacgcgcattgtgaacca

SEQ ID NO: 464734 - DNA, 30 bp, Artificial Sequence
  Synthetic oligonucleotide
gaatcatggtagccatgcagttgtgaacca

SEQ ID NO: 464735 - DNA, 30 bp, Artificial Sequence
  Synthetic oligonucleotide
gagtatatcggccttatgggacgataacca

SEQ ID NO: 464736 - DNA, 30 bp, Artificial Sequence
  Synthetic oligonucleotide
ctctatgaaggcaggattactgcctaacca

SEQ ID NO: 464737 - DNA, 30 bp, Artificial Sequence
  Synthetic oligonucleotide
tacagacctaaagtttagacatgctaacca

SEQ ID NO: 464738 - DNA, 30 bp, Artificial Sequence
  Synthetic oligonucleotide
tgacagtttatctctctataggggtaacca

SEQ ID NO: 464739 - DNA, 30 bp, Artificial Sequence
  Synthetic oligonucleotide
agatcatcgagttggttatatatgtaacca

SEQ ID NO: 464740 - DNA, 30 bp, Artificial Sequence
  Synthetic oligonucleotide
cagacacggcgcggatcgtatcgttaacca

SEQ ID NO: 464741 - DNA, 30 bp, Artificial Sequence
  Synthetic oligonucleotide
accgtcgccatggaggcatgaaaaacacca

SEQ ID NO: 464742 - DNA, 30 bp, Artificial Sequence
  Synthetic oligonucleotide
acactcgtcgcgcttagataccaaacacca

SEQ ID NO: 464743 - DNA, 30 bp, Artificial Sequence
  Synthetic oligonucleotide
caacgggctcctggttcagccgcaacacca

SEQ ID NO: 464744 - DNA, 30 bp, Artificial Sequence
  Synthetic oligonucleotide
ctgatgccagttgtgttggtctcaacacca

SEQ ID NO: 464745 - DNA, 30 bp, Artificial Sequence
  Synthetic oligonucleotide
aatcattatgctgctgtacgtcacacacca

SEQ ID NO: 464746 - DNA, 30 bp, Artificial Sequence
  Synthetic oligonucleotide
aactacttttggactattcagcggacacca

SEQ ID NO: 464747 - DNA, 30 bp, Artificial Sequence
  Synthetic oligonucleotide
ggcattatggtacgaagtccctggacacca

SEQ ID NO: 464748 - DNA, 30 bp, Artificial Sequence
  Synthetic oligonucleotide
atcttagtattgtagtacatcggtacacca

SEQ ID NO: 464749 - DNA, 30 bp, Artificial Sequence
  Synthetic oligonucleotide
tccgaaataatccttggtgttaaaccacca

SEQ ID NO: 464750 - DNA, 30 bp, Artificial Sequence
  Synthetic oligonucleotide
ggttttggggattctacaaaagccccacca

SEQ ID NO: 464751 - DNA, 30 bp, Artificial Sequence
  Synthetic oligonucleotide
ggatatttctattattgttgttagccacca

SEQ ID NO: 464752 - DNA, 30 bp, Artificial Sequence
  Synthetic oligonucleotide
taaccccgatggagctcgacgtatccacca

SEQ ID NO: 464753 - DNA, 30 bp, Artificial Sequence
  Synthetic oligonucleotide
atacgatcgcagaagtgggtaaacgcacca

SEQ ID NO: 464754 - DNA, 30 bp, Artificial Sequence
  Synthetic oligonucleotide
gcgacatttggaatggtatctggtgcacca

SEQ ID NO: 464755 - DNA, 30 bp, Artificial Sequence
  Synthetic oligonucleotide
tcgggcgccgagaccggccccatatcacca

SEQ ID NO: 464756 - DNA, 30 bp, Artificial Sequence
  Synthetic oligonucleotide
tattatgggttttagtattttagctcacca

SEQ ID NO: 464757 - DNA, 30 bp, Artificial Sequence
  Synthetic oligonucleotide
agtagtataccgttccgacagaagtcacca

SEQ ID NO: 464758 - DNA, 30 bp, Artificial Sequence
  Synthetic oligonucleotide
gggatctaattttcagttgatgcgtcacca

SEQ ID NO: 464759 - DNA, 30 bp, Artificial Sequence
  Synthetic oligonucleotide
agtacgacaatcttgcaagtcttgtcacca

SEQ ID NO: 464760 - DNA, 30 bp, Artificial Sequence
  Synthetic oligonucleotide
ttatattgttttacttcgtcgttgtcacca

SEQ ID NO: 464761 - DNA, 30 bp, Artificial Sequence
  Synthetic oligonucleotide
gttctaaggggggggttatagccttcacca

SEQ ID NO: 464762 - DNA, 30 bp, Artificial Sequence
  Synthetic oligonucleotide
acacaacctaacgcgagacactgttcacca

SEQ ID NO: 464763 - DNA, 30 bp, Artificial Sequence
  Synthetic oligonucleotide
taacatatcgacggagtagggttaagacca

SEQ ID NO: 464764 - DNA, 30 bp, Artificial Sequence
  Synthetic oligonucleotide
atcctgggggaacgcgaaattcacagacca

SEQ ID NO: 464765 - DNA, 30 bp, Artificial Sequence
  Synthetic oligonucleotide
gaagtcttggggtgtcaccggtgcagacca

SEQ ID NO: 464766 - DNA, 30 bp, Artificial Sequence
  Synthetic oligonucleotide
gatcggtcagaggctcagcagatcagacca

SEQ ID NO: 464767 - DNA, 30 bp, Artificial Sequence
  Synthetic oligonucleotide
tattttgacacggatacccgtgggagacca

SEQ ID NO: 464768 - DNA, 30 bp, Artificial Sequence
  Synthetic oligonucleotide
ggccaagctgtactgtaataacatagacca

SEQ ID NO: 464769 - DNA, 30 bp, Artificial Sequence
  Synthetic oligonucleotide
gttaatagggctgtaaccgatactagacca

SEQ ID NO: 464770 - DNA, 30 bp, Artificial Sequence
  Synthetic oligonucleotide
agttttgagaacaccggcgttcgtagacca

SEQ ID NO: 464771 - DNA, 30 bp, Artificial Sequence
  Synthetic oligonucleotide
gaaaagcatggggtggcttgcaaccgacca

SEQ ID NO: 464772 - DNA, 30 bp, Artificial Sequence
  Synthetic oligonucleotide
gaagtagtaagaaattttgttccgcgacca

SEQ ID NO: 464773 - DNA, 30 bp, Artificial Sequence
  Synthetic oligonucleotide
ttccgttttccaaacagataaaacggacca

SEQ ID NO: 464774 - DNA, 30 bp, Artificial Sequence
  Synthetic oligonucleotide
ggtcctcagggtcctgtgccacgcggacca

SEQ ID NO: 464775 - DNA, 30 bp, Artificial Sequence
  Synthetic oligonucleotide
aatctcaaagattattaaatttcgggacca

SEQ ID NO: 464776 - DNA, 30 bp, Artificial Sequence
  Synthetic oligonucleotide
cctctctcgctataactacccagtggacca

SEQ ID NO: 464777 - DNA, 30 bp, Artificial Sequence
  Synthetic oligonucleotide
atgcgggcgtgggtcgtatcctgatgacca

SEQ ID NO: 464778 - DNA, 30 bp, Artificial Sequence
  Synthetic oligonucleotide
tatattaaacggtctatgagttagtgacca

SEQ ID NO: 464779 - DNA, 30 bp, Artificial Sequence
  Synthetic oligonucleotide
ccttcaaaactgtgttttagcttgtgacca

SEQ ID NO: 464780 - DNA, 30 bp, Artificial Sequence
  Synthetic oligonucleotide
gctttgtaatggacgacgcatagttgacca

SEQ ID NO: 464781 - DNA, 30 bp, Artificial Sequence
  Synthetic oligonucleotide
aatagtaacgagcagtttatgttgatacca

SEQ ID NO: 464782 - DNA, 30 bp, Artificial Sequence
  Synthetic oligonucleotide
ggtcaatcatggcttggcagccgtatacca

SEQ ID NO: 464783 - DNA, 30 bp, Artificial Sequence
  Synthetic oligonucleotide
ttattccctcgttgcccttcaaaactacca

SEQ ID NO: 464784 - DNA, 30 bp, Artificial Sequence
  Synthetic oligonucleotide
cttttctaagggagtaaactagccctacca

SEQ ID NO: 464785 - DNA, 30 bp, Artificial Sequence
  Synthetic oligonucleotide
agttaaggatactcgcatgccccagtacca

SEQ ID NO: 464786 - DNA, 30 bp, Artificial Sequence
  Synthetic oligonucleotide
gtggttgcatagttttaatggctagtacca

SEQ ID NO: 464787 - DNA, 30 bp, Artificial Sequence
  Synthetic oligonucleotide
ttatctggtgaatatcctggcggcgtacca

SEQ ID NO: 464788 - DNA, 30 bp, Artificial Sequence
  Synthetic oligonucleotide
ttaatcatgagcgtttggtagtcggtacca

SEQ ID NO: 464789 - DNA, 30 bp, Artificial Sequence
  Synthetic oligonucleotide
ctctaagggccccgtggaccgcatgtacca

SEQ ID NO: 464790 - DNA, 30 bp, Artificial Sequence
  Synthetic oligonucleotide
cgtgtccaaagaggcaatgtttatgtacca

SEQ ID NO: 464791 - DNA, 30 bp, Artificial Sequence
  Synthetic oligonucleotide
cctatgttctaatgaaccacccctgtacca

SEQ ID NO: 464792 - DNA, 30 bp, Artificial Sequence
  Synthetic oligonucleotide
tgtaaatttgtttgcccgcgtagtgtacca

SEQ ID NO: 464793 - DNA, 30 bp, Artificial Sequence
  Synthetic oligonucleotide
gttcttgaagttattgtttcgaaattacca

SEQ ID NO: 464794 - DNA, 30 bp, Artificial Sequence
  Synthetic oligonucleotide
acatggcacctgacagtacggtcattacca

SEQ ID NO: 464795 - DNA, 30 bp, Artificial Sequence
  Synthetic oligonucleotide
cagtccatgccggtgctaggtaacttacca

SEQ ID NO: 464796 - DNA, 30 bp, Artificial Sequence
  Synthetic oligonucleotide
tttagcaacggggcccccccaggcttacca

SEQ ID NO: 464797 - DNA, 30 bp, Artificial Sequence
  Synthetic oligonucleotide
cgcatacaggttggagttagcgaaaaccca

SEQ ID NO: 464798 - DNA, 30 bp, Artificial Sequence
  Synthetic oligonucleotide
ctcaagaaggttctcaatctaacaaaccca

SEQ ID NO: 464799 - DNA, 30 bp, Artificial Sequence
  Synthetic oligonucleotide
atacgaagagcctctacgctttcaaaccca

SEQ ID NO: 464800 - DNA, 30 bp, Artificial Sequence
  Synthetic oligonucleotide
ccgtactataatatggcatgagtaaaccca

SEQ ID NO: 464801 - DNA, 30 bp, Artificial Sequence
  Synthetic oligonucleotide
gggcttaattaatttggcaaaagcaaccca

SEQ ID NO: 464802 - DNA, 30 bp, Artificial Sequence
  Synthetic oligonucleotide
ttttgacgtggaacgtcatcattcaaccca

SEQ ID NO: 464803 - DNA, 30 bp, Artificial Sequence
  Synthetic oligonucleotide
gcctgggaatattattttttttagaaccca

SEQ ID NO: 464804 - DNA, 30 bp, Artificial Sequence
  Synthetic oligonucleotide
agggtcccatgtacgaggcgcagacaccca

SEQ ID NO: 464805 - DNA, 30 bp, Artificial Sequence
  Synthetic oligonucleotide
tatttaagctaacccgagacaaaccaccca

SEQ ID NO: 464806 - DNA, 30 bp, Artificial Sequence
  Synthetic oligonucleotide
tcactcatgagggctggatgtttccaccca

SEQ ID NO: 464807 - DNA, 30 bp, Artificial Sequence
  Synthetic oligonucleotide
tgtagcgcgatcactgcgcgcgctcaccca

SEQ ID NO: 464808 - DNA, 30 bp, Artificial Sequence
  Synthetic oligonucleotide
gctccgatttccaagctatatcacgaccca

SEQ ID NO: 464809 - DNA, 30 bp, Artificial Sequence
  Synthetic oligonucleotide
cgtgcagatggttgcagtagcgcggaccca

SEQ ID NO: 464810 - DNA, 30 bp, Artificial Sequence
  Synthetic oligonucleotide
gaatggcccgctaattcgggaagggaccca

SEQ ID NO: 464811 - DNA, 30 bp, Artificial Sequence
  Synthetic oligonucleotide
taaggctctattttagggaacggggaccca

SEQ ID NO: 464812 - DNA, 30 bp, Artificial Sequence
  Synthetic oligonucleotide
ttgaattatactgacggcatcttataccca

SEQ ID NO: 464813 - DNA, 30 bp, Artificial Sequence
  Synthetic oligonucleotide
cacactgtgtgtttacattcgttgtaccca

SEQ ID NO: 464814 - DNA, 30 bp, Artificial Sequence
  Synthetic oligonucleotide
ctaagggcttgtaggagccttacttaccca

SEQ ID NO: 464815 - DNA, 30 bp, Artificial Sequence
  Synthetic oligonucleotide
acgctccgtttgacttaggaaaaaacccca

SEQ ID NO: 464816 - DNA, 31 bp, Artificial Sequence
  Synthetic oligonucleotide
agtcgcaacttaccatctgttatcaacccca

SEQ ID NO: 464817 - DNA, 30 bp, Artificial Sequence
  Synthetic oligonucleotide
atggggtcagtttaagtcaaggccacccca

SEQ ID NO: 464818 - DNA, 29 bp, Artificial Sequence
  Synthetic oligonucleotide
attacgcacttgggcagataaagacccca

SEQ ID NO: 464819 - DNA, 30 bp, Artificial Sequence
  Synthetic oligonucleotide
aggaccaacaagggataggaaagaccccca

SEQ ID NO: 464820 - DNA, 30 bp, Artificial Sequence
  Synthetic oligonucleotide
tctccatagggttcctgactcggaccccca

SEQ ID NO: 464821 - DNA, 31 bp, Artificial Sequence
  Synthetic oligonucleotide
tgacaactgagtttgtagtaggggaccccca

SEQ ID NO: 464822 - DNA, 30 bp, Artificial Sequence
  Synthetic oligonucleotide
gattccgcgattgtcactgaggagccccca

SEQ ID NO: 464823 - DNA, 30 bp, Artificial Sequence
  Synthetic oligonucleotide
agttgttatggtcgcatacgcactccccca

SEQ ID NO: 464824 - DNA, 30 bp, Artificial Sequence
  Synthetic oligonucleotide
ttatcacgatttacttacgtgcttccccca

SEQ ID NO: 464825 - DNA, 30 bp, Artificial Sequence
  Synthetic oligonucleotide
gagcagatgggggaggggaggctcgcccca

SEQ ID NO: 464826 - DNA, 30 bp, Artificial Sequence
  Synthetic oligonucleotide
tcgccataaacagtgatgagttgtgcccca

SEQ ID NO: 464827 - DNA, 30 bp, Artificial Sequence
  Synthetic oligonucleotide
ttcaccgaagattaaagcaatgttgcccca

SEQ ID NO: 464828 - DNA, 30 bp, Artificial Sequence
  Synthetic oligonucleotide
tcaggagatattgagtccgcttaatcccca

SEQ ID NO: 464829 - DNA, 30 bp, Artificial Sequence
  Synthetic oligonucleotide
ccagagcaccttctcgtagatcactcccca

SEQ ID NO: 464830 - DNA, 30 bp, Artificial Sequence
  Synthetic oligonucleotide
ttggttaagcgggagcttcatagaagccca

SEQ ID NO: 464831 - DNA, 30 bp, Artificial Sequence
  Synthetic oligonucleotide
ggagcggggtctatgagcgttcacagccca

SEQ ID NO: 464832 - DNA, 30 bp, Artificial Sequence
  Synthetic oligonucleotide
ggatgggctgttgatctgtcagacagccca

SEQ ID NO: 464833 - DNA, 30 bp, Artificial Sequence
  Synthetic oligonucleotide
ttccactgcccccgtactgtagtcagccca

SEQ ID NO: 464834 - DNA, 30 bp, Artificial Sequence
  Synthetic oligonucleotide
agccaagcaattagctgaccattcagccca

SEQ ID NO: 464835 - DNA, 30 bp, Artificial Sequence
  Synthetic oligonucleotide
gattacttcggttaggaacaccctagccca

SEQ ID NO: 464836 - DNA, 30 bp, Artificial Sequence
  Synthetic oligonucleotide
aatcaagcgtgcagctgttgacgtagccca

SEQ ID NO: 464837 - DNA, 30 bp, Artificial Sequence
  Synthetic oligonucleotide
acccgaggtcaatcttgcgttgttagccca

SEQ ID NO: 464838 - DNA, 30 bp, Artificial Sequence
  Synthetic oligonucleotide
gggcattgaagatcatttttcatacgccca

SEQ ID NO: 464839 - DNA, 30 bp, Artificial Sequence
  Synthetic oligonucleotide
cgatcaggtggccgtccgcttgaccgccca

SEQ ID NO: 464840 - DNA, 30 bp, Artificial Sequence
  Synthetic oligonucleotide
cgcatcgacttgaaaaatcgtccccgccca

SEQ ID NO: 464841 - DNA, 30 bp, Artificial Sequence
  Synthetic oligonucleotide
gtttaattttgggcctgagacaaaggccca

SEQ ID NO: 464842 - DNA, 30 bp, Artificial Sequence
  Synthetic oligonucleotide
tattgcagagcgcaggatgagtgaggccca

SEQ ID NO: 464843 - DNA, 30 bp, Artificial Sequence
  Synthetic oligonucleotide
aattgctgaaagaacgacacggcgggccca

SEQ ID NO: 464844 - DNA, 30 bp, Artificial Sequence
  Synthetic oligonucleotide
cagtggctatagttcgagacattatgccca

SEQ ID NO: 464845 - DNA, 30 bp, Artificial Sequence
  Synthetic oligonucleotide
ctgacagttgctcgcaggttaggctgccca

SEQ ID NO: 464846 - DNA, 30 bp, Artificial Sequence
  Synthetic oligonucleotide
agctccaagcgtaatttttctaggtgccca

SEQ ID NO: 464847 - DNA, 30 bp, Artificial Sequence
  Synthetic oligonucleotide
tactttcttggcattcggggctggatccca

SEQ ID NO: 464848 - DNA, 30 bp, Artificial Sequence
  Synthetic oligonucleotide
tcagttgacccggtgtcaaaatatatccca

SEQ ID NO: 464849 - DNA, 30 bp, Artificial Sequence
  Synthetic oligonucleotide
ttatactcgtatactggaactcccctccca

SEQ ID NO: 464850 - DNA, 30 bp, Artificial Sequence
  Synthetic oligonucleotide
tatattgcagtgtaatgcgtaaggctccca

SEQ ID NO: 464851 - DNA, 30 bp, Artificial Sequence
  Synthetic oligonucleotide
gcgctggatgggaggtatttcggtctccca

SEQ ID NO: 464852 - DNA, 30 bp, Artificial Sequence
  Synthetic oligonucleotide
aatcctagtttgcaaccgtgtttagtccca

SEQ ID NO: 464853 - DNA, 30 bp, Artificial Sequence
  Synthetic oligonucleotide
aggaagaaaataacaccaccgctggtccca

SEQ ID NO: 464854 - DNA, 30 bp, Artificial Sequence
  Synthetic oligonucleotide
ggttaaagttactgtcttagagaattccca

SEQ ID NO: 464855 - DNA, 30 bp, Artificial Sequence
  Synthetic oligonucleotide
ggtcaggtccgggcacccgatggattccca

SEQ ID NO: 464856 - DNA, 30 bp, Artificial Sequence
  Synthetic oligonucleotide
attacgagttactagcggtaattattccca

SEQ ID NO: 464857 - DNA, 30 bp, Artificial Sequence
  Synthetic oligonucleotide
ggaaatcttgaaatctaatagatcttccca

SEQ ID NO: 464858 - DNA, 30 bp, Artificial Sequence
  Synthetic oligonucleotide
caaatccacatttcgctttacaagttccca

SEQ ID NO: 464859 - DNA, 30 bp, Artificial Sequence
  Synthetic oligonucleotide
ttatatgacaagggagttactcggttccca

SEQ ID NO: 464860 - DNA, 30 bp, Artificial Sequence
  Synthetic oligonucleotide
tgccgcaccaggctgagagctcaaaagcca

SEQ ID NO: 464861 - DNA, 30 bp, Artificial Sequence
  Synthetic oligonucleotide
gcgacctgtacggtgtcggtttaaaagcca

SEQ ID NO: 464862 - DNA, 30 bp, Artificial Sequence
  Synthetic oligonucleotide
cgtggtagcgtataacacccgtcaaagcca

SEQ ID NO: 464863 - DNA, 30 bp, Artificial Sequence
  Synthetic oligonucleotide
gttgaacgcggagtctatggcgtaaagcca

SEQ ID NO: 464864 - DNA, 30 bp, Artificial Sequence
  Synthetic oligonucleotide
tcttctgccttggatcataataccaagcca

SEQ ID NO: 464865 - DNA, 30 bp, Artificial Sequence
  Synthetic oligonucleotide
gagcgcgcgggcgacattctgaagaagcca

SEQ ID NO: 464866 - DNA, 30 bp, Artificial Sequence
  Synthetic oligonucleotide
gttcacttgaccttttcctacccgaagcca

SEQ ID NO: 464867 - DNA, 30 bp, Artificial Sequence
  Synthetic oligonucleotide
atcctggtgtgcttcgttatggcgaagcca

SEQ ID NO: 464868 - DNA, 30 bp, Artificial Sequence
  Synthetic oligonucleotide
gtgtgtactataatctacgggatgaagcca

SEQ ID NO: 464869 - DNA, 30 bp, Artificial Sequence
  Synthetic oligonucleotide
atagacacagtcgctttatgaggacagcca

SEQ ID NO: 464870 - DNA, 30 bp, Artificial Sequence
  Synthetic oligonucleotide
atactgtacaaaaccattttgggacagcca

SEQ ID NO: 464871 - DNA, 30 bp, Artificial Sequence
  Synthetic oligonucleotide
gtgttacttatcactttatgtcagcagcca

SEQ ID NO: 464872 - DNA, 31 bp, Artificial Sequence
  Synthetic oligonucleotide
gtcaccatacttgttgctcctcgcgcagcca

SEQ ID NO: 464873 - DNA, 30 bp, Artificial Sequence
  Synthetic oligonucleotide
gtatgcaactgtcatcaatgagggcagcca

SEQ ID NO: 464874 - DNA, 30 bp, Artificial Sequence
  Synthetic oligonucleotide
agcttacacctttcgttatgagggcagcca

SEQ ID NO: 464875 - DNA, 30 bp, Artificial Sequence
  Synthetic oligonucleotide
cgggtttgccaagcgacattgtggcagcca

SEQ ID NO: 464876 - DNA, 30 bp, Artificial Sequence
  Synthetic oligonucleotide
atcaggggagacacataaaaatgagagcca

SEQ ID NO: 464877 - DNA, 30 bp, Artificial Sequence
  Synthetic oligonucleotide
tactacgtacttctctagtaatcggagcca

SEQ ID NO: 464878 - DNA, 30 bp, Artificial Sequence
  Synthetic oligonucleotide
aaaatttcgcttacagcgatttcggagcca

SEQ ID NO: 464879 - DNA, 30 bp, Artificial Sequence
  Synthetic oligonucleotide
ttagttggttaaaccgaactcaaatagcca

SEQ ID NO: 464880 - DNA, 30 bp, Artificial Sequence
  Synthetic oligonucleotide
actactcgtgcccggcatccaacctagcca

SEQ ID NO: 464881 - DNA, 30 bp, Artificial Sequence
  Synthetic oligonucleotide
acaaggcgggttgggacccacctgtagcca

SEQ ID NO: 464882 - DNA, 30 bp, Artificial Sequence
  Synthetic oligonucleotide
gtgtttaaaaccacgctcaaattgtagcca

SEQ ID NO: 464883 - DNA, 30 bp, Artificial Sequence
  Synthetic oligonucleotide
gagtctttcggctcatctggggaaacgcca

SEQ ID NO: 464884 - DNA, 30 bp, Artificial Sequence
  Synthetic oligonucleotide
ttggtgaaataggcatgtcgtctaacgcca

SEQ ID NO: 464885 - DNA, 30 bp, Artificial Sequence
  Synthetic oligonucleotide
ggacatgggtaccctcgtatggtaacgcca

SEQ ID NO: 464886 - DNA, 30 bp, Artificial Sequence
  Synthetic oligonucleotide
ttagtgatgaatggtcaattgcacacgcca

SEQ ID NO: 464887 - DNA, 30 bp, Artificial Sequence
  Synthetic oligonucleotide
agaaatattacacgctagctatgcacgcca

SEQ ID NO: 464888 - DNA, 30 bp, Artificial Sequence
  Synthetic oligonucleotide
tcggtacggaccactactaaacagacgcca

SEQ ID NO: 464889 - DNA, 30 bp, Artificial Sequence
  Synthetic oligonucleotide
tatgtttttctattagtttctaggacgcca

SEQ ID NO: 464890 - DNA, 30 bp, Artificial Sequence
  Synthetic oligonucleotide
ctcctggggattgctgtcacgctgacgcca

SEQ ID NO: 464891 - DNA, 30 bp, Artificial Sequence
  Synthetic oligonucleotide
ggataagaattttggtaagtcgctacgcca

SEQ ID NO: 464892 - DNA, 30 bp, Artificial Sequence
  Synthetic oligonucleotide
gctgcgcttatacggctgttctaaccgcca

SEQ ID NO: 464893 - DNA, 30 bp, Artificial Sequence
  Synthetic oligonucleotide
catgggcgtgttgaagtcatgacaccgcca

SEQ ID NO: 464894 - DNA, 30 bp, Artificial Sequence
  Synthetic oligonucleotide
ccactcatcgaacgtactgctcgaccgcca

SEQ ID NO: 464895 - DNA, 30 bp, Artificial Sequence
  Synthetic oligonucleotide
ctactgggggtgcgcgcaggatgaccgcca

SEQ ID NO: 464896 - DNA, 30 bp, Artificial Sequence
  Synthetic oligonucleotide
aaacattttagtgttgcatagctaccgcca

SEQ ID NO: 464897 - DNA, 30 bp, Artificial Sequence
  Synthetic oligonucleotide
attaaatgataaaaccctgataggccgcca

SEQ ID NO: 464898 - DNA, 30 bp, Artificial Sequence
  Synthetic oligonucleotide
tagtgaacgcggcggcagaaaaatccgcca

SEQ ID NO: 464899 - DNA, 30 bp, Artificial Sequence
  Synthetic oligonucleotide
cctcttcagcatttcgcgtggagtccgcca

SEQ ID NO: 464900 - DNA, 30 bp, Artificial Sequence
  Synthetic oligonucleotide
gagtataaactggagggggccacagcgcca

SEQ ID NO: 464901 - DNA, 30 bp, Artificial Sequence
  Synthetic oligonucleotide
gcaagatcgggggcatcgcttttagcgcca

SEQ ID NO: 464902 - DNA, 30 bp, Artificial Sequence
  Synthetic oligonucleotide
caggtgcggagggctcactacggcgcgcca

SEQ ID NO: 464903 - DNA, 30 bp, Artificial Sequence
  Synthetic oligonucleotide
tcacataggggcgccaaatgataggcgcca

SEQ ID NO: 464904 - DNA, 30 bp, Artificial Sequence
  Synthetic oligonucleotide
ctattcaaacccgttatgagcccggcgcca

SEQ ID NO: 464905 - DNA, 30 bp, Artificial Sequence
  Synthetic oligonucleotide
ggaagaactggcgccgaaatctttgcgcca

SEQ ID NO: 464906 - DNA, 30 bp, Artificial Sequence
  Synthetic oligonucleotide
tatctacgtcacgcaaagctggaatcgcca

SEQ ID NO: 464907 - DNA, 30 bp, Artificial Sequence
  Synthetic oligonucleotide
gccggtatcattcatatcagatgctcgcca

SEQ ID NO: 464908 - DNA, 30 bp, Artificial Sequence
  Synthetic oligonucleotide
actctcgactgatgcaaagtcaggtcgcca

SEQ ID NO: 464909 - DNA, 30 bp, Artificial Sequence
  Synthetic oligonucleotide
tgatgtttcacactaccattggggtcgcca

SEQ ID NO: 464910 - DNA, 30 bp, Artificial Sequence
  Synthetic oligonucleotide
ctcctattaattggttggcagcaaaggcca

SEQ ID NO: 464911 - DNA, 30 bp, Artificial Sequence
  Synthetic oligonucleotide
aatagttactctaattcgttggtaaggcca

SEQ ID NO: 464912 - DNA, 30 bp, Artificial Sequence
  Synthetic oligonucleotide
aatctgctcgctatttcccacttaaggcca

SEQ ID NO: 464913 - DNA, 30 bp, Artificial Sequence
  Synthetic oligonucleotide
aaatgtagaatcagctcttaagccaggcca

SEQ ID NO: 464914 - DNA, 30 bp, Artificial Sequence
  Synthetic oligonucleotide
atctacgtaacgtactcacctgtcaggcca

SEQ ID NO: 464915 - DNA, 30 bp, Artificial Sequence
  Synthetic oligonucleotide
tccagtaatgactagatacattggaggcca

SEQ ID NO: 464916 - DNA, 30 bp, Artificial Sequence
  Synthetic oligonucleotide
gtattcctggggtcttatcagctgaggcca

SEQ ID NO: 464917 - DNA, 30 bp, Artificial Sequence
  Synthetic oligonucleotide
cttcgtatcaataagagacgcaataggcca

SEQ ID NO: 464918 - DNA, 30 bp, Artificial Sequence
  Synthetic oligonucleotide
ttggtcacggcgatatggcataataggcca

SEQ ID NO: 464919 - DNA, 30 bp, Artificial Sequence
  Synthetic oligonucleotide
tactttcaactctgtgacagcgctaggcca

SEQ ID NO: 464920 - DNA, 30 bp, Artificial Sequence
  Synthetic oligonucleotide
tagcgattttaagaggccaccagacggcca

SEQ ID NO: 464921 - DNA, 30 bp, Artificial Sequence
  Synthetic oligonucleotide
ctcgtagacgccgagtgagcactacggcca

SEQ ID NO: 464922 - DNA, 30 bp, Artificial Sequence
  Synthetic oligonucleotide
ggctaagggacactcatgcggaagcggcca

SEQ ID NO: 464923 - DNA, 30 bp, Artificial Sequence
  Synthetic oligonucleotide
gattgtagcgtcggttatgcggagcggcca

SEQ ID NO: 464924 - DNA, 30 bp, Artificial Sequence
  Synthetic oligonucleotide
ctgagtggtattacgccgccttagcggcca

SEQ ID NO: 464925 - DNA, 30 bp, Artificial Sequence
  Synthetic oligonucleotide
aacacataagatccctgggacccgcggcca

SEQ ID NO: 464926 - DNA, 30 bp, Artificial Sequence
  Synthetic oligonucleotide
gagttcgacttattttacttctggcggcca

SEQ ID NO: 464927 - DNA, 30 bp, Artificial Sequence
  Synthetic oligonucleotide
ttgtaatgaagggtataattaatgcggcca

SEQ ID NO: 464928 - DNA, 30 bp, Artificial Sequence
  Synthetic oligonucleotide
catttttaccctctccgagggtctcggcca

SEQ ID NO: 464929 - DNA, 30 bp, Artificial Sequence
  Synthetic oligonucleotide
agcctggatatagggggggggattcggcca

SEQ ID NO: 464930 - DNA, 30 bp, Artificial Sequence
  Synthetic oligonucleotide
ataattaggtgattatctccttttcggcca

SEQ ID NO: 464931 - DNA, 30 bp, Artificial Sequence
  Synthetic oligonucleotide
gggaacgcgccggcaggactataagggcca

SEQ ID NO: 464932 - DNA, 30 bp, Artificial Sequence
  Synthetic oligonucleotide
tcgttggatatcccgcgccgggcagggcca

SEQ ID NO: 464933 - DNA, 30 bp, Artificial Sequence
  Synthetic oligonucleotide
atgcgtgctccggatcatggaatagggcca

SEQ ID NO: 464934 - DNA, 30 bp, Artificial Sequence
  Synthetic oligonucleotide
tacatctggaacgggccgggtagcgggcca

SEQ ID NO: 464935 - DNA, 30 bp, Artificial Sequence
  Synthetic oligonucleotide
cgagaaatagggttgcggcaggatgggcca

SEQ ID NO: 464936 - DNA, 30 bp, Artificial Sequence
  Synthetic oligonucleotide
gtccatgaaactcttaataagtgtgggcca

SEQ ID NO: 464937 - DNA, 30 bp, Artificial Sequence
  Synthetic oligonucleotide
tagtcactccgtgcggctacccttgggcca

SEQ ID NO: 464938 - DNA, 30 bp, Artificial Sequence
  Synthetic oligonucleotide
gactagtcttggttttgtgtattatggcca

SEQ ID NO: 464939 - DNA, 30 bp, Artificial Sequence
  Synthetic oligonucleotide
cactgatgaacgcgggcagccgtctggcca

SEQ ID NO: 464940 - DNA, 30 bp, Artificial Sequence
  Synthetic oligonucleotide
gcagtaggtggacgcatctatttctggcca

SEQ ID NO: 464941 - DNA, 30 bp, Artificial Sequence
  Synthetic oligonucleotide
cgtctagtaaaagggcgggtccggtggcca

SEQ ID NO: 464942 - DNA, 30 bp, Artificial Sequence
  Synthetic oligonucleotide
tattgtaaaggccacatttacagttggcca

SEQ ID NO: 464943 - DNA, 30 bp, Artificial Sequence
  Synthetic oligonucleotide
gcggggccggtccctgactaggtttggcca

SEQ ID NO: 464944 - DNA, 30 bp, Artificial Sequence
  Synthetic oligonucleotide
gagagggcgcattccgggcccttttggcca

SEQ ID NO: 464945 - DNA, 30 bp, Artificial Sequence
  Synthetic oligonucleotide
gttgttatcactatgccgcttacaatgcca

SEQ ID NO: 464946 - DNA, 30 bp, Artificial Sequence
  Synthetic oligonucleotide
cccatgcatcggtaaattctttcgatgcca

SEQ ID NO: 464947 - DNA, 30 bp, Artificial Sequence
  Synthetic oligonucleotide
aaatatagatgttcgtcgtacaggatgcca

SEQ ID NO: 464948 - DNA, 30 bp, Artificial Sequence
  Synthetic oligonucleotide
agcatggcatagcaggtctcgaatatgcca

SEQ ID NO: 464949 - DNA, 30 bp, Artificial Sequence
  Synthetic oligonucleotide
tagttgcaatatgccggaatacgtatgcca

SEQ ID NO: 464950 - DNA, 30 bp, Artificial Sequence
  Synthetic oligonucleotide
ttcaataccctgcatcgcttctttatgcca

SEQ ID NO: 464951 - DNA, 30 bp, Artificial Sequence
  Synthetic oligonucleotide
tataaaggatactccttgaatagcctgcca

SEQ ID NO: 464952 - DNA, 30 bp, Artificial Sequence
  Synthetic oligonucleotide
cctggttactctcctctagaccagctgcca

SEQ ID NO: 464953 - DNA, 30 bp, Artificial Sequence
  Synthetic oligonucleotide
atatcaccacgaccaaggttgtatctgcca

SEQ ID NO: 464954 - DNA, 30 bp, Artificial Sequence
  Synthetic oligonucleotide
ctctctcaggtccccttggaaactctgcca

SEQ ID NO: 464955 - DNA, 30 bp, Artificial Sequence
  Synthetic oligonucleotide
tcagtgcccgggccgtttgtgtttctgcca

SEQ ID NO: 464956 - DNA, 30 bp, Artificial Sequence
  Synthetic oligonucleotide
ggggttggccaggttgcatcttcagtgcca

SEQ ID NO: 464957 - DNA, 30 bp, Artificial Sequence
  Synthetic oligonucleotide
gttgaaagcatgggcccgggatgcgtgcca

SEQ ID NO: 464958 - DNA, 30 bp, Artificial Sequence
  Synthetic oligonucleotide
tgcctgtcggtgggttcctgagtcgtgcca

SEQ ID NO: 464959 - DNA, 30 bp, Artificial Sequence
  Synthetic oligonucleotide
aactcaccggatatatagttcggggtgcca

SEQ ID NO: 464960 - DNA, 30 bp, Artificial Sequence
  Synthetic oligonucleotide
gattcgtaaagtggttatatagatgtgcca

SEQ ID NO: 464961 - DNA, 30 bp, Artificial Sequence
  Synthetic oligonucleotide
gaaggttttgattttaatccacaattgcca

SEQ ID NO: 464962 - DNA, 30 bp, Artificial Sequence
  Synthetic oligonucleotide
cattttcacatatagtgattaacattgcca

SEQ ID NO: 464963 - DNA, 30 bp, Artificial Sequence
  Synthetic oligonucleotide
acccgctctgctcagttacgcccattgcca

SEQ ID NO: 464964 - DNA, 30 bp, Artificial Sequence
  Synthetic oligonucleotide
aattatggcagtccctatctaagcttgcca

SEQ ID NO: 464965 - DNA, 30 bp, Artificial Sequence
  Synthetic oligonucleotide
tactacggcgagaaggtcttggagttgcca

SEQ ID NO: 464966 - DNA, 30 bp, Artificial Sequence
  Synthetic oligonucleotide
aagccgcccctgcggcacctgaggttgcca

SEQ ID NO: 464967 - DNA, 30 bp, Artificial Sequence
  Synthetic oligonucleotide
tttcgcctataactccgtcgggaaaatcca

SEQ ID NO: 464968 - DNA, 30 bp, Artificial Sequence
  Synthetic oligonucleotide
ccctttggggaattatcttgaggaaatcca

SEQ ID NO: 464969 - DNA, 30 bp, Artificial Sequence
  Synthetic oligonucleotide
atgccgcttaggagggaattttccaatcca

SEQ ID NO: 464970 - DNA, 30 bp, Artificial Sequence
  Synthetic oligonucleotide
aatcgggaaacgcaatatgtacgcaatcca

SEQ ID NO: 464971 - DNA, 30 bp, Artificial Sequence
  Synthetic oligonucleotide
ctactatcacgtgtgcaggtatgcaatcca

SEQ ID NO: 464972 - DNA, 30 bp, Artificial Sequence
  Synthetic oligonucleotide
tccatgaagaatacgcggcaggcgaatcca

SEQ ID NO: 464973 - DNA, 30 bp, Artificial Sequence
  Synthetic oligonucleotide
ttagcgtactgtttccatctggttaatcca

SEQ ID NO: 464974 - DNA, 30 bp, Artificial Sequence
  Synthetic oligonucleotide
aaaataactgggttgcaatcgttacatcca

SEQ ID NO: 464975 - DNA, 30 bp, Artificial Sequence
  Synthetic oligonucleotide
gatttcgtatttattaattgataccatcca

SEQ ID NO: 464976 - DNA, 30 bp, Artificial Sequence
  Synthetic oligonucleotide
gctccgggactgacacaagggacccatcca

SEQ ID NO: 464977 - DNA, 31 bp, Artificial Sequence
  Synthetic oligonucleotide
gaccttcggttgttcactagcatgccatcca

SEQ ID NO: 464978 - DNA, 30 bp, Artificial Sequence
  Synthetic oligonucleotide
ctaagcttccctggagtccccacgcatcca

SEQ ID NO: 464979 - DNA, 30 bp, Artificial Sequence
  Synthetic oligonucleotide
aaagtttgtatttcaccgcgttcgcatcca

SEQ ID NO: 464980 - DNA, 30 bp, Artificial Sequence
  Synthetic oligonucleotide
gcgtatagaccgttatcctaccaagatcca

SEQ ID NO: 464981 - DNA, 30 bp, Artificial Sequence
  Synthetic oligonucleotide
agttgttaacatttttaggcatcagatcca

SEQ ID NO: 464982 - DNA, 30 bp, Artificial Sequence
  Synthetic oligonucleotide
taggatcagtaagattcctggtgagatcca

SEQ ID NO: 464983 - DNA, 30 bp, Artificial Sequence
  Synthetic oligonucleotide
aaattggaactccgatccggggtcgatcca

SEQ ID NO: 464984 - DNA, 30 bp, Artificial Sequence
  Synthetic oligonucleotide
ctcacttttgtcgcttagaactaggatcca

SEQ ID NO: 464985 - DNA, 30 bp, Artificial Sequence
  Synthetic oligonucleotide
tagtcatcggctttccgttagtcggatcca

SEQ ID NO: 464986 - DNA, 30 bp, Artificial Sequence
  Synthetic oligonucleotide
gattagagaagatagtttacaagggatcca

SEQ ID NO: 464987 - DNA, 30 bp, Artificial Sequence
  Synthetic oligonucleotide
tggattctcgcaactggctccagggatcca

SEQ ID NO: 464988 - DNA, 30 bp, Artificial Sequence
  Synthetic oligonucleotide
tgaataccgatgatggacacgtgggatcca

SEQ ID NO: 464989 - DNA, 30 bp, Artificial Sequence
  Synthetic oligonucleotide
cattcgtcaagtcgcacgtgaggatatcca

SEQ ID NO: 464990 - DNA, 30 bp, Artificial Sequence
  Synthetic oligonucleotide
aagtaccagtttacatgccgcgtatatcca

SEQ ID NO: 464991 - DNA, 30 bp, Artificial Sequence
  Synthetic oligonucleotide
ccagttctttcggattacgatgcctatcca

SEQ ID NO: 464992 - DNA, 30 bp, Artificial Sequence
  Synthetic oligonucleotide
ttaagtatgtagtatgcgtctagctatcca

SEQ ID NO: 464993 - DNA, 30 bp, Artificial Sequence
  Synthetic oligonucleotide
ttcttcgtagaggcccgcacaacgtatcca

SEQ ID NO: 464994 - DNA, 30 bp, Artificial Sequence
  Synthetic oligonucleotide
acattttctaattggaagctaaattatcca

SEQ ID NO: 464995 - DNA, 30 bp, Artificial Sequence
  Synthetic oligonucleotide
tgacacaaacggtgggttttgctttatcca

SEQ ID NO: 464996 - DNA, 30 bp, Artificial Sequence
  Synthetic oligonucleotide
gtatccgatatcaattgaggcggcactcca

SEQ ID NO: 464997 - DNA, 30 bp, Artificial Sequence
  Synthetic oligonucleotide
ggccgttagtggtttgcctattgcactcca

SEQ ID NO: 464998 - DNA, 30 bp, Artificial Sequence
  Synthetic oligonucleotide
ggctcccctgttgaatgatataagactcca

SEQ ID NO: 464999 - DNA, 30 bp, Artificial Sequence
  Synthetic oligonucleotide
ttaactactgcgcgtcttggcaggactcca

SEQ ID NO: 465000 - DNA, 30 bp, Artificial Sequence
  Synthetic oligonucleotide
gaagaagggagaacctaagtattgcctcca

SEQ ID NO: 465001 - DNA, 30 bp, Artificial Sequence
  Synthetic oligonucleotide
aaccggtaacctcttggaatttcagctcca

SEQ ID NO: 465002 - DNA, 30 bp, Artificial Sequence
  Synthetic oligonucleotide
cgattctgtcgaccccagtccttagctcca

SEQ ID NO: 465003 - DNA, 30 bp, Artificial Sequence
  Synthetic oligonucleotide
aaagaagcgctcataccaggcttcgctcca

SEQ ID NO: 465004 - DNA, 30 bp, Artificial Sequence
  Synthetic oligonucleotide
ggtacacgttttaaggagtcggaggctcca

SEQ ID NO: 465005 - DNA, 30 bp, Artificial Sequence
  Synthetic oligonucleotide
ggtaagttttttttcctgacgtatgctcca

SEQ ID NO: 465006 - DNA, 30 bp, Artificial Sequence
  Synthetic oligonucleotide
cggcacttacattcacacgcaggatctcca

SEQ ID NO: 465007 - DNA, 30 bp, Artificial Sequence
  Synthetic oligonucleotide
gtcaaggtgactcatttcagctggtctcca

SEQ ID NO: 465008 - DNA, 30 bp, Artificial Sequence
  Synthetic oligonucleotide
atatgccaacacatatgacgaacttctcca

SEQ ID NO: 465009 - DNA, 30 bp, Artificial Sequence
  Synthetic oligonucleotide
catgttttgacgtgtatctataaaagtcca

SEQ ID NO: 465010 - DNA, 30 bp, Artificial Sequence
  Synthetic oligonucleotide
tcggaacagacccagttcgtatgaagtcca

SEQ ID NO: 465011 - DNA, 30 bp, Artificial Sequence
  Synthetic oligonucleotide
tcctgcgaaggaggaagcaacgtaagtcca

SEQ ID NO: 465012 - DNA, 30 bp, Artificial Sequence
  Synthetic oligonucleotide
cggtaaaaatggggtttttttgtaagtcca

SEQ ID NO: 465013 - DNA, 30 bp, Artificial Sequence
  Synthetic oligonucleotide
ttactcaaacgtggagaacattacagtcca

SEQ ID NO: 465014 - DNA, 30 bp, Artificial Sequence
  Synthetic oligonucleotide
gtctgaggcgaaaacttagtggccagtcca

SEQ ID NO: 465015 - DNA, 30 bp, Artificial Sequence
  Synthetic oligonucleotide
gctgtaggttggaacctccagaggagtcca

SEQ ID NO: 465016 - DNA, 30 bp, Artificial Sequence
  Synthetic oligonucleotide
ggtcggatctaacggattcatgggagtcca

SEQ ID NO: 465017 - DNA, 30 bp, Artificial Sequence
  Synthetic oligonucleotide
tacaacacgcgtcatgatagggatagtcca

SEQ ID NO: 465018 - DNA, 30 bp, Artificial Sequence
  Synthetic oligonucleotide
ggaactatctacaactcgcacgtacgtcca

SEQ ID NO: 465019 - DNA, 30 bp, Artificial Sequence
  Synthetic oligonucleotide
aagtgactcgtcagcgtttaattacgtcca

SEQ ID NO: 465020 - DNA, 30 bp, Artificial Sequence
  Synthetic oligonucleotide
tatatttgccgtgatttcgaagtccgtcca

SEQ ID NO: 465021 - DNA, 30 bp, Artificial Sequence
  Synthetic oligonucleotide
actttaccgcatggccgattagaaggtcca

SEQ ID NO: 465022 - DNA, 30 bp, Artificial Sequence
  Synthetic oligonucleotide
attcgaaggcttcaccccgatgaaggtcca

SEQ ID NO: 465023 - DNA, 30 bp, Artificial Sequence
  Synthetic oligonucleotide
taatcctatgagtgggaacctccaggtcca

SEQ ID NO: 465024 - DNA, 30 bp, Artificial Sequence
  Synthetic oligonucleotide
ggcctcttgatcagacataggaccggtcca

SEQ ID NO: 465025 - DNA, 30 bp, Artificial Sequence
  Synthetic oligonucleotide
aacaactggtggatggagtagtagggtcca

SEQ ID NO: 465026 - DNA, 30 bp, Artificial Sequence
  Synthetic oligonucleotide
ttcctcaaatgtaagcagagttggggtcca

SEQ ID NO: 465027 - DNA, 30 bp, Artificial Sequence
  Synthetic oligonucleotide
tactgaggaccagcgcaaacgactggtcca

SEQ ID NO: 465028 - DNA, 31 bp, Artificial Sequence
  Synthetic oligonucleotide
gtgagttcagttcttaaagttatcatgtcca

SEQ ID NO: 465029 - DNA, 30 bp, Artificial Sequence
  Synthetic oligonucleotide
ttgtgcacgggtgcgttggtatgatgtcca

SEQ ID NO: 465030 - DNA, 30 bp, Artificial Sequence
  Synthetic oligonucleotide
tccgatattgatttagctgatttatgtcca

SEQ ID NO: 465031 - DNA, 30 bp, Artificial Sequence
  Synthetic oligonucleotide
ggttgtttgacgagaaagtcaaagtgtcca

SEQ ID NO: 465032 - DNA, 30 bp, Artificial Sequence
  Synthetic oligonucleotide
gagttatatagcactctggctcattgtcca

SEQ ID NO: 465033 - DNA, 30 bp, Artificial Sequence
  Synthetic oligonucleotide
tctctgataggttggcgagggacttgtcca

SEQ ID NO: 465034 - DNA, 30 bp, Artificial Sequence
  Synthetic oligonucleotide
taaagttgttctactcctggaccttgtcca

SEQ ID NO: 465035 - DNA, 30 bp, Artificial Sequence
  Synthetic oligonucleotide
ttgctgtaataagcgcacccttcaattcca

SEQ ID NO: 465036 - DNA, 30 bp, Artificial Sequence
  Synthetic oligonucleotide
tcgttacggacaaacgcttatggaattcca

SEQ ID NO: 465037 - DNA, 30 bp, Artificial Sequence
  Synthetic oligonucleotide
ttaattgtgaaatcgtcgtttcgcattcca

SEQ ID NO: 465038 - DNA, 30 bp, Artificial Sequence
  Synthetic oligonucleotide
tcagtacctggtatgggtgcatgcattcca

SEQ ID NO: 465039 - DNA, 30 bp, Artificial Sequence
  Synthetic oligonucleotide
tacctgatgcgatcgtatggtgtgattcca

SEQ ID NO: 465040 - DNA, 30 bp, Artificial Sequence
  Synthetic oligonucleotide
cattatcgtccacatcagatgcatattcca

SEQ ID NO: 465041 - DNA, 30 bp, Artificial Sequence
  Synthetic oligonucleotide
tcaagattgtaaggaagcctgcctattcca

SEQ ID NO: 465042 - DNA, 30 bp, Artificial Sequence
  Synthetic oligonucleotide
tctgcgtcaaaaaggttgtgtcgtattcca

SEQ ID NO: 465043 - DNA, 30 bp, Artificial Sequence
  Synthetic oligonucleotide
cgcctgtttagaagtagtgaaatacttcca

SEQ ID NO: 465044 - DNA, 30 bp, Artificial Sequence
  Synthetic oligonucleotide
taaaaagaagaattagatcataaccttcca

SEQ ID NO: 465045 - DNA, 30 bp, Artificial Sequence
  Synthetic oligonucleotide
attaactacccggacggcaaggtccttcca

SEQ ID NO: 465046 - DNA, 30 bp, Artificial Sequence
  Synthetic oligonucleotide
aagcaattcagagctttaattaatcttcca

SEQ ID NO: 465047 - DNA, 30 bp, Artificial Sequence
  Synthetic oligonucleotide
gtatttcgttcaaattatttagcagttcca

SEQ ID NO: 465048 - DNA, 30 bp, Artificial Sequence
  Synthetic oligonucleotide
cggtaagtaaaggagccaatacgagttcca

SEQ ID NO: 465049 - DNA, 30 bp, Artificial Sequence
  Synthetic oligonucleotide
atagagcacatcttcaactgcgtcgttcca

SEQ ID NO: 465050 - DNA, 30 bp, Artificial Sequence
  Synthetic oligonucleotide
gcgtgcggccgccacagacgtttggttcca

SEQ ID NO: 465051 - DNA, 30 bp, Artificial Sequence
  Synthetic oligonucleotide
ctatcccggatggctgcattcgctgttcca

SEQ ID NO: 465052 - DNA, 30 bp, Artificial Sequence
  Synthetic oligonucleotide
ttctcttggtgccaccgtaagacatttcca

SEQ ID NO: 465053 - DNA, 30 bp, Artificial Sequence
  Synthetic oligonucleotide
tttgtgatggcacctctgttcagatttcca

SEQ ID NO: 465054 - DNA, 30 bp, Artificial Sequence
  Synthetic oligonucleotide
gttttaagaggatcagtgaaatattttcca

SEQ ID NO: 465055 - DNA, 30 bp, Artificial Sequence
  Synthetic oligonucleotide
cggcataaaatacggttccgttattttcca

SEQ ID NO: 465056 - DNA, 30 bp, Artificial Sequence
  Synthetic oligonucleotide
ccaagctgcatataaaattcaagttttcca

SEQ ID NO: 465057 - DNA, 30 bp, Artificial Sequence
  Synthetic oligonucleotide
cacaactcaagatgtgtaagtgtttttcca

SEQ ID NO: 465058 - DNA, 30 bp, Artificial Sequence
  Synthetic oligonucleotide
aagtagtgacacaagcctggcttttttcca

SEQ ID NO: 465059 - DNA, 30 bp, Artificial Sequence
  Synthetic oligonucleotide
agggtatcggcgggggaaaatgtcaaagca

SEQ ID NO: 465060 - DNA, 30 bp, Artificial Sequence
  Synthetic oligonucleotide
tactatccgttatcttaaatggctaaagca

SEQ ID NO: 465061 - DNA, 30 bp, Artificial Sequence
  Synthetic oligonucleotide
gctatatttcttctgtaagtcggtaaagca

SEQ ID NO: 465062 - DNA, 30 bp, Artificial Sequence
  Synthetic oligonucleotide
ggccggtaagccactatacgcaaacaagca

SEQ ID NO: 465063 - DNA, 31 bp, Artificial Sequence
  Synthetic oligonucleotide
gttacgccagacgctcatgactggccaagca

SEQ ID NO: 465064 - DNA, 30 bp, Artificial Sequence
  Synthetic oligonucleotide
ccccctcgggaagtcgctagaatccaagca

SEQ ID NO: 465065 - DNA, 30 bp, Artificial Sequence
  Synthetic oligonucleotide
ggttgtcgtcagttatagtattctcaagca

SEQ ID NO: 465066 - DNA, 30 bp, Artificial Sequence
  Synthetic oligonucleotide
ggtccaaagatactagcgtggcttcaagca

SEQ ID NO: 465067 - DNA, 30 bp, Artificial Sequence
  Synthetic oligonucleotide
attcatgctactggttttaaccgtgaagca

SEQ ID NO: 465068 - DNA, 30 bp, Artificial Sequence
  Synthetic oligonucleotide
aatggaaatatttatattaggccataagca

SEQ ID NO: 465069 - DNA, 30 bp, Artificial Sequence
  Synthetic oligonucleotide
gggctaatcagataaacgtcgccgtaagca

SEQ ID NO: 465070 - DNA, 30 bp, Artificial Sequence
  Synthetic oligonucleotide
ttctatcatagtttaacgccatggtaagca

SEQ ID NO: 465071 - DNA, 30 bp, Artificial Sequence
  Synthetic oligonucleotide
tcgtagtatggacggtaggttggttaagca

SEQ ID NO: 465072 - DNA, 30 bp, Artificial Sequence
  Synthetic oligonucleotide
gacgttcttataactcgcgggttttaagca

SEQ ID NO: 465073 - DNA, 30 bp, Artificial Sequence
  Synthetic oligonucleotide
tttatagatcttaattatttgttttaagca

SEQ ID NO: 465074 - DNA, 30 bp, Artificial Sequence
  Synthetic oligonucleotide
gctcgcccctacgctttcgctgccacagca

SEQ ID NO: 465075 - DNA, 30 bp, Artificial Sequence
  Synthetic oligonucleotide
accgatgatgtggctaagagcatcacagca

SEQ ID NO: 465076 - DNA, 30 bp, Artificial Sequence
  Synthetic oligonucleotide
ttgctcagctactctcatttacagacagca

SEQ ID NO: 465077 - DNA, 30 bp, Artificial Sequence
  Synthetic oligonucleotide
cgtgtccggaaaccttgtccatcgacagca

SEQ ID NO: 465078 - DNA, 30 bp, Artificial Sequence
  Synthetic oligonucleotide
acagggataaaagagtcaatctggacagca

SEQ ID NO: 465079 - DNA, 30 bp, Artificial Sequence
  Synthetic oligonucleotide
atcggttaagacctccgaggactgacagca

SEQ ID NO: 465080 - DNA, 30 bp, Artificial Sequence
  Synthetic oligonucleotide
tttgcccccggtcggagcaacgtgacagca

SEQ ID NO: 465081 - DNA, 30 bp, Artificial Sequence
  Synthetic oligonucleotide
gttttatatcggtggtgtgttaacccagca

SEQ ID NO: 465082 - DNA, 30 bp, Artificial Sequence
  Synthetic oligonucleotide
agtgatagcagtcttatgcccaccccagca

SEQ ID NO: 465083 - DNA, 30 bp, Artificial Sequence
  Synthetic oligonucleotide
tctgagacgggccgatgccctaggccagca

SEQ ID NO: 465084 - DNA, 30 bp, Artificial Sequence
  Synthetic oligonucleotide
atcctaaggacgtcaccagactttccagca

SEQ ID NO: 465085 - DNA, 30 bp, Artificial Sequence
  Synthetic oligonucleotide
gcgttacgtcaacagtccgtgcaagcagca

SEQ ID NO: 465086 - DNA, 30 bp, Artificial Sequence
  Synthetic oligonucleotide
tccgccatgttctgccaatactaggcagca

SEQ ID NO: 465087 - DNA, 30 bp, Artificial Sequence
  Synthetic oligonucleotide
atattcgcagacttagtattatcggcagca

SEQ ID NO: 465088 - DNA, 30 bp, Artificial Sequence
  Synthetic oligonucleotide
tgacatgctactcaagctaggtatgcagca

SEQ ID NO: 465089 - DNA, 30 bp, Artificial Sequence
  Synthetic oligonucleotide
gccgggctcatgccgcggaggattgcagca

SEQ ID NO: 465090 - DNA, 30 bp, Artificial Sequence
  Synthetic oligonucleotide
ttcgattttgctaactcgccagcctcagca

SEQ ID NO: 465091 - DNA, 30 bp, Artificial Sequence
  Synthetic oligonucleotide
aatgacttcatctggggatagtcctcagca

SEQ ID NO: 465092 - DNA, 30 bp, Artificial Sequence
  Synthetic oligonucleotide
ttagaaaagagatggatttcatgttcagca

SEQ ID NO: 465093 - DNA, 30 bp, Artificial Sequence
  Synthetic oligonucleotide
cgagactcgtgcgcaacccaggcaagagca

SEQ ID NO: 465094 - DNA, 30 bp, Artificial Sequence
  Synthetic oligonucleotide
cgtttgtgttttcaattgtctctaagagca

SEQ ID NO: 465095 - DNA, 30 bp, Artificial Sequence
  Synthetic oligonucleotide
aaagctagatcgcgaatgccgaagcgagca

SEQ ID NO: 465096 - DNA, 30 bp, Artificial Sequence
  Synthetic oligonucleotide
gctgtctctcccaataaagagcgtcgagca

SEQ ID NO: 465097 - DNA, 30 bp, Artificial Sequence
  Synthetic oligonucleotide
ggaacagtgggacacgggggttttcgagca

SEQ ID NO: 465098 - DNA, 30 bp, Artificial Sequence
  Synthetic oligonucleotide
ggtattgacttcaaggccggtagaggagca

SEQ ID NO: 465099 - DNA, 30 bp, Artificial Sequence
  Synthetic oligonucleotide
tactctggctcatttataggtgtaggagca

SEQ ID NO: 465100 - DNA, 30 bp, Artificial Sequence
  Synthetic oligonucleotide
tgatcactttttaggatataacccggagca

SEQ ID NO: 465101 - DNA, 30 bp, Artificial Sequence
  Synthetic oligonucleotide
attgttcggcatatatatgtatccggagca

SEQ ID NO: 465102 - DNA, 30 bp, Artificial Sequence
  Synthetic oligonucleotide
gggtttgcctcggcagtttggtagggagca

SEQ ID NO: 465103 - DNA, 30 bp, Artificial Sequence
  Synthetic oligonucleotide
gagtatccatctgtgccccccgcatgagca

SEQ ID NO: 465104 - DNA, 30 bp, Artificial Sequence
  Synthetic oligonucleotide
aaaaagtaacggtctttgaaaggatgagca

SEQ ID NO: 465105 - DNA, 30 bp, Artificial Sequence
  Synthetic oligonucleotide
ggagttttttctacgtatgaagcgtgagca

SEQ ID NO: 465106 - DNA, 30 bp, Artificial Sequence
  Synthetic oligonucleotide
caaattggtaataatagaaacaggtgagca

SEQ ID NO: 465107 - DNA, 30 bp, Artificial Sequence
  Synthetic oligonucleotide
gaatcgttagccggttacacaatttgagca

SEQ ID NO: 465108 - DNA, 30 bp, Artificial Sequence
  Synthetic oligonucleotide
taactgatcgcgcacgcttgttacatagca

SEQ ID NO: 465109 - DNA, 30 bp, Artificial Sequence
  Synthetic oligonucleotide
gacatgcttgttgtgttaagtgggatagca

SEQ ID NO: 465110 - DNA, 30 bp, Artificial Sequence
  Synthetic oligonucleotide
cttacgctagcatactttggtgggatagca

SEQ ID NO: 465111 - DNA, 30 bp, Artificial Sequence
  Synthetic oligonucleotide
aatcggacgatacaaagtcaatggatagca

SEQ ID NO: 465112 - DNA, 30 bp, Artificial Sequence
  Synthetic oligonucleotide
ttgtccagtcacgcgtatgcggtgatagca

SEQ ID NO: 465113 - DNA, 30 bp, Artificial Sequence
  Synthetic oligonucleotide
gtataacgcttagcaaaactggctatagca

SEQ ID NO: 465114 - DNA, 30 bp, Artificial Sequence
  Synthetic oligonucleotide
ttccacttagcccatcgttggggtatagca

SEQ ID NO: 465115 - DNA, 30 bp, Artificial Sequence
  Synthetic oligonucleotide
caatccaaaagtgatttggtgggactagca

SEQ ID NO: 465116 - DNA, 29 bp, Artificial Sequence
  Synthetic oligonucleotide
ggcctgccgttcgcccttgaatcctagca

SEQ ID NO: 465117 - DNA, 30 bp, Artificial Sequence
  Synthetic oligonucleotide
gtgtgacacaggtccttcgggctcctagca

SEQ ID NO: 465118 - DNA, 30 bp, Artificial Sequence
  Synthetic oligonucleotide
cacccggttatagacccctaggcagtagca

SEQ ID NO: 465119 - DNA, 30 bp, Artificial Sequence
  Synthetic oligonucleotide
catggtgcggtctcctggatccacgtagca

SEQ ID NO: 465120 - DNA, 30 bp, Artificial Sequence
  Synthetic oligonucleotide
agctttcttggtacccttcatcacgtagca

SEQ ID NO: 465121 - DNA, 30 bp, Artificial Sequence
  Synthetic oligonucleotide
aaacctaccgtgtctcggcaagcggtagca

SEQ ID NO: 465122 - DNA, 30 bp, Artificial Sequence
  Synthetic oligonucleotide
tacaagccacgctcatggtaacgcttagca

SEQ ID NO: 465123 - DNA, 30 bp, Artificial Sequence
  Synthetic oligonucleotide
tgaccgagcccacaaatcaacacgttagca

SEQ ID NO: 465124 - DNA, 30 bp, Artificial Sequence
  Synthetic oligonucleotide
cccacttatgttccgggtcttacaaacgca

SEQ ID NO: 465125 - DNA, 30 bp, Artificial Sequence
  Synthetic oligonucleotide
gacaacagaaccgcgaggatgcagaacgca

SEQ ID NO: 465126 - DNA, 30 bp, Artificial Sequence
  Synthetic oligonucleotide
agtatatgataaactacccgctggaacgca

SEQ ID NO: 465127 - DNA, 30 bp, Artificial Sequence
  Synthetic oligonucleotide
ggctgtatatctggtttaggcttgaacgca

SEQ ID NO: 465128 - DNA, 30 bp, Artificial Sequence
  Synthetic oligonucleotide
cacaatttagcgctactaactcataacgca

SEQ ID NO: 465129 - DNA, 30 bp, Artificial Sequence
  Synthetic oligonucleotide
gggcgatgcacaagctctgtttataacgca

SEQ ID NO: 465130 - DNA, 30 bp, Artificial Sequence
  Synthetic oligonucleotide
cgaatccgaccctgaacctcaagtaacgca

SEQ ID NO: 465131 - DNA, 30 bp, Artificial Sequence
  Synthetic oligonucleotide
gtctgctctggataattcgtcagtaacgca

SEQ ID NO: 465132 - DNA, 30 bp, Artificial Sequence
  Synthetic oligonucleotide
ttatactcaaaacggccctcgattaacgca

SEQ ID NO: 465133 - DNA, 30 bp, Artificial Sequence
  Synthetic oligonucleotide
cttaggtaggaggctaactatgttaacgca

SEQ ID NO: 465134 - DNA, 30 bp, Artificial Sequence
  Synthetic oligonucleotide
tttacatgctatagtccataggaacacgca

SEQ ID NO: 465135 - DNA, 30 bp, Artificial Sequence
  Synthetic oligonucleotide
gagcacagcacaattttggacacccacgca

SEQ ID NO: 465136 - DNA, 30 bp, Artificial Sequence
  Synthetic oligonucleotide
ggtatatgggggtagagtgaccatcacgca

SEQ ID NO: 465137 - DNA, 30 bp, Artificial Sequence
  Synthetic oligonucleotide
ccactgcgtttacgatcccgttctcacgca

SEQ ID NO: 465138 - DNA, 30 bp, Artificial Sequence
  Synthetic oligonucleotide
ggggccgcatatttgacacgctgtcacgca

SEQ ID NO: 465139 - DNA, 30 bp, Artificial Sequence
  Synthetic oligonucleotide
cgaactatttacgagaatttttgtcacgca

SEQ ID NO: 465140 - DNA, 30 bp, Artificial Sequence
  Synthetic oligonucleotide
tatttacacccgcccgaatgccttcacgca

SEQ ID NO: 465141 - DNA, 30 bp, Artificial Sequence
  Synthetic oligonucleotide
ctctatggtttggagagcttccaagacgca

SEQ ID NO: 465142 - DNA, 30 bp, Artificial Sequence
  Synthetic oligonucleotide
caattgttaatctcttagacgccagacgca

SEQ ID NO: 465143 - DNA, 30 bp, Artificial Sequence
  Synthetic oligonucleotide
ctaggtgaaagcaacggtagcttagacgca

SEQ ID NO: 465144 - DNA, 30 bp, Artificial Sequence
  Synthetic oligonucleotide
ttggtgtgtttaaaccgaactcgcgacgca

SEQ ID NO: 465145 - DNA, 30 bp, Artificial Sequence
  Synthetic oligonucleotide
aagtgggggaatttagtggttcgcgacgca

SEQ ID NO: 465146 - DNA, 30 bp, Artificial Sequence
  Synthetic oligonucleotide
attcactttgtaaccctgcggtaggacgca

SEQ ID NO: 465147 - DNA, 30 bp, Artificial Sequence
  Synthetic oligonucleotide
gctgtgattcttgagggtaactcggacgca

SEQ ID NO: 465148 - DNA, 30 bp, Artificial Sequence
  Synthetic oligonucleotide
ttgtgcagaaagttgtttgtgctggacgca

SEQ ID NO: 465149 - DNA, 30 bp, Artificial Sequence
  Synthetic oligonucleotide
ccgtttatgctagattagaatctggacgca

SEQ ID NO: 465150 - DNA, 30 bp, Artificial Sequence
  Synthetic oligonucleotide
cgaatgcattattccggattaaatgacgca

SEQ ID NO: 465151 - DNA, 30 bp, Artificial Sequence
  Synthetic oligonucleotide
atcctgcttcataggaagcgagatgacgca

SEQ ID NO: 465152 - DNA, 30 bp, Artificial Sequence
  Synthetic oligonucleotide
gtattggagagatataatttcgcatacgca

SEQ ID NO: 465153 - DNA, 30 bp, Artificial Sequence
  Synthetic oligonucleotide
tgatgccgtgacgaacggtaccgatacgca

SEQ ID NO: 465154 - DNA, 30 bp, Artificial Sequence
  Synthetic oligonucleotide
agaaactggatttatttatggaactacgca

SEQ ID NO: 465155 - DNA, 30 bp, Artificial Sequence
  Synthetic oligonucleotide
tcatgcccaaatcttaacgttccctacgca

SEQ ID NO: 465156 - DNA, 30 bp, Artificial Sequence
  Synthetic oligonucleotide
cagctatgcagttggatcgatagctacgca

SEQ ID NO: 465157 - DNA, 30 bp, Artificial Sequence
  Synthetic oligonucleotide
gacctaatcagtccttttgcatgctacgca

SEQ ID NO: 465158 - DNA, 30 bp, Artificial Sequence
  Synthetic oligonucleotide
gatgtaatcacgccgtttctctagtacgca

SEQ ID NO: 465159 - DNA, 27 bp, Artificial Sequence
  Synthetic oligonucleotide
caatagctgctgattgattggtacgca

SEQ ID NO: 465160 - DNA, 30 bp, Artificial Sequence
  Synthetic oligonucleotide
atcgagaacaatcgcacaagggattacgca

SEQ ID NO: 465161 - DNA, 30 bp, Artificial Sequence
  Synthetic oligonucleotide
gactttggtcgactattccactcttacgca

SEQ ID NO: 465162 - DNA, 30 bp, Artificial Sequence
  Synthetic oligonucleotide
gaaagcttacagtgatatactataaccgca

SEQ ID NO: 465163 - DNA, 30 bp, Artificial Sequence
  Synthetic oligonucleotide
ccgtcttacaggttaactagttgcaccgca

SEQ ID NO: 465164 - DNA, 30 bp, Artificial Sequence
  Synthetic oligonucleotide
tgccggtccaagtcgcgagccaagaccgca

SEQ ID NO: 465165 - DNA, 30 bp, Artificial Sequence
  Synthetic oligonucleotide
gtaactcggaaacgagcgtgtcttaccgca

SEQ ID NO: 465166 - DNA, 30 bp, Artificial Sequence
  Synthetic oligonucleotide
tgatctttacacggtaggtaagaccccgca

SEQ ID NO: 465167 - DNA, 30 bp, Artificial Sequence
  Synthetic oligonucleotide
ttttggcgttgcaccaaactcaggcccgca

SEQ ID NO: 465168 - DNA, 30 bp, Artificial Sequence
  Synthetic oligonucleotide
ggcctacttgccggggtggatcatcccgca

SEQ ID NO: 465169 - DNA, 30 bp, Artificial Sequence
  Synthetic oligonucleotide
agcatgctgctctcaacagtcgcagccgca

SEQ ID NO: 465170 - DNA, 30 bp, Artificial Sequence
  Synthetic oligonucleotide
tggttacgcggtctggttgagagtgccgca

SEQ ID NO: 465171 - DNA, 30 bp, Artificial Sequence
  Synthetic oligonucleotide
cttatagctagttatccccgaattgccgca

SEQ ID NO: 465172 - DNA, 30 bp, Artificial Sequence
  Synthetic oligonucleotide
taggtttcagcgctcaaggaggttgccgca

SEQ ID NO: 465173 - DNA, 30 bp, Artificial Sequence
  Synthetic oligonucleotide
cgaagcatgcgaccaagatataaatccgca

SEQ ID NO: 465174 - DNA, 30 bp, Artificial Sequence
  Synthetic oligonucleotide
ggtctctggcgccaattatgggcctccgca

SEQ ID NO: 465175 - DNA, 30 bp, Artificial Sequence
  Synthetic oligonucleotide
ataacccattcgtcggctatgatctccgca

SEQ ID NO: 465176 - DNA, 30 bp, Artificial Sequence
  Synthetic oligonucleotide
tgatgagcaccgtgcttttattcaagcgca

SEQ ID NO: 465177 - DNA, 30 bp, Artificial Sequence
  Synthetic oligonucleotide
agcaacccgaagaatgagaggcgaagcgca

SEQ ID NO: 465178 - DNA, 30 bp, Artificial Sequence
  Synthetic oligonucleotide
tcccattggcagtaatgcggatgaagcgca

SEQ ID NO: 465179 - DNA, 30 bp, Artificial Sequence
  Synthetic oligonucleotide
ttcaatcgttttggtgggccgactagcgca

SEQ ID NO: 465180 - DNA, 30 bp, Artificial Sequence
  Synthetic oligonucleotide
ggtgcgtctgccacattcgacgctagcgca

SEQ ID NO: 465181 - DNA, 30 bp, Artificial Sequence
  Synthetic oligonucleotide
ttggtcacattcgcaaacgcacgtagcgca

SEQ ID NO: 465182 - DNA, 30 bp, Artificial Sequence
  Synthetic oligonucleotide
gcgtgagacgtcccccgagcatgtagcgca

SEQ ID NO: 465183 - DNA, 30 bp, Artificial Sequence
  Synthetic oligonucleotide
gaactcggagggggtgtaagtatccgcgca

SEQ ID NO: 465184 - DNA, 30 bp, Artificial Sequence
  Synthetic oligonucleotide
acgatgcgggtcgtgatcatccgtcgcgca

SEQ ID NO: 465185 - DNA, 29 bp, Artificial Sequence
  Synthetic oligonucleotide
atacgatgtcgtacctcctcagaggcgca

SEQ ID NO: 465186 - DNA, 30 bp, Artificial Sequence
  Synthetic oligonucleotide
atccgttggttgtatctgggtttaggcgca

SEQ ID NO: 465187 - DNA, 30 bp, Artificial Sequence
  Synthetic oligonucleotide
attttgactatgcctgaggagttcggcgca

SEQ ID NO: 465188 - DNA, 30 bp, Artificial Sequence
  Synthetic oligonucleotide
gggactgtgggagccgctgtcaggggcgca

SEQ ID NO: 465189 - DNA, 30 bp, Artificial Sequence
  Synthetic oligonucleotide
agcccttcggttaaaacaccttttggcgca

SEQ ID NO: 465190 - DNA, 30 bp, Artificial Sequence
  Synthetic oligonucleotide
gatgggtggggggagtcaagaatatgcgca

SEQ ID NO: 465191 - DNA, 30 bp, Artificial Sequence
  Synthetic oligonucleotide
cagaggatggttctacaacatatatgcgca

SEQ ID NO: 465192 - DNA, 30 bp, Artificial Sequence
  Synthetic oligonucleotide
cgtctcgaaccttctgggacggagtgcgca

SEQ ID NO: 465193 - DNA, 30 bp, Artificial Sequence
  Synthetic oligonucleotide
atctattatttatcgtcaacctaaatcgca

SEQ ID NO: 465194 - DNA, 30 bp, Artificial Sequence
  Synthetic oligonucleotide
cccgatgaacaagggcgctgcataatcgca

SEQ ID NO: 465195 - DNA, 30 bp, Artificial Sequence
  Synthetic oligonucleotide
ttcggacgtgccagacaagcgttaatcgca

SEQ ID NO: 465196 - DNA, 30 bp, Artificial Sequence
  Synthetic oligonucleotide
ggaacgacgtacccgcacacgcacatcgca

SEQ ID NO: 465197 - DNA, 30 bp, Artificial Sequence
  Synthetic oligonucleotide
aatagctagtaggggccagattccatcgca

SEQ ID NO: 465198 - DNA, 30 bp, Artificial Sequence
  Synthetic oligonucleotide
taatgcgactctatgcctctaaagatcgca

SEQ ID NO: 465199 - DNA, 30 bp, Artificial Sequence
  Synthetic oligonucleotide
ttttggagtaataccatgtcatagatcgca

SEQ ID NO: 465200 - DNA, 30 bp, Artificial Sequence
  Synthetic oligonucleotide
aagctcttttgctctggatgggcgatcgca

SEQ ID NO: 465201 - DNA, 30 bp, Artificial Sequence
  Synthetic oligonucleotide
tagttacgtcgagagacgccgcggatcgca

SEQ ID NO: 465202 - DNA, 30 bp, Artificial Sequence
  Synthetic oligonucleotide
caatttcttaatctacaaagggctatcgca

SEQ ID NO: 465203 - DNA, 30 bp, Artificial Sequence
  Synthetic oligonucleotide
gacatttggcaacttacgtgctctatcgca

SEQ ID NO: 465204 - DNA, 30 bp, Artificial Sequence
  Synthetic oligonucleotide
tgttgcagatagaaaccgtgtcttatcgca

SEQ ID NO: 465205 - DNA, 30 bp, Artificial Sequence
  Synthetic oligonucleotide
cgaaaaagctttcgatgggtttggctcgca

SEQ ID NO: 465206 - DNA, 30 bp, Artificial Sequence
  Synthetic oligonucleotide
gctgtaacgagacccgggtgatgtctcgca

SEQ ID NO: 465207 - DNA, 30 bp, Artificial Sequence
  Synthetic oligonucleotide
actttgtcactctcgccagtgcttctcgca

SEQ ID NO: 465208 - DNA, 30 bp, Artificial Sequence
  Synthetic oligonucleotide
actccatggtttgaccctttcttagtcgca

SEQ ID NO: 465209 - DNA, 30 bp, Artificial Sequence
  Synthetic oligonucleotide
atacgctggcagggatccgggaacgtcgca

SEQ ID NO: 465210 - DNA, 30 bp, Artificial Sequence
  Synthetic oligonucleotide
cgaaccatatagtcgcgaatgcttgtcgca

SEQ ID NO: 465211 - DNA, 30 bp, Artificial Sequence
  Synthetic oligonucleotide
ttctacgggggtattgttaggtgcttcgca

SEQ ID NO: 465212 - DNA, 30 bp, Artificial Sequence
  Synthetic oligonucleotide
ggtattattatcgggcgtgctctgttcgca

SEQ ID NO: 465213 - DNA, 30 bp, Artificial Sequence
  Synthetic oligonucleotide
ttgaagcgatagagggatcttgtgttcgca

SEQ ID NO: 465214 - DNA, 30 bp, Artificial Sequence
  Synthetic oligonucleotide
agaagctttgtcttttttactactttcgca

SEQ ID NO: 465215 - DNA, 30 bp, Artificial Sequence
  Synthetic oligonucleotide
ggggaacctttaccgcatctttgtttcgca

SEQ ID NO: 465216 - DNA, 30 bp, Artificial Sequence
  Synthetic oligonucleotide
tcggggtattttttgtaacggcaaaaggca

SEQ ID NO: 465217 - DNA, 30 bp, Artificial Sequence
  Synthetic oligonucleotide
ttttacacttatagagcttattacaaggca

SEQ ID NO: 465218 - DNA, 30 bp, Artificial Sequence
  Synthetic oligonucleotide
attaagtacacgcacgggcttcccaaggca

SEQ ID NO: 465219 - DNA, 30 bp, Artificial Sequence
  Synthetic oligonucleotide
gcggccggcgcgggttcgttctgcaaggca

SEQ ID NO: 465220 - DNA, 30 bp, Artificial Sequence
  Synthetic oligonucleotide
atgatttaggtcgcagggcttctgaaggca

SEQ ID NO: 465221 - DNA, 30 bp, Artificial Sequence
  Synthetic oligonucleotide
attgccaatccggtttccgtgcgtaaggca

SEQ ID NO: 465222 - DNA, 30 bp, Artificial Sequence
  Synthetic oligonucleotide
cataagtgcaatcgacgtttgcttaaggca

SEQ ID NO: 465223 - DNA, 30 bp, Artificial Sequence
  Synthetic oligonucleotide
aaattcccgtgtctttcgtcggttaaggca

SEQ ID NO: 465224 - DNA, 30 bp, Artificial Sequence
  Synthetic oligonucleotide
acacactacgaggatggcaacccacaggca

SEQ ID NO: 465225 - DNA, 30 bp, Artificial Sequence
  Synthetic oligonucleotide
tccatgccctgacttttaagcaagcaggca

SEQ ID NO: 465226 - DNA, 30 bp, Artificial Sequence
  Synthetic oligonucleotide
gtatctttttcggagtgacccgtgcaggca

SEQ ID NO: 465227 - DNA, 29 bp, Artificial Sequence
  Synthetic oligonucleotide
ggtccagccttccggttcaccccgaggca

SEQ ID NO: 465228 - DNA, 30 bp, Artificial Sequence
  Synthetic oligonucleotide
tagatactgcttttgccatgttccgaggca

SEQ ID NO: 465229 - DNA, 30 bp, Artificial Sequence
  Synthetic oligonucleotide
ggggtgtcatggtgggctcggaaggaggca

SEQ ID NO: 465230 - DNA, 30 bp, Artificial Sequence
  Synthetic oligonucleotide
cttagggttcattgagttgaggaggaggca

SEQ ID NO: 465231 - DNA, 30 bp, Artificial Sequence
  Synthetic oligonucleotide
tagcacttgaaacggaggtacgatgaggca

SEQ ID NO: 465232 - DNA, 30 bp, Artificial Sequence
  Synthetic oligonucleotide
tgtggacccggggcgtgatgttaataggca

SEQ ID NO: 465233 - DNA, 30 bp, Artificial Sequence
  Synthetic oligonucleotide
gcctcactctgagcagcgcggctctaggca

SEQ ID NO: 465234 - DNA, 30 bp, Artificial Sequence
  Synthetic oligonucleotide
taatcaagagttcgcggcataacgtaggca

SEQ ID NO: 465235 - DNA, 30 bp, Artificial Sequence
  Synthetic oligonucleotide
taggcatccctagtctgtttcacgtaggca

SEQ ID NO: 465236 - DNA, 30 bp, Artificial Sequence
  Synthetic oligonucleotide
ctctcatcaacgtactataaatcgtaggca

SEQ ID NO: 465237 - DNA, 30 bp, Artificial Sequence
  Synthetic oligonucleotide
atgggagtggtaataacgggtgtgtaggca

SEQ ID NO: 465238 - DNA, 30 bp, Artificial Sequence
  Synthetic oligonucleotide
gcccggccaaattagcaagctttttaggca

SEQ ID NO: 465239 - DNA, 30 bp, Artificial Sequence
  Synthetic oligonucleotide
atcagtcgaactgagtgagtctgaacggca

SEQ ID NO: 465240 - DNA, 30 bp, Artificial Sequence
  Synthetic oligonucleotide
tagctatgggcgttcaatgctggaccggca

SEQ ID NO: 465241 - DNA, 30 bp, Artificial Sequence
  Synthetic oligonucleotide
tgactaccattcggaccggaagtaccggca

SEQ ID NO: 465242 - DNA, 30 bp, Artificial Sequence
  Synthetic oligonucleotide
ataagggctctaggacgcagtttaccggca

SEQ ID NO: 465243 - DNA, 30 bp, Artificial Sequence
  Synthetic oligonucleotide
gaaccggccttgccttcccagtgcccggca

SEQ ID NO: 465244 - DNA, 30 bp, Artificial Sequence
  Synthetic oligonucleotide
accggggtcttcttcgagtcccggccggca

SEQ ID NO: 465245 - DNA, 30 bp, Artificial Sequence
  Synthetic oligonucleotide
gagttaagattcgcgtgcaatatgccggca

SEQ ID NO: 465246 - DNA, 31 bp, Artificial Sequence
  Synthetic oligonucleotide
gacaaagtccggctgatgcattctgccggca

SEQ ID NO: 465247 - DNA, 30 bp, Artificial Sequence
  Synthetic oligonucleotide
atgctctgtaatcgtccattggtgccggca

SEQ ID NO: 465248 - DNA, 30 bp, Artificial Sequence
  Synthetic oligonucleotide
tttagcgcgagagtccctacgtaagcggca

SEQ ID NO: 465249 - DNA, 30 bp, Artificial Sequence
  Synthetic oligonucleotide
tgcttgcggcgaacgctaagttgcgcggca

SEQ ID NO: 465250 - DNA, 30 bp, Artificial Sequence
  Synthetic oligonucleotide
aaggtaaaccgagacggtgtggcggcggca

SEQ ID NO: 465251 - DNA, 30 bp, Artificial Sequence
  Synthetic oligonucleotide
atttctaaaacatcgcgctggcttgcggca

SEQ ID NO: 465252 - DNA, 30 bp, Artificial Sequence
  Synthetic oligonucleotide
cccattttgttttgctcagatgcatcggca

SEQ ID NO: 465253 - DNA, 30 bp, Artificial Sequence
  Synthetic oligonucleotide
ttaaccggcaccctatcgcgcttatcggca

SEQ ID NO: 465254 - DNA, 31 bp, Artificial Sequence
  Synthetic oligonucleotide
ccttgtgccggcgctgatcgactactcggca

SEQ ID NO: 465255 - DNA, 30 bp, Artificial Sequence
  Synthetic oligonucleotide
cgtattgtatctggtttacgctcgtcggca

SEQ ID NO: 465256 - DNA, 30 bp, Artificial Sequence
  Synthetic oligonucleotide
catatattattgggggacaccgggtcggca

SEQ ID NO: 465257 - DNA, 30 bp, Artificial Sequence
  Synthetic oligonucleotide
aacgctctacgtaatgattattattcggca

SEQ ID NO: 465258 - DNA, 30 bp, Artificial Sequence
  Synthetic oligonucleotide
ttggttagctcggtatccgacggaagggca

SEQ ID NO: 465259 - DNA, 30 bp, Artificial Sequence
  Synthetic oligonucleotide
tgagaccctcctcacggagcattaagggca

SEQ ID NO: 465260 - DNA, 30 bp, Artificial Sequence
  Synthetic oligonucleotide
ggcgcagagccgcgttcgttcttcagggca

SEQ ID NO: 465261 - DNA, 30 bp, Artificial Sequence
  Synthetic oligonucleotide
gagggactagtatcaacaaaggcccgggca

SEQ ID NO: 465262 - DNA, 30 bp, Artificial Sequence
  Synthetic oligonucleotide
atcgatgcactcgtgcccaaatagcgggca

SEQ ID NO: 465263 - DNA, 30 bp, Artificial Sequence
  Synthetic oligonucleotide
tttatggtttagaaacggggacatcgggca

SEQ ID NO: 465264 - DNA, 30 bp, Artificial Sequence
  Synthetic oligonucleotide
gagggacaaaggaacgatggctttcgggca

SEQ ID NO: 465265 - DNA, 30 bp, Artificial Sequence
  Synthetic oligonucleotide
tagcggttccttaaaagtgcttttcgggca

SEQ ID NO: 465266 - DNA, 30 bp, Artificial Sequence
  Synthetic oligonucleotide
cagcgaaacccctggtggactggaggggca

SEQ ID NO: 465267 - DNA, 30 bp, Artificial Sequence
  Synthetic oligonucleotide
agtgggacctcgttttgagttaccggggca

SEQ ID NO: 465268 - DNA, 30 bp, Artificial Sequence
  Synthetic oligonucleotide
caggtgaagggagaccagaccggcggggca

SEQ ID NO: 465269 - DNA, 30 bp, Artificial Sequence
  Synthetic oligonucleotide
tgaggatcacgacgagaattgggcggggca

SEQ ID NO: 465270 - DNA, 30 bp, Artificial Sequence
  Synthetic oligonucleotide
tacgctgcaacccgaacaagtgagggggca

SEQ ID NO: 465271 - DNA, 30 bp, Artificial Sequence
  Synthetic oligonucleotide
cacagcttcccggttaactaccctggggca

SEQ ID NO: 465272 - DNA, 30 bp, Artificial Sequence
  Synthetic oligonucleotide
tgaatttacaccggtccccggccatgggca

SEQ ID NO: 465273 - DNA, 30 bp, Artificial Sequence
  Synthetic oligonucleotide
cgtctatgcctacatgtgtaagcatgggca

SEQ ID NO: 465274 - DNA, 30 bp, Artificial Sequence
  Synthetic oligonucleotide
tagttttcgacgatcacataatcatgggca

SEQ ID NO: 465275 - DNA, 30 bp, Artificial Sequence
  Synthetic oligonucleotide
tcccatccgacggaacgaataatatgggca

SEQ ID NO: 465276 - DNA, 30 bp, Artificial Sequence
  Synthetic oligonucleotide
gtaaaaaagatagtatcgctcctctgggca

SEQ ID NO: 465277 - DNA, 30 bp, Artificial Sequence
  Synthetic oligonucleotide
tccaaacagcgtctgatatcggggtgggca

SEQ ID NO: 465278 - DNA, 30 bp, Artificial Sequence
  Synthetic oligonucleotide
ctctttttaatcgacatgatcaaaatggca

SEQ ID NO: 465279 - DNA, 30 bp, Artificial Sequence
  Synthetic oligonucleotide
gtggcatatttatggccattcgaaatggca

SEQ ID NO: 465280 - DNA, 30 bp, Artificial Sequence
  Synthetic oligonucleotide
atagacttatattatacgtagataatggca

SEQ ID NO: 465281 - DNA, 30 bp, Artificial Sequence
  Synthetic oligonucleotide
cggggcgcggatgtagggccattaatggca

SEQ ID NO: 465282 - DNA, 30 bp, Artificial Sequence
  Synthetic oligonucleotide
aatatccattattctcgtggacgcatggca

SEQ ID NO: 465283 - DNA, 30 bp, Artificial Sequence
  Synthetic oligonucleotide
cgataggatgacgcagtagtgggcatggca

SEQ ID NO: 465284 - DNA, 30 bp, Artificial Sequence
  Synthetic oligonucleotide
tagagacaagccgccattagggtcatggca

SEQ ID NO: 465285 - DNA, 30 bp, Artificial Sequence
  Synthetic oligonucleotide
tcagcttccagacgttaatccacgatggca

SEQ ID NO: 465286 - DNA, 30 bp, Artificial Sequence
  Synthetic oligonucleotide
cacggtgccacgcactagattactatggca

SEQ ID NO: 465287 - DNA, 30 bp, Artificial Sequence
  Synthetic oligonucleotide
caaagtgcccggaagctatggattatggca

SEQ ID NO: 465288 - DNA, 30 bp, Artificial Sequence
  Synthetic oligonucleotide
cccgttttattacgtccgcaagaactggca

SEQ ID NO: 465289 - DNA, 30 bp, Artificial Sequence
  Synthetic oligonucleotide
caatgcagaccgcaacatctgatactggca

SEQ ID NO: 465290 - DNA, 30 bp, Artificial Sequence
  Synthetic oligonucleotide
ttcttatgaatttgctcggccaccctggca

SEQ ID NO: 465291 - DNA, 30 bp, Artificial Sequence
  Synthetic oligonucleotide
ggtagtggagccaggggggtcagcctggca

SEQ ID NO: 465292 - DNA, 30 bp, Artificial Sequence
  Synthetic oligonucleotide
gtaaagactggatgctccccagtcctggca

SEQ ID NO: 465293 - DNA, 30 bp, Artificial Sequence
  Synthetic oligonucleotide
tcgggcaccctattcgtggccaagctggca

SEQ ID NO: 465294 - DNA, 30 bp, Artificial Sequence
  Synthetic oligonucleotide
gcgttctacggtactgtagggccagtggca

SEQ ID NO: 465295 - DNA, 30 bp, Artificial Sequence
  Synthetic oligonucleotide
cagtggggagggcctaactcggcagtggca

SEQ ID NO: 465296 - DNA, 30 bp, Artificial Sequence
  Synthetic oligonucleotide
tagtggatgcgggcctttagcgacgtggca

SEQ ID NO: 465297 - DNA, 30 bp, Artificial Sequence
  Synthetic oligonucleotide
ggttattgatcagtgacacataaggtggca

SEQ ID NO: 465298 - DNA, 29 bp, Artificial Sequence
  Synthetic oligonucleotide
ctttgttcgaattctaccttactgtggca

SEQ ID NO: 465299 - DNA, 30 bp, Artificial Sequence
  Synthetic oligonucleotide
acgctctgaccagttgagcattcattggca

SEQ ID NO: 465300 - DNA, 30 bp, Artificial Sequence
  Synthetic oligonucleotide
aattggcgcgtacaggttctcagattggca

SEQ ID NO: 465301 - DNA, 30 bp, Artificial Sequence
  Synthetic oligonucleotide
ccgctctgaggccgggctacaaacttggca

SEQ ID NO: 465302 - DNA, 30 bp, Artificial Sequence
  Synthetic oligonucleotide
gctcataaatatgtgcctatggtgttggca

SEQ ID NO: 465303 - DNA, 30 bp, Artificial Sequence
  Synthetic oligonucleotide
atatacagagaagcctcaatgtatttggca

SEQ ID NO: 465304 - DNA, 30 bp, Artificial Sequence
  Synthetic oligonucleotide
tccatgttcggtcgggaatattatttggca

SEQ ID NO: 465305 - DNA, 30 bp, Artificial Sequence
  Synthetic oligonucleotide
actgggaacacgtttgtggaagttttggca

SEQ ID NO: 465306 - DNA, 30 bp, Artificial Sequence
  Synthetic oligonucleotide
gcgagagacaggatcacaagataaaatgca

SEQ ID NO: 465307 - DNA, 30 bp, Artificial Sequence
  Synthetic oligonucleotide
atatgttctctcagtctgtgatgaaatgca

SEQ ID NO: 465308 - DNA, 30 bp, Artificial Sequence
  Synthetic oligonucleotide
aaggttcgggtcaaaaggcccgtaaatgca

SEQ ID NO: 465309 - DNA, 30 bp, Artificial Sequence
  Synthetic oligonucleotide
ccctgatgcgtacctgaaggggtaaatgca

SEQ ID NO: 465310 - DNA, 30 bp, Artificial Sequence
  Synthetic oligonucleotide
tagataagttggtcggaaagtggcaatgca

SEQ ID NO: 465311 - DNA, 30 bp, Artificial Sequence
  Synthetic oligonucleotide
catgttgttccacacaatacgtggaatgca

SEQ ID NO: 465312 - DNA, 30 bp, Artificial Sequence
  Synthetic oligonucleotide
agtcttctcgagggtcctcaaatgaatgca

SEQ ID NO: 465313 - DNA, 30 bp, Artificial Sequence
  Synthetic oligonucleotide
ttggtctgtagggttgattggtataatgca

SEQ ID NO: 465314 - DNA, 30 bp, Artificial Sequence
  Synthetic oligonucleotide
ttggagtccgtccgcatgtggggccatgca

SEQ ID NO: 465315 - DNA, 30 bp, Artificial Sequence
  Synthetic oligonucleotide
aatggtggtttgtgcttgcgtctccatgca

SEQ ID NO: 465316 - DNA, 30 bp, Artificial Sequence
  Synthetic oligonucleotide
tggacacaaagtaggatgttgtggcatgca

SEQ ID NO: 465317 - DNA, 30 bp, Artificial Sequence
  Synthetic oligonucleotide
gtccatactcgcatagtctagagtcatgca

SEQ ID NO: 465318 - DNA, 30 bp, Artificial Sequence
  Synthetic oligonucleotide
cataacgaggtatttattatgtttcatgca

SEQ ID NO: 465319 - DNA, 30 bp, Artificial Sequence
  Synthetic oligonucleotide
acccaggtttggtgttacactgcagatgca

SEQ ID NO: 465320 - DNA, 30 bp, Artificial Sequence
  Synthetic oligonucleotide
caaggtttccgtttttaggagctagatgca

SEQ ID NO: 465321 - DNA, 30 bp, Artificial Sequence
  Synthetic oligonucleotide
gctatcattaatgcggctgcagacgatgca

SEQ ID NO: 465322 - DNA, 30 bp, Artificial Sequence
  Synthetic oligonucleotide
tcttccgatgcgaaaaaatatatcgatgca

SEQ ID NO: 465323 - DNA, 30 bp, Artificial Sequence
  Synthetic oligonucleotide
atctgacactaatccgatggtctcgatgca

SEQ ID NO: 465324 - DNA, 30 bp, Artificial Sequence
  Synthetic oligonucleotide
cgtaatatacaatcccggtctccggatgca

SEQ ID NO: 465325 - DNA, 30 bp, Artificial Sequence
  Synthetic oligonucleotide
ttcatcttttacggactcctagcggatgca

SEQ ID NO: 465326 - DNA, 30 bp, Artificial Sequence
  Synthetic oligonucleotide
atttgaatagcactatcttccctggatgca

SEQ ID NO: 465327 - DNA, 30 bp, Artificial Sequence
  Synthetic oligonucleotide
tttcgtttggcctgcggtcgcttggatgca

SEQ ID NO: 465328 - DNA, 30 bp, Artificial Sequence
  Synthetic oligonucleotide
taaacaataaccggtcttcttttggatgca

SEQ ID NO: 465329 - DNA, 30 bp, Artificial Sequence
  Synthetic oligonucleotide
gcatgggtaatcgtgtaactcgatgatgca

SEQ ID NO: 465330 - DNA, 30 bp, Artificial Sequence
  Synthetic oligonucleotide
attagacatgtacgcactccagaatatgca

SEQ ID NO: 465331 - DNA, 30 bp, Artificial Sequence
  Synthetic oligonucleotide
tcttctatggtaaatcgtagcgtatatgca

SEQ ID NO: 465332 - DNA, 30 bp, Artificial Sequence
  Synthetic oligonucleotide
ggctcgcacgtgttgattgttacctatgca

SEQ ID NO: 465333 - DNA, 30 bp, Artificial Sequence
  Synthetic oligonucleotide
tagcgccaagctgcttttagaaggtatgca

SEQ ID NO: 465334 - DNA, 30 bp, Artificial Sequence
  Synthetic oligonucleotide
cgtatcacgggacgacaaaggacaactgca

SEQ ID NO: 465335 - DNA, 30 bp, Artificial Sequence
  Synthetic oligonucleotide
ccacgttccaacaagtgtgatgcaactgca

SEQ ID NO: 465336 - DNA, 30 bp, Artificial Sequence
  Synthetic oligonucleotide
caatccggcaaggagttctatcgaactgca

SEQ ID NO: 465337 - DNA, 30 bp, Artificial Sequence
  Synthetic oligonucleotide
ttgggttactaccaatggcctcggactgca

SEQ ID NO: 465338 - DNA, 30 bp, Artificial Sequence
  Synthetic oligonucleotide
aatgaagtcgttgcgcagtacaatactgca

SEQ ID NO: 465339 - DNA, 30 bp, Artificial Sequence
  Synthetic oligonucleotide
ccttttagctataactttgcggcacctgca

SEQ ID NO: 465340 - DNA, 30 bp, Artificial Sequence
  Synthetic oligonucleotide
atgctcgggtatggccgctcgatacctgca

SEQ ID NO: 465341 - DNA, 30 bp, Artificial Sequence
  Synthetic oligonucleotide
gggcagcgactcctctccaagtcccctgca

SEQ ID NO: 465342 - DNA, 30 bp, Artificial Sequence
  Synthetic oligonucleotide
aaataaggatcatctcgtctagctcctgca

SEQ ID NO: 465343 - DNA, 30 bp, Artificial Sequence
  Synthetic oligonucleotide
ccaccttgattgattgtgaatggtcctgca

SEQ ID NO: 465344 - DNA, 30 bp, Artificial Sequence
  Synthetic oligonucleotide
agctgcaagcgagccaaggtatacgctgca

SEQ ID NO: 465345 - DNA, 30 bp, Artificial Sequence
  Synthetic oligonucleotide
ggttcgcgcgtcactcattagcgtgctgca

SEQ ID NO: 465346 - DNA, 30 bp, Artificial Sequence
  Synthetic oligonucleotide
taggcctctggcgatcgctagcgctctgca

SEQ ID NO: 465347 - DNA, 30 bp, Artificial Sequence
  Synthetic oligonucleotide
atcctcgggccttttaaaatcctctctgca

SEQ ID NO: 465348 - DNA, 30 bp, Artificial Sequence
  Synthetic oligonucleotide
cgaccgtaggatgactcacgcgagtctgca

SEQ ID NO: 465349 - DNA, 30 bp, Artificial Sequence
  Synthetic oligonucleotide
cataagggacctttgactcagcgttctgca

SEQ ID NO: 465350 - DNA, 30 bp, Artificial Sequence
  Synthetic oligonucleotide
ttttcgccttggggacgcgagcgttctgca

SEQ ID NO: 465351 - DNA, 30 bp, Artificial Sequence
  Synthetic oligonucleotide
cttatgtcggccggtattgcaggttctgca

SEQ ID NO: 465352 - DNA, 30 bp, Artificial Sequence
  Synthetic oligonucleotide
tcgagcatgcattcgctatgcggcagtgca

SEQ ID NO: 465353 - DNA, 30 bp, Artificial Sequence
  Synthetic oligonucleotide
ctccgggatgaccggctgttctgcagtgca

SEQ ID NO: 465354 - DNA, 30 bp, Artificial Sequence
  Synthetic oligonucleotide
aggacagcatgcgcggtgttcgggagtgca

SEQ ID NO: 465355 - DNA, 30 bp, Artificial Sequence
  Synthetic oligonucleotide
gttaattacgacgcaacagcggatagtgca

SEQ ID NO: 465356 - DNA, 30 bp, Artificial Sequence
  Synthetic oligonucleotide
gctacggcgcctctctggcgccctagtgca

SEQ ID NO: 465357 - DNA, 30 bp, Artificial Sequence
  Synthetic oligonucleotide
tcagaaaatacgttcaatgtagaacgtgca

SEQ ID NO: 465358 - DNA, 30 bp, Artificial Sequence
  Synthetic oligonucleotide
ttcgcgggatgtaacgcgtgatcacgtgca

SEQ ID NO: 465359 - DNA, 30 bp, Artificial Sequence
  Synthetic oligonucleotide
gcttcttgccggccattatacagccgtgca

SEQ ID NO: 465360 - DNA, 30 bp, Artificial Sequence
  Synthetic oligonucleotide
tccggcggagggtcgtgaatgcgccgtgca

SEQ ID NO: 465361 - DNA, 30 bp, Artificial Sequence
  Synthetic oligonucleotide
gccccgggaacgaatagactggtaggtgca

SEQ ID NO: 465362 - DNA, 30 bp, Artificial Sequence
  Synthetic oligonucleotide
actgggtatacccgcactattaacggtgca

SEQ ID NO: 465363 - DNA, 30 bp, Artificial Sequence
  Synthetic oligonucleotide
gattataggcttggcagtcacaccggtgca

SEQ ID NO: 465364 - DNA, 30 bp, Artificial Sequence
  Synthetic oligonucleotide
ccggtggatatgaaggctccatgtggtgca

SEQ ID NO: 465365 - DNA, 30 bp, Artificial Sequence
  Synthetic oligonucleotide
attataagatagctttcaaactcatgtgca

SEQ ID NO: 465366 - DNA, 30 bp, Artificial Sequence
  Synthetic oligonucleotide
aaaagcggaaacatgagtcttttatgtgca

SEQ ID NO: 465367 - DNA, 30 bp, Artificial Sequence
  Synthetic oligonucleotide
cttttgaggatgatctcggtcgcctgtgca

SEQ ID NO: 465368 - DNA, 30 bp, Artificial Sequence
  Synthetic oligonucleotide
tcacctggagccacagacaaagcgtgtgca

SEQ ID NO: 465369 - DNA, 29 bp, Artificial Sequence
  Synthetic oligonucleotide
ccccttatatgggcacgatagggtgtgca

SEQ ID NO: 465370 - DNA, 30 bp, Artificial Sequence
  Synthetic oligonucleotide
aatcggtgctttcagtcacgctgttgtgca

SEQ ID NO: 465371 - DNA, 30 bp, Artificial Sequence
  Synthetic oligonucleotide
ttagtacaaatacgggtatgataaattgca

SEQ ID NO: 465372 - DNA, 30 bp, Artificial Sequence
  Synthetic oligonucleotide
ggtgctcaatagttaagcaactacattgca

SEQ ID NO: 465373 - DNA, 30 bp, Artificial Sequence
  Synthetic oligonucleotide
gctatgaatagtgttggaaccgccattgca

SEQ ID NO: 465374 - DNA, 30 bp, Artificial Sequence
  Synthetic oligonucleotide
gcgcgatgaatgctgagctccggcattgca

SEQ ID NO: 465375 - DNA, 30 bp, Artificial Sequence
  Synthetic oligonucleotide
ggactctgtctcatggtctaatagattgca

SEQ ID NO: 465376 - DNA, 30 bp, Artificial Sequence
  Synthetic oligonucleotide
gttgtattgatcataaacctttagattgca

SEQ ID NO: 465377 - DNA, 30 bp, Artificial Sequence
  Synthetic oligonucleotide
tagtcatgacactccttgataaggattgca

SEQ ID NO: 465378 - DNA, 30 bp, Artificial Sequence
  Synthetic oligonucleotide
cgctacagtctgcatgaacgcaatattgca

SEQ ID NO: 465379 - DNA, 30 bp, Artificial Sequence
  Synthetic oligonucleotide
acatgcaaacgcatcagccaacatattgca

SEQ ID NO: 465380 - DNA, 30 bp, Artificial Sequence
  Synthetic oligonucleotide
gcatgttgtgcaatttagataatacttgca

SEQ ID NO: 465381 - DNA, 30 bp, Artificial Sequence
  Synthetic oligonucleotide
tggcgcaggtgcaggagtaaacaccttgca

SEQ ID NO: 465382 - DNA, 30 bp, Artificial Sequence
  Synthetic oligonucleotide
cagctagattctggcagaactacgcttgca

SEQ ID NO: 465383 - DNA, 30 bp, Artificial Sequence
  Synthetic oligonucleotide
agcaagacgaacaggacaaggagtcttgca

SEQ ID NO: 465384 - DNA, 30 bp, Artificial Sequence
  Synthetic oligonucleotide
tagtattgatattcctgcggtcgtcttgca

SEQ ID NO: 465385 - DNA, 30 bp, Artificial Sequence
  Synthetic oligonucleotide
aaccataagaatgcaatggttattcttgca

SEQ ID NO: 465386 - DNA, 30 bp, Artificial Sequence
  Synthetic oligonucleotide
catattgcagaccaacggcgacgagttgca

SEQ ID NO: 465387 - DNA, 30 bp, Artificial Sequence
  Synthetic oligonucleotide
tattgtcttatatgtagctcgcacgttgca

SEQ ID NO: 465388 - DNA, 30 bp, Artificial Sequence
  Synthetic oligonucleotide
atctttcgatgtatcttagcatacgttgca

SEQ ID NO: 465389 - DNA, 30 bp, Artificial Sequence
  Synthetic oligonucleotide
aaatcgtgaagaagagtgggtgaggttgca

SEQ ID NO: 465390 - DNA, 30 bp, Artificial Sequence
  Synthetic oligonucleotide
gcaataacacttttatctcgataggttgca

SEQ ID NO: 465391 - DNA, 30 bp, Artificial Sequence
  Synthetic oligonucleotide
caccctctctcgtttagttcgtcggttgca

SEQ ID NO: 465392 - DNA, 30 bp, Artificial Sequence
  Synthetic oligonucleotide
gcagtttatactactggtccgcgtgttgca

SEQ ID NO: 465393 - DNA, 30 bp, Artificial Sequence
  Synthetic oligonucleotide
tagagggctactcctgaacagaaatttgca

SEQ ID NO: 465394 - DNA, 30 bp, Artificial Sequence
  Synthetic oligonucleotide
tttagagggctgcaaatatacacctttgca

SEQ ID NO: 465395 - DNA, 30 bp, Artificial Sequence
  Synthetic oligonucleotide
gtcacatgcaattagtcataaagctttgca

SEQ ID NO: 465396 - DNA, 30 bp, Artificial Sequence
  Synthetic oligonucleotide
gagtcgtgcgcggctagggttcagtttgca

SEQ ID NO: 465397 - DNA, 30 bp, Artificial Sequence
  Synthetic oligonucleotide
ctcaaaactgaatttttataggggtttgca

SEQ ID NO: 465398 - DNA, 30 bp, Artificial Sequence
  Synthetic oligonucleotide
ggccagtcataacccgatacgtggtttgca

SEQ ID NO: 465399 - DNA, 30 bp, Artificial Sequence
  Synthetic oligonucleotide
cagtagagcaaacctatcgacttgtttgca

SEQ ID NO: 465400 - DNA, 30 bp, Artificial Sequence
  Synthetic oligonucleotide
aaatgagctctaaaagactgcccttttgca

SEQ ID NO: 465401 - DNA, 30 bp, Artificial Sequence
  Synthetic oligonucleotide
ctcttcatatatcgaaaagcactttttgca

SEQ ID NO: 465402 - DNA, 30 bp, Artificial Sequence
  Synthetic oligonucleotide
ctagacctagagagctctcgggtttttgca

SEQ ID NO: 465403 - DNA, 30 bp, Artificial Sequence
  Synthetic oligonucleotide
gattcactttatgccagtgaggccaaatca

SEQ ID NO: 465404 - DNA, 30 bp, Artificial Sequence
  Synthetic oligonucleotide
aaccagcgaggttcggtatatttcaaatca

SEQ ID NO: 465405 - DNA, 30 bp, Artificial Sequence
  Synthetic oligonucleotide
tacggtttccccagaatagagttgaaatca

SEQ ID NO: 465406 - DNA, 30 bp, Artificial Sequence
  Synthetic oligonucleotide
tgaacgatccgttaatgcggtcataaatca

SEQ ID NO: 465407 - DNA, 30 bp, Artificial Sequence
  Synthetic oligonucleotide
gcagaacataccggatgcgtggataaatca

SEQ ID NO: 465408 - DNA, 30 bp, Artificial Sequence
  Synthetic oligonucleotide
taatctccgctgtccgtaaaatttaaatca

SEQ ID NO: 465409 - DNA, 30 bp, Artificial Sequence
  Synthetic oligonucleotide
tatatcagagattgtaagttataacaatca

SEQ ID NO: 465410 - DNA, 30 bp, Artificial Sequence
  Synthetic oligonucleotide
tttaaggacacctcgtcaggccgccaatca

SEQ ID NO: 465411 - DNA, 30 bp, Artificial Sequence
  Synthetic oligonucleotide
tactaacggtacttgagcactgagcaatca

SEQ ID NO: 465412 - DNA, 30 bp, Artificial Sequence
  Synthetic oligonucleotide
aacggcgccgcatgtcaaacggggcaatca

SEQ ID NO: 465413 - DNA, 30 bp, Artificial Sequence
  Synthetic oligonucleotide
tcagcatgggggtcactatccgctcaatca

SEQ ID NO: 465414 - DNA, 30 bp, Artificial Sequence
  Synthetic oligonucleotide
gaagttagaggagtgcaatacgttcaatca

SEQ ID NO: 465415 - DNA, 30 bp, Artificial Sequence
  Synthetic oligonucleotide
tcaatatgcaacatgtcgaggcgagaatca

SEQ ID NO: 465416 - DNA, 30 bp, Artificial Sequence
  Synthetic oligonucleotide
gtaacgcaagccccagagtgtcgagaatca

SEQ ID NO: 465417 - DNA, 30 bp, Artificial Sequence
  Synthetic oligonucleotide
ggactcgcaattgttactatgaacgaatca

SEQ ID NO: 465418 - DNA, 30 bp, Artificial Sequence
  Synthetic oligonucleotide
tgtaattttctgtgtaacattaccgaatca

SEQ ID NO: 465419 - DNA, 30 bp, Artificial Sequence
  Synthetic oligonucleotide
ctcacaattaacgaacgccagctcgaatca

SEQ ID NO: 465420 - DNA, 29 bp, Artificial Sequence
  Synthetic oligonucleotide
gagttataagcggaaccgcatcggaatca

SEQ ID NO: 465421 - DNA, 30 bp, Artificial Sequence
  Synthetic oligonucleotide
gatcagcaagggcggtcgtagagggaatca

SEQ ID NO: 465422 - DNA, 30 bp, Artificial Sequence
  Synthetic oligonucleotide
catgagcattttggtcgttgatatgaatca

SEQ ID NO: 465423 - DNA, 30 bp, Artificial Sequence
  Synthetic oligonucleotide
aacgattatattgctacaaggaaataatca

SEQ ID NO: 465424 - DNA, 30 bp, Artificial Sequence
  Synthetic oligonucleotide
gataaaatggacataacaggaccataatca

SEQ ID NO: 465425 - DNA, 30 bp, Artificial Sequence
  Synthetic oligonucleotide
ccaagggcgaaaggggtcgcgtcataatca

SEQ ID NO: 465426 - DNA, 30 bp, Artificial Sequence
  Synthetic oligonucleotide
agtttcggggagtaactatgtctgtaatca

SEQ ID NO: 465427 - DNA, 30 bp, Artificial Sequence
  Synthetic oligonucleotide
aaaaacagagttccccactcattgtaatca

SEQ ID NO: 465428 - DNA, 30 bp, Artificial Sequence
  Synthetic oligonucleotide
tgactatttttaacgtggcggttgtaatca

SEQ ID NO: 465429 - DNA, 30 bp, Artificial Sequence
  Synthetic oligonucleotide
gttgattataagggataccgttcaacatca

SEQ ID NO: 465430 - DNA, 30 bp, Artificial Sequence
  Synthetic oligonucleotide
gaaggttaaaatggggtatgacgaacatca

SEQ ID NO: 465431 - DNA, 30 bp, Artificial Sequence
  Synthetic oligonucleotide
gtcgttggctttatcattgtattaacatca

SEQ ID NO: 465432 - DNA, 30 bp, Artificial Sequence
  Synthetic oligonucleotide
ataggaggccacggtccctggttaacatca

SEQ ID NO: 465433 - DNA, 30 bp, Artificial Sequence
  Synthetic oligonucleotide
gtcctacaaccgcatatgacggccacatca

SEQ ID NO: 465434 - DNA, 30 bp, Artificial Sequence
  Synthetic oligonucleotide
aatatgtaagacacttcggacagtacatca

SEQ ID NO: 465435 - DNA, 30 bp, Artificial Sequence
  Synthetic oligonucleotide
aagttactcaccagatggatatacccatca

SEQ ID NO: 465436 - DNA, 30 bp, Artificial Sequence
  Synthetic oligonucleotide
ctgtttatagtgctgatggtccatccatca

SEQ ID NO: 465437 - DNA, 30 bp, Artificial Sequence
  Synthetic oligonucleotide
ggtgtgcatacaacgtgaatcagagcatca

SEQ ID NO: 465438 - DNA, 30 bp, Artificial Sequence
  Synthetic oligonucleotide
ggcagccgtgctggtcgcatgaacgcatca

SEQ ID NO: 465439 - DNA, 30 bp, Artificial Sequence
  Synthetic oligonucleotide
ttcgcggtttccggccaattatacgcatca

SEQ ID NO: 465440 - DNA, 30 bp, Artificial Sequence
  Synthetic oligonucleotide
aagccagacgcctagatgctattggcatca

SEQ ID NO: 465441 - DNA, 30 bp, Artificial Sequence
  Synthetic oligonucleotide
ccattttataggtctcaggttattgcatca

SEQ ID NO: 465442 - DNA, 30 bp, Artificial Sequence
  Synthetic oligonucleotide
ctgcatatatccgtttgtgtacaatcatca

SEQ ID NO: 465443 - DNA, 30 bp, Artificial Sequence
  Synthetic oligonucleotide
tagagaggatgcagatcgatatcatcatca

SEQ ID NO: 465444 - DNA, 30 bp, Artificial Sequence
  Synthetic oligonucleotide
acctggctggagtagtccgagtggtcatca

SEQ ID NO: 465445 - DNA, 30 bp, Artificial Sequence
  Synthetic oligonucleotide
tgtatgtaagggtgacgtttaagttcatca

SEQ ID NO: 465446 - DNA, 30 bp, Artificial Sequence
  Synthetic oligonucleotide
tacctccactcgcttgttaataaaagatca

SEQ ID NO: 465447 - DNA, 30 bp, Artificial Sequence
  Synthetic oligonucleotide
ttcgctggcggcgatgttcgggaaagatca

SEQ ID NO: 465448 - DNA, 30 bp, Artificial Sequence
  Synthetic oligonucleotide
gtgattttgactttcctacgcacaagatca

SEQ ID NO: 465449 - DNA, 30 bp, Artificial Sequence
  Synthetic oligonucleotide
ctaacccgcgggaaaagagccgtaagatca

SEQ ID NO: 465450 - DNA, 30 bp, Artificial Sequence
  Synthetic oligonucleotide
cacacgcccagcacagacatcgtaagatca

SEQ ID NO: 465451 - DNA, 30 bp, Artificial Sequence
  Synthetic oligonucleotide
atgccagtattgatctaagaggtcagatca

SEQ ID NO: 465452 - DNA, 30 bp, Artificial Sequence
  Synthetic oligonucleotide
gttggttgcagtaaggtgatatagagatca

SEQ ID NO: 465453 - DNA, 30 bp, Artificial Sequence
  Synthetic oligonucleotide
tatatgcatgaaacccttatatagagatca

SEQ ID NO: 465454 - DNA, 30 bp, Artificial Sequence
  Synthetic oligonucleotide
tcgtttagacttggttcgtgcacgagatca

SEQ ID NO: 465455 - DNA, 30 bp, Artificial Sequence
  Synthetic oligonucleotide
agggcccacgacaattctaaagatagatca

SEQ ID NO: 465456 - DNA, 30 bp, Artificial Sequence
  Synthetic oligonucleotide
tatttccgggcgaacaagtttactagatca

SEQ ID NO: 465457 - DNA, 30 bp, Artificial Sequence
  Synthetic oligonucleotide
caaccggaagggtattacgcatctagatca

SEQ ID NO: 465458 - DNA, 30 bp, Artificial Sequence
  Synthetic oligonucleotide
taaaatttccctcttttgcccacacgatca

SEQ ID NO: 465459 - DNA, 30 bp, Artificial Sequence
  Synthetic oligonucleotide
cgatacgatggtgggaaatttccccgatca

SEQ ID NO: 465460 - DNA, 30 bp, Artificial Sequence
  Synthetic oligonucleotide
ggcgggtattataacttatattcccgatca

SEQ ID NO: 465461 - DNA, 30 bp, Artificial Sequence
  Synthetic oligonucleotide
tggttgccgtgcttatgcgtattgcgatca

SEQ ID NO: 465462 - DNA, 30 bp, Artificial Sequence
  Synthetic oligonucleotide
actcggacgtacccgccttggttgcgatca

SEQ ID NO: 465463 - DNA, 30 bp, Artificial Sequence
  Synthetic oligonucleotide
actgtcggctttagcccttgacgtcgatca

SEQ ID NO: 465464 - DNA, 30 bp, Artificial Sequence
  Synthetic oligonucleotide
gattttgtgaaatacctgaggtcaggatca

SEQ ID NO: 465465 - DNA, 30 bp, Artificial Sequence
  Synthetic oligonucleotide
gaataggggtataagtgataactaggatca

SEQ ID NO: 465466 - DNA, 30 bp, Artificial Sequence
  Synthetic oligonucleotide
gtttacctggtggggagccctaccggatca

SEQ ID NO: 465467 - DNA, 30 bp, Artificial Sequence
  Synthetic oligonucleotide
aatcatatggtcccctcgggtcccggatca

SEQ ID NO: 465468 - DNA, 30 bp, Artificial Sequence
  Synthetic oligonucleotide
gtctatacgggttcaaaactagccggatca

SEQ ID NO: 465469 - DNA, 30 bp, Artificial Sequence
  Synthetic oligonucleotide
ctgcagggtataaattattttctgggatca

SEQ ID NO: 465470 - DNA, 30 bp, Artificial Sequence
  Synthetic oligonucleotide
gatctaccgattgccttgctagtgggatca

SEQ ID NO: 465471 - DNA, 30 bp, Artificial Sequence
  Synthetic oligonucleotide
tgcctcttgggggatgtagctgcatgatca

SEQ ID NO: 465472 - DNA, 30 bp, Artificial Sequence
  Synthetic oligonucleotide
ccatttcggccaacgggcagcaagtgatca

SEQ ID NO: 465473 - DNA, 30 bp, Artificial Sequence
  Synthetic oligonucleotide
ggacacagtaatgaacatggcacttgatca

SEQ ID NO: 465474 - DNA, 30 bp, Artificial Sequence
  Synthetic oligonucleotide
cctaattccttggattagagtacttgatca

SEQ ID NO: 465475 - DNA, 30 bp, Artificial Sequence
  Synthetic oligonucleotide
gtgtcggggttaacaagacgttcttgatca

SEQ ID NO: 465476 - DNA, 30 bp, Artificial Sequence
  Synthetic oligonucleotide
actcgttgttacatcagggtttcttgatca

SEQ ID NO: 465477 - DNA, 30 bp, Artificial Sequence
  Synthetic oligonucleotide
ttaatgaccctcgcgggtacataaatatca

SEQ ID NO: 465478 - DNA, 30 bp, Artificial Sequence
  Synthetic oligonucleotide
gaggttgaaaggcgcctatatggaatatca

SEQ ID NO: 465479 - DNA, 30 bp, Artificial Sequence
  Synthetic oligonucleotide
gaatgacccttacaaaagggcctaatatca

SEQ ID NO: 465480 - DNA, 30 bp, Artificial Sequence
  Synthetic oligonucleotide
tgggcgaatgtgcttagatgtttaatatca

SEQ ID NO: 465481 - DNA, 30 bp, Artificial Sequence
  Synthetic oligonucleotide
gtttacacttgggcacctcgctacatatca

SEQ ID NO: 465482 - DNA, 30 bp, Artificial Sequence
  Synthetic oligonucleotide
cataccttctttaaggaatgcctcatatca

SEQ ID NO: 465483 - DNA, 30 bp, Artificial Sequence
  Synthetic oligonucleotide
ttacgtaccagcccagttacgtagatatca

SEQ ID NO: 465484 - DNA, 30 bp, Artificial Sequence
  Synthetic oligonucleotide
aacgtgagagaatgatcttctctgatatca

SEQ ID NO: 465485 - DNA, 30 bp, Artificial Sequence
  Synthetic oligonucleotide
ttttcaaggtccgaggcggtccatatatca

SEQ ID NO: 465486 - DNA, 30 bp, Artificial Sequence
  Synthetic oligonucleotide
acatatcagaccgttggagcagtactatca

SEQ ID NO: 465487 - DNA, 30 bp, Artificial Sequence
  Synthetic oligonucleotide
aacaattggtaggtcctgatcgggctatca

SEQ ID NO: 465488 - DNA, 30 bp, Artificial Sequence
  Synthetic oligonucleotide
taatcaaagctttgactcccctggctatca

SEQ ID NO: 465489 - DNA, 30 bp, Artificial Sequence
  Synthetic oligonucleotide
actttattgactgatactgtcatgctatca

SEQ ID NO: 465490 - DNA, 30 bp, Artificial Sequence
  Synthetic oligonucleotide
gacttgtcaattgccggcctccatctatca

SEQ ID NO: 465491 - DNA, 30 bp, Artificial Sequence
  Synthetic oligonucleotide
gttttgttcctgggcggggcacctctatca

SEQ ID NO: 465492 - DNA, 30 bp, Artificial Sequence
  Synthetic oligonucleotide
atataggttatacagtatacggctctatca

SEQ ID NO: 465493 - DNA, 30 bp, Artificial Sequence
  Synthetic oligonucleotide
aaaatcgaagcggttttgataccagtatca

SEQ ID NO: 465494 - DNA, 30 bp, Artificial Sequence
  Synthetic oligonucleotide
tgtcgcatttctattgagttttgagtatca

SEQ ID NO: 465495 - DNA, 30 bp, Artificial Sequence
  Synthetic oligonucleotide
cgttcggacggcattcactgcgtagtatca

SEQ ID NO: 465496 - DNA, 30 bp, Artificial Sequence
  Synthetic oligonucleotide
tatgcgtgttgggccacgaggcccgtatca

SEQ ID NO: 465497 - DNA, 31 bp, Artificial Sequence
  Synthetic oligonucleotide
catacggtgtgaacgattccagcaggtatca

SEQ ID NO: 465498 - DNA, 30 bp, Artificial Sequence
  Synthetic oligonucleotide
atatctaatgtgtcatacctagaggtatca

SEQ ID NO: 465499 - DNA, 30 bp, Artificial Sequence
  Synthetic oligonucleotide
ggcaggcctacagcagatactatggtatca

SEQ ID NO: 465500 - DNA, 30 bp, Artificial Sequence
  Synthetic oligonucleotide
aaatcagatgaactgcggagatgtgtatca

SEQ ID NO: 465501 - DNA, 30 bp, Artificial Sequence
  Synthetic oligonucleotide
acgcgcattcactcgaatggcgttgtatca

SEQ ID NO: 465502 - DNA, 30 bp, Artificial Sequence
  Synthetic oligonucleotide
aatgggatggtgtcactccttcccttatca

SEQ ID NO: 465503 - DNA, 30 bp, Artificial Sequence
  Synthetic oligonucleotide
gggggaccgcgttgcttgtcattgttatca

SEQ ID NO: 465504 - DNA, 30 bp, Artificial Sequence
  Synthetic oligonucleotide
aattacggagatagggtggttcgtttatca

SEQ ID NO: 465505 - DNA, 30 bp, Artificial Sequence
  Synthetic oligonucleotide
aaatcaatgtaatatgattaaattttatca

SEQ ID NO: 465506 - DNA, 30 bp, Artificial Sequence
  Synthetic oligonucleotide
atattgcgagaggatcggcaatttttatca

SEQ ID NO: 465507 - DNA, 30 bp, Artificial Sequence
  Synthetic oligonucleotide
gataaggacaatgcaaagatatttttatca

SEQ ID NO: 465508 - DNA, 30 bp, Artificial Sequence
  Synthetic oligonucleotide
atcgctcacttatggcccaacccaaactca

SEQ ID NO: 465509 - DNA, 30 bp, Artificial Sequence
  Synthetic oligonucleotide
taactattagttcagggttatccaaactca

SEQ ID NO: 465510 - DNA, 30 bp, Artificial Sequence
  Synthetic oligonucleotide
ctatagttggcggttttataccgcaactca

SEQ ID NO: 465511 - DNA, 30 bp, Artificial Sequence
  Synthetic oligonucleotide
tacccgagatcctgtcgtcgaaggaactca

SEQ ID NO: 465512 - DNA, 30 bp, Artificial Sequence
  Synthetic oligonucleotide
aaggtcgacgtgagaatgagagcacactca

SEQ ID NO: 465513 - DNA, 30 bp, Artificial Sequence
  Synthetic oligonucleotide
gaatttgcaacgcatgtgccagtacactca

SEQ ID NO: 465514 - DNA, 30 bp, Artificial Sequence
  Synthetic oligonucleotide
ttgcagaccttgcctatttcttgccactca

SEQ ID NO: 465515 - DNA, 30 bp, Artificial Sequence
  Synthetic oligonucleotide
gtatagtataatgggtacgaccagcactca

SEQ ID NO: 465516 - DNA, 29 bp, Artificial Sequence
  Synthetic oligonucleotide
atacatgttgcacctcccggacgcactca

SEQ ID NO: 465517 - DNA, 30 bp, Artificial Sequence
  Synthetic oligonucleotide
gtaggctgtctaggcctgaggatgcactca

SEQ ID NO: 465518 - DNA, 30 bp, Artificial Sequence
  Synthetic oligonucleotide
aagtcctatatgcttggcatccgagactca

SEQ ID NO: 465519 - DNA, 30 bp, Artificial Sequence
  Synthetic oligonucleotide
atcgctctggaacttgttccaatagactca

SEQ ID NO: 465520 - DNA, 30 bp, Artificial Sequence
  Synthetic oligonucleotide
taatattaacgccggtgctgcttggactca

SEQ ID NO: 465521 - DNA, 30 bp, Artificial Sequence
  Synthetic oligonucleotide
ggcatgttacaaccgacttctcatgactca

SEQ ID NO: 465522 - DNA, 30 bp, Artificial Sequence
  Synthetic oligonucleotide
gtaatctccagcagcgaccctggtgactca

SEQ ID NO: 465523 - DNA, 30 bp, Artificial Sequence
  Synthetic oligonucleotide
ggttcgcaatcagcatggctacgatactca

SEQ ID NO: 465524 - DNA, 30 bp, Artificial Sequence
  Synthetic oligonucleotide
gcattccgcacgaagcaggagccctactca

SEQ ID NO: 465525 - DNA, 30 bp, Artificial Sequence
  Synthetic oligonucleotide
ctggtgtattggtacatgggtgagtactca

SEQ ID NO: 465526 - DNA, 30 bp, Artificial Sequence
  Synthetic oligonucleotide
caaaaagggagatgttaaagcgccacctca

SEQ ID NO: 465527 - DNA, 30 bp, Artificial Sequence
  Synthetic oligonucleotide
aacattaaaagtagtggggctaggacctca

SEQ ID NO: 465528 - DNA, 30 bp, Artificial Sequence
  Synthetic oligonucleotide
gaaccccgcggtcacggttgacggacctca

SEQ ID NO: 465529 - DNA, 30 bp, Artificial Sequence
  Synthetic oligonucleotide
ttccgctgtaatttataagaagctacctca

SEQ ID NO: 465530 - DNA, 30 bp, Artificial Sequence
  Synthetic oligonucleotide
actcatgtagtctacagccgcaaaccctca

SEQ ID NO: 465531 - DNA, 30 bp, Artificial Sequence
  Synthetic oligonucleotide
ccaaaagtgcagaaccttacggaaccctca

SEQ ID NO: 465532 - DNA, 30 bp, Artificial Sequence
  Synthetic oligonucleotide
ttttggatgagagcggatgtcggaccctca

SEQ ID NO: 465533 - DNA, 30 bp, Artificial Sequence
  Synthetic oligonucleotide
tgagtccgtcgctaatctagcctaccctca

SEQ ID NO: 465534 - DNA, 30 bp, Artificial Sequence
  Synthetic oligonucleotide
gtggtttcggatgacaggctgcctccctca

SEQ ID NO: 465535 - DNA, 30 bp, Artificial Sequence
  Synthetic oligonucleotide
agcgcgctctatgactaattagttccctca

SEQ ID NO: 465536 - DNA, 30 bp, Artificial Sequence
  Synthetic oligonucleotide
atagtctgcagtaacggccttagagcctca

SEQ ID NO: 465537 - DNA, 30 bp, Artificial Sequence
  Synthetic oligonucleotide
tttctttagcgaggatattggggcgcctca

SEQ ID NO: 465538 - DNA, 30 bp, Artificial Sequence
  Synthetic oligonucleotide
cgacctaggagcaaattaattaaggcctca

SEQ ID NO: 465539 - DNA, 30 bp, Artificial Sequence
  Synthetic oligonucleotide
tgttcagcacgctgtacgccatctgcctca

SEQ ID NO: 465540 - DNA, 30 bp, Artificial Sequence
  Synthetic oligonucleotide
tttgtcggccatgggcagtcatgtgcctca

SEQ ID NO: 465541 - DNA, 30 bp, Artificial Sequence
  Synthetic oligonucleotide
agacgattcaaaataaggcccctatcctca

SEQ ID NO: 465542 - DNA, 30 bp, Artificial Sequence
  Synthetic oligonucleotide
aaatagattatgttcgttggcccgtcctca

SEQ ID NO: 465543 - DNA, 30 bp, Artificial Sequence
  Synthetic oligonucleotide
attcgaccaacatcaggagtagtttcctca

SEQ ID NO: 465544 - DNA, 30 bp, Artificial Sequence
  Synthetic oligonucleotide
atctttgtagggtaggtttgaagaagctca

SEQ ID NO: 465545 - DNA, 30 bp, Artificial Sequence
  Synthetic oligonucleotide
ccatctaaggactggctctcgcgaagctca

SEQ ID NO: 465546 - DNA, 30 bp, Artificial Sequence
  Synthetic oligonucleotide
ggctcaagctgccgcggtagccacagctca

SEQ ID NO: 465547 - DNA, 30 bp, Artificial Sequence
  Synthetic oligonucleotide
ccatggctctgatagggttgaggcagctca

SEQ ID NO: 465548 - DNA, 30 bp, Artificial Sequence
  Synthetic oligonucleotide
ggcacagcatgtaggagatgagtgagctca

SEQ ID NO: 465549 - DNA, 30 bp, Artificial Sequence
  Synthetic oligonucleotide
aaaggctatggctgttatatccgacgctca

SEQ ID NO: 465550 - DNA, 30 bp, Artificial Sequence
  Synthetic oligonucleotide
gcgttgcgcggcgattagttgtgacgctca

SEQ ID NO: 465551 - DNA, 30 bp, Artificial Sequence
  Synthetic oligonucleotide
taatgcattgctcatgggataccccgctca

SEQ ID NO: 465552 - DNA, 30 bp, Artificial Sequence
  Synthetic oligonucleotide
ggttcatcgtcgacgggcgtcgcccgctca

SEQ ID NO: 465553 - DNA, 30 bp, Artificial Sequence
  Synthetic oligonucleotide
cttaattaacggtgcgaggtatttcgctca

SEQ ID NO: 465554 - DNA, 30 bp, Artificial Sequence
  Synthetic oligonucleotide
ttctaggtcccgccttgaggaccaggctca

SEQ ID NO: 465555 - DNA, 30 bp, Artificial Sequence
  Synthetic oligonucleotide
gtgggtaatcagatctacagggattgctca

SEQ ID NO: 465556 - DNA, 30 bp, Artificial Sequence
  Synthetic oligonucleotide
tgtttaatcaacgcctcagttgattgctca

SEQ ID NO: 465557 - DNA, 30 bp, Artificial Sequence
  Synthetic oligonucleotide
acatttctatgcaatatgtacgtaatctca

SEQ ID NO: 465558 - DNA, 30 bp, Artificial Sequence
  Synthetic oligonucleotide
atactgtcgagccaacatgtccgcatctca

SEQ ID NO: 465559 - DNA, 30 bp, Artificial Sequence
  Synthetic oligonucleotide
actagcggggcacgcacatagggtatctca

SEQ ID NO: 465560 - DNA, 30 bp, Artificial Sequence
  Synthetic oligonucleotide
aataccggtagctcgtatagcgttatctca

SEQ ID NO: 465561 - DNA, 30 bp, Artificial Sequence
  Synthetic oligonucleotide
agacgaccaaattaccgttccaccctctca

SEQ ID NO: 465562 - DNA, 30 bp, Artificial Sequence
  Synthetic oligonucleotide
ccgctcgatcgaagattccaaggcctctca

SEQ ID NO: 465563 - DNA, 30 bp, Artificial Sequence
  Synthetic oligonucleotide
accgtgcggacgtaatggcggttcctctca

SEQ ID NO: 465564 - DNA, 30 bp, Artificial Sequence
  Synthetic oligonucleotide
cttcccgttaggggggggtggacgctctca

SEQ ID NO: 465565 - DNA, 30 bp, Artificial Sequence
  Synthetic oligonucleotide
gcttcatctcagtatgagagtatgctctca

SEQ ID NO: 465566 - DNA, 30 bp, Artificial Sequence
  Synthetic oligonucleotide
caggcatgatgagtagtactacatctctca

SEQ ID NO: 465567 - DNA, 30 bp, Artificial Sequence
  Synthetic oligonucleotide
ggtacaaattgagttgccctaagcgtctca

SEQ ID NO: 465568 - DNA, 30 bp, Artificial Sequence
  Synthetic oligonucleotide
actgcaagcctataagtgcccagggtctca

SEQ ID NO: 465569 - DNA, 30 bp, Artificial Sequence
  Synthetic oligonucleotide
aaactggtccattgaatcctccgggtctca

SEQ ID NO: 465570 - DNA, 30 bp, Artificial Sequence
  Synthetic oligonucleotide
tttatgccaacgggactggtgttggtctca

SEQ ID NO: 465571 - DNA, 30 bp, Artificial Sequence
  Synthetic oligonucleotide
catgtctacgcgaggctccgcactgtctca

SEQ ID NO: 465572 - DNA, 30 bp, Artificial Sequence
  Synthetic oligonucleotide
ccaagtttaatggactatcccattgtctca

SEQ ID NO: 465573 - DNA, 30 bp, Artificial Sequence
  Synthetic oligonucleotide
ggcactgcagtcggcgcggcatccttctca

SEQ ID NO: 465574 - DNA, 30 bp, Artificial Sequence
  Synthetic oligonucleotide
actcgtacaagaaaaaagataagcttctca

SEQ ID NO: 465575 - DNA, 30 bp, Artificial Sequence
  Synthetic oligonucleotide
aatggctttgcggcgatggatgagttctca

SEQ ID NO: 465576 - DNA, 30 bp, Artificial Sequence
  Synthetic oligonucleotide
gagttccggctttttccatctacgttctca

SEQ ID NO: 465577 - DNA, 30 bp, Artificial Sequence
  Synthetic oligonucleotide
ccttgcccggggtcttcggattcgttctca

SEQ ID NO: 465578 - DNA, 30 bp, Artificial Sequence
  Synthetic oligonucleotide
aaggattatagccggagaatttctttctca

SEQ ID NO: 465579 - DNA, 30 bp, Artificial Sequence
  Synthetic oligonucleotide
cccggggaagtctacgccatatgtttctca

SEQ ID NO: 465580 - DNA, 30 bp, Artificial Sequence
  Synthetic oligonucleotide
tgtggaagatgattgagttagcttttctca

SEQ ID NO: 465581 - DNA, 30 bp, Artificial Sequence
  Synthetic oligonucleotide
aacagtcctgtgccgccagtctaaaagtca

SEQ ID NO: 465582 - DNA, 30 bp, Artificial Sequence
  Synthetic oligonucleotide
taggcttgtttcaaaaggcaaggaaagtca

SEQ ID NO: 465583 - DNA, 30 bp, Artificial Sequence
  Synthetic oligonucleotide
aattctctgcgatttctggtggtaaagtca

SEQ ID NO: 465584 - DNA, 30 bp, Artificial Sequence
  Synthetic oligonucleotide
tcgcattaaaatatattaaggtgcaagtca

SEQ ID NO: 465585 - DNA, 30 bp, Artificial Sequence
  Synthetic oligonucleotide
tcttcttcccctctgcaagggttgaagtca

SEQ ID NO: 465586 - DNA, 30 bp, Artificial Sequence
  Synthetic oligonucleotide
ttattgcagacatcgcaaggtattaagtca

SEQ ID NO: 465587 - DNA, 30 bp, Artificial Sequence
  Synthetic oligonucleotide
gtctttttccaaggagaaatgttccagtca

SEQ ID NO: 465588 - DNA, 30 bp, Artificial Sequence
  Synthetic oligonucleotide
gatcgggcaccggacgcaagagcgcagtca

SEQ ID NO: 465589 - DNA, 30 bp, Artificial Sequence
  Synthetic oligonucleotide
ttccgtttgtttttcggatcacggcagtca

SEQ ID NO: 465590 - DNA, 29 bp, Artificial Sequence
  Synthetic oligonucleotide
gcatttcgtattagctaccgcatcagtca

SEQ ID NO: 465591 - DNA, 30 bp, Artificial Sequence
  Synthetic oligonucleotide
ttaaattatccacgcacgttgcaagagtca

SEQ ID NO: 465592 - DNA, 30 bp, Artificial Sequence
  Synthetic oligonucleotide
cagccacatcccgggacttttcccgagtca

SEQ ID NO: 465593 - DNA, 30 bp, Artificial Sequence
  Synthetic oligonucleotide
tacgcttgcatgatgtactaactggagtca

SEQ ID NO: 465594 - DNA, 30 bp, Artificial Sequence
  Synthetic oligonucleotide
gtggagtgaggaaatacgtcgacatagtca

SEQ ID NO: 465595 - DNA, 30 bp, Artificial Sequence
  Synthetic oligonucleotide
ggttatattttgtttattaaaatatagtca

SEQ ID NO: 465596 - DNA, 30 bp, Artificial Sequence
  Synthetic oligonucleotide
caagcgtataaatgatcagtgttatagtca

SEQ ID NO: 465597 - DNA, 30 bp, Artificial Sequence
  Synthetic oligonucleotide
cagttccctaggtccgacattatgtagtca

SEQ ID NO: 465598 - DNA, 30 bp, Artificial Sequence
  Synthetic oligonucleotide
ataatctaggaagcggattaattgtagtca

SEQ ID NO: 465599 - DNA, 30 bp, Artificial Sequence
  Synthetic oligonucleotide
agcttttaaggcgtgtcgtagatttagtca

SEQ ID NO: 465600 - DNA, 30 bp, Artificial Sequence
  Synthetic oligonucleotide
gctaacaatcggcttggatgtgtttagtca

SEQ ID NO: 465601 - DNA, 30 bp, Artificial Sequence
  Synthetic oligonucleotide
ttagcagtcgaggcaatacaccgtacgtca

SEQ ID NO: 465602 - DNA, 30 bp, Artificial Sequence
  Synthetic oligonucleotide
taaccatttctatagcgttggtttacgtca

SEQ ID NO: 465603 - DNA, 30 bp, Artificial Sequence
  Synthetic oligonucleotide
ggacacgcaggaatacggctcgaaccgtca

SEQ ID NO: 465604 - DNA, 30 bp, Artificial Sequence
  Synthetic oligonucleotide
gctatcaatgtcgttcaacctgcaccgtca

SEQ ID NO: 465605 - DNA, 30 bp, Artificial Sequence
  Synthetic oligonucleotide
aaacggcatgggccctcatgtgcaccgtca

SEQ ID NO: 465606 - DNA, 30 bp, Artificial Sequence
  Synthetic oligonucleotide
gcctcttaacgagggataactctaccgtca

SEQ ID NO: 465607 - DNA, 30 bp, Artificial Sequence
  Synthetic oligonucleotide
gtcttttcccacaatgctagtggcccgtca

SEQ ID NO: 465608 - DNA, 30 bp, Artificial Sequence
  Synthetic oligonucleotide
aaaaatatccaccggcaccgtctgccgtca

SEQ ID NO: 465609 - DNA, 30 bp, Artificial Sequence
  Synthetic oligonucleotide
cggatcacacaaacacaggacaatccgtca

SEQ ID NO: 465610 - DNA, 30 bp, Artificial Sequence
  Synthetic oligonucleotide
gcttagatattgaccacagaatttccgtca

SEQ ID NO: 465611 - DNA, 30 bp, Artificial Sequence
  Synthetic oligonucleotide
gactaaagattcgtctcaacggccgcgtca

SEQ ID NO: 465612 - DNA, 29 bp, Artificial Sequence
  Synthetic oligonucleotide
gtggcagtattacactctttagggcgtca

SEQ ID NO: 465613 - DNA, 30 bp, Artificial Sequence
  Synthetic oligonucleotide
tgtatccaaaccaactctaattatgcgtca

SEQ ID NO: 465614 - DNA, 30 bp, Artificial Sequence
  Synthetic oligonucleotide
tggagtcgacatgagcgctatcctgcgtca

SEQ ID NO: 465615 - DNA, 30 bp, Artificial Sequence
  Synthetic oligonucleotide
tttgacatttccagatagcgttgtgcgtca

SEQ ID NO: 465616 - DNA, 30 bp, Artificial Sequence
  Synthetic oligonucleotide
tcagcgactagagacgatccacgatcgtca

SEQ ID NO: 465617 - DNA, 30 bp, Artificial Sequence
  Synthetic oligonucleotide
aggttgaggcagatcacgcatttatcgtca

SEQ ID NO: 465618 - DNA, 30 bp, Artificial Sequence
  Synthetic oligonucleotide
tgttttacgtgtgagctagttacctcgtca

SEQ ID NO: 465619 - DNA, 30 bp, Artificial Sequence
  Synthetic oligonucleotide
gcgtctcggccggaaggccccggctcgtca

SEQ ID NO: 465620 - DNA, 30 bp, Artificial Sequence
  Synthetic oligonucleotide
tagaaattgttcttctgggctaagtcgtca

SEQ ID NO: 465621 - DNA, 30 bp, Artificial Sequence
  Synthetic oligonucleotide
aacgcatgtatcgtcgtgagcggttcgtca

SEQ ID NO: 465622 - DNA, 30 bp, Artificial Sequence
  Synthetic oligonucleotide
agttgcgatccagctggaaatcacaggtca

SEQ ID NO: 465623 - DNA, 30 bp, Artificial Sequence
  Synthetic oligonucleotide
tacgctttgcgtgtagcgtacaagaggtca

SEQ ID NO: 465624 - DNA, 30 bp, Artificial Sequence
  Synthetic oligonucleotide
tctatgggtcgctggctgcgcatgaggtca

SEQ ID NO: 465625 - DNA, 30 bp, Artificial Sequence
  Synthetic oligonucleotide
cgttagtcagtgtcgtaattcgttaggtca

SEQ ID NO: 465626 - DNA, 30 bp, Artificial Sequence
  Synthetic oligonucleotide
attgctacggacgcgagttcatttaggtca

SEQ ID NO: 465627 - DNA, 30 bp, Artificial Sequence
  Synthetic oligonucleotide
tcttattcttgtttcgggacacaacggtca

SEQ ID NO: 465628 - DNA, 30 bp, Artificial Sequence
  Synthetic oligonucleotide
caaaatgcaaagcttcagcatggccggtca

SEQ ID NO: 465629 - DNA, 30 bp, Artificial Sequence
  Synthetic oligonucleotide
ctactgttcgtcttatacttcgcagggtca

SEQ ID NO: 465630 - DNA, 30 bp, Artificial Sequence
  Synthetic oligonucleotide
tgacgccgcagtgctgggtccaacgggtca

SEQ ID NO: 465631 - DNA, 30 bp, Artificial Sequence
  Synthetic oligonucleotide
ttctagagccactcgccacgtagcgggtca

SEQ ID NO: 465632 - DNA, 30 bp, Artificial Sequence
  Synthetic oligonucleotide
ttgcagtctgtccacgtgaaagcggggtca

SEQ ID NO: 465633 - DNA, 30 bp, Artificial Sequence
  Synthetic oligonucleotide
ttttagccggggccgccagagtgtgggtca

SEQ ID NO: 465634 - DNA, 30 bp, Artificial Sequence
  Synthetic oligonucleotide
aatcttagaattgatacgtaagaatggtca

SEQ ID NO: 465635 - DNA, 30 bp, Artificial Sequence
  Synthetic oligonucleotide
agtactcggatgacccattcccgctggtca

SEQ ID NO: 465636 - DNA, 30 bp, Artificial Sequence
  Synthetic oligonucleotide
gtatactagtcggccgtcaagtggtggtca

SEQ ID NO: 465637 - DNA, 30 bp, Artificial Sequence
  Synthetic oligonucleotide
tctatgccgttcacatggacactttggtca

SEQ ID NO: 465638 - DNA, 30 bp, Artificial Sequence
  Synthetic oligonucleotide
ctttgtatccccagccagtggggaatgtca

SEQ ID NO: 465639 - DNA, 30 bp, Artificial Sequence
  Synthetic oligonucleotide
aaatacacgagacgatcagactgtatgtca

SEQ ID NO: 465640 - DNA, 30 bp, Artificial Sequence
  Synthetic oligonucleotide
gctgatttccctatatggctgattatgtca

SEQ ID NO: 465641 - DNA, 30 bp, Artificial Sequence
  Synthetic oligonucleotide
aaaggaacgtccgtctcagcttcactgtca

SEQ ID NO: 465642 - DNA, 30 bp, Artificial Sequence
  Synthetic oligonucleotide
cacacttccgctgtggctgaccgactgtca

SEQ ID NO: 465643 - DNA, 30 bp, Artificial Sequence
  Synthetic oligonucleotide
ccctatgaagacagtgttatacccctgtca

SEQ ID NO: 465644 - DNA, 30 bp, Artificial Sequence
  Synthetic oligonucleotide
ccactcttagcaataccaaagacgctgtca

SEQ ID NO: 465645 - DNA, 30 bp, Artificial Sequence
  Synthetic oligonucleotide
aagtctgcgacatagacgctagtgctgtca

SEQ ID NO: 465646 - DNA, 30 bp, Artificial Sequence
  Synthetic oligonucleotide
gagaacgtgttgggcgcgagtcgtctgtca

SEQ ID NO: 465647 - DNA, 30 bp, Artificial Sequence
  Synthetic oligonucleotide
ttctaactcgttcctgggcatcctgtgtca

SEQ ID NO: 465648 - DNA, 30 bp, Artificial Sequence
  Synthetic oligonucleotide
ctgcggtatgaaaatgcagcacttgtgtca

SEQ ID NO: 465649 - DNA, 30 bp, Artificial Sequence
  Synthetic oligonucleotide
ggtttcgggctagtctccgatcaattgtca

SEQ ID NO: 465650 - DNA, 30 bp, Artificial Sequence
  Synthetic oligonucleotide
ctagcatctctggatacgacgggattgtca

SEQ ID NO: 465651 - DNA, 30 bp, Artificial Sequence
  Synthetic oligonucleotide
cacaatagctgtgaacactaggtgttgtca

SEQ ID NO: 465652 - DNA, 30 bp, Artificial Sequence
  Synthetic oligonucleotide
tttgtcaagaggtattcgagaaatttgtca

SEQ ID NO: 465653 - DNA, 30 bp, Artificial Sequence
  Synthetic oligonucleotide
aaaaaatcacttataacgcaacctttgtca

SEQ ID NO: 465654 - DNA, 30 bp, Artificial Sequence
  Synthetic oligonucleotide
gccctaccagcgcggctatgcggtttgtca

SEQ ID NO: 465655 - DNA, 30 bp, Artificial Sequence
  Synthetic oligonucleotide
ttggtgacgccctcctggattttaaattca

SEQ ID NO: 465656 - DNA, 30 bp, Artificial Sequence
  Synthetic oligonucleotide
aagtctccgttaaatgcggttaacaattca

SEQ ID NO: 465657 - DNA, 29 bp, Artificial Sequence
  Synthetic oligonucleotide
gtgactgggatttaccatatggcaattca

SEQ ID NO: 465658 - DNA, 30 bp, Artificial Sequence
  Synthetic oligonucleotide
aattgacccggtcacggcttactgaattca

SEQ ID NO: 465659 - DNA, 30 bp, Artificial Sequence
  Synthetic oligonucleotide
ctactgacacgattcccttgcagacattca

SEQ ID NO: 465660 - DNA, 30 bp, Artificial Sequence
  Synthetic oligonucleotide
ttctaagattccaattctcaaggacattca

SEQ ID NO: 465661 - DNA, 30 bp, Artificial Sequence
  Synthetic oligonucleotide
cttgcgcaccccgaatgtagtatacattca

SEQ ID NO: 465662 - DNA, 30 bp, Artificial Sequence
  Synthetic oligonucleotide
agctttacttcacaagtttgagcgcattca

SEQ ID NO: 465663 - DNA, 30 bp, Artificial Sequence
  Synthetic oligonucleotide
atgggctgcacgaaaaggggccttcattca

SEQ ID NO: 465664 - DNA, 30 bp, Artificial Sequence
  Synthetic oligonucleotide
ggcataagattttacccgtgcaacgattca

SEQ ID NO: 465665 - DNA, 30 bp, Artificial Sequence
  Synthetic oligonucleotide
ggtatagtattgagatctttattcgattca

SEQ ID NO: 465666 - DNA, 30 bp, Artificial Sequence
  Synthetic oligonucleotide
tttgccaacgccgaacccgggaaggattca

SEQ ID NO: 465667 - DNA, 30 bp, Artificial Sequence
  Synthetic oligonucleotide
aaatttggacgctcgcgatgatctgattca

SEQ ID NO: 465668 - DNA, 30 bp, Artificial Sequence
  Synthetic oligonucleotide
aatcctaggacgaatgggtgaattgattca

SEQ ID NO: 465669 - DNA, 30 bp, Artificial Sequence
  Synthetic oligonucleotide
taactcagcaaagtctcatcgtttgattca

SEQ ID NO: 465670 - DNA, 30 bp, Artificial Sequence
  Synthetic oligonucleotide
tcccttgatgtatgtttctggaaatattca

SEQ ID NO: 465671 - DNA, 30 bp, Artificial Sequence
  Synthetic oligonucleotide
aaacctaggtgagaatctcaaatatattca

SEQ ID NO: 465672 - DNA, 30 bp, Artificial Sequence
  Synthetic oligonucleotide
ttggccgggtcgataaacaggttatattca

SEQ ID NO: 465673 - DNA, 30 bp, Artificial Sequence
  Synthetic oligonucleotide
cttctagtctatggccagtaggggtattca

SEQ ID NO: 465674 - DNA, 30 bp, Artificial Sequence
  Synthetic oligonucleotide
tccctgaagacagcgcatgtcggttattca

SEQ ID NO: 465675 - DNA, 30 bp, Artificial Sequence
  Synthetic oligonucleotide
gtagtcgcgaagcgctactaatgttattca

SEQ ID NO: 465676 - DNA, 30 bp, Artificial Sequence
  Synthetic oligonucleotide
tcttagtcgatgttgatgacatgaacttca

SEQ ID NO: 465677 - DNA, 30 bp, Artificial Sequence
  Synthetic oligonucleotide
gtattgaggaaacttccattgttaacttca

SEQ ID NO: 465678 - DNA, 30 bp, Artificial Sequence
  Synthetic oligonucleotide
tacgtgacaggtcatgacaaccatacttca

SEQ ID NO: 465679 - DNA, 30 bp, Artificial Sequence
  Synthetic oligonucleotide
gaattggacagagctgctgcgcatacttca

SEQ ID NO: 465680 - DNA, 30 bp, Artificial Sequence
  Synthetic oligonucleotide
gcgcgtttgctaatgggagcaggtacttca

SEQ ID NO: 465681 - DNA, 30 bp, Artificial Sequence
  Synthetic oligonucleotide
tagttgatcagcgcaaggaaatgtacttca

SEQ ID NO: 465682 - DNA, 30 bp, Artificial Sequence
  Synthetic oligonucleotide
ggtgtatcaatgccctcggggataccttca

SEQ ID NO: 465683 - DNA, 30 bp, Artificial Sequence
  Synthetic oligonucleotide
aacaatcggtattcatcgtttgacccttca

SEQ ID NO: 465684 - DNA, 30 bp, Artificial Sequence
  Synthetic oligonucleotide
ctacagtcactttagtacaacgctccttca

SEQ ID NO: 465685 - DNA, 30 bp, Artificial Sequence
  Synthetic oligonucleotide
attacgcaagcgacgtgagacagtccttca

SEQ ID NO: 465686 - DNA, 30 bp, Artificial Sequence
  Synthetic oligonucleotide
ttttgatctttgttcgtgtaaggtccttca

SEQ ID NO: 465687 - DNA, 30 bp, Artificial Sequence
  Synthetic oligonucleotide
gctatgtcgtaacgctatacgacagcttca

SEQ ID NO: 465688 - DNA, 30 bp, Artificial Sequence
  Synthetic oligonucleotide
agactgcgggggtatttccccccagcttca

SEQ ID NO: 465689 - DNA, 30 bp, Artificial Sequence
  Synthetic oligonucleotide
cgactgggcggataatttggccacgcttca

SEQ ID NO: 465690 - DNA, 30 bp, Artificial Sequence
  Synthetic oligonucleotide
ttcccaccagggggaatgctaatcgcttca

SEQ ID NO: 465691 - DNA, 30 bp, Artificial Sequence
  Synthetic oligonucleotide
ggacgcccttgtacctcgtgtaaggcttca

SEQ ID NO: 465692 - DNA, 30 bp, Artificial Sequence
  Synthetic oligonucleotide
agtaaatgaggactagtgtttaaggcttca

SEQ ID NO: 465693 - DNA, 30 bp, Artificial Sequence
  Synthetic oligonucleotide
accacgggtgccctagagtaacaggcttca

SEQ ID NO: 465694 - DNA, 30 bp, Artificial Sequence
  Synthetic oligonucleotide
aatatgagtatctttagcatccgggcttca

SEQ ID NO: 465695 - DNA, 30 bp, Artificial Sequence
  Synthetic oligonucleotide
gcttacgccctaccatccttctctgcttca

SEQ ID NO: 465696 - DNA, 30 bp, Artificial Sequence
  Synthetic oligonucleotide
ccgtagtgtttaaaggtagacggatcttca

SEQ ID NO: 465697 - DNA, 30 bp, Artificial Sequence
  Synthetic oligonucleotide
tctacgttcaaaaggtagcgccactcttca

SEQ ID NO: 465698 - DNA, 30 bp, Artificial Sequence
  Synthetic oligonucleotide
tggctcgtgcatggccgcaggatctcttca

SEQ ID NO: 465699 - DNA, 30 bp, Artificial Sequence
  Synthetic oligonucleotide
agatcgagcagtagccatctagtctcttca

SEQ ID NO: 465700 - DNA, 30 bp, Artificial Sequence
  Synthetic oligonucleotide
tttccagcacgcatgtaaacagtttcttca

SEQ ID NO: 465701 - DNA, 30 bp, Artificial Sequence
  Synthetic oligonucleotide
ggtaatcgcagtcaccttccaaaaagttca

SEQ ID NO: 465702 - DNA, 30 bp, Artificial Sequence
  Synthetic oligonucleotide
atatcgagcctacagcggtcatacagttca

SEQ ID NO: 465703 - DNA, 30 bp, Artificial Sequence
  Synthetic oligonucleotide
aatatcttgtgaagagctaaacccagttca

SEQ ID NO: 465704 - DNA, 30 bp, Artificial Sequence
  Synthetic oligonucleotide
aaaatgcataccctcaccgcttccagttca

SEQ ID NO: 465705 - DNA, 30 bp, Artificial Sequence
  Synthetic oligonucleotide
gtatataatccaaaatggctcgtcagttca

SEQ ID NO: 465706 - DNA, 30 bp, Artificial Sequence
  Synthetic oligonucleotide
aactttgccaaaaatgggacacggagttca

SEQ ID NO: 465707 - DNA, 30 bp, Artificial Sequence
  Synthetic oligonucleotide
aagggacacgtctgaggtcctcttagttca

SEQ ID NO: 465708 - DNA, 30 bp, Artificial Sequence
  Synthetic oligonucleotide
aattggatttttttgttactacgacgttca

SEQ ID NO: 465709 - DNA, 30 bp, Artificial Sequence
  Synthetic oligonucleotide
caatcacaggctttccgaagaagccgttca

SEQ ID NO: 465710 - DNA, 30 bp, Artificial Sequence
  Synthetic oligonucleotide
gcatggaactatcgttaaggtaatcgttca

SEQ ID NO: 465711 - DNA, 30 bp, Artificial Sequence
  Synthetic oligonucleotide
gtcagtctcattacggacattctcggttca

SEQ ID NO: 465712 - DNA, 30 bp, Artificial Sequence
  Synthetic oligonucleotide
ttaacgtagccgacatcgatgcagggttca

SEQ ID NO: 465713 - DNA, 30 bp, Artificial Sequence
  Synthetic oligonucleotide
ggccggtgtgactactccgaggagggttca

SEQ ID NO: 465714 - DNA, 30 bp, Artificial Sequence
  Synthetic oligonucleotide
taggactgcatatagcgggtcgcgggttca

SEQ ID NO: 465715 - DNA, 30 bp, Artificial Sequence
  Synthetic oligonucleotide
tacttatcaccgcagacattatcgggttca

SEQ ID NO: 465716 - DNA, 30 bp, Artificial Sequence
  Synthetic oligonucleotide
gtgccgtgtcgcgtcgaccctaggggttca

SEQ ID NO: 465717 - DNA, 30 bp, Artificial Sequence
  Synthetic oligonucleotide
cactaaggcctccacccaattctgggttca

SEQ ID NO: 465718 - DNA, 30 bp, Artificial Sequence
  Synthetic oligonucleotide
tttccttattagaatattaggaatggttca

SEQ ID NO: 465719 - DNA, 30 bp, Artificial Sequence
  Synthetic oligonucleotide
gttcaaatcgacaacgcgactattggttca

SEQ ID NO: 465720 - DNA, 30 bp, Artificial Sequence
  Synthetic oligonucleotide
ttatctcccttttaatcaaatgttggttca

SEQ ID NO: 465721 - DNA, 30 bp, Artificial Sequence
  Synthetic oligonucleotide
ttccggacacaccattacggatcatgttca

SEQ ID NO: 465722 - DNA, 30 bp, Artificial Sequence
  Synthetic oligonucleotide
tatagactggcgggatttctctcctgttca

SEQ ID NO: 465723 - DNA, 30 bp, Artificial Sequence
  Synthetic oligonucleotide
gctatacagcttctccgacaacattgttca

SEQ ID NO: 465724 - DNA, 30 bp, Artificial Sequence
  Synthetic oligonucleotide
ttataggaactgagccgatatttttgttca

SEQ ID NO: 465725 - DNA, 30 bp, Artificial Sequence
  Synthetic oligonucleotide
tgcttgaccagggacgacgctttttgttca

SEQ ID NO: 465726 - DNA, 30 bp, Artificial Sequence
  Synthetic oligonucleotide
gccatatacttcctgagcgtccaaatttca

SEQ ID NO: 465727 - DNA, 30 bp, Artificial Sequence
  Synthetic oligonucleotide
tgtattgagattaattgctcggacatttca

SEQ ID NO: 465728 - DNA, 30 bp, Artificial Sequence
  Synthetic oligonucleotide
acgcttcaaggggagctttttcccatttca

SEQ ID NO: 465729 - DNA, 30 bp, Artificial Sequence
  Synthetic oligonucleotide
gtgcatcatccgggatcgagggatatttca

SEQ ID NO: 465730 - DNA, 30 bp, Artificial Sequence
  Synthetic oligonucleotide
attggatagactcccggagaccctatttca

SEQ ID NO: 465731 - DNA, 30 bp, Artificial Sequence
  Synthetic oligonucleotide
atgagctctagacaagttcatgctatttca

SEQ ID NO: 465732 - DNA, 30 bp, Artificial Sequence
  Synthetic oligonucleotide
agctgttgtagaggctacggatctatttca

SEQ ID NO: 465733 - DNA, 30 bp, Artificial Sequence
  Synthetic oligonucleotide
tccgtatactaacccgcatagagactttca

SEQ ID NO: 465734 - DNA, 30 bp, Artificial Sequence
  Synthetic oligonucleotide
actgttggggttcttggtactagactttca

SEQ ID NO: 465735 - DNA, 30 bp, Artificial Sequence
  Synthetic oligonucleotide
gtgcagctcaaacttttgtccggactttca

SEQ ID NO: 465736 - DNA, 30 bp, Artificial Sequence
  Synthetic oligonucleotide
attgttcgcctattggcgtcactactttca

SEQ ID NO: 465737 - DNA, 30 bp, Artificial Sequence
  Synthetic oligonucleotide
ggtagggcttctgccaagattttactttca

SEQ ID NO: 465738 - DNA, 30 bp, Artificial Sequence
  Synthetic oligonucleotide
gtgcctgtgtcaacgcagataaacctttca

SEQ ID NO: 465739 - DNA, 30 bp, Artificial Sequence
  Synthetic oligonucleotide
tattcaaatcaccctcaggttgacctttca

SEQ ID NO: 465740 - DNA, 30 bp, Artificial Sequence
  Synthetic oligonucleotide
ttatggatccggcactaaggttccctttca

SEQ ID NO: 465741 - DNA, 30 bp, Artificial Sequence
  Synthetic oligonucleotide
tttctcggaacgggttacgtcaatctttca

SEQ ID NO: 465742 - DNA, 30 bp, Artificial Sequence
  Synthetic oligonucleotide
cttcaataatttatcgtgaaacaagtttca

SEQ ID NO: 465743 - DNA, 30 bp, Artificial Sequence
  Synthetic oligonucleotide
gaaaccacattgactcgctccgaagtttca

SEQ ID NO: 465744 - DNA, 30 bp, Artificial Sequence
  Synthetic oligonucleotide
gagcggtgccatgggaaaaaactcgtttca

SEQ ID NO: 465745 - DNA, 30 bp, Artificial Sequence
  Synthetic oligonucleotide
taataattaaaggttaagaaatcggtttca

SEQ ID NO: 465746 - DNA, 30 bp, Artificial Sequence
  Synthetic oligonucleotide
gctattggtaggatttactaaagggtttca

SEQ ID NO: 465747 - DNA, 30 bp, Artificial Sequence
  Synthetic oligonucleotide
cattattcatacgcgtccagacgggtttca

SEQ ID NO: 465748 - DNA, 30 bp, Artificial Sequence
  Synthetic oligonucleotide
aaaccgtgtaacgcggccaaacatgtttca

SEQ ID NO: 465749 - DNA, 30 bp, Artificial Sequence
  Synthetic oligonucleotide
tgtcaagattcctggtcaacaagtgtttca

SEQ ID NO: 465750 - DNA, 30 bp, Artificial Sequence
  Synthetic oligonucleotide
atttgagttgtatagagtaatggattttca

SEQ ID NO: 465751 - DNA, 30 bp, Artificial Sequence
  Synthetic oligonucleotide
cagcatatagtacttggccaagtattttca

SEQ ID NO: 465752 - DNA, 30 bp, Artificial Sequence
  Synthetic oligonucleotide
tgccgcaccatgagtccagtcgccttttca

SEQ ID NO: 465753 - DNA, 30 bp, Artificial Sequence
  Synthetic oligonucleotide
ggaaggttccgccccaataccagcttttca

SEQ ID NO: 465754 - DNA, 30 bp, Artificial Sequence
  Synthetic oligonucleotide
gataactaccccggggtgagagtcttttca

SEQ ID NO: 465755 - DNA, 30 bp, Artificial Sequence
  Synthetic oligonucleotide
tccccaagtacaggagggtaaacgttttca

SEQ ID NO: 465756 - DNA, 30 bp, Artificial Sequence
  Synthetic oligonucleotide
taaacttatgagaatatccatacgttttca

SEQ ID NO: 465757 - DNA, 30 bp, Artificial Sequence
  Synthetic oligonucleotide
aaacaatttggatatcctgtccggttttca

SEQ ID NO: 465758 - DNA, 30 bp, Artificial Sequence
  Synthetic oligonucleotide
ctgagagtcgaagtgacacagtggttttca

SEQ ID NO: 465759 - DNA, 30 bp, Artificial Sequence
  Synthetic oligonucleotide
ccgcagcgaacgttttgtaggtatttttca

SEQ ID NO: 465760 - DNA, 30 bp, Artificial Sequence
  Synthetic oligonucleotide
accattcttatacgggtcttgtatttttca

SEQ ID NO: 465761 - DNA, 30 bp, Artificial Sequence
  Synthetic oligonucleotide
atttctaacagtcgagccgggtctttttca

SEQ ID NO: 465762 - DNA, 30 bp, Artificial Sequence
  Synthetic oligonucleotide
ttatactctgtaaaggtatgtattttttca

SEQ ID NO: 465763 - DNA, 30 bp, Artificial Sequence
  Synthetic oligonucleotide
cagtccatgattcttcctgattttttttca

SEQ ID NO: 465764 - DNA, 30 bp, Artificial Sequence
  Synthetic oligonucleotide
atactagcggaacccaaggggtaaaaaaga

SEQ ID NO: 465765 - DNA, 30 bp, Artificial Sequence
  Synthetic oligonucleotide
aaacatggccacgttgtaccgggaaaaaga

SEQ ID NO: 465766 - DNA, 30 bp, Artificial Sequence
  Synthetic oligonucleotide
taacgggggataggtagcttttgaaaaaga

SEQ ID NO: 465767 - DNA, 30 bp, Artificial Sequence
  Synthetic oligonucleotide
ggtctccgtgaactaaagcatgggaaaaga

SEQ ID NO: 465768 - DNA, 30 bp, Artificial Sequence
  Synthetic oligonucleotide
gcgttcggggtttcgatcatctgtaaaaga

SEQ ID NO: 465769 - DNA, 30 bp, Artificial Sequence
  Synthetic oligonucleotide
atatattcaacaccccgatagattaaaaga

SEQ ID NO: 465770 - DNA, 30 bp, Artificial Sequence
  Synthetic oligonucleotide
gatactcggcccgtagtaacctcacaaaga

SEQ ID NO: 465771 - DNA, 30 bp, Artificial Sequence
  Synthetic oligonucleotide
cctgctttcagacggaggctagtacaaaga

SEQ ID NO: 465772 - DNA, 30 bp, Artificial Sequence
  Synthetic oligonucleotide
cactatagtgctcgggattattgccaaaga

SEQ ID NO: 465773 - DNA, 30 bp, Artificial Sequence
  Synthetic oligonucleotide
gcatccattgatgggtggaagcagcaaaga

SEQ ID NO: 465774 - DNA, 31 bp, Artificial Sequence
  Synthetic oligonucleotide
gtagtgcgatgggttatatatgtcgcaaaga

SEQ ID NO: 465775 - DNA, 30 bp, Artificial Sequence
  Synthetic oligonucleotide
ccgcgggaagcttgtcgagggtggcaaaga

SEQ ID NO: 465776 - DNA, 30 bp, Artificial Sequence
  Synthetic oligonucleotide
ccagttggcaatcgttaccgggtgcaaaga

SEQ ID NO: 465777 - DNA, 30 bp, Artificial Sequence
  Synthetic oligonucleotide
aaaagttgaccaattaaaccaggtcaaaga

SEQ ID NO: 465778 - DNA, 30 bp, Artificial Sequence
  Synthetic oligonucleotide
gagacccgaattacgatctagccagaaaga

SEQ ID NO: 465779 - DNA, 30 bp, Artificial Sequence
  Synthetic oligonucleotide
tatctgacgttatgtttaatttcagaaaga

SEQ ID NO: 465780 - DNA, 30 bp, Artificial Sequence
  Synthetic oligonucleotide
ttcgtatactaatatacaatatgcgaaaga

SEQ ID NO: 465781 - DNA, 30 bp, Artificial Sequence
  Synthetic oligonucleotide
gtacgcagagagtctagtgccccggaaaga

SEQ ID NO: 465782 - DNA, 30 bp, Artificial Sequence
  Synthetic oligonucleotide
tggcgtatagtagatgcatacttggaaaga

SEQ ID NO: 465783 - DNA, 30 bp, Artificial Sequence
  Synthetic oligonucleotide
gattccagttcccactcgaagattgaaaga

SEQ ID NO: 465784 - DNA, 30 bp, Artificial Sequence
  Synthetic oligonucleotide
atcatagatcgagctggtaaagttgaaaga

SEQ ID NO: 465785 - DNA, 30 bp, Artificial Sequence
  Synthetic oligonucleotide
gagtggtggagaagcagaggaaaataaaga

SEQ ID NO: 465786 - DNA, 30 bp, Artificial Sequence
  Synthetic oligonucleotide
gccactccttcgggcatattcaaataaaga

SEQ ID NO: 465787 - DNA, 30 bp, Artificial Sequence
  Synthetic oligonucleotide
ggggctccttttgtcgtgcactaataaaga

SEQ ID NO: 465788 - DNA, 30 bp, Artificial Sequence
  Synthetic oligonucleotide
gcagggttgtggtattgcaagagataaaga

SEQ ID NO: 465789 - DNA, 30 bp, Artificial Sequence
  Synthetic oligonucleotide
taaaacccacatcgtgcacgcatataaaga

SEQ ID NO: 465790 - DNA, 30 bp, Artificial Sequence
  Synthetic oligonucleotide
gtcagcgttcttaaggctgtcggctaaaga

SEQ ID NO: 465791 - DNA, 30 bp, Artificial Sequence
  Synthetic oligonucleotide
gacttttaaacagtccgaacgcagtaaaga

SEQ ID NO: 465792 - DNA, 30 bp, Artificial Sequence
  Synthetic oligonucleotide
tttgactgtcgtcatgtagtttggtaaaga

SEQ ID NO: 465793 - DNA, 30 bp, Artificial Sequence
  Synthetic oligonucleotide
ttcgagcgtttcttcttcacgacttaaaga

SEQ ID NO: 465794 - DNA, 30 bp, Artificial Sequence
  Synthetic oligonucleotide
tttttccatcgataacctgccagttaaaga

SEQ ID NO: 465795 - DNA, 30 bp, Artificial Sequence
  Synthetic oligonucleotide
ccagaaccgtttttagccctttgaacaaga

SEQ ID NO: 465796 - DNA, 30 bp, Artificial Sequence
  Synthetic oligonucleotide
ttgagcgcgcaggtccgcttactaacaaga

SEQ ID NO: 465797 - DNA, 30 bp, Artificial Sequence
  Synthetic oligonucleotide
tcagtggcagcaaatgcaaaccacacaaga

SEQ ID NO: 465798 - DNA, 30 bp, Artificial Sequence
  Synthetic oligonucleotide
gatagcaatctatcatggcaattcacaaga

SEQ ID NO: 465799 - DNA, 30 bp, Artificial Sequence
  Synthetic oligonucleotide
atgcccggtttttcccatgtttcgacaaga

SEQ ID NO: 465800 - DNA, 30 bp, Artificial Sequence
  Synthetic oligonucleotide
aaatcttggagcgtccgatcgcggacaaga

SEQ ID NO: 465801 - DNA, 30 bp, Artificial Sequence
  Synthetic oligonucleotide
aacatattcaggacatcttggtacccaaga

SEQ ID NO: 465802 - DNA, 30 bp, Artificial Sequence
  Synthetic oligonucleotide
gacctttatgagctgaaaggtttcccaaga

SEQ ID NO: 465803 - DNA, 30 bp, Artificial Sequence
  Synthetic oligonucleotide
attattaggttgataggggggcggccaaga

SEQ ID NO: 465804 - DNA, 30 bp, Artificial Sequence
  Synthetic oligonucleotide
tcaaaatgtagagctcttgtagctccaaga

SEQ ID NO: 465805 - DNA, 30 bp, Artificial Sequence
  Synthetic oligonucleotide
aaaatggaaccttcattcgggaacgcaaga

SEQ ID NO: 465806 - DNA, 30 bp, Artificial Sequence
  Synthetic oligonucleotide
cacgtggcctttcggccgatcggcgcaaga

SEQ ID NO: 465807 - DNA, 30 bp, Artificial Sequence
  Synthetic oligonucleotide
cggcgttttcaaggcgcaggcctggcaaga

SEQ ID NO: 465808 - DNA, 30 bp, Artificial Sequence
  Synthetic oligonucleotide
gagtcgagttttaagcttccagtggcaaga

SEQ ID NO: 465809 - DNA, 30 bp, Artificial Sequence
  Synthetic oligonucleotide
gcccggaattggaggtttcttgtggcaaga

SEQ ID NO: 465810 - DNA, 30 bp, Artificial Sequence
  Synthetic oligonucleotide
ggggcgacgttagcgcttaggcgtgcaaga

SEQ ID NO: 465811 - DNA, 30 bp, Artificial Sequence
  Synthetic oligonucleotide
aaatggtcggtacaatcactttgtgcaaga

SEQ ID NO: 465812 - DNA, 30 bp, Artificial Sequence
  Synthetic oligonucleotide
cttactccgcggcgcctcattgaatcaaga

SEQ ID NO: 465813 - DNA, 30 bp, Artificial Sequence
  Synthetic oligonucleotide
tcttctcataggatgctgaatttatcaaga

SEQ ID NO: 465814 - DNA, 30 bp, Artificial Sequence
  Synthetic oligonucleotide
cggtaggctctcagcaggcgtgggtcaaga

SEQ ID NO: 465815 - DNA, 30 bp, Artificial Sequence
  Synthetic oligonucleotide
gtttaatcccatgtacaatttccttcaaga

SEQ ID NO: 465816 - DNA, 30 bp, Artificial Sequence
  Synthetic oligonucleotide
ctagacttggaaccggtccatcgaagaaga

SEQ ID NO: 465817 - DNA, 30 bp, Artificial Sequence
  Synthetic oligonucleotide
tagataccagttcttgtattaaacagaaga

SEQ ID NO: 465818 - DNA, 30 bp, Artificial Sequence
  Synthetic oligonucleotide
gtatctttctaatgtagatcagctagaaga

SEQ ID NO: 465819 - DNA, 30 bp, Artificial Sequence
  Synthetic oligonucleotide
tcattactctccaactccccaggtagaaga

SEQ ID NO: 465820 - DNA, 30 bp, Artificial Sequence
  Synthetic oligonucleotide
tacgcaataacatcttggtctcaacgaaga

SEQ ID NO: 465821 - DNA, 30 bp, Artificial Sequence
  Synthetic oligonucleotide
ttgttagacgggcccatcgttcgacgaaga

SEQ ID NO: 465822 - DNA, 30 bp, Artificial Sequence
  Synthetic oligonucleotide
tactataacttttcaatatactgacgaaga

SEQ ID NO: 465823 - DNA, 30 bp, Artificial Sequence
  Synthetic oligonucleotide
ttatcatagaacgaggccggccgccgaaga

SEQ ID NO: 465824 - DNA, 30 bp, Artificial Sequence
  Synthetic oligonucleotide
gccgcgaggctttatacggacgagcgaaga

SEQ ID NO: 465825 - DNA, 30 bp, Artificial Sequence
  Synthetic oligonucleotide
cgccctcgcgtaatacacgcggcgcgaaga

SEQ ID NO: 465826 - DNA, 30 bp, Artificial Sequence
  Synthetic oligonucleotide
aatattgtgcaattggaatttatgcgaaga

SEQ ID NO: 465827 - DNA, 30 bp, Artificial Sequence
  Synthetic oligonucleotide
gtggagggagccgggaccagtgtgcgaaga

SEQ ID NO: 465828 - DNA, 30 bp, Artificial Sequence
  Synthetic oligonucleotide
gactcattgtcgaaaccaatgtgaggaaga

SEQ ID NO: 465829 - DNA, 30 bp, Artificial Sequence
  Synthetic oligonucleotide
gaattgcacaagtagcgtataaagggaaga

SEQ ID NO: 465830 - DNA, 30 bp, Artificial Sequence
  Synthetic oligonucleotide
atttgagatgcccacctggaagagggaaga

SEQ ID NO: 465831 - DNA, 30 bp, Artificial Sequence
  Synthetic oligonucleotide
cttggctaccaatttggcgttgagggaaga

SEQ ID NO: 465832 - DNA, 30 bp, Artificial Sequence
  Synthetic oligonucleotide
ttttttacggtacaataggctagtggaaga

SEQ ID NO: 465833 - DNA, 30 bp, Artificial Sequence
  Synthetic oligonucleotide
ggtgagtggataagggcataaggatgaaga

SEQ ID NO: 465834 - DNA, 30 bp, Artificial Sequence
  Synthetic oligonucleotide
cgtgcctatatatagtaaagtggctgaaga

SEQ ID NO: 465835 - DNA, 30 bp, Artificial Sequence
  Synthetic oligonucleotide
taaaccgtctctagaccggagtcttgaaga

SEQ ID NO: 465836 - DNA, 30 bp, Artificial Sequence
  Synthetic oligonucleotide
catctgccctgatggccacgcatttgaaga

SEQ ID NO: 465837 - DNA, 30 bp, Artificial Sequence
  Synthetic oligonucleotide
aatgctgatgctaacttcaacaccataaga

SEQ ID NO: 465838 - DNA, 30 bp, Artificial Sequence
  Synthetic oligonucleotide
aagaggtctatagcgtgttcgtccataaga

SEQ ID NO: 465839 - DNA, 30 bp, Artificial Sequence
  Synthetic oligonucleotide
aacccaagtgaactagagggcttcataaga

SEQ ID NO: 465840 - DNA, 30 bp, Artificial Sequence
  Synthetic oligonucleotide
atccctgtcggaaccgaatggcggataaga

SEQ ID NO: 465841 - DNA, 30 bp, Artificial Sequence
  Synthetic oligonucleotide
ttagtagttcctagccaaaagggtataaga

SEQ ID NO: 465842 - DNA, 31 bp, Artificial Sequence
  Synthetic oligonucleotide
tgatacttgcgagctccccggatagctaaga

SEQ ID NO: 465843 - DNA, 30 bp, Artificial Sequence
  Synthetic oligonucleotide
acgagcttctgacagtcgcctaggctaaga

SEQ ID NO: 465844 - DNA, 30 bp, Artificial Sequence
  Synthetic oligonucleotide
gttggggggcgggtttacggactgctaaga

SEQ ID NO: 465845 - DNA, 30 bp, Artificial Sequence
  Synthetic oligonucleotide
gcctcgtattcaagagtttgtgaagtaaga

SEQ ID NO: 465846 - DNA, 30 bp, Artificial Sequence
  Synthetic oligonucleotide
taatatcttcacaagacctaaccagtaaga

SEQ ID NO: 465847 - DNA, 30 bp, Artificial Sequence
  Synthetic oligonucleotide
atgccctgctgcgtagcgagcgaggtaaga

SEQ ID NO: 465848 - DNA, 30 bp, Artificial Sequence
  Synthetic oligonucleotide
cctgtctctggaatcgcgtcatgtgtaaga

SEQ ID NO: 465849 - DNA, 30 bp, Artificial Sequence
  Synthetic oligonucleotide
gtagaatacgtaaagcaactgcaattaaga

SEQ ID NO: 465850 - DNA, 30 bp, Artificial Sequence
  Synthetic oligonucleotide
cgcttaccctagacggcacatggattaaga

SEQ ID NO: 465851 - DNA, 30 bp, Artificial Sequence
  Synthetic oligonucleotide
atgttccaaaggttgtagcgagtattaaga

SEQ ID NO: 465852 - DNA, 30 bp, Artificial Sequence
  Synthetic oligonucleotide
taaatttggcagcgcaccggcttattaaga

SEQ ID NO: 465853 - DNA, 30 bp, Artificial Sequence
  Synthetic oligonucleotide
tagctactcgagtggtgctagtccttaaga

SEQ ID NO: 465854 - DNA, 30 bp, Artificial Sequence
  Synthetic oligonucleotide
cgtcgagacgggcaaaggcgtttgttaaga

SEQ ID NO: 465855 - DNA, 30 bp, Artificial Sequence
  Synthetic oligonucleotide
tcttccggtccacggcagttagatttaaga

SEQ ID NO: 465856 - DNA, 30 bp, Artificial Sequence
  Synthetic oligonucleotide
aagtttctgcgtgctgccggcattttaaga

SEQ ID NO: 465857 - DNA, 30 bp, Artificial Sequence
  Synthetic oligonucleotide
catctaagcacggaaggttgtcttttaaga

SEQ ID NO: 465858 - DNA, 30 bp, Artificial Sequence
  Synthetic oligonucleotide
gttatctggcccgcacgggttgaaaacaga

SEQ ID NO: 465859 - DNA, 30 bp, Artificial Sequence
  Synthetic oligonucleotide
gcagtttgatgacattgttatacaaacaga

SEQ ID NO: 465860 - DNA, 30 bp, Artificial Sequence
  Synthetic oligonucleotide
gagggtatgccgatacatgaggtgaacaga

SEQ ID NO: 465861 - DNA, 30 bp, Artificial Sequence
  Synthetic oligonucleotide
ggtgtaggctttctattcagctcacacaga

SEQ ID NO: 465862 - DNA, 30 bp, Artificial Sequence
  Synthetic oligonucleotide
cgtgattggtcgccggagagttcacacaga

SEQ ID NO: 465863 - DNA, 30 bp, Artificial Sequence
  Synthetic oligonucleotide
gtcaatgcatagattggcactggacacaga

SEQ ID NO: 465864 - DNA, 30 bp, Artificial Sequence
  Synthetic oligonucleotide
gtctttgttgggtcagcgttatgacacaga

SEQ ID NO: 465865 - DNA, 30 bp, Artificial Sequence
  Synthetic oligonucleotide
gaggggcgaaggctggaataaaggcacaga

SEQ ID NO: 465866 - DNA, 30 bp, Artificial Sequence
  Synthetic oligonucleotide
cctacgagtgacacgtttcaatggcacaga

SEQ ID NO: 465867 - DNA, 30 bp, Artificial Sequence
  Synthetic oligonucleotide
gttatacatagcggctaagagttgcacaga

SEQ ID NO: 465868 - DNA, 30 bp, Artificial Sequence
  Synthetic oligonucleotide
attgtcggtcggagcatggcattagacaga

SEQ ID NO: 465869 - DNA, 30 bp, Artificial Sequence
  Synthetic oligonucleotide
ttcagttaggcgccagtaaaagccgacaga

SEQ ID NO: 465870 - DNA, 30 bp, Artificial Sequence
  Synthetic oligonucleotide
tctaactttctgcggcagtacgtcgacaga

SEQ ID NO: 465871 - DNA, 30 bp, Artificial Sequence
  Synthetic oligonucleotide
tacgagcatcaggtggtgccaacggacaga

SEQ ID NO: 465872 - DNA, 30 bp, Artificial Sequence
  Synthetic oligonucleotide
ccccaagaaacgtttcttcggggggacaga

SEQ ID NO: 465873 - DNA, 30 bp, Artificial Sequence
  Synthetic oligonucleotide
ctgtcaagaatcttgggtatatttgacaga

SEQ ID NO: 465874 - DNA, 30 bp, Artificial Sequence
  Synthetic oligonucleotide
atagtttcacgttttgggcggtactacaga

SEQ ID NO: 465875 - DNA, 30 bp, Artificial Sequence
  Synthetic oligonucleotide
ccggtggggcatctcaaaaagtcttacaga

SEQ ID NO: 465876 - DNA, 30 bp, Artificial Sequence
  Synthetic oligonucleotide
ctagctattatatctggtcattgaaccaga

SEQ ID NO: 465877 - DNA, 30 bp, Artificial Sequence
  Synthetic oligonucleotide
gtatttatatggggggtattccagcccaga

SEQ ID NO: 465878 - DNA, 30 bp, Artificial Sequence
  Synthetic oligonucleotide
acagggcgcgactctagacaagcgcccaga

SEQ ID NO: 465879 - DNA, 30 bp, Artificial Sequence
  Synthetic oligonucleotide
ggtgaaatctgggacaactctatgcccaga

SEQ ID NO: 465880 - DNA, 30 bp, Artificial Sequence
  Synthetic oligonucleotide
ttccactacatcatcatgagcaacgccaga

SEQ ID NO: 465881 - DNA, 30 bp, Artificial Sequence
  Synthetic oligonucleotide
aggtgccagggttttcgggggcgggccaga

SEQ ID NO: 465882 - DNA, 30 bp, Artificial Sequence
  Synthetic oligonucleotide
ctgcgcttggggtttatgtgttcgtccaga

SEQ ID NO: 465883 - DNA, 30 bp, Artificial Sequence
  Synthetic oligonucleotide
ggggctcccctttctattcggcgaagcaga

SEQ ID NO: 465884 - DNA, 30 bp, Artificial Sequence
  Synthetic oligonucleotide
tgacagggtatgacgatcatcctcagcaga

SEQ ID NO: 465885 - DNA, 30 bp, Artificial Sequence
  Synthetic oligonucleotide
taagcccctgattaaggggtgctcagcaga

SEQ ID NO: 465886 - DNA, 30 bp, Artificial Sequence
  Synthetic oligonucleotide
tgtcgcagacacaaactgggtgtcagcaga

SEQ ID NO: 465887 - DNA, 30 bp, Artificial Sequence
  Synthetic oligonucleotide
gcatatggtgattaacgcaagttcagcaga

SEQ ID NO: 465888 - DNA, 30 bp, Artificial Sequence
  Synthetic oligonucleotide
catacttactgctatgttgtgcggagcaga

SEQ ID NO: 465889 - DNA, 30 bp, Artificial Sequence
  Synthetic oligonucleotide
acagcgacatactaggaggaggatagcaga

SEQ ID NO: 465890 - DNA, 30 bp, Artificial Sequence
  Synthetic oligonucleotide
acccgatttaacatcctttcaattagcaga

SEQ ID NO: 465891 - DNA, 30 bp, Artificial Sequence
  Synthetic oligonucleotide
gcagcttccaaaaattagtggaaacgcaga

SEQ ID NO: 465892 - DNA, 30 bp, Artificial Sequence
  Synthetic oligonucleotide
tatatagaagcgagatccgctgcacgcaga

SEQ ID NO: 465893 - DNA, 30 bp, Artificial Sequence
  Synthetic oligonucleotide
gaatacccgtgataacaactcggacgcaga

SEQ ID NO: 465894 - DNA, 30 bp, Artificial Sequence
  Synthetic oligonucleotide
tgatacctctgaggtgatcgatgacgcaga

SEQ ID NO: 465895 - DNA, 30 bp, Artificial Sequence
  Synthetic oligonucleotide
cgttgtcgacttttttgctgtctacgcaga

SEQ ID NO: 465896 - DNA, 30 bp, Artificial Sequence
  Synthetic oligonucleotide
cagccactttgcagtacgtttgggcgcaga

SEQ ID NO: 465897 - DNA, 30 bp, Artificial Sequence
  Synthetic oligonucleotide
catacttaattgtacgtaggatggcgcaga

SEQ ID NO: 465898 - DNA, 30 bp, Artificial Sequence
  Synthetic oligonucleotide
acagtcgcgttgtagcagcaaacaggcaga

SEQ ID NO: 465899 - DNA, 30 bp, Artificial Sequence
  Synthetic oligonucleotide
tatatcgatcgtagccgcttcttaggcaga

SEQ ID NO: 465900 - DNA, 30 bp, Artificial Sequence
  Synthetic oligonucleotide
tcggacgtgcgttgatctaactcgggcaga

SEQ ID NO: 465901 - DNA, 30 bp, Artificial Sequence
  Synthetic oligonucleotide
ccatcacgcagtcgaattgagaggggcaga

SEQ ID NO: 465902 - DNA, 30 bp, Artificial Sequence
  Synthetic oligonucleotide
cctcacggcagcttgtccatcactggcaga

SEQ ID NO: 465903 - DNA, 30 bp, Artificial Sequence
  Synthetic oligonucleotide
acttacataatgcggatatacggtggcaga

SEQ ID NO: 465904 - DNA, 30 bp, Artificial Sequence
  Synthetic oligonucleotide
gcagcggtcgtctacgtacccgttggcaga

SEQ ID NO: 465905 - DNA, 30 bp, Artificial Sequence
  Synthetic oligonucleotide
accgcaacgttggccgagaggaaatgcaga

SEQ ID NO: 465906 - DNA, 30 bp, Artificial Sequence
  Synthetic oligonucleotide
cgttttcctcccattcagcgccaatgcaga

SEQ ID NO: 465907 - DNA, 30 bp, Artificial Sequence
  Synthetic oligonucleotide
cgcgggttctcgatgcgtggcacatgcaga

SEQ ID NO: 465908 - DNA, 30 bp, Artificial Sequence
  Synthetic oligonucleotide
ctcaacattgtcccctatagtgcatgcaga

SEQ ID NO: 465909 - DNA, 30 bp, Artificial Sequence
  Synthetic oligonucleotide
gatctgctcctgggtaaaatgagatgcaga

SEQ ID NO: 465910 - DNA, 30 bp, Artificial Sequence
  Synthetic oligonucleotide
cccggtaactctgataattacgcgtgcaga

SEQ ID NO: 465911 - DNA, 30 bp, Artificial Sequence
  Synthetic oligonucleotide
tagtatacacctttcgtttcttgttgcaga

SEQ ID NO: 465912 - DNA, 30 bp, Artificial Sequence
  Synthetic oligonucleotide
aattatataggcgcgatgctacccatcaga

SEQ ID NO: 465913 - DNA, 30 bp, Artificial Sequence
  Synthetic oligonucleotide
gtgaccatacaattggagaatatgatcaga

SEQ ID NO: 465914 - DNA, 30 bp, Artificial Sequence
  Synthetic oligonucleotide
ggctctctggcttgactcctaaaactcaga

SEQ ID NO: 465915 - DNA, 30 bp, Artificial Sequence
  Synthetic oligonucleotide
gcccggtctcttggctggaaggaactcaga

SEQ ID NO: 465916 - DNA, 30 bp, Artificial Sequence
  Synthetic oligonucleotide
gaactcacatttgaagaagggttgctcaga

SEQ ID NO: 465917 - DNA, 30 bp, Artificial Sequence
  Synthetic oligonucleotide
tttaataggctaggaaaaataactctcaga

SEQ ID NO: 465918 - DNA, 30 bp, Artificial Sequence
  Synthetic oligonucleotide
aaggatatttgccgcccaccgtttctcaga

SEQ ID NO: 465919 - DNA, 30 bp, Artificial Sequence
  Synthetic oligonucleotide
gctccccgtattcacctcggtggggtcaga

SEQ ID NO: 465920 - DNA, 30 bp, Artificial Sequence
  Synthetic oligonucleotide
agcaccatctagtctgactgagtggtcaga

SEQ ID NO: 465921 - DNA, 30 bp, Artificial Sequence
  Synthetic oligonucleotide
gttaaaactgattctccgctagcattcaga

SEQ ID NO: 465922 - DNA, 30 bp, Artificial Sequence
  Synthetic oligonucleotide
tttactaagtagtggcgcttaagcttcaga

SEQ ID NO: 465923 - DNA, 30 bp, Artificial Sequence
  Synthetic oligonucleotide
gggaatcctctaggggccttaaatttcaga

SEQ ID NO: 465924 - DNA, 30 bp, Artificial Sequence
  Synthetic oligonucleotide
tacttcttgctatcgcattaggctttcaga

SEQ ID NO: 465925 - DNA, 30 bp, Artificial Sequence
  Synthetic oligonucleotide
ttttttcacttttatatccaaggtttcaga

SEQ ID NO: 465926 - DNA, 30 bp, Artificial Sequence
  Synthetic oligonucleotide
atactcggtgaaagatgtttttgaaagaga

SEQ ID NO: 465927 - DNA, 30 bp, Artificial Sequence
  Synthetic oligonucleotide
accaacgcgctcacattccaactaaagaga

SEQ ID NO: 465928 - DNA, 30 bp, Artificial Sequence
  Synthetic oligonucleotide
gttcgccaatatgcaagcgactccaagaga

SEQ ID NO: 465929 - DNA, 30 bp, Artificial Sequence
  Synthetic oligonucleotide
atgtatcttgctccgtctggcggcaagaga

SEQ ID NO: 465930 - DNA, 30 bp, Artificial Sequence
  Synthetic oligonucleotide
ccactcggataggcttcatcccgtaagaga

SEQ ID NO: 465931 - DNA, 30 bp, Artificial Sequence
  Synthetic oligonucleotide
gctgaaaacatctatccagcaaaacagaga

SEQ ID NO: 465932 - DNA, 30 bp, Artificial Sequence
  Synthetic oligonucleotide
gtcgcagcatttgagtgcgagcaacagaga

SEQ ID NO: 465933 - DNA, 30 bp, Artificial Sequence
  Synthetic oligonucleotide
gcagccacccaggcaagtgagcgatagaga

SEQ ID NO: 465934 - DNA, 30 bp, Artificial Sequence
  Synthetic oligonucleotide
tgctcttggcgaagtctcatttactagaga

SEQ ID NO: 465935 - DNA, 30 bp, Artificial Sequence
  Synthetic oligonucleotide
ttggcagatattttggattggttctagaga

SEQ ID NO: 465936 - DNA, 30 bp, Artificial Sequence
  Synthetic oligonucleotide
ggagtttctgcctgcagcatagggtagaga

SEQ ID NO: 465937 - DNA, 30 bp, Artificial Sequence
  Synthetic oligonucleotide
gcatcgtgtcctgtataattgaacacgaga

SEQ ID NO: 465938 - DNA, 29 bp, Artificial Sequence
  Synthetic oligonucleotide
acccgcggatatatttattagtcacgaga

SEQ ID NO: 465939 - DNA, 30 bp, Artificial Sequence
  Synthetic oligonucleotide
ccctagggaccagcaccgacggagacgaga

SEQ ID NO: 465940 - DNA, 30 bp, Artificial Sequence
  Synthetic oligonucleotide
tgggtccttgcatagcccagtaggacgaga

SEQ ID NO: 465941 - DNA, 31 bp, Artificial Sequence
  Synthetic oligonucleotide
ggagaggtagcaagctgcaatacttacgaga

SEQ ID NO: 465942 - DNA, 30 bp, Artificial Sequence
  Synthetic oligonucleotide
tatcgacataagggatttctaagaccgaga

SEQ ID NO: 465943 - DNA, 30 bp, Artificial Sequence
  Synthetic oligonucleotide
cacaggtcgaacaatggcttcggcccgaga

SEQ ID NO: 465944 - DNA, 30 bp, Artificial Sequence
  Synthetic oligonucleotide
aaatgtgccaaaaacacagatatcccgaga

SEQ ID NO: 465945 - DNA, 30 bp, Artificial Sequence
  Synthetic oligonucleotide
actgtgaatttcagtctgtgtcttccgaga

SEQ ID NO: 465946 - DNA, 30 bp, Artificial Sequence
  Synthetic oligonucleotide
tcatatcgcttaagatgatagtaagcgaga

SEQ ID NO: 465947 - DNA, 30 bp, Artificial Sequence
  Synthetic oligonucleotide
aatgtagttacaggcatgtccaacgcgaga

SEQ ID NO: 465948 - DNA, 30 bp, Artificial Sequence
  Synthetic oligonucleotide
agtagcgccggagattttaacgccgcgaga

SEQ ID NO: 465949 - DNA, 30 bp, Artificial Sequence
  Synthetic oligonucleotide
acataacatctagtaggaagtttcgcgaga

SEQ ID NO: 465950 - DNA, 30 bp, Artificial Sequence
  Synthetic oligonucleotide
agatgtaccaagactagcaaaggggcgaga

SEQ ID NO: 465951 - DNA, 30 bp, Artificial Sequence
  Synthetic oligonucleotide
ccattatactcggattttatcaatgcgaga

SEQ ID NO: 465952 - DNA, 30 bp, Artificial Sequence
  Synthetic oligonucleotide
ttctgttgactgctatttgtatatgcgaga

SEQ ID NO: 465953 - DNA, 30 bp, Artificial Sequence
  Synthetic oligonucleotide
tatgcaattggtctcccttaaatatcgaga

SEQ ID NO: 465954 - DNA, 30 bp, Artificial Sequence
  Synthetic oligonucleotide
gctgtctcgatcgtctcatgcatatcgaga

SEQ ID NO: 465955 - DNA, 30 bp, Artificial Sequence
  Synthetic oligonucleotide
acaacgatcgttgcttctaagccctcgaga

SEQ ID NO: 465956 - DNA, 30 bp, Artificial Sequence
  Synthetic oligonucleotide
cttttagaggctgttttgccggagtcgaga

SEQ ID NO: 465957 - DNA, 30 bp, Artificial Sequence
  Synthetic oligonucleotide
aatcggcgatcgtttacgttagcgtcgaga

SEQ ID NO: 465958 - DNA, 30 bp, Artificial Sequence
  Synthetic oligonucleotide
atccatccctggccgctttatatgtcgaga

SEQ ID NO: 465959 - DNA, 30 bp, Artificial Sequence
  Synthetic oligonucleotide
cgccggtcgttacgtgctaagcaaaggaga

SEQ ID NO: 465960 - DNA, 30 bp, Artificial Sequence
  Synthetic oligonucleotide
cttttgattaatgtcagagcagccaggaga

SEQ ID NO: 465961 - DNA, 30 bp, Artificial Sequence
  Synthetic oligonucleotide
tatttcgacctcgatttacgaagcaggaga

SEQ ID NO: 465962 - DNA, 30 bp, Artificial Sequence
  Synthetic oligonucleotide
gactagacggaggcacggcgcggcaggaga

SEQ ID NO: 465963 - DNA, 30 bp, Artificial Sequence
  Synthetic oligonucleotide
tgctctcctcgaagatattgagggaggaga

SEQ ID NO: 465964 - DNA, 30 bp, Artificial Sequence
  Synthetic oligonucleotide
tcgccgccacggattacgaggcaacggaga

SEQ ID NO: 465965 - DNA, 30 bp, Artificial Sequence
  Synthetic oligonucleotide
cagggcacgcctcgagtaatgcgacggaga

SEQ ID NO: 465966 - DNA, 30 bp, Artificial Sequence
  Synthetic oligonucleotide
ctgtctcgcatgtcgcggctgaagcggaga

SEQ ID NO: 465967 - DNA, 30 bp, Artificial Sequence
  Synthetic oligonucleotide
ctgatgtcattgcagactcgtatgcggaga

SEQ ID NO: 465968 - DNA, 30 bp, Artificial Sequence
  Synthetic oligonucleotide
gtgctgtagcttcacaccccttatcggaga

SEQ ID NO: 465969 - DNA, 30 bp, Artificial Sequence
  Synthetic oligonucleotide
cgtacagatccgatcgggtttggtcggaga

SEQ ID NO: 465970 - DNA, 30 bp, Artificial Sequence
  Synthetic oligonucleotide
tacctcggaacggtagacacgtccgggaga

SEQ ID NO: 465971 - DNA, 30 bp, Artificial Sequence
  Synthetic oligonucleotide
aaaagataatgaggcagccaaacggggaga

SEQ ID NO: 465972 - DNA, 30 bp, Artificial Sequence
  Synthetic oligonucleotide
atggtccaaggacgggctcgagctgggaga

SEQ ID NO: 465973 - DNA, 30 bp, Artificial Sequence
  Synthetic oligonucleotide
aagctcaatgtgggatcaaagccatggaga

SEQ ID NO: 465974 - DNA, 30 bp, Artificial Sequence
  Synthetic oligonucleotide
gcatggacgctcgtcagctctccgtggaga

SEQ ID NO: 465975 - DNA, 30 bp, Artificial Sequence
  Synthetic oligonucleotide
gggaaatacaggcgcaggtttcggtggaga

SEQ ID NO: 465976 - DNA, 30 bp, Artificial Sequence
  Synthetic oligonucleotide
taagtttttatgtgagcccggggttggaga

SEQ ID NO: 465977 - DNA, 30 bp, Artificial Sequence
  Synthetic oligonucleotide
tatcggagtttatttctacgataaatgaga

SEQ ID NO: 465978 - DNA, 30 bp, Artificial Sequence
  Synthetic oligonucleotide
aatcctgtgattttggcaggggccatgaga

SEQ ID NO: 465979 - DNA, 30 bp, Artificial Sequence
  Synthetic oligonucleotide
tactcgttcagacatcctgtggtcatgaga

SEQ ID NO: 465980 - DNA, 30 bp, Artificial Sequence
  Synthetic oligonucleotide
gattagtgtcgtgcatatctcaggatgaga

SEQ ID NO: 465981 - DNA, 30 bp, Artificial Sequence
  Synthetic oligonucleotide
tgtgtccagtcgggttgcatcacactgaga

SEQ ID NO: 465982 - DNA, 30 bp, Artificial Sequence
  Synthetic oligonucleotide
agaaccgtgcgttcagaggtttatctgaga

SEQ ID NO: 465983 - DNA, 30 bp, Artificial Sequence
  Synthetic oligonucleotide
ctctgagtcctaggtagctggactctgaga

SEQ ID NO: 465984 - DNA, 30 bp, Artificial Sequence
  Synthetic oligonucleotide
gggccacgtatcggtgcttgcgaagtgaga

SEQ ID NO: 465985 - DNA, 30 bp, Artificial Sequence
  Synthetic oligonucleotide
aattcaccagggtataaacgctaagtgaga

SEQ ID NO: 465986 - DNA, 30 bp, Artificial Sequence
  Synthetic oligonucleotide
aacctgatcattgcaggtctcacagtgaga

SEQ ID NO: 465987 - DNA, 30 bp, Artificial Sequence
  Synthetic oligonucleotide
ggttcaaaaacgtcgctgagtagcgtgaga

SEQ ID NO: 465988 - DNA, 30 bp, Artificial Sequence
  Synthetic oligonucleotide
cactacggacagccgctagtactggtgaga

SEQ ID NO: 465989 - DNA, 30 bp, Artificial Sequence
  Synthetic oligonucleotide
atatgtatgcgactggcattgtatgtgaga

SEQ ID NO: 465990 - DNA, 30 bp, Artificial Sequence
  Synthetic oligonucleotide
ttgttataggcgcgcaaatatactgtgaga

SEQ ID NO: 465991 - DNA, 30 bp, Artificial Sequence
  Synthetic oligonucleotide
atccgtgtgcgacgcggtaacggtgtgaga

SEQ ID NO: 465992 - DNA, 30 bp, Artificial Sequence
  Synthetic oligonucleotide
taaatttggcaatatctgactatattgaga

SEQ ID NO: 465993 - DNA, 30 bp, Artificial Sequence
  Synthetic oligonucleotide
gatcattattatcgcagtaagtacttgaga

SEQ ID NO: 465994 - DNA, 30 bp, Artificial Sequence
  Synthetic oligonucleotide
tcacctagaacgttttaaagcatcttgaga

SEQ ID NO: 465995 - DNA, 30 bp, Artificial Sequence
  Synthetic oligonucleotide
attcgggggaaacctgggacatggttgaga

SEQ ID NO: 465996 - DNA, 30 bp, Artificial Sequence
  Synthetic oligonucleotide
aattgtatgattcctctccaggatttgaga

SEQ ID NO: 465997 - DNA, 30 bp, Artificial Sequence
  Synthetic oligonucleotide
tggcatttaccataccgcgcctgtttgaga

SEQ ID NO: 465998 - DNA, 30 bp, Artificial Sequence
  Synthetic oligonucleotide
gaaatttaactgcttcgatcgaaaaataga

SEQ ID NO: 465999 - DNA, 30 bp, Artificial Sequence
  Synthetic oligonucleotide
tatactgggcttatgcaagaggcaaataga

SEQ ID NO: 466000 - DNA, 30 bp, Artificial Sequence
  Synthetic oligonucleotide
caaccgggtgtttgtggcatcagaaataga

SEQ ID NO: 466001 - DNA, 30 bp, Artificial Sequence
  Synthetic oligonucleotide
aagaccactaaactctcacttataaataga

SEQ ID NO: 466002 - DNA, 30 bp, Artificial Sequence
  Synthetic oligonucleotide
tactacatctaacggagtatcgagaataga

SEQ ID NO: 466003 - DNA, 30 bp, Artificial Sequence
  Synthetic oligonucleotide
gccctaccacttaaatagatttataataga

SEQ ID NO: 466004 - DNA, 30 bp, Artificial Sequence
  Synthetic oligonucleotide
gatacgttcgcaggcttatattctaataga

SEQ ID NO: 466005 - DNA, 30 bp, Artificial Sequence
  Synthetic oligonucleotide
gtacctctttcgtaaccactttgtaataga

SEQ ID NO: 466006 - DNA, 30 bp, Artificial Sequence
  Synthetic oligonucleotide
gacactctatgccttggtttggttaataga

SEQ ID NO: 466007 - DNA, 29 bp, Artificial Sequence
  Synthetic oligonucleotide
catcgacccgaagtactcaagaacataga

SEQ ID NO: 466008 - DNA, 30 bp, Artificial Sequence
  Synthetic oligonucleotide
gaatcgaatggtggacgcccctagcataga

SEQ ID NO: 466009 - DNA, 30 bp, Artificial Sequence
  Synthetic oligonucleotide
ttggcatctaagatgtgggcgacgcataga

SEQ ID NO: 466010 - DNA, 30 bp, Artificial Sequence
  Synthetic oligonucleotide
gggtcggcatagattggagagtgtcataga

SEQ ID NO: 466011 - DNA, 30 bp, Artificial Sequence
  Synthetic oligonucleotide
atattcaaggacgcacgtccccttcataga

SEQ ID NO: 466012 - DNA, 30 bp, Artificial Sequence
  Synthetic oligonucleotide
gtctaactcattcccacgtatgttcataga

SEQ ID NO: 466013 - DNA, 30 bp, Artificial Sequence
  Synthetic oligonucleotide
atggactcccagaattttaattcagataga

SEQ ID NO: 466014 - DNA, 30 bp, Artificial Sequence
  Synthetic oligonucleotide
taacagtctaacagcagcaaaggagataga

SEQ ID NO: 466015 - DNA, 30 bp, Artificial Sequence
  Synthetic oligonucleotide
actttaggctcagtgcgaagacccgataga

SEQ ID NO: 466016 - DNA, 30 bp, Artificial Sequence
  Synthetic oligonucleotide
ggggtggacgcgctggtatcaagcgataga

SEQ ID NO: 466017 - DNA, 30 bp, Artificial Sequence
  Synthetic oligonucleotide
tgcgcaaaatctaatccaactgtggataga

SEQ ID NO: 466018 - DNA, 30 bp, Artificial Sequence
  Synthetic oligonucleotide
atgccatcggaatatttaggatctgataga

SEQ ID NO: 466019 - DNA, 30 bp, Artificial Sequence
  Synthetic oligonucleotide
tctattttcgtgagatagagaaaatataga

SEQ ID NO: 466020 - DNA, 30 bp, Artificial Sequence
  Synthetic oligonucleotide
acgctcgtatgtcgcaattagaactataga

SEQ ID NO: 466021 - DNA, 30 bp, Artificial Sequence
  Synthetic oligonucleotide
ggagtaactgttatcctggaacagtataga

SEQ ID NO: 466022 - DNA, 29 bp, Artificial Sequence
  Synthetic oligonucleotide
tttgttgtgtaggtttactcccgtataga

SEQ ID NO: 466023 - DNA, 29 bp, Artificial Sequence
  Synthetic oligonucleotide
agtattagtttataactgcggggtataga

SEQ ID NO: 466024 - DNA, 30 bp, Artificial Sequence
  Synthetic oligonucleotide
aaacagagatgagcccttcactattataga

SEQ ID NO: 466025 - DNA, 30 bp, Artificial Sequence
  Synthetic oligonucleotide
tcctgtgtgagagttcactcgggttataga

SEQ ID NO: 466026 - DNA, 30 bp, Artificial Sequence
  Synthetic oligonucleotide
actctactggcatctctagatatgactaga

SEQ ID NO: 466027 - DNA, 30 bp, Artificial Sequence
  Synthetic oligonucleotide
cacatctctactaacgtaagtcttactaga

SEQ ID NO: 466028 - DNA, 28 bp, Artificial Sequence
  Synthetic oligonucleotide
ataggtttctttgttacgctgacctaga

SEQ ID NO: 466029 - DNA, 30 bp, Artificial Sequence
  Synthetic oligonucleotide
catcgatgctatctgctcagtgcccctaga

SEQ ID NO: 466030 - DNA, 30 bp, Artificial Sequence
  Synthetic oligonucleotide
cgtcggcagtataggggtgacctccctaga

SEQ ID NO: 466031 - DNA, 30 bp, Artificial Sequence
  Synthetic oligonucleotide
cctcttcgaggacagggctctgtccctaga

SEQ ID NO: 466032 - DNA, 30 bp, Artificial Sequence
  Synthetic oligonucleotide
tagtacctggtcggcctttagcagcctaga

SEQ ID NO: 466033 - DNA, 30 bp, Artificial Sequence
  Synthetic oligonucleotide
gcttcctggtaatgcttacaggaagctaga

SEQ ID NO: 466034 - DNA, 30 bp, Artificial Sequence
  Synthetic oligonucleotide
ttgtgtcagcaaacctcgcggcgagctaga

SEQ ID NO: 466035 - DNA, 30 bp, Artificial Sequence
  Synthetic oligonucleotide
ttagtgtctgtaagtcatttacacgctaga

SEQ ID NO: 466036 - DNA, 30 bp, Artificial Sequence
  Synthetic oligonucleotide
agtcaattttgtcatgtcctgtacgctaga

SEQ ID NO: 466037 - DNA, 30 bp, Artificial Sequence
  Synthetic oligonucleotide
ttcccggtcactgcccgttagttcgctaga

SEQ ID NO: 466038 - DNA, 30 bp, Artificial Sequence
  Synthetic oligonucleotide
acaacgtccaggaggcagcaccaggctaga

SEQ ID NO: 466039 - DNA, 30 bp, Artificial Sequence
  Synthetic oligonucleotide
cgttgacagcacataagttcttctgctaga

SEQ ID NO: 466040 - DNA, 30 bp, Artificial Sequence
  Synthetic oligonucleotide
gccgtggcattgcctttggttcaatctaga

SEQ ID NO: 466041 - DNA, 30 bp, Artificial Sequence
  Synthetic oligonucleotide
tgtcacgattcgggttttccgtcatctaga

SEQ ID NO: 466042 - DNA, 30 bp, Artificial Sequence
  Synthetic oligonucleotide
tccctgtacgtccagcaaataggatctaga

SEQ ID NO: 466043 - DNA, 30 bp, Artificial Sequence
  Synthetic oligonucleotide
gttagagtccttgataataggaactctaga

SEQ ID NO: 466044 - DNA, 30 bp, Artificial Sequence
  Synthetic oligonucleotide
tccataagttggccaagacgcgtctctaga

SEQ ID NO: 466045 - DNA, 30 bp, Artificial Sequence
  Synthetic oligonucleotide
tttcgcggtccaagatgatttgggtctaga

SEQ ID NO: 466046 - DNA, 30 bp, Artificial Sequence
  Synthetic oligonucleotide
tcagagctacgcaagaataatttgtctaga

SEQ ID NO: 466047 - DNA, 30 bp, Artificial Sequence
  Synthetic oligonucleotide
cactattctcgtatcccgtagggttctaga

SEQ ID NO: 466048 - DNA, 30 bp, Artificial Sequence
  Synthetic oligonucleotide
atttcataccgtgaaatagcttgaagtaga

SEQ ID NO: 466049 - DNA, 30 bp, Artificial Sequence
  Synthetic oligonucleotide
ggtcgagccggtcgacatatctccagtaga

SEQ ID NO: 466050 - DNA, 30 bp, Artificial Sequence
  Synthetic oligonucleotide
ttcttttttaaaaaataggggtgcagtaga

SEQ ID NO: 466051 - DNA, 30 bp, Artificial Sequence
  Synthetic oligonucleotide
accccctaactcactggaggcctcagtaga

SEQ ID NO: 466052 - DNA, 30 bp, Artificial Sequence
  Synthetic oligonucleotide
ctaccaaacggatggatcatcactagtaga

SEQ ID NO: 466053 - DNA, 30 bp, Artificial Sequence
  Synthetic oligonucleotide
ggaatgtaacgttagaattaccctagtaga

SEQ ID NO: 466054 - DNA, 30 bp, Artificial Sequence
  Synthetic oligonucleotide
ttgttatgctgcttgtcgatatcacgtaga

SEQ ID NO: 466055 - DNA, 30 bp, Artificial Sequence
  Synthetic oligonucleotide
gagattaaagggcccagatacttacgtaga

SEQ ID NO: 466056 - DNA, 30 bp, Artificial Sequence
  Synthetic oligonucleotide
taggccatgaagtacatttaacaccgtaga

SEQ ID NO: 466057 - DNA, 30 bp, Artificial Sequence
  Synthetic oligonucleotide
gcgacccttttggcaagcccctcccgtaga

SEQ ID NO: 466058 - DNA, 30 bp, Artificial Sequence
  Synthetic oligonucleotide
attagtcgggacttgcgcactttgcgtaga

SEQ ID NO: 466059 - DNA, 30 bp, Artificial Sequence
  Synthetic oligonucleotide
ttcaacgggattattccttcgaacggtaga

SEQ ID NO: 466060 - DNA, 30 bp, Artificial Sequence
  Synthetic oligonucleotide
tcatgcgcttcctgtacttccaagggtaga

SEQ ID NO: 466061 - DNA, 30 bp, Artificial Sequence
  Synthetic oligonucleotide
acgctacactatgcgttcatggggggtaga

SEQ ID NO: 466062 - DNA, 30 bp, Artificial Sequence
  Synthetic oligonucleotide
ttagtcgctttagcgcttgagcatggtaga

SEQ ID NO: 466063 - DNA, 30 bp, Artificial Sequence
  Synthetic oligonucleotide
ggggagtaggaaacgcagttccttggtaga

SEQ ID NO: 466064 - DNA, 30 bp, Artificial Sequence
  Synthetic oligonucleotide
actctaacggaacgatgaggctttggtaga

SEQ ID NO: 466065 - DNA, 30 bp, Artificial Sequence
  Synthetic oligonucleotide
aatctatagtaaaccgattgatcctgtaga

SEQ ID NO: 466066 - DNA, 30 bp, Artificial Sequence
  Synthetic oligonucleotide
ttaattaataagactactccgtcctgtaga

SEQ ID NO: 466067 - DNA, 30 bp, Artificial Sequence
  Synthetic oligonucleotide
actttgcaggttgaagtgatacgctgtaga

SEQ ID NO: 466068 - DNA, 30 bp, Artificial Sequence
  Synthetic oligonucleotide
tctcctcatgtgcgaatttatctctgtaga

SEQ ID NO: 466069 - DNA, 30 bp, Artificial Sequence
  Synthetic oligonucleotide
tctgttggctcttatctctaatattgtaga

SEQ ID NO: 466070 - DNA, 30 bp, Artificial Sequence
  Synthetic oligonucleotide
gctctatgcgttcattaggtgacttgtaga

SEQ ID NO: 466071 - DNA, 30 bp, Artificial Sequence
  Synthetic oligonucleotide
gataatgacgccgcaatcccaatttgtaga

SEQ ID NO: 466072 - DNA, 30 bp, Artificial Sequence
  Synthetic oligonucleotide
tatcaagggagcacgtagctaaaaattaga

SEQ ID NO: 466073 - DNA, 30 bp, Artificial Sequence
  Synthetic oligonucleotide
taaccttcggagcactgcgcgcgaattaga

SEQ ID NO: 466074 - DNA, 30 bp, Artificial Sequence
  Synthetic oligonucleotide
tttttcaaatgcaattgcagtgatattaga

SEQ ID NO: 466075 - DNA, 30 bp, Artificial Sequence
  Synthetic oligonucleotide
ctttttaataattttacgaatgctattaga

SEQ ID NO: 466076 - DNA, 30 bp, Artificial Sequence
  Synthetic oligonucleotide
gccggtaccgcacacgtacctcttattaga

SEQ ID NO: 466077 - DNA, 30 bp, Artificial Sequence
  Synthetic oligonucleotide
gagtattaagctcagacggaatcccttaga

SEQ ID NO: 466078 - DNA, 30 bp, Artificial Sequence
  Synthetic oligonucleotide
gcaattaagtagagaaagataagccttaga

SEQ ID NO: 466079 - DNA, 30 bp, Artificial Sequence
  Synthetic oligonucleotide
attaatgcttagacgtgggcccggcttaga

SEQ ID NO: 466080 - DNA, 30 bp, Artificial Sequence
  Synthetic oligonucleotide
gagtcgagagggaaatgaacgggtcttaga

SEQ ID NO: 466081 - DNA, 30 bp, Artificial Sequence
  Synthetic oligonucleotide
aatacttgaagaacagggacgtgtcttaga

SEQ ID NO: 466082 - DNA, 30 bp, Artificial Sequence
  Synthetic oligonucleotide
ttaagttgctattaagatcactttcttaga

SEQ ID NO: 466083 - DNA, 30 bp, Artificial Sequence
  Synthetic oligonucleotide
cggaattaaagcggccacttttttcttaga

SEQ ID NO: 466084 - DNA, 30 bp, Artificial Sequence
  Synthetic oligonucleotide
gtcagtacaacattttcttgttaagttaga

SEQ ID NO: 466085 - DNA, 30 bp, Artificial Sequence
  Synthetic oligonucleotide
ggttgtatttcgttacttcaccaggttaga

SEQ ID NO: 466086 - DNA, 30 bp, Artificial Sequence
  Synthetic oligonucleotide
ctgcattcagtggtcgcgatataggttaga

SEQ ID NO: 466087 - DNA, 30 bp, Artificial Sequence
  Synthetic oligonucleotide
agtgttgtaagtggcagcgctgatgttaga

SEQ ID NO: 466088 - DNA, 30 bp, Artificial Sequence
  Synthetic oligonucleotide
atgtctgtcgagagctaaactcgtgttaga

SEQ ID NO: 466089 - DNA, 30 bp, Artificial Sequence
  Synthetic oligonucleotide
ggccactggcccccacggacctgtgttaga

SEQ ID NO: 466090 - DNA, 30 bp, Artificial Sequence
  Synthetic oligonucleotide
cacaacagacggcacgacatctgtgttaga

SEQ ID NO: 466091 - DNA, 30 bp, Artificial Sequence
  Synthetic oligonucleotide
gttagggaccgggacgctgtgtgtgttaga

SEQ ID NO: 466092 - DNA, 30 bp, Artificial Sequence
  Synthetic oligonucleotide
aattcataacaattgatacttgaatttaga

SEQ ID NO: 466093 - DNA, 30 bp, Artificial Sequence
  Synthetic oligonucleotide
aatccaccgtcgattatacgagcatttaga

SEQ ID NO: 466094 - DNA, 30 bp, Artificial Sequence
  Synthetic oligonucleotide
aatttgtgcattccgatgtgatactttaga

SEQ ID NO: 466095 - DNA, 30 bp, Artificial Sequence
  Synthetic oligonucleotide
caaggtatactgcgttggtatctctttaga

SEQ ID NO: 466096 - DNA, 30 bp, Artificial Sequence
  Synthetic oligonucleotide
cccatggccgcagaaaggcatacgtttaga

SEQ ID NO: 466097 - DNA, 30 bp, Artificial Sequence
  Synthetic oligonucleotide
aattgtttggcatatttggtcatgtttaga

SEQ ID NO: 466098 - DNA, 30 bp, Artificial Sequence
  Synthetic oligonucleotide
aatctagacaccattagaatccattttaga

SEQ ID NO: 466099 - DNA, 30 bp, Artificial Sequence
  Synthetic oligonucleotide
tgcatgtgggttgactgactaaaaaaacga

SEQ ID NO: 466100 - DNA, 30 bp, Artificial Sequence
  Synthetic oligonucleotide
ttctttcttttgcgacacacgcagaaacga

SEQ ID NO: 466101 - DNA, 30 bp, Artificial Sequence
  Synthetic oligonucleotide
aatcggaataggatgtacttgaggaaacga

SEQ ID NO: 466102 - DNA, 30 bp, Artificial Sequence
  Synthetic oligonucleotide
actatgtattcaagcacggctgctaaacga

SEQ ID NO: 466103 - DNA, 30 bp, Artificial Sequence
  Synthetic oligonucleotide
gtagccttgttacatactggatgtaaacga

SEQ ID NO: 466104 - DNA, 35 bp, Artificial Sequence
  Synthetic oligonucleotide
cgaaatgcctctttattcgcattcgcttacaacga

SEQ ID NO: 466105 - DNA, 30 bp, Artificial Sequence
  Synthetic oligonucleotide
gagccaacaggtatggaaaattcgcaacga

SEQ ID NO: 466106 - DNA, 30 bp, Artificial Sequence
  Synthetic oligonucleotide
gcccgatcaagcctggtctactgtcaacga

SEQ ID NO: 466107 - DNA, 30 bp, Artificial Sequence
  Synthetic oligonucleotide
agtaacccacctgttaggtatattcaacga

SEQ ID NO: 466108 - DNA, 30 bp, Artificial Sequence
  Synthetic oligonucleotide
tcaagtttaaaaggttctctctaagaacga

SEQ ID NO: 466109 - DNA, 30 bp, Artificial Sequence
  Synthetic oligonucleotide
atatgtagctcagttttacatccagaacga

SEQ ID NO: 466110 - DNA, 30 bp, Artificial Sequence
  Synthetic oligonucleotide
acatttggcagtcaggccagccgagaacga

SEQ ID NO: 466111 - DNA, 30 bp, Artificial Sequence
  Synthetic oligonucleotide
tccgtacgctcactccccactagcgaacga

SEQ ID NO: 466112 - DNA, 30 bp, Artificial Sequence
  Synthetic oligonucleotide
tgttgggtagttgtgtctaactgcgaacga

SEQ ID NO: 466113 - DNA, 30 bp, Artificial Sequence
  Synthetic oligonucleotide
gagagcattaacgcaacctcgagggaacga

SEQ ID NO: 466114 - DNA, 30 bp, Artificial Sequence
  Synthetic oligonucleotide
tgaaatttcccgcggggccctgttgaacga

SEQ ID NO: 466115 - DNA, 30 bp, Artificial Sequence
  Synthetic oligonucleotide
ttgttacttcctgtgtaacgccgataacga

SEQ ID NO: 466116 - DNA, 30 bp, Artificial Sequence
  Synthetic oligonucleotide
ttttgaggacacgacatcgggcggtaacga

SEQ ID NO: 466117 - DNA, 30 bp, Artificial Sequence
  Synthetic oligonucleotide
cttaaagctatcgcttgcttcatgtaacga

SEQ ID NO: 466118 - DNA, 30 bp, Artificial Sequence
  Synthetic oligonucleotide
cttatacgacccgtttcgtggtgttaacga

SEQ ID NO: 466119 - DNA, 30 bp, Artificial Sequence
  Synthetic oligonucleotide
gctcgcttatgcgaaggctgtccaacacga

SEQ ID NO: 466120 - DNA, 30 bp, Artificial Sequence
  Synthetic oligonucleotide
ggttagagagctcaggtttagcccacacga

SEQ ID NO: 466121 - DNA, 30 bp, Artificial Sequence
  Synthetic oligonucleotide
ctccgaattggattctaacgttatacacga

SEQ ID NO: 466122 - DNA, 30 bp, Artificial Sequence
  Synthetic oligonucleotide
cacgggacagtagtctttaagactacacga

SEQ ID NO: 466123 - DNA, 30 bp, Artificial Sequence
  Synthetic oligonucleotide
aatatcgtggtaccctcataaagtacacga

SEQ ID NO: 466124 - DNA, 30 bp, Artificial Sequence
  Synthetic oligonucleotide
agtttgggtcgtaagcggagctgaccacga

SEQ ID NO: 466125 - DNA, 30 bp, Artificial Sequence
  Synthetic oligonucleotide
caccggggtttacgctcccggaccccacga

SEQ ID NO: 466126 - DNA, 30 bp, Artificial Sequence
  Synthetic oligonucleotide
gaagcagagctggtcgccgcggccccacga

SEQ ID NO: 466127 - DNA, 30 bp, Artificial Sequence
  Synthetic oligonucleotide
atatagagtttttggagaaagccgccacga

SEQ ID NO: 466128 - DNA, 30 bp, Artificial Sequence
  Synthetic oligonucleotide
atatgccacctttaccttttcgtgccacga

SEQ ID NO: 466129 - DNA, 30 bp, Artificial Sequence
  Synthetic oligonucleotide
tcgagtgtgttatggacattcgatccacga

SEQ ID NO: 466130 - DNA, 30 bp, Artificial Sequence
  Synthetic oligonucleotide
tcgtctggcttttttagggcttctccacga

SEQ ID NO: 466131 - DNA, 30 bp, Artificial Sequence
  Synthetic oligonucleotide
taaatgatcttggagactatacgtccacga

SEQ ID NO: 466132 - DNA, 30 bp, Artificial Sequence
  Synthetic oligonucleotide
cttctcctccgtggcagggttattccacga

SEQ ID NO: 466133 - DNA, 30 bp, Artificial Sequence
  Synthetic oligonucleotide
aaggttgcacgcgcgcgagcgacagcacga

SEQ ID NO: 466134 - DNA, 30 bp, Artificial Sequence
  Synthetic oligonucleotide
attgtgtccgaagcagcacaatgagcacga

SEQ ID NO: 466135 - DNA, 30 bp, Artificial Sequence
  Synthetic oligonucleotide
cacctgatttctacgcgcgaccacgcacga

SEQ ID NO: 466136 - DNA, 30 bp, Artificial Sequence
  Synthetic oligonucleotide
taccatcgacggatggacgtctacgcacga

SEQ ID NO: 466137 - DNA, 30 bp, Artificial Sequence
  Synthetic oligonucleotide
tgggtgatgacgtcgttatctagcgcacga

SEQ ID NO: 466138 - DNA, 30 bp, Artificial Sequence
  Synthetic oligonucleotide
ctgatatctggtgtacctgccaaggcacga

SEQ ID NO: 466139 - DNA, 30 bp, Artificial Sequence
  Synthetic oligonucleotide
aacattaggagtatccgcttgcaggcacga

SEQ ID NO: 466140 - DNA, 30 bp, Artificial Sequence
  Synthetic oligonucleotide
ttagcactatcaggctacctcgttgcacga

SEQ ID NO: 466141 - DNA, 30 bp, Artificial Sequence
  Synthetic oligonucleotide
accggaggtaaggcactggtctttgcacga

SEQ ID NO: 466142 - DNA, 30 bp, Artificial Sequence
  Synthetic oligonucleotide
aattacgatcgtagcgtatacgaatcacga

SEQ ID NO: 466143 - DNA, 30 bp, Artificial Sequence
  Synthetic oligonucleotide
agtttcaacaaggcctgaaaccactcacga

SEQ ID NO: 466144 - DNA, 30 bp, Artificial Sequence
  Synthetic oligonucleotide
gaccgcagttaaacgcgatgaccgtcacga

SEQ ID NO: 466145 - DNA, 30 bp, Artificial Sequence
  Synthetic oligonucleotide
tatgtagcgctatgctcattggattcacga

SEQ ID NO: 466146 - DNA, 30 bp, Artificial Sequence
  Synthetic oligonucleotide
aagcagccagacattgcgggtataagacga

SEQ ID NO: 466147 - DNA, 30 bp, Artificial Sequence
  Synthetic oligonucleotide
acctagtgcgtacctaccaaacacagacga

SEQ ID NO: 466148 - DNA, 30 bp, Artificial Sequence
  Synthetic oligonucleotide
agccgttcgaccatcggtcgtcacagacga

SEQ ID NO: 466149 - DNA, 30 bp, Artificial Sequence
  Synthetic oligonucleotide
gccttaaagaaaccctggtgtgggagacga

SEQ ID NO: 466150 - DNA, 30 bp, Artificial Sequence
  Synthetic oligonucleotide
ttcgctccttcagaccgccaccatagacga

SEQ ID NO: 466151 - DNA, 29 bp, Artificial Sequence
  Synthetic oligonucleotide
cgctagtctatctagtctgtgcacgacga

SEQ ID NO: 466152 - DNA, 30 bp, Artificial Sequence
  Synthetic oligonucleotide
ttgcagatttggcgtttccgctgacgacga

SEQ ID NO: 466153 - DNA, 30 bp, Artificial Sequence
  Synthetic oligonucleotide
aatccgaaccgcagattctaacatcgacga

SEQ ID NO: 466154 - DNA, 30 bp, Artificial Sequence
  Synthetic oligonucleotide
aacattattgacgtggcggtcattcgacga

SEQ ID NO: 466155 - DNA, 30 bp, Artificial Sequence
  Synthetic oligonucleotide
ggtggctaaccggacagccaataaggacga

SEQ ID NO: 466156 - DNA, 30 bp, Artificial Sequence
  Synthetic oligonucleotide
tatcgtcgccgataagggattgcaggacga

SEQ ID NO: 466157 - DNA, 30 bp, Artificial Sequence
  Synthetic oligonucleotide
cctatatagtattattcgggacacggacga

SEQ ID NO: 466158 - DNA, 30 bp, Artificial Sequence
  Synthetic oligonucleotide
ctctgcagtgtacgggaagtatccggacga

SEQ ID NO: 466159 - DNA, 30 bp, Artificial Sequence
  Synthetic oligonucleotide
cggccggctcatcaagctggcgtgggacga

SEQ ID NO: 466160 - DNA, 30 bp, Artificial Sequence
  Synthetic oligonucleotide
gaataaacaccaacaaccttgcatggacga

SEQ ID NO: 466161 - DNA, 30 bp, Artificial Sequence
  Synthetic oligonucleotide
tctcgctggttgtacgttacaagctgacga

SEQ ID NO: 466162 - DNA, 30 bp, Artificial Sequence
  Synthetic oligonucleotide
atgacctttaccccttacctgatctgacga

SEQ ID NO: 466163 - DNA, 30 bp, Artificial Sequence
  Synthetic oligonucleotide
gtagtatttactagatagcttatctgacga

SEQ ID NO: 466164 - DNA, 30 bp, Artificial Sequence
  Synthetic oligonucleotide
ttcacacgtgtaggggatgtgtagtgacga

SEQ ID NO: 466165 - DNA, 30 bp, Artificial Sequence
  Synthetic oligonucleotide
tgctggtttctcaacggggtatcgtgacga

SEQ ID NO: 466166 - DNA, 30 bp, Artificial Sequence
  Synthetic oligonucleotide
atgtttacctttgacatggtatggtgacga

SEQ ID NO: 466167 - DNA, 30 bp, Artificial Sequence
  Synthetic oligonucleotide
gcggccgtcatgaattttggtccttgacga

SEQ ID NO: 466168 - DNA, 30 bp, Artificial Sequence
  Synthetic oligonucleotide
gcgtataggatgcaggatgcgattatacga

SEQ ID NO: 466169 - DNA, 30 bp, Artificial Sequence
  Synthetic oligonucleotide
tccgtcggatccacgtagtgagtactacga

SEQ ID NO: 466170 - DNA, 30 bp, Artificial Sequence
  Synthetic oligonucleotide
atttacggcagaatcgtattctgtctacga

SEQ ID NO: 466171 - DNA, 30 bp, Artificial Sequence
  Synthetic oligonucleotide
cagatttcgaatcctcatgctgaggtacga

SEQ ID NO: 466172 - DNA, 30 bp, Artificial Sequence
  Synthetic oligonucleotide
aggggtagttatggtatgcggcatgtacga

SEQ ID NO: 466173 - DNA, 30 bp, Artificial Sequence
  Synthetic oligonucleotide
gttgagtattgaatgcagccttctgtacga

SEQ ID NO: 466174 - DNA, 30 bp, Artificial Sequence
  Synthetic oligonucleotide
gagctcgacgtgtggagacaaggattacga

SEQ ID NO: 466175 - DNA, 30 bp, Artificial Sequence
  Synthetic oligonucleotide
ggtagttgtgtgtatggcttcgccttacga

SEQ ID NO: 466176 - DNA, 30 bp, Artificial Sequence
  Synthetic oligonucleotide
acggcgtgtacttcattataatgtttacga

SEQ ID NO: 466177 - DNA, 30 bp, Artificial Sequence
  Synthetic oligonucleotide
ctgaagtgccatacccttcaaattttacga

SEQ ID NO: 466178 - DNA, 30 bp, Artificial Sequence
  Synthetic oligonucleotide
gctcttgagtccggcccagggtgaaaccga

SEQ ID NO: 466179 - DNA, 30 bp, Artificial Sequence
  Synthetic oligonucleotide
tacgtagccaatgggtgtttaataaaccga

SEQ ID NO: 466180 - DNA, 30 bp, Artificial Sequence
  Synthetic oligonucleotide
gaatgaggatcatcgtgtcctataaaccga

SEQ ID NO: 466181 - DNA, 30 bp, Artificial Sequence
  Synthetic oligonucleotide
gataggtgattgcctgccagtataaaccga

SEQ ID NO: 466182 - DNA, 30 bp, Artificial Sequence
  Synthetic oligonucleotide
acaaattcatcgaaatggatttgcaaccga

SEQ ID NO: 466183 - DNA, 30 bp, Artificial Sequence
  Synthetic oligonucleotide
gatagtatgggcaaatcacggtgtaaccga

SEQ ID NO: 466184 - DNA, 30 bp, Artificial Sequence
  Synthetic oligonucleotide
tacacacctccataatgtttggaacaccga

SEQ ID NO: 466185 - DNA, 30 bp, Artificial Sequence
  Synthetic oligonucleotide
ctggacaaggttgagccttgtacacaccga

SEQ ID NO: 466186 - DNA, 30 bp, Artificial Sequence
  Synthetic oligonucleotide
ggggtaggtcgagtcatgtcccggcaccga

SEQ ID NO: 466187 - DNA, 30 bp, Artificial Sequence
  Synthetic oligonucleotide
tgcctatcgttttgctggcaaggagaccga

SEQ ID NO: 466188 - DNA, 30 bp, Artificial Sequence
  Synthetic oligonucleotide
atttagcatgcggcatgcgcgcacgaccga

SEQ ID NO: 466189 - DNA, 30 bp, Artificial Sequence
  Synthetic oligonucleotide
ggagatttagtatccttacattgcgaccga

SEQ ID NO: 466190 - DNA, 30 bp, Artificial Sequence
  Synthetic oligonucleotide
cctctgggggctacatcctgttgcgaccga

SEQ ID NO: 466191 - DNA, 30 bp, Artificial Sequence
  Synthetic oligonucleotide
gtcgtgttttgacattcggtaagataccga

SEQ ID NO: 466192 - DNA, 30 bp, Artificial Sequence
  Synthetic oligonucleotide
gaacggtcgctggcaagacgatactaccga

SEQ ID NO: 466193 - DNA, 30 bp, Artificial Sequence
  Synthetic oligonucleotide
tacgcgccattaccgggggtatactaccga

SEQ ID NO: 466194 - DNA, 30 bp, Artificial Sequence
  Synthetic oligonucleotide
gagttctaaacggtatcactctagtaccga

SEQ ID NO: 466195 - DNA, 30 bp, Artificial Sequence
  Synthetic oligonucleotide
gtaggcgactgaggttattctcggtaccga

SEQ ID NO: 466196 - DNA, 30 bp, Artificial Sequence
  Synthetic oligonucleotide
agttctgtgattgtttagcaagtgtaccga

SEQ ID NO: 466197 - DNA, 30 bp, Artificial Sequence
  Synthetic oligonucleotide
aatcacggctccttacgggctgtgtaccga

SEQ ID NO: 466198 - DNA, 30 bp, Artificial Sequence
  Synthetic oligonucleotide
aattactatgagctatcgataatttaccga

SEQ ID NO: 466199 - DNA, 30 bp, Artificial Sequence
  Synthetic oligonucleotide
tttacctgtgcctcccaaaaggacacccga

SEQ ID NO: 466200 - DNA, 30 bp, Artificial Sequence
  Synthetic oligonucleotide
ttggccagcacgcagactggtactccccga

SEQ ID NO: 466201 - DNA, 30 bp, Artificial Sequence
  Synthetic oligonucleotide
ttcggcttctcctgttacccaggcgcccga

SEQ ID NO: 466202 - DNA, 30 bp, Artificial Sequence
  Synthetic oligonucleotide
gtttgacagtcgcttccacacatcgcccga

SEQ ID NO: 466203 - DNA, 30 bp, Artificial Sequence
  Synthetic oligonucleotide
ttatgggtgtataaacagccataggcccga

SEQ ID NO: 466204 - DNA, 30 bp, Artificial Sequence
  Synthetic oligonucleotide
atattaccgtattactccatctaggcccga

SEQ ID NO: 466205 - DNA, 30 bp, Artificial Sequence
  Synthetic oligonucleotide
tgatggttcaactatgacctccgggcccga

SEQ ID NO: 466206 - DNA, 30 bp, Artificial Sequence
  Synthetic oligonucleotide
caccgctcgtctggccctcacaatgcccga

SEQ ID NO: 466207 - DNA, 30 bp, Artificial Sequence
  Synthetic oligonucleotide
gcaaataccatgatctttatgaaatcccga

SEQ ID NO: 466208 - DNA, 30 bp, Artificial Sequence
  Synthetic oligonucleotide
gatcttgtctgtatttgtaattgatcccga

SEQ ID NO: 466209 - DNA, 30 bp, Artificial Sequence
  Synthetic oligonucleotide
ttgcggggacctccgggaaaatggtcccga

SEQ ID NO: 466210 - DNA, 30 bp, Artificial Sequence
  Synthetic oligonucleotide
ggttttatactgaaatgacgaatgtcccga

SEQ ID NO: 466211 - DNA, 30 bp, Artificial Sequence
  Synthetic oligonucleotide
gtgagcagccgccaggggtcggcaagccga

SEQ ID NO: 466212 - DNA, 30 bp, Artificial Sequence
  Synthetic oligonucleotide
aattgttgttgatatgcccctataagccga

SEQ ID NO: 466213 - DNA, 30 bp, Artificial Sequence
  Synthetic oligonucleotide
ccttaccagtatatccgactgctaagccga

SEQ ID NO: 466214 - DNA, 30 bp, Artificial Sequence
  Synthetic oligonucleotide
ttggtatacccggagtcacgtaacagccga

SEQ ID NO: 466215 - DNA, 30 bp, Artificial Sequence
  Synthetic oligonucleotide
tgttcgcataactgtggtggcgacagccga

SEQ ID NO: 466216 - DNA, 30 bp, Artificial Sequence
  Synthetic oligonucleotide
ccagatgacaagggacgccggcgcagccga

SEQ ID NO: 466217 - DNA, 30 bp, Artificial Sequence
  Synthetic oligonucleotide
gggagttgcgtgcattacctgcgcagccga

SEQ ID NO: 466218 - DNA, 30 bp, Artificial Sequence
  Synthetic oligonucleotide
gctggcaatttcgcctgtccgatcagccga

SEQ ID NO: 466219 - DNA, 30 bp, Artificial Sequence
  Synthetic oligonucleotide
ccgcttcgaaagtttggtttagtgagccga

SEQ ID NO: 466220 - DNA, 30 bp, Artificial Sequence
  Synthetic oligonucleotide
tgtaagccgctagggcacctcggtagccga

SEQ ID NO: 466221 - DNA, 30 bp, Artificial Sequence
  Synthetic oligonucleotide
tggatccgtgtgcgattcagaacacgccga

SEQ ID NO: 466222 - DNA, 30 bp, Artificial Sequence
  Synthetic oligonucleotide
gtgctttcggtctttcacggtggacgccga

SEQ ID NO: 466223 - DNA, 30 bp, Artificial Sequence
  Synthetic oligonucleotide
aacgttgatcatagctatttacttcgccga

SEQ ID NO: 466224 - DNA, 30 bp, Artificial Sequence
  Synthetic oligonucleotide
gtccgcagaatgcgttggtaccttcgccga

SEQ ID NO: 466225 - DNA, 30 bp, Artificial Sequence
  Synthetic oligonucleotide
tataccacgctttatagcacggcaggccga

SEQ ID NO: 466226 - DNA, 30 bp, Artificial Sequence
  Synthetic oligonucleotide
gagggcccagctatatgtgggcaatgccga

SEQ ID NO: 466227 - DNA, 30 bp, Artificial Sequence
  Synthetic oligonucleotide
tacaagcgcttcgcatgaaatacatgccga

SEQ ID NO: 466228 - DNA, 30 bp, Artificial Sequence
  Synthetic oligonucleotide
gtacctagtctatcgggagtcatatgccga

SEQ ID NO: 466229 - DNA, 30 bp, Artificial Sequence
  Synthetic oligonucleotide
tctcagagaaggagtatctcaaactgccga

SEQ ID NO: 466230 - DNA, 30 bp, Artificial Sequence
  Synthetic oligonucleotide
caaggtcccttagaaatagactactgccga

SEQ ID NO: 466231 - DNA, 30 bp, Artificial Sequence
  Synthetic oligonucleotide
tcaccgacaccccctgatgccctctgccga

SEQ ID NO: 466232 - DNA, 30 bp, Artificial Sequence
  Synthetic oligonucleotide
gataataggagttgtgtgctaataatccga

SEQ ID NO: 466233 - DNA, 30 bp, Artificial Sequence
  Synthetic oligonucleotide
gaggatgtaatacgatctgcattaatccga

SEQ ID NO: 466234 - DNA, 30 bp, Artificial Sequence
  Synthetic oligonucleotide
gaggattaaatcatagtatctcagatccga

SEQ ID NO: 466235 - DNA, 31 bp, Artificial Sequence
  Synthetic oligonucleotide
taaactaagggtgaccagccggtagctccga

SEQ ID NO: 466236 - DNA, 30 bp, Artificial Sequence
  Synthetic oligonucleotide
acgtttataatttgaggtgaggtgctccga

SEQ ID NO: 466237 - DNA, 30 bp, Artificial Sequence
  Synthetic oligonucleotide
atctcgtcagcaccaactacggtgctccga

SEQ ID NO: 466238 - DNA, 30 bp, Artificial Sequence
  Synthetic oligonucleotide
gatatttattatattagaagacgtctccga

SEQ ID NO: 466239 - DNA, 30 bp, Artificial Sequence
  Synthetic oligonucleotide
tggctgaggtcttttccacggtatgtccga

SEQ ID NO: 466240 - DNA, 30 bp, Artificial Sequence
  Synthetic oligonucleotide
ttgcgcagttgtcgtccataccgtgtccga

SEQ ID NO: 466241 - DNA, 30 bp, Artificial Sequence
  Synthetic oligonucleotide
ataaggcggcaggcagtagagaaattccga

SEQ ID NO: 466242 - DNA, 30 bp, Artificial Sequence
  Synthetic oligonucleotide
ctatacgcccttgattatcgtagattccga

SEQ ID NO: 466243 - DNA, 30 bp, Artificial Sequence
  Synthetic oligonucleotide
taagaaataattagaggactggccttccga

SEQ ID NO: 466244 - DNA, 30 bp, Artificial Sequence
  Synthetic oligonucleotide
ttattgaaccgatggtaactaagcttccga

SEQ ID NO: 466245 - DNA, 30 bp, Artificial Sequence
  Synthetic oligonucleotide
tcttctcggaagatcgctgcgctcttccga

SEQ ID NO: 466246 - DNA, 30 bp, Artificial Sequence
  Synthetic oligonucleotide
gattgctttctgagagctctggtcttccga

SEQ ID NO: 466247 - DNA, 30 bp, Artificial Sequence
  Synthetic oligonucleotide
ttgcatgccgccgcagtaaatgcgttccga

SEQ ID NO: 466248 - DNA, 30 bp, Artificial Sequence
  Synthetic oligonucleotide
tcgaccgaatgctgttagcttaatttccga

SEQ ID NO: 466249 - DNA, 30 bp, Artificial Sequence
  Synthetic oligonucleotide
atcctataaatgctttggctggatttccga

SEQ ID NO: 466250 - DNA, 30 bp, Artificial Sequence
  Synthetic oligonucleotide
acgttttttgaggctataggacttttccga

SEQ ID NO: 466251 - DNA, 30 bp, Artificial Sequence
  Synthetic oligonucleotide
cgggcctttgctccttgtgggaaaaagcga

SEQ ID NO: 466252 - DNA, 30 bp, Artificial Sequence
  Synthetic oligonucleotide
gagctttgaaacggaagctttgtcaagcga

SEQ ID NO: 466253 - DNA, 30 bp, Artificial Sequence
  Synthetic oligonucleotide
cgtcaaatttagggcgggttctagaagcga

SEQ ID NO: 466254 - DNA, 30 bp, Artificial Sequence
  Synthetic oligonucleotide
ggattctattgcgcggatgctgtgaagcga

SEQ ID NO: 466255 - DNA, 30 bp, Artificial Sequence
  Synthetic oligonucleotide
gcaataacaagctgttattgcatacagcga

SEQ ID NO: 466256 - DNA, 30 bp, Artificial Sequence
  Synthetic oligonucleotide
gttatcatcgtaagtctttaacaccagcga

SEQ ID NO: 466257 - DNA, 30 bp, Artificial Sequence
  Synthetic oligonucleotide
gctggtcgagcgtgattcgttatccagcga

SEQ ID NO: 466258 - DNA, 30 bp, Artificial Sequence
  Synthetic oligonucleotide
tgcctacatgttgtccgcgacctccagcga

SEQ ID NO: 466259 - DNA, 30 bp, Artificial Sequence
  Synthetic oligonucleotide
cacaaggtcgatcagtgatgacggcagcga

SEQ ID NO: 466260 - DNA, 30 bp, Artificial Sequence
  Synthetic oligonucleotide
atattgtttttgtatatttgtgcagagcga

SEQ ID NO: 466261 - DNA, 30 bp, Artificial Sequence
  Synthetic oligonucleotide
tcatattggaggtctgcatcccgcgagcga

SEQ ID NO: 466262 - DNA, 30 bp, Artificial Sequence
  Synthetic oligonucleotide
ctcctcgacgctcgacttggtattgagcga

SEQ ID NO: 466263 - DNA, 30 bp, Artificial Sequence
  Synthetic oligonucleotide
ctctgctacgagagtgaaatatgctagcga

SEQ ID NO: 466264 - DNA, 30 bp, Artificial Sequence
  Synthetic oligonucleotide
cccaattaagtaccagtctcggagtagcga

SEQ ID NO: 466265 - DNA, 30 bp, Artificial Sequence
  Synthetic oligonucleotide
gtcataggccacgattgctctataacgcga

SEQ ID NO: 466266 - DNA, 30 bp, Artificial Sequence
  Synthetic oligonucleotide
atttgccggctccactgatcgagcacgcga

SEQ ID NO: 466267 - DNA, 30 bp, Artificial Sequence
  Synthetic oligonucleotide
agtcggggtatagacgattacacgacgcga

SEQ ID NO: 466268 - DNA, 30 bp, Artificial Sequence
  Synthetic oligonucleotide
aatctgactttcagttagtgtgggacgcga

SEQ ID NO: 466269 - DNA, 30 bp, Artificial Sequence
  Synthetic oligonucleotide
ggttcctaatgacactgcatgggtacgcga

SEQ ID NO: 466270 - DNA, 30 bp, Artificial Sequence
  Synthetic oligonucleotide
tcaatgaacccacgaatggtttgtacgcga

SEQ ID NO: 466271 - DNA, 30 bp, Artificial Sequence
  Synthetic oligonucleotide
agcattatgctgttttcaacggtaccgcga

SEQ ID NO: 466272 - DNA, 30 bp, Artificial Sequence
  Synthetic oligonucleotide
cgtcccggggggtttcgctttttgccgcga

SEQ ID NO: 466273 - DNA, 30 bp, Artificial Sequence
  Synthetic oligonucleotide
cgtttgggagatcctgcggagactccgcga

SEQ ID NO: 466274 - DNA, 30 bp, Artificial Sequence
  Synthetic oligonucleotide
agtctaccgagacggtgggagagtccgcga

SEQ ID NO: 466275 - DNA, 30 bp, Artificial Sequence
  Synthetic oligonucleotide
atagcgtaatcattaggactcaaagcgcga

SEQ ID NO: 466276 - DNA, 30 bp, Artificial Sequence
  Synthetic oligonucleotide
ccgcgtcgattctattataccaccgcgcga

SEQ ID NO: 466277 - DNA, 30 bp, Artificial Sequence
  Synthetic oligonucleotide
acctctctggagagccattgtgccgcgcga

SEQ ID NO: 466278 - DNA, 30 bp, Artificial Sequence
  Synthetic oligonucleotide
gtcttttacgattgtcggcaacgggcgcga

SEQ ID NO: 466279 - DNA, 30 bp, Artificial Sequence
  Synthetic oligonucleotide
tctctcgcaaatctgatcctctatgcgcga

SEQ ID NO: 466280 - DNA, 30 bp, Artificial Sequence
  Synthetic oligonucleotide
gtatcgcgggatgtttttgtgtactcgcga

SEQ ID NO: 466281 - DNA, 30 bp, Artificial Sequence
  Synthetic oligonucleotide
aggttcaatagcgctccctttcattcgcga

SEQ ID NO: 466282 - DNA, 30 bp, Artificial Sequence
  Synthetic oligonucleotide
cgcggtaagtgattctcagacccaaggcga

SEQ ID NO: 466283 - DNA, 30 bp, Artificial Sequence
  Synthetic oligonucleotide
taccagacacgaggataactcctcaggcga

SEQ ID NO: 466284 - DNA, 30 bp, Artificial Sequence
  Synthetic oligonucleotide
tcgtactgccttaaatcaatgtctaggcga

SEQ ID NO: 466285 - DNA, 30 bp, Artificial Sequence
  Synthetic oligonucleotide
acataagatggcatacgcacgaaacggcga

SEQ ID NO: 466286 - DNA, 30 bp, Artificial Sequence
  Synthetic oligonucleotide
aacggggattaggctatctatatccggcga

SEQ ID NO: 466287 - DNA, 30 bp, Artificial Sequence
  Synthetic oligonucleotide
cttctattggtattaaggtgtagtcggcga

SEQ ID NO: 466288 - DNA, 30 bp, Artificial Sequence
  Synthetic oligonucleotide
gcaccaagcatgggcttattacttcggcga

SEQ ID NO: 466289 - DNA, 30 bp, Artificial Sequence
  Synthetic oligonucleotide
atctacaatctatttgacgaagcagggcga

SEQ ID NO: 466290 - DNA, 30 bp, Artificial Sequence
  Synthetic oligonucleotide
tggcacttggtcagatcccggtgagggcga

SEQ ID NO: 466291 - DNA, 30 bp, Artificial Sequence
  Synthetic oligonucleotide
agggactgctcgcgcacatcgttcgggcga

SEQ ID NO: 466292 - DNA, 30 bp, Artificial Sequence
  Synthetic oligonucleotide
gatcggaacgtagggatactgtgggggcga

SEQ ID NO: 466293 - DNA, 30 bp, Artificial Sequence
  Synthetic oligonucleotide
tccgctttcgaaagaaatctattggggcga

SEQ ID NO: 466294 - DNA, 30 bp, Artificial Sequence
  Synthetic oligonucleotide
cgcgagcatcattcctcgcaatctgggcga

SEQ ID NO: 466295 - DNA, 30 bp, Artificial Sequence
  Synthetic oligonucleotide
gacttcttgactttggttcaccgatggcga

SEQ ID NO: 466296 - DNA, 30 bp, Artificial Sequence
  Synthetic oligonucleotide
accttcaagtcgcgcgctgcctgatggcga

SEQ ID NO: 466297 - DNA, 30 bp, Artificial Sequence
  Synthetic oligonucleotide
tggcagggcgataacattttagtatggcga

SEQ ID NO: 466298 - DNA, 30 bp, Artificial Sequence
  Synthetic oligonucleotide
acccttcaccgaaaacggactttctggcga

SEQ ID NO: 466299 - DNA, 30 bp, Artificial Sequence
  Synthetic oligonucleotide
gtattacgaatgattggacctacaatgcga

SEQ ID NO: 466300 - DNA, 30 bp, Artificial Sequence
  Synthetic oligonucleotide
acctcttaataaacgtaggggcacatgcga

SEQ ID NO: 466301 - DNA, 30 bp, Artificial Sequence
  Synthetic oligonucleotide
aaaagcaggtttttgcaaatcggcatgcga

SEQ ID NO: 466302 - DNA, 29 bp, Artificial Sequence
  Synthetic oligonucleotide
gaaaatcagctgtcgttgacgtcatgcga

SEQ ID NO: 466303 - DNA, 30 bp, Artificial Sequence
  Synthetic oligonucleotide
tagtatacaaccaggcgggttgagatgcga

SEQ ID NO: 466304 - DNA, 30 bp, Artificial Sequence
  Synthetic oligonucleotide
aaaccccagccagcttttgtataactgcga

SEQ ID NO: 466305 - DNA, 30 bp, Artificial Sequence
  Synthetic oligonucleotide
cgaaaagatcgcatggattcatcactgcga

SEQ ID NO: 466306 - DNA, 30 bp, Artificial Sequence
  Synthetic oligonucleotide
tcgtgccatcgcgacccgctcggactgcga

SEQ ID NO: 466307 - DNA, 30 bp, Artificial Sequence
  Synthetic oligonucleotide
ggagcaattattatcgcgcctagcctgcga

SEQ ID NO: 466308 - DNA, 30 bp, Artificial Sequence
  Synthetic oligonucleotide
tcctacccgtatatatctctggtgctgcga

SEQ ID NO: 466309 - DNA, 30 bp, Artificial Sequence
  Synthetic oligonucleotide
gcgctgctatctcggctgattactctgcga

SEQ ID NO: 466310 - DNA, 30 bp, Artificial Sequence
  Synthetic oligonucleotide
gtgctacccattgggtacgcggctctgcga

SEQ ID NO: 466311 - DNA, 30 bp, Artificial Sequence
  Synthetic oligonucleotide
ggccccgcccttagaaatggcgcagtgcga

SEQ ID NO: 466312 - DNA, 29 bp, Artificial Sequence
  Synthetic oligonucleotide
gacactgataggattgcgctgcagtgcga

SEQ ID NO: 466313 - DNA, 30 bp, Artificial Sequence
  Synthetic oligonucleotide
actgggtccctaccccgcacgttagtgcga

SEQ ID NO: 466314 - DNA, 30 bp, Artificial Sequence
  Synthetic oligonucleotide
tcattcgagcataacgttggcggggtgcga

SEQ ID NO: 466315 - DNA, 30 bp, Artificial Sequence
  Synthetic oligonucleotide
ccccacgtcgtcgccgtaatattggtgcga

SEQ ID NO: 466316 - DNA, 30 bp, Artificial Sequence
  Synthetic oligonucleotide
gtggccaagttattcgctcggcatgtgcga

SEQ ID NO: 466317 - DNA, 30 bp, Artificial Sequence
  Synthetic oligonucleotide
cagcggcccatgatagttcgctatgtgcga

SEQ ID NO: 466318 - DNA, 30 bp, Artificial Sequence
  Synthetic oligonucleotide
ttccgcgtcttgtacctactaattgtgcga

SEQ ID NO: 466319 - DNA, 30 bp, Artificial Sequence
  Synthetic oligonucleotide
tctttataagagctttcggggccattgcga

SEQ ID NO: 466320 - DNA, 30 bp, Artificial Sequence
  Synthetic oligonucleotide
tttgtcggcgtagcaaatatgggattgcga

SEQ ID NO: 466321 - DNA, 30 bp, Artificial Sequence
  Synthetic oligonucleotide
gttccctcgttttgggactcgcacttgcga

SEQ ID NO: 466322 - DNA, 30 bp, Artificial Sequence
  Synthetic oligonucleotide
aacttggtttctgtagtacgccgcttgcga

SEQ ID NO: 466323 - DNA, 30 bp, Artificial Sequence
  Synthetic oligonucleotide
tattagtgaaagcgtggtttctggttgcga

SEQ ID NO: 466324 - DNA, 31 bp, Artificial Sequence
  Synthetic oligonucleotide
gtgatgtacgcgcgtgccactcttgttgcga

SEQ ID NO: 466325 - DNA, 30 bp, Artificial Sequence
  Synthetic oligonucleotide
ttgaagatatttactacggggcctttgcga

SEQ ID NO: 466326 - DNA, 30 bp, Artificial Sequence
  Synthetic oligonucleotide
aagcaggggttgtctgcatagcaaaatcga

SEQ ID NO: 466327 - DNA, 30 bp, Artificial Sequence
  Synthetic oligonucleotide
gctctcggttcttgaatcgattgaaatcga

SEQ ID NO: 466328 - DNA, 30 bp, Artificial Sequence
  Synthetic oligonucleotide
gctataggtctagtacaaatctgtaatcga

SEQ ID NO: 466329 - DNA, 30 bp, Artificial Sequence
  Synthetic oligonucleotide
ctgagtattacagagaaattaaaacatcga

SEQ ID NO: 466330 - DNA, 30 bp, Artificial Sequence
  Synthetic oligonucleotide
agatttatgtacactttgaatggacatcga

SEQ ID NO: 466331 - DNA, 30 bp, Artificial Sequence
  Synthetic oligonucleotide
gctctacaatgagggctaaagccccatcga

SEQ ID NO: 466332 - DNA, 30 bp, Artificial Sequence
  Synthetic oligonucleotide
gttgattctgtgtatgctgtgttgcatcga

SEQ ID NO: 466333 - DNA, 30 bp, Artificial Sequence
  Synthetic oligonucleotide
gaagattggcatcatcatgcatatcatcga

SEQ ID NO: 466334 - DNA, 30 bp, Artificial Sequence
  Synthetic oligonucleotide
aacatcaggcgttagtatggttttcatcga

SEQ ID NO: 466335 - DNA, 30 bp, Artificial Sequence
  Synthetic oligonucleotide
cttgctttcctaaaccagggaggggatcga

SEQ ID NO: 466336 - DNA, 30 bp, Artificial Sequence
  Synthetic oligonucleotide
gttaattaaaaggttaatctttatgatcga

SEQ ID NO: 466337 - DNA, 30 bp, Artificial Sequence
  Synthetic oligonucleotide
atttatcggatcggcttattgggtgatcga

SEQ ID NO: 466338 - DNA, 30 bp, Artificial Sequence
  Synthetic oligonucleotide
tatcttaaaggtgtgtcacgacttgatcga

SEQ ID NO: 466339 - DNA, 30 bp, Artificial Sequence
  Synthetic oligonucleotide
aggagcaaccgatccccttttggatatcga

SEQ ID NO: 466340 - DNA, 30 bp, Artificial Sequence
  Synthetic oligonucleotide
tagctcggattataatacccggtatatcga

SEQ ID NO: 466341 - DNA, 26 bp, Artificial Sequence
  Synthetic oligonucleotide
aattagccacatgtagaccctatcga

SEQ ID NO: 466342 - DNA, 30 bp, Artificial Sequence
  Synthetic oligonucleotide
gcgcgcattaggattaaaattgtctatcga

SEQ ID NO: 466343 - DNA, 30 bp, Artificial Sequence
  Synthetic oligonucleotide
cctgccagcgcggtcaattggtagtatcga

SEQ ID NO: 466344 - DNA, 30 bp, Artificial Sequence
  Synthetic oligonucleotide
tgccttaggtcgaagccagcaatttatcga

SEQ ID NO: 466345 - DNA, 31 bp, Artificial Sequence
  Synthetic oligonucleotide
aatagctatacgaaagagaataactactcga

SEQ ID NO: 466346 - DNA, 30 bp, Artificial Sequence
  Synthetic oligonucleotide
ttgtgtagggttttctcgttcgttactcga

SEQ ID NO: 466347 - DNA, 30 bp, Artificial Sequence
  Synthetic oligonucleotide
ggagcaagaaagaagttggggtaacctcga

SEQ ID NO: 466348 - DNA, 30 bp, Artificial Sequence
  Synthetic oligonucleotide
agtaagtgtcggggggttgaggggcctcga

SEQ ID NO: 466349 - DNA, 30 bp, Artificial Sequence
  Synthetic oligonucleotide
caagtttttcactacaaggtgcaggctcga

SEQ ID NO: 466350 - DNA, 30 bp, Artificial Sequence
  Synthetic oligonucleotide
gcacgagccgatctcggcaaacgggctcga

SEQ ID NO: 466351 - DNA, 30 bp, Artificial Sequence
  Synthetic oligonucleotide
caggcaaactctttgctcgcgaatgctcga

SEQ ID NO: 466352 - DNA, 30 bp, Artificial Sequence
  Synthetic oligonucleotide
gcctcgcaacagcgaattataaaatctcga

SEQ ID NO: 466353 - DNA, 30 bp, Artificial Sequence
  Synthetic oligonucleotide
gtacaggatcccgcaggcgatctctctcga

SEQ ID NO: 466354 - DNA, 30 bp, Artificial Sequence
  Synthetic oligonucleotide
tcgtctgtgtaccgaacgttcttgtctcga

SEQ ID NO: 466355 - DNA, 30 bp, Artificial Sequence
  Synthetic oligonucleotide
gtaattgggcgtcatacaagcccttctcga

SEQ ID NO: 466356 - DNA, 30 bp, Artificial Sequence
  Synthetic oligonucleotide
atatgcttgccatatgatggaagcagtcga

SEQ ID NO: 466357 - DNA, 30 bp, Artificial Sequence
  Synthetic oligonucleotide
gctaatacggtagtcggtaccagcagtcga

SEQ ID NO: 466358 - DNA, 30 bp, Artificial Sequence
  Synthetic oligonucleotide
cccaatatcacaaccctgggatgcagtcga

SEQ ID NO: 466359 - DNA, 30 bp, Artificial Sequence
  Synthetic oligonucleotide
atagtgagagggcgtctaggtgtcagtcga

SEQ ID NO: 466360 - DNA, 30 bp, Artificial Sequence
  Synthetic oligonucleotide
taccaacccagctagcgacccgtacgtcga

SEQ ID NO: 466361 - DNA, 30 bp, Artificial Sequence
  Synthetic oligonucleotide
gccttataccgttagccgatgcaccgtcga

SEQ ID NO: 466362 - DNA, 30 bp, Artificial Sequence
  Synthetic oligonucleotide
ggataaccacgcaactcgaccttccgtcga

SEQ ID NO: 466363 - DNA, 30 bp, Artificial Sequence
  Synthetic oligonucleotide
tacgctgcgctggttgacttgcggcgtcga

SEQ ID NO: 466364 - DNA, 30 bp, Artificial Sequence
  Synthetic oligonucleotide
tgcagcgcccagaaccgagtctgtcgtcga

SEQ ID NO: 466365 - DNA, 30 bp, Artificial Sequence
  Synthetic oligonucleotide
taccctgattactttatcatcccaggtcga

SEQ ID NO: 466366 - DNA, 30 bp, Artificial Sequence
  Synthetic oligonucleotide
gttatagaagggcgctacagactaggtcga

SEQ ID NO: 466367 - DNA, 31 bp, Artificial Sequence
  Synthetic oligonucleotide
tcaatgacgtccccaagaaggagtcggtcga

SEQ ID NO: 466368 - DNA, 30 bp, Artificial Sequence
  Synthetic oligonucleotide
cacaatatcggtcctacaatggtgggtcga

SEQ ID NO: 466369 - DNA, 30 bp, Artificial Sequence
  Synthetic oligonucleotide
aataggatactattaacccttcgtggtcga

SEQ ID NO: 466370 - DNA, 30 bp, Artificial Sequence
  Synthetic oligonucleotide
tttttatatatgatacccatttactgtcga

SEQ ID NO: 466371 - DNA, 28 bp, Artificial Sequence
  Synthetic oligonucleotide
ttccacgtcagtgttcgggtgttgtcga

SEQ ID NO: 466372 - DNA, 30 bp, Artificial Sequence
  Synthetic oligonucleotide
cttccacgcgctttaagatggcggattcga

SEQ ID NO: 466373 - DNA, 30 bp, Artificial Sequence
  Synthetic oligonucleotide
ggattattggtcctcgttctgcatattcga

SEQ ID NO: 466374 - DNA, 30 bp, Artificial Sequence
  Synthetic oligonucleotide
tatgtaagaaataaccataatagtattcga

SEQ ID NO: 466375 - DNA, 30 bp, Artificial Sequence
  Synthetic oligonucleotide
gtttacatggccttggtcctgtttattcga

SEQ ID NO: 466376 - DNA, 30 bp, Artificial Sequence
  Synthetic oligonucleotide
gatctattaagttcaggacacgaacttcga

SEQ ID NO: 466377 - DNA, 30 bp, Artificial Sequence
  Synthetic oligonucleotide
attgtgaaagggtgccttgtatcacttcga

SEQ ID NO: 466378 - DNA, 30 bp, Artificial Sequence
  Synthetic oligonucleotide
acagtaccggcctttgtcggtctacttcga

SEQ ID NO: 466379 - DNA, 30 bp, Artificial Sequence
  Synthetic oligonucleotide
tacaagagtcgcagctctgataagcttcga

SEQ ID NO: 466380 - DNA, 30 bp, Artificial Sequence
  Synthetic oligonucleotide
gttcatgcatcagttaggcgaccgcttcga

SEQ ID NO: 466381 - DNA, 30 bp, Artificial Sequence
  Synthetic oligonucleotide
ctgcgcggggttcaaagggcacggcttcga

SEQ ID NO: 466382 - DNA, 30 bp, Artificial Sequence
  Synthetic oligonucleotide
actccgccctgtgtcccatccgccgttcga

SEQ ID NO: 466383 - DNA, 30 bp, Artificial Sequence
  Synthetic oligonucleotide
ttaagcttatgaggttctaacctcgttcga

SEQ ID NO: 466384 - DNA, 30 bp, Artificial Sequence
  Synthetic oligonucleotide
tattagtcggtgcacttcgtagcggttcga

SEQ ID NO: 466385 - DNA, 30 bp, Artificial Sequence
  Synthetic oligonucleotide
attcacaatacaggggggaaagaatttcga

SEQ ID NO: 466386 - DNA, 30 bp, Artificial Sequence
  Synthetic oligonucleotide
accactcggcgtatcacatcgcgatttcga

SEQ ID NO: 466387 - DNA, 30 bp, Artificial Sequence
  Synthetic oligonucleotide
atattctgttgccatctaagattatttcga

SEQ ID NO: 466388 - DNA, 30 bp, Artificial Sequence
  Synthetic oligonucleotide
tcgttgtctcgtggaattgcgatctttcga

SEQ ID NO: 466389 - DNA, 30 bp, Artificial Sequence
  Synthetic oligonucleotide
tgtacgctatcgatcttagggcagtttcga

SEQ ID NO: 466390 - DNA, 30 bp, Artificial Sequence
  Synthetic oligonucleotide
tcataaaaccaacggttttgagattttcga

SEQ ID NO: 466391 - DNA, 30 bp, Artificial Sequence
  Synthetic oligonucleotide
acacgtctttcattgatacgcacaaaagga

SEQ ID NO: 466392 - DNA, 30 bp, Artificial Sequence
  Synthetic oligonucleotide
agctctttagcaatctccagttgaaaagga

SEQ ID NO: 466393 - DNA, 30 bp, Artificial Sequence
  Synthetic oligonucleotide
tccccgggccgtacaaatcaggacaaagga

SEQ ID NO: 466394 - DNA, 30 bp, Artificial Sequence
  Synthetic oligonucleotide
actgtcgaagtaggcaattttaccaaagga

SEQ ID NO: 466395 - DNA, 30 bp, Artificial Sequence
  Synthetic oligonucleotide
ttattcccagcaggggtccaaggcaaagga

SEQ ID NO: 466396 - DNA, 30 bp, Artificial Sequence
  Synthetic oligonucleotide
cagacaactggacacctctaggcgaaagga

SEQ ID NO: 466397 - DNA, 30 bp, Artificial Sequence
  Synthetic oligonucleotide
ggcagatctagtcatgcgtcgcggaaagga

SEQ ID NO: 466398 - DNA, 30 bp, Artificial Sequence
  Synthetic oligonucleotide
aatggaggtgcttataccgtggtacaagga

SEQ ID NO: 466399 - DNA, 30 bp, Artificial Sequence
  Synthetic oligonucleotide
cggccatcgattgtgggtaccccccaagga

SEQ ID NO: 466400 - DNA, 30 bp, Artificial Sequence
  Synthetic oligonucleotide
caaaaacgcccggtaaggggaaggcaagga

SEQ ID NO: 466401 - DNA, 30 bp, Artificial Sequence
  Synthetic oligonucleotide
tggcagttcaaggtccttgcacggcaagga

SEQ ID NO: 466402 - DNA, 31 bp, Artificial Sequence
  Synthetic oligonucleotide
ttaccttaggcgttcttgattttggcaagga

SEQ ID NO: 466403 - DNA, 30 bp, Artificial Sequence
  Synthetic oligonucleotide
ttgatgagttccctggttattcatcaagga

SEQ ID NO: 466404 - DNA, 30 bp, Artificial Sequence
  Synthetic oligonucleotide
tcatctatcattcgcacttcaggtcaagga

SEQ ID NO: 466405 - DNA, 30 bp, Artificial Sequence
  Synthetic oligonucleotide
ccacattgttctccttaaaagtgtcaagga

SEQ ID NO: 466406 - DNA, 30 bp, Artificial Sequence
  Synthetic oligonucleotide
aacttatacacgctggaaatataagaagga

SEQ ID NO: 466407 - DNA, 30 bp, Artificial Sequence
  Synthetic oligonucleotide
tatttagggtggagcgtgatgaacgaagga

SEQ ID NO: 466408 - DNA, 30 bp, Artificial Sequence
  Synthetic oligonucleotide
gtcatggattatccacggtggatataagga

SEQ ID NO: 466409 - DNA, 30 bp, Artificial Sequence
  Synthetic oligonucleotide
aattaccaagcacgttctctaaactaagga

SEQ ID NO: 466410 - DNA, 30 bp, Artificial Sequence
  Synthetic oligonucleotide
aattgagatcgagtaattgagatctaagga

SEQ ID NO: 466411 - DNA, 30 bp, Artificial Sequence
  Synthetic oligonucleotide
gctcgttacggcagcgtacatgcgtaagga

SEQ ID NO: 466412 - DNA, 30 bp, Artificial Sequence
  Synthetic oligonucleotide
gcggggtcagacacgcgagcctcgtaagga

SEQ ID NO: 466413 - DNA, 30 bp, Artificial Sequence
  Synthetic oligonucleotide
tagttttaagttatctacaaacgttaagga

SEQ ID NO: 466414 - DNA, 30 bp, Artificial Sequence
  Synthetic oligonucleotide
gcattccttaatcttagacatgtttaagga

SEQ ID NO: 466415 - DNA, 30 bp, Artificial Sequence
  Synthetic oligonucleotide
gatcacatgtgaacatggttgttaacagga

SEQ ID NO: 466416 - DNA, 30 bp, Artificial Sequence
  Synthetic oligonucleotide
aagcacagatcggtaggacggagcacagga

SEQ ID NO: 466417 - DNA, 30 bp, Artificial Sequence
  Synthetic oligonucleotide
ctagtaactcacctgttgtgtgtcacagga

SEQ ID NO: 466418 - DNA, 30 bp, Artificial Sequence
  Synthetic oligonucleotide
cgctcaaatcaccctggaggccagacagga

SEQ ID NO: 466419 - DNA, 30 bp, Artificial Sequence
  Synthetic oligonucleotide
caggcaggccactggcggcctaggacagga

SEQ ID NO: 466420 - DNA, 30 bp, Artificial Sequence
  Synthetic oligonucleotide
gaaacgtttgtgcccatatcgtgtacagga

SEQ ID NO: 466421 - DNA, 30 bp, Artificial Sequence
  Synthetic oligonucleotide
ttatgttaagccatggcttggtaaccagga

SEQ ID NO: 466422 - DNA, 30 bp, Artificial Sequence
  Synthetic oligonucleotide
gagaaacgagttttattcccttgaccagga

SEQ ID NO: 466423 - DNA, 30 bp, Artificial Sequence
  Synthetic oligonucleotide
acaggtcaatctcgatcctgcggcccagga

SEQ ID NO: 466424 - DNA, 30 bp, Artificial Sequence
  Synthetic oligonucleotide
ggttgctgaggaactcagcagttcccagga

SEQ ID NO: 466425 - DNA, 30 bp, Artificial Sequence
  Synthetic oligonucleotide
gtggtattgttcatgttctggaagccagga

SEQ ID NO: 466426 - DNA, 31 bp, Artificial Sequence
  Synthetic oligonucleotide
cccaagacttcataatcccatgaagccagga

SEQ ID NO: 466427 - DNA, 30 bp, Artificial Sequence
  Synthetic oligonucleotide
taattttatcgtatgcggcaagtagcagga

SEQ ID NO: 466428 - DNA, 30 bp, Artificial Sequence
  Synthetic oligonucleotide
actttgcactcgatcatttctcacgcagga

SEQ ID NO: 466429 - DNA, 30 bp, Artificial Sequence
  Synthetic oligonucleotide
cacctgcaaaggacggtatctgacgcagga

SEQ ID NO: 466430 - DNA, 30 bp, Artificial Sequence
  Synthetic oligonucleotide
cgcatgagcgtagtataatagtacgcagga

SEQ ID NO: 466431 - DNA, 30 bp, Artificial Sequence
  Synthetic oligonucleotide
agtatcccgttagtttggtcataggcagga

SEQ ID NO: 466432 - DNA, 30 bp, Artificial Sequence
  Synthetic oligonucleotide
agtcccaagctatctgtgaggttggcagga

SEQ ID NO: 466433 - DNA, 30 bp, Artificial Sequence
  Synthetic oligonucleotide
aaagtcgtgtcgcgcttggtctaatcagga

SEQ ID NO: 466434 - DNA, 30 bp, Artificial Sequence
  Synthetic oligonucleotide
gaaatcacctcaccgttacgggcatcagga

SEQ ID NO: 466435 - DNA, 30 bp, Artificial Sequence
  Synthetic oligonucleotide
ttgcaatccgtagcgactcgctactcagga

SEQ ID NO: 466436 - DNA, 30 bp, Artificial Sequence
  Synthetic oligonucleotide
gtatctcgccttggaacattgatctcagga

SEQ ID NO: 466437 - DNA, 30 bp, Artificial Sequence
  Synthetic oligonucleotide
ccaaaagggttcctaaggggtctctcagga

SEQ ID NO: 466438 - DNA, 30 bp, Artificial Sequence
  Synthetic oligonucleotide
acacctcttgggtggcaacaacggtcagga

SEQ ID NO: 466439 - DNA, 30 bp, Artificial Sequence
  Synthetic oligonucleotide
aataagacgctcctaatgagattgtcagga

SEQ ID NO: 466440 - DNA, 30 bp, Artificial Sequence
  Synthetic oligonucleotide
atggagtcatgaattgtggggaattcagga

SEQ ID NO: 466441 - DNA, 30 bp, Artificial Sequence
  Synthetic oligonucleotide
ggttataatgggttagacgtattttcagga

SEQ ID NO: 466442 - DNA, 30 bp, Artificial Sequence
  Synthetic oligonucleotide
aactgcaggatactataggttttttcagga

SEQ ID NO: 466443 - DNA, 30 bp, Artificial Sequence
  Synthetic oligonucleotide
atggttgcgcagcattcaggtatcagagga

SEQ ID NO: 466444 - DNA, 30 bp, Artificial Sequence
  Synthetic oligonucleotide
cacgggtgtatttacggggcgttcagagga

SEQ ID NO: 466445 - DNA, 30 bp, Artificial Sequence
  Synthetic oligonucleotide
aggtcgtactaggcggagcatcagagagga

SEQ ID NO: 466446 - DNA, 30 bp, Artificial Sequence
  Synthetic oligonucleotide
agattgtttagaattgccattacgagagga

SEQ ID NO: 466447 - DNA, 30 bp, Artificial Sequence
  Synthetic oligonucleotide
gtactattgatgaaagtcacaccgagagga

SEQ ID NO: 466448 - DNA, 30 bp, Artificial Sequence
  Synthetic oligonucleotide
gagctcttggaccaaatcggtgggagagga

SEQ ID NO: 466449 - DNA, 30 bp, Artificial Sequence
  Synthetic oligonucleotide
tgggcgtggtgtctcataactcttagagga

SEQ ID NO: 466450 - DNA, 30 bp, Artificial Sequence
  Synthetic oligonucleotide
aacagtatatctacgggcgctgttcgagga

SEQ ID NO: 466451 - DNA, 30 bp, Artificial Sequence
  Synthetic oligonucleotide
atgttaaggcctcaagcgacgacaggagga

SEQ ID NO: 466452 - DNA, 30 bp, Artificial Sequence
  Synthetic oligonucleotide
aaatatcaaatagtcgtatccgcaggagga

SEQ ID NO: 466453 - DNA, 30 bp, Artificial Sequence
  Synthetic oligonucleotide
taatgaggtccggacgggcaacacggagga

SEQ ID NO: 466454 - DNA, 30 bp, Artificial Sequence
  Synthetic oligonucleotide
agtagggccgcggcacgccttaccggagga

SEQ ID NO: 466455 - DNA, 30 bp, Artificial Sequence
  Synthetic oligonucleotide
accgtttcccacagatcaaatgtgggagga

SEQ ID NO: 466456 - DNA, 30 bp, Artificial Sequence
  Synthetic oligonucleotide
tggacgaggtagctccatgcatctggagga

SEQ ID NO: 466457 - DNA, 30 bp, Artificial Sequence
  Synthetic oligonucleotide
ttccactttcggttttggcgccgatgagga

SEQ ID NO: 466458 - DNA, 30 bp, Artificial Sequence
  Synthetic oligonucleotide
catattgctgaccttgtatccttatgagga

SEQ ID NO: 466459 - DNA, 30 bp, Artificial Sequence
  Synthetic oligonucleotide
gccgagtgtccgggtgagcagcactgagga

SEQ ID NO: 466460 - DNA, 30 bp, Artificial Sequence
  Synthetic oligonucleotide
atgttgtctcttgtcatgtgcaattgagga

SEQ ID NO: 466461 - DNA, 30 bp, Artificial Sequence
  Synthetic oligonucleotide
atcccgcaataactgcgactgcaaatagga

SEQ ID NO: 466462 - DNA, 30 bp, Artificial Sequence
  Synthetic oligonucleotide
gttattctagtcaggtaaccttcaatagga

SEQ ID NO: 466463 - DNA, 30 bp, Artificial Sequence
  Synthetic oligonucleotide
gttagagcaatacgaacgtacctaatagga

SEQ ID NO: 466464 - DNA, 30 bp, Artificial Sequence
  Synthetic oligonucleotide
gcactttacatcatgaggctcggcatagga

SEQ ID NO: 466465 - DNA, 30 bp, Artificial Sequence
  Synthetic oligonucleotide
tcaggttcgaccccgtaacgcatcatagga

SEQ ID NO: 466466 - DNA, 30 bp, Artificial Sequence
  Synthetic oligonucleotide
gcccaccgcgctaaaacataactgatagga

SEQ ID NO: 466467 - DNA, 30 bp, Artificial Sequence
  Synthetic oligonucleotide
ctccacttctcgcagtacgtaaatatagga

SEQ ID NO: 466468 - DNA, 30 bp, Artificial Sequence
  Synthetic oligonucleotide
aatatgctagctgtcaggtactatatagga

SEQ ID NO: 466469 - DNA, 30 bp, Artificial Sequence
  Synthetic oligonucleotide
tggccgcaacctagagaatcagacctagga

SEQ ID NO: 466470 - DNA, 30 bp, Artificial Sequence
  Synthetic oligonucleotide
gttagggccattaaaggtaaatggctagga

SEQ ID NO: 466471 - DNA, 30 bp, Artificial Sequence
  Synthetic oligonucleotide
tgcttgaaccaccttattccgtgtctagga

SEQ ID NO: 466472 - DNA, 30 bp, Artificial Sequence
  Synthetic oligonucleotide
atacgagcaaagtgtgaaatttttctagga

SEQ ID NO: 466473 - DNA, 30 bp, Artificial Sequence
  Synthetic oligonucleotide
agccggaagactgtaggcacctaagtagga

SEQ ID NO: 466474 - DNA, 30 bp, Artificial Sequence
  Synthetic oligonucleotide
aatctctcgtcctaggtacgcccagtagga

SEQ ID NO: 466475 - DNA, 30 bp, Artificial Sequence
  Synthetic oligonucleotide
actcaaccctcacgcagacctgcggtagga

SEQ ID NO: 466476 - DNA, 30 bp, Artificial Sequence
  Synthetic oligonucleotide
atatcctttagcggccaggcacgggtagga

SEQ ID NO: 466477 - DNA, 30 bp, Artificial Sequence
  Synthetic oligonucleotide
tcaccctgggtctggaggcaaggtgtagga

SEQ ID NO: 466478 - DNA, 30 bp, Artificial Sequence
  Synthetic oligonucleotide
gctctacacaatattcggaagggtgtagga

SEQ ID NO: 466479 - DNA, 30 bp, Artificial Sequence
  Synthetic oligonucleotide
gtcgcccaagcagatccatactgtgtagga

SEQ ID NO: 466480 - DNA, 30 bp, Artificial Sequence
  Synthetic oligonucleotide
tacgggtgtttgtgtcgttcagacttagga

SEQ ID NO: 466481 - DNA, 30 bp, Artificial Sequence
  Synthetic oligonucleotide
gagcgactggtatgttagtcggggttagga

SEQ ID NO: 466482 - DNA, 30 bp, Artificial Sequence
  Synthetic oligonucleotide
tcaacatagcctgtctcgtaagatttagga

SEQ ID NO: 466483 - DNA, 30 bp, Artificial Sequence
  Synthetic oligonucleotide
ggtctaaaagtccaaggtcggggtttagga

SEQ ID NO: 466484 - DNA, 30 bp, Artificial Sequence
  Synthetic oligonucleotide
actgctgcccgcaacattcgattaaacgga

SEQ ID NO: 466485 - DNA, 30 bp, Artificial Sequence
  Synthetic oligonucleotide
gagtagctccgacgtcctttggacaacgga

SEQ ID NO: 466486 - DNA, 30 bp, Artificial Sequence
  Synthetic oligonucleotide
tagcacatcttggaccgggacgggaacgga

SEQ ID NO: 466487 - DNA, 30 bp, Artificial Sequence
  Synthetic oligonucleotide
atagattagactagatttgtatgtaacgga

SEQ ID NO: 466488 - DNA, 30 bp, Artificial Sequence
  Synthetic oligonucleotide
caagcacgtgccgaacaacatcgacacgga

SEQ ID NO: 466489 - DNA, 30 bp, Artificial Sequence
  Synthetic oligonucleotide
atcaacgagagtctcaacttcacccacgga

SEQ ID NO: 466490 - DNA, 30 bp, Artificial Sequence
  Synthetic oligonucleotide
gactatttccggagcctaatgctccacgga

SEQ ID NO: 466491 - DNA, 30 bp, Artificial Sequence
  Synthetic oligonucleotide
attctacgtgattcagggatactgcacgga

SEQ ID NO: 466492 - DNA, 30 bp, Artificial Sequence
  Synthetic oligonucleotide
gtttaatgttcgagttaccagctgcacgga

SEQ ID NO: 466493 - DNA, 30 bp, Artificial Sequence
  Synthetic oligonucleotide
gaaacggaccggcgtctgcaaggtcacgga

SEQ ID NO: 466494 - DNA, 30 bp, Artificial Sequence
  Synthetic oligonucleotide
tgcagcggcgtagcggaacacacagacgga

SEQ ID NO: 466495 - DNA, 30 bp, Artificial Sequence
  Synthetic oligonucleotide
ttccctttcacgtaaaaatcttcagacgga

SEQ ID NO: 466496 - DNA, 30 bp, Artificial Sequence
  Synthetic oligonucleotide
ttaatatcactgttcctttaagtagacgga

SEQ ID NO: 466497 - DNA, 31 bp, Artificial Sequence
  Synthetic oligonucleotide
tttagtgtaggaccgtccacaaaacgacgga

SEQ ID NO: 466498 - DNA, 30 bp, Artificial Sequence
  Synthetic oligonucleotide
atcggatgtctgacgactagatccgacgga

SEQ ID NO: 466499 - DNA, 30 bp, Artificial Sequence
  Synthetic oligonucleotide
gttgaatagcggaacttttatgaggacgga

SEQ ID NO: 466500 - DNA, 30 bp, Artificial Sequence
  Synthetic oligonucleotide
atctgaagtagcgtcacgttaatggacgga

SEQ ID NO: 466501 - DNA, 30 bp, Artificial Sequence
  Synthetic oligonucleotide
ggtcaggagggcaatcctcgaactgacgga

SEQ ID NO: 466502 - DNA, 30 bp, Artificial Sequence
  Synthetic oligonucleotide
gagctttgaattgctctactcattgacgga

SEQ ID NO: 466503 - DNA, 30 bp, Artificial Sequence
  Synthetic oligonucleotide
tgatctcctcatcatgtatcagactacgga

SEQ ID NO: 466504 - DNA, 30 bp, Artificial Sequence
  Synthetic oligonucleotide
gccccgttcaatccattttgacggtacgga

SEQ ID NO: 466505 - DNA, 30 bp, Artificial Sequence
  Synthetic oligonucleotide
aggtcagcgttatccaattcaatgtacgga

SEQ ID NO: 466506 - DNA, 30 bp, Artificial Sequence
  Synthetic oligonucleotide
gatattcgggagcttgctcttctttacgga

SEQ ID NO: 466507 - DNA, 30 bp, Artificial Sequence
  Synthetic oligonucleotide
caccctgtttcagcctgaccagaaaccgga

SEQ ID NO: 466508 - DNA, 30 bp, Artificial Sequence
  Synthetic oligonucleotide
tgtaatcttctcctcggcagagcaaccgga

SEQ ID NO: 466509 - DNA, 30 bp, Artificial Sequence
  Synthetic oligonucleotide
agttgacatagcggttcaacatcaaccgga

SEQ ID NO: 466510 - DNA, 30 bp, Artificial Sequence
  Synthetic oligonucleotide
tgtcctgtgagcaccctatggctacccgga

SEQ ID NO: 466511 - DNA, 30 bp, Artificial Sequence
  Synthetic oligonucleotide
tccagaagaccgtcggacgtctaccccgga

SEQ ID NO: 466512 - DNA, 30 bp, Artificial Sequence
  Synthetic oligonucleotide
ccccgagataaaagttaatcgactcccgga

SEQ ID NO: 466513 - DNA, 30 bp, Artificial Sequence
  Synthetic oligonucleotide
cgcctatattgttcccatctaacagccgga

SEQ ID NO: 466514 - DNA, 30 bp, Artificial Sequence
  Synthetic oligonucleotide
tagggctcgttcgttgccctgttagccgga

SEQ ID NO: 466515 - DNA, 30 bp, Artificial Sequence
  Synthetic oligonucleotide
gacgggtgagcaaatgaagtggacgccgga

SEQ ID NO: 466516 - DNA, 30 bp, Artificial Sequence
  Synthetic oligonucleotide
actgcattggtatacgctatcctggccgga

SEQ ID NO: 466517 - DNA, 30 bp, Artificial Sequence
  Synthetic oligonucleotide
gggggcgtcgctaggggtgggggtgccgga

SEQ ID NO: 466518 - DNA, 30 bp, Artificial Sequence
  Synthetic oligonucleotide
taatttttgaccggtagaaaagcctccgga

SEQ ID NO: 466519 - DNA, 30 bp, Artificial Sequence
  Synthetic oligonucleotide
ttcaaaaattgactatggtagaagtccgga

SEQ ID NO: 466520 - DNA, 30 bp, Artificial Sequence
  Synthetic oligonucleotide
gatgacgtgccatgtagtacatagtccgga

SEQ ID NO: 466521 - DNA, 30 bp, Artificial Sequence
  Synthetic oligonucleotide
gtcccggcgcctcctagaggctcgtccgga

SEQ ID NO: 466522 - DNA, 30 bp, Artificial Sequence
  Synthetic oligonucleotide
cctaatcgtaattagaatggaatgtccgga

SEQ ID NO: 466523 - DNA, 30 bp, Artificial Sequence
  Synthetic oligonucleotide
aacttgggcgatgctgctggtatgtccgga

SEQ ID NO: 466524 - DNA, 30 bp, Artificial Sequence
  Synthetic oligonucleotide
aatttggtgagcaagtatatttgaagcgga

SEQ ID NO: 466525 - DNA, 30 bp, Artificial Sequence
  Synthetic oligonucleotide
catttcggacaactgctacaccgcagcgga

SEQ ID NO: 466526 - DNA, 30 bp, Artificial Sequence
  Synthetic oligonucleotide
agtgttcgctgcgaaaccccgttcagcgga

SEQ ID NO: 466527 - DNA, 30 bp, Artificial Sequence
  Synthetic oligonucleotide
ctacacggtcaggagaacggttagagcgga

SEQ ID NO: 466528 - DNA, 29 bp, Artificial Sequence
  Synthetic oligonucleotide
atggtttcggtgcagatatacggagcgga

SEQ ID NO: 466529 - DNA, 30 bp, Artificial Sequence
  Synthetic oligonucleotide
cttgcggcgcaaaaacaccgtcctagcgga

SEQ ID NO: 466530 - DNA, 30 bp, Artificial Sequence
  Synthetic oligonucleotide
tatgggacgtgcgttggacgatctagcgga

SEQ ID NO: 466531 - DNA, 30 bp, Artificial Sequence
  Synthetic oligonucleotide
tgactgatgcgcgtaaacatttaacgcgga

SEQ ID NO: 466532 - DNA, 30 bp, Artificial Sequence
  Synthetic oligonucleotide
taaaagacggcgtgaaacacaccccgcgga

SEQ ID NO: 466533 - DNA, 30 bp, Artificial Sequence
  Synthetic oligonucleotide
aataagttgtagcccccatatacgcgcgga

SEQ ID NO: 466534 - DNA, 30 bp, Artificial Sequence
  Synthetic oligonucleotide
gctatcaatgcacgttaaactacgcgcgga

SEQ ID NO: 466535 - DNA, 30 bp, Artificial Sequence
  Synthetic oligonucleotide
aagggcttctctgttatagcatggcgcgga

SEQ ID NO: 466536 - DNA, 30 bp, Artificial Sequence
  Synthetic oligonucleotide
tttataggccgctaatcacaagtgcgcgga

SEQ ID NO: 466537 - DNA, 30 bp, Artificial Sequence
  Synthetic oligonucleotide
ttatgcgttcgatcttattttaaaggcgga

SEQ ID NO: 466538 - DNA, 30 bp, Artificial Sequence
  Synthetic oligonucleotide
ctttcagattgtgaaaaatagttaggcgga

SEQ ID NO: 466539 - DNA, 30 bp, Artificial Sequence
  Synthetic oligonucleotide
cgggtagagcatgcttcagtacgcggcgga

SEQ ID NO: 466540 - DNA, 30 bp, Artificial Sequence
  Synthetic oligonucleotide
gataataaaacaagacgcagattcggcgga

SEQ ID NO: 466541 - DNA, 30 bp, Artificial Sequence
  Synthetic oligonucleotide
ttcttcgggtgaaagggaagtcgtggcgga

SEQ ID NO: 466542 - DNA, 30 bp, Artificial Sequence
  Synthetic oligonucleotide
ccgctgttacaaaagggttggccatgcgga

SEQ ID NO: 466543 - DNA, 30 bp, Artificial Sequence
  Synthetic oligonucleotide
taattcgtacacttttgatccgactgcgga

SEQ ID NO: 466544 - DNA, 30 bp, Artificial Sequence
  Synthetic oligonucleotide
ggatatctagaacttgcttctgaaatcgga

SEQ ID NO: 466545 - DNA, 30 bp, Artificial Sequence
  Synthetic oligonucleotide
ttattcatccaggtgatcttgtcaatcgga

SEQ ID NO: 466546 - DNA, 30 bp, Artificial Sequence
  Synthetic oligonucleotide
tttatgagaggttgtgacataggcatcgga

SEQ ID NO: 466547 - DNA, 30 bp, Artificial Sequence
  Synthetic oligonucleotide
agaataaatgcaacagagccccatatcgga

SEQ ID NO: 466548 - DNA, 30 bp, Artificial Sequence
  Synthetic oligonucleotide
gtggggaaaacatgaaaataacgtatcgga

SEQ ID NO: 466549 - DNA, 30 bp, Artificial Sequence
  Synthetic oligonucleotide
gcaccaataattacactaatgtttatcgga

SEQ ID NO: 466550 - DNA, 30 bp, Artificial Sequence
  Synthetic oligonucleotide
ttcatgccgctgagacgaacatcactcgga

SEQ ID NO: 466551 - DNA, 30 bp, Artificial Sequence
  Synthetic oligonucleotide
atctttgataataacggtctatgagtcgga

SEQ ID NO: 466552 - DNA, 30 bp, Artificial Sequence
  Synthetic oligonucleotide
ttggttatcgtaagacaaaacttagtcgga

SEQ ID NO: 466553 - DNA, 30 bp, Artificial Sequence
  Synthetic oligonucleotide
ttcagcgacctaggaaactgctaggtcgga

SEQ ID NO: 466554 - DNA, 30 bp, Artificial Sequence
  Synthetic oligonucleotide
taccagagcatataacatgctgtggtcgga

SEQ ID NO: 466555 - DNA, 30 bp, Artificial Sequence
  Synthetic oligonucleotide
tgtccgacatattgacgccccgcattcgga

SEQ ID NO: 466556 - DNA, 30 bp, Artificial Sequence
  Synthetic oligonucleotide
attgtatactgcgcgcaacccggattcgga

SEQ ID NO: 466557 - DNA, 30 bp, Artificial Sequence
  Synthetic oligonucleotide
cattactgaaccgcaccgaatggattcgga

SEQ ID NO: 466558 - DNA, 30 bp, Artificial Sequence
  Synthetic oligonucleotide
agccgtagtccggaaatgcggtgattcgga

SEQ ID NO: 466559 - DNA, 30 bp, Artificial Sequence
  Synthetic oligonucleotide
gttttgaagtgcggagtggaatacttcgga

SEQ ID NO: 466560 - DNA, 30 bp, Artificial Sequence
  Synthetic oligonucleotide
actattctgtctatctagatctgaaaggga

SEQ ID NO: 466561 - DNA, 30 bp, Artificial Sequence
  Synthetic oligonucleotide
tcttggcgagcgctgggtttggccaaggga

SEQ ID NO: 466562 - DNA, 30 bp, Artificial Sequence
  Synthetic oligonucleotide
actactacttacgtatttctcctcaaggga

SEQ ID NO: 466563 - DNA, 30 bp, Artificial Sequence
  Synthetic oligonucleotide
gttatataggcctccgacgttttcaaggga

SEQ ID NO: 466564 - DNA, 30 bp, Artificial Sequence
  Synthetic oligonucleotide
ctctgggaatttgaagtccacttgaaggga

SEQ ID NO: 466565 - DNA, 30 bp, Artificial Sequence
  Synthetic oligonucleotide
atgcgcgttcttcagttccgggataaggga

SEQ ID NO: 466566 - DNA, 30 bp, Artificial Sequence
  Synthetic oligonucleotide
ttcagaagttctgttgggacaattaaggga

SEQ ID NO: 466567 - DNA, 30 bp, Artificial Sequence
  Synthetic oligonucleotide
ccaaacccaggattcaccggctttaaggga

SEQ ID NO: 466568 - DNA, 30 bp, Artificial Sequence
  Synthetic oligonucleotide
cacgtattatacctttgtttttttaaggga

SEQ ID NO: 466569 - DNA, 30 bp, Artificial Sequence
  Synthetic oligonucleotide
cattctggtacgtcccgtatggcacaggga

SEQ ID NO: 466570 - DNA, 31 bp, Artificial Sequence
  Synthetic oligonucleotide
actatactgggtgttacctgcctcccaggga

SEQ ID NO: 466571 - DNA, 30 bp, Artificial Sequence
  Synthetic oligonucleotide
gtggtacttctctagaagacggtgcaggga

SEQ ID NO: 466572 - DNA, 30 bp, Artificial Sequence
  Synthetic oligonucleotide
tattgaaatgtcatcgcctagattcaggga

SEQ ID NO: 466573 - DNA, 30 bp, Artificial Sequence
  Synthetic oligonucleotide
tgtcattatcccagcagctgccttcaggga

SEQ ID NO: 466574 - DNA, 39 bp, Artificial Sequence
  Synthetic oligonucleotide
aagataatacattcatggtatgtcggggatcgggaggga

SEQ ID NO: 466575 - DNA, 30 bp, Artificial Sequence
  Synthetic oligonucleotide
aaattgcttctatccagtcgcgatgaggga

SEQ ID NO: 466576 - DNA, 30 bp, Artificial Sequence
  Synthetic oligonucleotide
gagctgcattatgccagttgaaagtaggga

SEQ ID NO: 466577 - DNA, 30 bp, Artificial Sequence
  Synthetic oligonucleotide
gcgtgctaggtcgcccggagctcttaggga

SEQ ID NO: 466578 - DNA, 30 bp, Artificial Sequence
  Synthetic oligonucleotide
tttagaatgtattttacagtgaaaacggga

SEQ ID NO: 466579 - DNA, 30 bp, Artificial Sequence
  Synthetic oligonucleotide
ttaattgccgacggtagcctatccacggga

SEQ ID NO: 466580 - DNA, 30 bp, Artificial Sequence
  Synthetic oligonucleotide
tggcatcgtccgacggaagtcggcacggga

SEQ ID NO: 466581 - DNA, 30 bp, Artificial Sequence
  Synthetic oligonucleotide
cttggcgcatcaatattgctgggcacggga

SEQ ID NO: 466582 - DNA, 30 bp, Artificial Sequence
  Synthetic oligonucleotide
ctgtccgatcgcagtgtaagcactacggga

SEQ ID NO: 466583 - DNA, 30 bp, Artificial Sequence
  Synthetic oligonucleotide
caatcccggcgttggtatatatctacggga

SEQ ID NO: 466584 - DNA, 30 bp, Artificial Sequence
  Synthetic oligonucleotide
actcgcgatattgaagcacgcagtacggga

SEQ ID NO: 466585 - DNA, 30 bp, Artificial Sequence
  Synthetic oligonucleotide
aagttaaataccgctgcactaggtacggga

SEQ ID NO: 466586 - DNA, 30 bp, Artificial Sequence
  Synthetic oligonucleotide
gcatccggcatatggactattccaccggga

SEQ ID NO: 466587 - DNA, 30 bp, Artificial Sequence
  Synthetic oligonucleotide
tttggtcattcgtgtaaataatacccggga

SEQ ID NO: 466588 - DNA, 30 bp, Artificial Sequence
  Synthetic oligonucleotide
gagtggaccggcgtagaatctggcccggga

SEQ ID NO: 466589 - DNA, 30 bp, Artificial Sequence
  Synthetic oligonucleotide
ggcacgcaaggtggggtatacatcccggga

SEQ ID NO: 466590 - DNA, 30 bp, Artificial Sequence
  Synthetic oligonucleotide
gtaaaagttttcggctgtacacggccggga

SEQ ID NO: 466591 - DNA, 30 bp, Artificial Sequence
  Synthetic oligonucleotide
gtagccatgcgctcccggcaccttccggga

SEQ ID NO: 466592 - DNA, 30 bp, Artificial Sequence
  Synthetic oligonucleotide
attctgtacaactgcggtcgccaagcggga

SEQ ID NO: 466593 - DNA, 30 bp, Artificial Sequence
  Synthetic oligonucleotide
ccgcgtcgcgaccgctcttaggaagcggga

SEQ ID NO: 466594 - DNA, 30 bp, Artificial Sequence
  Synthetic oligonucleotide
aattcttcctccggaaataagagagcggga

SEQ ID NO: 466595 - DNA, 30 bp, Artificial Sequence
  Synthetic oligonucleotide
gtaaatctctctcataaagttagagcggga

SEQ ID NO: 466596 - DNA, 30 bp, Artificial Sequence
  Synthetic oligonucleotide
gatacggtcctagacatctgggacgcggga

SEQ ID NO: 466597 - DNA, 30 bp, Artificial Sequence
  Synthetic oligonucleotide
cgaagccgcaacacaccccgagtcgcggga

SEQ ID NO: 466598 - DNA, 30 bp, Artificial Sequence
  Synthetic oligonucleotide
ctcctgggaaccaaatacgaggcggcggga

SEQ ID NO: 466599 - DNA, 30 bp, Artificial Sequence
  Synthetic oligonucleotide
aagacccagcgtcaatgatggtatgcggga

SEQ ID NO: 466600 - DNA, 30 bp, Artificial Sequence
  Synthetic oligonucleotide
cgaacatccaccctagatgaagtctcggga

SEQ ID NO: 466601 - DNA, 30 bp, Artificial Sequence
  Synthetic oligonucleotide
accttctgtttcgagtgttggacgtcggga

SEQ ID NO: 466602 - DNA, 30 bp, Artificial Sequence
  Synthetic oligonucleotide
gaagtcacatatgaacatctgatgtcggga

SEQ ID NO: 466603 - DNA, 30 bp, Artificial Sequence
  Synthetic oligonucleotide
taggggacccctttgtaagtatgttcggga

SEQ ID NO: 466604 - DNA, 30 bp, Artificial Sequence
  Synthetic oligonucleotide
cccattttgcgtgtcggtgctagaagggga

SEQ ID NO: 466605 - DNA, 30 bp, Artificial Sequence
  Synthetic oligonucleotide
gatgcctagctgttttcaactcgaagggga

SEQ ID NO: 466606 - DNA, 30 bp, Artificial Sequence
  Synthetic oligonucleotide
tgaatggtgctctaatcttaatgaagggga

SEQ ID NO: 466607 - DNA, 30 bp, Artificial Sequence
  Synthetic oligonucleotide
ctgtctttaagacgtggatgccacagggga

SEQ ID NO: 466608 - DNA, 30 bp, Artificial Sequence
  Synthetic oligonucleotide
gtagcagtcgtgggataactgtccagggga

SEQ ID NO: 466609 - DNA, 30 bp, Artificial Sequence
  Synthetic oligonucleotide
gttcgatggcggtcagcccattccagggga

SEQ ID NO: 466610 - DNA, 30 bp, Artificial Sequence
  Synthetic oligonucleotide
tctatccacgtgacgaaggtttccagggga

SEQ ID NO: 466611 - DNA, 30 bp, Artificial Sequence
  Synthetic oligonucleotide
atattacggttgcggagtagctgcagggga

SEQ ID NO: 466612 - DNA, 30 bp, Artificial Sequence
  Synthetic oligonucleotide
gggtaggaagggaccttcgtcttcagggga

SEQ ID NO: 466613 - DNA, 30 bp, Artificial Sequence
  Synthetic oligonucleotide
attcagtagtcacagcagcgacgtagggga

SEQ ID NO: 466614 - DNA, 30 bp, Artificial Sequence
  Synthetic oligonucleotide
tatgtaagtatcagtttatcacaccgggga

SEQ ID NO: 466615 - DNA, 30 bp, Artificial Sequence
  Synthetic oligonucleotide
atgtgacccaggggcgcacgggctcgggga

SEQ ID NO: 466616 - DNA, 30 bp, Artificial Sequence
  Synthetic oligonucleotide
aaggagttggactgcaatttgaaaggggga

SEQ ID NO: 466617 - DNA, 30 bp, Artificial Sequence
  Synthetic oligonucleotide
tcattgtaccgtagtattctttcaggggga

SEQ ID NO: 466618 - DNA, 40 bp, Artificial Sequence
  Synthetic oligonucleotide
aagataatacattcatggtatggtcggggatcgcggggga

SEQ ID NO: 466619 - DNA, 30 bp, Artificial Sequence
  Synthetic oligonucleotide
cgcttgtacgattcagatagaatcggggga

SEQ ID NO: 466620 - DNA, 40 bp, Artificial Sequence
  Synthetic oligonucleotide
aagataatacattcatggtatggtcgggcatcggggggga

SEQ ID NO: 466621 - DNA, 40 bp, Artificial Sequence
  Synthetic oligonucleotide
aagataatacattcatgctatggtcggggatcggggggga

SEQ ID NO: 466622 - DNA, 40 bp, Artificial Sequence
  Synthetic oligonucleotide
aagataatcaattcatggtatggtcggggatcggggggga

SEQ ID NO: 466623 - DNA, 30 bp, Artificial Sequence
  Synthetic oligonucleotide
caccttaatttacattagcctttgggggga

SEQ ID NO: 466624 - DNA, 30 bp, Artificial Sequence
  Synthetic oligonucleotide
tgcgcccttcatgtactgggcactggggga

SEQ ID NO: 466625 - DNA, 30 bp, Artificial Sequence
  Synthetic oligonucleotide
tgcgtttccaggtgcaaaacagaatgggga

SEQ ID NO: 466626 - DNA, 30 bp, Artificial Sequence
  Synthetic oligonucleotide
attgttacgcacggatataatgtctgggga

SEQ ID NO: 466627 - DNA, 30 bp, Artificial Sequence
  Synthetic oligonucleotide
tatttcagttacttgcaactagagtgggga

SEQ ID NO: 466628 - DNA, 30 bp, Artificial Sequence
  Synthetic oligonucleotide
ctggttttagttacagggttggattgggga

SEQ ID NO: 466629 - DNA, 30 bp, Artificial Sequence
  Synthetic oligonucleotide
ggtggtatagcagcggtcacctattgggga

SEQ ID NO: 466630 - DNA, 30 bp, Artificial Sequence
  Synthetic oligonucleotide
ggggtaaagtagggcaaggtatcttgggga

SEQ ID NO: 466631 - DNA, 30 bp, Artificial Sequence
  Synthetic oligonucleotide
gatgtagtccgttatgctgtcataatggga

SEQ ID NO: 466632 - DNA, 30 bp, Artificial Sequence
  Synthetic oligonucleotide
tccagggataatggaccggtcgtaatggga

SEQ ID NO: 466633 - DNA, 30 bp, Artificial Sequence
  Synthetic oligonucleotide
actgtgtactcgagttaaatcatcatggga

SEQ ID NO: 466634 - DNA, 30 bp, Artificial Sequence
  Synthetic oligonucleotide
tttacactgtcaaggtttcacactatggga

SEQ ID NO: 466635 - DNA, 30 bp, Artificial Sequence
  Synthetic oligonucleotide
ctccccgatttgtaatatccaagtatggga

SEQ ID NO: 466636 - DNA, 30 bp, Artificial Sequence
  Synthetic oligonucleotide
aaatggcatcaacatgtgggctttatggga

SEQ ID NO: 466637 - DNA, 30 bp, Artificial Sequence
  Synthetic oligonucleotide
gaacacaggcatcaggtatttatactggga

SEQ ID NO: 466638 - DNA, 30 bp, Artificial Sequence
  Synthetic oligonucleotide
tctgtcccaagagtgtcactcgtactggga

SEQ ID NO: 466639 - DNA, 30 bp, Artificial Sequence
  Synthetic oligonucleotide
taaattcgtgtatactttcagagcctggga

SEQ ID NO: 466640 - DNA, 30 bp, Artificial Sequence
  Synthetic oligonucleotide
agtctgatccagtgtaattaaaagctggga

SEQ ID NO: 466641 - DNA, 30 bp, Artificial Sequence
  Synthetic oligonucleotide
gctccctccagtgcaagtgccgggctggga

SEQ ID NO: 466642 - DNA, 30 bp, Artificial Sequence
  Synthetic oligonucleotide
ctaattatcgatgttgaacgcctgctggga

SEQ ID NO: 466643 - DNA, 30 bp, Artificial Sequence
  Synthetic oligonucleotide
aagcttgtgaactttaagtatgttctggga

SEQ ID NO: 466644 - DNA, 30 bp, Artificial Sequence
  Synthetic oligonucleotide
gaccggggatagacgccgccgctagtggga

SEQ ID NO: 466645 - DNA, 30 bp, Artificial Sequence
  Synthetic oligonucleotide
agacagagaagatgagtaacatccgtggga

SEQ ID NO: 466646 - DNA, 30 bp, Artificial Sequence
  Synthetic oligonucleotide
agaattgtttgaatagaggaggaattggga

SEQ ID NO: 466647 - DNA, 30 bp, Artificial Sequence
  Synthetic oligonucleotide
aacgtagctcatctaaagtcttaattggga

SEQ ID NO: 466648 - DNA, 30 bp, Artificial Sequence
  Synthetic oligonucleotide
cattcatcagccgtagcagggacattggga

SEQ ID NO: 466649 - DNA, 30 bp, Artificial Sequence
  Synthetic oligonucleotide
aatgggaggctcgggaattgccccttggga

SEQ ID NO: 466650 - DNA, 30 bp, Artificial Sequence
  Synthetic oligonucleotide
cccaagtccctcagcgttggctgcttggga

SEQ ID NO: 466651 - DNA, 30 bp, Artificial Sequence
  Synthetic oligonucleotide
cgggatttttaacagggtaaaaggttggga

SEQ ID NO: 466652 - DNA, 30 bp, Artificial Sequence
  Synthetic oligonucleotide
tgtgagtctacgatactactgtttttggga

SEQ ID NO: 466653 - DNA, 30 bp, Artificial Sequence
  Synthetic oligonucleotide
ttgtgttgatcggacacccgttcaaatgga

SEQ ID NO: 466654 - DNA, 30 bp, Artificial Sequence
  Synthetic oligonucleotide
agacgtttgaagcctttttagataaatgga

SEQ ID NO: 466655 - DNA, 30 bp, Artificial Sequence
  Synthetic oligonucleotide
taagcaatcgcccgttccttcttaaatgga

SEQ ID NO: 466656 - DNA, 30 bp, Artificial Sequence
  Synthetic oligonucleotide
ttcaagcacctcgcgagttctaccaatgga

SEQ ID NO: 466657 - DNA, 30 bp, Artificial Sequence
  Synthetic oligonucleotide
tagcaaaatatatagcacttccagaatgga

SEQ ID NO: 466658 - DNA, 30 bp, Artificial Sequence
  Synthetic oligonucleotide
actttgtcacactcataagagtcgaatgga

SEQ ID NO: 466659 - DNA, 30 bp, Artificial Sequence
  Synthetic oligonucleotide
accttttgatggcccggcatagggaatgga

SEQ ID NO: 466660 - DNA, 29 bp, Artificial Sequence
  Synthetic oligonucleotide
tttttagcgagcaattatcatataatgga

SEQ ID NO: 466661 - DNA, 30 bp, Artificial Sequence
  Synthetic oligonucleotide
aggtacatgtcgcggggaccgagacatgga

SEQ ID NO: 466662 - DNA, 30 bp, Artificial Sequence
  Synthetic oligonucleotide
aaatctttggagggtatgcgctaccatgga

SEQ ID NO: 466663 - DNA, 30 bp, Artificial Sequence
  Synthetic oligonucleotide
gatttttcatgtatagggatgtagcatgga

SEQ ID NO: 466664 - DNA, 30 bp, Artificial Sequence
  Synthetic oligonucleotide
ttataggggcgggatctgcaccggcatgga

SEQ ID NO: 466665 - DNA, 30 bp, Artificial Sequence
  Synthetic oligonucleotide
cggctaatcttctcaggaagggggcatgga

SEQ ID NO: 466666 - DNA, 30 bp, Artificial Sequence
  Synthetic oligonucleotide
cattaatgggacttgagttcgcaagatgga

SEQ ID NO: 466667 - DNA, 30 bp, Artificial Sequence
  Synthetic oligonucleotide
cataccggatatagacagatccacgatgga

SEQ ID NO: 466668 - DNA, 30 bp, Artificial Sequence
  Synthetic oligonucleotide
gggaatcgccggaggattagagacgatgga

SEQ ID NO: 466669 - DNA, 30 bp, Artificial Sequence
  Synthetic oligonucleotide
ctgaggtcgagccgagctacttacgatgga

SEQ ID NO: 466670 - DNA, 30 bp, Artificial Sequence
  Synthetic oligonucleotide
tatgttgtgtttctacgactcatggatgga

SEQ ID NO: 466671 - DNA, 30 bp, Artificial Sequence
  Synthetic oligonucleotide
agtccctttcagtaacacgtcgttgatgga

SEQ ID NO: 466672 - DNA, 30 bp, Artificial Sequence
  Synthetic oligonucleotide
taccgagataacgtatagacctcatatgga

SEQ ID NO: 466673 - DNA, 30 bp, Artificial Sequence
  Synthetic oligonucleotide
ctcggaccacatcctccattattatatgga

SEQ ID NO: 466674 - DNA, 30 bp, Artificial Sequence
  Synthetic oligonucleotide
actttggtttcgatcattcgagactatgga

SEQ ID NO: 466675 - DNA, 30 bp, Artificial Sequence
  Synthetic oligonucleotide
gaagttccctgggcgccaaacctgtatgga

SEQ ID NO: 466676 - DNA, 30 bp, Artificial Sequence
  Synthetic oligonucleotide
gactatgcctgcgctggagaccgttatgga

SEQ ID NO: 466677 - DNA, 30 bp, Artificial Sequence
  Synthetic oligonucleotide
ggatatgggagtgttcgctttggttatgga

SEQ ID NO: 466678 - DNA, 30 bp, Artificial Sequence
  Synthetic oligonucleotide
ttttaataattgtagtaaaacagcactgga

SEQ ID NO: 466679 - DNA, 30 bp, Artificial Sequence
  Synthetic oligonucleotide
ggccacctcagttataataccttcactgga

SEQ ID NO: 466680 - DNA, 30 bp, Artificial Sequence
  Synthetic oligonucleotide
tcacgccatgcattcgtgcaaaagactgga

SEQ ID NO: 466681 - DNA, 30 bp, Artificial Sequence
  Synthetic oligonucleotide
taaagacaattgtgtcaataaacgactgga

SEQ ID NO: 466682 - DNA, 30 bp, Artificial Sequence
  Synthetic oligonucleotide
gaacatcagttgtcttaacagatgactgga

SEQ ID NO: 466683 - DNA, 30 bp, Artificial Sequence
  Synthetic oligonucleotide
cttattgtatagcgtgagaacttgactgga

SEQ ID NO: 466684 - DNA, 30 bp, Artificial Sequence
  Synthetic oligonucleotide
aaatctaaacgtggatcgttaagtactgga

SEQ ID NO: 466685 - DNA, 30 bp, Artificial Sequence
  Synthetic oligonucleotide
tgtcggagctccgggagtttaattactgga

SEQ ID NO: 466686 - DNA, 30 bp, Artificial Sequence
  Synthetic oligonucleotide
ttcttgaatcaacacgccggtgaacctgga

SEQ ID NO: 466687 - DNA, 30 bp, Artificial Sequence
  Synthetic oligonucleotide
attacgtaaaaatgtacgacgcaccctgga

SEQ ID NO: 466688 - DNA, 30 bp, Artificial Sequence
  Synthetic oligonucleotide
ccgcattaagtccggaaaccggggcctgga

SEQ ID NO: 466689 - DNA, 30 bp, Artificial Sequence
  Synthetic oligonucleotide
ggcaaggtgccaacctgaaggttgcctgga

SEQ ID NO: 466690 - DNA, 30 bp, Artificial Sequence
  Synthetic oligonucleotide
tacctatatttctggcgtgtgcatcctgga

SEQ ID NO: 466691 - DNA, 30 bp, Artificial Sequence
  Synthetic oligonucleotide
gagggacggatttagacaacgaaagctgga

SEQ ID NO: 466692 - DNA, 30 bp, Artificial Sequence
  Synthetic oligonucleotide
ttgtagtagctgtcttggctctccgctgga

SEQ ID NO: 466693 - DNA, 30 bp, Artificial Sequence
  Synthetic oligonucleotide
tctacgcccactggtgccgaaagcgctgga

SEQ ID NO: 466694 - DNA, 30 bp, Artificial Sequence
  Synthetic oligonucleotide
atctgtacggagagattcttctactctgga

SEQ ID NO: 466695 - DNA, 30 bp, Artificial Sequence
  Synthetic oligonucleotide
ataatcttaggaacaagcgaaaattctgga

SEQ ID NO: 466696 - DNA, 30 bp, Artificial Sequence
  Synthetic oligonucleotide
ctcagcatcaatatacgtgccaattctgga

SEQ ID NO: 466697 - DNA, 30 bp, Artificial Sequence
  Synthetic oligonucleotide
cgtaggctctgtcacggagctatttctgga

SEQ ID NO: 466698 - DNA, 30 bp, Artificial Sequence
  Synthetic oligonucleotide
tgggcgaactcggaccctagtccaagtgga

SEQ ID NO: 466699 - DNA, 30 bp, Artificial Sequence
  Synthetic oligonucleotide
ttatcgacggaatcactgttagacagtgga

SEQ ID NO: 466700 - DNA, 30 bp, Artificial Sequence
  Synthetic oligonucleotide
aaaactacttctcgtagtctccgcagtgga

SEQ ID NO: 466701 - DNA, 30 bp, Artificial Sequence
  Synthetic oligonucleotide
gccttctagtcccgtgaggacatgagtgga

SEQ ID NO: 466702 - DNA, 30 bp, Artificial Sequence
  Synthetic oligonucleotide
gatctaaatacgagcgcgtcgggtcgtgga

SEQ ID NO: 466703 - DNA, 30 bp, Artificial Sequence
  Synthetic oligonucleotide
accctctacgcacgggcctaggaaggtgga

SEQ ID NO: 466704 - DNA, 30 bp, Artificial Sequence
  Synthetic oligonucleotide
tgtaataattgaggcaccggtgccggtgga

SEQ ID NO: 466705 - DNA, 30 bp, Artificial Sequence
  Synthetic oligonucleotide
tcatcttgattgaattcttgttccggtgga

SEQ ID NO: 466706 - DNA, 30 bp, Artificial Sequence
  Synthetic oligonucleotide
gcaacttgaaattccgtattcgtcggtgga

SEQ ID NO: 466707 - DNA, 30 bp, Artificial Sequence
  Synthetic oligonucleotide
cttgattacctgcaattaacgccgggtgga

SEQ ID NO: 466708 - DNA, 30 bp, Artificial Sequence
  Synthetic oligonucleotide
agttgttttctcggtggtcccctgggtgga

SEQ ID NO: 466709 - DNA, 30 bp, Artificial Sequence
  Synthetic oligonucleotide
ggtggcttgaatcggagagacttgggtgga

SEQ ID NO: 466710 - DNA, 30 bp, Artificial Sequence
  Synthetic oligonucleotide
gttagcgctaggagcgctggacatggtgga

SEQ ID NO: 466711 - DNA, 30 bp, Artificial Sequence
  Synthetic oligonucleotide
aattcgcttcttatgattcaggatggtgga

SEQ ID NO: 466712 - DNA, 30 bp, Artificial Sequence
  Synthetic oligonucleotide
aaaggtctggattgttcaggccctggtgga

SEQ ID NO: 466713 - DNA, 40 bp, Artificial Sequence
  Synthetic oligonucleotide
aagataatacattcatggtatggtcggggatcgtggtgga

SEQ ID NO: 466714 - DNA, 30 bp, Artificial Sequence
  Synthetic oligonucleotide
acttgtcgtcatgccatgccgttatgtgga

SEQ ID NO: 466715 - DNA, 30 bp, Artificial Sequence
  Synthetic oligonucleotide
ggcattacgcatgttccggtctcctgtgga

SEQ ID NO: 466716 - DNA, 30 bp, Artificial Sequence
  Synthetic oligonucleotide
tcattcactattcttggtatctcgtgtgga

SEQ ID NO: 466717 - DNA, 30 bp, Artificial Sequence
  Synthetic oligonucleotide
taacattgtaggaggggaaagtggtgtgga

SEQ ID NO: 466718 - DNA, 30 bp, Artificial Sequence
  Synthetic oligonucleotide
gagttggggtactagggtgatatgtgtgga

SEQ ID NO: 466719 - DNA, 30 bp, Artificial Sequence
  Synthetic oligonucleotide
ttcaccgttactcagacgcttcgaattgga

SEQ ID NO: 466720 - DNA, 30 bp, Artificial Sequence
  Synthetic oligonucleotide
attatttcaggcccttttaagttaattgga

SEQ ID NO: 466721 - DNA, 30 bp, Artificial Sequence
  Synthetic oligonucleotide
atatcagcctataatgtcttcaacattgga

SEQ ID NO: 466722 - DNA, 30 bp, Artificial Sequence
  Synthetic oligonucleotide
atagcattctaaaacttctacgacattgga

SEQ ID NO: 466723 - DNA, 30 bp, Artificial Sequence
  Synthetic oligonucleotide
ttaatgtcgacctggagaaggcccattgga

SEQ ID NO: 466724 - DNA, 30 bp, Artificial Sequence
  Synthetic oligonucleotide
tcccgtattcatccatatgtatccattgga

SEQ ID NO: 466725 - DNA, 30 bp, Artificial Sequence
  Synthetic oligonucleotide
ggtgttttcgttgcaggcgcattcattgga

SEQ ID NO: 466726 - DNA, 30 bp, Artificial Sequence
  Synthetic oligonucleotide
ctaactggttgttttgcatacaagattgga

SEQ ID NO: 466727 - DNA, 30 bp, Artificial Sequence
  Synthetic oligonucleotide
tatcgacgcgctttcagtcgcccgattgga

SEQ ID NO: 466728 - DNA, 30 bp, Artificial Sequence
  Synthetic oligonucleotide
ttagttccgcggagaaacattgtgattgga

SEQ ID NO: 466729 - DNA, 30 bp, Artificial Sequence
  Synthetic oligonucleotide
tccagcacaccaggcctacctagtattgga

SEQ ID NO: 466730 - DNA, 30 bp, Artificial Sequence
  Synthetic oligonucleotide
aaaaaaagtgaactgcttttccgtattgga

SEQ ID NO: 466731 - DNA, 30 bp, Artificial Sequence
  Synthetic oligonucleotide
cactagccagcggctcgaatggttattgga

SEQ ID NO: 466732 - DNA, 30 bp, Artificial Sequence
  Synthetic oligonucleotide
ttcaagcacggttttgggggtcgacttgga

SEQ ID NO: 466733 - DNA, 30 bp, Artificial Sequence
  Synthetic oligonucleotide
gaccccattgtcctggtggaagaccttgga

SEQ ID NO: 466734 - DNA, 30 bp, Artificial Sequence
  Synthetic oligonucleotide
ttcacagcacgtcgggagccttaccttgga

SEQ ID NO: 466735 - DNA, 30 bp, Artificial Sequence
  Synthetic oligonucleotide
ccaagtcaccgccattgcaaggagcttgga

SEQ ID NO: 466736 - DNA, 30 bp, Artificial Sequence
  Synthetic oligonucleotide
tacaagggtatagggttgattaggcttgga

SEQ ID NO: 466737 - DNA, 30 bp, Artificial Sequence
  Synthetic oligonucleotide
aagctcatccactatggggttatgcttgga

SEQ ID NO: 466738 - DNA, 30 bp, Artificial Sequence
  Synthetic oligonucleotide
tagattacctatctgtcctctaatcttgga

SEQ ID NO: 466739 - DNA, 30 bp, Artificial Sequence
  Synthetic oligonucleotide
gactccaacccagtagaacgtaaagttgga

SEQ ID NO: 466740 - DNA, 30 bp, Artificial Sequence
  Synthetic oligonucleotide
agtggttaaattttatttttaggagttgga

SEQ ID NO: 466741 - DNA, 30 bp, Artificial Sequence
  Synthetic oligonucleotide
gtccaatgcatagcactagtcatagttgga

SEQ ID NO: 466742 - DNA, 30 bp, Artificial Sequence
  Synthetic oligonucleotide
atcgtggttactacgtgctggggcgttgga

SEQ ID NO: 466743 - DNA, 30 bp, Artificial Sequence
  Synthetic oligonucleotide
agaggaccctatgggcactatggggttgga

SEQ ID NO: 466744 - DNA, 30 bp, Artificial Sequence
  Synthetic oligonucleotide
tccaggaaactttacgctagtttggttgga

SEQ ID NO: 466745 - DNA, 30 bp, Artificial Sequence
  Synthetic oligonucleotide
gttgtcagccctgtgcgcacaaatgttgga

SEQ ID NO: 466746 - DNA, 30 bp, Artificial Sequence
  Synthetic oligonucleotide
aagtttcctcaagtataatgaggtgttgga

SEQ ID NO: 466747 - DNA, 30 bp, Artificial Sequence
  Synthetic oligonucleotide
tattctatatgcgggttagattgtgttgga

SEQ ID NO: 466748 - DNA, 30 bp, Artificial Sequence
  Synthetic oligonucleotide
caagggttgggagctgcacgagtatttgga

SEQ ID NO: 466749 - DNA, 30 bp, Artificial Sequence
  Synthetic oligonucleotide
gactatatcttataaagatgctgctttgga

SEQ ID NO: 466750 - DNA, 30 bp, Artificial Sequence
  Synthetic oligonucleotide
gtctacaaatttctgccaaggttctttgga

SEQ ID NO: 466751 - DNA, 30 bp, Artificial Sequence
  Synthetic oligonucleotide
ctttgtccgttgtgttaggtaaagtttgga

SEQ ID NO: 466752 - DNA, 30 bp, Artificial Sequence
  Synthetic oligonucleotide
ttcttgcccgggcccgttcaatagtttgga

SEQ ID NO: 466753 - DNA, 30 bp, Artificial Sequence
  Synthetic oligonucleotide
tcgcgaactcacatcactacccggtttgga

SEQ ID NO: 466754 - DNA, 30 bp, Artificial Sequence
  Synthetic oligonucleotide
ctagatagcacttccgggtgtacttttgga

SEQ ID NO: 466755 - DNA, 30 bp, Artificial Sequence
  Synthetic oligonucleotide
ttctagcttggtgtggataccggttttgga

SEQ ID NO: 466756 - DNA, 30 bp, Artificial Sequence
  Synthetic oligonucleotide
ttaaaagttggtagtttttcaggaaaatga

SEQ ID NO: 466757 - DNA, 30 bp, Artificial Sequence
  Synthetic oligonucleotide
actggtgtttcacgtgaatacaggaaatga

SEQ ID NO: 466758 - DNA, 30 bp, Artificial Sequence
  Synthetic oligonucleotide
tccctttgcacatttccacaagtgaaatga

SEQ ID NO: 466759 - DNA, 30 bp, Artificial Sequence
  Synthetic oligonucleotide
gacgggatcgatgaatgcagaagtaaatga

SEQ ID NO: 466760 - DNA, 30 bp, Artificial Sequence
  Synthetic oligonucleotide
ggattaacccgaggtttgagccttaaatga

SEQ ID NO: 466761 - DNA, 30 bp, Artificial Sequence
  Synthetic oligonucleotide
catcattaaaacatgtaaactgttaaatga

SEQ ID NO: 466762 - DNA, 30 bp, Artificial Sequence
  Synthetic oligonucleotide
aaataacatgtgcggtgtacaccacaatga

SEQ ID NO: 466763 - DNA, 30 bp, Artificial Sequence
  Synthetic oligonucleotide
tcataaccgattacaaatattcgacaatga

SEQ ID NO: 466764 - DNA, 30 bp, Artificial Sequence
  Synthetic oligonucleotide
aaactacttgctcgcgtgccgagccaatga

SEQ ID NO: 466765 - DNA, 31 bp, Artificial Sequence
  Synthetic oligonucleotide
aagagacttgaacttgctcgtgagccaatga

SEQ ID NO: 466766 - DNA, 30 bp, Artificial Sequence
  Synthetic oligonucleotide
aagtggtcagttggggtacctggccaatga

SEQ ID NO: 466767 - DNA, 30 bp, Artificial Sequence
  Synthetic oligonucleotide
taatcccatattctcttagatacgcaatga

SEQ ID NO: 466768 - DNA, 30 bp, Artificial Sequence
  Synthetic oligonucleotide
ggaggcgataatcgaaagatctggcaatga

SEQ ID NO: 466769 - DNA, 30 bp, Artificial Sequence
  Synthetic oligonucleotide
aaaggcgtttcttagacgaacgatcaatga

SEQ ID NO: 466770 - DNA, 30 bp, Artificial Sequence
  Synthetic oligonucleotide
acctcagtgcgcgacgacgcattagaatga

SEQ ID NO: 466771 - DNA, 28 bp, Artificial Sequence
  Synthetic oligonucleotide
agttctagatggtcgttagtacgaatga

SEQ ID NO: 466772 - DNA, 30 bp, Artificial Sequence
  Synthetic oligonucleotide
ccctctgtcattgggcgttgctccgaatga

SEQ ID NO: 466773 - DNA, 30 bp, Artificial Sequence
  Synthetic oligonucleotide
gtgacgtaaagagctatttaagtcgaatga

SEQ ID NO: 466774 - DNA, 30 bp, Artificial Sequence
  Synthetic oligonucleotide
taaaactctgtacactagtaaggggaatga

SEQ ID NO: 466775 - DNA, 30 bp, Artificial Sequence
  Synthetic oligonucleotide
tattcacgaggcgaacctttggatgaatga

SEQ ID NO: 466776 - DNA, 30 bp, Artificial Sequence
  Synthetic oligonucleotide
gcattttgttgcaataacctgtactaatga

SEQ ID NO: 466777 - DNA, 30 bp, Artificial Sequence
  Synthetic oligonucleotide
gaatctctggggccacatctaccctaatga

SEQ ID NO: 466778 - DNA, 30 bp, Artificial Sequence
  Synthetic oligonucleotide
tacccggagtccgtctgcgggggctaatga

SEQ ID NO: 466779 - DNA, 30 bp, Artificial Sequence
  Synthetic oligonucleotide
gcgggaaggcggacagcgttggggtaatga

SEQ ID NO: 466780 - DNA, 30 bp, Artificial Sequence
  Synthetic oligonucleotide
tcgctgggtccatctggacacggttaatga

SEQ ID NO: 466781 - DNA, 30 bp, Artificial Sequence
  Synthetic oligonucleotide
ggacgccttcgtgaacatggagcaacatga

SEQ ID NO: 466782 - DNA, 30 bp, Artificial Sequence
  Synthetic oligonucleotide
ttcactacgtttgtcgggtcgtcaacatga

SEQ ID NO: 466783 - DNA, 30 bp, Artificial Sequence
  Synthetic oligonucleotide
tcataaggaggttccccgggcgtaacatga

SEQ ID NO: 466784 - DNA, 30 bp, Artificial Sequence
  Synthetic oligonucleotide
cgaacctctaagagtgaccaaagcacatga

SEQ ID NO: 466785 - DNA, 29 bp, Artificial Sequence
  Synthetic oligonucleotide
ttatttaacatgacgacttcgggacatga

SEQ ID NO: 466786 - DNA, 30 bp, Artificial Sequence
  Synthetic oligonucleotide
gtgattattaccggtcttcgcatgacatga

SEQ ID NO: 466787 - DNA, 30 bp, Artificial Sequence
  Synthetic oligonucleotide
tgactgttatccgtgtaggtgatgacatga

SEQ ID NO: 466788 - DNA, 30 bp, Artificial Sequence
  Synthetic oligonucleotide
tatccccaagcgacacgatgcgctacatga

SEQ ID NO: 466789 - DNA, 30 bp, Artificial Sequence
  Synthetic oligonucleotide
agctcttgttattaggaaggccacccatga

SEQ ID NO: 466790 - DNA, 30 bp, Artificial Sequence
  Synthetic oligonucleotide
tcgtaacacatgggacaatgatgtccatga

SEQ ID NO: 466791 - DNA, 30 bp, Artificial Sequence
  Synthetic oligonucleotide
cgacaggcatgctccatcggaggagcatga

SEQ ID NO: 466792 - DNA, 31 bp, Artificial Sequence
  Synthetic oligonucleotide
acaatagggactagctttacgtaccgcatga

SEQ ID NO: 466793 - DNA, 30 bp, Artificial Sequence
  Synthetic oligonucleotide
ccggtatttcgttgtcggggccgcgcatga

SEQ ID NO: 466794 - DNA, 30 bp, Artificial Sequence
  Synthetic oligonucleotide
aagcaacacacgtcgggaaaaaaggcatga

SEQ ID NO: 466795 - DNA, 30 bp, Artificial Sequence
  Synthetic oligonucleotide
cgaaagaggagacaactctgaacggcatga

SEQ ID NO: 466796 - DNA, 30 bp, Artificial Sequence
  Synthetic oligonucleotide
catctatatgctcggggatttttggcatga

SEQ ID NO: 466797 - DNA, 30 bp, Artificial Sequence
  Synthetic oligonucleotide
aaatattatggcagatagtgaccatcatga

SEQ ID NO: 466798 - DNA, 30 bp, Artificial Sequence
  Synthetic oligonucleotide
gcaaattctctttgttgggtcctatcatga

SEQ ID NO: 466799 - DNA, 30 bp, Artificial Sequence
  Synthetic oligonucleotide
atcatattgtccgctctgtagctatcatga

SEQ ID NO: 466800 - DNA, 29 bp, Artificial Sequence
  Synthetic oligonucleotide
cgtaattttttccattatgggcctcatga

SEQ ID NO: 466801 - DNA, 30 bp, Artificial Sequence
  Synthetic oligonucleotide
atgaagatgacatcggacttcgtctcatga

SEQ ID NO: 466802 - DNA, 30 bp, Artificial Sequence
  Synthetic oligonucleotide
ttaagccaccatagttaatcggggtcatga

SEQ ID NO: 466803 - DNA, 30 bp, Artificial Sequence
  Synthetic oligonucleotide
aagccggcgtagtttgcacacatgtcatga

SEQ ID NO: 466804 - DNA, 30 bp, Artificial Sequence
  Synthetic oligonucleotide
atgtgggaactaggtctgcggccttcatga

SEQ ID NO: 466805 - DNA, 30 bp, Artificial Sequence
  Synthetic oligonucleotide
cttgcgcgcagtacagtcgagggttcatga

SEQ ID NO: 466806 - DNA, 30 bp, Artificial Sequence
  Synthetic oligonucleotide
gccgttgcaagcaagttcctcggcagatga

SEQ ID NO: 466807 - DNA, 30 bp, Artificial Sequence
  Synthetic oligonucleotide
gcttttgaacatgccatcgtctagagatga

SEQ ID NO: 466808 - DNA, 30 bp, Artificial Sequence
  Synthetic oligonucleotide
gtaagtgactcttacggtagtaggagatga

SEQ ID NO: 466809 - DNA, 30 bp, Artificial Sequence
  Synthetic oligonucleotide
aatttgactgaacgcgctcccaatagatga

SEQ ID NO: 466810 - DNA, 30 bp, Artificial Sequence
  Synthetic oligonucleotide
ccgatccccccacagcgcggtaatagatga

SEQ ID NO: 466811 - DNA, 30 bp, Artificial Sequence
  Synthetic oligonucleotide
gagggatcattatataacgctcaacgatga

SEQ ID NO: 466812 - DNA, 30 bp, Artificial Sequence
  Synthetic oligonucleotide
cctgatcgctcagcctctcacgaacgatga

SEQ ID NO: 466813 - DNA, 30 bp, Artificial Sequence
  Synthetic oligonucleotide
tactctatcttttgagtccaagcacgatga

SEQ ID NO: 466814 - DNA, 30 bp, Artificial Sequence
  Synthetic oligonucleotide
taatcaaaaattttaaattgggcccgatga

SEQ ID NO: 466815 - DNA, 30 bp, Artificial Sequence
  Synthetic oligonucleotide
ctgtctgcgtaacgatcgacatcccgatga

SEQ ID NO: 466816 - DNA, 30 bp, Artificial Sequence
  Synthetic oligonucleotide
aaagagattagctttgtggaatcgcgatga

SEQ ID NO: 466817 - DNA, 30 bp, Artificial Sequence
  Synthetic oligonucleotide
gagctcatcatcatggtcattcaaggatga

SEQ ID NO: 466818 - DNA, 30 bp, Artificial Sequence
  Synthetic oligonucleotide
ttagttatcggagctccaatagaaggatga

SEQ ID NO: 466819 - DNA, 30 bp, Artificial Sequence
  Synthetic oligonucleotide
agactgactaggcatcaacgatcaggatga

SEQ ID NO: 466820 - DNA, 30 bp, Artificial Sequence
  Synthetic oligonucleotide
gcggcatctcttggatggacggacggatga

SEQ ID NO: 466821 - DNA, 30 bp, Artificial Sequence
  Synthetic oligonucleotide
atatgggcagtataacattgtttcggatga

SEQ ID NO: 466822 - DNA, 30 bp, Artificial Sequence
  Synthetic oligonucleotide
gtgagtcgcagcagtgtgacgtggggatga

SEQ ID NO: 466823 - DNA, 30 bp, Artificial Sequence
  Synthetic oligonucleotide
atcactctctcggtaggggactctggatga

SEQ ID NO: 466824 - DNA, 30 bp, Artificial Sequence
  Synthetic oligonucleotide
gaggtgggccaatgtgttgaagactgatga

SEQ ID NO: 466825 - DNA, 30 bp, Artificial Sequence
  Synthetic oligonucleotide
cttagtctatgattcattcgtacgtgatga

SEQ ID NO: 466826 - DNA, 30 bp, Artificial Sequence
  Synthetic oligonucleotide
gctgattacatcacaggtaatgtgtgatga

SEQ ID NO: 466827 - DNA, 30 bp, Artificial Sequence
  Synthetic oligonucleotide
tgataagcgcaataggcatctatttgatga

SEQ ID NO: 466828 - DNA, 30 bp, Artificial Sequence
  Synthetic oligonucleotide
tatttaagatagttgattaaacaaatatga

SEQ ID NO: 466829 - DNA, 30 bp, Artificial Sequence
  Synthetic oligonucleotide
tgtaagacgctagccccagatcccatatga

SEQ ID NO: 466830 - DNA, 30 bp, Artificial Sequence
  Synthetic oligonucleotide
agcgaggatcgcctctcagtccgcatatga

SEQ ID NO: 466831 - DNA, 30 bp, Artificial Sequence
  Synthetic oligonucleotide
aactgcagcagagctaagaggcctatatga

SEQ ID NO: 466832 - DNA, 30 bp, Artificial Sequence
  Synthetic oligonucleotide
gattgccacgtcgtgtttattcctatatga

SEQ ID NO: 466833 - DNA, 30 bp, Artificial Sequence
  Synthetic oligonucleotide
gtactgcgggataaagctacggttatatga

SEQ ID NO: 466834 - DNA, 30 bp, Artificial Sequence
  Synthetic oligonucleotide
ataagagaagtctagagtcttagactatga

SEQ ID NO: 466835 - DNA, 30 bp, Artificial Sequence
  Synthetic oligonucleotide
agcagcggttcactacagaaccgcctatga

SEQ ID NO: 466836 - DNA, 30 bp, Artificial Sequence
  Synthetic oligonucleotide
gaggttaaatttgtttttctactcctatga

SEQ ID NO: 466837 - DNA, 30 bp, Artificial Sequence
  Synthetic oligonucleotide
gggcctgtgcatgttggtcttttcctatga

SEQ ID NO: 466838 - DNA, 30 bp, Artificial Sequence
  Synthetic oligonucleotide
tgtgtcttacctctaaatatagggctatga

SEQ ID NO: 466839 - DNA, 30 bp, Artificial Sequence
  Synthetic oligonucleotide
gctctctctaattctcagtattggctatga

SEQ ID NO: 466840 - DNA, 30 bp, Artificial Sequence
  Synthetic oligonucleotide
ggtcatagtgcgtttccgtcggatctatga

SEQ ID NO: 466841 - DNA, 30 bp, Artificial Sequence
  Synthetic oligonucleotide
ttagaatttcagccagtgagttaagtatga

SEQ ID NO: 466842 - DNA, 30 bp, Artificial Sequence
  Synthetic oligonucleotide
tcgacggatgaatttccactactagtatga

SEQ ID NO: 466843 - DNA, 30 bp, Artificial Sequence
  Synthetic oligonucleotide
tagccctccggctcgtctggttgggtatga

SEQ ID NO: 466844 - DNA, 30 bp, Artificial Sequence
  Synthetic oligonucleotide
ggcgtttaaatctccacactgttggtatga

SEQ ID NO: 466845 - DNA, 30 bp, Artificial Sequence
  Synthetic oligonucleotide
ccataaaaatcatttatgaacattgtatga

SEQ ID NO: 466846 - DNA, 30 bp, Artificial Sequence
  Synthetic oligonucleotide
gcaaattagtgcagcaccctggaattatga

SEQ ID NO: 466847 - DNA, 30 bp, Artificial Sequence
  Synthetic oligonucleotide
acgtcaactggtttcattgcgacattatga

SEQ ID NO: 466848 - DNA, 30 bp, Artificial Sequence
  Synthetic oligonucleotide
gtcattttcgtaagggcactcatattatga

SEQ ID NO: 466849 - DNA, 30 bp, Artificial Sequence
  Synthetic oligonucleotide
ggaattgttttcaaaaacattatattatga

SEQ ID NO: 466850 - DNA, 30 bp, Artificial Sequence
  Synthetic oligonucleotide
tccccgaccttacttaaagaccacttatga

SEQ ID NO: 466851 - DNA, 30 bp, Artificial Sequence
  Synthetic oligonucleotide
gagagactcctataagcgacgtgcttatga

SEQ ID NO: 466852 - DNA, 30 bp, Artificial Sequence
  Synthetic oligonucleotide
taatagtcaggcactgggttgatcttatga

SEQ ID NO: 466853 - DNA, 30 bp, Artificial Sequence
  Synthetic oligonucleotide
attcgccaaaacagcctttgtacgttatga

SEQ ID NO: 466854 - DNA, 30 bp, Artificial Sequence
  Synthetic oligonucleotide
gcgggccttgtctcgctccgcgggttatga

SEQ ID NO: 466855 - DNA, 30 bp, Artificial Sequence
  Synthetic oligonucleotide
gccaaggcatccgagcagaggagtttatga

SEQ ID NO: 466856 - DNA, 31 bp, Artificial Sequence
  Synthetic oligonucleotide
atactctggggcatagacttctagtttatga

SEQ ID NO: 466857 - DNA, 30 bp, Artificial Sequence
  Synthetic oligonucleotide
caaacaaggtaacccgcctcggcgaactga

SEQ ID NO: 466858 - DNA, 30 bp, Artificial Sequence
  Synthetic oligonucleotide
gttagcaggggtttttggaatcggaactga

SEQ ID NO: 466859 - DNA, 30 bp, Artificial Sequence
  Synthetic oligonucleotide
aaccgctaagtagcacgaccagtgaactga

SEQ ID NO: 466860 - DNA, 30 bp, Artificial Sequence
  Synthetic oligonucleotide
gaattaatttcagcgcccactggtaactga

SEQ ID NO: 466861 - DNA, 29 bp, Artificial Sequence
  Synthetic oligonucleotide
ctgctctgtactcgtttcatgcacactga

SEQ ID NO: 466862 - DNA, 30 bp, Artificial Sequence
  Synthetic oligonucleotide
aaatgatttatttttgattctttccactga

SEQ ID NO: 466863 - DNA, 30 bp, Artificial Sequence
  Synthetic oligonucleotide
gatacacgcggcgcctagaccgcgcactga

SEQ ID NO: 466864 - DNA, 30 bp, Artificial Sequence
  Synthetic oligonucleotide
tttagggagcgccgggtaaactcgcactga

SEQ ID NO: 466865 - DNA, 30 bp, Artificial Sequence
  Synthetic oligonucleotide
gggggaggcggcttattgcctttgcactga

SEQ ID NO: 466866 - DNA, 30 bp, Artificial Sequence
  Synthetic oligonucleotide
ctactgcatgggtgcacagggaatcactga

SEQ ID NO: 466867 - DNA, 30 bp, Artificial Sequence
  Synthetic oligonucleotide
tctttattagtgtggtcgtcgattcactga

SEQ ID NO: 466868 - DNA, 30 bp, Artificial Sequence
  Synthetic oligonucleotide
atgatccggtcgctcgcagtttacgactga

SEQ ID NO: 466869 - DNA, 30 bp, Artificial Sequence
  Synthetic oligonucleotide
aacgtacatgagcctatgacataggactga

SEQ ID NO: 466870 - DNA, 30 bp, Artificial Sequence
  Synthetic oligonucleotide
agtctccaccttggtggttttactgactga

SEQ ID NO: 466871 - DNA, 30 bp, Artificial Sequence
  Synthetic oligonucleotide
aatctagtgttatgatgattataatactga

SEQ ID NO: 466872 - DNA, 30 bp, Artificial Sequence
  Synthetic oligonucleotide
gtttctggattctaagataggtaatactga

SEQ ID NO: 466873 - DNA, 30 bp, Artificial Sequence
  Synthetic oligonucleotide
ttgtttttactatccgccggggcgtactga

SEQ ID NO: 466874 - DNA, 29 bp, Artificial Sequence
  Synthetic oligonucleotide
gtatatcgacaggtatcagaggttactga

SEQ ID NO: 466875 - DNA, 30 bp, Artificial Sequence
  Synthetic oligonucleotide
aaagtttgtgaccgagttttaggttactga

SEQ ID NO: 466876 - DNA, 30 bp, Artificial Sequence
  Synthetic oligonucleotide
tgcaaaccgcgaccagagttttaaacctga

SEQ ID NO: 466877 - DNA, 30 bp, Artificial Sequence
  Synthetic oligonucleotide
gtcctatagagatttgtgacgcggacctga

SEQ ID NO: 466878 - DNA, 30 bp, Artificial Sequence
  Synthetic oligonucleotide
atagacagttaaacgctgttcattacctga

SEQ ID NO: 466879 - DNA, 30 bp, Artificial Sequence
  Synthetic oligonucleotide
taggattcagacccacattaagggccctga

SEQ ID NO: 466880 - DNA, 30 bp, Artificial Sequence
  Synthetic oligonucleotide
aaaacgagaatgacacagcttcatccctga

SEQ ID NO: 466881 - DNA, 30 bp, Artificial Sequence
  Synthetic oligonucleotide
catgcaattatttaaaggaacgatccctga

SEQ ID NO: 466882 - DNA, 30 bp, Artificial Sequence
  Synthetic oligonucleotide
ggtcttcttggaatgaaccccgctccctga

SEQ ID NO: 466883 - DNA, 30 bp, Artificial Sequence
  Synthetic oligonucleotide
ggaatttattgcaacagtgggttcgcctga

SEQ ID NO: 466884 - DNA, 30 bp, Artificial Sequence
  Synthetic oligonucleotide
ctgagcgacattttttatgtacgggcctga

SEQ ID NO: 466885 - DNA, 30 bp, Artificial Sequence
  Synthetic oligonucleotide
acgaatatcaatgagcgtaaaagctcctga

SEQ ID NO: 466886 - DNA, 30 bp, Artificial Sequence
  Synthetic oligonucleotide
gttgtgcatagtcctgtaattatgtcctga

SEQ ID NO: 466887 - DNA, 30 bp, Artificial Sequence
  Synthetic oligonucleotide
ccaaagtgttcacgtgcattattgtcctga

SEQ ID NO: 466888 - DNA, 30 bp, Artificial Sequence
  Synthetic oligonucleotide
tatcgcgcaggtgaaggtgatctaagctga

SEQ ID NO: 466889 - DNA, 30 bp, Artificial Sequence
  Synthetic oligonucleotide
ctgtcaattgtatgcctattgttaagctga

SEQ ID NO: 466890 - DNA, 30 bp, Artificial Sequence
  Synthetic oligonucleotide
gggagttccacgtatcgatgtcacagctga

SEQ ID NO: 466891 - DNA, 30 bp, Artificial Sequence
  Synthetic oligonucleotide
agtgacaacgcgacgctcactcgcagctga

SEQ ID NO: 466892 - DNA, 29 bp, Artificial Sequence
  Synthetic oligonucleotide
gcaaagtgttgtatagctgcatcagctga

SEQ ID NO: 466893 - DNA, 30 bp, Artificial Sequence
  Synthetic oligonucleotide
ctgctcgtatcgaaaggactatggagctga

SEQ ID NO: 466894 - DNA, 30 bp, Artificial Sequence
  Synthetic oligonucleotide
ccggctctagcctccctagcgcctagctga

SEQ ID NO: 466895 - DNA, 30 bp, Artificial Sequence
  Synthetic oligonucleotide
gccgcttgagtcgatatgtactctagctga

SEQ ID NO: 466896 - DNA, 30 bp, Artificial Sequence
  Synthetic oligonucleotide
ctcacgccggagataaactactttagctga

SEQ ID NO: 466897 - DNA, 30 bp, Artificial Sequence
  Synthetic oligonucleotide
gggtgtgtgcgttttaatccgggacgctga

SEQ ID NO: 466898 - DNA, 30 bp, Artificial Sequence
  Synthetic oligonucleotide
cctgtttcgcgctcagataacgtacgctga

SEQ ID NO: 466899 - DNA, 30 bp, Artificial Sequence
  Synthetic oligonucleotide
gaccgcggcataagatgggatgtacgctga

SEQ ID NO: 466900 - DNA, 30 bp, Artificial Sequence
  Synthetic oligonucleotide
gatgcctgcgcaccttatagtccgcgctga

SEQ ID NO: 466901 - DNA, 30 bp, Artificial Sequence
  Synthetic oligonucleotide
gcttggcgccccgggattctgcggcgctga

SEQ ID NO: 466902 - DNA, 30 bp, Artificial Sequence
  Synthetic oligonucleotide
gaatacgcccttcaaccgcggagaggctga

SEQ ID NO: 466903 - DNA, 30 bp, Artificial Sequence
  Synthetic oligonucleotide
tttcatgcctccatttatcaggacggctga

SEQ ID NO: 466904 - DNA, 30 bp, Artificial Sequence
  Synthetic oligonucleotide
ctcgtcgtttattgtagtccacgcggctga

SEQ ID NO: 466905 - DNA, 30 bp, Artificial Sequence
  Synthetic oligonucleotide
tttgcatgaactcgtacctattctggctga

SEQ ID NO: 466906 - DNA, 30 bp, Artificial Sequence
  Synthetic oligonucleotide
atctttggggagtctccgattttctgctga

SEQ ID NO: 466907 - DNA, 30 bp, Artificial Sequence
  Synthetic oligonucleotide
tggtcggctcaacctatggtctagtgctga

SEQ ID NO: 466908 - DNA, 30 bp, Artificial Sequence
  Synthetic oligonucleotide
tttcactctcgcctactgcccttaatctga

SEQ ID NO: 466909 - DNA, 30 bp, Artificial Sequence
  Synthetic oligonucleotide
ataattgtggttaccatggggtgtatctga

SEQ ID NO: 466910 - DNA, 30 bp, Artificial Sequence
  Synthetic oligonucleotide
aaatcggcggtgcataagtcttttatctga

SEQ ID NO: 466911 - DNA, 30 bp, Artificial Sequence
  Synthetic oligonucleotide
ggccgttggggtttgacagtgaaactctga

SEQ ID NO: 466912 - DNA, 30 bp, Artificial Sequence
  Synthetic oligonucleotide
gtttgaccgcaaattattcacgaactctga

SEQ ID NO: 466913 - DNA, 30 bp, Artificial Sequence
  Synthetic oligonucleotide
tccgttcggaatagtcaggatatactctga

SEQ ID NO: 466914 - DNA, 30 bp, Artificial Sequence
  Synthetic oligonucleotide
tctcttgccttgcaggcctcggtactctga

SEQ ID NO: 466915 - DNA, 30 bp, Artificial Sequence
  Synthetic oligonucleotide
caactcacgttgttaggcggaatcgtctga

SEQ ID NO: 466916 - DNA, 30 bp, Artificial Sequence
  Synthetic oligonucleotide
cagaatattaaaagtccctctttcgtctga

SEQ ID NO: 466917 - DNA, 30 bp, Artificial Sequence
  Synthetic oligonucleotide
agaactcagacaagactttctaatgtctga

SEQ ID NO: 466918 - DNA, 30 bp, Artificial Sequence
  Synthetic oligonucleotide
ttatctcactaagtcctaactagtgtctga

SEQ ID NO: 466919 - DNA, 30 bp, Artificial Sequence
  Synthetic oligonucleotide
gacagcgtccacgaacactcatcattctga

SEQ ID NO: 466920 - DNA, 30 bp, Artificial Sequence
  Synthetic oligonucleotide
tgtatttggatgaccgcacgttcgttctga

SEQ ID NO: 466921 - DNA, 30 bp, Artificial Sequence
  Synthetic oligonucleotide
gttgagcatatcttagtttagtctttctga

SEQ ID NO: 466922 - DNA, 30 bp, Artificial Sequence
  Synthetic oligonucleotide
cgcccgcgcatcttaaaatattctttctga

SEQ ID NO: 466923 - DNA, 30 bp, Artificial Sequence
  Synthetic oligonucleotide
cttatttgcgtgttcagactcaggaagtga

SEQ ID NO: 466924 - DNA, 30 bp, Artificial Sequence
  Synthetic oligonucleotide
atccctacgggctgcctcggacataagtga

SEQ ID NO: 466925 - DNA, 30 bp, Artificial Sequence
  Synthetic oligonucleotide
tgtcgtctccggctttagttgtataagtga

SEQ ID NO: 466926 - DNA, 30 bp, Artificial Sequence
  Synthetic oligonucleotide
ataaacgcttttataaaggtaggacagtga

SEQ ID NO: 466927 - DNA, 30 bp, Artificial Sequence
  Synthetic oligonucleotide
gaaaggaggtcctctcactacaggcagtga

SEQ ID NO: 466928 - DNA, 30 bp, Artificial Sequence
  Synthetic oligonucleotide
caggcgagacgcagtattaacgtgcagtga

SEQ ID NO: 466929 - DNA, 30 bp, Artificial Sequence
  Synthetic oligonucleotide
gcaaaggtatgaactgtaggtttagagtga

SEQ ID NO: 466930 - DNA, 30 bp, Artificial Sequence
  Synthetic oligonucleotide
tatccgggaatcgtttactaccacgagtga

SEQ ID NO: 466931 - DNA, 28 bp, Artificial Sequence
  Synthetic oligonucleotide
ctttaggattcctctcttaaccgagtga

SEQ ID NO: 466932 - DNA, 30 bp, Artificial Sequence
  Synthetic oligonucleotide
ctataaattgctcaagttatcgtatagtga

SEQ ID NO: 466933 - DNA, 30 bp, Artificial Sequence
  Synthetic oligonucleotide
attattgaattatcactgttatactagtga

SEQ ID NO: 466934 - DNA, 30 bp, Artificial Sequence
  Synthetic oligonucleotide
tgtgacaaatgatgcggattactctagtga

SEQ ID NO: 466935 - DNA, 30 bp, Artificial Sequence
  Synthetic oligonucleotide
gtaactcgggccgcggcatttgagtagtga

SEQ ID NO: 466936 - DNA, 30 bp, Artificial Sequence
  Synthetic oligonucleotide
cgtaactggagatgctcaggagcgtagtga

SEQ ID NO: 466937 - DNA, 30 bp, Artificial Sequence
  Synthetic oligonucleotide
agcatcacctgctcgtgcctttcgtagtga

SEQ ID NO: 466938 - DNA, 30 bp, Artificial Sequence
  Synthetic oligonucleotide
ggttctgacccgtaagtatcgtgttagtga

SEQ ID NO: 466939 - DNA, 30 bp, Artificial Sequence
  Synthetic oligonucleotide
aagctaggatgcaacactcttgaaacgtga

SEQ ID NO: 466940 - DNA, 30 bp, Artificial Sequence
  Synthetic oligonucleotide
aaacgctgacagagtagtctcgccacgtga

SEQ ID NO: 466941 - DNA, 30 bp, Artificial Sequence
  Synthetic oligonucleotide
aaaggtttgtagaatagattattcacgtga

SEQ ID NO: 466942 - DNA, 30 bp, Artificial Sequence
  Synthetic oligonucleotide
acacgcgcatcaagtagtggcaggacgtga

SEQ ID NO: 466943 - DNA, 30 bp, Artificial Sequence
  Synthetic oligonucleotide
atctgatgtttaatccgagataggacgtga

SEQ ID NO: 466944 - DNA, 30 bp, Artificial Sequence
  Synthetic oligonucleotide
gcctcattgtatactggcgggcggacgtga

SEQ ID NO: 466945 - DNA, 30 bp, Artificial Sequence
  Synthetic oligonucleotide
actatcacgcattggcaaaaaattacgtga

SEQ ID NO: 466946 - DNA, 30 bp, Artificial Sequence
  Synthetic oligonucleotide
agtcttagtcggtgggcaatcaacccgtga

SEQ ID NO: 466947 - DNA, 30 bp, Artificial Sequence
  Synthetic oligonucleotide
caccctgtcagaaatgtgcgtggcccgtga

SEQ ID NO: 466948 - DNA, 30 bp, Artificial Sequence
  Synthetic oligonucleotide
aagccttcacgctcgactagcatcccgtga

SEQ ID NO: 466949 - DNA, 30 bp, Artificial Sequence
  Synthetic oligonucleotide
gaatacggcgtgcgttgacaagatccgtga

SEQ ID NO: 466950 - DNA, 30 bp, Artificial Sequence
  Synthetic oligonucleotide
agtttaatcggggtggcttaagctccgtga

SEQ ID NO: 466951 - DNA, 30 bp, Artificial Sequence
  Synthetic oligonucleotide
taatcggtccctgaattcaagtgtccgtga

SEQ ID NO: 466952 - DNA, 30 bp, Artificial Sequence
  Synthetic oligonucleotide
cagaggacagaccgcaatttcattccgtga

SEQ ID NO: 466953 - DNA, 30 bp, Artificial Sequence
  Synthetic oligonucleotide
ccgagcggaattagatgtgttaaagcgtga

SEQ ID NO: 466954 - DNA, 30 bp, Artificial Sequence
  Synthetic oligonucleotide
caggtagcccacgcaattctcagagcgtga

SEQ ID NO: 466955 - DNA, 31 bp, Artificial Sequence
  Synthetic oligonucleotide
tcgcgggtgtcgtagcgggttcggagcgtga

SEQ ID NO: 466956 - DNA, 30 bp, Artificial Sequence
  Synthetic oligonucleotide
tgaagtattggctcaacatacttagcgtga

SEQ ID NO: 466957 - DNA, 30 bp, Artificial Sequence
  Synthetic oligonucleotide
cgacacggactgacgcgcgatcacgcgtga

SEQ ID NO: 466958 - DNA, 30 bp, Artificial Sequence
  Synthetic oligonucleotide
ctattcgtgaaacagtgaagagacgcgtga

SEQ ID NO: 466959 - DNA, 30 bp, Artificial Sequence
  Synthetic oligonucleotide
tagacggactgattgatccctcaggcgtga

SEQ ID NO: 466960 - DNA, 30 bp, Artificial Sequence
  Synthetic oligonucleotide
caggggtctacgggcccacgcacggcgtga

SEQ ID NO: 466961 - DNA, 30 bp, Artificial Sequence
  Synthetic oligonucleotide
gttagagctcttgacactgttaactcgtga

SEQ ID NO: 466962 - DNA, 30 bp, Artificial Sequence
  Synthetic oligonucleotide
gcgatcggtgtcgcactgacccgctcgtga

SEQ ID NO: 466963 - DNA, 30 bp, Artificial Sequence
  Synthetic oligonucleotide
atccgttgccagtacaatggtctctcgtga

SEQ ID NO: 466964 - DNA, 30 bp, Artificial Sequence
  Synthetic oligonucleotide
gtagcctgttaaaggtaaccattctcgtga

SEQ ID NO: 466965 - DNA, 30 bp, Artificial Sequence
  Synthetic oligonucleotide
cccccttctcagtaagtataagtttcgtga

SEQ ID NO: 466966 - DNA, 30 bp, Artificial Sequence
  Synthetic oligonucleotide
ttgcgggaagcgcccgaacgtctcaggtga

SEQ ID NO: 466967 - DNA, 30 bp, Artificial Sequence
  Synthetic oligonucleotide
gtttgggtattgggtctgagcaggaggtga

SEQ ID NO: 466968 - DNA, 30 bp, Artificial Sequence
  Synthetic oligonucleotide
gccataccgattctccctcctttgaggtga

SEQ ID NO: 466969 - DNA, 30 bp, Artificial Sequence
  Synthetic oligonucleotide
gagacgtttctcggtagcagacttaggtga

SEQ ID NO: 466970 - DNA, 30 bp, Artificial Sequence
  Synthetic oligonucleotide
gggattttatgacattccgttgcacggtga

SEQ ID NO: 466971 - DNA, 30 bp, Artificial Sequence
  Synthetic oligonucleotide
agactccaggccaggcattgaggacggtga

SEQ ID NO: 466972 - DNA, 30 bp, Artificial Sequence
  Synthetic oligonucleotide
gcataccgttgctcgattaagatacggtga

SEQ ID NO: 466973 - DNA, 30 bp, Artificial Sequence
  Synthetic oligonucleotide
tgaactatttcacggaggctgctccggtga

SEQ ID NO: 466974 - DNA, 30 bp, Artificial Sequence
  Synthetic oligonucleotide
ccctctctattagggccactaccgcggtga

SEQ ID NO: 466975 - DNA, 30 bp, Artificial Sequence
  Synthetic oligonucleotide
tagatgtagaggttccataaggttcggtga

SEQ ID NO: 466976 - DNA, 30 bp, Artificial Sequence
  Synthetic oligonucleotide
actggctggtaaagtgagaacaatgggtga

SEQ ID NO: 466977 - DNA, 30 bp, Artificial Sequence
  Synthetic oligonucleotide
gcaatgggtacgcacaaggcggctgggtga

SEQ ID NO: 466978 - DNA, 30 bp, Artificial Sequence
  Synthetic oligonucleotide
gggtggcgcaattgcggtggtagtgggtga

SEQ ID NO: 466979 - DNA, 30 bp, Artificial Sequence
  Synthetic oligonucleotide
cgaatgcctcagacaattccgtgtgggtga

SEQ ID NO: 466980 - DNA, 30 bp, Artificial Sequence
  Synthetic oligonucleotide
cagcgaccaacgaaactgcagtcatggtga

SEQ ID NO: 466981 - DNA, 30 bp, Artificial Sequence
  Synthetic oligonucleotide
aactcgtaggcaattatgggattatggtga

SEQ ID NO: 466982 - DNA, 30 bp, Artificial Sequence
  Synthetic oligonucleotide
gatgaagtttccggagatttgttttggtga

SEQ ID NO: 466983 - DNA, 30 bp, Artificial Sequence
  Synthetic oligonucleotide
attttcgattcaggagtaggtccaatgtga

SEQ ID NO: 466984 - DNA, 30 bp, Artificial Sequence
  Synthetic oligonucleotide
caacacgcacaatgcactttggcaatgtga

SEQ ID NO: 466985 - DNA, 30 bp, Artificial Sequence
  Synthetic oligonucleotide
actttgcctaatcttcgaaccgtaatgtga

SEQ ID NO: 466986 - DNA, 30 bp, Artificial Sequence
  Synthetic oligonucleotide
tctacatagcctgtgagaattggtatgtga

SEQ ID NO: 466987 - DNA, 30 bp, Artificial Sequence
  Synthetic oligonucleotide
ttacaggaagatgatgtggacgttatgtga

SEQ ID NO: 466988 - DNA, 30 bp, Artificial Sequence
  Synthetic oligonucleotide
attagaggtactggctacggacaactgtga

SEQ ID NO: 466989 - DNA, 30 bp, Artificial Sequence
  Synthetic oligonucleotide
ttaaaccttaataccgccagtccactgtga

SEQ ID NO: 466990 - DNA, 30 bp, Artificial Sequence
  Synthetic oligonucleotide
cttggaaccgaatacttatgcgcgctgtga

SEQ ID NO: 466991 - DNA, 30 bp, Artificial Sequence
  Synthetic oligonucleotide
cagagcaggccacgcatggggtttctgtga

SEQ ID NO: 466992 - DNA, 30 bp, Artificial Sequence
  Synthetic oligonucleotide
ttattagagtctggattttgtggcgtgtga

SEQ ID NO: 466993 - DNA, 31 bp, Artificial Sequence
  Synthetic oligonucleotide
gagtacccaagatagtcacagcatcgtgtga

SEQ ID NO: 466994 - DNA, 30 bp, Artificial Sequence
  Synthetic oligonucleotide
ttgcggcccaatattcctccttgggtgtga

SEQ ID NO: 466995 - DNA, 31 bp, Artificial Sequence
  Synthetic oligonucleotide
cgataactaccttatcgacgcattattgtga

SEQ ID NO: 466996 - DNA, 30 bp, Artificial Sequence
  Synthetic oligonucleotide
agcatcgattggcgcgtcaagtgcttgtga

SEQ ID NO: 466997 - DNA, 30 bp, Artificial Sequence
  Synthetic oligonucleotide
gggagtggctaggtgtggccttggttgtga

SEQ ID NO: 466998 - DNA, 30 bp, Artificial Sequence
  Synthetic oligonucleotide
agaatgcaaagacattatctgcctttgtga

SEQ ID NO: 466999 - DNA, 30 bp, Artificial Sequence
  Synthetic oligonucleotide
cgaaagtgcggtgataagagatctttgtga

SEQ ID NO: 467000 - DNA, 30 bp, Artificial Sequence
  Synthetic oligonucleotide
cagtttcgacgcaagggtcatgaaaattga

SEQ ID NO: 467001 - DNA, 30 bp, Artificial Sequence
  Synthetic oligonucleotide
agctatagagactacatggtcacaaattga

SEQ ID NO: 467002 - DNA, 30 bp, Artificial Sequence
  Synthetic oligonucleotide
gaagtttcacgggcgccttgattaaattga

SEQ ID NO: 467003 - DNA, 30 bp, Artificial Sequence
  Synthetic oligonucleotide
ttataggagcccgtcgtctctcgcaattga

SEQ ID NO: 467004 - DNA, 30 bp, Artificial Sequence
  Synthetic oligonucleotide
agattgatatttaattggacacggaattga

SEQ ID NO: 467005 - DNA, 30 bp, Artificial Sequence
  Synthetic oligonucleotide
ccggcgctcacgtgtgaagggggtaattga

SEQ ID NO: 467006 - DNA, 30 bp, Artificial Sequence
  Synthetic oligonucleotide
tgcgtttaaaactcctcttgcatacattga

SEQ ID NO: 467007 - DNA, 30 bp, Artificial Sequence
  Synthetic oligonucleotide
tttacttcatggattccacgagtccattga

SEQ ID NO: 467008 - DNA, 30 bp, Artificial Sequence
  Synthetic oligonucleotide
gcagaaactatctgagaccttctgcattga

SEQ ID NO: 467009 - DNA, 30 bp, Artificial Sequence
  Synthetic oligonucleotide
taaaatttttaggcgacgaatgctcattga

SEQ ID NO: 467010 - DNA, 30 bp, Artificial Sequence
  Synthetic oligonucleotide
gcacacatccagttgaggatgttggattga

SEQ ID NO: 467011 - DNA, 30 bp, Artificial Sequence
  Synthetic oligonucleotide
agggttgttagactcgagcatagatattga

SEQ ID NO: 467012 - DNA, 30 bp, Artificial Sequence
  Synthetic oligonucleotide
gaaaatatggagccggtaatcgactattga

SEQ ID NO: 467013 - DNA, 29 bp, Artificial Sequence
  Synthetic oligonucleotide
tccgcgcctcaatgcgcagtctctattga

SEQ ID NO: 467014 - DNA, 30 bp, Artificial Sequence
  Synthetic oligonucleotide
aagtgatactctgtcatactgtagtattga

SEQ ID NO: 467015 - DNA, 30 bp, Artificial Sequence
  Synthetic oligonucleotide
aggtattcacgcagtacgatgcggtattga

SEQ ID NO: 467016 - DNA, 30 bp, Artificial Sequence
  Synthetic oligonucleotide
actggtaaagctacccgcttatattattga

SEQ ID NO: 467017 - DNA, 30 bp, Artificial Sequence
  Synthetic oligonucleotide
aatccgaccgttcttagaaggggttattga

SEQ ID NO: 467018 - DNA, 30 bp, Artificial Sequence
  Synthetic oligonucleotide
attatttgcttgtatatcatcctttattga

SEQ ID NO: 467019 - DNA, 30 bp, Artificial Sequence
  Synthetic oligonucleotide
gtcgttgtctcacatatgatacaaacttga

SEQ ID NO: 467020 - DNA, 30 bp, Artificial Sequence
  Synthetic oligonucleotide
gaggaatcatctaagttaacctccacttga

SEQ ID NO: 467021 - DNA, 30 bp, Artificial Sequence
  Synthetic oligonucleotide
gcttctttgtggattagagcgctcacttga

SEQ ID NO: 467022 - DNA, 30 bp, Artificial Sequence
  Synthetic oligonucleotide
cagaatcacattctggctcgtgatacttga

SEQ ID NO: 467023 - DNA, 30 bp, Artificial Sequence
  Synthetic oligonucleotide
aatgcataagtcgtagttctccctacttga

SEQ ID NO: 467024 - DNA, 30 bp, Artificial Sequence
  Synthetic oligonucleotide
acttacatcagtcagagaacgattacttga

SEQ ID NO: 467025 - DNA, 30 bp, Artificial Sequence
  Synthetic oligonucleotide
cgccgagcaaccggggtgccaggaccttga

SEQ ID NO: 467026 - DNA, 30 bp, Artificial Sequence
  Synthetic oligonucleotide
aagaattaagctgcccttaggcccccttga

SEQ ID NO: 467027 - DNA, 30 bp, Artificial Sequence
  Synthetic oligonucleotide
gtaacatcaaggaatataagtagcccttga

SEQ ID NO: 467028 - DNA, 30 bp, Artificial Sequence
  Synthetic oligonucleotide
aactcatttagtatagtcggggagccttga

SEQ ID NO: 467029 - DNA, 30 bp, Artificial Sequence
  Synthetic oligonucleotide
ttaaggggggccgtagctcagtgtccttga

SEQ ID NO: 467030 - DNA, 30 bp, Artificial Sequence
  Synthetic oligonucleotide
tagttttgcttttgaacaaagattccttga

SEQ ID NO: 467031 - DNA, 30 bp, Artificial Sequence
  Synthetic oligonucleotide
ggcggcaatgcttctatgcgccaagcttga

SEQ ID NO: 467032 - DNA, 30 bp, Artificial Sequence
  Synthetic oligonucleotide
aaacgttgtataccccacatagcagcttga

SEQ ID NO: 467033 - DNA, 30 bp, Artificial Sequence
  Synthetic oligonucleotide
agtggaatgttcttctaatgcatagcttga

SEQ ID NO: 467034 - DNA, 30 bp, Artificial Sequence
  Synthetic oligonucleotide
gacgagccatcgcatattcttgtagcttga

SEQ ID NO: 467035 - DNA, 30 bp, Artificial Sequence
  Synthetic oligonucleotide
gtgacgtgaatcagcgccaatccggcttga

SEQ ID NO: 467036 - DNA, 30 bp, Artificial Sequence
  Synthetic oligonucleotide
ttgattctattagctgttcgtggtgcttga

SEQ ID NO: 467037 - DNA, 30 bp, Artificial Sequence
  Synthetic oligonucleotide
cggtccctgaccggacaatcctgtgcttga

SEQ ID NO: 467038 - DNA, 30 bp, Artificial Sequence
  Synthetic oligonucleotide
atgttccagactgcagctacgccctcttga

SEQ ID NO: 467039 - DNA, 30 bp, Artificial Sequence
  Synthetic oligonucleotide
ctggagcgatattggtccagtccctcttga

SEQ ID NO: 467040 - DNA, 30 bp, Artificial Sequence
  Synthetic oligonucleotide
gaatggtaattggtgctcgcctgctcttga

SEQ ID NO: 467041 - DNA, 30 bp, Artificial Sequence
  Synthetic oligonucleotide
accgcagtcactagctgccgaacgtcttga

SEQ ID NO: 467042 - DNA, 30 bp, Artificial Sequence
  Synthetic oligonucleotide
gggatcttttttaaccagggggattcttga

SEQ ID NO: 467043 - DNA, 30 bp, Artificial Sequence
  Synthetic oligonucleotide
ggtgatggggggcgtgggcagtcaagttga

SEQ ID NO: 467044 - DNA, 30 bp, Artificial Sequence
  Synthetic oligonucleotide
gatcgactctaactacgcgaactcagttga

SEQ ID NO: 467045 - DNA, 30 bp, Artificial Sequence
  Synthetic oligonucleotide
gatggattaacccgctgtactctcagttga

SEQ ID NO: 467046 - DNA, 30 bp, Artificial Sequence
  Synthetic oligonucleotide
gtccaagggactattccttgagtcagttga

SEQ ID NO: 467047 - DNA, 30 bp, Artificial Sequence
  Synthetic oligonucleotide
cttactgctttgggtaaggcattcagttga

SEQ ID NO: 467048 - DNA, 30 bp, Artificial Sequence
  Synthetic oligonucleotide
accgcatgggctttaagtttacagagttga

SEQ ID NO: 467049 - DNA, 30 bp, Artificial Sequence
  Synthetic oligonucleotide
tgttggctacaactttgactgcagagttga

SEQ ID NO: 467050 - DNA, 30 bp, Artificial Sequence
  Synthetic oligonucleotide
tatccgttttagggacttggcacgagttga

SEQ ID NO: 467051 - DNA, 30 bp, Artificial Sequence
  Synthetic oligonucleotide
tttcttaagggtaatgaggatgaacgttga

SEQ ID NO: 467052 - DNA, 30 bp, Artificial Sequence
  Synthetic oligonucleotide
acctgtacctgtcaagtactgaatcgttga

SEQ ID NO: 467053 - DNA, 30 bp, Artificial Sequence
  Synthetic oligonucleotide
tagcatatgcaatatccgtttataggttga

SEQ ID NO: 467054 - DNA, 30 bp, Artificial Sequence
  Synthetic oligonucleotide
ttttgtcacgatggtcagaactacggttga

SEQ ID NO: 467055 - DNA, 30 bp, Artificial Sequence
  Synthetic oligonucleotide
cggggctcgtcttttggttagttcggttga

SEQ ID NO: 467056 - DNA, 30 bp, Artificial Sequence
  Synthetic oligonucleotide
aatgcgtattttttatactaaggatgttga

SEQ ID NO: 467057 - DNA, 30 bp, Artificial Sequence
  Synthetic oligonucleotide
tgggttcacagcaacggcgtacactgttga

SEQ ID NO: 467058 - DNA, 30 bp, Artificial Sequence
  Synthetic oligonucleotide
ggcaagcatcgggttcatggccagtgttga

SEQ ID NO: 467059 - DNA, 30 bp, Artificial Sequence
  Synthetic oligonucleotide
tattgacaaaatcagaacggtcagtgttga

SEQ ID NO: 467060 - DNA, 30 bp, Artificial Sequence
  Synthetic oligonucleotide
cagtacctgtttttgtcgcctctgtgttga

SEQ ID NO: 467061 - DNA, 30 bp, Artificial Sequence
  Synthetic oligonucleotide
ctgtcgggtacgcacggtgttagttgttga

SEQ ID NO: 467062 - DNA, 30 bp, Artificial Sequence
  Synthetic oligonucleotide
tatcgagtcgcggcacaatctggttgttga

SEQ ID NO: 467063 - DNA, 30 bp, Artificial Sequence
  Synthetic oligonucleotide
tctacatatcatggggcggcacaaatttga

SEQ ID NO: 467064 - DNA, 30 bp, Artificial Sequence
  Synthetic oligonucleotide
ttgctttcgacgctatcaattccaatttga

SEQ ID NO: 467065 - DNA, 30 bp, Artificial Sequence
  Synthetic oligonucleotide
acttttataacgtatgaactagcaatttga

SEQ ID NO: 467066 - DNA, 30 bp, Artificial Sequence
  Synthetic oligonucleotide
cgcgattctacgcttggaaatagaatttga

SEQ ID NO: 467067 - DNA, 30 bp, Artificial Sequence
  Synthetic oligonucleotide
ataactttagatggagggtttggaatttga

SEQ ID NO: 467068 - DNA, 30 bp, Artificial Sequence
  Synthetic oligonucleotide
aaagttgggtctcctatccattgaatttga

SEQ ID NO: 467069 - DNA, 30 bp, Artificial Sequence
  Synthetic oligonucleotide
ttgatctcaacttaaaatagcttaatttga

SEQ ID NO: 467070 - DNA, 30 bp, Artificial Sequence
  Synthetic oligonucleotide
gtaagtccaagtagtcgttgatccatttga

SEQ ID NO: 467071 - DNA, 30 bp, Artificial Sequence
  Synthetic oligonucleotide
aacgcaactaagttagctttctccatttga

SEQ ID NO: 467072 - DNA, 30 bp, Artificial Sequence
  Synthetic oligonucleotide
gtaggtattccccattacgtactcatttga

SEQ ID NO: 467073 - DNA, 30 bp, Artificial Sequence
  Synthetic oligonucleotide
gtacaccactccgtatataacgtcatttga

SEQ ID NO: 467074 - DNA, 30 bp, Artificial Sequence
  Synthetic oligonucleotide
caccatagaaaatcgggagaggtcatttga

SEQ ID NO: 467075 - DNA, 30 bp, Artificial Sequence
  Synthetic oligonucleotide
acgattttcaccttagacactgtcatttga

SEQ ID NO: 467076 - DNA, 30 bp, Artificial Sequence
  Synthetic oligonucleotide
aaatcgaatgcaatacatgtggctatttga

SEQ ID NO: 467077 - DNA, 30 bp, Artificial Sequence
  Synthetic oligonucleotide
gtcgcttgatcttagagctagtttatttga

SEQ ID NO: 467078 - DNA, 30 bp, Artificial Sequence
  Synthetic oligonucleotide
gttctagtggtacgcttataaaaactttga

SEQ ID NO: 467079 - DNA, 30 bp, Artificial Sequence
  Synthetic oligonucleotide
ttccgatcgtgacgatgattcaaactttga

SEQ ID NO: 467080 - DNA, 30 bp, Artificial Sequence
  Synthetic oligonucleotide
gccctcttctggaggtaaaaccgactttga

SEQ ID NO: 467081 - DNA, 30 bp, Artificial Sequence
  Synthetic oligonucleotide
aatgttagttaacggtcatggcccctttga

SEQ ID NO: 467082 - DNA, 30 bp, Artificial Sequence
  Synthetic oligonucleotide
attcgaacgttgcagactctatttctttga

SEQ ID NO: 467083 - DNA, 30 bp, Artificial Sequence
  Synthetic oligonucleotide
agagttctgggttttggtgttggagtttga

SEQ ID NO: 467084 - DNA, 30 bp, Artificial Sequence
  Synthetic oligonucleotide
ccagcggacatccatagtacagacgtttga

SEQ ID NO: 467085 - DNA, 30 bp, Artificial Sequence
  Synthetic oligonucleotide
aagcgtccgactactgcgtaactcgtttga

SEQ ID NO: 467086 - DNA, 30 bp, Artificial Sequence
  Synthetic oligonucleotide
ggtcaccgagtgaaccactttccggtttga

SEQ ID NO: 467087 - DNA, 30 bp, Artificial Sequence
  Synthetic oligonucleotide
tccgctcacacggatagctaacgggtttga

SEQ ID NO: 467088 - DNA, 30 bp, Artificial Sequence
  Synthetic oligonucleotide
agtccatttatgtgagtgtaacgggtttga

SEQ ID NO: 467089 - DNA, 30 bp, Artificial Sequence
  Synthetic oligonucleotide
ataaagggctctggaacttcgttggtttga

SEQ ID NO: 467090 - DNA, 31 bp, Artificial Sequence
  Synthetic oligonucleotide
cttctctttgattcacgtttacgctgtttga

SEQ ID NO: 467091 - DNA, 30 bp, Artificial Sequence
  Synthetic oligonucleotide
gcacattactatggaatatccattgtttga

SEQ ID NO: 467092 - DNA, 30 bp, Artificial Sequence
  Synthetic oligonucleotide
ctcaaactttgggggagttctattgtttga

SEQ ID NO: 467093 - DNA, 30 bp, Artificial Sequence
  Synthetic oligonucleotide
ggttccgaggggctgttccaggaattttga

SEQ ID NO: 467094 - DNA, 30 bp, Artificial Sequence
  Synthetic oligonucleotide
gcagtgtctacaagtcacctggtattttga

SEQ ID NO: 467095 - DNA, 30 bp, Artificial Sequence
  Synthetic oligonucleotide
tccacggtagtattaagtcgatgcttttga

SEQ ID NO: 467096 - DNA, 30 bp, Artificial Sequence
  Synthetic oligonucleotide
gtcgaggcagaacagattacatggttttga

SEQ ID NO: 467097 - DNA, 30 bp, Artificial Sequence
  Synthetic oligonucleotide
gtaataggtaagccgtcccgcttgttttga

SEQ ID NO: 467098 - DNA, 31 bp, Artificial Sequence
  Synthetic oligonucleotide
cgcaagcaacctacattgacgcgcaaaaata

SEQ ID NO: 467099 - DNA, 30 bp, Artificial Sequence
  Synthetic oligonucleotide
actaacgcgagttcctttctcagaaaaata

SEQ ID NO: 467100 - DNA, 30 bp, Artificial Sequence
  Synthetic oligonucleotide
gcttctatgcggtaagcttgctccaaaata

SEQ ID NO: 467101 - DNA, 30 bp, Artificial Sequence
  Synthetic oligonucleotide
ggtaaatttttactgggggaacgcaaaata

SEQ ID NO: 467102 - DNA, 30 bp, Artificial Sequence
  Synthetic oligonucleotide
ttaaccttggtacaccccttcatcaaaata

SEQ ID NO: 467103 - DNA, 30 bp, Artificial Sequence
  Synthetic oligonucleotide
gatggggcggtctacattcgggcgaaaata

SEQ ID NO: 467104 - DNA, 30 bp, Artificial Sequence
  Synthetic oligonucleotide
aataaatgagggcgcttcggccctaaaata

SEQ ID NO: 467105 - DNA, 30 bp, Artificial Sequence
  Synthetic oligonucleotide
ttgaagtagtatatagcattatctaaaata

SEQ ID NO: 467106 - DNA, 30 bp, Artificial Sequence
  Synthetic oligonucleotide
agcgccatggtggaaataaccggtaaaata

SEQ ID NO: 467107 - DNA, 30 bp, Artificial Sequence
  Synthetic oligonucleotide
agtaattaattctcttgcgaccttaaaata

SEQ ID NO: 467108 - DNA, 30 bp, Artificial Sequence
  Synthetic oligonucleotide
gcatataggggatataatggtccacaaata

SEQ ID NO: 467109 - DNA, 30 bp, Artificial Sequence
  Synthetic oligonucleotide
tttgtttctctacaggaaaggctacaaata

SEQ ID NO: 467110 - DNA, 30 bp, Artificial Sequence
  Synthetic oligonucleotide
aattcaacttcggtcacacatgaccaaata

SEQ ID NO: 467111 - DNA, 30 bp, Artificial Sequence
  Synthetic oligonucleotide
acaaagtggtctggttctaaaggccaaata

SEQ ID NO: 467112 - DNA, 30 bp, Artificial Sequence
  Synthetic oligonucleotide
ttctggtccgctattgtctttttccaaata

SEQ ID NO: 467113 - DNA, 30 bp, Artificial Sequence
  Synthetic oligonucleotide
aggatgattcagtatgtttaccggcaaata

SEQ ID NO: 467114 - DNA, 30 bp, Artificial Sequence
  Synthetic oligonucleotide
tcacaggcagcgacagttgtttggcaaata

SEQ ID NO: 467115 - DNA, 30 bp, Artificial Sequence
  Synthetic oligonucleotide
attttagggtggacacataaacgtcaaata

SEQ ID NO: 467116 - DNA, 30 bp, Artificial Sequence
  Synthetic oligonucleotide
cgacggccactgtaattgtttggtcaaata

SEQ ID NO: 467117 - DNA, 30 bp, Artificial Sequence
  Synthetic oligonucleotide
aattgtttctagcaggccatagcagaaata

SEQ ID NO: 467118 - DNA, 30 bp, Artificial Sequence
  Synthetic oligonucleotide
aatcctacattaggtgttctgatagaaata

SEQ ID NO: 467119 - DNA, 30 bp, Artificial Sequence
  Synthetic oligonucleotide
atttctttgatagggcactctcatgaaata

SEQ ID NO: 467120 - DNA, 30 bp, Artificial Sequence
  Synthetic oligonucleotide
aattagtcgagttgcgcgctaggtgaaata

SEQ ID NO: 467121 - DNA, 30 bp, Artificial Sequence
  Synthetic oligonucleotide
aaattataaagcggatttatcattgaaata

SEQ ID NO: 467122 - DNA, 30 bp, Artificial Sequence
  Synthetic oligonucleotide
ggttaaggatagctcgactatgcataaata

SEQ ID NO: 467123 - DNA, 30 bp, Artificial Sequence
  Synthetic oligonucleotide
gcgttatctcctctcgcactcatataaata

SEQ ID NO: 467124 - DNA, 30 bp, Artificial Sequence
  Synthetic oligonucleotide
tgttctgctgcgacgctgttgccctaaata

SEQ ID NO: 467125 - DNA, 30 bp, Artificial Sequence
  Synthetic oligonucleotide
tcttatatccaacgccaagtcctgtaaata

SEQ ID NO: 467126 - DNA, 30 bp, Artificial Sequence
  Synthetic oligonucleotide
cactcccactgcgtgtcggcgaattaaata

SEQ ID NO: 467127 - DNA, 30 bp, Artificial Sequence
  Synthetic oligonucleotide
caaatcacatatcggggttttcgttaaata

SEQ ID NO: 467128 - DNA, 30 bp, Artificial Sequence
  Synthetic oligonucleotide
ttaaccaactgccaggcactatcaacaata

SEQ ID NO: 467129 - DNA, 30 bp, Artificial Sequence
  Synthetic oligonucleotide
tgcagacacacactgttgtgttcaacaata

SEQ ID NO: 467130 - DNA, 30 bp, Artificial Sequence
  Synthetic oligonucleotide
tgccctctcgattcggcagctcgaacaata

SEQ ID NO: 467131 - DNA, 30 bp, Artificial Sequence
  Synthetic oligonucleotide
atggaggccatcattgcatcaggaacaata

SEQ ID NO: 467132 - DNA, 30 bp, Artificial Sequence
  Synthetic oligonucleotide
agagtctccatagaacggctgggaacaata

SEQ ID NO: 467133 - DNA, 30 bp, Artificial Sequence
  Synthetic oligonucleotide
tatttcagcgttagcatgaagtgcacaata

SEQ ID NO: 467134 - DNA, 30 bp, Artificial Sequence
  Synthetic oligonucleotide
ttattcgctcaaaccgggaaggtgacaata

SEQ ID NO: 467135 - DNA, 30 bp, Artificial Sequence
  Synthetic oligonucleotide
gaacgacctcgactgctcagctatacaata

SEQ ID NO: 467136 - DNA, 30 bp, Artificial Sequence
  Synthetic oligonucleotide
tgacagcccgtggggcgtttcagtacaata

SEQ ID NO: 467137 - DNA, 30 bp, Artificial Sequence
  Synthetic oligonucleotide
gtatacgtcaaggctgaagctattacaata

SEQ ID NO: 467138 - DNA, 30 bp, Artificial Sequence
  Synthetic oligonucleotide
gcaaaatgttataatgccataacaccaata

SEQ ID NO: 467139 - DNA, 30 bp, Artificial Sequence
  Synthetic oligonucleotide
gcttttgaaaatcttggtgacaacccaata

SEQ ID NO: 467140 - DNA, 30 bp, Artificial Sequence
  Synthetic oligonucleotide
accgtcatttgccgtgtaggaccgccaata

SEQ ID NO: 467141 - DNA, 30 bp, Artificial Sequence
  Synthetic oligonucleotide
aaaacacccgttataggaccgcctccaata

SEQ ID NO: 467142 - DNA, 30 bp, Artificial Sequence
  Synthetic oligonucleotide
cacaggaatgtaccggcaaccgcagcaata

SEQ ID NO: 467143 - DNA, 30 bp, Artificial Sequence
  Synthetic oligonucleotide
ttcactgtggtcatttgtgatgacgcaata

SEQ ID NO: 467144 - DNA, 30 bp, Artificial Sequence
  Synthetic oligonucleotide
ctatgcagtataacaggcctcggggcaata

SEQ ID NO: 467145 - DNA, 30 bp, Artificial Sequence
  Synthetic oligonucleotide
ctttctaacagtctgtcagtctgggcaata

SEQ ID NO: 467146 - DNA, 30 bp, Artificial Sequence
  Synthetic oligonucleotide
gggtttaagaaattaattcagtgggcaata

SEQ ID NO: 467147 - DNA, 30 bp, Artificial Sequence
  Synthetic oligonucleotide
tgaccattgaccctgtacgcagtggcaata

SEQ ID NO: 467148 - DNA, 30 bp, Artificial Sequence
  Synthetic oligonucleotide
gtctctgtgcccggcgccgtgactgcaata

SEQ ID NO: 467149 - DNA, 30 bp, Artificial Sequence
  Synthetic oligonucleotide
ctcatcgaatatccgtgaggtcctgcaata

SEQ ID NO: 467150 - DNA, 30 bp, Artificial Sequence
  Synthetic oligonucleotide
gctacgttcgaaggttcttggtcatcaata

SEQ ID NO: 467151 - DNA, 30 bp, Artificial Sequence
  Synthetic oligonucleotide
agcatttgttgagtttgtctttcatcaata

SEQ ID NO: 467152 - DNA, 30 bp, Artificial Sequence
  Synthetic oligonucleotide
ttcgattacgcaaatgtgggggactcaata

SEQ ID NO: 467153 - DNA, 30 bp, Artificial Sequence
  Synthetic oligonucleotide
tagctgaaaattgctccggatacctcaata

SEQ ID NO: 467154 - DNA, 30 bp, Artificial Sequence
  Synthetic oligonucleotide
gaaaaaggcttgttaggcgtagtctcaata

SEQ ID NO: 467155 - DNA, 30 bp, Artificial Sequence
  Synthetic oligonucleotide
gccgaatgaatgtggaatgagtagtcaata

SEQ ID NO: 467156 - DNA, 30 bp, Artificial Sequence
  Synthetic oligonucleotide
agttgacgaattcactggcaattgtcaata

SEQ ID NO: 467157 - DNA, 30 bp, Artificial Sequence
  Synthetic oligonucleotide
acgaactaagcccgcagcttagtttcaata

SEQ ID NO: 467158 - DNA, 30 bp, Artificial Sequence
  Synthetic oligonucleotide
gctggacgccgctctgtaaacaaaagaata

SEQ ID NO: 467159 - DNA, 30 bp, Artificial Sequence
  Synthetic oligonucleotide
aatctatattattggcagttgttaagaata

SEQ ID NO: 467160 - DNA, 30 bp, Artificial Sequence
  Synthetic oligonucleotide
gaatgatgtttgcaagctacaaacagaata

SEQ ID NO: 467161 - DNA, 30 bp, Artificial Sequence
  Synthetic oligonucleotide
aacaggcgatagtcagtgcaagacagaata

SEQ ID NO: 467162 - DNA, 30 bp, Artificial Sequence
  Synthetic oligonucleotide
agactttgttgacgtcggtaatacagaata

SEQ ID NO: 467163 - DNA, 30 bp, Artificial Sequence
  Synthetic oligonucleotide
ctaggtaagaggggcgacgtagtcagaata

SEQ ID NO: 467164 - DNA, 30 bp, Artificial Sequence
  Synthetic oligonucleotide
cttgggggcccgccgaactggcagagaata

SEQ ID NO: 467165 - DNA, 30 bp, Artificial Sequence
  Synthetic oligonucleotide
atataaatattcggttgggcgtcgagaata

SEQ ID NO: 467166 - DNA, 30 bp, Artificial Sequence
  Synthetic oligonucleotide
ctatatcacgcggtacgtagaaatagaata

SEQ ID NO: 467167 - DNA, 30 bp, Artificial Sequence
  Synthetic oligonucleotide
aagaacataacgttcgcgaatattagaata

SEQ ID NO: 467168 - DNA, 30 bp, Artificial Sequence
  Synthetic oligonucleotide
atttagcctaataaccccactattagaata

SEQ ID NO: 467169 - DNA, 30 bp, Artificial Sequence
  Synthetic oligonucleotide
ggtaagctggcttagtcagccgttagaata

SEQ ID NO: 467170 - DNA, 30 bp, Artificial Sequence
  Synthetic oligonucleotide
cggtgtgtattaaccaattcatttagaata

SEQ ID NO: 467171 - DNA, 28 bp, Artificial Sequence
  Synthetic oligonucleotide
gtctaggaagcatgacgttccacgaata

SEQ ID NO: 467172 - DNA, 30 bp, Artificial Sequence
  Synthetic oligonucleotide
tttgcgtccgaaggctattacgtacgaata

SEQ ID NO: 467173 - DNA, 30 bp, Artificial Sequence
  Synthetic oligonucleotide
ctcgcaacagtcttatcgcattggcgaata

SEQ ID NO: 467174 - DNA, 30 bp, Artificial Sequence
  Synthetic oligonucleotide
ctcatcttgacctcgaatgcaccaggaata

SEQ ID NO: 467175 - DNA, 30 bp, Artificial Sequence
  Synthetic oligonucleotide
agttttggcccctggcatccctcaggaata

SEQ ID NO: 467176 - DNA, 30 bp, Artificial Sequence
  Synthetic oligonucleotide
gtacgtattgactttgaagttataggaata

SEQ ID NO: 467177 - DNA, 30 bp, Artificial Sequence
  Synthetic oligonucleotide
gtgccggcggaccgttgggccggcggaata

SEQ ID NO: 467178 - DNA, 30 bp, Artificial Sequence
  Synthetic oligonucleotide
ctcatgctttatttgctgatcttcggaata

SEQ ID NO: 467179 - DNA, 30 bp, Artificial Sequence
  Synthetic oligonucleotide
aaaaataattagggagattcgaagggaata

SEQ ID NO: 467180 - DNA, 30 bp, Artificial Sequence
  Synthetic oligonucleotide
tgctttccgatatcgcttaattagggaata

SEQ ID NO: 467181 - DNA, 30 bp, Artificial Sequence
  Synthetic oligonucleotide
gaccttaggagacactctctaggtggaata

SEQ ID NO: 467182 - DNA, 30 bp, Artificial Sequence
  Synthetic oligonucleotide
gtccaaattttagcttattttggtggaata

SEQ ID NO: 467183 - DNA, 30 bp, Artificial Sequence
  Synthetic oligonucleotide
tggcttgctccatggttgtctcactgaata

SEQ ID NO: 467184 - DNA, 30 bp, Artificial Sequence
  Synthetic oligonucleotide
aattacggcggaagtcactcagactgaata

SEQ ID NO: 467185 - DNA, 30 bp, Artificial Sequence
  Synthetic oligonucleotide
gggaatccgtaaatatctaaagtctgaata

SEQ ID NO: 467186 - DNA, 30 bp, Artificial Sequence
  Synthetic oligonucleotide
tctttttcaaattctcaaggtcagtgaata

SEQ ID NO: 467187 - DNA, 30 bp, Artificial Sequence
  Synthetic oligonucleotide
ccgggtgccagtcccctgggaacgtgaata

SEQ ID NO: 467188 - DNA, 30 bp, Artificial Sequence
  Synthetic oligonucleotide
tataaccttacgtacgttcggaggtgaata

SEQ ID NO: 467189 - DNA, 30 bp, Artificial Sequence
  Synthetic oligonucleotide
aggtcagaacatgacctgttgtattgaata

SEQ ID NO: 467190 - DNA, 30 bp, Artificial Sequence
  Synthetic oligonucleotide
atcatagtaaagcggcataaatcttgaata

SEQ ID NO: 467191 - DNA, 30 bp, Artificial Sequence
  Synthetic oligonucleotide
acgtgccaatacggctgcacaataataata

SEQ ID NO: 467192 - DNA, 30 bp, Artificial Sequence
  Synthetic oligonucleotide
catcgggcccggcaccgggtcctaataata

SEQ ID NO: 467193 - DNA, 31 bp, Artificial Sequence
  Synthetic oligonucleotide
aagattaagggacactatccggttaataata

SEQ ID NO: 467194 - DNA, 30 bp, Artificial Sequence
  Synthetic oligonucleotide
aatcgcgacgttccatgtgtaaacataata

SEQ ID NO: 467195 - DNA, 30 bp, Artificial Sequence
  Synthetic oligonucleotide
ctgagatatgctgtaggatggcccataata

SEQ ID NO: 467196 - DNA, 30 bp, Artificial Sequence
  Synthetic oligonucleotide
cgggtgaagatctaaagtatgcagataata

SEQ ID NO: 467197 - DNA, 30 bp, Artificial Sequence
  Synthetic oligonucleotide
tatgtatagctgggtaataaatggataata

SEQ ID NO: 467198 - DNA, 30 bp, Artificial Sequence
  Synthetic oligonucleotide
ctttagtaagtccttcgaatataactaata

SEQ ID NO: 467199 - DNA, 30 bp, Artificial Sequence
  Synthetic oligonucleotide
ctggattcatattatccttatatactaata

SEQ ID NO: 467200 - DNA, 30 bp, Artificial Sequence
  Synthetic oligonucleotide
atcttcaacgaacctcatagtcacctaata

SEQ ID NO: 467201 - DNA, 30 bp, Artificial Sequence
  Synthetic oligonucleotide
ggacacgtcgccgtggtcctcaagctaata

SEQ ID NO: 467202 - DNA, 30 bp, Artificial Sequence
  Synthetic oligonucleotide
ctctaggccttaggtaggttatatctaata

SEQ ID NO: 467203 - DNA, 30 bp, Artificial Sequence
  Synthetic oligonucleotide
atctcctaagtgactccgttttatctaata

SEQ ID NO: 467204 - DNA, 30 bp, Artificial Sequence
  Synthetic oligonucleotide
ctttcgagcgttagatgacaacgtctaata

SEQ ID NO: 467205 - DNA, 30 bp, Artificial Sequence
  Synthetic oligonucleotide
cttttctaagatggttctcgaaaagtaata

SEQ ID NO: 467206 - DNA, 30 bp, Artificial Sequence
  Synthetic oligonucleotide
tctctatgaatagtgttaccgtaagtaata

SEQ ID NO: 467207 - DNA, 30 bp, Artificial Sequence
  Synthetic oligonucleotide
ttctactttacgttatgatcacgagtaata

SEQ ID NO: 467208 - DNA, 30 bp, Artificial Sequence
  Synthetic oligonucleotide
acgcccaatcatttagggagtgacgtaata

SEQ ID NO: 467209 - DNA, 30 bp, Artificial Sequence
  Synthetic oligonucleotide
atcttaggcgtgcatagccaaggcgtaata

SEQ ID NO: 467210 - DNA, 30 bp, Artificial Sequence
  Synthetic oligonucleotide
tggatcatctttttcggcagaacggtaata

SEQ ID NO: 467211 - DNA, 30 bp, Artificial Sequence
  Synthetic oligonucleotide
gttcaactattaccttccgtctgggtaata

SEQ ID NO: 467212 - DNA, 30 bp, Artificial Sequence
  Synthetic oligonucleotide
agccagcaagtacggcacttaaatgtaata

SEQ ID NO: 467213 - DNA, 30 bp, Artificial Sequence
  Synthetic oligonucleotide
gtttccaactgtagccgtggtgctgtaata

SEQ ID NO: 467214 - DNA, 30 bp, Artificial Sequence
  Synthetic oligonucleotide
tgtgggttttgaatcattcaatctgtaata

SEQ ID NO: 467215 - DNA, 30 bp, Artificial Sequence
  Synthetic oligonucleotide
acgaagtgcatttcgataatttaattaata

SEQ ID NO: 467216 - DNA, 30 bp, Artificial Sequence
  Synthetic oligonucleotide
ataagtctgtgatgtgctaccatattaata

SEQ ID NO: 467217 - DNA, 30 bp, Artificial Sequence
  Synthetic oligonucleotide
cccttactatcaagacccctcaatttaata

SEQ ID NO: 467218 - DNA, 30 bp, Artificial Sequence
  Synthetic oligonucleotide
taaggtataactctttaaaatcatttaata

SEQ ID NO: 467219 - DNA, 30 bp, Artificial Sequence
  Synthetic oligonucleotide
ctgccacatgggttcccggggggaaacata

SEQ ID NO: 467220 - DNA, 30 bp, Artificial Sequence
  Synthetic oligonucleotide
taattgttaagattccacagactaaacata

SEQ ID NO: 467221 - DNA, 30 bp, Artificial Sequence
  Synthetic oligonucleotide
gggaggttatttgtattatcgcgcaacata

SEQ ID NO: 467222 - DNA, 30 bp, Artificial Sequence
  Synthetic oligonucleotide
ggaggacacggcacaaaaagacagaacata

SEQ ID NO: 467223 - DNA, 30 bp, Artificial Sequence
  Synthetic oligonucleotide
gctggatgggtcaccggaccggcgaacata

SEQ ID NO: 467224 - DNA, 30 bp, Artificial Sequence
  Synthetic oligonucleotide
tttcaaattcaattcgcctactggaacata

SEQ ID NO: 467225 - DNA, 30 bp, Artificial Sequence
  Synthetic oligonucleotide
aacctatatcttaactcgttacgccacata

SEQ ID NO: 467226 - DNA, 30 bp, Artificial Sequence
  Synthetic oligonucleotide
gaggtcctacagtccgcagccggccacata

SEQ ID NO: 467227 - DNA, 30 bp, Artificial Sequence
  Synthetic oligonucleotide
tccagcatatgacgaccacgggtccacata

SEQ ID NO: 467228 - DNA, 30 bp, Artificial Sequence
  Synthetic oligonucleotide
gcctatatagtacgctgtctcacgcacata

SEQ ID NO: 467229 - DNA, 30 bp, Artificial Sequence
  Synthetic oligonucleotide
tctcaaatgatgcgatgataaatgcacata

SEQ ID NO: 467230 - DNA, 30 bp, Artificial Sequence
  Synthetic oligonucleotide
attgccaattgcccctcagctctgcacata

SEQ ID NO: 467231 - DNA, 30 bp, Artificial Sequence
  Synthetic oligonucleotide
cgtgctcgtcagtctagagccgtgcacata

SEQ ID NO: 467232 - DNA, 30 bp, Artificial Sequence
  Synthetic oligonucleotide
taacagtctctattgtggttctttcacata

SEQ ID NO: 467233 - DNA, 30 bp, Artificial Sequence
  Synthetic oligonucleotide
cactctgatctcacttgcacatgagacata

SEQ ID NO: 467234 - DNA, 30 bp, Artificial Sequence
  Synthetic oligonucleotide
gtccctaacaatctgggcacggtagacata

SEQ ID NO: 467235 - DNA, 30 bp, Artificial Sequence
  Synthetic oligonucleotide
aattagtaagtgggcctatagaatgacata

SEQ ID NO: 467236 - DNA, 30 bp, Artificial Sequence
  Synthetic oligonucleotide
gtgaagctcatcatggcctggagtgacata

SEQ ID NO: 467237 - DNA, 30 bp, Artificial Sequence
  Synthetic oligonucleotide
gatttatgcatgaaccacatatcatacata

SEQ ID NO: 467238 - DNA, 30 bp, Artificial Sequence
  Synthetic oligonucleotide
aacatctatacgcaaggcagcgtctacata

SEQ ID NO: 467239 - DNA, 30 bp, Artificial Sequence
  Synthetic oligonucleotide
gcatgtccccgcacgctctggccgtacata

SEQ ID NO: 467240 - DNA, 30 bp, Artificial Sequence
  Synthetic oligonucleotide
ttaaatggactgttctcaaatgtttacata

SEQ ID NO: 467241 - DNA, 30 bp, Artificial Sequence
  Synthetic oligonucleotide
atagccgggcgaggtcttggtggaaccata

SEQ ID NO: 467242 - DNA, 30 bp, Artificial Sequence
  Synthetic oligonucleotide
cgacctcagtttccggctcgcaagaccata

SEQ ID NO: 467243 - DNA, 30 bp, Artificial Sequence
  Synthetic oligonucleotide
gcttatgtttccaagtgcgaacggaccata

SEQ ID NO: 467244 - DNA, 30 bp, Artificial Sequence
  Synthetic oligonucleotide
tcctcgtcatggtagcgtgagtataccata

SEQ ID NO: 467245 - DNA, 30 bp, Artificial Sequence
  Synthetic oligonucleotide
cagagttgactcctaggttttggtaccata

SEQ ID NO: 467246 - DNA, 30 bp, Artificial Sequence
  Synthetic oligonucleotide
gggcgtagcagactaatgagtattaccata

SEQ ID NO: 467247 - DNA, 30 bp, Artificial Sequence
  Synthetic oligonucleotide
cttcggacttgttacactctgcttaccata

SEQ ID NO: 467248 - DNA, 30 bp, Artificial Sequence
  Synthetic oligonucleotide
aatcactgtccacattcaagcaaacccata

SEQ ID NO: 467249 - DNA, 30 bp, Artificial Sequence
  Synthetic oligonucleotide
tttcaagtttaagcgataagtaaacccata

SEQ ID NO: 467250 - DNA, 30 bp, Artificial Sequence
  Synthetic oligonucleotide
ctgattaagtcgttacttgtcagccccata

SEQ ID NO: 467251 - DNA, 30 bp, Artificial Sequence
  Synthetic oligonucleotide
acaccttcgctggtatctcttaagcccata

SEQ ID NO: 467252 - DNA, 30 bp, Artificial Sequence
  Synthetic oligonucleotide
aatcgtcagtattagtcgcgtgagcccata

SEQ ID NO: 467253 - DNA, 30 bp, Artificial Sequence
  Synthetic oligonucleotide
tgtccccatttgcaaaaattacgtcccata

SEQ ID NO: 467254 - DNA, 30 bp, Artificial Sequence
  Synthetic oligonucleotide
ctcttcgtttcttcgtggacccgtcccata

SEQ ID NO: 467255 - DNA, 30 bp, Artificial Sequence
  Synthetic oligonucleotide
atttgctacgacttatgatgttcagccata

SEQ ID NO: 467256 - DNA, 30 bp, Artificial Sequence
  Synthetic oligonucleotide
gccggcatgctgtacttatacatagccata

SEQ ID NO: 467257 - DNA, 29 bp, Artificial Sequence
  Synthetic oligonucleotide
cactacgttgtgttaccggtcacgccata

SEQ ID NO: 467258 - DNA, 30 bp, Artificial Sequence
  Synthetic oligonucleotide
caacaacatcagttccgtcctgcggccata

SEQ ID NO: 467259 - DNA, 30 bp, Artificial Sequence
  Synthetic oligonucleotide
gcaatcttgccccatttctagggggccata

SEQ ID NO: 467260 - DNA, 30 bp, Artificial Sequence
  Synthetic oligonucleotide
taggctcacccgtgtgttgatgttgccata

SEQ ID NO: 467261 - DNA, 30 bp, Artificial Sequence
  Synthetic oligonucleotide
gcgttatatgaatcactatgggggtccata

SEQ ID NO: 467262 - DNA, 30 bp, Artificial Sequence
  Synthetic oligonucleotide
tatcacttcagttcgtatcttaattccata

SEQ ID NO: 467263 - DNA, 30 bp, Artificial Sequence
  Synthetic oligonucleotide
aatttgctcaatatccctccggcttccata

SEQ ID NO: 467264 - DNA, 30 bp, Artificial Sequence
  Synthetic oligonucleotide
aaaatagtagtggagcgcagcggttccata

SEQ ID NO: 467265 - DNA, 30 bp, Artificial Sequence
  Synthetic oligonucleotide
aacgaggggaatgggagggaccaaagcata

SEQ ID NO: 467266 - DNA, 30 bp, Artificial Sequence
  Synthetic oligonucleotide
caaaaaaagcgggcgtgtagttaaagcata

SEQ ID NO: 467267 - DNA, 30 bp, Artificial Sequence
  Synthetic oligonucleotide
agccatcagaatacttatatctgaagcata

SEQ ID NO: 467268 - DNA, 30 bp, Artificial Sequence
  Synthetic oligonucleotide
cttccaggtactgcttgtgggaggagcata

SEQ ID NO: 467269 - DNA, 30 bp, Artificial Sequence
  Synthetic oligonucleotide
tttcagatttgtaccggcgaggtgagcata

SEQ ID NO: 467270 - DNA, 30 bp, Artificial Sequence
  Synthetic oligonucleotide
ggcggtatttacacctatgctaatagcata

SEQ ID NO: 467271 - DNA, 30 bp, Artificial Sequence
  Synthetic oligonucleotide
agctctatggtgaatcgcagtggtagcata

SEQ ID NO: 467272 - DNA, 30 bp, Artificial Sequence
  Synthetic oligonucleotide
ctctccctcgtgtaccgtagccgacgcata

SEQ ID NO: 467273 - DNA, 30 bp, Artificial Sequence
  Synthetic oligonucleotide
tcacatagataaaatagatccgtacgcata

SEQ ID NO: 467274 - DNA, 30 bp, Artificial Sequence
  Synthetic oligonucleotide
gatatgagtatggcattaataatccgcata

SEQ ID NO: 467275 - DNA, 30 bp, Artificial Sequence
  Synthetic oligonucleotide
ggggttgtaccgttgcaaagcacgcgcata

SEQ ID NO: 467276 - DNA, 30 bp, Artificial Sequence
  Synthetic oligonucleotide
ggtctctctaactttaacgccaatcgcata

SEQ ID NO: 467277 - DNA, 30 bp, Artificial Sequence
  Synthetic oligonucleotide
tagattgcagtgctagactagagaggcata

SEQ ID NO: 467278 - DNA, 30 bp, Artificial Sequence
  Synthetic oligonucleotide
aactagtcaacaaaaatgagatgaggcata

SEQ ID NO: 467279 - DNA, 30 bp, Artificial Sequence
  Synthetic oligonucleotide
tgttctttaaacgccctcaaatacggcata

SEQ ID NO: 467280 - DNA, 30 bp, Artificial Sequence
  Synthetic oligonucleotide
gaatataattacttaatgtcaatcggcata

SEQ ID NO: 467281 - DNA, 30 bp, Artificial Sequence
  Synthetic oligonucleotide
gccgggcatctgaccccgcaaccgggcata

SEQ ID NO: 467282 - DNA, 30 bp, Artificial Sequence
  Synthetic oligonucleotide
tggatcaagtagatgctgcggaaatgcata

SEQ ID NO: 467283 - DNA, 30 bp, Artificial Sequence
  Synthetic oligonucleotide
tgtaataacggtcttggcggagaatgcata

SEQ ID NO: 467284 - DNA, 30 bp, Artificial Sequence
  Synthetic oligonucleotide
tagaatctaaaaactagattttactgcata

SEQ ID NO: 467285 - DNA, 30 bp, Artificial Sequence
  Synthetic oligonucleotide
ggacccccagcgatatgcgtctcgtgcata

SEQ ID NO: 467286 - DNA, 30 bp, Artificial Sequence
  Synthetic oligonucleotide
agttgctcaggtagtcaagtacattgcata

SEQ ID NO: 467287 - DNA, 30 bp, Artificial Sequence
  Synthetic oligonucleotide
cagaccgccccgaattagcggtcttgcata

SEQ ID NO: 467288 - DNA, 30 bp, Artificial Sequence
  Synthetic oligonucleotide
ttggtatgtatatggtacgttaaaatcata

SEQ ID NO: 467289 - DNA, 30 bp, Artificial Sequence
  Synthetic oligonucleotide
ttcctacactccattccctaagaaatcata

SEQ ID NO: 467290 - DNA, 30 bp, Artificial Sequence
  Synthetic oligonucleotide
tgtgaattctttgacatgtattcaatcata

SEQ ID NO: 467291 - DNA, 30 bp, Artificial Sequence
  Synthetic oligonucleotide
ttaagaggttggttctctgcggtaatcata

SEQ ID NO: 467292 - DNA, 30 bp, Artificial Sequence
  Synthetic oligonucleotide
agagaagccgggggtataatgtacatcata

SEQ ID NO: 467293 - DNA, 30 bp, Artificial Sequence
  Synthetic oligonucleotide
gaatacatgacctgactgcgagtcatcata

SEQ ID NO: 467294 - DNA, 30 bp, Artificial Sequence
  Synthetic oligonucleotide
tgcctgtgaccttatacctaattcatcata

SEQ ID NO: 467295 - DNA, 30 bp, Artificial Sequence
  Synthetic oligonucleotide
tttatcatggagcgcggttttccgatcata

SEQ ID NO: 467296 - DNA, 30 bp, Artificial Sequence
  Synthetic oligonucleotide
ttaagcgcaggtggttggttttttatcata

SEQ ID NO: 467297 - DNA, 28 bp, Artificial Sequence
  Synthetic oligonucleotide
taggttaggatgttctcacagactcata

SEQ ID NO: 467298 - DNA, 30 bp, Artificial Sequence
  Synthetic oligonucleotide
gtgctagcacgtaaaggcatcctcctcata

SEQ ID NO: 467299 - DNA, 30 bp, Artificial Sequence
  Synthetic oligonucleotide
ttccttctcgtccatggctgggtcctcata

SEQ ID NO: 467300 - DNA, 30 bp, Artificial Sequence
  Synthetic oligonucleotide
aattaggtattccagatggcaagtctcata

SEQ ID NO: 467301 - DNA, 30 bp, Artificial Sequence
  Synthetic oligonucleotide
tgaatgtatcacccactacgaattctcata

SEQ ID NO: 467302 - DNA, 30 bp, Artificial Sequence
  Synthetic oligonucleotide
ttgaccgagagggttgcgccttttctcata

SEQ ID NO: 467303 - DNA, 30 bp, Artificial Sequence
  Synthetic oligonucleotide
attatgggcagtttacttaggccagtcata

SEQ ID NO: 467304 - DNA, 30 bp, Artificial Sequence
  Synthetic oligonucleotide
tattggtgtgcagcgcggaacatagtcata

SEQ ID NO: 467305 - DNA, 30 bp, Artificial Sequence
  Synthetic oligonucleotide
atcaccgcatagacatcgatagtagtcata

SEQ ID NO: 467306 - DNA, 30 bp, Artificial Sequence
  Synthetic oligonucleotide
tcttaaacttagtacggaggattagtcata

SEQ ID NO: 467307 - DNA, 30 bp, Artificial Sequence
  Synthetic oligonucleotide
ctatggtcgaaggcaggccattgcgtcata

SEQ ID NO: 467308 - DNA, 30 bp, Artificial Sequence
  Synthetic oligonucleotide
gcagctatcttctgttagccagtggtcata

SEQ ID NO: 467309 - DNA, 30 bp, Artificial Sequence
  Synthetic oligonucleotide
atcgcagttacttatgtgcaaacattcata

SEQ ID NO: 467310 - DNA, 30 bp, Artificial Sequence
  Synthetic oligonucleotide
attaactgaccggagacttaaacattcata

SEQ ID NO: 467311 - DNA, 30 bp, Artificial Sequence
  Synthetic oligonucleotide
aatttatctcacatcagttgtcgattcata

SEQ ID NO: 467312 - DNA, 30 bp, Artificial Sequence
  Synthetic oligonucleotide
ggcccagggttgcatcaacgtgccttcata

SEQ ID NO: 467313 - DNA, 30 bp, Artificial Sequence
  Synthetic oligonucleotide
caatgcaattctaatagggaaaatttcata

SEQ ID NO: 467314 - DNA, 30 bp, Artificial Sequence
  Synthetic oligonucleotide
gaggtgccttggctacgcagtgctttcata

SEQ ID NO: 467315 - DNA, 30 bp, Artificial Sequence
  Synthetic oligonucleotide
gtgagcactgtacaccgtcagtttttcata

SEQ ID NO: 467316 - DNA, 30 bp, Artificial Sequence
  Synthetic oligonucleotide
tgccaccatgtgcttgtcacgggaaagata

SEQ ID NO: 467317 - DNA, 30 bp, Artificial Sequence
  Synthetic oligonucleotide
agttcttacgccttaaggaggttaaagata

SEQ ID NO: 467318 - DNA, 30 bp, Artificial Sequence
  Synthetic oligonucleotide
aaattttaaacttaagccactgagaagata

SEQ ID NO: 467319 - DNA, 30 bp, Artificial Sequence
  Synthetic oligonucleotide
ttaattactccgcctggtctcaggaagata

SEQ ID NO: 467320 - DNA, 30 bp, Artificial Sequence
  Synthetic oligonucleotide
tcctgcctggtattgcgcgcaatgaagata

SEQ ID NO: 467321 - DNA, 30 bp, Artificial Sequence
  Synthetic oligonucleotide
ctacagactgtcttatactagatgaagata

SEQ ID NO: 467322 - DNA, 30 bp, Artificial Sequence
  Synthetic oligonucleotide
gaacttacactgaatcggagctgtaagata

SEQ ID NO: 467323 - DNA, 30 bp, Artificial Sequence
  Synthetic oligonucleotide
acccagtgaggaaggttcaaaattaagata

SEQ ID NO: 467324 - DNA, 30 bp, Artificial Sequence
  Synthetic oligonucleotide
gccatacacgcgcggctccgaacgcagata

SEQ ID NO: 467325 - DNA, 30 bp, Artificial Sequence
  Synthetic oligonucleotide
tctccgatgtttgggaccatcacgcagata

SEQ ID NO: 467326 - DNA, 30 bp, Artificial Sequence
  Synthetic oligonucleotide
attcgagatggacgcagactgacgcagata

SEQ ID NO: 467327 - DNA, 30 bp, Artificial Sequence
  Synthetic oligonucleotide
gtccgtcaataaaccccattgatgcagata

SEQ ID NO: 467328 - DNA, 30 bp, Artificial Sequence
  Synthetic oligonucleotide
aaaagtggcaccttctggccgactcagata

SEQ ID NO: 467329 - DNA, 30 bp, Artificial Sequence
  Synthetic oligonucleotide
agtggaattctgcaggcaatctcagagata

SEQ ID NO: 467330 - DNA, 30 bp, Artificial Sequence
  Synthetic oligonucleotide
ggttttcatgcgttgacgattctagagata

SEQ ID NO: 467331 - DNA, 30 bp, Artificial Sequence
  Synthetic oligonucleotide
tgtcttgtacacttcagtgatcacgagata

SEQ ID NO: 467332 - DNA, 30 bp, Artificial Sequence
  Synthetic oligonucleotide
acaggacaagcgattccataatcggagata

SEQ ID NO: 467333 - DNA, 30 bp, Artificial Sequence
  Synthetic oligonucleotide
aaaagtcaatgggccaataattgggagata

SEQ ID NO: 467334 - DNA, 30 bp, Artificial Sequence
  Synthetic oligonucleotide
cattagaaacgggaggattcatctgagata

SEQ ID NO: 467335 - DNA, 30 bp, Artificial Sequence
  Synthetic oligonucleotide
tgtcctggttacaagcgggtgacatagata

SEQ ID NO: 467336 - DNA, 30 bp, Artificial Sequence
  Synthetic oligonucleotide
tattggggccatatcatacagtactagata

SEQ ID NO: 467337 - DNA, 30 bp, Artificial Sequence
  Synthetic oligonucleotide
atctttatcaatcaacgggtatcctagata

SEQ ID NO: 467338 - DNA, 30 bp, Artificial Sequence
  Synthetic oligonucleotide
gtgttggttactttttacgtaatctagata

SEQ ID NO: 467339 - DNA, 30 bp, Artificial Sequence
  Synthetic oligonucleotide
ccatatgcctataccagccctaagtagata

SEQ ID NO: 467340 - DNA, 30 bp, Artificial Sequence
  Synthetic oligonucleotide
tttgcgggcagtacaggcaagaggtagata

SEQ ID NO: 467341 - DNA, 30 bp, Artificial Sequence
  Synthetic oligonucleotide
acatgtcttgtttcaactccccattagata

SEQ ID NO: 467342 - DNA, 30 bp, Artificial Sequence
  Synthetic oligonucleotide
cagagaagccttacagactctgtttagata

SEQ ID NO: 467343 - DNA, 30 bp, Artificial Sequence
  Synthetic oligonucleotide
caaagactgtttggcttattacaaacgata

SEQ ID NO: 467344 - DNA, 30 bp, Artificial Sequence
  Synthetic oligonucleotide
tcgggtctgggccccccctctcgcacgata

SEQ ID NO: 467345 - DNA, 30 bp, Artificial Sequence
  Synthetic oligonucleotide
aactacccaacaggcagccttgggacgata

SEQ ID NO: 467346 - DNA, 30 bp, Artificial Sequence
  Synthetic oligonucleotide
tgctattcgtaagcggtgagttatacgata

SEQ ID NO: 467347 - DNA, 30 bp, Artificial Sequence
  Synthetic oligonucleotide
cgtaagtttatcgcgggcatcactacgata

SEQ ID NO: 467348 - DNA, 30 bp, Artificial Sequence
  Synthetic oligonucleotide
cctcgggtttgcctgtcagcgtaaccgata

SEQ ID NO: 467349 - DNA, 30 bp, Artificial Sequence
  Synthetic oligonucleotide
gttaccatgtagtcttcagctataccgata

SEQ ID NO: 467350 - DNA, 30 bp, Artificial Sequence
  Synthetic oligonucleotide
aaatctcaatgcaccagtgcggtaccgata

SEQ ID NO: 467351 - DNA, 30 bp, Artificial Sequence
  Synthetic oligonucleotide
tgattaaatttgatatatatagtcccgata

SEQ ID NO: 467352 - DNA, 30 bp, Artificial Sequence
  Synthetic oligonucleotide
gtcgttagtatatggtaccgaaggccgata

SEQ ID NO: 467353 - DNA, 31 bp, Artificial Sequence
  Synthetic oligonucleotide
tttattcttgcatgtaggatcacgtccgata

SEQ ID NO: 467354 - DNA, 30 bp, Artificial Sequence
  Synthetic oligonucleotide
gaacagatcgaacctaaatcctttccgata

SEQ ID NO: 467355 - DNA, 30 bp, Artificial Sequence
  Synthetic oligonucleotide
cttcacctctgagtcggtatttcagcgata

SEQ ID NO: 467356 - DNA, 30 bp, Artificial Sequence
  Synthetic oligonucleotide
gatccgcaagacgcactccaaggagcgata

SEQ ID NO: 467357 - DNA, 30 bp, Artificial Sequence
  Synthetic oligonucleotide
agtatgacccctaccgtttctcctgcgata

SEQ ID NO: 467358 - DNA, 30 bp, Artificial Sequence
  Synthetic oligonucleotide
tctatgaattatgggcgtagaccctcgata

SEQ ID NO: 467359 - DNA, 30 bp, Artificial Sequence
  Synthetic oligonucleotide
ttcgatcaccgtaatttttgcccctcgata

SEQ ID NO: 467360 - DNA, 30 bp, Artificial Sequence
  Synthetic oligonucleotide
gtggtttcgcagctgcacgccccgtcgata

SEQ ID NO: 467361 - DNA, 30 bp, Artificial Sequence
  Synthetic oligonucleotide
gctgtcaccaggtactttctgatgtcgata

SEQ ID NO: 467362 - DNA, 30 bp, Artificial Sequence
  Synthetic oligonucleotide
gtacctggaataagtttaaggccttcgata

SEQ ID NO: 467363 - DNA, 30 bp, Artificial Sequence
  Synthetic oligonucleotide
taagtccgcccatcgaaatgtgtttcgata

SEQ ID NO: 467364 - DNA, 30 bp, Artificial Sequence
  Synthetic oligonucleotide
agcggcactacagagtgaaacgtaaggata

SEQ ID NO: 467365 - DNA, 30 bp, Artificial Sequence
  Synthetic oligonucleotide
aaacatgcgtgtcctacgaacgacaggata

SEQ ID NO: 467366 - DNA, 30 bp, Artificial Sequence
  Synthetic oligonucleotide
ccgatcgggttgttgttgctaccgaggata

SEQ ID NO: 467367 - DNA, 30 bp, Artificial Sequence
  Synthetic oligonucleotide
attcagtgaaatcctccaaatcggaggata

SEQ ID NO: 467368 - DNA, 30 bp, Artificial Sequence
  Synthetic oligonucleotide
gtcttgggttacaggtttataattaggata

SEQ ID NO: 467369 - DNA, 30 bp, Artificial Sequence
  Synthetic oligonucleotide
gggcctcagagcctgccgcaaccacggata

SEQ ID NO: 467370 - DNA, 30 bp, Artificial Sequence
  Synthetic oligonucleotide
taagaacaggtagaggctctagaccggata

SEQ ID NO: 467371 - DNA, 30 bp, Artificial Sequence
  Synthetic oligonucleotide
agagacggccgcggttattgcagccggata

SEQ ID NO: 467372 - DNA, 30 bp, Artificial Sequence
  Synthetic oligonucleotide
ataatacttggcatcaccaagctccggata

SEQ ID NO: 467373 - DNA, 30 bp, Artificial Sequence
  Synthetic oligonucleotide
tgggtgcgtacttgaatacgcccgcggata

SEQ ID NO: 467374 - DNA, 30 bp, Artificial Sequence
  Synthetic oligonucleotide
cgcacttgcgttccacgaaatgcgcggata

SEQ ID NO: 467375 - DNA, 30 bp, Artificial Sequence
  Synthetic oligonucleotide
gtggcgttgaacccatttccaatgcggata

SEQ ID NO: 467376 - DNA, 30 bp, Artificial Sequence
  Synthetic oligonucleotide
atgttcgttgcgaatacccaaacagggata

SEQ ID NO: 467377 - DNA, 30 bp, Artificial Sequence
  Synthetic oligonucleotide
taaatgtaatgaatgcgtctgttagggata

SEQ ID NO: 467378 - DNA, 30 bp, Artificial Sequence
  Synthetic oligonucleotide
tgcctaaggtcaaaggttactggcgggata

SEQ ID NO: 467379 - DNA, 30 bp, Artificial Sequence
  Synthetic oligonucleotide
gaactctacaggtccacatggttcgggata

SEQ ID NO: 467380 - DNA, 30 bp, Artificial Sequence
  Synthetic oligonucleotide
tttccgcagtgtagcgtggaaggggggata

SEQ ID NO: 467381 - DNA, 30 bp, Artificial Sequence
  Synthetic oligonucleotide
ttccaactttagcggccggtcgctgggata

SEQ ID NO: 467382 - DNA, 30 bp, Artificial Sequence
  Synthetic oligonucleotide
tgcttctacatggtttatcagggtgggata

SEQ ID NO: 467383 - DNA, 30 bp, Artificial Sequence
  Synthetic oligonucleotide
atttcgaatcagtcagaacgcattgggata

SEQ ID NO: 467384 - DNA, 30 bp, Artificial Sequence
  Synthetic oligonucleotide
tgcgcgcatacagccgttaatctatggata

SEQ ID NO: 467385 - DNA, 30 bp, Artificial Sequence
  Synthetic oligonucleotide
cctgataaagaagtataccagagctggata

SEQ ID NO: 467386 - DNA, 30 bp, Artificial Sequence
  Synthetic oligonucleotide
tatgacccaccgtccctcttggtctggata

SEQ ID NO: 467387 - DNA, 30 bp, Artificial Sequence
  Synthetic oligonucleotide
ttggtcggatatatgcggcacttctggata

SEQ ID NO: 467388 - DNA, 30 bp, Artificial Sequence
  Synthetic oligonucleotide
cattcgttacaaaatctatttttctggata

SEQ ID NO: 467389 - DNA, 30 bp, Artificial Sequence
  Synthetic oligonucleotide
ggggccgtccgtttccatgcccagtggata

SEQ ID NO: 467390 - DNA, 30 bp, Artificial Sequence
  Synthetic oligonucleotide
accagatactcgacgtagtaattaatgata

SEQ ID NO: 467391 - DNA, 30 bp, Artificial Sequence
  Synthetic oligonucleotide
gtttcaagcttcattgagaaacccatgata

SEQ ID NO: 467392 - DNA, 30 bp, Artificial Sequence
  Synthetic oligonucleotide
ataaatcttacagaattctgccgcatgata

SEQ ID NO: 467393 - DNA, 30 bp, Artificial Sequence
  Synthetic oligonucleotide
aaatgatttttctgtcaattcctcatgata

SEQ ID NO: 467394 - DNA, 30 bp, Artificial Sequence
  Synthetic oligonucleotide
acgcacggtttcgattgattcaggatgata

SEQ ID NO: 467395 - DNA, 30 bp, Artificial Sequence
  Synthetic oligonucleotide
tccgtccgcggtaacaccatgaatatgata

SEQ ID NO: 467396 - DNA, 30 bp, Artificial Sequence
  Synthetic oligonucleotide
gtcttcttatgtaacgtgacccatatgata

SEQ ID NO: 467397 - DNA, 30 bp, Artificial Sequence
  Synthetic oligonucleotide
gcatgatcaagaagcaccagcgatatgata

SEQ ID NO: 467398 - DNA, 30 bp, Artificial Sequence
  Synthetic oligonucleotide
aaatcgccacacttattaatcagtatgata

SEQ ID NO: 467399 - DNA, 30 bp, Artificial Sequence
  Synthetic oligonucleotide
tgctctcatgcgcctacggacggtatgata

SEQ ID NO: 467400 - DNA, 30 bp, Artificial Sequence
  Synthetic oligonucleotide
atgaatcaggatagttttaagggtatgata

SEQ ID NO: 467401 - DNA, 30 bp, Artificial Sequence
  Synthetic oligonucleotide
ggaggtctttgcctctctactggtatgata

SEQ ID NO: 467402 - DNA, 30 bp, Artificial Sequence
  Synthetic oligonucleotide
ggtaagtgtcaatatagaggccaactgata

SEQ ID NO: 467403 - DNA, 30 bp, Artificial Sequence
  Synthetic oligonucleotide
taaagaggcatgtcgcgctttgaactgata

SEQ ID NO: 467404 - DNA, 30 bp, Artificial Sequence
  Synthetic oligonucleotide
cggtcttcgcctctcgtcgtatacctgata

SEQ ID NO: 467405 - DNA, 30 bp, Artificial Sequence
  Synthetic oligonucleotide
cgatctacgctcggttttgactccctgata

SEQ ID NO: 467406 - DNA, 30 bp, Artificial Sequence
  Synthetic oligonucleotide
atggttgtaaacgctgcgctaagcctgata

SEQ ID NO: 467407 - DNA, 30 bp, Artificial Sequence
  Synthetic oligonucleotide
ttttagtgggcggtaggtaacggcctgata

SEQ ID NO: 467408 - DNA, 30 bp, Artificial Sequence
  Synthetic oligonucleotide
aaagcgaccattgcttctccactcctgata

SEQ ID NO: 467409 - DNA, 30 bp, Artificial Sequence
  Synthetic oligonucleotide
tattaaggggctaacccgtgatggctgata

SEQ ID NO: 467410 - DNA, 30 bp, Artificial Sequence
  Synthetic oligonucleotide
ttgggcctcagggggcgccaaggtctgata

SEQ ID NO: 467411 - DNA, 30 bp, Artificial Sequence
  Synthetic oligonucleotide
tgtggcctttcgtcttagctctgtctgata

SEQ ID NO: 467412 - DNA, 30 bp, Artificial Sequence
  Synthetic oligonucleotide
actcaggagttggtaaaacgtgttctgata

SEQ ID NO: 467413 - DNA, 30 bp, Artificial Sequence
  Synthetic oligonucleotide
gtgcatgttcacttcttacgtgaagtgata

SEQ ID NO: 467414 - DNA, 30 bp, Artificial Sequence
  Synthetic oligonucleotide
ggacgcatgagaaccaacgctgccgtgata

SEQ ID NO: 467415 - DNA, 30 bp, Artificial Sequence
  Synthetic oligonucleotide
taatgcttcgcttcgaatctgatcgtgata

SEQ ID NO: 467416 - DNA, 30 bp, Artificial Sequence
  Synthetic oligonucleotide
tgtggcgcagccctcagtcacgtcgtgata

SEQ ID NO: 467417 - DNA, 30 bp, Artificial Sequence
  Synthetic oligonucleotide
tcgttttataagtctggcacgtgggtgata

SEQ ID NO: 467418 - DNA, 30 bp, Artificial Sequence
  Synthetic oligonucleotide
acctttacaatggtgtactttaaattgata

SEQ ID NO: 467419 - DNA, 30 bp, Artificial Sequence
  Synthetic oligonucleotide
ctgtccgcgtatcccgtataaacattgata

SEQ ID NO: 467420 - DNA, 30 bp, Artificial Sequence
  Synthetic oligonucleotide
aggtttaatttagtttttgctatattgata

SEQ ID NO: 467421 - DNA, 30 bp, Artificial Sequence
  Synthetic oligonucleotide
tgcagcatgacgtaagctcttatattgata

SEQ ID NO: 467422 - DNA, 30 bp, Artificial Sequence
  Synthetic oligonucleotide
ttccatgcagtctatgataaattattgata

SEQ ID NO: 467423 - DNA, 30 bp, Artificial Sequence
  Synthetic oligonucleotide
taatcaagatcacgtttcagggtcttgata

SEQ ID NO: 467424 - DNA, 30 bp, Artificial Sequence
  Synthetic oligonucleotide
gtttcgaccggtcattatcgtaggttgata

SEQ ID NO: 467425 - DNA, 30 bp, Artificial Sequence
  Synthetic oligonucleotide
actcagtccgggaaggacaagtgtttgata

SEQ ID NO: 467426 - DNA, 30 bp, Artificial Sequence
  Synthetic oligonucleotide
gaagcgcatcatataatcgaaattttgata

SEQ ID NO: 467427 - DNA, 30 bp, Artificial Sequence
  Synthetic oligonucleotide
ccagtcaagtcggacttctcaattttgata

SEQ ID NO: 467428 - DNA, 30 bp, Artificial Sequence
  Synthetic oligonucleotide
aagtgtgttgcagtaatggcagaaaatata

SEQ ID NO: 467429 - DNA, 30 bp, Artificial Sequence
  Synthetic oligonucleotide
agctctgaaacttctagtgggtaaaatata

SEQ ID NO: 467430 - DNA, 30 bp, Artificial Sequence
  Synthetic oligonucleotide
ctggaggtgttgcagagtacatcaaatata

SEQ ID NO: 467431 - DNA, 30 bp, Artificial Sequence
  Synthetic oligonucleotide
cttggatgttgcgaacgacactcaaatata

SEQ ID NO: 467432 - DNA, 30 bp, Artificial Sequence
  Synthetic oligonucleotide
cggttctcgatgtcctttacatgaaatata

SEQ ID NO: 467433 - DNA, 30 bp, Artificial Sequence
  Synthetic oligonucleotide
ttagcatacatacttccctataacaatata

SEQ ID NO: 467434 - DNA, 30 bp, Artificial Sequence
  Synthetic oligonucleotide
gcatcaactctggaacctgtagtcaatata

SEQ ID NO: 467435 - DNA, 30 bp, Artificial Sequence
  Synthetic oligonucleotide
attaggaatccagtttaagctccgaatata

SEQ ID NO: 467436 - DNA, 30 bp, Artificial Sequence
  Synthetic oligonucleotide
tcctaggtttcaacagcataccggaatata

SEQ ID NO: 467437 - DNA, 30 bp, Artificial Sequence
  Synthetic oligonucleotide
tgtattccggatagacggtatgctaatata

SEQ ID NO: 467438 - DNA, 30 bp, Artificial Sequence
  Synthetic oligonucleotide
agatccaaagaaacctgtcgagcacatata

SEQ ID NO: 467439 - DNA, 30 bp, Artificial Sequence
  Synthetic oligonucleotide
ctttctattgggttatattctggacatata

SEQ ID NO: 467440 - DNA, 30 bp, Artificial Sequence
  Synthetic oligonucleotide
ccatgactaaaaaaagagcaattacatata

SEQ ID NO: 467441 - DNA, 30 bp, Artificial Sequence
  Synthetic oligonucleotide
aattcacaagttgacgacgcctaccatata

SEQ ID NO: 467442 - DNA, 30 bp, Artificial Sequence
  Synthetic oligonucleotide
agccgttggtatcgcattggcgtccatata

SEQ ID NO: 467443 - DNA, 30 bp, Artificial Sequence
  Synthetic oligonucleotide
caggtccctcgtgggttggtgggtcatata

SEQ ID NO: 467444 - DNA, 30 bp, Artificial Sequence
  Synthetic oligonucleotide
gtagtaagaggtggcagactaaaagatata

SEQ ID NO: 467445 - DNA, 30 bp, Artificial Sequence
  Synthetic oligonucleotide
tagaataggtcgctggatgacacagatata

SEQ ID NO: 467446 - DNA, 30 bp, Artificial Sequence
  Synthetic oligonucleotide
cgtaattagaaagtggttggttgagatata

SEQ ID NO: 467447 - DNA, 30 bp, Artificial Sequence
  Synthetic oligonucleotide
catatttgtgtttttcggtttctagatata

SEQ ID NO: 467448 - DNA, 30 bp, Artificial Sequence
  Synthetic oligonucleotide
ttccaatttgggtacatgactacggatata

SEQ ID NO: 467449 - DNA, 30 bp, Artificial Sequence
  Synthetic oligonucleotide
aagtggatacagctacagtgccctgatata

SEQ ID NO: 467450 - DNA, 30 bp, Artificial Sequence
  Synthetic oligonucleotide
tgatacaacttagaatggggtagatatata

SEQ ID NO: 467451 - DNA, 30 bp, Artificial Sequence
  Synthetic oligonucleotide
ccgtgggatagcctccctgggcgatatata

SEQ ID NO: 467452 - DNA, 30 bp, Artificial Sequence
  Synthetic oligonucleotide
atgactgtttccgggtttgaactatatata

SEQ ID NO: 467453 - DNA, 30 bp, Artificial Sequence
  Synthetic oligonucleotide
tgctggggcttcacatgtgcagactatata

SEQ ID NO: 467454 - DNA, 30 bp, Artificial Sequence
  Synthetic oligonucleotide
tgccagctgatagttcccgcagcctatata

SEQ ID NO: 467455 - DNA, 30 bp, Artificial Sequence
  Synthetic oligonucleotide
ctgacaaaagaaagctttcggctctatata

SEQ ID NO: 467456 - DNA, 30 bp, Artificial Sequence
  Synthetic oligonucleotide
acctacatcgaaacgtcgcgtgtctatata

SEQ ID NO: 467457 - DNA, 30 bp, Artificial Sequence
  Synthetic oligonucleotide
atttgacgaccttgacaaaacgagtatata

SEQ ID NO: 467458 - DNA, 30 bp, Artificial Sequence
  Synthetic oligonucleotide
cttgcacgcatctattcgcaaatgtatata

SEQ ID NO: 467459 - DNA, 30 bp, Artificial Sequence
  Synthetic oligonucleotide
tatcctgaagatcggttaggggtgtatata

SEQ ID NO: 467460 - DNA, 30 bp, Artificial Sequence
  Synthetic oligonucleotide
cccgatactcacggatctagattgtatata

SEQ ID NO: 467461 - DNA, 30 bp, Artificial Sequence
  Synthetic oligonucleotide
acacaaaaattatataatcggcattatata

SEQ ID NO: 467462 - DNA, 30 bp, Artificial Sequence
  Synthetic oligonucleotide
tgggtacatacaccctaagtctattatata

SEQ ID NO: 467463 - DNA, 30 bp, Artificial Sequence
  Synthetic oligonucleotide
gagttaagtgttaacatcaccttttatata

SEQ ID NO: 467464 - DNA, 30 bp, Artificial Sequence
  Synthetic oligonucleotide
tatgtatgttcaccgatggtcttttatata

SEQ ID NO: 467465 - DNA, 30 bp, Artificial Sequence
  Synthetic oligonucleotide
ccaaagtattcccaggggctgtgaactata

SEQ ID NO: 467466 - DNA, 30 bp, Artificial Sequence
  Synthetic oligonucleotide
gtacgctatgcgccctaccacgtaactata

SEQ ID NO: 467467 - DNA, 30 bp, Artificial Sequence
  Synthetic oligonucleotide
agcagccggttctaacagacggccactata

SEQ ID NO: 467468 - DNA, 30 bp, Artificial Sequence
  Synthetic oligonucleotide
attaagcgaattcaacttagtgccactata

SEQ ID NO: 467469 - DNA, 30 bp, Artificial Sequence
  Synthetic oligonucleotide
catcggtatatttgtttggatgtcactata

SEQ ID NO: 467470 - DNA, 30 bp, Artificial Sequence
  Synthetic oligonucleotide
caggatgtcatgataggcaataagactata

SEQ ID NO: 467471 - DNA, 30 bp, Artificial Sequence
  Synthetic oligonucleotide
tgtcatttatagaatctctgacagactata

SEQ ID NO: 467472 - DNA, 30 bp, Artificial Sequence
  Synthetic oligonucleotide
gctagaaacggaaggggagttatgactata

SEQ ID NO: 467473 - DNA, 30 bp, Artificial Sequence
  Synthetic oligonucleotide
ggagtgtctatatgttacgaacatactata

SEQ ID NO: 467474 - DNA, 30 bp, Artificial Sequence
  Synthetic oligonucleotide
tactatcaacggtactgggagtatactata

SEQ ID NO: 467475 - DNA, 30 bp, Artificial Sequence
  Synthetic oligonucleotide
atacagctgtgttgacgcttttctactata

SEQ ID NO: 467476 - DNA, 30 bp, Artificial Sequence
  Synthetic oligonucleotide
aaagtccatcctttctccccggatcctata

SEQ ID NO: 467477 - DNA, 30 bp, Artificial Sequence
  Synthetic oligonucleotide
agagtcctacagaatttcgaatgtcctata

SEQ ID NO: 467478 - DNA, 30 bp, Artificial Sequence
  Synthetic oligonucleotide
gagacgtcatcgaaaccttgggtagctata

SEQ ID NO: 467479 - DNA, 30 bp, Artificial Sequence
  Synthetic oligonucleotide
aaacgacactgtaataggaaggacgctata

SEQ ID NO: 467480 - DNA, 30 bp, Artificial Sequence
  Synthetic oligonucleotide
gcacctattaaacgaccaatggacgctata

SEQ ID NO: 467481 - DNA, 30 bp, Artificial Sequence
  Synthetic oligonucleotide
ttgttacaaaaaatgacccggtgcgctata

SEQ ID NO: 467482 - DNA, 30 bp, Artificial Sequence
  Synthetic oligonucleotide
agttccaccgcggctagacgccaggctata

SEQ ID NO: 467483 - DNA, 30 bp, Artificial Sequence
  Synthetic oligonucleotide
gctagcggcagctaaatgcagagggctata

SEQ ID NO: 467484 - DNA, 30 bp, Artificial Sequence
  Synthetic oligonucleotide
aggatcattactctgtgaaacggggctata

SEQ ID NO: 467485 - DNA, 30 bp, Artificial Sequence
  Synthetic oligonucleotide
gtgaggtggtgtattcactgagtggctata

SEQ ID NO: 467486 - DNA, 30 bp, Artificial Sequence
  Synthetic oligonucleotide
ccctagcatagacgcgccgtggatgctata

SEQ ID NO: 467487 - DNA, 30 bp, Artificial Sequence
  Synthetic oligonucleotide
actttcccgactcaagcaggggctgctata

SEQ ID NO: 467488 - DNA, 30 bp, Artificial Sequence
  Synthetic oligonucleotide
atggtgttaccgctcaggtgaggtgctata

SEQ ID NO: 467489 - DNA, 30 bp, Artificial Sequence
  Synthetic oligonucleotide
tacctgaatagttcgaacgtagttgctata

SEQ ID NO: 467490 - DNA, 30 bp, Artificial Sequence
  Synthetic oligonucleotide
agtcctcctaagcaaccacgctttgctata

SEQ ID NO: 467491 - DNA, 30 bp, Artificial Sequence
  Synthetic oligonucleotide
tgctcatgctcgggtatatcatagtctata

SEQ ID NO: 467492 - DNA, 30 bp, Artificial Sequence
  Synthetic oligonucleotide
atctttacacgagaagcggagcattctata

SEQ ID NO: 467493 - DNA, 30 bp, Artificial Sequence
  Synthetic oligonucleotide
ttcgcagttataggcatcgagggttctata

SEQ ID NO: 467494 - DNA, 30 bp, Artificial Sequence
  Synthetic oligonucleotide
ggcacgggccattatcaaaggggttctata

SEQ ID NO: 467495 - DNA, 30 bp, Artificial Sequence
  Synthetic oligonucleotide
gccagctaggttgatcaatataacagtata

SEQ ID NO: 467496 - DNA, 30 bp, Artificial Sequence
  Synthetic oligonucleotide
aaagggttagtacggtccttttacagtata

SEQ ID NO: 467497 - DNA, 30 bp, Artificial Sequence
  Synthetic oligonucleotide
gggcatctccgggccgggcaggtcagtata

SEQ ID NO: 467498 - DNA, 30 bp, Artificial Sequence
  Synthetic oligonucleotide
agagaccgctggagtaaatagcagagtata

SEQ ID NO: 467499 - DNA, 30 bp, Artificial Sequence
  Synthetic oligonucleotide
cctgaacttatcgggcatactatgagtata

SEQ ID NO: 467500 - DNA, 30 bp, Artificial Sequence
  Synthetic oligonucleotide
ttctcttacctttaacaggcaaaccgtata

SEQ ID NO: 467501 - DNA, 30 bp, Artificial Sequence
  Synthetic oligonucleotide
tatttacaggtgaacgagcttgtccgtata

SEQ ID NO: 467502 - DNA, 30 bp, Artificial Sequence
  Synthetic oligonucleotide
cggaaggagttatccaaggcaaagcgtata

SEQ ID NO: 467503 - DNA, 30 bp, Artificial Sequence
  Synthetic oligonucleotide
ctagaggttgatgcgttagataatcgtata

SEQ ID NO: 467504 - DNA, 30 bp, Artificial Sequence
  Synthetic oligonucleotide
aaaatatggattcatttttgtctaggtata

SEQ ID NO: 467505 - DNA, 30 bp, Artificial Sequence
  Synthetic oligonucleotide
aataagagctatcactagcctaacggtata

SEQ ID NO: 467506 - DNA, 30 bp, Artificial Sequence
  Synthetic oligonucleotide
ttattggttatgttttatcccgacggtata

SEQ ID NO: 467507 - DNA, 30 bp, Artificial Sequence
  Synthetic oligonucleotide
gattgacaattgaccagggtatacggtata

SEQ ID NO: 467508 - DNA, 30 bp, Artificial Sequence
  Synthetic oligonucleotide
atctccacaaccagcctctcgcgcggtata

SEQ ID NO: 467509 - DNA, 30 bp, Artificial Sequence
  Synthetic oligonucleotide
gggctgtccccactcataagatgcggtata

SEQ ID NO: 467510 - DNA, 30 bp, Artificial Sequence
  Synthetic oligonucleotide
ggattacttgaatcgcagactcagggtata

SEQ ID NO: 467511 - DNA, 30 bp, Artificial Sequence
  Synthetic oligonucleotide
ccggggctctatacggcgtggttgggtata

SEQ ID NO: 467512 - DNA, 30 bp, Artificial Sequence
  Synthetic oligonucleotide
ttgtgctacatggggcaagacaatggtata

SEQ ID NO: 467513 - DNA, 30 bp, Artificial Sequence
  Synthetic oligonucleotide
gggtactttccacgtctactgtcatgtata

SEQ ID NO: 467514 - DNA, 30 bp, Artificial Sequence
  Synthetic oligonucleotide
tcatgatgatgttgatttggaagatgtata

SEQ ID NO: 467515 - DNA, 30 bp, Artificial Sequence
  Synthetic oligonucleotide
cattttccatatgacgaaccgcgatgtata

SEQ ID NO: 467516 - DNA, 30 bp, Artificial Sequence
  Synthetic oligonucleotide
gggtctactagaccgataaaggtctgtata

SEQ ID NO: 467517 - DNA, 30 bp, Artificial Sequence
  Synthetic oligonucleotide
acaagccgatgggatccatgggtctgtata

SEQ ID NO: 467518 - DNA, 30 bp, Artificial Sequence
  Synthetic oligonucleotide
tgatcttaacgttagcacatccagtgtata

SEQ ID NO: 467519 - DNA, 30 bp, Artificial Sequence
  Synthetic oligonucleotide
atttagtcgataacccgctgaaggtgtata

SEQ ID NO: 467520 - DNA, 30 bp, Artificial Sequence
  Synthetic oligonucleotide
cggtggacacatctcgaaactctgtgtata

SEQ ID NO: 467521 - DNA, 30 bp, Artificial Sequence
  Synthetic oligonucleotide
ggcccctcatatccgccccagaattgtata

SEQ ID NO: 467522 - DNA, 30 bp, Artificial Sequence
  Synthetic oligonucleotide
tcgtcttcccagttgcacgtgccttgtata

SEQ ID NO: 467523 - DNA, 30 bp, Artificial Sequence
  Synthetic oligonucleotide
gggggtccgaccagcttctcttaaattata

SEQ ID NO: 467524 - DNA, 30 bp, Artificial Sequence
  Synthetic oligonucleotide
aacgctcttaatcatctaccttcaattata

SEQ ID NO: 467525 - DNA, 30 bp, Artificial Sequence
  Synthetic oligonucleotide
gtcttctgcatatcggcgcatagaattata

SEQ ID NO: 467526 - DNA, 30 bp, Artificial Sequence
  Synthetic oligonucleotide
agaaactacagttgatgcatcgtaattata

SEQ ID NO: 467527 - DNA, 30 bp, Artificial Sequence
  Synthetic oligonucleotide
tgtgtgtccttaacgaggatcgacattata

SEQ ID NO: 467528 - DNA, 30 bp, Artificial Sequence
  Synthetic oligonucleotide
agttgccctagttccatgtcagggattata

SEQ ID NO: 467529 - DNA, 30 bp, Artificial Sequence
  Synthetic oligonucleotide
agaattaattggttccgcaccgtgattata

SEQ ID NO: 467530 - DNA, 30 bp, Artificial Sequence
  Synthetic oligonucleotide
aatgattaccgcatggacgggtatattata

SEQ ID NO: 467531 - DNA, 30 bp, Artificial Sequence
  Synthetic oligonucleotide
gtctccagcaatatcgcgttgactattata

SEQ ID NO: 467532 - DNA, 30 bp, Artificial Sequence
  Synthetic oligonucleotide
gggtaccccgtagcgtaataatgtattata

SEQ ID NO: 467533 - DNA, 30 bp, Artificial Sequence
  Synthetic oligonucleotide
ggtaaatgtagatcatacgcacttattata

SEQ ID NO: 467534 - DNA, 30 bp, Artificial Sequence
  Synthetic oligonucleotide
gagatgcgttacacgcccgaggttattata

SEQ ID NO: 467535 - DNA, 30 bp, Artificial Sequence
  Synthetic oligonucleotide
ggtattgagtttatgatcgaatttattata

SEQ ID NO: 467536 - DNA, 30 bp, Artificial Sequence
  Synthetic oligonucleotide
agaagtttgacaggacacctaggacttata

SEQ ID NO: 467537 - DNA, 30 bp, Artificial Sequence
  Synthetic oligonucleotide
tcagttaagctacgctttggcggacttata

SEQ ID NO: 467538 - DNA, 30 bp, Artificial Sequence
  Synthetic oligonucleotide
accagtcgatccgcttatagtgtacttata

SEQ ID NO: 467539 - DNA, 30 bp, Artificial Sequence
  Synthetic oligonucleotide
ttttcttttaatggacctagcgagcttata

SEQ ID NO: 467540 - DNA, 30 bp, Artificial Sequence
  Synthetic oligonucleotide
tgacatgcttcaccggcccgtgagcttata

SEQ ID NO: 467541 - DNA, 30 bp, Artificial Sequence
  Synthetic oligonucleotide
cgcagtagagatttctatcactcgcttata

SEQ ID NO: 467542 - DNA, 30 bp, Artificial Sequence
  Synthetic oligonucleotide
ctaactaagggtttggatccaaatcttata

SEQ ID NO: 467543 - DNA, 30 bp, Artificial Sequence
  Synthetic oligonucleotide
tagcgtcgcaacacgacgccggatcttata

SEQ ID NO: 467544 - DNA, 30 bp, Artificial Sequence
  Synthetic oligonucleotide
cccggcatttacgcgctccaggctcttata

SEQ ID NO: 467545 - DNA, 30 bp, Artificial Sequence
  Synthetic oligonucleotide
gaactgattagctttagtgaacgagttata

SEQ ID NO: 467546 - DNA, 30 bp, Artificial Sequence
  Synthetic oligonucleotide
ttgcgctcctaaagtatagtaggagttata

SEQ ID NO: 467547 - DNA, 30 bp, Artificial Sequence
  Synthetic oligonucleotide
tgtttcggtctatgccggcataacgttata

SEQ ID NO: 467548 - DNA, 30 bp, Artificial Sequence
  Synthetic oligonucleotide
ggcccttagaattttgatgggtacgttata

SEQ ID NO: 467549 - DNA, 30 bp, Artificial Sequence
  Synthetic oligonucleotide
aactttcctcatagaatcatacgcgttata

SEQ ID NO: 467550 - DNA, 30 bp, Artificial Sequence
  Synthetic oligonucleotide
accattaaccacatctaaccttgcgttata

SEQ ID NO: 467551 - DNA, 30 bp, Artificial Sequence
  Synthetic oligonucleotide
cgatactcctgttaggacaaaagggttata

SEQ ID NO: 467552 - DNA, 30 bp, Artificial Sequence
  Synthetic oligonucleotide
tcgtccgattggccctattccagggttata

SEQ ID NO: 467553 - DNA, 30 bp, Artificial Sequence
  Synthetic oligonucleotide
atcgtgaaaagcccgcctaacactgttata

SEQ ID NO: 467554 - DNA, 30 bp, Artificial Sequence
  Synthetic oligonucleotide
aaaattatcgcttcaggtatgactgttata

SEQ ID NO: 467555 - DNA, 30 bp, Artificial Sequence
  Synthetic oligonucleotide
aagtcagaccgcaagggttgagctgttata

SEQ ID NO: 467556 - DNA, 30 bp, Artificial Sequence
  Synthetic oligonucleotide
ttctgcatataatttcggagcgctgttata

SEQ ID NO: 467557 - DNA, 30 bp, Artificial Sequence
  Synthetic oligonucleotide
ccgggaatgagctctttgtcttctgttata

SEQ ID NO: 467558 - DNA, 30 bp, Artificial Sequence
  Synthetic oligonucleotide
cccagcagcattgcggcatcaggtgttata

SEQ ID NO: 467559 - DNA, 30 bp, Artificial Sequence
  Synthetic oligonucleotide
ttgaataacttcaaggtatattttgttata

SEQ ID NO: 467560 - DNA, 30 bp, Artificial Sequence
  Synthetic oligonucleotide
gtagataaatgtgcaattaggccatttata

SEQ ID NO: 467561 - DNA, 30 bp, Artificial Sequence
  Synthetic oligonucleotide
aatacgcagctcctgaacataggatttata

SEQ ID NO: 467562 - DNA, 30 bp, Artificial Sequence
  Synthetic oligonucleotide
ttaacctagcgcttacggtccggatttata

SEQ ID NO: 467563 - DNA, 30 bp, Artificial Sequence
  Synthetic oligonucleotide
cattggagtggaagtttgaaagcctttata

SEQ ID NO: 467564 - DNA, 30 bp, Artificial Sequence
  Synthetic oligonucleotide
tgtaaaaaataggttgtaccgaagtttata

SEQ ID NO: 467565 - DNA, 30 bp, Artificial Sequence
  Synthetic oligonucleotide
agtagtgaatgtgcatcctactagtttata

SEQ ID NO: 467566 - DNA, 30 bp, Artificial Sequence
  Synthetic oligonucleotide
gttttgtgactaaactactccatgtttata

SEQ ID NO: 467567 - DNA, 30 bp, Artificial Sequence
  Synthetic oligonucleotide
atgtgccggtaagagcatcgagtaaaacta

SEQ ID NO: 467568 - DNA, 30 bp, Artificial Sequence
  Synthetic oligonucleotide
aattgtatgatctttaaaagtgacaaacta

SEQ ID NO: 467569 - DNA, 30 bp, Artificial Sequence
  Synthetic oligonucleotide
tcttcctcgagtttacgcagctccaaacta

SEQ ID NO: 467570 - DNA, 30 bp, Artificial Sequence
  Synthetic oligonucleotide
aactaaatcaagcaaacggagatcaaacta

SEQ ID NO: 467571 - DNA, 30 bp, Artificial Sequence
  Synthetic oligonucleotide
tcccaggtagttaaggcacgcaagaaacta

SEQ ID NO: 467572 - DNA, 30 bp, Artificial Sequence
  Synthetic oligonucleotide
ctgcagaagagaacctatgggttgaaacta

SEQ ID NO: 467573 - DNA, 30 bp, Artificial Sequence
  Synthetic oligonucleotide
caattaaaagactttgataattataaacta

SEQ ID NO: 467574 - DNA, 30 bp, Artificial Sequence
  Synthetic oligonucleotide
gtatgtgcattatcgaattactctaaacta

SEQ ID NO: 467575 - DNA, 30 bp, Artificial Sequence
  Synthetic oligonucleotide
taaatagttctggacgagatgcgtaaacta

SEQ ID NO: 467576 - DNA, 30 bp, Artificial Sequence
  Synthetic oligonucleotide
attggtagaatctatatgacgggtaaacta

SEQ ID NO: 467577 - DNA, 30 bp, Artificial Sequence
  Synthetic oligonucleotide
gagaattacgcttaagagcttgaacaacta

SEQ ID NO: 467578 - DNA, 30 bp, Artificial Sequence
  Synthetic oligonucleotide
aaagaaattttacatagcaacacacaacta

SEQ ID NO: 467579 - DNA, 30 bp, Artificial Sequence
  Synthetic oligonucleotide
gtgttgtgaatcctatcggcgtcacaacta

SEQ ID NO: 467580 - DNA, 30 bp, Artificial Sequence
  Synthetic oligonucleotide
gagggcagccttgtacttttcttacaacta

SEQ ID NO: 467581 - DNA, 30 bp, Artificial Sequence
  Synthetic oligonucleotide
ctatacagcccgcaagttgtaaggcaacta

SEQ ID NO: 467582 - DNA, 30 bp, Artificial Sequence
  Synthetic oligonucleotide
gttaccacatgcgctgatgtagggcaacta

SEQ ID NO: 467583 - DNA, 30 bp, Artificial Sequence
  Synthetic oligonucleotide
catgttaccgccgtagcatggttgcaacta

SEQ ID NO: 467584 - DNA, 30 bp, Artificial Sequence
  Synthetic oligonucleotide
gagtcgcgagaggttgatgtagctcaacta

SEQ ID NO: 467585 - DNA, 31 bp, Artificial Sequence
  Synthetic oligonucleotide
gatgagatcgtaggaacagtaataagaacta

SEQ ID NO: 467586 - DNA, 30 bp, Artificial Sequence
  Synthetic oligonucleotide
ctgcaatagaacctatgcgagtactaacta

SEQ ID NO: 467587 - DNA, 30 bp, Artificial Sequence
  Synthetic oligonucleotide
aatgcttcagggttaaccatctggtaacta

SEQ ID NO: 467588 - DNA, 30 bp, Artificial Sequence
  Synthetic oligonucleotide
tcgaccccgttaaccctcgaaatgtaacta

SEQ ID NO: 467589 - DNA, 30 bp, Artificial Sequence
  Synthetic oligonucleotide
atgaaactacgctatctgaattgttaacta

SEQ ID NO: 467590 - DNA, 30 bp, Artificial Sequence
  Synthetic oligonucleotide
gccattcggccagcgataggcggcacacta

SEQ ID NO: 467591 - DNA, 30 bp, Artificial Sequence
  Synthetic oligonucleotide
cccaccctcgttggcacgctgatcacacta

SEQ ID NO: 467592 - DNA, 30 bp, Artificial Sequence
  Synthetic oligonucleotide
tttgagagctgtcgttcgcaactcacacta

SEQ ID NO: 467593 - DNA, 30 bp, Artificial Sequence
  Synthetic oligonucleotide
ggctcatacaactaggattcgcagacacta

SEQ ID NO: 467594 - DNA, 30 bp, Artificial Sequence
  Synthetic oligonucleotide
ccattgtagctaaatgattgtgagacacta

SEQ ID NO: 467595 - DNA, 30 bp, Artificial Sequence
  Synthetic oligonucleotide
ccgggctgaggactctgctcgtcgacacta

SEQ ID NO: 467596 - DNA, 30 bp, Artificial Sequence
  Synthetic oligonucleotide
cctaggtgtctgaatgcgatcggtacacta

SEQ ID NO: 467597 - DNA, 30 bp, Artificial Sequence
  Synthetic oligonucleotide
gcaattagcagccgaggcacaataccacta

SEQ ID NO: 467598 - DNA, 30 bp, Artificial Sequence
  Synthetic oligonucleotide
cataacagtaaccatcattctgccccacta

SEQ ID NO: 467599 - DNA, 30 bp, Artificial Sequence
  Synthetic oligonucleotide
gcccttactttcccctacccggaagcacta

SEQ ID NO: 467600 - DNA, 30 bp, Artificial Sequence
  Synthetic oligonucleotide
tgacgtttatcagcatgtggtttagcacta

SEQ ID NO: 467601 - DNA, 30 bp, Artificial Sequence
  Synthetic oligonucleotide
taaccgcttatgtgacggtctcacgcacta

SEQ ID NO: 467602 - DNA, 30 bp, Artificial Sequence
  Synthetic oligonucleotide
tcttgctgagaggccaactgggacgcacta

SEQ ID NO: 467603 - DNA, 30 bp, Artificial Sequence
  Synthetic oligonucleotide
aaccggattgcctaatggacaagcgcacta

SEQ ID NO: 467604 - DNA, 30 bp, Artificial Sequence
  Synthetic oligonucleotide
attaactgtaagccgcatagccaggcacta

SEQ ID NO: 467605 - DNA, 30 bp, Artificial Sequence
  Synthetic oligonucleotide
tagcatagcgaccattaaacaggggcacta

SEQ ID NO: 467606 - DNA, 30 bp, Artificial Sequence
  Synthetic oligonucleotide
ggtgtggagtctccgcatgctagtgcacta

SEQ ID NO: 467607 - DNA, 30 bp, Artificial Sequence
  Synthetic oligonucleotide
tatgcctggataagtaatagtagtgcacta

SEQ ID NO: 467608 - DNA, 30 bp, Artificial Sequence
  Synthetic oligonucleotide
acacgagccgaagcgtagagcccatcacta

SEQ ID NO: 467609 - DNA, 30 bp, Artificial Sequence
  Synthetic oligonucleotide
gtaggccgctaggcatctgacagctcacta

SEQ ID NO: 467610 - DNA, 30 bp, Artificial Sequence
  Synthetic oligonucleotide
ttccacatgagccgtcctttaaagtcacta

SEQ ID NO: 467611 - DNA, 30 bp, Artificial Sequence
  Synthetic oligonucleotide
tattctccttgcccccgagtcgtgtcacta

SEQ ID NO: 467612 - DNA, 30 bp, Artificial Sequence
  Synthetic oligonucleotide
tataggtccggcgggtagctataaagacta

SEQ ID NO: 467613 - DNA, 31 bp, Artificial Sequence
  Synthetic oligonucleotide
gaattgtaatccctgtcttaggttaagacta

SEQ ID NO: 467614 - DNA, 30 bp, Artificial Sequence
  Synthetic oligonucleotide
taccgtttttctgaaagttgtagcagacta

SEQ ID NO: 467615 - DNA, 30 bp, Artificial Sequence
  Synthetic oligonucleotide
cacaagaaagcccttctgggccgcagacta

SEQ ID NO: 467616 - DNA, 30 bp, Artificial Sequence
  Synthetic oligonucleotide
gtaatgcttctcccctgctatttgagacta

SEQ ID NO: 467617 - DNA, 30 bp, Artificial Sequence
  Synthetic oligonucleotide
tagtcagttagccttcgtctttatagacta

SEQ ID NO: 467618 - DNA, 30 bp, Artificial Sequence
  Synthetic oligonucleotide
gttgattgattctcggaaatgattagacta

SEQ ID NO: 467619 - DNA, 30 bp, Artificial Sequence
  Synthetic oligonucleotide
tactatcaatgaggtgttagttttagacta

SEQ ID NO: 467620 - DNA, 30 bp, Artificial Sequence
  Synthetic oligonucleotide
ttttatatctacgcttatgagtcccgacta

SEQ ID NO: 467621 - DNA, 30 bp, Artificial Sequence
  Synthetic oligonucleotide
aaatgacgctttataaccatttttcgacta

SEQ ID NO: 467622 - DNA, 30 bp, Artificial Sequence
  Synthetic oligonucleotide
gttctcctccatggtgggaacccaggacta

SEQ ID NO: 467623 - DNA, 30 bp, Artificial Sequence
  Synthetic oligonucleotide
gttagcggaattcatagtcaccgaggacta

SEQ ID NO: 467624 - DNA, 30 bp, Artificial Sequence
  Synthetic oligonucleotide
ctacctgacatagatctacgcaacggacta

SEQ ID NO: 467625 - DNA, 30 bp, Artificial Sequence
  Synthetic oligonucleotide
gatcgggtagatattatttgacccggacta

SEQ ID NO: 467626 - DNA, 30 bp, Artificial Sequence
  Synthetic oligonucleotide
atttaggagcggtttcgttcccccggacta

SEQ ID NO: 467627 - DNA, 30 bp, Artificial Sequence
  Synthetic oligonucleotide
atactaatgtatagtcaacccaagggacta

SEQ ID NO: 467628 - DNA, 30 bp, Artificial Sequence
  Synthetic oligonucleotide
cagaatccttttctccctctatggggacta

SEQ ID NO: 467629 - DNA, 30 bp, Artificial Sequence
  Synthetic oligonucleotide
actgctttaacttgagcggaaattggacta

SEQ ID NO: 467630 - DNA, 30 bp, Artificial Sequence
  Synthetic oligonucleotide
agacggcccacgcaggcatagctatgacta

SEQ ID NO: 467631 - DNA, 31 bp, Artificial Sequence
  Synthetic oligonucleotide
tgctcgttatacggaaattgtacactgacta

SEQ ID NO: 467632 - DNA, 30 bp, Artificial Sequence
  Synthetic oligonucleotide
cagactgccaatcctaagttacgctgacta

SEQ ID NO: 467633 - DNA, 30 bp, Artificial Sequence
  Synthetic oligonucleotide
tatacagacttattaccgcagacttgacta

SEQ ID NO: 467634 - DNA, 30 bp, Artificial Sequence
  Synthetic oligonucleotide
acagcggatacaaacctatggttttgacta

SEQ ID NO: 467635 - DNA, 30 bp, Artificial Sequence
  Synthetic oligonucleotide
aaattcgccattctccagtcggaaatacta

SEQ ID NO: 467636 - DNA, 29 bp, Artificial Sequence
  Synthetic oligonucleotide
ctgtaagtgtaatgtcacgtggaatacta

SEQ ID NO: 467637 - DNA, 30 bp, Artificial Sequence
  Synthetic oligonucleotide
gttgttttctcctgggcgcccgtaatacta

SEQ ID NO: 467638 - DNA, 30 bp, Artificial Sequence
  Synthetic oligonucleotide
ccattggttcttcctgggtttcacatacta

SEQ ID NO: 467639 - DNA, 30 bp, Artificial Sequence
  Synthetic oligonucleotide
gacacatgaattactcgcgtccccatacta

SEQ ID NO: 467640 - DNA, 30 bp, Artificial Sequence
  Synthetic oligonucleotide
cgaatctcgcagctcttgcgggtcatacta

SEQ ID NO: 467641 - DNA, 30 bp, Artificial Sequence
  Synthetic oligonucleotide
aaagaaagccatagcacttacttgatacta

SEQ ID NO: 467642 - DNA, 30 bp, Artificial Sequence
  Synthetic oligonucleotide
ttcacttattctcggataagttgtatacta

SEQ ID NO: 467643 - DNA, 30 bp, Artificial Sequence
  Synthetic oligonucleotide
gctttcagctgtgctgtcccatcactacta

SEQ ID NO: 467644 - DNA, 30 bp, Artificial Sequence
  Synthetic oligonucleotide
cgccatcatgtatcagttatgtcactacta

SEQ ID NO: 467645 - DNA, 30 bp, Artificial Sequence
  Synthetic oligonucleotide
ggcgaaccggtcgtacgtatcagcctacta

SEQ ID NO: 467646 - DNA, 30 bp, Artificial Sequence
  Synthetic oligonucleotide
ctactcgtatagccttggtaaggcctacta

SEQ ID NO: 467647 - DNA, 30 bp, Artificial Sequence
  Synthetic oligonucleotide
catagtcttccataagccccaaggctacta

SEQ ID NO: 467648 - DNA, 30 bp, Artificial Sequence
  Synthetic oligonucleotide
ttgtgtacaaatgtcgtaactgggctacta

SEQ ID NO: 467649 - DNA, 30 bp, Artificial Sequence
  Synthetic oligonucleotide
cctaatgaaacaggctatgttcctctacta

SEQ ID NO: 467650 - DNA, 30 bp, Artificial Sequence
  Synthetic oligonucleotide
tgaccttagtccatatgacgctttctacta

SEQ ID NO: 467651 - DNA, 30 bp, Artificial Sequence
  Synthetic oligonucleotide
agccaaacttactacgtgtccgtagtacta

SEQ ID NO: 467652 - DNA, 30 bp, Artificial Sequence
  Synthetic oligonucleotide
tagtgttggcatagacgttacaacgtacta

SEQ ID NO: 467653 - DNA, 30 bp, Artificial Sequence
  Synthetic oligonucleotide
acccggacgttggcgtcagtagccgtacta

SEQ ID NO: 467654 - DNA, 30 bp, Artificial Sequence
  Synthetic oligonucleotide
accagtcttagagttgagcctttcgtacta

SEQ ID NO: 467655 - DNA, 30 bp, Artificial Sequence
  Synthetic oligonucleotide
aactggacgtctaattaggtgggggtacta

SEQ ID NO: 467656 - DNA, 31 bp, Artificial Sequence
  Synthetic oligonucleotide
ccagcgtatatagcttcagggggttgtacta

SEQ ID NO: 467657 - DNA, 30 bp, Artificial Sequence
  Synthetic oligonucleotide
gtcacctacgggtccctccgtagattacta

SEQ ID NO: 467658 - DNA, 30 bp, Artificial Sequence
  Synthetic oligonucleotide
gacctgatttaccagtttagcggattacta

SEQ ID NO: 467659 - DNA, 30 bp, Artificial Sequence
  Synthetic oligonucleotide
aatacagtgtatgtaggcttgggattacta

SEQ ID NO: 467660 - DNA, 30 bp, Artificial Sequence
  Synthetic oligonucleotide
gaattgtactcgacgattcgtctattacta

SEQ ID NO: 467661 - DNA, 30 bp, Artificial Sequence
  Synthetic oligonucleotide
tagagaagtcgcatcttgaattgcttacta

SEQ ID NO: 467662 - DNA, 30 bp, Artificial Sequence
  Synthetic oligonucleotide
ttacggattcgcgattatggctagttacta

SEQ ID NO: 467663 - DNA, 30 bp, Artificial Sequence
  Synthetic oligonucleotide
ttaggttatatcggagcctaacggttacta

SEQ ID NO: 467664 - DNA, 30 bp, Artificial Sequence
  Synthetic oligonucleotide
tacatcacatcttttcatgactctttacta

SEQ ID NO: 467665 - DNA, 30 bp, Artificial Sequence
  Synthetic oligonucleotide
gaaagtatcacttggcacggccaaaaccta

SEQ ID NO: 467666 - DNA, 30 bp, Artificial Sequence
  Synthetic oligonucleotide
cggagctctagagccccgtagcaaaaccta

SEQ ID NO: 467667 - DNA, 30 bp, Artificial Sequence
  Synthetic oligonucleotide
cgcgaaaaggggttgaatggaacacaccta

SEQ ID NO: 467668 - DNA, 30 bp, Artificial Sequence
  Synthetic oligonucleotide
gggataaaaacagacgcccaagtgcaccta

SEQ ID NO: 467669 - DNA, 30 bp, Artificial Sequence
  Synthetic oligonucleotide
ttggaattaatccaggggtacgctcaccta

SEQ ID NO: 467670 - DNA, 30 bp, Artificial Sequence
  Synthetic oligonucleotide
ctcgattgttaaattcttctaaaagaccta

SEQ ID NO: 467671 - DNA, 30 bp, Artificial Sequence
  Synthetic oligonucleotide
acccgctggatactaaaaatctaagaccta

SEQ ID NO: 467672 - DNA, 30 bp, Artificial Sequence
  Synthetic oligonucleotide
gacacatgctattttctcgaaggggaccta

SEQ ID NO: 467673 - DNA, 30 bp, Artificial Sequence
  Synthetic oligonucleotide
gatctaagtaactagaggactattgaccta

SEQ ID NO: 467674 - DNA, 30 bp, Artificial Sequence
  Synthetic oligonucleotide
ctaagttgaagcaggtaaagggcataccta

SEQ ID NO: 467675 - DNA, 30 bp, Artificial Sequence
  Synthetic oligonucleotide
cgtgcagttacttggcagtagagataccta

SEQ ID NO: 467676 - DNA, 30 bp, Artificial Sequence
  Synthetic oligonucleotide
ctaagaccgtggagatggttttactaccta

SEQ ID NO: 467677 - DNA, 30 bp, Artificial Sequence
  Synthetic oligonucleotide
ctcaattgataattcatgctcgcctaccta

SEQ ID NO: 467678 - DNA, 30 bp, Artificial Sequence
  Synthetic oligonucleotide
tttttaattattgggggaacttagtaccta

SEQ ID NO: 467679 - DNA, 30 bp, Artificial Sequence
  Synthetic oligonucleotide
ggagctattatatgaagctttcattaccta

SEQ ID NO: 467680 - DNA, 30 bp, Artificial Sequence
  Synthetic oligonucleotide
gccctaaaggtcagttatacgccttaccta

SEQ ID NO: 467681 - DNA, 30 bp, Artificial Sequence
  Synthetic oligonucleotide
tacgcaagagcacgacgccactcttaccta

SEQ ID NO: 467682 - DNA, 30 bp, Artificial Sequence
  Synthetic oligonucleotide
aataggtaatcaaggatgaccgtaacccta

SEQ ID NO: 467683 - DNA, 30 bp, Artificial Sequence
  Synthetic oligonucleotide
tcgcacagtgcatccagaggattcacccta

SEQ ID NO: 467684 - DNA, 30 bp, Artificial Sequence
  Synthetic oligonucleotide
gttgaggttgagcaagaatctgcgacccta

SEQ ID NO: 467685 - DNA, 30 bp, Artificial Sequence
  Synthetic oligonucleotide
cctagcggctaacgtcgcttggggacccta

SEQ ID NO: 467686 - DNA, 26 bp, Artificial Sequence
  Synthetic oligonucleotide
ctgcccgttaggagcgtttgacccta

SEQ ID NO: 467687 - DNA, 30 bp, Artificial Sequence
  Synthetic oligonucleotide
agggttctcaactcagttgaaaatacccta

SEQ ID NO: 467688 - DNA, 30 bp, Artificial Sequence
  Synthetic oligonucleotide
aatgacaaatggtggttggtactaccccta

SEQ ID NO: 467689 - DNA, 30 bp, Artificial Sequence
  Synthetic oligonucleotide
tgaggttcccattgcgtagtcgggccccta

SEQ ID NO: 467690 - DNA, 30 bp, Artificial Sequence
  Synthetic oligonucleotide
atattccacttggaccatatgcaagcccta

SEQ ID NO: 467691 - DNA, 30 bp, Artificial Sequence
  Synthetic oligonucleotide
agcggaatcgcatttaggcgtgtagcccta

SEQ ID NO: 467692 - DNA, 30 bp, Artificial Sequence
  Synthetic oligonucleotide
gtatgctgatgacatgcctcggccgcccta

SEQ ID NO: 467693 - DNA, 30 bp, Artificial Sequence
  Synthetic oligonucleotide
atgggtgtgtgggctttacttaaggcccta

SEQ ID NO: 467694 - DNA, 30 bp, Artificial Sequence
  Synthetic oligonucleotide
gtatataataagtgccatttacatgcccta

SEQ ID NO: 467695 - DNA, 30 bp, Artificial Sequence
  Synthetic oligonucleotide
caaccttcgctgcgtccactaagtgcccta

SEQ ID NO: 467696 - DNA, 30 bp, Artificial Sequence
  Synthetic oligonucleotide
tcgccgggatcagcctttgtagtatcccta

SEQ ID NO: 467697 - DNA, 30 bp, Artificial Sequence
  Synthetic oligonucleotide
ctggtgctcattaagtggggatagtcccta

SEQ ID NO: 467698 - DNA, 30 bp, Artificial Sequence
  Synthetic oligonucleotide
tgctggctctgacaagattgtaggtcccta

SEQ ID NO: 467699 - DNA, 30 bp, Artificial Sequence
  Synthetic oligonucleotide
tttccgccattcagggctgtttggtcccta

SEQ ID NO: 467700 - DNA, 30 bp, Artificial Sequence
  Synthetic oligonucleotide
ccggaaggcgctatctcatttttgtcccta

SEQ ID NO: 467701 - DNA, 30 bp, Artificial Sequence
  Synthetic oligonucleotide
gtgcgcatcgggtagatccttcattcccta

SEQ ID NO: 467702 - DNA, 30 bp, Artificial Sequence
  Synthetic oligonucleotide
gagtcgcttttgatgtctatcctttcccta

SEQ ID NO: 467703 - DNA, 30 bp, Artificial Sequence
  Synthetic oligonucleotide
gtagtacttcttccttgggtaccaagccta

SEQ ID NO: 467704 - DNA, 30 bp, Artificial Sequence
  Synthetic oligonucleotide
cttagtactatattggtgacgggaagccta

SEQ ID NO: 467705 - DNA, 30 bp, Artificial Sequence
  Synthetic oligonucleotide
tttattgggagggttgccgtatacagccta

SEQ ID NO: 467706 - DNA, 30 bp, Artificial Sequence
  Synthetic oligonucleotide
ggaatagaatgatcttagcccgtcagccta

SEQ ID NO: 467707 - DNA, 30 bp, Artificial Sequence
  Synthetic oligonucleotide
catggcagggcaggcatcgtatcgagccta

SEQ ID NO: 467708 - DNA, 30 bp, Artificial Sequence
  Synthetic oligonucleotide
actttacatgatgcgcagattcatagccta

SEQ ID NO: 467709 - DNA, 30 bp, Artificial Sequence
  Synthetic oligonucleotide
tgtaaagacctacttatgaaacgtagccta

SEQ ID NO: 467710 - DNA, 30 bp, Artificial Sequence
  Synthetic oligonucleotide
cgcacagctacaaaggatgtatgtagccta

SEQ ID NO: 467711 - DNA, 30 bp, Artificial Sequence
  Synthetic oligonucleotide
ggatggtcggttgaggtggggtgtagccta

SEQ ID NO: 467712 - DNA, 30 bp, Artificial Sequence
  Synthetic oligonucleotide
aatgccatgaaccggcccgaaattagccta

SEQ ID NO: 467713 - DNA, 30 bp, Artificial Sequence
  Synthetic oligonucleotide
gtaggcgaaactgccacgcggcagcgccta

SEQ ID NO: 467714 - DNA, 30 bp, Artificial Sequence
  Synthetic oligonucleotide
ggttggtgcagcagggaagggtagcgccta

SEQ ID NO: 467715 - DNA, 30 bp, Artificial Sequence
  Synthetic oligonucleotide
tgcgtcattaggtttttagggtctcgccta

SEQ ID NO: 467716 - DNA, 30 bp, Artificial Sequence
  Synthetic oligonucleotide
taaaaagagcatcgacgtatttgaggccta

SEQ ID NO: 467717 - DNA, 30 bp, Artificial Sequence
  Synthetic oligonucleotide
gcgacgcataaagggctgtaagtaggccta

SEQ ID NO: 467718 - DNA, 30 bp, Artificial Sequence
  Synthetic oligonucleotide
gcttcatacgcgacctttacgggcggccta

SEQ ID NO: 467719 - DNA, 30 bp, Artificial Sequence
  Synthetic oligonucleotide
agggatgcgggttgagagtgcaagggccta

SEQ ID NO: 467720 - DNA, 30 bp, Artificial Sequence
  Synthetic oligonucleotide
ggatcggcctgccccgaccttcagggccta

SEQ ID NO: 467721 - DNA, 30 bp, Artificial Sequence
  Synthetic oligonucleotide
atcgatcggctcttacatttatagggccta

SEQ ID NO: 467722 - DNA, 30 bp, Artificial Sequence
  Synthetic oligonucleotide
gtttcaagggggggtccatctaggggccta

SEQ ID NO: 467723 - DNA, 30 bp, Artificial Sequence
  Synthetic oligonucleotide
gggctcaatgacgggccgtataatggccta

SEQ ID NO: 467724 - DNA, 30 bp, Artificial Sequence
  Synthetic oligonucleotide
caatatgtttcgcggtcagcggctggccta

SEQ ID NO: 467725 - DNA, 40 bp, Artificial Sequence
  Synthetic oligonucleotide
ttctgcgtcataacggaacgacggtggggcttgatgccta

SEQ ID NO: 467726 - DNA, 30 bp, Artificial Sequence
  Synthetic oligonucleotide
acttctagacctacacaacaacactgccta

SEQ ID NO: 467727 - DNA, 30 bp, Artificial Sequence
  Synthetic oligonucleotide
ccccactttacggactggcataattgccta

SEQ ID NO: 467728 - DNA, 30 bp, Artificial Sequence
  Synthetic oligonucleotide
cattcgtcatcctgaccctgacgaatccta

SEQ ID NO: 467729 - DNA, 30 bp, Artificial Sequence
  Synthetic oligonucleotide
attcgacataatctgcgcatgtccatccta

SEQ ID NO: 467730 - DNA, 31 bp, Artificial Sequence
  Synthetic oligonucleotide
cacccatgtggtatggatgtacggcatccta

SEQ ID NO: 467731 - DNA, 30 bp, Artificial Sequence
  Synthetic oligonucleotide
gtttcattcccataggagcaaaagatccta

SEQ ID NO: 467732 - DNA, 30 bp, Artificial Sequence
  Synthetic oligonucleotide
atacatctattcggttcctttgagatccta

SEQ ID NO: 467733 - DNA, 30 bp, Artificial Sequence
  Synthetic oligonucleotide
gcaacattatagacctactacactatccta

SEQ ID NO: 467734 - DNA, 30 bp, Artificial Sequence
  Synthetic oligonucleotide
tcagtaggccataggaattatggtatccta

SEQ ID NO: 467735 - DNA, 30 bp, Artificial Sequence
  Synthetic oligonucleotide
cacggtgtttagtttgagatttttatccta

SEQ ID NO: 467736 - DNA, 30 bp, Artificial Sequence
  Synthetic oligonucleotide
ttaacttaatctaggtagaacaccctccta

SEQ ID NO: 467737 - DNA, 30 bp, Artificial Sequence
  Synthetic oligonucleotide
aacgtagtatagattagcctcggcctccta

SEQ ID NO: 467738 - DNA, 30 bp, Artificial Sequence
  Synthetic oligonucleotide
atagcgcatgggatcctttaagtcctccta

SEQ ID NO: 467739 - DNA, 30 bp, Artificial Sequence
  Synthetic oligonucleotide
acgaattcacaggaggccacgcagctccta

SEQ ID NO: 467740 - DNA, 30 bp, Artificial Sequence
  Synthetic oligonucleotide
ttagcaagaagttatacaaagcatctccta

SEQ ID NO: 467741 - DNA, 30 bp, Artificial Sequence
  Synthetic oligonucleotide
gagtggccggtttagatttaatgtctccta

SEQ ID NO: 467742 - DNA, 30 bp, Artificial Sequence
  Synthetic oligonucleotide
aagtcgcacactggagttggcgttctccta

SEQ ID NO: 467743 - DNA, 30 bp, Artificial Sequence
  Synthetic oligonucleotide
cttaggaaacaatttcagaattttctccta

SEQ ID NO: 467744 - DNA, 30 bp, Artificial Sequence
  Synthetic oligonucleotide
tggaaggcattcttagcagaaggagtccta

SEQ ID NO: 467745 - DNA, 30 bp, Artificial Sequence
  Synthetic oligonucleotide
aagtcggaggcattatactgaggagtccta

SEQ ID NO: 467746 - DNA, 30 bp, Artificial Sequence
  Synthetic oligonucleotide
gacctcctaaaaaggatttataccgtccta

SEQ ID NO: 467747 - DNA, 30 bp, Artificial Sequence
  Synthetic oligonucleotide
tgtagtagactccggtttagagatgtccta

SEQ ID NO: 467748 - DNA, 30 bp, Artificial Sequence
  Synthetic oligonucleotide
atcctacgtgccgccggaatgactgtccta

SEQ ID NO: 467749 - DNA, 30 bp, Artificial Sequence
  Synthetic oligonucleotide
gatagggcaggctctacgtacgttgtccta

SEQ ID NO: 467750 - DNA, 30 bp, Artificial Sequence
  Synthetic oligonucleotide
gattcgcagccaaatggagagagattccta

SEQ ID NO: 467751 - DNA, 30 bp, Artificial Sequence
  Synthetic oligonucleotide
aggatgatagcacattaggatatattccta

SEQ ID NO: 467752 - DNA, 30 bp, Artificial Sequence
  Synthetic oligonucleotide
gagcgctcggggcgctgcaattccttccta

SEQ ID NO: 467753 - DNA, 30 bp, Artificial Sequence
  Synthetic oligonucleotide
caccgatatcatcaccgctatttcttccta

SEQ ID NO: 467754 - DNA, 30 bp, Artificial Sequence
  Synthetic oligonucleotide
gccacgctagccgcagccctgtagttccta

SEQ ID NO: 467755 - DNA, 30 bp, Artificial Sequence
  Synthetic oligonucleotide
cggatcagacgcgggataggtacgttccta

SEQ ID NO: 467756 - DNA, 30 bp, Artificial Sequence
  Synthetic oligonucleotide
ccactgggtggttaatggagacggttccta

SEQ ID NO: 467757 - DNA, 30 bp, Artificial Sequence
  Synthetic oligonucleotide
gagaccgaaatgctccaggccaatttccta

SEQ ID NO: 467758 - DNA, 30 bp, Artificial Sequence
  Synthetic oligonucleotide
gtgcacaataacgaaaggcgtactttccta

SEQ ID NO: 467759 - DNA, 30 bp, Artificial Sequence
  Synthetic oligonucleotide
atgagccgcgaggatacggatagtttccta

SEQ ID NO: 467760 - DNA, 30 bp, Artificial Sequence
  Synthetic oligonucleotide
tgttggtatatggatacagggtgtttccta

SEQ ID NO: 467761 - DNA, 30 bp, Artificial Sequence
  Synthetic oligonucleotide
aacgtagtatctgtgcatgcgttcaagcta

SEQ ID NO: 467762 - DNA, 30 bp, Artificial Sequence
  Synthetic oligonucleotide
ggggtcccatttagcagggtcaagaagcta

SEQ ID NO: 467763 - DNA, 30 bp, Artificial Sequence
  Synthetic oligonucleotide
gaccgatctaacaactgacgacggaagcta

SEQ ID NO: 467764 - DNA, 31 bp, Artificial Sequence
  Synthetic oligonucleotide
tcacctatctttctcgcgcgaaaataagcta

SEQ ID NO: 467765 - DNA, 30 bp, Artificial Sequence
  Synthetic oligonucleotide
ggcagcgcataagcgctacgatgtaagcta

SEQ ID NO: 467766 - DNA, 31 bp, Artificial Sequence
  Synthetic oligonucleotide
ttcgaacaaagtctgtgccctgtttaagcta

SEQ ID NO: 467767 - DNA, 30 bp, Artificial Sequence
  Synthetic oligonucleotide
tgggtagcggcgcgcagagagcgccagcta

SEQ ID NO: 467768 - DNA, 30 bp, Artificial Sequence
  Synthetic oligonucleotide
tggactttataaggtgctatgccgcagcta

SEQ ID NO: 467769 - DNA, 30 bp, Artificial Sequence
  Synthetic oligonucleotide
gagcaacgtgggcaacatcaggcgcagcta

SEQ ID NO: 467770 - DNA, 30 bp, Artificial Sequence
  Synthetic oligonucleotide
aatcaaaagaaaatattacgaaatcagcta

SEQ ID NO: 467771 - DNA, 30 bp, Artificial Sequence
  Synthetic oligonucleotide
ttgtccgagcgagaattcactcgtcagcta

SEQ ID NO: 467772 - DNA, 30 bp, Artificial Sequence
  Synthetic oligonucleotide
tattgaaatcaaagattccaattagagcta

SEQ ID NO: 467773 - DNA, 30 bp, Artificial Sequence
  Synthetic oligonucleotide
tgcattggtgaccatcagtgccccgagcta

SEQ ID NO: 467774 - DNA, 30 bp, Artificial Sequence
  Synthetic oligonucleotide
ttagtaatggatgccaacgcatgggagcta

SEQ ID NO: 467775 - DNA, 30 bp, Artificial Sequence
  Synthetic oligonucleotide
tgggacgtggttggtgtctaactggagcta

SEQ ID NO: 467776 - DNA, 30 bp, Artificial Sequence
  Synthetic oligonucleotide
accccgataaagtgtctcatataatagcta

SEQ ID NO: 467777 - DNA, 30 bp, Artificial Sequence
  Synthetic oligonucleotide
aaaatagcacttgtataccgacactagcta

SEQ ID NO: 467778 - DNA, 30 bp, Artificial Sequence
  Synthetic oligonucleotide
actttcggtccgggaccaaaaccctagcta

SEQ ID NO: 467779 - DNA, 30 bp, Artificial Sequence
  Synthetic oligonucleotide
gtgaaggcatcccagagggccacgtagcta

SEQ ID NO: 467780 - DNA, 30 bp, Artificial Sequence
  Synthetic oligonucleotide
tatagggaggtcctaaaggacaggtagcta

SEQ ID NO: 467781 - DNA, 30 bp, Artificial Sequence
  Synthetic oligonucleotide
ttccaacctggcagttgcatatattagcta

SEQ ID NO: 467782 - DNA, 30 bp, Artificial Sequence
  Synthetic oligonucleotide
gcaatagcttacgcctaacggtattagcta

SEQ ID NO: 467783 - DNA, 30 bp, Artificial Sequence
  Synthetic oligonucleotide
gtactgatcttgcgcgcaagtccttagcta

SEQ ID NO: 467784 - DNA, 30 bp, Artificial Sequence
  Synthetic oligonucleotide
gttccagaggcccctatcccgcgttagcta

SEQ ID NO: 467785 - DNA, 30 bp, Artificial Sequence
  Synthetic oligonucleotide
atcccgcttggaagttggtgagcaacgcta

SEQ ID NO: 467786 - DNA, 30 bp, Artificial Sequence
  Synthetic oligonucleotide
ctgactagggcaatgagatcttcaacgcta

SEQ ID NO: 467787 - DNA, 30 bp, Artificial Sequence
  Synthetic oligonucleotide
aaagtccctattaaatttgggagaacgcta

SEQ ID NO: 467788 - DNA, 30 bp, Artificial Sequence
  Synthetic oligonucleotide
aagaatgacaaagattccgtagtcacgcta

SEQ ID NO: 467789 - DNA, 30 bp, Artificial Sequence
  Synthetic oligonucleotide
tgtgcttttatagtctttcagcttacgcta

SEQ ID NO: 467790 - DNA, 30 bp, Artificial Sequence
  Synthetic oligonucleotide
cgaatactgtcgcggcattgcgcaccgcta

SEQ ID NO: 467791 - DNA, 30 bp, Artificial Sequence
  Synthetic oligonucleotide
cttcgtttggcgcttaccatagacccgcta

SEQ ID NO: 467792 - DNA, 30 bp, Artificial Sequence
  Synthetic oligonucleotide
tcgacactgtagcttattccgacgccgcta

SEQ ID NO: 467793 - DNA, 30 bp, Artificial Sequence
  Synthetic oligonucleotide
ggttgagatgcggagggccggacgccgcta

SEQ ID NO: 467794 - DNA, 30 bp, Artificial Sequence
  Synthetic oligonucleotide
gtaaagtctttaaattgatttgcgccgcta

SEQ ID NO: 467795 - DNA, 30 bp, Artificial Sequence
  Synthetic oligonucleotide
caggcttgtagttccaacttaggtccgcta

SEQ ID NO: 467796 - DNA, 30 bp, Artificial Sequence
  Synthetic oligonucleotide
ttttgaaaaacagttaggcaggttccgcta

SEQ ID NO: 467797 - DNA, 30 bp, Artificial Sequence
  Synthetic oligonucleotide
gaagccgctggtggaggggccagggcgcta

SEQ ID NO: 467798 - DNA, 30 bp, Artificial Sequence
  Synthetic oligonucleotide
cgcgcctaaacgaccacggttatatcgcta

SEQ ID NO: 467799 - DNA, 30 bp, Artificial Sequence
  Synthetic oligonucleotide
ctatatgggtaaaaactgcccgcttcgcta

SEQ ID NO: 467800 - DNA, 31 bp, Artificial Sequence
  Synthetic oligonucleotide
tttatcttagagttcaggtcctacgaggcta

SEQ ID NO: 467801 - DNA, 30 bp, Artificial Sequence
  Synthetic oligonucleotide
tcgcgacgtccccgggtactgcataggcta

SEQ ID NO: 467802 - DNA, 30 bp, Artificial Sequence
  Synthetic oligonucleotide
ttcttgtttctgagaagagccgctaggcta

SEQ ID NO: 467803 - DNA, 30 bp, Artificial Sequence
  Synthetic oligonucleotide
cagtgtttttagtgttgtgttgaacggcta

SEQ ID NO: 467804 - DNA, 30 bp, Artificial Sequence
  Synthetic oligonucleotide
gaggtattcggcatagcgtaggcccggcta

SEQ ID NO: 467805 - DNA, 30 bp, Artificial Sequence
  Synthetic oligonucleotide
ttcatcgaacgtgtagcggctacgcggcta

SEQ ID NO: 467806 - DNA, 30 bp, Artificial Sequence
  Synthetic oligonucleotide
ttatatatctagcgcaggcttgcgcggcta

SEQ ID NO: 467807 - DNA, 30 bp, Artificial Sequence
  Synthetic oligonucleotide
gaatattgtatcatatcatcgaggcggcta

SEQ ID NO: 467808 - DNA, 30 bp, Artificial Sequence
  Synthetic oligonucleotide
gcgtgaccccaaagtcactatactcggcta

SEQ ID NO: 467809 - DNA, 30 bp, Artificial Sequence
  Synthetic oligonucleotide
gtgctaggccgtgaggatggttctcggcta

SEQ ID NO: 467810 - DNA, 30 bp, Artificial Sequence
  Synthetic oligonucleotide
gtgcttaagaccggtggggaaaccgggcta

SEQ ID NO: 467811 - DNA, 30 bp, Artificial Sequence
  Synthetic oligonucleotide
aatatgtacgtcctaaaaccgaccgggcta

SEQ ID NO: 467812 - DNA, 30 bp, Artificial Sequence
  Synthetic oligonucleotide
tagaatgtatttgtcattggggccgggcta

SEQ ID NO: 467813 - DNA, 30 bp, Artificial Sequence
  Synthetic oligonucleotide
ttacttgatcggacacgcctctccgggcta

SEQ ID NO: 467814 - DNA, 30 bp, Artificial Sequence
  Synthetic oligonucleotide
cccataggcgcctagtactggagcgggcta

SEQ ID NO: 467815 - DNA, 30 bp, Artificial Sequence
  Synthetic oligonucleotide
ttcacagattccctacccccgactgggcta

SEQ ID NO: 467816 - DNA, 30 bp, Artificial Sequence
  Synthetic oligonucleotide
aagcgctgcatctaacggagatttgggcta

SEQ ID NO: 467817 - DNA, 30 bp, Artificial Sequence
  Synthetic oligonucleotide
cgtcgtaatgatggtgaaccacgatggcta

SEQ ID NO: 467818 - DNA, 30 bp, Artificial Sequence
  Synthetic oligonucleotide
actctctgcacgtgggagcatttatggcta

SEQ ID NO: 467819 - DNA, 30 bp, Artificial Sequence
  Synthetic oligonucleotide
tcagaatcgcttccgaagatagactggcta

SEQ ID NO: 467820 - DNA, 30 bp, Artificial Sequence
  Synthetic oligonucleotide
aggccgctcgtctttacaaagacctggcta

SEQ ID NO: 467821 - DNA, 30 bp, Artificial Sequence
  Synthetic oligonucleotide
ttttattagggggtgtgagggcgctggcta

SEQ ID NO: 467822 - DNA, 30 bp, Artificial Sequence
  Synthetic oligonucleotide
gacagggcactcccgctgctcggctggcta

SEQ ID NO: 467823 - DNA, 30 bp, Artificial Sequence
  Synthetic oligonucleotide
caggatccgaagtatctgccgcagtggcta

SEQ ID NO: 467824 - DNA, 30 bp, Artificial Sequence
  Synthetic oligonucleotide
agttatttaatagccgcagtaccgtggcta

SEQ ID NO: 467825 - DNA, 30 bp, Artificial Sequence
  Synthetic oligonucleotide
gtacattctaaaatagtcagacggtggcta

SEQ ID NO: 467826 - DNA, 30 bp, Artificial Sequence
  Synthetic oligonucleotide
ttttcgatcaaagggcgacaatggtggcta

SEQ ID NO: 467827 - DNA, 30 bp, Artificial Sequence
  Synthetic oligonucleotide
acctatacggggatagtggctctgtggcta

SEQ ID NO: 467828 - DNA, 30 bp, Artificial Sequence
  Synthetic oligonucleotide
ctttgagtgctcttcggggcaccttggcta

SEQ ID NO: 467829 - DNA, 30 bp, Artificial Sequence
  Synthetic oligonucleotide
ctcgacgatatacgtgcttccagttggcta

SEQ ID NO: 467830 - DNA, 30 bp, Artificial Sequence
  Synthetic oligonucleotide
actctaagcaagggtcgctcttgttggcta

SEQ ID NO: 467831 - DNA, 30 bp, Artificial Sequence
  Synthetic oligonucleotide
tgtggcggcagctgacgtgataaaatgcta

SEQ ID NO: 467832 - DNA, 30 bp, Artificial Sequence
  Synthetic oligonucleotide
tccggacaggacacgctcggttaaatgcta

SEQ ID NO: 467833 - DNA, 30 bp, Artificial Sequence
  Synthetic oligonucleotide
ttactgttcagcgcatctaagacaatgcta

SEQ ID NO: 467834 - DNA, 30 bp, Artificial Sequence
  Synthetic oligonucleotide
gtgattctcccattagcatgactaatgcta

SEQ ID NO: 467835 - DNA, 30 bp, Artificial Sequence
  Synthetic oligonucleotide
ggggtcttgctgtcgttgcgattaatgcta

SEQ ID NO: 467836 - DNA, 30 bp, Artificial Sequence
  Synthetic oligonucleotide
ctttaaatgctcgcgcaccgcgccatgcta

SEQ ID NO: 467837 - DNA, 30 bp, Artificial Sequence
  Synthetic oligonucleotide
caagcgttcatagagcccatggctatgcta

SEQ ID NO: 467838 - DNA, 30 bp, Artificial Sequence
  Synthetic oligonucleotide
ataaatattgctactgcctagtctatgcta

SEQ ID NO: 467839 - DNA, 30 bp, Artificial Sequence
  Synthetic oligonucleotide
gtaagaggtttcccaccatcgattatgcta

SEQ ID NO: 467840 - DNA, 30 bp, Artificial Sequence
  Synthetic oligonucleotide
gtcttgagtcatacgcatggaggactgcta

SEQ ID NO: 467841 - DNA, 30 bp, Artificial Sequence
  Synthetic oligonucleotide
ggagattcttgtttcggagcatgactgcta

SEQ ID NO: 467842 - DNA, 30 bp, Artificial Sequence
  Synthetic oligonucleotide
cacctctctgaagagctcgtcgtactgcta

SEQ ID NO: 467843 - DNA, 30 bp, Artificial Sequence
  Synthetic oligonucleotide
agtatacaccccagcgtggctttcctgcta

SEQ ID NO: 467844 - DNA, 30 bp, Artificial Sequence
  Synthetic oligonucleotide
gcccgctatggaaattcttgtttcctgcta

SEQ ID NO: 467845 - DNA, 30 bp, Artificial Sequence
  Synthetic oligonucleotide
aatttattatgttcttcacgagagctgcta

SEQ ID NO: 467846 - DNA, 30 bp, Artificial Sequence
  Synthetic oligonucleotide
tgacgcttggaatattcatcgaggctgcta

SEQ ID NO: 467847 - DNA, 30 bp, Artificial Sequence
  Synthetic oligonucleotide
tgtgtttctcgctgctttggggtcgtgcta

SEQ ID NO: 467848 - DNA, 30 bp, Artificial Sequence
  Synthetic oligonucleotide
aaggggtgcaaattgcacattttcgtgcta

SEQ ID NO: 467849 - DNA, 30 bp, Artificial Sequence
  Synthetic oligonucleotide
ttgcttttgatcgcaacccgtaaggtgcta

SEQ ID NO: 467850 - DNA, 30 bp, Artificial Sequence
  Synthetic oligonucleotide
tgataattaaggacaaattgaccggtgcta

SEQ ID NO: 467851 - DNA, 30 bp, Artificial Sequence
  Synthetic oligonucleotide
gcggacgaagcactatttaatgatgtgcta

SEQ ID NO: 467852 - DNA, 30 bp, Artificial Sequence
  Synthetic oligonucleotide
catataaccgaaatttgattaattgtgcta

SEQ ID NO: 467853 - DNA, 30 bp, Artificial Sequence
  Synthetic oligonucleotide
attgaactctgctcattcggggaattgcta

SEQ ID NO: 467854 - DNA, 30 bp, Artificial Sequence
  Synthetic oligonucleotide
cgctttaattgttattcagcgtaattgcta

SEQ ID NO: 467855 - DNA, 30 bp, Artificial Sequence
  Synthetic oligonucleotide
tgatctacaacgcctgcaatctcattgcta

SEQ ID NO: 467856 - DNA, 30 bp, Artificial Sequence
  Synthetic oligonucleotide
tgttcgcacgtctctttgtgagtattgcta

SEQ ID NO: 467857 - DNA, 30 bp, Artificial Sequence
  Synthetic oligonucleotide
accggtacaattcacccgccagatttgcta

SEQ ID NO: 467858 - DNA, 30 bp, Artificial Sequence
  Synthetic oligonucleotide
ggtgcggggatctggttggtaacaaatcta

SEQ ID NO: 467859 - DNA, 30 bp, Artificial Sequence
  Synthetic oligonucleotide
aatttagtggaagcacatgccgccaatcta

SEQ ID NO: 467860 - DNA, 30 bp, Artificial Sequence
  Synthetic oligonucleotide
aatattacgggggtatcctatagcaatcta

SEQ ID NO: 467861 - DNA, 30 bp, Artificial Sequence
  Synthetic oligonucleotide
tggatgtactgtcgcttgggttgcaatcta

SEQ ID NO: 467862 - DNA, 30 bp, Artificial Sequence
  Synthetic oligonucleotide
cccgcctgcccgttcgggcctgtcaatcta

SEQ ID NO: 467863 - DNA, 30 bp, Artificial Sequence
  Synthetic oligonucleotide
tcggttcaatcgtggcctttattcaatcta

SEQ ID NO: 467864 - DNA, 30 bp, Artificial Sequence
  Synthetic oligonucleotide
gatatcgtaccgcagagttagttcaatcta

SEQ ID NO: 467865 - DNA, 30 bp, Artificial Sequence
  Synthetic oligonucleotide
ttacttatctggtatgcatcgctgaatcta

SEQ ID NO: 467866 - DNA, 30 bp, Artificial Sequence
  Synthetic oligonucleotide
tacccgtagattcgggtggcttataatcta

SEQ ID NO: 467867 - DNA, 30 bp, Artificial Sequence
  Synthetic oligonucleotide
tggcccctaaacatccgaattcaacatcta

SEQ ID NO: 467868 - DNA, 30 bp, Artificial Sequence
  Synthetic oligonucleotide
caccgcgcccactcaatgtattgacatcta

SEQ ID NO: 467869 - DNA, 30 bp, Artificial Sequence
  Synthetic oligonucleotide
cggtagcacgcagtttagaagatacatcta

SEQ ID NO: 467870 - DNA, 30 bp, Artificial Sequence
  Synthetic oligonucleotide
taaatcacttgatagtgtttgatacatcta

SEQ ID NO: 467871 - DNA, 30 bp, Artificial Sequence
  Synthetic oligonucleotide
gttgaattggcgcagtttggaaaccatcta

SEQ ID NO: 467872 - DNA, 30 bp, Artificial Sequence
  Synthetic oligonucleotide
gtgatttggtcggacagagtccgccatcta

SEQ ID NO: 467873 - DNA, 30 bp, Artificial Sequence
  Synthetic oligonucleotide
ggctcgcgcttaggtaaggcatcgcatcta

SEQ ID NO: 467874 - DNA, 30 bp, Artificial Sequence
  Synthetic oligonucleotide
ttccttggggaggcgggtcgacatcatcta

SEQ ID NO: 467875 - DNA, 30 bp, Artificial Sequence
  Synthetic oligonucleotide
gcgagcatacaagggtggaaccatcatcta

SEQ ID NO: 467876 - DNA, 30 bp, Artificial Sequence
  Synthetic oligonucleotide
tacagtctgagcaggctctcttatcatcta

SEQ ID NO: 467877 - DNA, 30 bp, Artificial Sequence
  Synthetic oligonucleotide
cccacgtccgcaacgcctatgttagatcta

SEQ ID NO: 467878 - DNA, 30 bp, Artificial Sequence
  Synthetic oligonucleotide
ctcattaaaagatgctctgagatcgatcta

SEQ ID NO: 467879 - DNA, 30 bp, Artificial Sequence
  Synthetic oligonucleotide
tttttgccagacgtttatttaatggatcta

SEQ ID NO: 467880 - DNA, 30 bp, Artificial Sequence
  Synthetic oligonucleotide
gttctcaggtgtcagattttcttggatcta

SEQ ID NO: 467881 - DNA, 30 bp, Artificial Sequence
  Synthetic oligonucleotide
gaggagtcgcggcacactttccatgatcta

SEQ ID NO: 467882 - DNA, 30 bp, Artificial Sequence
  Synthetic oligonucleotide
aagattcccggtaggtggggttttgatcta

SEQ ID NO: 467883 - DNA, 30 bp, Artificial Sequence
  Synthetic oligonucleotide
attgggagcctggtataaacaaaatatcta

SEQ ID NO: 467884 - DNA, 30 bp, Artificial Sequence
  Synthetic oligonucleotide
agcgccgatcaatagttgccatactatcta

SEQ ID NO: 467885 - DNA, 30 bp, Artificial Sequence
  Synthetic oligonucleotide
acgcaacaatgagccgcattgacctatcta

SEQ ID NO: 467886 - DNA, 30 bp, Artificial Sequence
  Synthetic oligonucleotide
tgaagtttgtacgcctccagacagtatcta

SEQ ID NO: 467887 - DNA, 30 bp, Artificial Sequence
  Synthetic oligonucleotide
atttaccacggcggattccttcagtatcta

SEQ ID NO: 467888 - DNA, 30 bp, Artificial Sequence
  Synthetic oligonucleotide
accacggttgcttagaattattcaactcta

SEQ ID NO: 467889 - DNA, 30 bp, Artificial Sequence
  Synthetic oligonucleotide
ccagcggtctactcagcaaaatgcactcta

SEQ ID NO: 467890 - DNA, 30 bp, Artificial Sequence
  Synthetic oligonucleotide
tcaggtatctcaccttattattgcactcta

SEQ ID NO: 467891 - DNA, 30 bp, Artificial Sequence
  Synthetic oligonucleotide
tgaggttgatgccttcagaccattactcta

SEQ ID NO: 467892 - DNA, 30 bp, Artificial Sequence
  Synthetic oligonucleotide
tcgtgcatttaagtcaacctgattactcta

SEQ ID NO: 467893 - DNA, 30 bp, Artificial Sequence
  Synthetic oligonucleotide
ttatccttaactccgttgcagacacctcta

SEQ ID NO: 467894 - DNA, 30 bp, Artificial Sequence
  Synthetic oligonucleotide
cgcccacagaaacgcccttctatgcctcta

SEQ ID NO: 467895 - DNA, 30 bp, Artificial Sequence
  Synthetic oligonucleotide
tgaccggcgtatcggaggaagtatcctcta

SEQ ID NO: 467896 - DNA, 30 bp, Artificial Sequence
  Synthetic oligonucleotide
acaatgcatgcctctcccgggtctcctcta

SEQ ID NO: 467897 - DNA, 30 bp, Artificial Sequence
  Synthetic oligonucleotide
tcacctcatctcctttgattcattcctcta

SEQ ID NO: 467898 - DNA, 30 bp, Artificial Sequence
  Synthetic oligonucleotide
ttcttaatcttgacatgaacggcagctcta

SEQ ID NO: 467899 - DNA, 30 bp, Artificial Sequence
  Synthetic oligonucleotide
tgctaactcatggaatagtcggcagctcta

SEQ ID NO: 467900 - DNA, 30 bp, Artificial Sequence
  Synthetic oligonucleotide
agacgatccgcttggctccctccggctcta

SEQ ID NO: 467901 - DNA, 30 bp, Artificial Sequence
  Synthetic oligonucleotide
ctattttgacggaaaacattgtatgctcta

SEQ ID NO: 467902 - DNA, 30 bp, Artificial Sequence
  Synthetic oligonucleotide
tcaaagactaagagggcgcttagtgctcta

SEQ ID NO: 467903 - DNA, 30 bp, Artificial Sequence
  Synthetic oligonucleotide
gtatcgattgcgcagaaacgttttgctcta

SEQ ID NO: 467904 - DNA, 30 bp, Artificial Sequence
  Synthetic oligonucleotide
aagacgggatttagagctagtgtatctcta

SEQ ID NO: 467905 - DNA, 30 bp, Artificial Sequence
  Synthetic oligonucleotide
aactgtaagggtttctcagaacactctcta

SEQ ID NO: 467906 - DNA, 30 bp, Artificial Sequence
  Synthetic oligonucleotide
caagcccaagcatcaaggacgcgctctcta

SEQ ID NO: 467907 - DNA, 30 bp, Artificial Sequence
  Synthetic oligonucleotide
gagtctagcagtccgcgaggcggttctcta

SEQ ID NO: 467908 - DNA, 30 bp, Artificial Sequence
  Synthetic oligonucleotide
gggtgatttaaagagccacgagcaagtcta

SEQ ID NO: 467909 - DNA, 30 bp, Artificial Sequence
  Synthetic oligonucleotide
cctgattgcacgtgtgggttcaacagtcta

SEQ ID NO: 467910 - DNA, 30 bp, Artificial Sequence
  Synthetic oligonucleotide
aagatgtcagacgtagcccgttagagtcta

SEQ ID NO: 467911 - DNA, 30 bp, Artificial Sequence
  Synthetic oligonucleotide
cgcatcaacatgcaaggattccctagtcta

SEQ ID NO: 467912 - DNA, 30 bp, Artificial Sequence
  Synthetic oligonucleotide
actattactatataaccctctagtagtcta

SEQ ID NO: 467913 - DNA, 30 bp, Artificial Sequence
  Synthetic oligonucleotide
gagttacactaggcatctctctttagtcta

SEQ ID NO: 467914 - DNA, 30 bp, Artificial Sequence
  Synthetic oligonucleotide
tcttccggtgcttgctgacgtgcacgtcta

SEQ ID NO: 467915 - DNA, 30 bp, Artificial Sequence
  Synthetic oligonucleotide
aaaacgtttgcggatttaatgtcacgtcta

SEQ ID NO: 467916 - DNA, 30 bp, Artificial Sequence
  Synthetic oligonucleotide
gttagttaatgcagaaccattacaggtcta

SEQ ID NO: 467917 - DNA, 30 bp, Artificial Sequence
  Synthetic oligonucleotide
cagaccctcttgtaactctttacaggtcta

SEQ ID NO: 467918 - DNA, 30 bp, Artificial Sequence
  Synthetic oligonucleotide
agcttcatttcggccttatgatacggtcta

SEQ ID NO: 467919 - DNA, 30 bp, Artificial Sequence
  Synthetic oligonucleotide
gatgccccagagaaccgcctttacggtcta

SEQ ID NO: 467920 - DNA, 30 bp, Artificial Sequence
  Synthetic oligonucleotide
acttcaagagctcatacagtggggggtcta

SEQ ID NO: 467921 - DNA, 30 bp, Artificial Sequence
  Synthetic oligonucleotide
tgcaagctgacattagctcgcttgggtcta

SEQ ID NO: 467922 - DNA, 30 bp, Artificial Sequence
  Synthetic oligonucleotide
tctgcggcatgggaaaatttagatggtcta

SEQ ID NO: 467923 - DNA, 30 bp, Artificial Sequence
  Synthetic oligonucleotide
agaccccgcggtgtctattgggttggtcta

SEQ ID NO: 467924 - DNA, 30 bp, Artificial Sequence
  Synthetic oligonucleotide
taaacattcggacaactcgtcttatgtcta

SEQ ID NO: 467925 - DNA, 30 bp, Artificial Sequence
  Synthetic oligonucleotide
cgcctacaatctgtaagtcgccactgtcta

SEQ ID NO: 467926 - DNA, 30 bp, Artificial Sequence
  Synthetic oligonucleotide
gtacgcgggccgctgagatactcctgtcta

SEQ ID NO: 467927 - DNA, 30 bp, Artificial Sequence
  Synthetic oligonucleotide
ttgatgaaatttaatgggtcttgctgtcta

SEQ ID NO: 467928 - DNA, 30 bp, Artificial Sequence
  Synthetic oligonucleotide
gcgctgttgggtcacattcggctctgtcta

SEQ ID NO: 467929 - DNA, 30 bp, Artificial Sequence
  Synthetic oligonucleotide
gcaaatgcgtgaccatatgtggtctgtcta

SEQ ID NO: 467930 - DNA, 30 bp, Artificial Sequence
  Synthetic oligonucleotide
gcactttgtcaggcgagagctaagtgtcta

SEQ ID NO: 467931 - DNA, 30 bp, Artificial Sequence
  Synthetic oligonucleotide
tgaacgctaggacttctgagatggtgtcta

SEQ ID NO: 467932 - DNA, 30 bp, Artificial Sequence
  Synthetic oligonucleotide
tatgcatgcgtaaaggcatttataattcta

SEQ ID NO: 467933 - DNA, 30 bp, Artificial Sequence
  Synthetic oligonucleotide
gaagcttatagcggtgggagaaacattcta

SEQ ID NO: 467934 - DNA, 30 bp, Artificial Sequence
  Synthetic oligonucleotide
cacatagctatataagtaaatcacattcta

SEQ ID NO: 467935 - DNA, 30 bp, Artificial Sequence
  Synthetic oligonucleotide
gtgcgcatataagatttcggagccattcta

SEQ ID NO: 467936 - DNA, 30 bp, Artificial Sequence
  Synthetic oligonucleotide
ctcgcgaatagctggatgattccgattcta

SEQ ID NO: 467937 - DNA, 30 bp, Artificial Sequence
  Synthetic oligonucleotide
gggagggttcgtattgtacgcacacttcta

SEQ ID NO: 467938 - DNA, 30 bp, Artificial Sequence
  Synthetic oligonucleotide
gtgtacccccagcacgctaatggacttcta

SEQ ID NO: 467939 - DNA, 30 bp, Artificial Sequence
  Synthetic oligonucleotide
gaaaactatacaatacgtattatacttcta

SEQ ID NO: 467940 - DNA, 30 bp, Artificial Sequence
  Synthetic oligonucleotide
atacacgtacatttcttcaatctacttcta

SEQ ID NO: 467941 - DNA, 30 bp, Artificial Sequence
  Synthetic oligonucleotide
aacgcgggatccatcttcggcaaccttcta

SEQ ID NO: 467942 - DNA, 30 bp, Artificial Sequence
  Synthetic oligonucleotide
ctctattattcaatatagtgctaccttcta

SEQ ID NO: 467943 - DNA, 30 bp, Artificial Sequence
  Synthetic oligonucleotide
tacatcccgcttaaaaacctttatcttcta

SEQ ID NO: 467944 - DNA, 30 bp, Artificial Sequence
  Synthetic oligonucleotide
acgctctttttagactggaggggtcttcta

SEQ ID NO: 467945 - DNA, 30 bp, Artificial Sequence
  Synthetic oligonucleotide
gagatctcgacagatgcacgatttcttcta

SEQ ID NO: 467946 - DNA, 30 bp, Artificial Sequence
  Synthetic oligonucleotide
gtaaaaatgtaattgatttctaaagttcta

SEQ ID NO: 467947 - DNA, 30 bp, Artificial Sequence
  Synthetic oligonucleotide
gctcatcctgatgtactacgagaagttcta

SEQ ID NO: 467948 - DNA, 30 bp, Artificial Sequence
  Synthetic oligonucleotide
actctcaaaaatcggcatcgcagagttcta

SEQ ID NO: 467949 - DNA, 30 bp, Artificial Sequence
  Synthetic oligonucleotide
tgggtgtcttaccttaactgcggggttcta

SEQ ID NO: 467950 - DNA, 30 bp, Artificial Sequence
  Synthetic oligonucleotide
atcggagcaatagagctataacttgttcta

SEQ ID NO: 467951 - DNA, 30 bp, Artificial Sequence
  Synthetic oligonucleotide
aaccagaatcccataagatacttatttcta

SEQ ID NO: 467952 - DNA, 30 bp, Artificial Sequence
  Synthetic oligonucleotide
aatacaatgacgtgtaatgcatagtttcta

SEQ ID NO: 467953 - DNA, 30 bp, Artificial Sequence
  Synthetic oligonucleotide
gcatacggcacgttcgttccaacgtttcta

SEQ ID NO: 467954 - DNA, 30 bp, Artificial Sequence
  Synthetic oligonucleotide
agtgtgtacctcatataccaaaggtttcta

SEQ ID NO: 467955 - DNA, 30 bp, Artificial Sequence
  Synthetic oligonucleotide
tgccatgagccatgctggccatggtttcta

SEQ ID NO: 467956 - DNA, 30 bp, Artificial Sequence
  Synthetic oligonucleotide
ggcttcatgttcccgcgatcggtgtttcta

SEQ ID NO: 467957 - DNA, 30 bp, Artificial Sequence
  Synthetic oligonucleotide
ggaggcaatatctgtaggtggaattttcta

SEQ ID NO: 467958 - DNA, 30 bp, Artificial Sequence
  Synthetic oligonucleotide
accccctctgtctcttgtttctcttttcta

SEQ ID NO: 467959 - DNA, 30 bp, Artificial Sequence
  Synthetic oligonucleotide
cccccctctttctcttgtttctcttttcta

SEQ ID NO: 467960 - DNA, 30 bp, Artificial Sequence
  Synthetic oligonucleotide
agccattctaggaatccatagagttttcta

SEQ ID NO: 467961 - DNA, 30 bp, Artificial Sequence
  Synthetic oligonucleotide
aatgacagcgttgtacaatttgaaaaagta

SEQ ID NO: 467962 - DNA, 30 bp, Artificial Sequence
  Synthetic oligonucleotide
cagccgtcccttttatagaaataaaaagta

SEQ ID NO: 467963 - DNA, 30 bp, Artificial Sequence
  Synthetic oligonucleotide
atagttggtaagaatgtaagggcaaaagta

SEQ ID NO: 467964 - DNA, 30 bp, Artificial Sequence
  Synthetic oligonucleotide
gaaatctcgctggcgccacactcaaaagta

SEQ ID NO: 467965 - DNA, 30 bp, Artificial Sequence
  Synthetic oligonucleotide
catagtggaccagtgattttgggcaaagta

SEQ ID NO: 467966 - DNA, 30 bp, Artificial Sequence
  Synthetic oligonucleotide
attccacccgaaggggaatgtctcaaagta

SEQ ID NO: 467967 - DNA, 30 bp, Artificial Sequence
  Synthetic oligonucleotide
tatgatacttataggcgccgtgagaaagta

SEQ ID NO: 467968 - DNA, 30 bp, Artificial Sequence
  Synthetic oligonucleotide
gtggaagaggcagaaatcggaacgaaagta

SEQ ID NO: 467969 - DNA, 30 bp, Artificial Sequence
  Synthetic oligonucleotide
agccaattgagcaggaatatctggaaagta

SEQ ID NO: 467970 - DNA, 30 bp, Artificial Sequence
  Synthetic oligonucleotide
gtacgcagacatttgatacaaagtaaagta

SEQ ID NO: 467971 - DNA, 30 bp, Artificial Sequence
  Synthetic oligonucleotide
gataacccctagtggtaaaccccacaagta

SEQ ID NO: 467972 - DNA, 30 bp, Artificial Sequence
  Synthetic oligonucleotide
aaaggggtcgttcagcgaacagaccaagta

SEQ ID NO: 467973 - DNA, 30 bp, Artificial Sequence
  Synthetic oligonucleotide
atcggggtacttctgggatggccccaagta

SEQ ID NO: 467974 - DNA, 30 bp, Artificial Sequence
  Synthetic oligonucleotide
attcgcagcaattaactcgatggccaagta

SEQ ID NO: 467975 - DNA, 30 bp, Artificial Sequence
  Synthetic oligonucleotide
tatgtcaccagttgaggtgcgcggcaagta

SEQ ID NO: 467976 - DNA, 30 bp, Artificial Sequence
  Synthetic oligonucleotide
attatttagagttctatactgctgcaagta

SEQ ID NO: 467977 - DNA, 30 bp, Artificial Sequence
  Synthetic oligonucleotide
gttagcgccgcggatatttacgttcaagta

SEQ ID NO: 467978 - DNA, 30 bp, Artificial Sequence
  Synthetic oligonucleotide
acccccaatatggccagcaggacagaagta

SEQ ID NO: 467979 - DNA, 30 bp, Artificial Sequence
  Synthetic oligonucleotide
aacgtgtaagcaccaaaagatttagaagta

SEQ ID NO: 467980 - DNA, 30 bp, Artificial Sequence
  Synthetic oligonucleotide
gtaatgacaccgcgtacaaataacgaagta

SEQ ID NO: 467981 - DNA, 30 bp, Artificial Sequence
  Synthetic oligonucleotide
acaactcagatataggcgcggcccgaagta

SEQ ID NO: 467982 - DNA, 30 bp, Artificial Sequence
  Synthetic oligonucleotide
cggcgacttttattcaatcaaggcgaagta

SEQ ID NO: 467983 - DNA, 31 bp, Artificial Sequence
  Synthetic oligonucleotide
ccaaagagtgataaggcaaagtcatgaagta

SEQ ID NO: 467984 - DNA, 30 bp, Artificial Sequence
  Synthetic oligonucleotide
atttcacacgcgcttctccgtggtgaagta

SEQ ID NO: 467985 - DNA, 29 bp, Artificial Sequence
  Synthetic oligonucleotide
tcattgagacgaagccgcaatggtaagta

SEQ ID NO: 467986 - DNA, 30 bp, Artificial Sequence
  Synthetic oligonucleotide
cgcaagagtctattaaggccactttaagta

SEQ ID NO: 467987 - DNA, 30 bp, Artificial Sequence
  Synthetic oligonucleotide
ttgtctgggcgttatttatcattttaagta

SEQ ID NO: 467988 - DNA, 30 bp, Artificial Sequence
  Synthetic oligonucleotide
atgcgagtctatattctgaaaataacagta

SEQ ID NO: 467989 - DNA, 30 bp, Artificial Sequence
  Synthetic oligonucleotide
ctacttctgcacagatgtggttccacagta

SEQ ID NO: 467990 - DNA, 30 bp, Artificial Sequence
  Synthetic oligonucleotide
atcatagttgtttactatccacagacagta

SEQ ID NO: 467991 - DNA, 30 bp, Artificial Sequence
  Synthetic oligonucleotide
acccgtctacgcacgttattcacgacagta

SEQ ID NO: 467992 - DNA, 30 bp, Artificial Sequence
  Synthetic oligonucleotide
tagcggctgaacgtttgtccaactacagta

SEQ ID NO: 467993 - DNA, 30 bp, Artificial Sequence
  Synthetic oligonucleotide
aggttcgtagcgacgttagcatccccagta

SEQ ID NO: 467994 - DNA, 30 bp, Artificial Sequence
  Synthetic oligonucleotide
ttgaggtgtcgtttttaaagccgcccagta

SEQ ID NO: 467995 - DNA, 30 bp, Artificial Sequence
  Synthetic oligonucleotide
tactgctctctgagcactcttgctccagta

SEQ ID NO: 467996 - DNA, 30 bp, Artificial Sequence
  Synthetic oligonucleotide
tctctgtgaactttactgtagcgagcagta

SEQ ID NO: 467997 - DNA, 30 bp, Artificial Sequence
  Synthetic oligonucleotide
gcctgggcaacggtaaagcttgtcgcagta

SEQ ID NO: 467998 - DNA, 30 bp, Artificial Sequence
  Synthetic oligonucleotide
cgtccgttggcgacgtgcattccggcagta

SEQ ID NO: 467999 - DNA, 30 bp, Artificial Sequence
  Synthetic oligonucleotide
cagttcgcttgccgcgattatcatgcagta

SEQ ID NO: 468000 - DNA, 30 bp, Artificial Sequence
  Synthetic oligonucleotide
caattaacctgtctgattttctaatcagta

SEQ ID NO: 468001 - DNA, 30 bp, Artificial Sequence
  Synthetic oligonucleotide
gttacaaactctttttatgctatatcagta

SEQ ID NO: 468002 - DNA, 30 bp, Artificial Sequence
  Synthetic oligonucleotide
atttcgagaatatcacctagtaggtcagta

SEQ ID NO: 468003 - DNA, 30 bp, Artificial Sequence
  Synthetic oligonucleotide
caagtatcaaccgcacactatgggtcagta

SEQ ID NO: 468004 - DNA, 30 bp, Artificial Sequence
  Synthetic oligonucleotide
ttgttattccctcgcctgcatgaaagagta

SEQ ID NO: 468005 - DNA, 30 bp, Artificial Sequence
  Synthetic oligonucleotide
attcgttggcaacacactctatcaagagta

SEQ ID NO: 468006 - DNA, 30 bp, Artificial Sequence
  Synthetic oligonucleotide
aaatttaacttttgaggataagtaagagta

SEQ ID NO: 468007 - DNA, 30 bp, Artificial Sequence
  Synthetic oligonucleotide
gacagccagttgagggttcacgacagagta

SEQ ID NO: 468008 - DNA, 30 bp, Artificial Sequence
  Synthetic oligonucleotide
aatatgttctgattccacttcctcagagta

SEQ ID NO: 468009 - DNA, 30 bp, Artificial Sequence
  Synthetic oligonucleotide
aataatcagtaaggttttctgtctagagta

SEQ ID NO: 468010 - DNA, 30 bp, Artificial Sequence
  Synthetic oligonucleotide
gtcctccatacagtgtagaactttagagta

SEQ ID NO: 468011 - DNA, 30 bp, Artificial Sequence
  Synthetic oligonucleotide
aaatcctggcagtggttccactcacgagta

SEQ ID NO: 468012 - DNA, 30 bp, Artificial Sequence
  Synthetic oligonucleotide
cagggtatgggtagtcgaagcacccgagta

SEQ ID NO: 468013 - DNA, 30 bp, Artificial Sequence
  Synthetic oligonucleotide
gaatagtacgaggaacacctaatccgagta

SEQ ID NO: 468014 - DNA, 30 bp, Artificial Sequence
  Synthetic oligonucleotide
aagtcttcctgaaggaaggataggcgagta

SEQ ID NO: 468015 - DNA, 30 bp, Artificial Sequence
  Synthetic oligonucleotide
ttcgaccccactagacggtccggaggagta

SEQ ID NO: 468016 - DNA, 30 bp, Artificial Sequence
  Synthetic oligonucleotide
gtgttgggcaacctgagacccctcggagta

SEQ ID NO: 468017 - DNA, 30 bp, Artificial Sequence
  Synthetic oligonucleotide
cataatgctaaccccaggtgctagggagta

SEQ ID NO: 468018 - DNA, 30 bp, Artificial Sequence
  Synthetic oligonucleotide
ggtcgccactctgaaatagcgttgggagta

SEQ ID NO: 468019 - DNA, 30 bp, Artificial Sequence
  Synthetic oligonucleotide
ggttcataaatgagattttatgatggagta

SEQ ID NO: 468020 - DNA, 30 bp, Artificial Sequence
  Synthetic oligonucleotide
tgggagacatcggttcctagttatggagta

SEQ ID NO: 468021 - DNA, 29 bp, Artificial Sequence
  Synthetic oligonucleotide
tgtacaatcgactatgctttgctggagta

SEQ ID NO: 468022 - DNA, 30 bp, Artificial Sequence
  Synthetic oligonucleotide
tcaggactcaatagcagacgcggtggagta

SEQ ID NO: 468023 - DNA, 30 bp, Artificial Sequence
  Synthetic oligonucleotide
tagtcgagtcgaatgagaagcaaatgagta

SEQ ID NO: 468024 - DNA, 30 bp, Artificial Sequence
  Synthetic oligonucleotide
gagctaaatgctcggtgattcgcatgagta

SEQ ID NO: 468025 - DNA, 30 bp, Artificial Sequence
  Synthetic oligonucleotide
ggaatttagttacttccggagttctgagta

SEQ ID NO: 468026 - DNA, 30 bp, Artificial Sequence
  Synthetic oligonucleotide
ttgaataacagggtcagattgtcaatagta

SEQ ID NO: 468027 - DNA, 30 bp, Artificial Sequence
  Synthetic oligonucleotide
aataggcccggcatataagcccccatagta

SEQ ID NO: 468028 - DNA, 30 bp, Artificial Sequence
  Synthetic oligonucleotide
tattttgaccatatgggcagcgccatagta

SEQ ID NO: 468029 - DNA, 30 bp, Artificial Sequence
  Synthetic oligonucleotide
gagtctacggaatactagagattcatagta

SEQ ID NO: 468030 - DNA, 30 bp, Artificial Sequence
  Synthetic oligonucleotide
gtcattacgttatcaatgacaatgatagta

SEQ ID NO: 468031 - DNA, 30 bp, Artificial Sequence
  Synthetic oligonucleotide
aactacttccggatttttctattgatagta

SEQ ID NO: 468032 - DNA, 30 bp, Artificial Sequence
  Synthetic oligonucleotide
cattttgccgctggctccatttgtatagta

SEQ ID NO: 468033 - DNA, 30 bp, Artificial Sequence
  Synthetic oligonucleotide
gcccttctcacatggaagagtcttatagta

SEQ ID NO: 468034 - DNA, 30 bp, Artificial Sequence
  Synthetic oligonucleotide
ggttcagctttaatatataagtcactagta

SEQ ID NO: 468035 - DNA, 30 bp, Artificial Sequence
  Synthetic oligonucleotide
attacctgtctggcgcgtgtaatactagta

SEQ ID NO: 468036 - DNA, 30 bp, Artificial Sequence
  Synthetic oligonucleotide
aagggtttctttctagtcggagtactagta

SEQ ID NO: 468037 - DNA, 30 bp, Artificial Sequence
  Synthetic oligonucleotide
tgtatgtaaccagcgtgctgtgacctagta

SEQ ID NO: 468038 - DNA, 30 bp, Artificial Sequence
  Synthetic oligonucleotide
ctggagccactttagctgtacgccctagta

SEQ ID NO: 468039 - DNA, 30 bp, Artificial Sequence
  Synthetic oligonucleotide
accgtggtaatcttactctgattgctagta

SEQ ID NO: 468040 - DNA, 30 bp, Artificial Sequence
  Synthetic oligonucleotide
gctctagagttcgacgtactcaaagtagta

SEQ ID NO: 468041 - DNA, 30 bp, Artificial Sequence
  Synthetic oligonucleotide
cctgccagcatctggaccgtaggagtagta

SEQ ID NO: 468042 - DNA, 31 bp, Artificial Sequence
  Synthetic oligonucleotide
ttttccaccggggggttgccgactagtagta

SEQ ID NO: 468043 - DNA, 30 bp, Artificial Sequence
  Synthetic oligonucleotide
tacacgaattctggaattttggacgtagta

SEQ ID NO: 468044 - DNA, 30 bp, Artificial Sequence
  Synthetic oligonucleotide
acgtacctacggcgcaggcatgacgtagta

SEQ ID NO: 468045 - DNA, 30 bp, Artificial Sequence
  Synthetic oligonucleotide
gtaccctccgcccgcgaggcccccgtagta

SEQ ID NO: 468046 - DNA, 30 bp, Artificial Sequence
  Synthetic oligonucleotide
tacatagattgagttattaacgcggtagta

SEQ ID NO: 468047 - DNA, 30 bp, Artificial Sequence
  Synthetic oligonucleotide
ttgtacttctttcaccgatccggggtagta

SEQ ID NO: 468048 - DNA, 30 bp, Artificial Sequence
  Synthetic oligonucleotide
aatccttgcgcgctgaggatttgggtagta

SEQ ID NO: 468049 - DNA, 30 bp, Artificial Sequence
  Synthetic oligonucleotide
gtgtcgtgctatctgagtttatatgtagta

SEQ ID NO: 468050 - DNA, 30 bp, Artificial Sequence
  Synthetic oligonucleotide
ttctgtcgtcgtttttgtaatccattagta

SEQ ID NO: 468051 - DNA, 30 bp, Artificial Sequence
  Synthetic oligonucleotide
gcatttatacggttgtggggcggattagta

SEQ ID NO: 468052 - DNA, 30 bp, Artificial Sequence
  Synthetic oligonucleotide
gccccccataggacatgccaatacttagta

SEQ ID NO: 468053 - DNA, 30 bp, Artificial Sequence
  Synthetic oligonucleotide
gcagtttctcatttagtcgattacttagta

SEQ ID NO: 468054 - DNA, 30 bp, Artificial Sequence
  Synthetic oligonucleotide
tcaaccagttaatccggctttcgcttagta

SEQ ID NO: 468055 - DNA, 30 bp, Artificial Sequence
  Synthetic oligonucleotide
aaaactgatcccaggggtcattgcttagta

SEQ ID NO: 468056 - DNA, 30 bp, Artificial Sequence
  Synthetic oligonucleotide
atgcggaaacgcaccgaagagaagttagta

SEQ ID NO: 468057 - DNA, 30 bp, Artificial Sequence
  Synthetic oligonucleotide
tttcttcacaaagttcaatcgccgttagta

SEQ ID NO: 468058 - DNA, 30 bp, Artificial Sequence
  Synthetic oligonucleotide
atggggatcctagatcccgcctggttagta

SEQ ID NO: 468059 - DNA, 30 bp, Artificial Sequence
  Synthetic oligonucleotide
tgcaggacccaccagacggccttgttagta

SEQ ID NO: 468060 - DNA, 30 bp, Artificial Sequence
  Synthetic oligonucleotide
ctctggtttgttctgtagtaaacaaacgta

SEQ ID NO: 468061 - DNA, 30 bp, Artificial Sequence
  Synthetic oligonucleotide
tgcgttgtaattacatggtgagcaaacgta

SEQ ID NO: 468062 - DNA, 30 bp, Artificial Sequence
  Synthetic oligonucleotide
tggacttgtagcgcagctcccaccaacgta

SEQ ID NO: 468063 - DNA, 30 bp, Artificial Sequence
  Synthetic oligonucleotide
tttgcagattctattccgctcgtcaacgta

SEQ ID NO: 468064 - DNA, 30 bp, Artificial Sequence
  Synthetic oligonucleotide
aatgctcacttcgtccagtttgagaacgta

SEQ ID NO: 468065 - DNA, 30 bp, Artificial Sequence
  Synthetic oligonucleotide
tgtattggtcctggcggacttaaacacgta

SEQ ID NO: 468066 - DNA, 30 bp, Artificial Sequence
  Synthetic oligonucleotide
gattcttacgtcgcggggcatccacacgta

SEQ ID NO: 468067 - DNA, 30 bp, Artificial Sequence
  Synthetic oligonucleotide
ctggcttaccagggttccagtgtacacgta

SEQ ID NO: 468068 - DNA, 30 bp, Artificial Sequence
  Synthetic oligonucleotide
atttagatcttggtgaagtcgcaccacgta

SEQ ID NO: 468069 - DNA, 30 bp, Artificial Sequence
  Synthetic oligonucleotide
tttgtcaacatcgccgcacatgcccacgta

SEQ ID NO: 468070 - DNA, 30 bp, Artificial Sequence
  Synthetic oligonucleotide
agtgcgctccgtctcttgttcaagcacgta

SEQ ID NO: 468071 - DNA, 30 bp, Artificial Sequence
  Synthetic oligonucleotide
aatgaacgcccttcaatactatccgacgta

SEQ ID NO: 468072 - DNA, 30 bp, Artificial Sequence
  Synthetic oligonucleotide
tataactctcgacagctgggccgcgacgta

SEQ ID NO: 468073 - DNA, 30 bp, Artificial Sequence
  Synthetic oligonucleotide
attcttacactgtaccgcctacaggacgta

SEQ ID NO: 468074 - DNA, 30 bp, Artificial Sequence
  Synthetic oligonucleotide
gaaaatatttaaattataagtgaggacgta

SEQ ID NO: 468075 - DNA, 30 bp, Artificial Sequence
  Synthetic oligonucleotide
tactcttctgaagccaagccaagggacgta

SEQ ID NO: 468076 - DNA, 30 bp, Artificial Sequence
  Synthetic oligonucleotide
gcgtggtgcttcattaaaattagtgacgta

SEQ ID NO: 468077 - DNA, 30 bp, Artificial Sequence
  Synthetic oligonucleotide
tgggccaaaagccgtagcggcaactacgta

SEQ ID NO: 468078 - DNA, 30 bp, Artificial Sequence
  Synthetic oligonucleotide
tctcacgatgggactaacttgccgtacgta

SEQ ID NO: 468079 - DNA, 30 bp, Artificial Sequence
  Synthetic oligonucleotide
cccgtcttgacttctctggagacttacgta

SEQ ID NO: 468080 - DNA, 30 bp, Artificial Sequence
  Synthetic oligonucleotide
aagcatccgcttggagccaatacttacgta

SEQ ID NO: 468081 - DNA, 30 bp, Artificial Sequence
  Synthetic oligonucleotide
aaatctaacttgccctgccgtcccaccgta

SEQ ID NO: 468082 - DNA, 30 bp, Artificial Sequence
  Synthetic oligonucleotide
aattgatcgatgatctggataaataccgta

SEQ ID NO: 468083 - DNA, 30 bp, Artificial Sequence
  Synthetic oligonucleotide
gatcggctctcagtattgacgggtaccgta

SEQ ID NO: 468084 - DNA, 30 bp, Artificial Sequence
  Synthetic oligonucleotide
ggatgcaaattagatactgattgtaccgta

SEQ ID NO: 468085 - DNA, 30 bp, Artificial Sequence
  Synthetic oligonucleotide
atagtatttagtccgtctagcgcccccgta

SEQ ID NO: 468086 - DNA, 30 bp, Artificial Sequence
  Synthetic oligonucleotide
gtcacaagcgcggtgttacgcgtccccgta

SEQ ID NO: 468087 - DNA, 30 bp, Artificial Sequence
  Synthetic oligonucleotide
aatagactaaagccaagggttaatcccgta

SEQ ID NO: 468088 - DNA, 30 bp, Artificial Sequence
  Synthetic oligonucleotide
tgcttatacttggattctgtaattcccgta

SEQ ID NO: 468089 - DNA, 30 bp, Artificial Sequence
  Synthetic oligonucleotide
taccatattcagaattgctctttagccgta

SEQ ID NO: 468090 - DNA, 30 bp, Artificial Sequence
  Synthetic oligonucleotide
tgtctcataatacagtggaagcgcgccgta

SEQ ID NO: 468091 - DNA, 30 bp, Artificial Sequence
  Synthetic oligonucleotide
cattacgcgcggttcacgaggtaggccgta

SEQ ID NO: 468092 - DNA, 30 bp, Artificial Sequence
  Synthetic oligonucleotide
ttacctatacgctccgttcccccggccgta

SEQ ID NO: 468093 - DNA, 31 bp, Artificial Sequence
  Synthetic oligonucleotide
acaagcatacgataaacagagacggtccgta

SEQ ID NO: 468094 - DNA, 30 bp, Artificial Sequence
  Synthetic oligonucleotide
ctcgtggagctatacttgggtatgtccgta

SEQ ID NO: 468095 - DNA, 30 bp, Artificial Sequence
  Synthetic oligonucleotide
gttattcggaatgccttcaagggttccgta

SEQ ID NO: 468096 - DNA, 30 bp, Artificial Sequence
  Synthetic oligonucleotide
ctttgttttgtccttcacctcatttccgta

SEQ ID NO: 468097 - DNA, 30 bp, Artificial Sequence
  Synthetic oligonucleotide
cttacgaaagtcaaggtaaagttttccgta

SEQ ID NO: 468098 - DNA, 30 bp, Artificial Sequence
  Synthetic oligonucleotide
ataggtgaggacgcgagcgccttaagcgta

SEQ ID NO: 468099 - DNA, 30 bp, Artificial Sequence
  Synthetic oligonucleotide
tttgttcgcgtcgaagtcggaaacagcgta

SEQ ID NO: 468100 - DNA, 30 bp, Artificial Sequence
  Synthetic oligonucleotide
cagcgttatatgaacggctttgacagcgta

SEQ ID NO: 468101 - DNA, 29 bp, Artificial Sequence
  Synthetic oligonucleotide
ttagtaggacggtcaattccttgagcgta

SEQ ID NO: 468102 - DNA, 30 bp, Artificial Sequence
  Synthetic oligonucleotide
ttcctaagctttcgggtcctagaacgcgta

SEQ ID NO: 468103 - DNA, 30 bp, Artificial Sequence
  Synthetic oligonucleotide
ctgatggtgaagtagctgttaagacgcgta

SEQ ID NO: 468104 - DNA, 30 bp, Artificial Sequence
  Synthetic oligonucleotide
gcttggggcagttggcggcggtgacgcgta

SEQ ID NO: 468105 - DNA, 30 bp, Artificial Sequence
  Synthetic oligonucleotide
ctatggagatgtaccgcctcgttacgcgta

SEQ ID NO: 468106 - DNA, 30 bp, Artificial Sequence
  Synthetic oligonucleotide
aatatccagtaagtatctgcgctccgcgta

SEQ ID NO: 468107 - DNA, 30 bp, Artificial Sequence
  Synthetic oligonucleotide
caaaaagtcccagtagaccgctgcggcgta

SEQ ID NO: 468108 - DNA, 30 bp, Artificial Sequence
  Synthetic oligonucleotide
aatatactcactcttcggtgttgcggcgta

SEQ ID NO: 468109 - DNA, 31 bp, Artificial Sequence
  Synthetic oligonucleotide
ttcagaacgtgcagttacacccccgggcgta

SEQ ID NO: 468110 - DNA, 30 bp, Artificial Sequence
  Synthetic oligonucleotide
gagagtcaagtaggtgccaacaggggcgta

SEQ ID NO: 468111 - DNA, 30 bp, Artificial Sequence
  Synthetic oligonucleotide
ccaaaaatgtcgtgcttgccatttggcgta

SEQ ID NO: 468112 - DNA, 30 bp, Artificial Sequence
  Synthetic oligonucleotide
ttgggactcagcgcaagacggtcatgcgta

SEQ ID NO: 468113 - DNA, 30 bp, Artificial Sequence
  Synthetic oligonucleotide
gggcaattagggtaacgtcgcagctgcgta

SEQ ID NO: 468114 - DNA, 30 bp, Artificial Sequence
  Synthetic oligonucleotide
ttactggacagtcaatctggacgttgcgta

SEQ ID NO: 468115 - DNA, 30 bp, Artificial Sequence
  Synthetic oligonucleotide
gtagttatagttccacttgctttttgcgta

SEQ ID NO: 468116 - DNA, 30 bp, Artificial Sequence
  Synthetic oligonucleotide
cattgtgagggcgatagaaatttcatcgta

SEQ ID NO: 468117 - DNA, 30 bp, Artificial Sequence
  Synthetic oligonucleotide
atattaaccgtcaacaccgaaaatatcgta

SEQ ID NO: 468118 - DNA, 30 bp, Artificial Sequence
  Synthetic oligonucleotide
atgagatacaggcactggacatatatcgta

SEQ ID NO: 468119 - DNA, 30 bp, Artificial Sequence
  Synthetic oligonucleotide
gtataagcatagctgcacgtccttatcgta

SEQ ID NO: 468120 - DNA, 30 bp, Artificial Sequence
  Synthetic oligonucleotide
tcctgtattgttgacagttttcaactcgta

SEQ ID NO: 468121 - DNA, 30 bp, Artificial Sequence
  Synthetic oligonucleotide
aaaaatgcaacatttgccccactactcgta

SEQ ID NO: 468122 - DNA, 30 bp, Artificial Sequence
  Synthetic oligonucleotide
atgtgcatcttcaccagttgtagcctcgta

SEQ ID NO: 468123 - DNA, 30 bp, Artificial Sequence
  Synthetic oligonucleotide
tttatgatgtaattccgtgaacatctcgta

SEQ ID NO: 468124 - DNA, 30 bp, Artificial Sequence
  Synthetic oligonucleotide
gttggagtcgcccttagcaaagctctcgta

SEQ ID NO: 468125 - DNA, 30 bp, Artificial Sequence
  Synthetic oligonucleotide
tcccggggtatcgagaattgaattctcgta

SEQ ID NO: 468126 - DNA, 30 bp, Artificial Sequence
  Synthetic oligonucleotide
ggcgatatatacgtccgatttcgcgtcgta

SEQ ID NO: 468127 - DNA, 30 bp, Artificial Sequence
  Synthetic oligonucleotide
cttagcaagactgttgcctgccttgtcgta

SEQ ID NO: 468128 - DNA, 30 bp, Artificial Sequence
  Synthetic oligonucleotide
ttgcctaaggtttgaccaaatgacttcgta

SEQ ID NO: 468129 - DNA, 30 bp, Artificial Sequence
  Synthetic oligonucleotide
taggtttagaattaagaactgcggttcgta

SEQ ID NO: 468130 - DNA, 30 bp, Artificial Sequence
  Synthetic oligonucleotide
ttatgagagttgttatacgaaattttcgta

SEQ ID NO: 468131 - DNA, 30 bp, Artificial Sequence
  Synthetic oligonucleotide
ctggatgagatcctgcttgatattttcgta

SEQ ID NO: 468132 - DNA, 30 bp, Artificial Sequence
  Synthetic oligonucleotide
gggcagttgctgttgcgctttcgcaaggta

SEQ ID NO: 468133 - DNA, 30 bp, Artificial Sequence
  Synthetic oligonucleotide
ggtaggctaataaaggggaccaagaaggta

SEQ ID NO: 468134 - DNA, 30 bp, Artificial Sequence
  Synthetic oligonucleotide
ggtttcgggtctacggaagcatcgaaggta

SEQ ID NO: 468135 - DNA, 30 bp, Artificial Sequence
  Synthetic oligonucleotide
ggtggggcagcgtctcacgttcggaaggta

SEQ ID NO: 468136 - DNA, 30 bp, Artificial Sequence
  Synthetic oligonucleotide
cagggcgcttgtttggcccgtttgaaggta

SEQ ID NO: 468137 - DNA, 30 bp, Artificial Sequence
  Synthetic oligonucleotide
ttatctctgtggaagaggaaccgacaggta

SEQ ID NO: 468138 - DNA, 30 bp, Artificial Sequence
  Synthetic oligonucleotide
tgtccttttgtcgaagatgaaggccaggta

SEQ ID NO: 468139 - DNA, 30 bp, Artificial Sequence
  Synthetic oligonucleotide
tgatcgcagggccacgtggttgcgcaggta

SEQ ID NO: 468140 - DNA, 30 bp, Artificial Sequence
  Synthetic oligonucleotide
gctgctcgctccgcgaggcgcatgcaggta

SEQ ID NO: 468141 - DNA, 30 bp, Artificial Sequence
  Synthetic oligonucleotide
ttaaattatgggccttttgtgactcaggta

SEQ ID NO: 468142 - DNA, 30 bp, Artificial Sequence
  Synthetic oligonucleotide
cgaacgttattccgaggggcccgtcaggta

SEQ ID NO: 468143 - DNA, 30 bp, Artificial Sequence
  Synthetic oligonucleotide
ccactggggggttgatttttcctagaggta

SEQ ID NO: 468144 - DNA, 30 bp, Artificial Sequence
  Synthetic oligonucleotide
gagtgcaccaacacgtgaagtcatgaggta

SEQ ID NO: 468145 - DNA, 30 bp, Artificial Sequence
  Synthetic oligonucleotide
cgatcaaacaactccgacgactatgaggta

SEQ ID NO: 468146 - DNA, 30 bp, Artificial Sequence
  Synthetic oligonucleotide
atgtcgccgcggtggatactttatgaggta

SEQ ID NO: 468147 - DNA, 30 bp, Artificial Sequence
  Synthetic oligonucleotide
ggcgcagcttcacaattctggactgaggta

SEQ ID NO: 468148 - DNA, 30 bp, Artificial Sequence
  Synthetic oligonucleotide
acattaatagaggttggtcgggcataggta

SEQ ID NO: 468149 - DNA, 30 bp, Artificial Sequence
  Synthetic oligonucleotide
ttcaccggttacatggttttgcggtaggta

SEQ ID NO: 468150 - DNA, 30 bp, Artificial Sequence
  Synthetic oligonucleotide
tccggatcttgcagccgtctattgtaggta

SEQ ID NO: 468151 - DNA, 30 bp, Artificial Sequence
  Synthetic oligonucleotide
gcaatgatctttgatacctcaccttaggta

SEQ ID NO: 468152 - DNA, 30 bp, Artificial Sequence
  Synthetic oligonucleotide
agcccaccatatgctgagggtgtttaggta

SEQ ID NO: 468153 - DNA, 30 bp, Artificial Sequence
  Synthetic oligonucleotide
cagatctatttctggcattggtgaacggta

SEQ ID NO: 468154 - DNA, 30 bp, Artificial Sequence
  Synthetic oligonucleotide
acaccggaatggggcacccagcccacggta

SEQ ID NO: 468155 - DNA, 30 bp, Artificial Sequence
  Synthetic oligonucleotide
ctataccaaaaggcccgcacgtggacggta

SEQ ID NO: 468156 - DNA, 30 bp, Artificial Sequence
  Synthetic oligonucleotide
ggaacgcaagcgaggcagaggcttacggta

SEQ ID NO: 468157 - DNA, 30 bp, Artificial Sequence
  Synthetic oligonucleotide
gatccgtattgatctgttatttgaccggta

SEQ ID NO: 468158 - DNA, 30 bp, Artificial Sequence
  Synthetic oligonucleotide
atcttactagggatttctacctacccggta

SEQ ID NO: 468159 - DNA, 30 bp, Artificial Sequence
  Synthetic oligonucleotide
ggaattccgacggagaggccagccccggta

SEQ ID NO: 468160 - DNA, 30 bp, Artificial Sequence
  Synthetic oligonucleotide
tttgcgggatttaagtaactcgccccggta

SEQ ID NO: 468161 - DNA, 30 bp, Artificial Sequence
  Synthetic oligonucleotide
gcaatgcgaccgcaaccgtcgaagccggta

SEQ ID NO: 468162 - DNA, 30 bp, Artificial Sequence
  Synthetic oligonucleotide
gccctggccgtcgaaggacgggatccggta

SEQ ID NO: 468163 - DNA, 30 bp, Artificial Sequence
  Synthetic oligonucleotide
atcaaaggtgttctaagcacagttccggta

SEQ ID NO: 468164 - DNA, 30 bp, Artificial Sequence
  Synthetic oligonucleotide
agtagagctcacgtggtcattccagcggta

SEQ ID NO: 468165 - DNA, 29 bp, Artificial Sequence
  Synthetic oligonucleotide
atcctctcccagtcgtccaagcagcggta

SEQ ID NO: 468166 - DNA, 30 bp, Artificial Sequence
  Synthetic oligonucleotide
gaatacttgcgatcgaatcggcccgcggta

SEQ ID NO: 468167 - DNA, 30 bp, Artificial Sequence
  Synthetic oligonucleotide
tcaaagaggagcccagcttttcccgcggta

SEQ ID NO: 468168 - DNA, 30 bp, Artificial Sequence
  Synthetic oligonucleotide
acctgatcatggggcatttagtgcgcggta

SEQ ID NO: 468169 - DNA, 30 bp, Artificial Sequence
  Synthetic oligonucleotide
cgtaaagagccacttgttccacaggcggta

SEQ ID NO: 468170 - DNA, 30 bp, Artificial Sequence
  Synthetic oligonucleotide
gcaatataaactgcggctctaggggcggta

SEQ ID NO: 468171 - DNA, 30 bp, Artificial Sequence
  Synthetic oligonucleotide
acggcgtactacccacgggccattgcggta

SEQ ID NO: 468172 - DNA, 30 bp, Artificial Sequence
  Synthetic oligonucleotide
tggttgacgctagtctcaaagcaatcggta

SEQ ID NO: 468173 - DNA, 30 bp, Artificial Sequence
  Synthetic oligonucleotide
agtgatgagctacgacgtcgatcatcggta

SEQ ID NO: 468174 - DNA, 30 bp, Artificial Sequence
  Synthetic oligonucleotide
gggttaacgcgagctggccggacgtcggta

SEQ ID NO: 468175 - DNA, 30 bp, Artificial Sequence
  Synthetic oligonucleotide
gaggcgtgacggggctacggcccgtcggta

SEQ ID NO: 468176 - DNA, 30 bp, Artificial Sequence
  Synthetic oligonucleotide
tactttgtttagacacaattcatgtcggta

SEQ ID NO: 468177 - DNA, 30 bp, Artificial Sequence
  Synthetic oligonucleotide
taaatcggcattagttctgcgctgtcggta

SEQ ID NO: 468178 - DNA, 30 bp, Artificial Sequence
  Synthetic oligonucleotide
tattatgtcaacccgtgacggtattcggta

SEQ ID NO: 468179 - DNA, 30 bp, Artificial Sequence
  Synthetic oligonucleotide
agccgatcgtagcgatgaatgatttcggta

SEQ ID NO: 468180 - DNA, 30 bp, Artificial Sequence
  Synthetic oligonucleotide
agttctcagcacttaggtattctttcggta

SEQ ID NO: 468181 - DNA, 30 bp, Artificial Sequence
  Synthetic oligonucleotide
ctataccccaggccccttcacagaagggta

SEQ ID NO: 468182 - DNA, 30 bp, Artificial Sequence
  Synthetic oligonucleotide
cggatggatgcgataccgggcgtaagggta

SEQ ID NO: 468183 - DNA, 30 bp, Artificial Sequence
  Synthetic oligonucleotide
agatttcaaggccgtcatgcagtcagggta

SEQ ID NO: 468184 - DNA, 30 bp, Artificial Sequence
  Synthetic oligonucleotide
ccctaaatttcacgtcgtcaatcgagggta

SEQ ID NO: 468185 - DNA, 30 bp, Artificial Sequence
  Synthetic oligonucleotide
atagcggcacgattttagtttcggagggta

SEQ ID NO: 468186 - DNA, 30 bp, Artificial Sequence
  Synthetic oligonucleotide
ggacggatagatccacgagctagtagggta

SEQ ID NO: 468187 - DNA, 30 bp, Artificial Sequence
  Synthetic oligonucleotide
tccctgtcccggttaaagcatccacgggta

SEQ ID NO: 468188 - DNA, 30 bp, Artificial Sequence
  Synthetic oligonucleotide
gtcggtcttcagactacccctacccgggta

SEQ ID NO: 468189 - DNA, 30 bp, Artificial Sequence
  Synthetic oligonucleotide
gctcctccgtgagggcgtgtgctccgggta

SEQ ID NO: 468190 - DNA, 30 bp, Artificial Sequence
  Synthetic oligonucleotide
gttatagcgtcactctaattgccgcgggta

SEQ ID NO: 468191 - DNA, 30 bp, Artificial Sequence
  Synthetic oligonucleotide
tggttaaatgcgcgggaacgctggcgggta

SEQ ID NO: 468192 - DNA, 30 bp, Artificial Sequence
  Synthetic oligonucleotide
tctcagcatacagcacacataaatcgggta

SEQ ID NO: 468193 - DNA, 30 bp, Artificial Sequence
  Synthetic oligonucleotide
gtacacggcggtgctacctagggtcgggta

SEQ ID NO: 468194 - DNA, 30 bp, Artificial Sequence
  Synthetic oligonucleotide
actccgccattgtcagatgtagttcgggta

SEQ ID NO: 468195 - DNA, 30 bp, Artificial Sequence
  Synthetic oligonucleotide
attttccaatagggtgttgatcaaggggta

SEQ ID NO: 468196 - DNA, 30 bp, Artificial Sequence
  Synthetic oligonucleotide
actcctagaactggtttgaaggcaggggta

SEQ ID NO: 468197 - DNA, 30 bp, Artificial Sequence
  Synthetic oligonucleotide
taacctgtgtctcgctgatatgcaggggta

SEQ ID NO: 468198 - DNA, 30 bp, Artificial Sequence
  Synthetic oligonucleotide
ctaccatttccgctcaccaaccccggggta

SEQ ID NO: 468199 - DNA, 30 bp, Artificial Sequence
  Synthetic oligonucleotide
aacgctttgcacttgtacgaggcgggggta

SEQ ID NO: 468200 - DNA, 30 bp, Artificial Sequence
  Synthetic oligonucleotide
tctcgcaagaattaagccttagggggggta

SEQ ID NO: 468201 - DNA, 30 bp, Artificial Sequence
  Synthetic oligonucleotide
ccccttgttgggcctaggaaagatggggta

SEQ ID NO: 468202 - DNA, 30 bp, Artificial Sequence
  Synthetic oligonucleotide
cagttagcatgttgatcttatgatggggta

SEQ ID NO: 468203 - DNA, 30 bp, Artificial Sequence
  Synthetic oligonucleotide
catacggtcttcttccctgaacttggggta

SEQ ID NO: 468204 - DNA, 30 bp, Artificial Sequence
  Synthetic oligonucleotide
tatgctgatcagggtattttataatgggta

SEQ ID NO: 468205 - DNA, 30 bp, Artificial Sequence
  Synthetic oligonucleotide
agttacgggtgcagggtcttgggatgggta

SEQ ID NO: 468206 - DNA, 30 bp, Artificial Sequence
  Synthetic oligonucleotide
gagggctgcccccaatcggtgctatgggta

SEQ ID NO: 468207 - DNA, 30 bp, Artificial Sequence
  Synthetic oligonucleotide
gcacttatgcagattaacttaaactgggta

SEQ ID NO: 468208 - DNA, 30 bp, Artificial Sequence
  Synthetic oligonucleotide
gaaagacaaggccaactgcatccctgggta

SEQ ID NO: 468209 - DNA, 30 bp, Artificial Sequence
  Synthetic oligonucleotide
aatctcgggttctttttaacaaagtgggta

SEQ ID NO: 468210 - DNA, 30 bp, Artificial Sequence
  Synthetic oligonucleotide
atctacgtcgcatacatcttcgagtgggta

SEQ ID NO: 468211 - DNA, 30 bp, Artificial Sequence
  Synthetic oligonucleotide
tctgcttataagtgaagggtatagtgggta

SEQ ID NO: 468212 - DNA, 31 bp, Artificial Sequence
  Synthetic oligonucleotide
agcggaaaagagtgatgcggctgggtgggta

SEQ ID NO: 468213 - DNA, 30 bp, Artificial Sequence
  Synthetic oligonucleotide
atttccaagattccagcactatggtgggta

SEQ ID NO: 468214 - DNA, 30 bp, Artificial Sequence
  Synthetic oligonucleotide
ctcggagaatgagatgttctcatgtgggta

SEQ ID NO: 468215 - DNA, 30 bp, Artificial Sequence
  Synthetic oligonucleotide
tttatactcctggctggttaacattgggta

SEQ ID NO: 468216 - DNA, 30 bp, Artificial Sequence
  Synthetic oligonucleotide
catttgagtgaagacgcaaggttttgggta

SEQ ID NO: 468217 - DNA, 30 bp, Artificial Sequence
  Synthetic oligonucleotide
acttagttaaactgactttgttaaatggta

SEQ ID NO: 468218 - DNA, 30 bp, Artificial Sequence
  Synthetic oligonucleotide
gcctatcgatctattatgcatcagatggta

SEQ ID NO: 468219 - DNA, 30 bp, Artificial Sequence
  Synthetic oligonucleotide
gtcgcgaggcaggtttacatcttgatggta

SEQ ID NO: 468220 - DNA, 30 bp, Artificial Sequence
  Synthetic oligonucleotide
tgctgatcccattctgtcaacaatatggta

SEQ ID NO: 468221 - DNA, 30 bp, Artificial Sequence
  Synthetic oligonucleotide
aaattttgacaggggaatatatctatggta

SEQ ID NO: 468222 - DNA, 30 bp, Artificial Sequence
  Synthetic oligonucleotide
gtacattttataagcgcttgcattatggta

SEQ ID NO: 468223 - DNA, 30 bp, Artificial Sequence
  Synthetic oligonucleotide
gaatactggtacatcgaattacgcctggta

SEQ ID NO: 468224 - DNA, 30 bp, Artificial Sequence
  Synthetic oligonucleotide
agctaatgctgtaagcaatacgggctggta

SEQ ID NO: 468225 - DNA, 30 bp, Artificial Sequence
  Synthetic oligonucleotide
caatatatgtctgtggtaataaatctggta

SEQ ID NO: 468226 - DNA, 30 bp, Artificial Sequence
  Synthetic oligonucleotide
tgcttccttaaccttataggtattctggta

SEQ ID NO: 468227 - DNA, 30 bp, Artificial Sequence
  Synthetic oligonucleotide
ggggcgctgccaagtatagatgcagtggta

SEQ ID NO: 468228 - DNA, 30 bp, Artificial Sequence
  Synthetic oligonucleotide
acgcaccacgttactatgagctgcgtggta

SEQ ID NO: 468229 - DNA, 30 bp, Artificial Sequence
  Synthetic oligonucleotide
gaactagtcagggcacggaggctcgtggta

SEQ ID NO: 468230 - DNA, 30 bp, Artificial Sequence
  Synthetic oligonucleotide
actgctcgtggaacaagcccaacggtggta

SEQ ID NO: 468231 - DNA, 30 bp, Artificial Sequence
  Synthetic oligonucleotide
gcgtccctactcgttgacgtcctattggta

SEQ ID NO: 468232 - DNA, 30 bp, Artificial Sequence
  Synthetic oligonucleotide
ggtggtaaatgtttaattcatttattggta

SEQ ID NO: 468233 - DNA, 30 bp, Artificial Sequence
  Synthetic oligonucleotide
gcacaccgtacgccgtgaaggaccttggta

SEQ ID NO: 468234 - DNA, 30 bp, Artificial Sequence
  Synthetic oligonucleotide
ggcggggaattcctgtgagaacgcttggta

SEQ ID NO: 468235 - DNA, 30 bp, Artificial Sequence
  Synthetic oligonucleotide
taaaagccctaggatgggcgcaggttggta

SEQ ID NO: 468236 - DNA, 30 bp, Artificial Sequence
  Synthetic oligonucleotide
tcattgatcttcttactggactatttggta

SEQ ID NO: 468237 - DNA, 30 bp, Artificial Sequence
  Synthetic oligonucleotide
ctgtgtagacacgatggggatgctttggta

SEQ ID NO: 468238 - DNA, 30 bp, Artificial Sequence
  Synthetic oligonucleotide
cgaggcgggacacgactagtaagtttggta

SEQ ID NO: 468239 - DNA, 30 bp, Artificial Sequence
  Synthetic oligonucleotide
atatgggtccacctcggttacctaaatgta

SEQ ID NO: 468240 - DNA, 30 bp, Artificial Sequence
  Synthetic oligonucleotide
ccatagagatacgcgccgccacacaatgta

SEQ ID NO: 468241 - DNA, 30 bp, Artificial Sequence
  Synthetic oligonucleotide
gttgaaattgactggtgccagtgcaatgta

SEQ ID NO: 468242 - DNA, 30 bp, Artificial Sequence
  Synthetic oligonucleotide
gcgagttaccgatatcacaaatttaatgta

SEQ ID NO: 468243 - DNA, 30 bp, Artificial Sequence
  Synthetic oligonucleotide
tttcactcatccccaggagtgtttaatgta

SEQ ID NO: 468244 - DNA, 30 bp, Artificial Sequence
  Synthetic oligonucleotide
ggggcattaaccaggaaagctcaacatgta

SEQ ID NO: 468245 - DNA, 30 bp, Artificial Sequence
  Synthetic oligonucleotide
gtactgtcagtgcaccgcgtctgacatgta

SEQ ID NO: 468246 - DNA, 30 bp, Artificial Sequence
  Synthetic oligonucleotide
atgcccgcgtgagggagcaacctacatgta

SEQ ID NO: 468247 - DNA, 30 bp, Artificial Sequence
  Synthetic oligonucleotide
ccgcatgtttttttcgtggatctgcatgta

SEQ ID NO: 468248 - DNA, 30 bp, Artificial Sequence
  Synthetic oligonucleotide
gtccgtcgtcgaacgcttaaaatagatgta

SEQ ID NO: 468249 - DNA, 30 bp, Artificial Sequence
  Synthetic oligonucleotide
caggtctacaaggttccgaccatagatgta

SEQ ID NO: 468250 - DNA, 30 bp, Artificial Sequence
  Synthetic oligonucleotide
aagccacattagcagaccaaatacgatgta

SEQ ID NO: 468251 - DNA, 30 bp, Artificial Sequence
  Synthetic oligonucleotide
gtcatagtgcctcctacggcaacggatgta

SEQ ID NO: 468252 - DNA, 30 bp, Artificial Sequence
  Synthetic oligonucleotide
gttagggggtctcctacgctcatggatgta

SEQ ID NO: 468253 - DNA, 30 bp, Artificial Sequence
  Synthetic oligonucleotide
cttttagtactcttagggattaatgatgta

SEQ ID NO: 468254 - DNA, 30 bp, Artificial Sequence
  Synthetic oligonucleotide
ttcgaatccccaactagggcttctgatgta

SEQ ID NO: 468255 - DNA, 30 bp, Artificial Sequence
  Synthetic oligonucleotide
caattgactccacagcacgtaaaatatgta

SEQ ID NO: 468256 - DNA, 30 bp, Artificial Sequence
  Synthetic oligonucleotide
gctgtaaactttgaccgcaccggatatgta

SEQ ID NO: 468257 - DNA, 30 bp, Artificial Sequence
  Synthetic oligonucleotide
tctctaacctacatgtttccattatatgta

SEQ ID NO: 468258 - DNA, 30 bp, Artificial Sequence
  Synthetic oligonucleotide
aaatttggctgtttaggtattgtctatgta

SEQ ID NO: 468259 - DNA, 30 bp, Artificial Sequence
  Synthetic oligonucleotide
ctatattgcgtgtgactggtggcgtatgta

SEQ ID NO: 468260 - DNA, 30 bp, Artificial Sequence
  Synthetic oligonucleotide
acccaggttgctattatgcaggtttatgta

SEQ ID NO: 468261 - DNA, 30 bp, Artificial Sequence
  Synthetic oligonucleotide
ttttatacagcgtcatatgagcaaactgta

SEQ ID NO: 468262 - DNA, 30 bp, Artificial Sequence
  Synthetic oligonucleotide
gagacaacgcgagtcgaatgtataactgta

SEQ ID NO: 468263 - DNA, 30 bp, Artificial Sequence
  Synthetic oligonucleotide
gatactcacgacacgtgcgcattcactgta

SEQ ID NO: 468264 - DNA, 30 bp, Artificial Sequence
  Synthetic oligonucleotide
ataatttaagtcgtgtcgatagggactgta

SEQ ID NO: 468265 - DNA, 30 bp, Artificial Sequence
  Synthetic oligonucleotide
aagcatcaaccgatcccatcctggactgta

SEQ ID NO: 468266 - DNA, 30 bp, Artificial Sequence
  Synthetic oligonucleotide
gggttcaagggcggcccgttcgctactgta

SEQ ID NO: 468267 - DNA, 30 bp, Artificial Sequence
  Synthetic oligonucleotide
ttgtcagtgttatgtgtaccataacctgta

SEQ ID NO: 468268 - DNA, 30 bp, Artificial Sequence
  Synthetic oligonucleotide
aatctgaatccgttacatgagcgacctgta

SEQ ID NO: 468269 - DNA, 30 bp, Artificial Sequence
  Synthetic oligonucleotide
gttaacttcgaggcagttacgagccctgta

SEQ ID NO: 468270 - DNA, 30 bp, Artificial Sequence
  Synthetic oligonucleotide
atgtagcgggaacagcggataatagctgta

SEQ ID NO: 468271 - DNA, 30 bp, Artificial Sequence
  Synthetic oligonucleotide
agagattctgcattgaagccgctagctgta

SEQ ID NO: 468272 - DNA, 30 bp, Artificial Sequence
  Synthetic oligonucleotide
acgcccattattgacctgcaacgcgctgta

SEQ ID NO: 468273 - DNA, 30 bp, Artificial Sequence
  Synthetic oligonucleotide
ctgatcgcagcgacataacgacaatctgta

SEQ ID NO: 468274 - DNA, 30 bp, Artificial Sequence
  Synthetic oligonucleotide
gagtccttaacgcaaagtagcacctctgta

SEQ ID NO: 468275 - DNA, 30 bp, Artificial Sequence
  Synthetic oligonucleotide
acaacgaccgtcccgagtgacgtctctgta

SEQ ID NO: 468276 - DNA, 30 bp, Artificial Sequence
  Synthetic oligonucleotide
tcagccacatgaaatagtgtaggttctgta

SEQ ID NO: 468277 - DNA, 30 bp, Artificial Sequence
  Synthetic oligonucleotide
gattcagaaagtaagtgccaactttctgta

SEQ ID NO: 468278 - DNA, 30 bp, Artificial Sequence
  Synthetic oligonucleotide
aaatctaccctccaaattaacctttctgta

SEQ ID NO: 468279 - DNA, 30 bp, Artificial Sequence
  Synthetic oligonucleotide
tttccctgcccggtcccttgttccagtgta

SEQ ID NO: 468280 - DNA, 30 bp, Artificial Sequence
  Synthetic oligonucleotide
tcctcaggtcagaaggagcatattagtgta

SEQ ID NO: 468281 - DNA, 30 bp, Artificial Sequence
  Synthetic oligonucleotide
gtacagattcgcgtatttgcgaaacgtgta

SEQ ID NO: 468282 - DNA, 30 bp, Artificial Sequence
  Synthetic oligonucleotide
cataggtatattcatatctcgcgacgtgta

SEQ ID NO: 468283 - DNA, 30 bp, Artificial Sequence
  Synthetic oligonucleotide
tacaaagcaggcacttgaaaggtacgtgta

SEQ ID NO: 468284 - DNA, 30 bp, Artificial Sequence
  Synthetic oligonucleotide
cctcttgggcttcggagccaaaaccgtgta

SEQ ID NO: 468285 - DNA, 30 bp, Artificial Sequence
  Synthetic oligonucleotide
acaatatgagatagctgcagcgaccgtgta

SEQ ID NO: 468286 - DNA, 30 bp, Artificial Sequence
  Synthetic oligonucleotide
gcccagacaatccgccggtgtctccgtgta

SEQ ID NO: 468287 - DNA, 30 bp, Artificial Sequence
  Synthetic oligonucleotide
tagcatgagaccttgccgagctgcggtgta

SEQ ID NO: 468288 - DNA, 30 bp, Artificial Sequence
  Synthetic oligonucleotide
tggaccacgtgcttgttcacacggggtgta

SEQ ID NO: 468289 - DNA, 30 bp, Artificial Sequence
  Synthetic oligonucleotide
ctgtcagtttttaagttaaaagctggtgta

SEQ ID NO: 468290 - DNA, 30 bp, Artificial Sequence
  Synthetic oligonucleotide
cgagtcaattcataaaaataagctggtgta

SEQ ID NO: 468291 - DNA, 30 bp, Artificial Sequence
  Synthetic oligonucleotide
tccattaaactacacccgggtcgtggtgta

SEQ ID NO: 468292 - DNA, 30 bp, Artificial Sequence
  Synthetic oligonucleotide
cagccgtctgactgaacgacgtgatgtgta

SEQ ID NO: 468293 - DNA, 30 bp, Artificial Sequence
  Synthetic oligonucleotide
cattccgaaacgggtccgacattctgtgta

SEQ ID NO: 468294 - DNA, 30 bp, Artificial Sequence
  Synthetic oligonucleotide
accatattcgagcagtgggaggggtgtgta

SEQ ID NO: 468295 - DNA, 30 bp, Artificial Sequence
  Synthetic oligonucleotide
cttgggacatagttattgttgatgtgtgta

SEQ ID NO: 468296 - DNA, 30 bp, Artificial Sequence
  Synthetic oligonucleotide
gtacttctcacaagttgagtcttgtgtgta

SEQ ID NO: 468297 - DNA, 30 bp, Artificial Sequence
  Synthetic oligonucleotide
ttctcttggtttgttgacttggtttgtgta

SEQ ID NO: 468298 - DNA, 30 bp, Artificial Sequence
  Synthetic oligonucleotide
gtttctgctggtaattatccgaaaattgta

SEQ ID NO: 468299 - DNA, 30 bp, Artificial Sequence
  Synthetic oligonucleotide
atgcagcaacgaacgcccaaggcaattgta

SEQ ID NO: 468300 - DNA, 30 bp, Artificial Sequence
  Synthetic oligonucleotide
gccaccttcgaagttgcgtatttaattgta

SEQ ID NO: 468301 - DNA, 30 bp, Artificial Sequence
  Synthetic oligonucleotide
caacgctgggaacctccagccagcattgta

SEQ ID NO: 468302 - DNA, 30 bp, Artificial Sequence
  Synthetic oligonucleotide
tcaggacgcttgctacgttaaatcattgta

SEQ ID NO: 468303 - DNA, 30 bp, Artificial Sequence
  Synthetic oligonucleotide
tcgatccccgccgggggtcttgtgattgta

SEQ ID NO: 468304 - DNA, 30 bp, Artificial Sequence
  Synthetic oligonucleotide
tgaatatagcggccggtgattcatattgta

SEQ ID NO: 468305 - DNA, 30 bp, Artificial Sequence
  Synthetic oligonucleotide
gtacatatatcattgtcggacagtattgta

SEQ ID NO: 468306 - DNA, 30 bp, Artificial Sequence
  Synthetic oligonucleotide
catatgattcagtttctaactggtattgta

SEQ ID NO: 468307 - DNA, 30 bp, Artificial Sequence
  Synthetic oligonucleotide
ttgttcggaggatcctgcttttgtattgta

SEQ ID NO: 468308 - DNA, 30 bp, Artificial Sequence
  Synthetic oligonucleotide
ttaaggttctatttgggcgctcaacttgta

SEQ ID NO: 468309 - DNA, 30 bp, Artificial Sequence
  Synthetic oligonucleotide
cgtcgtcactttgcccgctgttcacttgta

SEQ ID NO: 468310 - DNA, 30 bp, Artificial Sequence
  Synthetic oligonucleotide
actgtaactcgggagtgtggattacttgta

SEQ ID NO: 468311 - DNA, 30 bp, Artificial Sequence
  Synthetic oligonucleotide
actctgctcacagcgcactgtcggcttgta

SEQ ID NO: 468312 - DNA, 30 bp, Artificial Sequence
  Synthetic oligonucleotide
gagttgacaggattggcaccttatcttgta

SEQ ID NO: 468313 - DNA, 30 bp, Artificial Sequence
  Synthetic oligonucleotide
atcatcttggaaccggttgggtctcttgta

SEQ ID NO: 468314 - DNA, 30 bp, Artificial Sequence
  Synthetic oligonucleotide
tacagcggcgtcttgtttttaattcttgta

SEQ ID NO: 468315 - DNA, 30 bp, Artificial Sequence
  Synthetic oligonucleotide
tgttgcgtccgcaactagcgatttcttgta

SEQ ID NO: 468316 - DNA, 30 bp, Artificial Sequence
  Synthetic oligonucleotide
gtaagaaggcagtcctggaccatcgttgta

SEQ ID NO: 468317 - DNA, 30 bp, Artificial Sequence
  Synthetic oligonucleotide
attctgattctcacgagacgtgaggttgta

SEQ ID NO: 468318 - DNA, 30 bp, Artificial Sequence
  Synthetic oligonucleotide
gatagactcatccagaattctcatgttgta

SEQ ID NO: 468319 - DNA, 30 bp, Artificial Sequence
  Synthetic oligonucleotide
tagcccacagcattaacctctcctgttgta

SEQ ID NO: 468320 - DNA, 30 bp, Artificial Sequence
  Synthetic oligonucleotide
attgtcgacgactggccagactcatttgta

SEQ ID NO: 468321 - DNA, 30 bp, Artificial Sequence
  Synthetic oligonucleotide
aactcaactatacttttttgtgactttgta

SEQ ID NO: 468322 - DNA, 30 bp, Artificial Sequence
  Synthetic oligonucleotide
ttagtgctgacgttcccgacgtactttgta

SEQ ID NO: 468323 - DNA, 30 bp, Artificial Sequence
  Synthetic oligonucleotide
tgcccaacccgcagcgtccgggcaaaatta

SEQ ID NO: 468324 - DNA, 30 bp, Artificial Sequence
  Synthetic oligonucleotide
ctctccgaccgctgcctcagatcaaaatta

SEQ ID NO: 468325 - DNA, 30 bp, Artificial Sequence
  Synthetic oligonucleotide
acttcttgagtgctatcgtcccacaaatta

SEQ ID NO: 468326 - DNA, 30 bp, Artificial Sequence
  Synthetic oligonucleotide
tttcaagtgactcgggtcatgcgcaaatta

SEQ ID NO: 468327 - DNA, 30 bp, Artificial Sequence
  Synthetic oligonucleotide
gggacaaagcagtgagcaacaatgaaatta

SEQ ID NO: 468328 - DNA, 30 bp, Artificial Sequence
  Synthetic oligonucleotide
tgaactactcttttgaagctttgacaatta

SEQ ID NO: 468329 - DNA, 30 bp, Artificial Sequence
  Synthetic oligonucleotide
tacatggccgaacattctcaaccccaatta

SEQ ID NO: 468330 - DNA, 30 bp, Artificial Sequence
  Synthetic oligonucleotide
accggaagtggatttgtaaaccagcaatta

SEQ ID NO: 468331 - DNA, 30 bp, Artificial Sequence
  Synthetic oligonucleotide
gtccaaattgggcttccatgttatcaatta

SEQ ID NO: 468332 - DNA, 30 bp, Artificial Sequence
  Synthetic oligonucleotide
atgaaagcacaataatagttttatcaatta

SEQ ID NO: 468333 - DNA, 30 bp, Artificial Sequence
  Synthetic oligonucleotide
agcaataccttaacggctctctttcaatta

SEQ ID NO: 468334 - DNA, 30 bp, Artificial Sequence
  Synthetic oligonucleotide
cgcgtgggttttttgacgcgggaagaatta

SEQ ID NO: 468335 - DNA, 30 bp, Artificial Sequence
  Synthetic oligonucleotide
cttccgatagatcctaaaattgacgaatta

SEQ ID NO: 468336 - DNA, 30 bp, Artificial Sequence
  Synthetic oligonucleotide
atagaaatggggcaggacgtgcaggaatta

SEQ ID NO: 468337 - DNA, 30 bp, Artificial Sequence
  Synthetic oligonucleotide
atgttcgacacgtctgatcgatgggaatta

SEQ ID NO: 468338 - DNA, 31 bp, Artificial Sequence
  Synthetic oligonucleotide
cttttcccgtatctttgcccattctgaatta

SEQ ID NO: 468339 - DNA, 30 bp, Artificial Sequence
  Synthetic oligonucleotide
gaatcccttgccggtttcctttgtgaatta

SEQ ID NO: 468340 - DNA, 30 bp, Artificial Sequence
  Synthetic oligonucleotide
aagcgcaaaataacatcgtcctttgaatta

SEQ ID NO: 468341 - DNA, 30 bp, Artificial Sequence
  Synthetic oligonucleotide
ccagcataggcgagaaccgccaaataatta

SEQ ID NO: 468342 - DNA, 30 bp, Artificial Sequence
  Synthetic oligonucleotide
gttcgacatcgttcggtcgcaacataatta

SEQ ID NO: 468343 - DNA, 30 bp, Artificial Sequence
  Synthetic oligonucleotide
gttgaaagtagagctatgcccgcataatta

SEQ ID NO: 468344 - DNA, 30 bp, Artificial Sequence
  Synthetic oligonucleotide
tctgggaaattcccattgcgtttataatta

SEQ ID NO: 468345 - DNA, 30 bp, Artificial Sequence
  Synthetic oligonucleotide
cctcagagttctgtgcgagtattgtaatta

SEQ ID NO: 468346 - DNA, 30 bp, Artificial Sequence
  Synthetic oligonucleotide
gcatactgatttggagtgagcccttaatta

SEQ ID NO: 468347 - DNA, 30 bp, Artificial Sequence
  Synthetic oligonucleotide
caaaacatactgtttaaacgagtttaatta

SEQ ID NO: 468348 - DNA, 30 bp, Artificial Sequence
  Synthetic oligonucleotide
tcagcgaaaggttttttggcataaacatta

SEQ ID NO: 468349 - DNA, 30 bp, Artificial Sequence
  Synthetic oligonucleotide
attaccagaagtcccgagatggtaacatta

SEQ ID NO: 468350 - DNA, 30 bp, Artificial Sequence
  Synthetic oligonucleotide
aactattatgttgtgtggtagtacacatta

SEQ ID NO: 468351 - DNA, 30 bp, Artificial Sequence
  Synthetic oligonucleotide
atgatcgtgttatactaatcgtagacatta

SEQ ID NO: 468352 - DNA, 30 bp, Artificial Sequence
  Synthetic oligonucleotide
attacttggtatgacacaggagggacatta

SEQ ID NO: 468353 - DNA, 30 bp, Artificial Sequence
  Synthetic oligonucleotide
ctgttacttgtttggacttgcatgacatta

SEQ ID NO: 468354 - DNA, 30 bp, Artificial Sequence
  Synthetic oligonucleotide
aaatattctaatatcaactagcctacatta

SEQ ID NO: 468355 - DNA, 30 bp, Artificial Sequence
  Synthetic oligonucleotide
gtcctgtatactccacaacaaggtacatta

SEQ ID NO: 468356 - DNA, 30 bp, Artificial Sequence
  Synthetic oligonucleotide
tccgtaatggaatccggaggcgtaccatta

SEQ ID NO: 468357 - DNA, 30 bp, Artificial Sequence
  Synthetic oligonucleotide
tggtcaaagcctgccacgatccagccatta

SEQ ID NO: 468358 - DNA, 30 bp, Artificial Sequence
  Synthetic oligonucleotide
gtatcatggagtgagaagtccgcgccatta

SEQ ID NO: 468359 - DNA, 30 bp, Artificial Sequence
  Synthetic oligonucleotide
agctgagctgggtcagccactgatccatta

SEQ ID NO: 468360 - DNA, 30 bp, Artificial Sequence
  Synthetic oligonucleotide
ttccatcgagatcacgactctcgtccatta

SEQ ID NO: 468361 - DNA, 30 bp, Artificial Sequence
  Synthetic oligonucleotide
tgccaaggaatccacagacaataagcatta

SEQ ID NO: 468362 - DNA, 30 bp, Artificial Sequence
  Synthetic oligonucleotide
attagcgaaagcacccattggttagcatta

SEQ ID NO: 468363 - DNA, 30 bp, Artificial Sequence
  Synthetic oligonucleotide
tgattcagagagtctgagggtggcgcatta

SEQ ID NO: 468364 - DNA, 30 bp, Artificial Sequence
  Synthetic oligonucleotide
ctaatgtttggtttgggggcagtcgcatta

SEQ ID NO: 468365 - DNA, 30 bp, Artificial Sequence
  Synthetic oligonucleotide
tcaggtgttactagttcttagttcgcatta

SEQ ID NO: 468366 - DNA, 30 bp, Artificial Sequence
  Synthetic oligonucleotide
ctcctacgagctcataagcaataggcatta

SEQ ID NO: 468367 - DNA, 30 bp, Artificial Sequence
  Synthetic oligonucleotide
aataacgaaaaatttgcattctaggcatta

SEQ ID NO: 468368 - DNA, 30 bp, Artificial Sequence
  Synthetic oligonucleotide
ttaaggcctgcagctcgcctggtggcatta

SEQ ID NO: 468369 - DNA, 30 bp, Artificial Sequence
  Synthetic oligonucleotide
gtgcaagaaagcaatcttgtcattgcatta

SEQ ID NO: 468370 - DNA, 30 bp, Artificial Sequence
  Synthetic oligonucleotide
ccatagtcttgggcaaatgttccatcatta

SEQ ID NO: 468371 - DNA, 30 bp, Artificial Sequence
  Synthetic oligonucleotide
gacatacctgtctgtcgacgcgcatcatta

SEQ ID NO: 468372 - DNA, 30 bp, Artificial Sequence
  Synthetic oligonucleotide
catttcgggaagaagtttttgatatcatta

SEQ ID NO: 468373 - DNA, 30 bp, Artificial Sequence
  Synthetic oligonucleotide
atcggccgtgccaaggagcttatatcatta

SEQ ID NO: 468374 - DNA, 30 bp, Artificial Sequence
  Synthetic oligonucleotide
aaagtgtcacaaataaaagattagtcatta

SEQ ID NO: 468375 - DNA, 30 bp, Artificial Sequence
  Synthetic oligonucleotide
ctttttgtcgccagacgcccctggtcatta

SEQ ID NO: 468376 - DNA, 30 bp, Artificial Sequence
  Synthetic oligonucleotide
ctctattatacgtattgcgcgtggtcatta

SEQ ID NO: 468377 - DNA, 30 bp, Artificial Sequence
  Synthetic oligonucleotide
gtggatcagggcgatgattctgattcatta

SEQ ID NO: 468378 - DNA, 30 bp, Artificial Sequence
  Synthetic oligonucleotide
tttcggaaaggcgttcagcgttattcatta

SEQ ID NO: 468379 - DNA, 30 bp, Artificial Sequence
  Synthetic oligonucleotide
gctggaagacccggtagctctctttcatta

SEQ ID NO: 468380 - DNA, 30 bp, Artificial Sequence
  Synthetic oligonucleotide
aggccggttaatgtaaccgttgtttcatta

SEQ ID NO: 468381 - DNA, 30 bp, Artificial Sequence
  Synthetic oligonucleotide
aggagcggggccggctgtggataaagatta

SEQ ID NO: 468382 - DNA, 30 bp, Artificial Sequence
  Synthetic oligonucleotide
tgggagcaaagtgcccgtctcggcagatta

SEQ ID NO: 468383 - DNA, 30 bp, Artificial Sequence
  Synthetic oligonucleotide
caagatttctctggtaacgcaaagagatta

SEQ ID NO: 468384 - DNA, 30 bp, Artificial Sequence
  Synthetic oligonucleotide
ataaacgttttctattagttggcgagatta

SEQ ID NO: 468385 - DNA, 30 bp, Artificial Sequence
  Synthetic oligonucleotide
cacctgttttgcagacaatgagctagatta

SEQ ID NO: 468386 - DNA, 30 bp, Artificial Sequence
  Synthetic oligonucleotide
gtcctccgaaagcgttccgcttgtagatta

SEQ ID NO: 468387 - DNA, 30 bp, Artificial Sequence
  Synthetic oligonucleotide
ggtagttttgtagcatttgctatacgatta

SEQ ID NO: 468388 - DNA, 30 bp, Artificial Sequence
  Synthetic oligonucleotide
gaagttccagcggagcgacctaaccgatta

SEQ ID NO: 468389 - DNA, 30 bp, Artificial Sequence
  Synthetic oligonucleotide
cgtagattttcctgcccgcctctccgatta

SEQ ID NO: 468390 - DNA, 30 bp, Artificial Sequence
  Synthetic oligonucleotide
ggcgagtgacctcggtgccgctggcgatta

SEQ ID NO: 468391 - DNA, 27 bp, Artificial Sequence
  Synthetic oligonucleotide
agtatgtggccctgctcgttgcgatta

SEQ ID NO: 468392 - DNA, 30 bp, Artificial Sequence
  Synthetic oligonucleotide
atgttttttaaggcagtttaacctcgatta

SEQ ID NO: 468393 - DNA, 30 bp, Artificial Sequence
  Synthetic oligonucleotide
aagccattcgccccttgcactaaaggatta

SEQ ID NO: 468394 - DNA, 30 bp, Artificial Sequence
  Synthetic oligonucleotide
gacacaatttaggtttatcaggaaggatta

SEQ ID NO: 468395 - DNA, 30 bp, Artificial Sequence
  Synthetic oligonucleotide
gttttatacaattgggtcggataaggatta

SEQ ID NO: 468396 - DNA, 30 bp, Artificial Sequence
  Synthetic oligonucleotide
tggacctctgtgaacgaaaacgcaggatta

SEQ ID NO: 468397 - DNA, 30 bp, Artificial Sequence
  Synthetic oligonucleotide
gggttgtacaaggccctcaccaacggatta

SEQ ID NO: 468398 - DNA, 30 bp, Artificial Sequence
  Synthetic oligonucleotide
cggagggcaaaggctggacgatgcggatta

SEQ ID NO: 468399 - DNA, 30 bp, Artificial Sequence
  Synthetic oligonucleotide
ggaaaagctttttcgtgccgagtgggatta

SEQ ID NO: 468400 - DNA, 30 bp, Artificial Sequence
  Synthetic oligonucleotide
tgacccaagtggcaacgccacaatggatta

SEQ ID NO: 468401 - DNA, 30 bp, Artificial Sequence
  Synthetic oligonucleotide
ccgtcttagttttactaattacatggatta

SEQ ID NO: 468402 - DNA, 30 bp, Artificial Sequence
  Synthetic oligonucleotide
agactgagtggtttgcaacttcctggatta

SEQ ID NO: 468403 - DNA, 30 bp, Artificial Sequence
  Synthetic oligonucleotide
gctagttgacgtcttcaagcttaatgatta

SEQ ID NO: 468404 - DNA, 30 bp, Artificial Sequence
  Synthetic oligonucleotide
cgaaagccagagacgacaaatgcatgatta

SEQ ID NO: 468405 - DNA, 30 bp, Artificial Sequence
  Synthetic oligonucleotide
ggatataggccacatgaccttccctgatta

SEQ ID NO: 468406 - DNA, 30 bp, Artificial Sequence
  Synthetic oligonucleotide
aactggggcacttctatgtggtcgtgatta

SEQ ID NO: 468407 - DNA, 30 bp, Artificial Sequence
  Synthetic oligonucleotide
gccggtcaccgcttcgcaaacagttgatta

SEQ ID NO: 468408 - DNA, 30 bp, Artificial Sequence
  Synthetic oligonucleotide
cctttataagcaaaatattcataaatatta

SEQ ID NO: 468409 - DNA, 30 bp, Artificial Sequence
  Synthetic oligonucleotide
gcggccgggcggcacttgaccgtaatatta

SEQ ID NO: 468410 - DNA, 30 bp, Artificial Sequence
  Synthetic oligonucleotide
tcttaggccttatacagaacgttaatatta

SEQ ID NO: 468411 - DNA, 31 bp, Artificial Sequence
  Synthetic oligonucleotide
actcatgataagatactatcggtacatatta

SEQ ID NO: 468412 - DNA, 30 bp, Artificial Sequence
  Synthetic oligonucleotide
taacgtataaatcgttatgtaggcatatta

SEQ ID NO: 468413 - DNA, 30 bp, Artificial Sequence
  Synthetic oligonucleotide
taaaaagatttcttataacgagggatatta

SEQ ID NO: 468414 - DNA, 30 bp, Artificial Sequence
  Synthetic oligonucleotide
ttttacgaaattttctagttgctgatatta

SEQ ID NO: 468415 - DNA, 30 bp, Artificial Sequence
  Synthetic oligonucleotide
acgcagtaactttagggtttattgatatta

SEQ ID NO: 468416 - DNA, 30 bp, Artificial Sequence
  Synthetic oligonucleotide
aatccgatactgtctccctgtgatatatta

SEQ ID NO: 468417 - DNA, 30 bp, Artificial Sequence
  Synthetic oligonucleotide
agaattgttatatttgctatatgtatatta

SEQ ID NO: 468418 - DNA, 30 bp, Artificial Sequence
  Synthetic oligonucleotide
ccgataatttatctagacgtcattatatta

SEQ ID NO: 468419 - DNA, 30 bp, Artificial Sequence
  Synthetic oligonucleotide
aactctgcgagcgcatatcaggttatatta

SEQ ID NO: 468420 - DNA, 30 bp, Artificial Sequence
  Synthetic oligonucleotide
atgatggcgcaccataactaaaaactatta

SEQ ID NO: 468421 - DNA, 30 bp, Artificial Sequence
  Synthetic oligonucleotide
ggaataagtcactggctcaccgaactatta

SEQ ID NO: 468422 - DNA, 30 bp, Artificial Sequence
  Synthetic oligonucleotide
tttaacatataatcatttccgcgcctatta

SEQ ID NO: 468423 - DNA, 30 bp, Artificial Sequence
  Synthetic oligonucleotide
gcgctatcgtatacgggggctttcctatta

SEQ ID NO: 468424 - DNA, 30 bp, Artificial Sequence
  Synthetic oligonucleotide
tatgcgtattttaaacattacaggctatta

SEQ ID NO: 468425 - DNA, 30 bp, Artificial Sequence
  Synthetic oligonucleotide
ccgtctcaacgctaaccccgtggtctatta

SEQ ID NO: 468426 - DNA, 30 bp, Artificial Sequence
  Synthetic oligonucleotide
ctttcacttcgacttctatagtgtctatta

SEQ ID NO: 468427 - DNA, 30 bp, Artificial Sequence
  Synthetic oligonucleotide
aagttgcatatcaagatattgattctatta

SEQ ID NO: 468428 - DNA, 30 bp, Artificial Sequence
  Synthetic oligonucleotide
tgttttcccggctacggggcccaagtatta

SEQ ID NO: 468429 - DNA, 30 bp, Artificial Sequence
  Synthetic oligonucleotide
aaactctcagggcggataaacggagtatta

SEQ ID NO: 468430 - DNA, 30 bp, Artificial Sequence
  Synthetic oligonucleotide
taggtattagtcggggcgcagtgagtatta

SEQ ID NO: 468431 - DNA, 30 bp, Artificial Sequence
  Synthetic oligonucleotide
ggctggcggaactggtctacattcgtatta

SEQ ID NO: 468432 - DNA, 30 bp, Artificial Sequence
  Synthetic oligonucleotide
cattggtcaaggggtattttttgggtatta

SEQ ID NO: 468433 - DNA, 30 bp, Artificial Sequence
  Synthetic oligonucleotide
cttcataaatgggatacaagttctgtatta

SEQ ID NO: 468434 - DNA, 30 bp, Artificial Sequence
  Synthetic oligonucleotide
accattggggggacaaagtcaatattatta

SEQ ID NO: 468435 - DNA, 30 bp, Artificial Sequence
  Synthetic oligonucleotide
agttagtatgaaaagccgaatttcttatta

SEQ ID NO: 468436 - DNA, 30 bp, Artificial Sequence
  Synthetic oligonucleotide
tagtatgtgtagacatttatacagttatta

SEQ ID NO: 468437 - DNA, 30 bp, Artificial Sequence
  Synthetic oligonucleotide
aaaaggcctggctgcattatatagttatta

SEQ ID NO: 468438 - DNA, 30 bp, Artificial Sequence
  Synthetic oligonucleotide
acgaggctgaaggaatgtgggccgttatta

SEQ ID NO: 468439 - DNA, 30 bp, Artificial Sequence
  Synthetic oligonucleotide
gccggcagtacgttaatcgaagcgttatta

SEQ ID NO: 468440 - DNA, 30 bp, Artificial Sequence
  Synthetic oligonucleotide
attgagtcgacctcctatttatcgttatta

SEQ ID NO: 468441 - DNA, 29 bp, Artificial Sequence
  Synthetic oligonucleotide
ttcaaaaaagaatgttgtattggttatta

SEQ ID NO: 468442 - DNA, 30 bp, Artificial Sequence
  Synthetic oligonucleotide
aaccagactcaagctacttcttggttatta

SEQ ID NO: 468443 - DNA, 30 bp, Artificial Sequence
  Synthetic oligonucleotide
catcgtaggttggcggtggagttgttatta

SEQ ID NO: 468444 - DNA, 30 bp, Artificial Sequence
  Synthetic oligonucleotide
acggcaaatgcatctgccgtaaatttatta

SEQ ID NO: 468445 - DNA, 30 bp, Artificial Sequence
  Synthetic oligonucleotide
ctccgctaacgaaagtccccgtctttatta

SEQ ID NO: 468446 - DNA, 30 bp, Artificial Sequence
  Synthetic oligonucleotide
tcacttgcgaataacgctatatttttatta

SEQ ID NO: 468447 - DNA, 30 bp, Artificial Sequence
  Synthetic oligonucleotide
catagtcaagtagcgttatattttttatta

SEQ ID NO: 468448 - DNA, 30 bp, Artificial Sequence
  Synthetic oligonucleotide
gatatatccaattcgggcgttagacactta

SEQ ID NO: 468449 - DNA, 30 bp, Artificial Sequence
  Synthetic oligonucleotide
ccgcgtgaaggagagtagtcaggccactta

SEQ ID NO: 468450 - DNA, 30 bp, Artificial Sequence
  Synthetic oligonucleotide
aatgtgagaaccatttcacaggcgcactta

SEQ ID NO: 468451 - DNA, 30 bp, Artificial Sequence
  Synthetic oligonucleotide
tcccaattagcatacttgttgcggcactta

SEQ ID NO: 468452 - DNA, 34 bp, Artificial Sequence
  Synthetic oligonucleotide
tgttttccttcttacctttatgctgcgtcactta

SEQ ID NO: 468453 - DNA, 30 bp, Artificial Sequence
  Synthetic oligonucleotide
aaggataacgtcctgatccgctgagactta

SEQ ID NO: 468454 - DNA, 30 bp, Artificial Sequence
  Synthetic oligonucleotide
tgattctcgtaagcgttgcgtaatgactta

SEQ ID NO: 468455 - DNA, 30 bp, Artificial Sequence
  Synthetic oligonucleotide
acattgattgaacggatagcccctgactta

SEQ ID NO: 468456 - DNA, 30 bp, Artificial Sequence
  Synthetic oligonucleotide
tggggtagattatgcccaacatttgactta

SEQ ID NO: 468457 - DNA, 30 bp, Artificial Sequence
  Synthetic oligonucleotide
tatactccagtgtccgcacaaacatactta

SEQ ID NO: 468458 - DNA, 30 bp, Artificial Sequence
  Synthetic oligonucleotide
gatgtaaattaacctcttatggtatactta

SEQ ID NO: 468459 - DNA, 30 bp, Artificial Sequence
  Synthetic oligonucleotide
ttcggttgtgtacatgagtcggactactta

SEQ ID NO: 468460 - DNA, 30 bp, Artificial Sequence
  Synthetic oligonucleotide
cacgcgctaacaaatgccacaggctactta

SEQ ID NO: 468461 - DNA, 30 bp, Artificial Sequence
  Synthetic oligonucleotide
agcggcaaagagcctgcggcctggtactta

SEQ ID NO: 468462 - DNA, 30 bp, Artificial Sequence
  Synthetic oligonucleotide
ttaatacaggattgaagcaaggtgtactta

SEQ ID NO: 468463 - DNA, 30 bp, Artificial Sequence
  Synthetic oligonucleotide
tgggtctggacagcattcgggccttactta

SEQ ID NO: 468464 - DNA, 30 bp, Artificial Sequence
  Synthetic oligonucleotide
acatatgccccgctggtattttgttactta

SEQ ID NO: 468465 - DNA, 30 bp, Artificial Sequence
  Synthetic oligonucleotide
gtcttgccccagcgtagaaatacaacctta

SEQ ID NO: 468466 - DNA, 30 bp, Artificial Sequence
  Synthetic oligonucleotide
cacactctgagtgtttgtacgataacctta

SEQ ID NO: 468467 - DNA, 30 bp, Artificial Sequence
  Synthetic oligonucleotide
gcatctatggttcggcttatcctaacctta

SEQ ID NO: 468468 - DNA, 30 bp, Artificial Sequence
  Synthetic oligonucleotide
tgtcttttcactagggcaggtgctacctta

SEQ ID NO: 468469 - DNA, 30 bp, Artificial Sequence
  Synthetic oligonucleotide
accggacaccacggtccgatatcaccctta

SEQ ID NO: 468470 - DNA, 30 bp, Artificial Sequence
  Synthetic oligonucleotide
gtgagccaaatcgtagcaaagaccccctta

SEQ ID NO: 468471 - DNA, 30 bp, Artificial Sequence
  Synthetic oligonucleotide
actgtaatttcaatgggtcccccgccctta

SEQ ID NO: 468472 - DNA, 30 bp, Artificial Sequence
  Synthetic oligonucleotide
gtagtccagtgtaggtatttagttccctta

SEQ ID NO: 468473 - DNA, 30 bp, Artificial Sequence
  Synthetic oligonucleotide
tgaaattcctgtctctcacgtaacgcctta

SEQ ID NO: 468474 - DNA, 29 bp, Artificial Sequence
  Synthetic oligonucleotide
gggcgcatggtagtgagcttaccgcctta

SEQ ID NO: 468475 - DNA, 30 bp, Artificial Sequence
  Synthetic oligonucleotide
aacagcatgcataccgagccggaggcctta

SEQ ID NO: 468476 - DNA, 30 bp, Artificial Sequence
  Synthetic oligonucleotide
actcagatttgctactaagcaagggcctta

SEQ ID NO: 468477 - DNA, 30 bp, Artificial Sequence
  Synthetic oligonucleotide
aatgcgtctgctgtcccacaacttgcctta

SEQ ID NO: 468478 - DNA, 30 bp, Artificial Sequence
  Synthetic oligonucleotide
tgctcagctgtatatccgagagtatcctta

SEQ ID NO: 468479 - DNA, 30 bp, Artificial Sequence
  Synthetic oligonucleotide
caaaaatctccggccgtggggtcctcctta

SEQ ID NO: 468480 - DNA, 30 bp, Artificial Sequence
  Synthetic oligonucleotide
atcggtttcatagtctgtacgggctcctta

SEQ ID NO: 468481 - DNA, 30 bp, Artificial Sequence
  Synthetic oligonucleotide
cacgtgaaattagttaccggacagtcctta

SEQ ID NO: 468482 - DNA, 30 bp, Artificial Sequence
  Synthetic oligonucleotide
ggataacccaggatgatagtgcagtcctta

SEQ ID NO: 468483 - DNA, 30 bp, Artificial Sequence
  Synthetic oligonucleotide
ggtttagcccgacaatgttatgagtcctta

SEQ ID NO: 468484 - DNA, 30 bp, Artificial Sequence
  Synthetic oligonucleotide
tcatttaggggacggggataggattcctta

SEQ ID NO: 468485 - DNA, 30 bp, Artificial Sequence
  Synthetic oligonucleotide
gtgttttcctatggctcgccgacttcctta

SEQ ID NO: 468486 - DNA, 28 bp, Artificial Sequence
  Synthetic oligonucleotide
tggaatgcgtgtatttacgcgttcctta

SEQ ID NO: 468487 - DNA, 30 bp, Artificial Sequence
  Synthetic oligonucleotide
actctggtcccgccgaggccaatttcctta

SEQ ID NO: 468488 - DNA, 30 bp, Artificial Sequence
  Synthetic oligonucleotide
cttcgattcattcgacacaagttttcctta

SEQ ID NO: 468489 - DNA, 30 bp, Artificial Sequence
  Synthetic oligonucleotide
ataaaattgatgcgggcagttcgaagctta

SEQ ID NO: 468490 - DNA, 30 bp, Artificial Sequence
  Synthetic oligonucleotide
tgagctactatccctgagacgcatagctta

SEQ ID NO: 468491 - DNA, 30 bp, Artificial Sequence
  Synthetic oligonucleotide
aatttcatcattcccgtgggatgtagctta

SEQ ID NO: 468492 - DNA, 30 bp, Artificial Sequence
  Synthetic oligonucleotide
taatgcctgaaaaagtggcagattagctta

SEQ ID NO: 468493 - DNA, 30 bp, Artificial Sequence
  Synthetic oligonucleotide
gaaaacttccttgttgaggagcaacgctta

SEQ ID NO: 468494 - DNA, 30 bp, Artificial Sequence
  Synthetic oligonucleotide
cgaacttcaattcaccaccgcggacgctta

SEQ ID NO: 468495 - DNA, 30 bp, Artificial Sequence
  Synthetic oligonucleotide
caacgcagcgggttggccaagccccgctta

SEQ ID NO: 468496 - DNA, 30 bp, Artificial Sequence
  Synthetic oligonucleotide
aactgggacgtccatccataggagcgctta

SEQ ID NO: 468497 - DNA, 30 bp, Artificial Sequence
  Synthetic oligonucleotide
aaccatagtttggagcggaatcggcgctta

SEQ ID NO: 468498 - DNA, 29 bp, Artificial Sequence
  Synthetic oligonucleotide
aaccggagtgcagtatccggcatcgctta

SEQ ID NO: 468499 - DNA, 30 bp, Artificial Sequence
  Synthetic oligonucleotide
cggtgactagagggatatctcagtcgctta

SEQ ID NO: 468500 - DNA, 30 bp, Artificial Sequence
  Synthetic oligonucleotide
cacaaaggcagctatcagggggtaggctta

SEQ ID NO: 468501 - DNA, 30 bp, Artificial Sequence
  Synthetic oligonucleotide
atttccaagtcgactcagccgaagggctta

SEQ ID NO: 468502 - DNA, 30 bp, Artificial Sequence
  Synthetic oligonucleotide
ctatcgtctgttaagtggatcgcgggctta

SEQ ID NO: 468503 - DNA, 30 bp, Artificial Sequence
  Synthetic oligonucleotide
tttctaccctcgcgttagacggtgggctta

SEQ ID NO: 468504 - DNA, 30 bp, Artificial Sequence
  Synthetic oligonucleotide
gtttttacgaggataaatgaatatggctta

SEQ ID NO: 468505 - DNA, 30 bp, Artificial Sequence
  Synthetic oligonucleotide
gcgatacctaaaaacatttgcagtggctta

SEQ ID NO: 468506 - DNA, 30 bp, Artificial Sequence
  Synthetic oligonucleotide
attttctcagctgtatctacgcgtggctta

SEQ ID NO: 468507 - DNA, 30 bp, Artificial Sequence
  Synthetic oligonucleotide
atccgtacggtaagtccccccagatgctta

SEQ ID NO: 468508 - DNA, 30 bp, Artificial Sequence
  Synthetic oligonucleotide
gagctgtatacggcctattgcggatgctta

SEQ ID NO: 468509 - DNA, 30 bp, Artificial Sequence
  Synthetic oligonucleotide
tggtatcatagaggctttaggggttgctta

SEQ ID NO: 468510 - DNA, 30 bp, Artificial Sequence
  Synthetic oligonucleotide
cgaagtacaagcactaactattgttgctta

SEQ ID NO: 468511 - DNA, 30 bp, Artificial Sequence
  Synthetic oligonucleotide
gcaagaaccgcgcaggggcacttttgctta

SEQ ID NO: 468512 - DNA, 30 bp, Artificial Sequence
  Synthetic oligonucleotide
aatgaggtagaggcaccaccacaaatctta

SEQ ID NO: 468513 - DNA, 30 bp, Artificial Sequence
  Synthetic oligonucleotide
accatttctcgtactgcttacgccatctta

SEQ ID NO: 468514 - DNA, 30 bp, Artificial Sequence
  Synthetic oligonucleotide
tccgcaggagtctcagctaagcgcatctta

SEQ ID NO: 468515 - DNA, 30 bp, Artificial Sequence
  Synthetic oligonucleotide
tggtcctttaatgccccgggcggcatctta

SEQ ID NO: 468516 - DNA, 30 bp, Artificial Sequence
  Synthetic oligonucleotide
tgcttagattttttttttagaaagatctta

SEQ ID NO: 468517 - DNA, 30 bp, Artificial Sequence
  Synthetic oligonucleotide
acatgcgacagctatactttgaggatctta

SEQ ID NO: 468518 - DNA, 30 bp, Artificial Sequence
  Synthetic oligonucleotide
tgtttagagatcgccatgaagactatctta

SEQ ID NO: 468519 - DNA, 30 bp, Artificial Sequence
  Synthetic oligonucleotide
gttcaaattctgtgggaacagcaactctta

SEQ ID NO: 468520 - DNA, 30 bp, Artificial Sequence
  Synthetic oligonucleotide
gcctaataagaggatgggcgccacctctta

SEQ ID NO: 468521 - DNA, 30 bp, Artificial Sequence
  Synthetic oligonucleotide
gagtcacgcaatagattgaatttcctctta

SEQ ID NO: 468522 - DNA, 30 bp, Artificial Sequence
  Synthetic oligonucleotide
tgcatcagacaataccattcaccgctctta

SEQ ID NO: 468523 - DNA, 30 bp, Artificial Sequence
  Synthetic oligonucleotide
tatagggcccaacttctctgtccgctctta

SEQ ID NO: 468524 - DNA, 30 bp, Artificial Sequence
  Synthetic oligonucleotide
caggataggtcgggcttgttaaaagtctta

SEQ ID NO: 468525 - DNA, 30 bp, Artificial Sequence
  Synthetic oligonucleotide
atctaatcggatcaaacgcatctagtctta

SEQ ID NO: 468526 - DNA, 30 bp, Artificial Sequence
  Synthetic oligonucleotide
gtactgtcctattatgtaaatttagtctta

SEQ ID NO: 468527 - DNA, 30 bp, Artificial Sequence
  Synthetic oligonucleotide
cccttccaccgggggggctagggggtctta

SEQ ID NO: 468528 - DNA, 30 bp, Artificial Sequence
  Synthetic oligonucleotide
tatcgcatgcgaatttggcatactgtctta

SEQ ID NO: 468529 - DNA, 30 bp, Artificial Sequence
  Synthetic oligonucleotide
gtttaagtgggccgctaattggctgtctta

SEQ ID NO: 468530 - DNA, 30 bp, Artificial Sequence
  Synthetic oligonucleotide
tatacaatggtcatcgaagcaagtgtctta

SEQ ID NO: 468531 - DNA, 30 bp, Artificial Sequence
  Synthetic oligonucleotide
taatcaagtcacggtcagtgatttgtctta

SEQ ID NO: 468532 - DNA, 30 bp, Artificial Sequence
  Synthetic oligonucleotide
atccgtatgggtgatgaactgtttgtctta

SEQ ID NO: 468533 - DNA, 30 bp, Artificial Sequence
  Synthetic oligonucleotide
cgtttactttgctgcgacttttaattctta

SEQ ID NO: 468534 - DNA, 30 bp, Artificial Sequence
  Synthetic oligonucleotide
cgggcgtactttaagcaaccgagattctta

SEQ ID NO: 468535 - DNA, 30 bp, Artificial Sequence
  Synthetic oligonucleotide
attcgtttaagctatagcatcttattctta

SEQ ID NO: 468536 - DNA, 30 bp, Artificial Sequence
  Synthetic oligonucleotide
gaagattaggtacagaatgtagacttctta

SEQ ID NO: 468537 - DNA, 30 bp, Artificial Sequence
  Synthetic oligonucleotide
ttatctcaccagtatgtagtacgcttctta

SEQ ID NO: 468538 - DNA, 30 bp, Artificial Sequence
  Synthetic oligonucleotide
cggcgtttgatggaaggataggtcttctta

SEQ ID NO: 468539 - DNA, 30 bp, Artificial Sequence
  Synthetic oligonucleotide
ctttatgtggtcagacgagacaagttctta

SEQ ID NO: 468540 - DNA, 30 bp, Artificial Sequence
  Synthetic oligonucleotide
ccgtcgtctcattaagagacgaagttctta

SEQ ID NO: 468541 - DNA, 30 bp, Artificial Sequence
  Synthetic oligonucleotide
tcctaaatccttgggtatcacgggttctta

SEQ ID NO: 468542 - DNA, 31 bp, Artificial Sequence
  Synthetic oligonucleotide
tttgtttctaagatcgaaaggcgggttctta

SEQ ID NO: 468543 - DNA, 30 bp, Artificial Sequence
  Synthetic oligonucleotide
tagtccgatggccccgaattttatttctta

SEQ ID NO: 468544 - DNA, 30 bp, Artificial Sequence
  Synthetic oligonucleotide
gtttagcgtattcacacaaaggttttctta

SEQ ID NO: 468545 - DNA, 30 bp, Artificial Sequence
  Synthetic oligonucleotide
tggctaggcattttctttctgcgaaagtta

SEQ ID NO: 468546 - DNA, 30 bp, Artificial Sequence
  Synthetic oligonucleotide
acactttccgggttggcctttggaaagtta

SEQ ID NO: 468547 - DNA, 30 bp, Artificial Sequence
  Synthetic oligonucleotide
tacacagattaaatcgctattttcaagtta

SEQ ID NO: 468548 - DNA, 31 bp, Artificial Sequence
  Synthetic oligonucleotide
gcaatgagggatactgattgtcacgaagtta

SEQ ID NO: 468549 - DNA, 30 bp, Artificial Sequence
  Synthetic oligonucleotide
aactgcttcaatttgaaaggcatgaagtta

SEQ ID NO: 468550 - DNA, 30 bp, Artificial Sequence
  Synthetic oligonucleotide
cacgggcattcactgcactagatgaagtta

SEQ ID NO: 468551 - DNA, 30 bp, Artificial Sequence
  Synthetic oligonucleotide
accgtgaattcatagaacgataataagtta

SEQ ID NO: 468552 - DNA, 30 bp, Artificial Sequence
  Synthetic oligonucleotide
agtcttccagttctctttaatattaagtta

SEQ ID NO: 468553 - DNA, 30 bp, Artificial Sequence
  Synthetic oligonucleotide
gacgtatcgatagtttggaaatcacagtta

SEQ ID NO: 468554 - DNA, 30 bp, Artificial Sequence
  Synthetic oligonucleotide
acccctttagaactttagcgtgagcagtta

SEQ ID NO: 468555 - DNA, 30 bp, Artificial Sequence
  Synthetic oligonucleotide
cccatgtatctatagtctcgctcgcagtta

SEQ ID NO: 468556 - DNA, 30 bp, Artificial Sequence
  Synthetic oligonucleotide
gcctgctgttaagtcttacaggggcagtta

SEQ ID NO: 468557 - DNA, 30 bp, Artificial Sequence
  Synthetic oligonucleotide
ggtctgagtggtagagggtaccctcagtta

SEQ ID NO: 468558 - DNA, 30 bp, Artificial Sequence
  Synthetic oligonucleotide
ctccactcttaacatggggtcccagagtta

SEQ ID NO: 468559 - DNA, 30 bp, Artificial Sequence
  Synthetic oligonucleotide
gtttatacgtgaaagctcggatcagagtta

SEQ ID NO: 468560 - DNA, 30 bp, Artificial Sequence
  Synthetic oligonucleotide
tttaatcaattggccgggttgttagagtta

SEQ ID NO: 468561 - DNA, 30 bp, Artificial Sequence
  Synthetic oligonucleotide
ggtatgcttttacatgttaaatcggagtta

SEQ ID NO: 468562 - DNA, 30 bp, Artificial Sequence
  Synthetic oligonucleotide
ggatattggatggtatcccgtgtggagtta

SEQ ID NO: 468563 - DNA, 30 bp, Artificial Sequence
  Synthetic oligonucleotide
gtgtgtttgccatctttaatgcatgagtta

SEQ ID NO: 468564 - DNA, 30 bp, Artificial Sequence
  Synthetic oligonucleotide
cacgcaactcggctccgttgctctgagtta

SEQ ID NO: 468565 - DNA, 30 bp, Artificial Sequence
  Synthetic oligonucleotide
gggtcagcatactttagattgggtgagtta

SEQ ID NO: 468566 - DNA, 30 bp, Artificial Sequence
  Synthetic oligonucleotide
tatccccccgctcgggactttcaatagtta

SEQ ID NO: 468567 - DNA, 30 bp, Artificial Sequence
  Synthetic oligonucleotide
ggcacggggtgtaggtacctatgctagtta

SEQ ID NO: 468568 - DNA, 30 bp, Artificial Sequence
  Synthetic oligonucleotide
cctgtttgtggcacgaaggccccgtagtta

SEQ ID NO: 468569 - DNA, 30 bp, Artificial Sequence
  Synthetic oligonucleotide
tttgcttgttcaaccataggccggtagtta

SEQ ID NO: 468570 - DNA, 30 bp, Artificial Sequence
  Synthetic oligonucleotide
gtgtactaagctcctatgtgagattagtta

SEQ ID NO: 468571 - DNA, 30 bp, Artificial Sequence
  Synthetic oligonucleotide
aaacgtcacaatagccttcgcaaaacgtta

SEQ ID NO: 468572 - DNA, 30 bp, Artificial Sequence
  Synthetic oligonucleotide
acaggtctatgggtaaaggcgacaacgtta

SEQ ID NO: 468573 - DNA, 30 bp, Artificial Sequence
  Synthetic oligonucleotide
ccgcgagctcacgggcaagatgcaacgtta

SEQ ID NO: 468574 - DNA, 30 bp, Artificial Sequence
  Synthetic oligonucleotide
catgaatttccttagctggtgagaacgtta

SEQ ID NO: 468575 - DNA, 30 bp, Artificial Sequence
  Synthetic oligonucleotide
aattgaatttggcggtgggttcgcacgtta

SEQ ID NO: 468576 - DNA, 30 bp, Artificial Sequence
  Synthetic oligonucleotide
tctcttttaaaggattattttggcacgtta

SEQ ID NO: 468577 - DNA, 30 bp, Artificial Sequence
  Synthetic oligonucleotide
gggagtaactgacgtgtctggctcacgtta

SEQ ID NO: 468578 - DNA, 30 bp, Artificial Sequence
  Synthetic oligonucleotide
aattacacttcgtgtgactttgcgacgtta

SEQ ID NO: 468579 - DNA, 30 bp, Artificial Sequence
  Synthetic oligonucleotide
tcaaagtaatgctcagcttctatgacgtta

SEQ ID NO: 468580 - DNA, 30 bp, Artificial Sequence
  Synthetic oligonucleotide
aacaaagacgtccgacgttcgataccgtta

SEQ ID NO: 468581 - DNA, 30 bp, Artificial Sequence
  Synthetic oligonucleotide
gatttaacatcactgtatgatataccgtta

SEQ ID NO: 468582 - DNA, 30 bp, Artificial Sequence
  Synthetic oligonucleotide
gttcaaaccaaggcactcgggaccccgtta

SEQ ID NO: 468583 - DNA, 30 bp, Artificial Sequence
  Synthetic oligonucleotide
aagcttcttgcgctgccgatcacagcgtta

SEQ ID NO: 468584 - DNA, 30 bp, Artificial Sequence
  Synthetic oligonucleotide
gcggacttcagccaacgatcggcagcgtta

SEQ ID NO: 468585 - DNA, 30 bp, Artificial Sequence
  Synthetic oligonucleotide
ggtctgtagatactgaattgaagagcgtta

SEQ ID NO: 468586 - DNA, 30 bp, Artificial Sequence
  Synthetic oligonucleotide
agcggccccggacctatagtggacgcgtta

SEQ ID NO: 468587 - DNA, 30 bp, Artificial Sequence
  Synthetic oligonucleotide
ccgcaagcagtatcttggtagacggcgtta

SEQ ID NO: 468588 - DNA, 30 bp, Artificial Sequence
  Synthetic oligonucleotide
cgtagcaactcctaatatttcagggcgtta

SEQ ID NO: 468589 - DNA, 30 bp, Artificial Sequence
  Synthetic oligonucleotide
ataaagatgcagtgtacgactcgggcgtta

SEQ ID NO: 468590 - DNA, 30 bp, Artificial Sequence
  Synthetic oligonucleotide
atccgtcgatgcggagtccacctggcgtta

SEQ ID NO: 468591 - DNA, 30 bp, Artificial Sequence
  Synthetic oligonucleotide
atctgctgcgaaacatgcctcgtggcgtta

SEQ ID NO: 468592 - DNA, 30 bp, Artificial Sequence
  Synthetic oligonucleotide
gatcggggtaacggccacgacagtgcgtta

SEQ ID NO: 468593 - DNA, 30 bp, Artificial Sequence
  Synthetic oligonucleotide
gccactaatcggagcggtactgttgcgtta

SEQ ID NO: 468594 - DNA, 30 bp, Artificial Sequence
  Synthetic oligonucleotide
tggctttaacacgccgcttagtcatcgtta

SEQ ID NO: 468595 - DNA, 30 bp, Artificial Sequence
  Synthetic oligonucleotide
cttttggaaagattccgtgaacgatcgtta

SEQ ID NO: 468596 - DNA, 30 bp, Artificial Sequence
  Synthetic oligonucleotide
atactgggtaaagtcgtaactgcttcgtta

SEQ ID NO: 468597 - DNA, 30 bp, Artificial Sequence
  Synthetic oligonucleotide
atcccgactgccgaaagcgagagttcgtta

SEQ ID NO: 468598 - DNA, 30 bp, Artificial Sequence
  Synthetic oligonucleotide
cgtgtcaccaattatacgtgaaaaaggtta

SEQ ID NO: 468599 - DNA, 30 bp, Artificial Sequence
  Synthetic oligonucleotide
aatataattagtcgtgtcagaacaaggtta

SEQ ID NO: 468600 - DNA, 30 bp, Artificial Sequence
  Synthetic oligonucleotide
gagtatctctcggggcgttagccaaggtta

SEQ ID NO: 468601 - DNA, 30 bp, Artificial Sequence
  Synthetic oligonucleotide
ttatgtcagcgtttgacaatatcaaggtta

SEQ ID NO: 468602 - DNA, 30 bp, Artificial Sequence
  Synthetic oligonucleotide
gtctatcatagcaatacgccatccaggtta

SEQ ID NO: 468603 - DNA, 30 bp, Artificial Sequence
  Synthetic oligonucleotide
gcccggatatggggtatgtccttcaggtta

SEQ ID NO: 468604 - DNA, 30 bp, Artificial Sequence
  Synthetic oligonucleotide
caaagtgtaggcgcggaaccacagaggtta

SEQ ID NO: 468605 - DNA, 30 bp, Artificial Sequence
  Synthetic oligonucleotide
agaaggcagcattagaaagtcgagaggtta

SEQ ID NO: 468606 - DNA, 30 bp, Artificial Sequence
  Synthetic oligonucleotide
gcgtaacattaccccccctttaggaggtta

SEQ ID NO: 468607 - DNA, 30 bp, Artificial Sequence
  Synthetic oligonucleotide
ttacatctctaataacgttctttgaggtta

SEQ ID NO: 468608 - DNA, 30 bp, Artificial Sequence
  Synthetic oligonucleotide
ttatggcttggcgaagcattacgtaggtta

SEQ ID NO: 468609 - DNA, 30 bp, Artificial Sequence
  Synthetic oligonucleotide
aatttggagtatctttgcattcaacggtta

SEQ ID NO: 468610 - DNA, 30 bp, Artificial Sequence
  Synthetic oligonucleotide
gtcgtaccagctaggtaatgaccacggtta

SEQ ID NO: 468611 - DNA, 30 bp, Artificial Sequence
  Synthetic oligonucleotide
ggcaagtgatagtcgtaatttctacggtta

SEQ ID NO: 468612 - DNA, 30 bp, Artificial Sequence
  Synthetic oligonucleotide
gggataaacggggtaggtatctcccggtta

SEQ ID NO: 468613 - DNA, 30 bp, Artificial Sequence
  Synthetic oligonucleotide
acaagcctaaataaagtctagtgccggtta

SEQ ID NO: 468614 - DNA, 30 bp, Artificial Sequence
  Synthetic oligonucleotide
tatctgctatactgcagctggcagcggtta

SEQ ID NO: 468615 - DNA, 30 bp, Artificial Sequence
  Synthetic oligonucleotide
ctaaatgtataagcatgcacgtagcggtta

SEQ ID NO: 468616 - DNA, 30 bp, Artificial Sequence
  Synthetic oligonucleotide
aatccaacgttgatgagtagtccgcggtta

SEQ ID NO: 468617 - DNA, 30 bp, Artificial Sequence
  Synthetic oligonucleotide
tcctctatggaaccctgcgactggcggtta

SEQ ID NO: 468618 - DNA, 30 bp, Artificial Sequence
  Synthetic oligonucleotide
ttgtgagaaatttcagctaaatgtcggtta

SEQ ID NO: 468619 - DNA, 30 bp, Artificial Sequence
  Synthetic oligonucleotide
aggtacggtcggttgtggcgcaaagggtta

SEQ ID NO: 468620 - DNA, 30 bp, Artificial Sequence
  Synthetic oligonucleotide
atcccttcacgccctagttgtaaagggtta

SEQ ID NO: 468621 - DNA, 30 bp, Artificial Sequence
  Synthetic oligonucleotide
aacccttggataggcatctgggcagggtta

SEQ ID NO: 468622 - DNA, 30 bp, Artificial Sequence
  Synthetic oligonucleotide
aaagcgaactgcctaattgagtcagggtta

SEQ ID NO: 468623 - DNA, 30 bp, Artificial Sequence
  Synthetic oligonucleotide
taataatcaccgggtgtagcgcacgggtta

SEQ ID NO: 468624 - DNA, 30 bp, Artificial Sequence
  Synthetic oligonucleotide
cgaaacgcgtgccatgtgtccttcgggtta

SEQ ID NO: 468625 - DNA, 30 bp, Artificial Sequence
  Synthetic oligonucleotide
acgaagaggtgaatatgttcgacggggtta

SEQ ID NO: 468626 - DNA, 30 bp, Artificial Sequence
  Synthetic oligonucleotide
catctccccacgatgtattagggggggtta

SEQ ID NO: 468627 - DNA, 30 bp, Artificial Sequence
  Synthetic oligonucleotide
agagctggcagacggtcctacctggggtta

SEQ ID NO: 468628 - DNA, 30 bp, Artificial Sequence
  Synthetic oligonucleotide
taaaccgcattcaatcgcataaatgggtta

SEQ ID NO: 468629 - DNA, 30 bp, Artificial Sequence
  Synthetic oligonucleotide
cggatcagggtacactccatcactgggtta

SEQ ID NO: 468630 - DNA, 30 bp, Artificial Sequence
  Synthetic oligonucleotide
gggggactcaccgtgaactatattgggtta

SEQ ID NO: 468631 - DNA, 30 bp, Artificial Sequence
  Synthetic oligonucleotide
gaaacgcatgttttgctcagacttgggtta

SEQ ID NO: 468632 - DNA, 30 bp, Artificial Sequence
  Synthetic oligonucleotide
ggttaagtctggaggttgagctttgggtta

SEQ ID NO: 468633 - DNA, 30 bp, Artificial Sequence
  Synthetic oligonucleotide
tgatattggtgtccgccgagaagatggtta

SEQ ID NO: 468634 - DNA, 30 bp, Artificial Sequence
  Synthetic oligonucleotide
aggtttgtaaagtatacccacggatggtta

SEQ ID NO: 468635 - DNA, 30 bp, Artificial Sequence
  Synthetic oligonucleotide
gcagccaaccccgcaggtcaagactggtta

SEQ ID NO: 468636 - DNA, 30 bp, Artificial Sequence
  Synthetic oligonucleotide
atctagcattgtcctcattgtcagtggtta

SEQ ID NO: 468637 - DNA, 30 bp, Artificial Sequence
  Synthetic oligonucleotide
tttgaggatgctgaatccctgtggtggtta

SEQ ID NO: 468638 - DNA, 30 bp, Artificial Sequence
  Synthetic oligonucleotide
gaaacaaaagattctggtctcgtgtggtta

SEQ ID NO: 468639 - DNA, 31 bp, Artificial Sequence
  Synthetic oligonucleotide
attcgcaggtaattggtgcatgttgtggtta

SEQ ID NO: 468640 - DNA, 30 bp, Artificial Sequence
  Synthetic oligonucleotide
ttcgtatattgggaatgtccctattggtta

SEQ ID NO: 468641 - DNA, 30 bp, Artificial Sequence
  Synthetic oligonucleotide
gtgatgatcgcgttaaccactagttggtta

SEQ ID NO: 468642 - DNA, 30 bp, Artificial Sequence
  Synthetic oligonucleotide
acatcgtaaaaagatgggactcgcatgtta

SEQ ID NO: 468643 - DNA, 30 bp, Artificial Sequence
  Synthetic oligonucleotide
cacttgagcatatggatcagtacgatgtta

SEQ ID NO: 468644 - DNA, 30 bp, Artificial Sequence
  Synthetic oligonucleotide
atataacacctgtccaacttcgggatgtta

SEQ ID NO: 468645 - DNA, 30 bp, Artificial Sequence
  Synthetic oligonucleotide
acctagtctactttgagtatagatatgtta

SEQ ID NO: 468646 - DNA, 30 bp, Artificial Sequence
  Synthetic oligonucleotide
tgcttcatacatcctatagaacgtatgtta

SEQ ID NO: 468647 - DNA, 30 bp, Artificial Sequence
  Synthetic oligonucleotide
agggtgctctttagactcgcgtgtatgtta

SEQ ID NO: 468648 - DNA, 30 bp, Artificial Sequence
  Synthetic oligonucleotide
gaggttcatttgagagactgaattatgtta

SEQ ID NO: 468649 - DNA, 30 bp, Artificial Sequence
  Synthetic oligonucleotide
ggtagaatggaggcgtgagggatactgtta

SEQ ID NO: 468650 - DNA, 30 bp, Artificial Sequence
  Synthetic oligonucleotide
gtttaggatcagacggactcgaacctgtta

SEQ ID NO: 468651 - DNA, 30 bp, Artificial Sequence
  Synthetic oligonucleotide
caggaacgtcaggttgacgttcgcctgtta

SEQ ID NO: 468652 - DNA, 30 bp, Artificial Sequence
  Synthetic oligonucleotide
tacccgttgtaactgatctggatcctgtta

SEQ ID NO: 468653 - DNA, 30 bp, Artificial Sequence
  Synthetic oligonucleotide
agatacctcagtcacgtgcgcccgctgtta

SEQ ID NO: 468654 - DNA, 30 bp, Artificial Sequence
  Synthetic oligonucleotide
cggggtaatcctgacggcagccggctgtta

SEQ ID NO: 468655 - DNA, 30 bp, Artificial Sequence
  Synthetic oligonucleotide
ctatcccgtacattggtatgcatgctgtta

SEQ ID NO: 468656 - DNA, 30 bp, Artificial Sequence
  Synthetic oligonucleotide
atctttgtgccttctacgtgctatctgtta

SEQ ID NO: 468657 - DNA, 30 bp, Artificial Sequence
  Synthetic oligonucleotide
cccgcctgatctaaagtactgactctgtta

SEQ ID NO: 468658 - DNA, 30 bp, Artificial Sequence
  Synthetic oligonucleotide
tgttccacctagtcatagtgaagtctgtta

SEQ ID NO: 468659 - DNA, 30 bp, Artificial Sequence
  Synthetic oligonucleotide
tatgtatgtgtcgtaagtacaggtctgtta

SEQ ID NO: 468660 - DNA, 30 bp, Artificial Sequence
  Synthetic oligonucleotide
ccagtcagaaatgcaccccatgccgtgtta

SEQ ID NO: 468661 - DNA, 30 bp, Artificial Sequence
  Synthetic oligonucleotide
aagctttctgcagttcaccgctaggtgtta

SEQ ID NO: 468662 - DNA, 30 bp, Artificial Sequence
  Synthetic oligonucleotide
tctgtaatcaagcattaccttaatgtgtta

SEQ ID NO: 468663 - DNA, 30 bp, Artificial Sequence
  Synthetic oligonucleotide
tccctgctcgtgagactagcaggattgtta

SEQ ID NO: 468664 - DNA, 30 bp, Artificial Sequence
  Synthetic oligonucleotide
ttcggtttgtggttgttaatcgtattgtta

SEQ ID NO: 468665 - DNA, 30 bp, Artificial Sequence
  Synthetic oligonucleotide
ctacgaaagtcttgtctggaaagtttgtta

SEQ ID NO: 468666 - DNA, 30 bp, Artificial Sequence
  Synthetic oligonucleotide
tgaaggtggtggccatgagagacaaattta

SEQ ID NO: 468667 - DNA, 30 bp, Artificial Sequence
  Synthetic oligonucleotide
aattgagcgtccgtcccagtagagaattta

SEQ ID NO: 468668 - DNA, 30 bp, Artificial Sequence
  Synthetic oligonucleotide
ggtgagcaacactagtaacgatcgaattta

SEQ ID NO: 468669 - DNA, 30 bp, Artificial Sequence
  Synthetic oligonucleotide
tccgaagcttcatctggccggtcgaattta

SEQ ID NO: 468670 - DNA, 30 bp, Artificial Sequence
  Synthetic oligonucleotide
tgtcaactcgatgcacggagcaggaattta

SEQ ID NO: 468671 - DNA, 30 bp, Artificial Sequence
  Synthetic oligonucleotide
gtcgcagcctagtaataaaagtggaattta

SEQ ID NO: 468672 - DNA, 30 bp, Artificial Sequence
  Synthetic oligonucleotide
gaaaagtcaatgcctataggtctgaattta

SEQ ID NO: 468673 - DNA, 30 bp, Artificial Sequence
  Synthetic oligonucleotide
aatagttactaagctaacatgtataattta

SEQ ID NO: 468674 - DNA, 30 bp, Artificial Sequence
  Synthetic oligonucleotide
aaacgcccactgcaggcgccgacacattta

SEQ ID NO: 468675 - DNA, 30 bp, Artificial Sequence
  Synthetic oligonucleotide
gaataaacagacggatcaaatatacattta

SEQ ID NO: 468676 - DNA, 30 bp, Artificial Sequence
  Synthetic oligonucleotide
gaaagcatttggagttttacaaaccattta

SEQ ID NO: 468677 - DNA, 30 bp, Artificial Sequence
  Synthetic oligonucleotide
tatcgctttactgaaagaagctcccattta

SEQ ID NO: 468678 - DNA, 30 bp, Artificial Sequence
  Synthetic oligonucleotide
tcatttcgtataggaaaaggttcccattta

SEQ ID NO: 468679 - DNA, 30 bp, Artificial Sequence
  Synthetic oligonucleotide
aatggtaaatcgttactaagaccgcattta

SEQ ID NO: 468680 - DNA, 30 bp, Artificial Sequence
  Synthetic oligonucleotide
taaagtatgccgtccgttctgaggcattta

SEQ ID NO: 468681 - DNA, 30 bp, Artificial Sequence
  Synthetic oligonucleotide
ttatacttgatagatatgggagtgcattta

SEQ ID NO: 468682 - DNA, 30 bp, Artificial Sequence
  Synthetic oligonucleotide
tgcgtcaagataatagtctttgatcattta

SEQ ID NO: 468683 - DNA, 30 bp, Artificial Sequence
  Synthetic oligonucleotide
tattctatggtcatgacttgatctcattta

SEQ ID NO: 468684 - DNA, 30 bp, Artificial Sequence
  Synthetic oligonucleotide
atacccttgaggttctgatcttttcattta

SEQ ID NO: 468685 - DNA, 30 bp, Artificial Sequence
  Synthetic oligonucleotide
aaggaggctctggtgtttatgacagattta

SEQ ID NO: 468686 - DNA, 30 bp, Artificial Sequence
  Synthetic oligonucleotide
aagcgtccatgggcaccggaccgagattta

SEQ ID NO: 468687 - DNA, 30 bp, Artificial Sequence
  Synthetic oligonucleotide
tgctaacgctagtatagtaatgacgattta

SEQ ID NO: 468688 - DNA, 30 bp, Artificial Sequence
  Synthetic oligonucleotide
gcagcaatagcgtagtgcagcatcgattta

SEQ ID NO: 468689 - DNA, 30 bp, Artificial Sequence
  Synthetic oligonucleotide
ctcagagaccagacccgtcgttgggattta

SEQ ID NO: 468690 - DNA, 30 bp, Artificial Sequence
  Synthetic oligonucleotide
atctgggtcttataatggagcactgattta

SEQ ID NO: 468691 - DNA, 30 bp, Artificial Sequence
  Synthetic oligonucleotide
ctatagacgtcgctcgcagtcactgattta

SEQ ID NO: 468692 - DNA, 30 bp, Artificial Sequence
  Synthetic oligonucleotide
aaaacgcagatcgtcacaggcagtgattta

SEQ ID NO: 468693 - DNA, 30 bp, Artificial Sequence
  Synthetic oligonucleotide
tattaatatacctacgggacatgtgattta

SEQ ID NO: 468694 - DNA, 30 bp, Artificial Sequence
  Synthetic oligonucleotide
ttaatctgaaaatatgttggtcttgattta

SEQ ID NO: 468695 - DNA, 30 bp, Artificial Sequence
  Synthetic oligonucleotide
caccgggattgtattgatacaaaatattta

SEQ ID NO: 468696 - DNA, 30 bp, Artificial Sequence
  Synthetic oligonucleotide
tgtgcagatcgggcacgcacagaatattta

SEQ ID NO: 468697 - DNA, 30 bp, Artificial Sequence
  Synthetic oligonucleotide
tgtgtgcttgagaattagtcgagatattta

SEQ ID NO: 468698 - DNA, 30 bp, Artificial Sequence
  Synthetic oligonucleotide
tcactcacatacttgaaagtaggatattta

SEQ ID NO: 468699 - DNA, 30 bp, Artificial Sequence
  Synthetic oligonucleotide
acctcgtatatgtaaagaagcggatattta

SEQ ID NO: 468700 - DNA, 30 bp, Artificial Sequence
  Synthetic oligonucleotide
ccagtgtaagctaaactcggcttatattta

SEQ ID NO: 468701 - DNA, 30 bp, Artificial Sequence
  Synthetic oligonucleotide
gtgcaaatttggtagagaacaacctattta

SEQ ID NO: 468702 - DNA, 30 bp, Artificial Sequence
  Synthetic oligonucleotide
aatccgctagtaagaatatgctcctattta

SEQ ID NO: 468703 - DNA, 29 bp, Artificial Sequence
  Synthetic oligonucleotide
ataaattgtgagggttagtacgctattta

SEQ ID NO: 468704 - DNA, 30 bp, Artificial Sequence
  Synthetic oligonucleotide
ttctgatcctggtaccgcaaaacgtattta

SEQ ID NO: 468705 - DNA, 30 bp, Artificial Sequence
  Synthetic oligonucleotide
cgggcacggtctcgggcgggctcgtattta

SEQ ID NO: 468706 - DNA, 30 bp, Artificial Sequence
  Synthetic oligonucleotide
ccaaattatagttgtgccgagtcgtattta

SEQ ID NO: 468707 - DNA, 30 bp, Artificial Sequence
  Synthetic oligonucleotide
tgctacacgaccgtttctgataggtattta

SEQ ID NO: 468708 - DNA, 30 bp, Artificial Sequence
  Synthetic oligonucleotide
atgatcttgactcactctagagattattta

SEQ ID NO: 468709 - DNA, 30 bp, Artificial Sequence
  Synthetic oligonucleotide
gaatcaattttatagcgccggtattattta

SEQ ID NO: 468710 - DNA, 30 bp, Artificial Sequence
  Synthetic oligonucleotide
cagtattgcagagtctcaacgatttattta

SEQ ID NO: 468711 - DNA, 30 bp, Artificial Sequence
  Synthetic oligonucleotide
ggattcatagacaagtatgcagtttattta

SEQ ID NO: 468712 - DNA, 30 bp, Artificial Sequence
  Synthetic oligonucleotide
gcataacaaggtacgttatttgaaacttta

SEQ ID NO: 468713 - DNA, 30 bp, Artificial Sequence
  Synthetic oligonucleotide
gaaataggtcctcagacgcttacaacttta

SEQ ID NO: 468714 - DNA, 30 bp, Artificial Sequence
  Synthetic oligonucleotide
gctaacgccattccgggattaaacacttta

SEQ ID NO: 468715 - DNA, 30 bp, Artificial Sequence
  Synthetic oligonucleotide
ccctaatagcggaatggggtccacacttta

SEQ ID NO: 468716 - DNA, 30 bp, Artificial Sequence
  Synthetic oligonucleotide
tggttgcgtgttaggccatcgtacacttta

SEQ ID NO: 468717 - DNA, 30 bp, Artificial Sequence
  Synthetic oligonucleotide
caagacggccttttaattcgcagcacttta

SEQ ID NO: 468718 - DNA, 30 bp, Artificial Sequence
  Synthetic oligonucleotide
taatctccgggatgatggcgccagacttta

SEQ ID NO: 468719 - DNA, 30 bp, Artificial Sequence
  Synthetic oligonucleotide
attcaggaagccccgcaaggaccgacttta

SEQ ID NO: 468720 - DNA, 30 bp, Artificial Sequence
  Synthetic oligonucleotide
ttgtctagaacacggagccacaggacttta

SEQ ID NO: 468721 - DNA, 30 bp, Artificial Sequence
  Synthetic oligonucleotide
acggtcttttttggcagagtatggacttta

SEQ ID NO: 468722 - DNA, 30 bp, Artificial Sequence
  Synthetic oligonucleotide
gactccgggatggtactattggtgacttta

SEQ ID NO: 468723 - DNA, 30 bp, Artificial Sequence
  Synthetic oligonucleotide
cgcccacttcagatgggcgacactacttta

SEQ ID NO: 468724 - DNA, 30 bp, Artificial Sequence
  Synthetic oligonucleotide
gttcttgagtaacggttgggaagtacttta

SEQ ID NO: 468725 - DNA, 30 bp, Artificial Sequence
  Synthetic oligonucleotide
ttaggattgcctggcttaaccagtacttta

SEQ ID NO: 468726 - DNA, 30 bp, Artificial Sequence
  Synthetic oligonucleotide
gacacctgactgcaacagaaggttacttta

SEQ ID NO: 468727 - DNA, 30 bp, Artificial Sequence
  Synthetic oligonucleotide
ttccctattgggagagtgtccaaaccttta

SEQ ID NO: 468728 - DNA, 30 bp, Artificial Sequence
  Synthetic oligonucleotide
tgtttatgctggtgtcaacccgaaccttta

SEQ ID NO: 468729 - DNA, 30 bp, Artificial Sequence
  Synthetic oligonucleotide
tttgcaagtcgtcaaaaaaccccaccttta

SEQ ID NO: 468730 - DNA, 30 bp, Artificial Sequence
  Synthetic oligonucleotide
agctctgtaaccgtggctcttccaccttta

SEQ ID NO: 468731 - DNA, 30 bp, Artificial Sequence
  Synthetic oligonucleotide
cataccaggttcatgaatctcataccttta

SEQ ID NO: 468732 - DNA, 31 bp, Artificial Sequence
  Synthetic oligonucleotide
caccgtgtccatgttttccttcttaccttta

SEQ ID NO: 468733 - DNA, 29 bp, Artificial Sequence
  Synthetic oligonucleotide
ccgtgtccatgttttccttcttaccttta

SEQ ID NO: 468734 - DNA, 30 bp, Artificial Sequence
  Synthetic oligonucleotide
acactagatgcacgcgaaaatttaccttta

SEQ ID NO: 468735 - DNA, 30 bp, Artificial Sequence
  Synthetic oligonucleotide
tctcagccctgtgttccggatttaccttta

SEQ ID NO: 468736 - DNA, 30 bp, Artificial Sequence
  Synthetic oligonucleotide
gttcgtgcgaccggcaggacgaacccttta

SEQ ID NO: 468737 - DNA, 30 bp, Artificial Sequence
  Synthetic oligonucleotide
tccacgtgagtgtagcatcaatacccttta

SEQ ID NO: 468738 - DNA, 30 bp, Artificial Sequence
  Synthetic oligonucleotide
ggcgttttcgtcagcaacgccgccccttta

SEQ ID NO: 468739 - DNA, 30 bp, Artificial Sequence
  Synthetic oligonucleotide
caatgctagtttagcgatagcatcccttta

SEQ ID NO: 468740 - DNA, 30 bp, Artificial Sequence
  Synthetic oligonucleotide
ggctgtggtacgtaagggttcgggccttta

SEQ ID NO: 468741 - DNA, 30 bp, Artificial Sequence
  Synthetic oligonucleotide
ctatctcctcattgttttttatctccttta

SEQ ID NO: 468742 - DNA, 30 bp, Artificial Sequence
  Synthetic oligonucleotide
tcctgtctatgggaagcaagttctccttta

SEQ ID NO: 468743 - DNA, 30 bp, Artificial Sequence
  Synthetic oligonucleotide
gtaacgcatgtacagcgggcgattccttta

SEQ ID NO: 468744 - DNA, 30 bp, Artificial Sequence
  Synthetic oligonucleotide
ggtaatcatatggattagccttaagcttta

SEQ ID NO: 468745 - DNA, 30 bp, Artificial Sequence
  Synthetic oligonucleotide
gataaaaaacagtcgcatcttgtagcttta

SEQ ID NO: 468746 - DNA, 30 bp, Artificial Sequence
  Synthetic oligonucleotide
acctgagagagcagtccacacggcgcttta

SEQ ID NO: 468747 - DNA, 30 bp, Artificial Sequence
  Synthetic oligonucleotide
gttggcagccaggtgaacccctgcgcttta

SEQ ID NO: 468748 - DNA, 30 bp, Artificial Sequence
  Synthetic oligonucleotide
atgggaaaagaatggacacgcaaggcttta

SEQ ID NO: 468749 - DNA, 30 bp, Artificial Sequence
  Synthetic oligonucleotide
ctctgaactccatataaaacccaggcttta

SEQ ID NO: 468750 - DNA, 30 bp, Artificial Sequence
  Synthetic oligonucleotide
atacataggagaagcactacccaggcttta

SEQ ID NO: 468751 - DNA, 30 bp, Artificial Sequence
  Synthetic oligonucleotide
gcaatagcttggatgcggctgcaggcttta

SEQ ID NO: 468752 - DNA, 30 bp, Artificial Sequence
  Synthetic oligonucleotide
tctattatatatagtgctttgcaggcttta

SEQ ID NO: 468753 - DNA, 30 bp, Artificial Sequence
  Synthetic oligonucleotide
tcaataatcaatatagcaaatgcggcttta

SEQ ID NO: 468754 - DNA, 30 bp, Artificial Sequence
  Synthetic oligonucleotide
accttttagttccactccaggatatcttta

SEQ ID NO: 468755 - DNA, 30 bp, Artificial Sequence
  Synthetic oligonucleotide
ttcgttggattaaagcctgcattatcttta

SEQ ID NO: 468756 - DNA, 30 bp, Artificial Sequence
  Synthetic oligonucleotide
gatcgataggtgctgccggtaggctcttta

SEQ ID NO: 468757 - DNA, 30 bp, Artificial Sequence
  Synthetic oligonucleotide
atctgtcgggtaagtgcgacgacgtcttta

SEQ ID NO: 468758 - DNA, 30 bp, Artificial Sequence
  Synthetic oligonucleotide
cgaatttgcaacgcaactatttcgtcttta

SEQ ID NO: 468759 - DNA, 30 bp, Artificial Sequence
  Synthetic oligonucleotide
gtgcgaaggtttggcgtcacacggtcttta

SEQ ID NO: 468760 - DNA, 30 bp, Artificial Sequence
  Synthetic oligonucleotide
gtactaaccttatctctggggtggtcttta

SEQ ID NO: 468761 - DNA, 30 bp, Artificial Sequence
  Synthetic oligonucleotide
tgcactgagtccggcggaagtcattcttta

SEQ ID NO: 468762 - DNA, 30 bp, Artificial Sequence
  Synthetic oligonucleotide
caaatatagcggattcaaatatcttcttta

SEQ ID NO: 468763 - DNA, 30 bp, Artificial Sequence
  Synthetic oligonucleotide
tcacgtcactcccggtccggcatttcttta

SEQ ID NO: 468764 - DNA, 30 bp, Artificial Sequence
  Synthetic oligonucleotide
ttatggttgatgcttcaaagagaaagttta

SEQ ID NO: 468765 - DNA, 30 bp, Artificial Sequence
  Synthetic oligonucleotide
tataaatgggtcctacgacatgcaagttta

SEQ ID NO: 468766 - DNA, 30 bp, Artificial Sequence
  Synthetic oligonucleotide
acgcagcagaagcgcgagcaatgaagttta

SEQ ID NO: 468767 - DNA, 30 bp, Artificial Sequence
  Synthetic oligonucleotide
ttctccataattatatactaaaccagttta

SEQ ID NO: 468768 - DNA, 30 bp, Artificial Sequence
  Synthetic oligonucleotide
gtatttaacgcaactcattacaccagttta

SEQ ID NO: 468769 - DNA, 30 bp, Artificial Sequence
  Synthetic oligonucleotide
aagttcttcgggtctaaactcggcagttta

SEQ ID NO: 468770 - DNA, 30 bp, Artificial Sequence
  Synthetic oligonucleotide
aattctacaagaaagctgcaacggagttta

SEQ ID NO: 468771 - DNA, 30 bp, Artificial Sequence
  Synthetic oligonucleotide
tgaatacactagatgtgctagtctagttta

SEQ ID NO: 468772 - DNA, 30 bp, Artificial Sequence
  Synthetic oligonucleotide
caaggtctcgtccgagcgcaggaacgttta

SEQ ID NO: 468773 - DNA, 30 bp, Artificial Sequence
  Synthetic oligonucleotide
ttcttgggtgattccaccaagtaacgttta

SEQ ID NO: 468774 - DNA, 30 bp, Artificial Sequence
  Synthetic oligonucleotide
gagtcaggtgacgtgcaacaagcacgttta

SEQ ID NO: 468775 - DNA, 30 bp, Artificial Sequence
  Synthetic oligonucleotide
tgctatccgcgttccgaactaatacgttta

SEQ ID NO: 468776 - DNA, 30 bp, Artificial Sequence
  Synthetic oligonucleotide
atgccgtcggtcccattggatcagcgttta

SEQ ID NO: 468777 - DNA, 30 bp, Artificial Sequence
  Synthetic oligonucleotide
tccttgattttgataaatgccttgcgttta

SEQ ID NO: 468778 - DNA, 30 bp, Artificial Sequence
  Synthetic oligonucleotide
atagaggcagtgcctcggaaccttcgttta

SEQ ID NO: 468779 - DNA, 30 bp, Artificial Sequence
  Synthetic oligonucleotide
tcaccatgggtaactatgtacccaggttta

SEQ ID NO: 468780 - DNA, 30 bp, Artificial Sequence
  Synthetic oligonucleotide
gagcgtggatgtaatgccgctgagggttta

SEQ ID NO: 468781 - DNA, 30 bp, Artificial Sequence
  Synthetic oligonucleotide
gggtatacgaaactgcaagcacggggttta

SEQ ID NO: 468782 - DNA, 30 bp, Artificial Sequence
  Synthetic oligonucleotide
ctcgagtcgcatctactcttagtgggttta

SEQ ID NO: 468783 - DNA, 30 bp, Artificial Sequence
  Synthetic oligonucleotide
tatattccgggtaaacaaccggatggttta

SEQ ID NO: 468784 - DNA, 30 bp, Artificial Sequence
  Synthetic oligonucleotide
ctgatgctgttggtaggcgcgcctggttta

SEQ ID NO: 468785 - DNA, 30 bp, Artificial Sequence
  Synthetic oligonucleotide
cgtttcctggcatgtttctcccgtggttta

SEQ ID NO: 468786 - DNA, 30 bp, Artificial Sequence
  Synthetic oligonucleotide
ccagaagcggtttcctcggttaaatgttta

SEQ ID NO: 468787 - DNA, 30 bp, Artificial Sequence
  Synthetic oligonucleotide
gacaggttaatgattttggaaacatgttta

SEQ ID NO: 468788 - DNA, 30 bp, Artificial Sequence
  Synthetic oligonucleotide
ttttgctccctaagtcctccaccatgttta

SEQ ID NO: 468789 - DNA, 30 bp, Artificial Sequence
  Synthetic oligonucleotide
gtcgaatccttgtcgaccggattatgttta

SEQ ID NO: 468790 - DNA, 30 bp, Artificial Sequence
  Synthetic oligonucleotide
tatatgcctgtattagaatgtttatgttta

SEQ ID NO: 468791 - DNA, 30 bp, Artificial Sequence
  Synthetic oligonucleotide
gatccgtactgtaatcagatagagtgttta

SEQ ID NO: 468792 - DNA, 30 bp, Artificial Sequence
  Synthetic oligonucleotide
catggcattgatcatgcgtggacgtgttta

SEQ ID NO: 468793 - DNA, 30 bp, Artificial Sequence
  Synthetic oligonucleotide
tgatgataaggacgggcagatacgtgttta

SEQ ID NO: 468794 - DNA, 30 bp, Artificial Sequence
  Synthetic oligonucleotide
ttttcaatcctaaattgaatgcattgttta

SEQ ID NO: 468795 - DNA, 30 bp, Artificial Sequence
  Synthetic oligonucleotide
agcgcttgcgcggcttttttaacttgttta

SEQ ID NO: 468796 - DNA, 30 bp, Artificial Sequence
  Synthetic oligonucleotide
gaggttctgcagccaagatatgcttgttta

SEQ ID NO: 468797 - DNA, 30 bp, Artificial Sequence
  Synthetic oligonucleotide
aaacacgaattttcttacacatgttgttta

SEQ ID NO: 468798 - DNA, 30 bp, Artificial Sequence
  Synthetic oligonucleotide
tggggcccccagggatccttactttgttta

SEQ ID NO: 468799 - DNA, 30 bp, Artificial Sequence
  Synthetic oligonucleotide
atcggcggcctctcagaggacgaaatttta

SEQ ID NO: 468800 - DNA, 30 bp, Artificial Sequence
  Synthetic oligonucleotide
tttaaatggttaggcctgagggaaatttta

SEQ ID NO: 468801 - DNA, 30 bp, Artificial Sequence
  Synthetic oligonucleotide
ttagccataacttcacggcaagcaatttta

SEQ ID NO: 468802 - DNA, 30 bp, Artificial Sequence
  Synthetic oligonucleotide
gttggcggggcagcagggactcgcatttta

SEQ ID NO: 468803 - DNA, 30 bp, Artificial Sequence
  Synthetic oligonucleotide
gagttaatagactgacaggtaaagatttta

SEQ ID NO: 468804 - DNA, 30 bp, Artificial Sequence
  Synthetic oligonucleotide
taggcccagtgtgtcttatttgagatttta

SEQ ID NO: 468805 - DNA, 30 bp, Artificial Sequence
  Synthetic oligonucleotide
cacgggttccgcgcgtcgccctcgatttta

SEQ ID NO: 468806 - DNA, 30 bp, Artificial Sequence
  Synthetic oligonucleotide
acgtcctgctcctggccccgtgggatttta

SEQ ID NO: 468807 - DNA, 30 bp, Artificial Sequence
  Synthetic oligonucleotide
agtgaataacctatacacaaaatgatttta

SEQ ID NO: 468808 - DNA, 30 bp, Artificial Sequence
  Synthetic oligonucleotide
gccccattgtgacgcacacgtgctatttta

SEQ ID NO: 468809 - DNA, 30 bp, Artificial Sequence
  Synthetic oligonucleotide
taagacacctggtgccgtttttctatttta

SEQ ID NO: 468810 - DNA, 30 bp, Artificial Sequence
  Synthetic oligonucleotide
gctaggaagctatgttcgccaaaactttta

SEQ ID NO: 468811 - DNA, 30 bp, Artificial Sequence
  Synthetic oligonucleotide
ctagcctttgtaccaggtcctcaactttta

SEQ ID NO: 468812 - DNA, 30 bp, Artificial Sequence
  Synthetic oligonucleotide
cccaaggcttcactgaatatctcactttta

SEQ ID NO: 468813 - DNA, 30 bp, Artificial Sequence
  Synthetic oligonucleotide
tagtcaacccattctctgcatatactttta

SEQ ID NO: 468814 - DNA, 30 bp, Artificial Sequence
  Synthetic oligonucleotide
cagggatcattgaattgacgggacctttta

SEQ ID NO: 468815 - DNA, 30 bp, Artificial Sequence
  Synthetic oligonucleotide
ataaaccgcagtgaaagacgaaccctttta

SEQ ID NO: 468816 - DNA, 30 bp, Artificial Sequence
  Synthetic oligonucleotide
tattgcagctgaaatagacccctcctttta

SEQ ID NO: 468817 - DNA, 30 bp, Artificial Sequence
  Synthetic oligonucleotide
actatgtactggtttgaaagtgtcctttta

SEQ ID NO: 468818 - DNA, 30 bp, Artificial Sequence
  Synthetic oligonucleotide
agtaagtcttatgggaggtctaagctttta

SEQ ID NO: 468819 - DNA, 30 bp, Artificial Sequence
  Synthetic oligonucleotide
tgtacagctggttgtctacagcagctttta

SEQ ID NO: 468820 - DNA, 30 bp, Artificial Sequence
  Synthetic oligonucleotide
tcggacaacgcgaacaagacggagctttta

SEQ ID NO: 468821 - DNA, 30 bp, Artificial Sequence
  Synthetic oligonucleotide
ggtgagaagcgacggatcaatgggctttta

SEQ ID NO: 468822 - DNA, 30 bp, Artificial Sequence
  Synthetic oligonucleotide
gagtaccgtgagtgggttgaatggctttta

SEQ ID NO: 468823 - DNA, 30 bp, Artificial Sequence
  Synthetic oligonucleotide
ttgcccaacgccctttgggttaatctttta

SEQ ID NO: 468824 - DNA, 30 bp, Artificial Sequence
  Synthetic oligonucleotide
atcgcgggaactgtttggtcaactctttta

SEQ ID NO: 468825 - DNA, 30 bp, Artificial Sequence
  Synthetic oligonucleotide
taatctacagcaggccatctttgtctttta

SEQ ID NO: 468826 - DNA, 30 bp, Artificial Sequence
  Synthetic oligonucleotide
gtgcctgcgtcaacgacagctggcgtttta

SEQ ID NO: 468827 - DNA, 30 bp, Artificial Sequence
  Synthetic oligonucleotide
tcagacgcaacgaagaggtgagtcgtttta

SEQ ID NO: 468828 - DNA, 30 bp, Artificial Sequence
  Synthetic oligonucleotide
ggggggccaatactgcggtcaggggtttta

SEQ ID NO: 468829 - DNA, 30 bp, Artificial Sequence
  Synthetic oligonucleotide
aaatcaatgggtgcgttcttaagtgtttta

SEQ ID NO: 468830 - DNA, 30 bp, Artificial Sequence
  Synthetic oligonucleotide
acgctactccaattaccagcttaattttta

SEQ ID NO: 468831 - DNA, 30 bp, Artificial Sequence
  Synthetic oligonucleotide
aatcagtgtggctcataggaagcattttta

SEQ ID NO: 468832 - DNA, 30 bp, Artificial Sequence
  Synthetic oligonucleotide
tggtccggtctgttcacaatatcattttta

SEQ ID NO: 468833 - DNA, 30 bp, Artificial Sequence
  Synthetic oligonucleotide
cacacggcccggctatagttgcgattttta

SEQ ID NO: 468834 - DNA, 30 bp, Artificial Sequence
  Synthetic oligonucleotide
tataccagcgaagcttcggaaggattttta

SEQ ID NO: 468835 - DNA, 30 bp, Artificial Sequence
  Synthetic oligonucleotide
tacgaatgctatttcaagtaaaacttttta

SEQ ID NO: 468836 - DNA, 30 bp, Artificial Sequence
  Synthetic oligonucleotide
aatcccatgggtattgtctggcggttttta

SEQ ID NO: 468837 - DNA, 30 bp, Artificial Sequence
  Synthetic oligonucleotide
gagattcttattggactaacttggttttta

SEQ ID NO: 468838 - DNA, 30 bp, Artificial Sequence
  Synthetic oligonucleotide
gggggccccgggagtagtcagcatttttta

SEQ ID NO: 468839 - DNA, 30 bp, Artificial Sequence
  Synthetic oligonucleotide
attaattgggttccatataatgctttttta

SEQ ID NO: 468840 - DNA, 30 bp, Artificial Sequence
  Synthetic oligonucleotide
tatgcttcctcttctggtcgaggtttttta

SEQ ID NO: 468841 - DNA, 30 bp, Artificial Sequence
  Synthetic oligonucleotide
cagtcaagggaaaaccccatatgtttttta

SEQ ID NO: 468842 - DNA, 30 bp, Artificial Sequence
  Synthetic oligonucleotide
cgacagtaacaaaaatcttgccttttttta

SEQ ID NO: 468843 - DNA, 30 bp, Artificial Sequence
  Synthetic oligonucleotide
catgaacatgatcacggggtagttttttta

SEQ ID NO: 468844 - DNA, 30 bp, Artificial Sequence
  Synthetic oligonucleotide
acataaccgtccgtacctaatgttttttta

SEQ ID NO: 468845 - DNA, 30 bp, Artificial Sequence
  Synthetic oligonucleotide
aagtggttcagcctccgggagtaaaaaaac

SEQ ID NO: 468846 - DNA, 30 bp, Artificial Sequence
  Synthetic oligonucleotide
ataatcgctatcttattgcaatcaaaaaac

SEQ ID NO: 468847 - DNA, 31 bp, Artificial Sequence
  Synthetic oligonucleotide
ctattgttatagccaccaccgttgaaaaaac

SEQ ID NO: 468848 - DNA, 30 bp, Artificial Sequence
  Synthetic oligonucleotide
gagacaaaaataaaacttgtagtaaaaaac

SEQ ID NO: 468849 - DNA, 30 bp, Artificial Sequence
  Synthetic oligonucleotide
cgcactgctggtcatccgacgttaaaaaac

SEQ ID NO: 468850 - DNA, 30 bp, Artificial Sequence
  Synthetic oligonucleotide
aggttcagttgcaccactgcgaacaaaaac

SEQ ID NO: 468851 - DNA, 30 bp, Artificial Sequence
  Synthetic oligonucleotide
cttgaacacgttccggagttatagaaaaac

SEQ ID NO: 468852 - DNA, 30 bp, Artificial Sequence
  Synthetic oligonucleotide
gactgtgggcagtttcccattgcgaaaaac

SEQ ID NO: 468853 - DNA, 30 bp, Artificial Sequence
  Synthetic oligonucleotide
actcaaccgtttagagtgtatttgaaaaac

SEQ ID NO: 468854 - DNA, 30 bp, Artificial Sequence
  Synthetic oligonucleotide
taataaaccagttgcggattcaataaaaac

SEQ ID NO: 468855 - DNA, 30 bp, Artificial Sequence
  Synthetic oligonucleotide
aatatagaacaggggtaaggcgataaaaac

SEQ ID NO: 468856 - DNA, 30 bp, Artificial Sequence
  Synthetic oligonucleotide
tcgtgacttatagtcagtatgactaaaaac

SEQ ID NO: 468857 - DNA, 30 bp, Artificial Sequence
  Synthetic oligonucleotide
atttaaattgatctctcagaatgtaaaaac

SEQ ID NO: 468858 - DNA, 30 bp, Artificial Sequence
  Synthetic oligonucleotide
gaatctgtaaggagatgtaggcttaaaaac

SEQ ID NO: 468859 - DNA, 30 bp, Artificial Sequence
  Synthetic oligonucleotide
tatcggtaacgcttgctcatagttaaaaac

SEQ ID NO: 468860 - DNA, 30 bp, Artificial Sequence
  Synthetic oligonucleotide
cctcggtggatttaacctgtatttaaaaac

SEQ ID NO: 468861 - DNA, 30 bp, Artificial Sequence
  Synthetic oligonucleotide
gtttacataaatggaggtggggaacaaaac

SEQ ID NO: 468862 - DNA, 30 bp, Artificial Sequence
  Synthetic oligonucleotide
attttgcagactaggtctcctgtacaaaac

SEQ ID NO: 468863 - DNA, 30 bp, Artificial Sequence
  Synthetic oligonucleotide
cttttgagaggtacgttggagatccaaaac

SEQ ID NO: 468864 - DNA, 30 bp, Artificial Sequence
  Synthetic oligonucleotide
aaccgccgtggcgcttagactatccaaaac

SEQ ID NO: 468865 - DNA, 30 bp, Artificial Sequence
  Synthetic oligonucleotide
cggtaatatgtatccgtttgacagcaaaac

SEQ ID NO: 468866 - DNA, 30 bp, Artificial Sequence
  Synthetic oligonucleotide
ctgtattttccgtggttcaacaggcaaaac

SEQ ID NO: 468867 - DNA, 30 bp, Artificial Sequence
  Synthetic oligonucleotide
gctgaaaccttggtgtgtcaatggcaaaac

SEQ ID NO: 468868 - DNA, 30 bp, Artificial Sequence
  Synthetic oligonucleotide
actatactattcgcgataaaggttcaaaac

SEQ ID NO: 468869 - DNA, 30 bp, Artificial Sequence
  Synthetic oligonucleotide
ctccattcccgaatagttgttgtagaaaac

SEQ ID NO: 468870 - DNA, 30 bp, Artificial Sequence
  Synthetic oligonucleotide
tccaaatcataattctaagttttagaaaac

SEQ ID NO: 468871 - DNA, 30 bp, Artificial Sequence
  Synthetic oligonucleotide
tattcccactcaccttgttatgacgaaaac

SEQ ID NO: 468872 - DNA, 30 bp, Artificial Sequence
  Synthetic oligonucleotide
attagttttgaacggttttgttacgaaaac

SEQ ID NO: 468873 - DNA, 30 bp, Artificial Sequence
  Synthetic oligonucleotide
tttggtcttcgacgtcttggacccgaaaac

SEQ ID NO: 468874 - DNA, 30 bp, Artificial Sequence
  Synthetic oligonucleotide
ggcccagctttcatcttaagcgaggaaaac

SEQ ID NO: 468875 - DNA, 30 bp, Artificial Sequence
  Synthetic oligonucleotide
tgtgcgcgttttgataagcaataggaaaac

SEQ ID NO: 468876 - DNA, 30 bp, Artificial Sequence
  Synthetic oligonucleotide
tatgttcaagtcctactctagcatgaaaac

SEQ ID NO: 468877 - DNA, 30 bp, Artificial Sequence
  Synthetic oligonucleotide
catcccccagcccatgcaggcagtgaaaac

SEQ ID NO: 468878 - DNA, 30 bp, Artificial Sequence
  Synthetic oligonucleotide
acgagtgtggcgattgcccctagtgaaaac

SEQ ID NO: 468879 - DNA, 30 bp, Artificial Sequence
  Synthetic oligonucleotide
cgcagcgataccgtcctggttaaataaaac

SEQ ID NO: 468880 - DNA, 30 bp, Artificial Sequence
  Synthetic oligonucleotide
gtgggagctgcttagagtgtttcataaaac

SEQ ID NO: 468881 - DNA, 30 bp, Artificial Sequence
  Synthetic oligonucleotide
ctttgtccgctgtctacgagagactaaaac

SEQ ID NO: 468882 - DNA, 30 bp, Artificial Sequence
  Synthetic oligonucleotide
ctacttaacgctatctggatccagtaaaac

SEQ ID NO: 468883 - DNA, 30 bp, Artificial Sequence
  Synthetic oligonucleotide
ggaatctcgtgatgcccccttaggtaaaac

SEQ ID NO: 468884 - DNA, 30 bp, Artificial Sequence
  Synthetic oligonucleotide
gaaaacgcgttatgtaatgaccggtaaaac

SEQ ID NO: 468885 - DNA, 30 bp, Artificial Sequence
  Synthetic oligonucleotide
gctttttattcccgtctaggtagttaaaac

SEQ ID NO: 468886 - DNA, 30 bp, Artificial Sequence
  Synthetic oligonucleotide
tggtattctctagagaatacattttaaaac

SEQ ID NO: 468887 - DNA, 30 bp, Artificial Sequence
  Synthetic oligonucleotide
tgtttagacaagttagggtccgaaacaaac

SEQ ID NO: 468888 - DNA, 30 bp, Artificial Sequence
  Synthetic oligonucleotide
gactagactcttggtcatagcccaacaaac

SEQ ID NO: 468889 - DNA, 30 bp, Artificial Sequence
  Synthetic oligonucleotide
aagctaggggtacgcacatgaataacaaac

SEQ ID NO: 468890 - DNA, 30 bp, Artificial Sequence
  Synthetic oligonucleotide
cttcgacgctgcgtagttccactaacaaac

SEQ ID NO: 468891 - DNA, 30 bp, Artificial Sequence
  Synthetic oligonucleotide
atttaattaaagtcgagttaaggcacaaac

SEQ ID NO: 468892 - DNA, 30 bp, Artificial Sequence
  Synthetic oligonucleotide
tgcattgccgtttgtatggcgatcacaaac

SEQ ID NO: 468893 - DNA, 30 bp, Artificial Sequence
  Synthetic oligonucleotide
gaataaacgcaacgctcgtcattcacaaac

SEQ ID NO: 468894 - DNA, 30 bp, Artificial Sequence
  Synthetic oligonucleotide
gcactgagttctctaaggttacagacaaac

SEQ ID NO: 468895 - DNA, 30 bp, Artificial Sequence
  Synthetic oligonucleotide
agatgcggcatcgttcattatgtgacaaac

SEQ ID NO: 468896 - DNA, 30 bp, Artificial Sequence
  Synthetic oligonucleotide
tcacactcgtggggattattgtatacaaac

SEQ ID NO: 468897 - DNA, 30 bp, Artificial Sequence
  Synthetic oligonucleotide
caccggttttctgttatggtaacaccaaac

SEQ ID NO: 468898 - DNA, 30 bp, Artificial Sequence
  Synthetic oligonucleotide
gctgtagcgggcgcgcactgcgctccaaac

SEQ ID NO: 468899 - DNA, 30 bp, Artificial Sequence
  Synthetic oligonucleotide
acaaacacttaacctaaaaattacgcaaac

SEQ ID NO: 468900 - DNA, 30 bp, Artificial Sequence
  Synthetic oligonucleotide
caacaacccctatcgggcgggtccgcaaac

SEQ ID NO: 468901 - DNA, 30 bp, Artificial Sequence
  Synthetic oligonucleotide
gtaaccactttattagcaaggggggcaaac

SEQ ID NO: 468902 - DNA, 30 bp, Artificial Sequence
  Synthetic oligonucleotide
gcccgttggaatgactagtgtttggcaaac

SEQ ID NO: 468903 - DNA, 30 bp, Artificial Sequence
  Synthetic oligonucleotide
agatcgaatgaaagggtctcgtctgcaaac

SEQ ID NO: 468904 - DNA, 30 bp, Artificial Sequence
  Synthetic oligonucleotide
aatattctttacagcaacctgcaatcaaac

SEQ ID NO: 468905 - DNA, 30 bp, Artificial Sequence
  Synthetic oligonucleotide
cccacgaacgcatgcgtcatgtactcaaac

SEQ ID NO: 468906 - DNA, 30 bp, Artificial Sequence
  Synthetic oligonucleotide
catttacaagcatattggcgcgtctcaaac

SEQ ID NO: 468907 - DNA, 31 bp, Artificial Sequence
  Synthetic oligonucleotide
atttgccggagcgacctgctaacagtcaaac

SEQ ID NO: 468908 - DNA, 30 bp, Artificial Sequence
  Synthetic oligonucleotide
gtaatattcgtcatggtttgttattcaaac

SEQ ID NO: 468909 - DNA, 30 bp, Artificial Sequence
  Synthetic oligonucleotide
tcctaaagctgtgggtgtgtgcgaagaaac

SEQ ID NO: 468910 - DNA, 30 bp, Artificial Sequence
  Synthetic oligonucleotide
gatcgttcggagaccagctgattaagaaac

SEQ ID NO: 468911 - DNA, 30 bp, Artificial Sequence
  Synthetic oligonucleotide
cctcattggtgccctacggcacccagaaac

SEQ ID NO: 468912 - DNA, 30 bp, Artificial Sequence
  Synthetic oligonucleotide
catatctataatggcgccgccgccagaaac

SEQ ID NO: 468913 - DNA, 30 bp, Artificial Sequence
  Synthetic oligonucleotide
taatgcgacgcgggacatctgaagagaaac

SEQ ID NO: 468914 - DNA, 30 bp, Artificial Sequence
  Synthetic oligonucleotide
aaccggggttgccgttgttttatgagaaac

SEQ ID NO: 468915 - DNA, 30 bp, Artificial Sequence
  Synthetic oligonucleotide
tttgttttcaaagcttttaaagtgagaaac

SEQ ID NO: 468916 - DNA, 30 bp, Artificial Sequence
  Synthetic oligonucleotide
gcctaacactccttgcatgttgttagaaac

SEQ ID NO: 468917 - DNA, 30 bp, Artificial Sequence
  Synthetic oligonucleotide
atgcaatgcggattaatacgcaaacgaaac

SEQ ID NO: 468918 - DNA, 30 bp, Artificial Sequence
  Synthetic oligonucleotide
gcaacaacgtacaggtccgttaacggaaac

SEQ ID NO: 468919 - DNA, 30 bp, Artificial Sequence
  Synthetic oligonucleotide
gatgcatgtctgtgtccaccaaccggaaac

SEQ ID NO: 468920 - DNA, 30 bp, Artificial Sequence
  Synthetic oligonucleotide
cccaaacttggcaggacgcggtcgggaaac

SEQ ID NO: 468921 - DNA, 30 bp, Artificial Sequence
  Synthetic oligonucleotide
tttcgggtctgcgcatcgggggggggaaac

SEQ ID NO: 468922 - DNA, 30 bp, Artificial Sequence
  Synthetic oligonucleotide
gaggacccaacttgtcatttgcgtggaaac

SEQ ID NO: 468923 - DNA, 30 bp, Artificial Sequence
  Synthetic oligonucleotide
cgaagattataataccgatggcttggaaac

SEQ ID NO: 468924 - DNA, 30 bp, Artificial Sequence
  Synthetic oligonucleotide
gcatatttcctgcgtacatggtaatgaaac

SEQ ID NO: 468925 - DNA, 30 bp, Artificial Sequence
  Synthetic oligonucleotide
atcatggcaggtttagagctgcgatgaaac

SEQ ID NO: 468926 - DNA, 30 bp, Artificial Sequence
  Synthetic oligonucleotide
aatagttcacacgacgcggtgttatgaaac

SEQ ID NO: 468927 - DNA, 31 bp, Artificial Sequence
  Synthetic oligonucleotide
cttctccagggtttctaggcccaagtgaaac

SEQ ID NO: 468928 - DNA, 30 bp, Artificial Sequence
  Synthetic oligonucleotide
ccatagaggtgcggcagatccaagtgaaac

SEQ ID NO: 468929 - DNA, 30 bp, Artificial Sequence
  Synthetic oligonucleotide
ggctaggagttgtcgaggttagggtgaaac

SEQ ID NO: 468930 - DNA, 30 bp, Artificial Sequence
  Synthetic oligonucleotide
cctgtgatcagtactctagccgtttgaaac

SEQ ID NO: 468931 - DNA, 30 bp, Artificial Sequence
  Synthetic oligonucleotide
ttaacggacatcgtggctaaaccaataaac

SEQ ID NO: 468932 - DNA, 30 bp, Artificial Sequence
  Synthetic oligonucleotide
ctactgtatgaaaagagtatattaataaac

SEQ ID NO: 468933 - DNA, 30 bp, Artificial Sequence
  Synthetic oligonucleotide
ctatacgctgaaggagcctcattcataaac

SEQ ID NO: 468934 - DNA, 30 bp, Artificial Sequence
  Synthetic oligonucleotide
aatcaaagggactgggtgactaatataaac

SEQ ID NO: 468935 - DNA, 30 bp, Artificial Sequence
  Synthetic oligonucleotide
tgttcggttaattgccaacaaaaactaaac

SEQ ID NO: 468936 - DNA, 30 bp, Artificial Sequence
  Synthetic oligonucleotide
ttagcagcaggcgaattcactgtactaaac

SEQ ID NO: 468937 - DNA, 30 bp, Artificial Sequence
  Synthetic oligonucleotide
ctatcgcttagggtgtggcaagagctaaac

SEQ ID NO: 468938 - DNA, 30 bp, Artificial Sequence
  Synthetic oligonucleotide
ttctgctgcacactgcggcgggagctaaac

SEQ ID NO: 468939 - DNA, 30 bp, Artificial Sequence
  Synthetic oligonucleotide
tgtttctcagaccggtctgactagctaaac

SEQ ID NO: 468940 - DNA, 30 bp, Artificial Sequence
  Synthetic oligonucleotide
cttgcatttccattagccagaacgctaaac

SEQ ID NO: 468941 - DNA, 30 bp, Artificial Sequence
  Synthetic oligonucleotide
agacccagacggctgagttagattctaaac

SEQ ID NO: 468942 - DNA, 30 bp, Artificial Sequence
  Synthetic oligonucleotide
gaccttttaatccggacgccttcggtaaac

SEQ ID NO: 468943 - DNA, 30 bp, Artificial Sequence
  Synthetic oligonucleotide
ttgttttcctgagattcggcaactgtaaac

SEQ ID NO: 468944 - DNA, 30 bp, Artificial Sequence
  Synthetic oligonucleotide
taagtttaatatatatatctaactgtaaac

SEQ ID NO: 468945 - DNA, 30 bp, Artificial Sequence
  Synthetic oligonucleotide
gttctgaaccagcgaaaattttgtgtaaac

SEQ ID NO: 468946 - DNA, 40 bp, Artificial Sequence
  Synthetic oligonucleotide
cttctcgttgtgctgatcggagttgctccctaaattaaac

SEQ ID NO: 468947 - DNA, 30 bp, Artificial Sequence
  Synthetic oligonucleotide
gtctaaccaggtcaaacggttagattaaac

SEQ ID NO: 468948 - DNA, 30 bp, Artificial Sequence
  Synthetic oligonucleotide
ctcaacaagaatttgctttcgcgattaaac

SEQ ID NO: 468949 - DNA, 30 bp, Artificial Sequence
  Synthetic oligonucleotide
ccaaatggggtcacttgccgctacttaaac

SEQ ID NO: 468950 - DNA, 30 bp, Artificial Sequence
  Synthetic oligonucleotide
tgaatgcgcagaatcaagtttgtgttaaac

SEQ ID NO: 468951 - DNA, 30 bp, Artificial Sequence
  Synthetic oligonucleotide
aaaacacatggcgtgaaatccactttaaac

SEQ ID NO: 468952 - DNA, 30 bp, Artificial Sequence
  Synthetic oligonucleotide
ggcgcaaagttccaggaaccccttttaaac

SEQ ID NO: 468953 - DNA, 30 bp, Artificial Sequence
  Synthetic oligonucleotide
ccaatggcattcttgactgccaccaacaac

SEQ ID NO: 468954 - DNA, 30 bp, Artificial Sequence
  Synthetic oligonucleotide
tataaggcatcgatatagacgcccaacaac

SEQ ID NO: 468955 - DNA, 30 bp, Artificial Sequence
  Synthetic oligonucleotide
cagtgtgtgtgtatattttccatgaacaac

SEQ ID NO: 468956 - DNA, 30 bp, Artificial Sequence
  Synthetic oligonucleotide
gaccaactgcgcagttacaaatgtaacaac

SEQ ID NO: 468957 - DNA, 30 bp, Artificial Sequence
  Synthetic oligonucleotide
ggacagcgtttggattcgctgcttaacaac

SEQ ID NO: 468958 - DNA, 30 bp, Artificial Sequence
  Synthetic oligonucleotide
ttgggatggttttggagctttgttaacaac

SEQ ID NO: 468959 - DNA, 30 bp, Artificial Sequence
  Synthetic oligonucleotide
acgggaacgcccctcgctgtgccccacaac

SEQ ID NO: 468960 - DNA, 30 bp, Artificial Sequence
  Synthetic oligonucleotide
cgacgttccgaatgtcacggagggcacaac

SEQ ID NO: 468961 - DNA, 30 bp, Artificial Sequence
  Synthetic oligonucleotide
tggccgagtatcgatctgagaggtcacaac

SEQ ID NO: 468962 - DNA, 30 bp, Artificial Sequence
  Synthetic oligonucleotide
gacgtagcgttgtaacctcgatgtcacaac

SEQ ID NO: 468963 - DNA, 30 bp, Artificial Sequence
  Synthetic oligonucleotide
caggtaatacaaccctatatctgtcacaac

SEQ ID NO: 468964 - DNA, 30 bp, Artificial Sequence
  Synthetic oligonucleotide
aattgatgctctgccattctcattcacaac

SEQ ID NO: 468965 - DNA, 30 bp, Artificial Sequence
  Synthetic oligonucleotide
attacaccgctagctgctgtgacagacaac

SEQ ID NO: 468966 - DNA, 30 bp, Artificial Sequence
  Synthetic oligonucleotide
aattctgcggttgaaacgtcgagagacaac

SEQ ID NO: 468967 - DNA, 30 bp, Artificial Sequence
  Synthetic oligonucleotide
gtccgtgagacgaagatatgcttagacaac

SEQ ID NO: 468968 - DNA, 30 bp, Artificial Sequence
  Synthetic oligonucleotide
aaatggtgagtgtcttcgatgttagacaac

SEQ ID NO: 468969 - DNA, 30 bp, Artificial Sequence
  Synthetic oligonucleotide
catcctttagctgccggcggttgcgacaac

SEQ ID NO: 468970 - DNA, 30 bp, Artificial Sequence
  Synthetic oligonucleotide
ctagttgtcatctttagttaccaatacaac

SEQ ID NO: 468971 - DNA, 30 bp, Artificial Sequence
  Synthetic oligonucleotide
ggatttgagacatctttgagatcctacaac

SEQ ID NO: 468972 - DNA, 30 bp, Artificial Sequence
  Synthetic oligonucleotide
gtgaactgggagaggcgattactctacaac

SEQ ID NO: 468973 - DNA, 30 bp, Artificial Sequence
  Synthetic oligonucleotide
ctgcggagtacgctcgtgtttgtctacaac

SEQ ID NO: 468974 - DNA, 30 bp, Artificial Sequence
  Synthetic oligonucleotide
atatccaccgtaggatgcaacctgtacaac

SEQ ID NO: 468975 - DNA, 30 bp, Artificial Sequence
  Synthetic oligonucleotide
tgcgcgcttgaagtacgcagggtttacaac

SEQ ID NO: 468976 - DNA, 30 bp, Artificial Sequence
  Synthetic oligonucleotide
cccctcttaacggatagtatgcaaaccaac

SEQ ID NO: 468977 - DNA, 30 bp, Artificial Sequence
  Synthetic oligonucleotide
tgacccttgaaacacgcacgataaaccaac

SEQ ID NO: 468978 - DNA, 30 bp, Artificial Sequence
  Synthetic oligonucleotide
aaatgcgtgttaggtatgcagtagaccaac

SEQ ID NO: 468979 - DNA, 29 bp, Artificial Sequence
  Synthetic oligonucleotide
cttggaggtagaaattcctagctaccaac

SEQ ID NO: 468980 - DNA, 30 bp, Artificial Sequence
  Synthetic oligonucleotide
gcccacacaccagctggtggtggtaccaac

SEQ ID NO: 468981 - DNA, 30 bp, Artificial Sequence
  Synthetic oligonucleotide
gcaatgaacactggtggtatcgttaccaac

SEQ ID NO: 468982 - DNA, 30 bp, Artificial Sequence
  Synthetic oligonucleotide
gttttaatggctgagcagatctgacccaac

SEQ ID NO: 468983 - DNA, 30 bp, Artificial Sequence
  Synthetic oligonucleotide
atttgggcaggtaaacctggtctacccaac

SEQ ID NO: 468984 - DNA, 30 bp, Artificial Sequence
  Synthetic oligonucleotide
tacccatcaggggagtcctcggaccccaac

SEQ ID NO: 468985 - DNA, 30 bp, Artificial Sequence
  Synthetic oligonucleotide
atattgctccgaccaagatcgcgtcccaac

SEQ ID NO: 468986 - DNA, 30 bp, Artificial Sequence
  Synthetic oligonucleotide
tattcaaatgatggtatactatgtcccaac

SEQ ID NO: 468987 - DNA, 30 bp, Artificial Sequence
  Synthetic oligonucleotide
attcgaaataaacggcacgctacagccaac

SEQ ID NO: 468988 - DNA, 30 bp, Artificial Sequence
  Synthetic oligonucleotide
cattcgcatacagctagggctacagccaac

SEQ ID NO: 468989 - DNA, 30 bp, Artificial Sequence
  Synthetic oligonucleotide
ttgcttctacgggtccctgttccagccaac

SEQ ID NO: 468990 - DNA, 30 bp, Artificial Sequence
  Synthetic oligonucleotide
cttccactgtaattataccgccgagccaac

SEQ ID NO: 468991 - DNA, 30 bp, Artificial Sequence
  Synthetic oligonucleotide
ttactgcagacaggccacaaggccgccaac

SEQ ID NO: 468992 - DNA, 30 bp, Artificial Sequence
  Synthetic oligonucleotide
ttggtccggcctccacgctcgcgggccaac

SEQ ID NO: 468993 - DNA, 30 bp, Artificial Sequence
  Synthetic oligonucleotide
tggacataagcaggctaccttaatgccaac

SEQ ID NO: 468994 - DNA, 30 bp, Artificial Sequence
  Synthetic oligonucleotide
attcgcacgagtcgtacaccgcgtgccaac

SEQ ID NO: 468995 - DNA, 30 bp, Artificial Sequence
  Synthetic oligonucleotide
ggattaaaagcgatatggaatcgctccaac

SEQ ID NO: 468996 - DNA, 30 bp, Artificial Sequence
  Synthetic oligonucleotide
aaaatttgtcagatcttttgtggctccaac

SEQ ID NO: 468997 - DNA, 30 bp, Artificial Sequence
  Synthetic oligonucleotide
ggactgactgttaaagtttctacgtccaac

SEQ ID NO: 468998 - DNA, 30 bp, Artificial Sequence
  Synthetic oligonucleotide
cagtgtaaaccatggatcatatcgtccaac

SEQ ID NO: 468999 - DNA, 30 bp, Artificial Sequence
  Synthetic oligonucleotide
ttaaacagacttattctatcaaattccaac

SEQ ID NO: 469000 - DNA, 30 bp, Artificial Sequence
  Synthetic oligonucleotide
ggtacacgcagaacctagcttttttccaac

SEQ ID NO: 469001 - DNA, 30 bp, Artificial Sequence
  Synthetic oligonucleotide
ttgtttaaccccgctaagctcgcaagcaac

SEQ ID NO: 469002 - DNA, 30 bp, Artificial Sequence
  Synthetic oligonucleotide
gcggcttgagtgggctgcccattcagcaac

SEQ ID NO: 469003 - DNA, 30 bp, Artificial Sequence
  Synthetic oligonucleotide
aaagtgtccaagtctcccttggcgagcaac

SEQ ID NO: 469004 - DNA, 30 bp, Artificial Sequence
  Synthetic oligonucleotide
agtcatttgtttctcctttctaggagcaac

SEQ ID NO: 469005 - DNA, 30 bp, Artificial Sequence
  Synthetic oligonucleotide
cctacacgtgaccccgcaacacatagcaac

SEQ ID NO: 469006 - DNA, 30 bp, Artificial Sequence
  Synthetic oligonucleotide
ggagcctggtcttcaagacaggctagcaac

SEQ ID NO: 469007 - DNA, 30 bp, Artificial Sequence
  Synthetic oligonucleotide
agcactaggtcaggtgtatccagtagcaac

SEQ ID NO: 469008 - DNA, 30 bp, Artificial Sequence
  Synthetic oligonucleotide
tcacgagatagttagcacctaaaacgcaac

SEQ ID NO: 469009 - DNA, 30 bp, Artificial Sequence
  Synthetic oligonucleotide
aatgtgtgcgaaccttgcttactacgcaac

SEQ ID NO: 469010 - DNA, 30 bp, Artificial Sequence
  Synthetic oligonucleotide
gacaatcggtacgtagccgctcagcgcaac

SEQ ID NO: 469011 - DNA, 30 bp, Artificial Sequence
  Synthetic oligonucleotide
atatgtaacttacttatgacacgtcgcaac

SEQ ID NO: 469012 - DNA, 30 bp, Artificial Sequence
  Synthetic oligonucleotide
gtttaaatccaatagggtcacagaggcaac

SEQ ID NO: 469013 - DNA, 30 bp, Artificial Sequence
  Synthetic oligonucleotide
ttctagcagtccagccgaatagccggcaac

SEQ ID NO: 469014 - DNA, 30 bp, Artificial Sequence
  Synthetic oligonucleotide
tagtccagttattgtagcgccgcgggcaac

SEQ ID NO: 469015 - DNA, 30 bp, Artificial Sequence
  Synthetic oligonucleotide
taggtcgttcagtgggtttaccctggcaac

SEQ ID NO: 469016 - DNA, 30 bp, Artificial Sequence
  Synthetic oligonucleotide
ctagggaagagagctgcgactaattgcaac

SEQ ID NO: 469017 - DNA, 30 bp, Artificial Sequence
  Synthetic oligonucleotide
tttcatgtacaaccgcaggaacattgcaac

SEQ ID NO: 469018 - DNA, 30 bp, Artificial Sequence
  Synthetic oligonucleotide
attcatgtaacttgttaaacggtttgcaac

SEQ ID NO: 469019 - DNA, 30 bp, Artificial Sequence
  Synthetic oligonucleotide
ggtcatgtatgtaagaatttacaaatcaac

SEQ ID NO: 469020 - DNA, 30 bp, Artificial Sequence
  Synthetic oligonucleotide
atgcgacagttgatcggattaataatcaac

SEQ ID NO: 469021 - DNA, 30 bp, Artificial Sequence
  Synthetic oligonucleotide
acccttatactgtgtcctagcataatcaac

SEQ ID NO: 469022 - DNA, 30 bp, Artificial Sequence
  Synthetic oligonucleotide
tgactttgtgaggagactctacgcatcaac

SEQ ID NO: 469023 - DNA, 30 bp, Artificial Sequence
  Synthetic oligonucleotide
cgcattaattgccaccgtgagtgcatcaac

SEQ ID NO: 469024 - DNA, 30 bp, Artificial Sequence
  Synthetic oligonucleotide
aatccaacaattgtctatagcgggatcaac

SEQ ID NO: 469025 - DNA, 30 bp, Artificial Sequence
  Synthetic oligonucleotide
ccttcgagaccctgggagaaatctatcaac

SEQ ID NO: 469026 - DNA, 30 bp, Artificial Sequence
  Synthetic oligonucleotide
atgtctcccgggcgaggtgcccttatcaac

SEQ ID NO: 469027 - DNA, 30 bp, Artificial Sequence
  Synthetic oligonucleotide
tgtgcaagcttggtggctctgacactcaac

SEQ ID NO: 469028 - DNA, 30 bp, Artificial Sequence
  Synthetic oligonucleotide
aaactcgattgttgttctaggggactcaac

SEQ ID NO: 469029 - DNA, 30 bp, Artificial Sequence
  Synthetic oligonucleotide
cataagagcaatgctcgccactgcctcaac

SEQ ID NO: 469030 - DNA, 30 bp, Artificial Sequence
  Synthetic oligonucleotide
tccaggacaccgcggtccaggttcctcaac

SEQ ID NO: 469031 - DNA, 30 bp, Artificial Sequence
  Synthetic oligonucleotide
ttaaaattgaacttcagtctcaatctcaac

SEQ ID NO: 469032 - DNA, 30 bp, Artificial Sequence
  Synthetic oligonucleotide
attcgattgattctataataaggtctcaac

SEQ ID NO: 469033 - DNA, 30 bp, Artificial Sequence
  Synthetic oligonucleotide
ctgctgtacagtgtgaacgcgtttctcaac

SEQ ID NO: 469034 - DNA, 30 bp, Artificial Sequence
  Synthetic oligonucleotide
gggcacgaaaagatggtaccagcagtcaac

SEQ ID NO: 469035 - DNA, 30 bp, Artificial Sequence
  Synthetic oligonucleotide
ttcagcgagcctctttagagccatgtcaac

SEQ ID NO: 469036 - DNA, 30 bp, Artificial Sequence
  Synthetic oligonucleotide
ggtctggtttacaacacagacactgtcaac

SEQ ID NO: 469037 - DNA, 30 bp, Artificial Sequence
  Synthetic oligonucleotide
gtcttcgggcatggctaggtcatattcaac

SEQ ID NO: 469038 - DNA, 30 bp, Artificial Sequence
  Synthetic oligonucleotide
gcgggcaggaggcagcagcacatcttcaac

SEQ ID NO: 469039 - DNA, 30 bp, Artificial Sequence
  Synthetic oligonucleotide
tggatattcaatatctcattcccgttcaac

SEQ ID NO: 469040 - DNA, 30 bp, Artificial Sequence
  Synthetic oligonucleotide
agtttgctaagaaattttgatgtgttcaac

SEQ ID NO: 469041 - DNA, 30 bp, Artificial Sequence
  Synthetic oligonucleotide
cagagttatgactggatatgtcgaaagaac

SEQ ID NO: 469042 - DNA, 30 bp, Artificial Sequence
  Synthetic oligonucleotide
gttaatgggcagcccttaatcgtaaagaac

SEQ ID NO: 469043 - DNA, 30 bp, Artificial Sequence
  Synthetic oligonucleotide
agcagttctggtcgagggggccgcaagaac

SEQ ID NO: 469044 - DNA, 30 bp, Artificial Sequence
  Synthetic oligonucleotide
ggcgtagcgacttatcatttggtcaagaac

SEQ ID NO: 469045 - DNA, 30 bp, Artificial Sequence
  Synthetic oligonucleotide
cccctccgtatctgtactagactacagaac

SEQ ID NO: 469046 - DNA, 30 bp, Artificial Sequence
  Synthetic oligonucleotide
ataagatattcggattcgtagcagcagaac

SEQ ID NO: 469047 - DNA, 30 bp, Artificial Sequence
  Synthetic oligonucleotide
aaaacattcaggcgtccaaggacgcagaac

SEQ ID NO: 469048 - DNA, 30 bp, Artificial Sequence
  Synthetic oligonucleotide
cccaattcagagattatgcgtacgcagaac

SEQ ID NO: 469049 - DNA, 30 bp, Artificial Sequence
  Synthetic oligonucleotide
atccaaaacctttctgcagttacgcagaac

SEQ ID NO: 469050 - DNA, 30 bp, Artificial Sequence
  Synthetic oligonucleotide
tatctctccgagcacaatcccccgcagaac

SEQ ID NO: 469051 - DNA, 30 bp, Artificial Sequence
  Synthetic oligonucleotide
gatggcgaggcgcgtcggtaggcgcagaac

SEQ ID NO: 469052 - DNA, 30 bp, Artificial Sequence
  Synthetic oligonucleotide
tgcaaagctagtacgaaagcgtgagagaac

SEQ ID NO: 469053 - DNA, 30 bp, Artificial Sequence
  Synthetic oligonucleotide
accagtaacctttttttgactaaggagaac

SEQ ID NO: 469054 - DNA, 30 bp, Artificial Sequence
  Synthetic oligonucleotide
gatcgataagctgagtttcgctaggagaac

SEQ ID NO: 469055 - DNA, 30 bp, Artificial Sequence
  Synthetic oligonucleotide
tagctcaggccaggaatggacagggagaac

SEQ ID NO: 469056 - DNA, 30 bp, Artificial Sequence
  Synthetic oligonucleotide
caacttatgtgaactgtcgcatttgagaac

SEQ ID NO: 469057 - DNA, 30 bp, Artificial Sequence
  Synthetic oligonucleotide
gatgccggggcgaaacaaatttaatagaac

SEQ ID NO: 469058 - DNA, 30 bp, Artificial Sequence
  Synthetic oligonucleotide
gttcacggtatcattatagacggatagaac

SEQ ID NO: 469059 - DNA, 30 bp, Artificial Sequence
  Synthetic oligonucleotide
acgttcataggagcagcacggggatagaac

SEQ ID NO: 469060 - DNA, 30 bp, Artificial Sequence
  Synthetic oligonucleotide
gtggactccgtttggccgtcgtactagaac

SEQ ID NO: 469061 - DNA, 30 bp, Artificial Sequence
  Synthetic oligonucleotide
gatgataactgccggattgtccagtagaac

SEQ ID NO: 469062 - DNA, 30 bp, Artificial Sequence
  Synthetic oligonucleotide
atatcctatggccagtcattcctgtagaac

SEQ ID NO: 469063 - DNA, 30 bp, Artificial Sequence
  Synthetic oligonucleotide
gacgtacttatgctgcaatctgattagaac

SEQ ID NO: 469064 - DNA, 30 bp, Artificial Sequence
  Synthetic oligonucleotide
ggcatctgagtatgttgcagacgaacgaac

SEQ ID NO: 469065 - DNA, 30 bp, Artificial Sequence
  Synthetic oligonucleotide
taatatttcaaggattgttaccgaacgaac

SEQ ID NO: 469066 - DNA, 30 bp, Artificial Sequence
  Synthetic oligonucleotide
caatttaaagttgtcctgtctggaacgaac

SEQ ID NO: 469067 - DNA, 30 bp, Artificial Sequence
  Synthetic oligonucleotide
tattatttgggtatgcctttggtcacgaac

SEQ ID NO: 469068 - DNA, 30 bp, Artificial Sequence
  Synthetic oligonucleotide
cttgtatcgtcacgcaaggcgctgacgaac

SEQ ID NO: 469069 - DNA, 30 bp, Artificial Sequence
  Synthetic oligonucleotide
gctttatctgaaagatactcctatacgaac

SEQ ID NO: 469070 - DNA, 30 bp, Artificial Sequence
  Synthetic oligonucleotide
tatgtttgctcaatagcattctcaccgaac

SEQ ID NO: 469071 - DNA, 30 bp, Artificial Sequence
  Synthetic oligonucleotide
ctagtgcctgaacacggggggagaccgaac

SEQ ID NO: 469072 - DNA, 30 bp, Artificial Sequence
  Synthetic oligonucleotide
tgccggaattgatagaaacgcagcccgaac

SEQ ID NO: 469073 - DNA, 30 bp, Artificial Sequence
  Synthetic oligonucleotide
tcgtcccacagcgttttaaaatttccgaac

SEQ ID NO: 469074 - DNA, 30 bp, Artificial Sequence
  Synthetic oligonucleotide
tcgttcttagtctggtgaacaccagcgaac

SEQ ID NO: 469075 - DNA, 30 bp, Artificial Sequence
  Synthetic oligonucleotide
ggtcttcactcattgatcgagtcctcgaac

SEQ ID NO: 469076 - DNA, 30 bp, Artificial Sequence
  Synthetic oligonucleotide
agactgtgtggattaagtccaaagtcgaac

SEQ ID NO: 469077 - DNA, 30 bp, Artificial Sequence
  Synthetic oligonucleotide
gaggtagggtacggacccgtggcttcgaac

SEQ ID NO: 469078 - DNA, 30 bp, Artificial Sequence
  Synthetic oligonucleotide
gtagtccgcacacgggggagctgttcgaac

SEQ ID NO: 469079 - DNA, 30 bp, Artificial Sequence
  Synthetic oligonucleotide
gttgtgcgtcgacgcctcgcacaaaggaac

SEQ ID NO: 469080 - DNA, 30 bp, Artificial Sequence
  Synthetic oligonucleotide
caacgcgtatcaacgatacccgcaaggaac

SEQ ID NO: 469081 - DNA, 30 bp, Artificial Sequence
  Synthetic oligonucleotide
tccacggtctttggatcgggcataaggaac

SEQ ID NO: 469082 - DNA, 30 bp, Artificial Sequence
  Synthetic oligonucleotide
ctgactcctacggaaaactttgcgaggaac

SEQ ID NO: 469083 - DNA, 30 bp, Artificial Sequence
  Synthetic oligonucleotide
attaaatggacgtagtactgtaataggaac

SEQ ID NO: 469084 - DNA, 30 bp, Artificial Sequence
  Synthetic oligonucleotide
ttaatgatacggcggttgctctttaggaac

SEQ ID NO: 469085 - DNA, 30 bp, Artificial Sequence
  Synthetic oligonucleotide
agaaacgtatgcattcagtagagacggaac

SEQ ID NO: 469086 - DNA, 30 bp, Artificial Sequence
  Synthetic oligonucleotide
actgttggagtcagctgaagcggacggaac

SEQ ID NO: 469087 - DNA, 30 bp, Artificial Sequence
  Synthetic oligonucleotide
ttgctattcatggtttctaatatacggaac

SEQ ID NO: 469088 - DNA, 30 bp, Artificial Sequence
  Synthetic oligonucleotide
gaatcctgcgaatgctattgttaccggaac

SEQ ID NO: 469089 - DNA, 30 bp, Artificial Sequence
  Synthetic oligonucleotide
tttcaacattcaaaagaatttggccggaac

SEQ ID NO: 469090 - DNA, 30 bp, Artificial Sequence
  Synthetic oligonucleotide
taaggtaatccgggtagttccacgcggaac

SEQ ID NO: 469091 - DNA, 30 bp, Artificial Sequence
  Synthetic oligonucleotide
aagatgacagccctgtgatatgcgcggaac

SEQ ID NO: 469092 - DNA, 30 bp, Artificial Sequence
  Synthetic oligonucleotide
ccgctctcaaagaagacatatcggcggaac

SEQ ID NO: 469093 - DNA, 30 bp, Artificial Sequence
  Synthetic oligonucleotide
ctcggtttaccgtgtccaccggggcggaac

SEQ ID NO: 469094 - DNA, 30 bp, Artificial Sequence
  Synthetic oligonucleotide
aaattatcagctgttcccacattgcggaac

SEQ ID NO: 469095 - DNA, 30 bp, Artificial Sequence
  Synthetic oligonucleotide
ctgaattgaatctctttttaaagtcggaac

SEQ ID NO: 469096 - DNA, 30 bp, Artificial Sequence
  Synthetic oligonucleotide
tacagatttcgaccatggttgagtcggaac

SEQ ID NO: 469097 - DNA, 30 bp, Artificial Sequence
  Synthetic oligonucleotide
atcccggtctccttttcagagccagggaac

SEQ ID NO: 469098 - DNA, 30 bp, Artificial Sequence
  Synthetic oligonucleotide
ggcttcgaagggctccagctgatagggaac

SEQ ID NO: 469099 - DNA, 30 bp, Artificial Sequence
  Synthetic oligonucleotide
cgtcttatcttacaatcgcgtcacgggaac

SEQ ID NO: 469100 - DNA, 30 bp, Artificial Sequence
  Synthetic oligonucleotide
gcccacccactccttcatttgtccgggaac

SEQ ID NO: 469101 - DNA, 30 bp, Artificial Sequence
  Synthetic oligonucleotide
actcgacgtgggacacgcgggttggggaac

SEQ ID NO: 469102 - DNA, 30 bp, Artificial Sequence
  Synthetic oligonucleotide
cttttgcaaagcactcctaatcctgggaac

SEQ ID NO: 469103 - DNA, 30 bp, Artificial Sequence
  Synthetic oligonucleotide
gagtgtaccccatcgcccagttaatggaac

SEQ ID NO: 469104 - DNA, 30 bp, Artificial Sequence
  Synthetic oligonucleotide
ttataaacacacaagatacatacatggaac

SEQ ID NO: 469105 - DNA, 30 bp, Artificial Sequence
  Synthetic oligonucleotide
gactaatttgcggaggagtccatatggaac

SEQ ID NO: 469106 - DNA, 30 bp, Artificial Sequence
  Synthetic oligonucleotide
ccgaggaatcctccttaacgcatatggaac

SEQ ID NO: 469107 - DNA, 30 bp, Artificial Sequence
  Synthetic oligonucleotide
tagtgagccaatcgtttgcattggtggaac

SEQ ID NO: 469108 - DNA, 30 bp, Artificial Sequence
  Synthetic oligonucleotide
agatataaatattagatataactcatgaac

SEQ ID NO: 469109 - DNA, 30 bp, Artificial Sequence
  Synthetic oligonucleotide
ccatttcatcgtcttctagataatatgaac

SEQ ID NO: 469110 - DNA, 30 bp, Artificial Sequence
  Synthetic oligonucleotide
gtaagtgatacatcactcgcccctatgaac

SEQ ID NO: 469111 - DNA, 30 bp, Artificial Sequence
  Synthetic oligonucleotide
gtcggagagattgatatggagagtatgaac

SEQ ID NO: 469112 - DNA, 30 bp, Artificial Sequence
  Synthetic oligonucleotide
tatatcaggatgggggagcattgactgaac

SEQ ID NO: 469113 - DNA, 30 bp, Artificial Sequence
  Synthetic oligonucleotide
attcgcccgttgcgaatgcaattactgaac

SEQ ID NO: 469114 - DNA, 30 bp, Artificial Sequence
  Synthetic oligonucleotide
gttgtgacggcggcgggtattcacctgaac

SEQ ID NO: 469115 - DNA, 30 bp, Artificial Sequence
  Synthetic oligonucleotide
caatttgccacacacagtggctgcctgaac

SEQ ID NO: 469116 - DNA, 30 bp, Artificial Sequence
  Synthetic oligonucleotide
accttttttgggtcagagaatactctgaac

SEQ ID NO: 469117 - DNA, 30 bp, Artificial Sequence
  Synthetic oligonucleotide
aatgcgtgtttagagtttactccagtgaac

SEQ ID NO: 469118 - DNA, 30 bp, Artificial Sequence
  Synthetic oligonucleotide
ttaacccactcacgtccactttcagtgaac

SEQ ID NO: 469119 - DNA, 30 bp, Artificial Sequence
  Synthetic oligonucleotide
gctagggttagttctcttcttaccgtgaac

SEQ ID NO: 469120 - DNA, 30 bp, Artificial Sequence
  Synthetic oligonucleotide
ctagtttttaagcgccgaggacgattgaac

SEQ ID NO: 469121 - DNA, 30 bp, Artificial Sequence
  Synthetic oligonucleotide
gcactttatagtcaattcatgggattgaac

SEQ ID NO: 469122 - DNA, 30 bp, Artificial Sequence
  Synthetic oligonucleotide
atttgcaggctcccagtccactacttgaac

SEQ ID NO: 469123 - DNA, 30 bp, Artificial Sequence
  Synthetic oligonucleotide
catgtatgttcattgttgggtatcttgaac

SEQ ID NO: 469124 - DNA, 30 bp, Artificial Sequence
  Synthetic oligonucleotide
gaatccagctattaggggtctcagttgaac

SEQ ID NO: 469125 - DNA, 30 bp, Artificial Sequence
  Synthetic oligonucleotide
tttatagcaggttgaagtccggatttgaac

SEQ ID NO: 469126 - DNA, 30 bp, Artificial Sequence
  Synthetic oligonucleotide
ctagcacgttaagggcctgcacaaaataac

SEQ ID NO: 469127 - DNA, 30 bp, Artificial Sequence
  Synthetic oligonucleotide
tatagctaagcttttcaatttcaaaataac

SEQ ID NO: 469128 - DNA, 30 bp, Artificial Sequence
  Synthetic oligonucleotide
aataatcgtactgtcgcgcaggtaaataac

SEQ ID NO: 469129 - DNA, 30 bp, Artificial Sequence
  Synthetic oligonucleotide
caaacttgtacgaaatttgtgttcaataac

SEQ ID NO: 469130 - DNA, 30 bp, Artificial Sequence
  Synthetic oligonucleotide
cgcgagaataactcaaacctctagaataac

SEQ ID NO: 469131 - DNA, 30 bp, Artificial Sequence
  Synthetic oligonucleotide
tgtagacgccattccagaaggtagaataac

SEQ ID NO: 469132 - DNA, 30 bp, Artificial Sequence
  Synthetic oligonucleotide
cgttttgcctagtactctgctaggaataac

SEQ ID NO: 469133 - DNA, 30 bp, Artificial Sequence
  Synthetic oligonucleotide
gcggtttcactggttccgacagggaataac

SEQ ID NO: 469134 - DNA, 30 bp, Artificial Sequence
  Synthetic oligonucleotide
agggtggtgtaaatgcgcttcatgaataac

SEQ ID NO: 469135 - DNA, 30 bp, Artificial Sequence
  Synthetic oligonucleotide
gatgagaacttttcgcgttacaataataac

SEQ ID NO: 469136 - DNA, 30 bp, Artificial Sequence
  Synthetic oligonucleotide
gtttaactctgagagggtttggataataac

SEQ ID NO: 469137 - DNA, 30 bp, Artificial Sequence
  Synthetic oligonucleotide
acccgtgggttagcttttccttataataac

SEQ ID NO: 469138 - DNA, 30 bp, Artificial Sequence
  Synthetic oligonucleotide
acttgttcttcctcgttcaagattaataac

SEQ ID NO: 469139 - DNA, 30 bp, Artificial Sequence
  Synthetic oligonucleotide
gttttgggtgacggaggatagagccataac

SEQ ID NO: 469140 - DNA, 30 bp, Artificial Sequence
  Synthetic oligonucleotide
tctccttagctagtctaaaaatgccataac

SEQ ID NO: 469141 - DNA, 30 bp, Artificial Sequence
  Synthetic oligonucleotide
ttgtactacgtattgaggaggcggcataac

SEQ ID NO: 469142 - DNA, 30 bp, Artificial Sequence
  Synthetic oligonucleotide
gtcagagacgagatttccgtgtggcataac

SEQ ID NO: 469143 - DNA, 30 bp, Artificial Sequence
  Synthetic oligonucleotide
tatgttatcgggtcctatctgcgtcataac

SEQ ID NO: 469144 - DNA, 30 bp, Artificial Sequence
  Synthetic oligonucleotide
ccaatctattaccgggtagtaatagataac

SEQ ID NO: 469145 - DNA, 30 bp, Artificial Sequence
  Synthetic oligonucleotide
ggtcttaaactgatgcgtttgttagataac

SEQ ID NO: 469146 - DNA, 30 bp, Artificial Sequence
  Synthetic oligonucleotide
agtacgaagcagtcggctcaatacgataac

SEQ ID NO: 469147 - DNA, 30 bp, Artificial Sequence
  Synthetic oligonucleotide
gagtgatgacaaccagatccccaggataac

SEQ ID NO: 469148 - DNA, 30 bp, Artificial Sequence
  Synthetic oligonucleotide
aagtgatagaaccgtgacaccgtggataac

SEQ ID NO: 469149 - DNA, 30 bp, Artificial Sequence
  Synthetic oligonucleotide
ggggaaccaagatatttgggaactgataac

SEQ ID NO: 469150 - DNA, 30 bp, Artificial Sequence
  Synthetic oligonucleotide
tatgcatatggggggtgctgtcctgataac

SEQ ID NO: 469151 - DNA, 30 bp, Artificial Sequence
  Synthetic oligonucleotide
aataggtacgcagtcacaaacagtgataac

SEQ ID NO: 469152 - DNA, 30 bp, Artificial Sequence
  Synthetic oligonucleotide
agtagctgctctagcgcccgcagtgataac

SEQ ID NO: 469153 - DNA, 30 bp, Artificial Sequence
  Synthetic oligonucleotide
cgggcaagtactatatagtgccttgataac

SEQ ID NO: 469154 - DNA, 30 bp, Artificial Sequence
  Synthetic oligonucleotide
gttccctgggcccgagagataatatataac

SEQ ID NO: 469155 - DNA, 30 bp, Artificial Sequence
  Synthetic oligonucleotide
agttgaatgccactaagattttactataac

SEQ ID NO: 469156 - DNA, 30 bp, Artificial Sequence
  Synthetic oligonucleotide
ggtatttcctggactatggaaatctataac

SEQ ID NO: 469157 - DNA, 30 bp, Artificial Sequence
  Synthetic oligonucleotide
ggtaggcaaagatgcaaggtaatctataac

SEQ ID NO: 469158 - DNA, 30 bp, Artificial Sequence
  Synthetic oligonucleotide
gatcagaaaatgccccatgggacgtataac

SEQ ID NO: 469159 - DNA, 30 bp, Artificial Sequence
  Synthetic oligonucleotide
cagtggaccgtctcgctgctgacgtataac

SEQ ID NO: 469160 - DNA, 30 bp, Artificial Sequence
  Synthetic oligonucleotide
tgcgacagagggttatacaacttgtataac

SEQ ID NO: 469161 - DNA, 30 bp, Artificial Sequence
  Synthetic oligonucleotide
ccagaatgttaccacatcaggttgtataac

SEQ ID NO: 469162 - DNA, 30 bp, Artificial Sequence
  Synthetic oligonucleotide
ttcatggacggtcgggtataaaattataac

SEQ ID NO: 469163 - DNA, 30 bp, Artificial Sequence
  Synthetic oligonucleotide
aagcgaccgtacagctacaagaattataac

SEQ ID NO: 469164 - DNA, 30 bp, Artificial Sequence
  Synthetic oligonucleotide
tgttgttaactactggacagccattataac

SEQ ID NO: 469165 - DNA, 30 bp, Artificial Sequence
  Synthetic oligonucleotide
gaagctgcaagataattagatgattataac

SEQ ID NO: 469166 - DNA, 30 bp, Artificial Sequence
  Synthetic oligonucleotide
caagagattttgagagtacggggttataac

SEQ ID NO: 469167 - DNA, 30 bp, Artificial Sequence
  Synthetic oligonucleotide
ctcccagccccatactcgaggctttataac

SEQ ID NO: 469168 - DNA, 30 bp, Artificial Sequence
  Synthetic oligonucleotide
gactttgagaactgagttgaagaaactaac

SEQ ID NO: 469169 - DNA, 30 bp, Artificial Sequence
  Synthetic oligonucleotide
ttgtctgtcgccacgacgccatgaactaac

SEQ ID NO: 469170 - DNA, 31 bp, Artificial Sequence
  Synthetic oligonucleotide
cccttacggggaccataggccgttaactaac

SEQ ID NO: 469171 - DNA, 30 bp, Artificial Sequence
  Synthetic oligonucleotide
tgctacggagcatctatgcaatacactaac

SEQ ID NO: 469172 - DNA, 30 bp, Artificial Sequence
  Synthetic oligonucleotide
gctccggcaaccgtctgttttgagactaac

SEQ ID NO: 469173 - DNA, 30 bp, Artificial Sequence
  Synthetic oligonucleotide
cgctttccgccgttagaagatccgactaac

SEQ ID NO: 469174 - DNA, 30 bp, Artificial Sequence
  Synthetic oligonucleotide
agtttctagtatcgtttcgggatgactaac

SEQ ID NO: 469175 - DNA, 30 bp, Artificial Sequence
  Synthetic oligonucleotide
ttgtatggctgggagattggttcacctaac

SEQ ID NO: 469176 - DNA, 30 bp, Artificial Sequence
  Synthetic oligonucleotide
gttacccaagctgggagccagaggcctaac

SEQ ID NO: 469177 - DNA, 30 bp, Artificial Sequence
  Synthetic oligonucleotide
tgtctttcgaagcggtcatgtgtagctaac

SEQ ID NO: 469178 - DNA, 31 bp, Artificial Sequence
  Synthetic oligonucleotide
tcacatacaaagcagtaacttcggcgctaac

SEQ ID NO: 469179 - DNA, 30 bp, Artificial Sequence
  Synthetic oligonucleotide
ttccctaaccaccccgcgtgatttgctaac

SEQ ID NO: 469180 - DNA, 30 bp, Artificial Sequence
  Synthetic oligonucleotide
ccggggacgcacgtccgccgtaattctaac

SEQ ID NO: 469181 - DNA, 30 bp, Artificial Sequence
  Synthetic oligonucleotide
tgtatgttccctgacttcgccctttctaac

SEQ ID NO: 469182 - DNA, 30 bp, Artificial Sequence
  Synthetic oligonucleotide
actacccccaactatcggagattttctaac

SEQ ID NO: 469183 - DNA, 30 bp, Artificial Sequence
  Synthetic oligonucleotide
tgagtttaacgaccgatttaaaaaagtaac

SEQ ID NO: 469184 - DNA, 30 bp, Artificial Sequence
  Synthetic oligonucleotide
gtccccatgcgcatgcagccccaaagtaac

SEQ ID NO: 469185 - DNA, 30 bp, Artificial Sequence
  Synthetic oligonucleotide
taattctgtttagcttacgcgataagtaac

SEQ ID NO: 469186 - DNA, 30 bp, Artificial Sequence
  Synthetic oligonucleotide
atattgccccggatgtacgatttcagtaac

SEQ ID NO: 469187 - DNA, 30 bp, Artificial Sequence
  Synthetic oligonucleotide
ctgattttccccttgcaattagcgagtaac

SEQ ID NO: 469188 - DNA, 30 bp, Artificial Sequence
  Synthetic oligonucleotide
acgctatcgaacaccgtaacagttagtaac

SEQ ID NO: 469189 - DNA, 30 bp, Artificial Sequence
  Synthetic oligonucleotide
gctaacattcgtaaatcactcccccgtaac

SEQ ID NO: 469190 - DNA, 30 bp, Artificial Sequence
  Synthetic oligonucleotide
gttcgctgctggcggtcggcagggcgtaac

SEQ ID NO: 469191 - DNA, 30 bp, Artificial Sequence
  Synthetic oligonucleotide
cggctttccggtcttaagtgagggcgtaac

SEQ ID NO: 469192 - DNA, 30 bp, Artificial Sequence
  Synthetic oligonucleotide
aaacccaaggtctcgcgcaccttgcgtaac

SEQ ID NO: 469193 - DNA, 30 bp, Artificial Sequence
  Synthetic oligonucleotide
ccctagccctacgcaatcaaggatcgtaac

SEQ ID NO: 469194 - DNA, 30 bp, Artificial Sequence
  Synthetic oligonucleotide
tgtatcggttactcatacgcatgaggtaac

SEQ ID NO: 469195 - DNA, 30 bp, Artificial Sequence
  Synthetic oligonucleotide
atcaggttggcgcgtgtacgcaccggtaac

SEQ ID NO: 469196 - DNA, 30 bp, Artificial Sequence
  Synthetic oligonucleotide
gatttatgcacgatgccgttgatcggtaac

SEQ ID NO: 469197 - DNA, 30 bp, Artificial Sequence
  Synthetic oligonucleotide
aaaacaacctgtaaagctcagctcggtaac

SEQ ID NO: 469198 - DNA, 30 bp, Artificial Sequence
  Synthetic oligonucleotide
ttttaccgcgtatcacatcggttcggtaac

SEQ ID NO: 469199 - DNA, 30 bp, Artificial Sequence
  Synthetic oligonucleotide
gtatcttgtaccttcaagataaatggtaac

SEQ ID NO: 469200 - DNA, 30 bp, Artificial Sequence
  Synthetic oligonucleotide
gcccctgttatcgtagttccgactggtaac

SEQ ID NO: 469201 - DNA, 30 bp, Artificial Sequence
  Synthetic oligonucleotide
aatttaaatagtggaggtacatgatgtaac

SEQ ID NO: 469202 - DNA, 30 bp, Artificial Sequence
  Synthetic oligonucleotide
ctgaagacaagcgctgcgttaaactgtaac

SEQ ID NO: 469203 - DNA, 30 bp, Artificial Sequence
  Synthetic oligonucleotide
agtatgagtgcaatcttacgtcactgtaac

SEQ ID NO: 469204 - DNA, 30 bp, Artificial Sequence
  Synthetic oligonucleotide
aagcggatgtgactagcagtatcctgtaac

SEQ ID NO: 469205 - DNA, 30 bp, Artificial Sequence
  Synthetic oligonucleotide
catttaaacttgtcgcagttctcctgtaac

SEQ ID NO: 469206 - DNA, 29 bp, Artificial Sequence
  Synthetic oligonucleotide
taaatcgtaacagcaacggtggttgtaac

SEQ ID NO: 469207 - DNA, 30 bp, Artificial Sequence
  Synthetic oligonucleotide
catgtgcacagaactagaatatgttgtaac

SEQ ID NO: 469208 - DNA, 30 bp, Artificial Sequence
  Synthetic oligonucleotide
tattgggatctcagatttctaacaattaac

SEQ ID NO: 469209 - DNA, 30 bp, Artificial Sequence
  Synthetic oligonucleotide
gtacgagatgatatgaatcaagtaattaac

SEQ ID NO: 469210 - DNA, 30 bp, Artificial Sequence
  Synthetic oligonucleotide
gaaaatctcgacggtctgcaggtaattaac

SEQ ID NO: 469211 - DNA, 30 bp, Artificial Sequence
  Synthetic oligonucleotide
atcaaattataagtcgtcctacccattaac

SEQ ID NO: 469212 - DNA, 30 bp, Artificial Sequence
  Synthetic oligonucleotide
acgcagtgttgccgtccggaggccattaac

SEQ ID NO: 469213 - DNA, 30 bp, Artificial Sequence
  Synthetic oligonucleotide
gctatgcgaggtttactaggttagattaac

SEQ ID NO: 469214 - DNA, 30 bp, Artificial Sequence
  Synthetic oligonucleotide
aggagaagtttatctggtatcactattaac

SEQ ID NO: 469215 - DNA, 30 bp, Artificial Sequence
  Synthetic oligonucleotide
taccggctcatgtagggaggcggtattaac

SEQ ID NO: 469216 - DNA, 30 bp, Artificial Sequence
  Synthetic oligonucleotide
aattcaataaatcgatcgcgttaccttaac

SEQ ID NO: 469217 - DNA, 30 bp, Artificial Sequence
  Synthetic oligonucleotide
gttttctaaattattctattagcccttaac

SEQ ID NO: 469218 - DNA, 30 bp, Artificial Sequence
  Synthetic oligonucleotide
cccggcaagaggaggcctgctcctcttaac

SEQ ID NO: 469219 - DNA, 30 bp, Artificial Sequence
  Synthetic oligonucleotide
cctcccctgaattcgtggggcttagttaac

SEQ ID NO: 469220 - DNA, 30 bp, Artificial Sequence
  Synthetic oligonucleotide
atacggtctgttcgttttagcgccgttaac

SEQ ID NO: 469221 - DNA, 31 bp, Artificial Sequence
  Synthetic oligonucleotide
ccatgagaccattcggtcgggctatgttaac

SEQ ID NO: 469222 - DNA, 30 bp, Artificial Sequence
  Synthetic oligonucleotide
ttaggtgtacactggcatgaccgtgttaac

SEQ ID NO: 469223 - DNA, 30 bp, Artificial Sequence
  Synthetic oligonucleotide
tgattctgtgttccctcccgcacatttaac

SEQ ID NO: 469224 - DNA, 30 bp, Artificial Sequence
  Synthetic oligonucleotide
gtgtactatcatttgatgggcggatttaac

SEQ ID NO: 469225 - DNA, 30 bp, Artificial Sequence
  Synthetic oligonucleotide
agctcctagtttcaacactaggtatttaac

SEQ ID NO: 469226 - DNA, 30 bp, Artificial Sequence
  Synthetic oligonucleotide
ggccacggaaggtagtttattttctttaac

SEQ ID NO: 469227 - DNA, 30 bp, Artificial Sequence
  Synthetic oligonucleotide
atacgtaatggcactggagtggtgtttaac

SEQ ID NO: 469228 - DNA, 30 bp, Artificial Sequence
  Synthetic oligonucleotide
cactatatggatgactatgaatcttttaac

SEQ ID NO: 469229 - DNA, 30 bp, Artificial Sequence
  Synthetic oligonucleotide
aatctatagtacgcctggcccccaaaacac

SEQ ID NO: 469230 - DNA, 30 bp, Artificial Sequence
  Synthetic oligonucleotide
gtattcgtaccaaagcggcctttaaaacac

SEQ ID NO: 469231 - DNA, 30 bp, Artificial Sequence
  Synthetic oligonucleotide
tattgtttgatgcttcactcaaacaaacac

SEQ ID NO: 469232 - DNA, 30 bp, Artificial Sequence
  Synthetic oligonucleotide
ttaagtggaactaaagttccaagcaaacac

SEQ ID NO: 469233 - DNA, 30 bp, Artificial Sequence
  Synthetic oligonucleotide
aggcacccccagctactccaggagaaacac

SEQ ID NO: 469234 - DNA, 30 bp, Artificial Sequence
  Synthetic oligonucleotide
ttaatgaagtttggagtcaatccgaaacac

SEQ ID NO: 469235 - DNA, 30 bp, Artificial Sequence
  Synthetic oligonucleotide
agtatgcggcgtggtgcccttaataaacac

SEQ ID NO: 469236 - DNA, 30 bp, Artificial Sequence
  Synthetic oligonucleotide
aatgctgcttatgtttaatgtagccaacac

SEQ ID NO: 469237 - DNA, 30 bp, Artificial Sequence
  Synthetic oligonucleotide
ccgccggcacatggcatatcaggccaacac

SEQ ID NO: 469238 - DNA, 30 bp, Artificial Sequence
  Synthetic oligonucleotide
atccctagggttttatagaactaagaacac

SEQ ID NO: 469239 - DNA, 30 bp, Artificial Sequence
  Synthetic oligonucleotide
tatagggtgttcttcacccgatcagaacac

SEQ ID NO: 469240 - DNA, 30 bp, Artificial Sequence
  Synthetic oligonucleotide
taggggagcaggtgcgtaatttgcgaacac

SEQ ID NO: 469241 - DNA, 30 bp, Artificial Sequence
  Synthetic oligonucleotide
tacccctaaaacccacgcccgtgggaacac

SEQ ID NO: 469242 - DNA, 30 bp, Artificial Sequence
  Synthetic oligonucleotide
gcgtcccgtctttatacgacgattgaacac

SEQ ID NO: 469243 - DNA, 30 bp, Artificial Sequence
  Synthetic oligonucleotide
catctactccgcatttaagttattgaacac

SEQ ID NO: 469244 - DNA, 30 bp, Artificial Sequence
  Synthetic oligonucleotide
ctcattactgtgatgcgtcactgataacac

SEQ ID NO: 469245 - DNA, 30 bp, Artificial Sequence
  Synthetic oligonucleotide
gcagatgaagtgcgcagtgagcactaacac

SEQ ID NO: 469246 - DNA, 30 bp, Artificial Sequence
  Synthetic oligonucleotide
cgtctgagtcaacggattgtacagtaacac

SEQ ID NO: 469247 - DNA, 30 bp, Artificial Sequence
  Synthetic oligonucleotide
ttgatctgatagttcgctgcaaggtaacac

SEQ ID NO: 469248 - DNA, 30 bp, Artificial Sequence
  Synthetic oligonucleotide
agacggtcgtttccacgtcctctgtaacac

SEQ ID NO: 469249 - DNA, 30 bp, Artificial Sequence
  Synthetic oligonucleotide
aagtatggatctttagatcccttgtaacac

SEQ ID NO: 469250 - DNA, 30 bp, Artificial Sequence
  Synthetic oligonucleotide
ggccacggtaggcgaatgaatagttaacac

SEQ ID NO: 469251 - DNA, 30 bp, Artificial Sequence
  Synthetic oligonucleotide
catctatccgggccctggcatgtaacacac

SEQ ID NO: 469252 - DNA, 30 bp, Artificial Sequence
  Synthetic oligonucleotide
gtatatgctgcttcttcaatggccacacac

SEQ ID NO: 469253 - DNA, 30 bp, Artificial Sequence
  Synthetic oligonucleotide
gattgcgcggtccgaaaaagtaagacacac

SEQ ID NO: 469254 - DNA, 30 bp, Artificial Sequence
  Synthetic oligonucleotide
gtagatgaagattgaacagagtagacacac

SEQ ID NO: 469255 - DNA, 30 bp, Artificial Sequence
  Synthetic oligonucleotide
gcgggcctaagtacagttttagcgacacac

SEQ ID NO: 469256 - DNA, 30 bp, Artificial Sequence
  Synthetic oligonucleotide
attcaatagtagcagatctaatctacacac

SEQ ID NO: 469257 - DNA, 30 bp, Artificial Sequence
  Synthetic oligonucleotide
gttgatacggatcgttttgacggtacacac

SEQ ID NO: 469258 - DNA, 30 bp, Artificial Sequence
  Synthetic oligonucleotide
gtaataccccctgaggcagaggaaccacac

SEQ ID NO: 469259 - DNA, 30 bp, Artificial Sequence
  Synthetic oligonucleotide
cccctacccccactgccatcccagccacac

SEQ ID NO: 469260 - DNA, 30 bp, Artificial Sequence
  Synthetic oligonucleotide
tatcctgcttattgaaatgcacatccacac

SEQ ID NO: 469261 - DNA, 30 bp, Artificial Sequence
  Synthetic oligonucleotide
aaagtacggcaccttgacgttcgagcacac

SEQ ID NO: 469262 - DNA, 30 bp, Artificial Sequence
  Synthetic oligonucleotide
ttcaaggcttagtatcatctgatagcacac

SEQ ID NO: 469263 - DNA, 30 bp, Artificial Sequence
  Synthetic oligonucleotide
cgccagcgccttaccggaggttacgcacac

SEQ ID NO: 469264 - DNA, 30 bp, Artificial Sequence
  Synthetic oligonucleotide
aaaaatgggcagccccctgcaggcgcacac

SEQ ID NO: 469265 - DNA, 30 bp, Artificial Sequence
  Synthetic oligonucleotide
ccctgggatgaggcttcttcacaggcacac

SEQ ID NO: 469266 - DNA, 30 bp, Artificial Sequence
  Synthetic oligonucleotide
ctctctgaacgttgttgtgtaccggcacac

SEQ ID NO: 469267 - DNA, 30 bp, Artificial Sequence
  Synthetic oligonucleotide
ccattcttccattggcccgacccatcacac

SEQ ID NO: 469268 - DNA, 30 bp, Artificial Sequence
  Synthetic oligonucleotide
agacgtaagggagttcgcgtcgactcacac

SEQ ID NO: 469269 - DNA, 30 bp, Artificial Sequence
  Synthetic oligonucleotide
ctttagtttcgcactgtaaagatctcacac

SEQ ID NO: 469270 - DNA, 30 bp, Artificial Sequence
  Synthetic oligonucleotide
gcagctgtggtgtgttggaacgcgtcacac

SEQ ID NO: 469271 - DNA, 30 bp, Artificial Sequence
  Synthetic oligonucleotide
ccagggcacggtgtacaatatacttcacac

SEQ ID NO: 469272 - DNA, 30 bp, Artificial Sequence
  Synthetic oligonucleotide
gaccgcattcttaattggtacagttcacac

SEQ ID NO: 469273 - DNA, 30 bp, Artificial Sequence
  Synthetic oligonucleotide
gcgtgatctccatcgagccgtacaagacac

SEQ ID NO: 469274 - DNA, 30 bp, Artificial Sequence
  Synthetic oligonucleotide
gctgtacttgatcgaagatgattaagacac

SEQ ID NO: 469275 - DNA, 30 bp, Artificial Sequence
  Synthetic oligonucleotide
tcatgcaagcgggagtgaagtgccagacac

SEQ ID NO: 469276 - DNA, 30 bp, Artificial Sequence
  Synthetic oligonucleotide
aagagcgcatatccgcggcaacgcagacac

SEQ ID NO: 469277 - DNA, 30 bp, Artificial Sequence
  Synthetic oligonucleotide
gaagttcgtagcgctcccatctgcagacac

SEQ ID NO: 469278 - DNA, 30 bp, Artificial Sequence
  Synthetic oligonucleotide
atttagataagtagtgaaacgctgagacac

SEQ ID NO: 469279 - DNA, 30 bp, Artificial Sequence
  Synthetic oligonucleotide
aagggatcctggagcctctgcattagacac

SEQ ID NO: 469280 - DNA, 30 bp, Artificial Sequence
  Synthetic oligonucleotide
aactagggttaagttcttctaaaacgacac

SEQ ID NO: 469281 - DNA, 30 bp, Artificial Sequence
  Synthetic oligonucleotide
actcggcgcgtacgtgatccgtgacgacac

SEQ ID NO: 469282 - DNA, 30 bp, Artificial Sequence
  Synthetic oligonucleotide
gtgcgtagctcagtggcgagtgaccgacac

SEQ ID NO: 469283 - DNA, 30 bp, Artificial Sequence
  Synthetic oligonucleotide
gctgcccagtgctagtattagatgcgacac

SEQ ID NO: 469284 - DNA, 30 bp, Artificial Sequence
  Synthetic oligonucleotide
tctataccgggcatagtcgtgctgcgacac

SEQ ID NO: 469285 - DNA, 30 bp, Artificial Sequence
  Synthetic oligonucleotide
gcctggcaatagctggagctatctcgacac

SEQ ID NO: 469286 - DNA, 30 bp, Artificial Sequence
  Synthetic oligonucleotide
tggtaacatgatgctgatcaccaaggacac

SEQ ID NO: 469287 - DNA, 30 bp, Artificial Sequence
  Synthetic oligonucleotide
ttcaatcttgtaatcggacgtggaggacac

SEQ ID NO: 469288 - DNA, 30 bp, Artificial Sequence
  Synthetic oligonucleotide
ctttattgcaacgtcctatattagggacac

SEQ ID NO: 469289 - DNA, 30 bp, Artificial Sequence
  Synthetic oligonucleotide
catggtcatcccaactacacagcgggacac

SEQ ID NO: 469290 - DNA, 30 bp, Artificial Sequence
  Synthetic oligonucleotide
caattacctccgaaagccgtacggggacac

SEQ ID NO: 469291 - DNA, 30 bp, Artificial Sequence
  Synthetic oligonucleotide
tttcgtctagaatggagatttgggggacac

SEQ ID NO: 469292 - DNA, 30 bp, Artificial Sequence
  Synthetic oligonucleotide
ctttaaaatattatggcataatggggacac

SEQ ID NO: 469293 - DNA, 30 bp, Artificial Sequence
  Synthetic oligonucleotide
ttaatctccaaatccattctgtggggacac

SEQ ID NO: 469294 - DNA, 30 bp, Artificial Sequence
  Synthetic oligonucleotide
accgtcctaaagtattaggaggtgggacac

SEQ ID NO: 469295 - DNA, 30 bp, Artificial Sequence
  Synthetic oligonucleotide
gtcgtggccgactccgtgagaggtggacac

SEQ ID NO: 469296 - DNA, 30 bp, Artificial Sequence
  Synthetic oligonucleotide
ttcacgtccgcacaagatggggttggacac

SEQ ID NO: 469297 - DNA, 30 bp, Artificial Sequence
  Synthetic oligonucleotide
atgatcctttacatagtacttacatgacac

SEQ ID NO: 469298 - DNA, 30 bp, Artificial Sequence
  Synthetic oligonucleotide
gattcacggagtcacctgttcggctgacac

SEQ ID NO: 469299 - DNA, 30 bp, Artificial Sequence
  Synthetic oligonucleotide
gaaaaattaacaaccctcggcaagtgacac

SEQ ID NO: 469300 - DNA, 30 bp, Artificial Sequence
  Synthetic oligonucleotide
aaaggtgtgctgaaccccgcgcagtgacac

SEQ ID NO: 469301 - DNA, 30 bp, Artificial Sequence
  Synthetic oligonucleotide
agtacattttatattacgaaccgttgacac

SEQ ID NO: 469302 - DNA, 30 bp, Artificial Sequence
  Synthetic oligonucleotide
tctcaggtctcgacctgtgtaaaaatacac

SEQ ID NO: 469303 - DNA, 30 bp, Artificial Sequence
  Synthetic oligonucleotide
aatagtttctctaaagattcgtcaatacac

SEQ ID NO: 469304 - DNA, 30 bp, Artificial Sequence
  Synthetic oligonucleotide
gcagttgtactagagaaccgcttaatacac

SEQ ID NO: 469305 - DNA, 30 bp, Artificial Sequence
  Synthetic oligonucleotide
agattttgcgtgtcgcagatcgccatacac

SEQ ID NO: 469306 - DNA, 30 bp, Artificial Sequence
  Synthetic oligonucleotide
attctccccgttcgagaggacagcatacac

SEQ ID NO: 469307 - DNA, 30 bp, Artificial Sequence
  Synthetic oligonucleotide
actatgtatgaggaagttccactcatacac

SEQ ID NO: 469308 - DNA, 30 bp, Artificial Sequence
  Synthetic oligonucleotide
agacttggcttcaagccaagactcatacac

SEQ ID NO: 469309 - DNA, 30 bp, Artificial Sequence
  Synthetic oligonucleotide
ggtcactgggacaatctctatgcgatacac

SEQ ID NO: 469310 - DNA, 30 bp, Artificial Sequence
  Synthetic oligonucleotide
atttgctggttccatccggaatcgatacac

SEQ ID NO: 469311 - DNA, 30 bp, Artificial Sequence
  Synthetic oligonucleotide
cacgggagaacgtggaaacgaatgatacac

SEQ ID NO: 469312 - DNA, 30 bp, Artificial Sequence
  Synthetic oligonucleotide
cagcttcagggcaagtatcacttgatacac

SEQ ID NO: 469313 - DNA, 30 bp, Artificial Sequence
  Synthetic oligonucleotide
acacttaaaatcccattgtattatatacac

SEQ ID NO: 469314 - DNA, 30 bp, Artificial Sequence
  Synthetic oligonucleotide
tccagctggctgatcatatctattatacac

SEQ ID NO: 469315 - DNA, 30 bp, Artificial Sequence
  Synthetic oligonucleotide
gaagcgccaggataagttttaaaactacac

SEQ ID NO: 469316 - DNA, 30 bp, Artificial Sequence
  Synthetic oligonucleotide
aaacctgtccggtgaactaaatgactacac

SEQ ID NO: 469317 - DNA, 30 bp, Artificial Sequence
  Synthetic oligonucleotide
aatagatagcgtcgcgacgaattgctacac

SEQ ID NO: 469318 - DNA, 30 bp, Artificial Sequence
  Synthetic oligonucleotide
ggcgttaaagtatctgttactcgtctacac

SEQ ID NO: 469319 - DNA, 30 bp, Artificial Sequence
  Synthetic oligonucleotide
ctctgtcgcacgaccaccgatggtctacac

SEQ ID NO: 469320 - DNA, 30 bp, Artificial Sequence
  Synthetic oligonucleotide
tcaatagtccgcgcgtggcaggttctacac

SEQ ID NO: 469321 - DNA, 30 bp, Artificial Sequence
  Synthetic oligonucleotide
ggtgttttgctcgagatagcgcaagtacac

SEQ ID NO: 469322 - DNA, 30 bp, Artificial Sequence
  Synthetic oligonucleotide
gacataacattttaaggagcgtaagtacac

SEQ ID NO: 469323 - DNA, 30 bp, Artificial Sequence
  Synthetic oligonucleotide
gttaaggtatgttgtcaggcttaagtacac

SEQ ID NO: 469324 - DNA, 30 bp, Artificial Sequence
  Synthetic oligonucleotide
atttttagaaacttccaatgttacgtacac

SEQ ID NO: 469325 - DNA, 30 bp, Artificial Sequence
  Synthetic oligonucleotide
cgaaagaactgtcaaggactacgcgtacac

SEQ ID NO: 469326 - DNA, 30 bp, Artificial Sequence
  Synthetic oligonucleotide
tcgtagatgtctgtccagtcgttggtacac

SEQ ID NO: 469327 - DNA, 30 bp, Artificial Sequence
  Synthetic oligonucleotide
gctaatagtagcggtgctcccgatgtacac

SEQ ID NO: 469328 - DNA, 30 bp, Artificial Sequence
  Synthetic oligonucleotide
ggcaacgcattgctgtgttctcctgtacac

SEQ ID NO: 469329 - DNA, 30 bp, Artificial Sequence
  Synthetic oligonucleotide
atacccaatgtgtttaacattgttgtacac

SEQ ID NO: 469330 - DNA, 30 bp, Artificial Sequence
  Synthetic oligonucleotide
tataaacgttgtgcgggaattgtattacac

SEQ ID NO: 469331 - DNA, 30 bp, Artificial Sequence
  Synthetic oligonucleotide
aagctagaaagttcacggtcaatcttacac

SEQ ID NO: 469332 - DNA, 30 bp, Artificial Sequence
  Synthetic oligonucleotide
gatgaccggttatatgccgaagcgttacac

SEQ ID NO: 469333 - DNA, 30 bp, Artificial Sequence
  Synthetic oligonucleotide
gaaactccatttccagatacagcgttacac

SEQ ID NO: 469334 - DNA, 30 bp, Artificial Sequence
  Synthetic oligonucleotide
acacagggtaccttttagtaaaggttacac

SEQ ID NO: 469335 - DNA, 30 bp, Artificial Sequence
  Synthetic oligonucleotide
ccctatcatagcaatttggaactgttacac

SEQ ID NO: 469336 - DNA, 30 bp, Artificial Sequence
  Synthetic oligonucleotide
gtaaaaggaacagatcctatgctgttacac

SEQ ID NO: 469337 - DNA, 30 bp, Artificial Sequence
  Synthetic oligonucleotide
tctatcgatatgcggtccaagtcaaaccac

SEQ ID NO: 469338 - DNA, 30 bp, Artificial Sequence
  Synthetic oligonucleotide
accagtctgtcgtaatcacacggaaaccac

SEQ ID NO: 469339 - DNA, 30 bp, Artificial Sequence
  Synthetic oligonucleotide
acccctacttcagaccggccgaggaaccac

SEQ ID NO: 469340 - DNA, 30 bp, Artificial Sequence
  Synthetic oligonucleotide
ttagacctagagcggatgggtaggaaccac

SEQ ID NO: 469341 - DNA, 30 bp, Artificial Sequence
  Synthetic oligonucleotide
ttatgaggatccccgtgtatgcgtaaccac

SEQ ID NO: 469342 - DNA, 30 bp, Artificial Sequence
  Synthetic oligonucleotide
ttccgcaaggcccagtcgttacttaaccac

SEQ ID NO: 469343 - DNA, 30 bp, Artificial Sequence
  Synthetic oligonucleotide
ttctgctaagatccagttgtttttaaccac

SEQ ID NO: 469344 - DNA, 30 bp, Artificial Sequence
  Synthetic oligonucleotide
ctaccgaatcgaggaatgccacgccaccac

SEQ ID NO: 469345 - DNA, 30 bp, Artificial Sequence
  Synthetic oligonucleotide
caaggcttgtggtgcttggtcgcgcaccac

SEQ ID NO: 469346 - DNA, 30 bp, Artificial Sequence
  Synthetic oligonucleotide
ttaatcactataagtcggatgtggcaccac

SEQ ID NO: 469347 - DNA, 30 bp, Artificial Sequence
  Synthetic oligonucleotide
tacggccatatcggatttgtacgtcaccac

SEQ ID NO: 469348 - DNA, 30 bp, Artificial Sequence
  Synthetic oligonucleotide
agcaggatggatcatgaatgcatagaccac

SEQ ID NO: 469349 - DNA, 30 bp, Artificial Sequence
  Synthetic oligonucleotide
attgctgcatgctttcggtgtgtcgaccac

SEQ ID NO: 469350 - DNA, 30 bp, Artificial Sequence
  Synthetic oligonucleotide
tatactgaaatttacgcacgcctataccac

SEQ ID NO: 469351 - DNA, 30 bp, Artificial Sequence
  Synthetic oligonucleotide
tagtttgccgtcctgtgcagccactaccac

SEQ ID NO: 469352 - DNA, 30 bp, Artificial Sequence
  Synthetic oligonucleotide
ttgcccacttaatcggtttgagactaccac

SEQ ID NO: 469353 - DNA, 30 bp, Artificial Sequence
  Synthetic oligonucleotide
ggagagctataacaggcttcatgctaccac

SEQ ID NO: 469354 - DNA, 30 bp, Artificial Sequence
  Synthetic oligonucleotide
atgtgtatgtctagctccatgctctaccac

SEQ ID NO: 469355 - DNA, 30 bp, Artificial Sequence
  Synthetic oligonucleotide
ttatggttaaaacctgttaatgagtaccac

SEQ ID NO: 469356 - DNA, 31 bp, Artificial Sequence
  Synthetic oligonucleotide
aaaagttcattaagccagcgtaaggtaccac

SEQ ID NO: 469357 - DNA, 30 bp, Artificial Sequence
  Synthetic oligonucleotide
gtgtaagctgtggcttcttccttaacccac

SEQ ID NO: 469358 - DNA, 30 bp, Artificial Sequence
  Synthetic oligonucleotide
acccgcttttgcgactgattgcgcacccac

SEQ ID NO: 469359 - DNA, 30 bp, Artificial Sequence
  Synthetic oligonucleotide
tggtcccagtcggcatgcaacgggacccac

SEQ ID NO: 469360 - DNA, 30 bp, Artificial Sequence
  Synthetic oligonucleotide
attgatatccacagagaattttatacccac

SEQ ID NO: 469361 - DNA, 30 bp, Artificial Sequence
  Synthetic oligonucleotide
cccctaaagtcgattgcgaagggtacccac

SEQ ID NO: 469362 - DNA, 25 bp, Artificial Sequence
  Synthetic oligonucleotide
ggcgtgcttttgcttgtttacccac

SEQ ID NO: 469363 - DNA, 30 bp, Artificial Sequence
  Synthetic oligonucleotide
gatgtgctacctcacgcagccgtaccccac

SEQ ID NO: 469364 - DNA, 30 bp, Artificial Sequence
  Synthetic oligonucleotide
cttccgcgcttcgaagtagggcccccccac

SEQ ID NO: 469365 - DNA, 30 bp, Artificial Sequence
  Synthetic oligonucleotide
acaggatgcctgcaagggtctagcccccac

SEQ ID NO: 469366 - DNA, 30 bp, Artificial Sequence
  Synthetic oligonucleotide
aagtcgtgttgatgaggaatacggccccac

SEQ ID NO: 469367 - DNA, 30 bp, Artificial Sequence
  Synthetic oligonucleotide
tgtgccacgcgcttgcgcttggtagcccac

SEQ ID NO: 469368 - DNA, 30 bp, Artificial Sequence
  Synthetic oligonucleotide
gtgtccgcattaactttggtaggcgcccac

SEQ ID NO: 469369 - DNA, 30 bp, Artificial Sequence
  Synthetic oligonucleotide
agaaatcctgatcgttctaacagggcccac

SEQ ID NO: 469370 - DNA, 30 bp, Artificial Sequence
  Synthetic oligonucleotide
gcagacccggaggcgccggtcgtggcccac

SEQ ID NO: 469371 - DNA, 30 bp, Artificial Sequence
  Synthetic oligonucleotide
aagtttcccaagcgttctaaggtggcccac

SEQ ID NO: 469372 - DNA, 30 bp, Artificial Sequence
  Synthetic oligonucleotide
gtcggtgcggggcaagtagcaagatcccac

SEQ ID NO: 469373 - DNA, 30 bp, Artificial Sequence
  Synthetic oligonucleotide
tatcgcgtaggagctagatcatactcccac

SEQ ID NO: 469374 - DNA, 30 bp, Artificial Sequence
  Synthetic oligonucleotide
tgtttacacggcgtttattgggcctcccac

SEQ ID NO: 469375 - DNA, 30 bp, Artificial Sequence
  Synthetic oligonucleotide
cgggctctatgtggtcctgcattgtcccac

SEQ ID NO: 469376 - DNA, 30 bp, Artificial Sequence
  Synthetic oligonucleotide
caggtgttcaacggccaaaaacaaagccac

SEQ ID NO: 469377 - DNA, 30 bp, Artificial Sequence
  Synthetic oligonucleotide
gccgccaatggagtttgtttaacaagccac

SEQ ID NO: 469378 - DNA, 30 bp, Artificial Sequence
  Synthetic oligonucleotide
acattatgcttaccaccaccgccgagccac

SEQ ID NO: 469379 - DNA, 30 bp, Artificial Sequence
  Synthetic oligonucleotide
atattagtcgatgcgtttcaagatagccac

SEQ ID NO: 469380 - DNA, 30 bp, Artificial Sequence
  Synthetic oligonucleotide
acccgggctgtgagaccacgccttagccac

SEQ ID NO: 469381 - DNA, 28 bp, Artificial Sequence
  Synthetic oligonucleotide
aaatccgagatttaacttagaacgccac

SEQ ID NO: 469382 - DNA, 30 bp, Artificial Sequence
  Synthetic oligonucleotide
attgggtttctctagtgcccgccccgccac

SEQ ID NO: 469383 - DNA, 30 bp, Artificial Sequence
  Synthetic oligonucleotide
agttttttggttttatcggactcgcgccac

SEQ ID NO: 469384 - DNA, 30 bp, Artificial Sequence
  Synthetic oligonucleotide
cagagccagagattagtgaagcaaggccac

SEQ ID NO: 469385 - DNA, 30 bp, Artificial Sequence
  Synthetic oligonucleotide
acggactggcggaatatatggccaggccac

SEQ ID NO: 469386 - DNA, 30 bp, Artificial Sequence
  Synthetic oligonucleotide
atgtccttggtttagtcactaggaggccac

SEQ ID NO: 469387 - DNA, 30 bp, Artificial Sequence
  Synthetic oligonucleotide
gtctcgacttgtaaaccgttttgaggccac

SEQ ID NO: 469388 - DNA, 30 bp, Artificial Sequence
  Synthetic oligonucleotide
catcactatttacttgcctaacgcggccac

SEQ ID NO: 469389 - DNA, 30 bp, Artificial Sequence
  Synthetic oligonucleotide
catctgggaaagttttccagctcgggccac

SEQ ID NO: 469390 - DNA, 30 bp, Artificial Sequence
  Synthetic oligonucleotide
cccgctatgataaggcgcgggcggggccac

SEQ ID NO: 469391 - DNA, 30 bp, Artificial Sequence
  Synthetic oligonucleotide
taaagttgtcgtgagccaattgatggccac

SEQ ID NO: 469392 - DNA, 30 bp, Artificial Sequence
  Synthetic oligonucleotide
gtcttttaatagtgggctcatactggccac

SEQ ID NO: 469393 - DNA, 30 bp, Artificial Sequence
  Synthetic oligonucleotide
gtcgtgggtagagatagtgaatttggccac

SEQ ID NO: 469394 - DNA, 30 bp, Artificial Sequence
  Synthetic oligonucleotide
aaaagtacaagaagcgctcatcaatgccac

SEQ ID NO: 469395 - DNA, 30 bp, Artificial Sequence
  Synthetic oligonucleotide
ttaggcttgcgcccacgctgctagtgccac

SEQ ID NO: 469396 - DNA, 30 bp, Artificial Sequence
  Synthetic oligonucleotide
taatattaagctggtagaatgacgtgccac

SEQ ID NO: 469397 - DNA, 30 bp, Artificial Sequence
  Synthetic oligonucleotide
gcactgagaggtatatcccttgtgtgccac

SEQ ID NO: 469398 - DNA, 30 bp, Artificial Sequence
  Synthetic oligonucleotide
gagtcagatgattggaccagtttgtgccac

SEQ ID NO: 469399 - DNA, 30 bp, Artificial Sequence
  Synthetic oligonucleotide
aattaaacaaccgattcgtagtcaatccac

SEQ ID NO: 469400 - DNA, 30 bp, Artificial Sequence
  Synthetic oligonucleotide
ccacgcctcctgaagttgtgcgggatccac

SEQ ID NO: 469401 - DNA, 30 bp, Artificial Sequence
  Synthetic oligonucleotide
ggcttctgagtagtcgagggactactccac

SEQ ID NO: 469402 - DNA, 30 bp, Artificial Sequence
  Synthetic oligonucleotide
gcaggggagcatatgcggtatcgcctccac

SEQ ID NO: 469403 - DNA, 30 bp, Artificial Sequence
  Synthetic oligonucleotide
ccgtggggaccttactgtgtatagctccac

SEQ ID NO: 469404 - DNA, 30 bp, Artificial Sequence
  Synthetic oligonucleotide
gctcggttatggtcaaattacgggctccac

SEQ ID NO: 469405 - DNA, 30 bp, Artificial Sequence
  Synthetic oligonucleotide
gtggtcctgagcgcgcgtcgcactctccac

SEQ ID NO: 469406 - DNA, 30 bp, Artificial Sequence
  Synthetic oligonucleotide
atagcacaaatggtgcacgcgccggtccac

SEQ ID NO: 469407 - DNA, 30 bp, Artificial Sequence
  Synthetic oligonucleotide
acttgtcgggacctgtcaccgttggtccac

SEQ ID NO: 469408 - DNA, 30 bp, Artificial Sequence
  Synthetic oligonucleotide
aaacccgtcaatgcctactaacttgtccac

SEQ ID NO: 469409 - DNA, 30 bp, Artificial Sequence
  Synthetic oligonucleotide
cctccgctactaaataatctgtttgtccac

SEQ ID NO: 469410 - DNA, 30 bp, Artificial Sequence
  Synthetic oligonucleotide
cataggtcttctaccattttttggttccac

SEQ ID NO: 469411 - DNA, 30 bp, Artificial Sequence
  Synthetic oligonucleotide
atctgtagatagatatctagattaaagcac

SEQ ID NO: 469412 - DNA, 30 bp, Artificial Sequence
  Synthetic oligonucleotide
cgaagcgtccgcactaccaagcggaagcac

SEQ ID NO: 469413 - DNA, 30 bp, Artificial Sequence
  Synthetic oligonucleotide
cggtacaggtcgggggtgaatctgaagcac

SEQ ID NO: 469414 - DNA, 30 bp, Artificial Sequence
  Synthetic oligonucleotide
atcggatacattgacgcatactttaagcac

SEQ ID NO: 469415 - DNA, 30 bp, Artificial Sequence
  Synthetic oligonucleotide
tttcgtactatgctgttggcatgccagcac

SEQ ID NO: 469416 - DNA, 30 bp, Artificial Sequence
  Synthetic oligonucleotide
gaaaaggaagcactctaataaaggcagcac

SEQ ID NO: 469417 - DNA, 30 bp, Artificial Sequence
  Synthetic oligonucleotide
tgtatcgtgattttccacgtccatcagcac

SEQ ID NO: 469418 - DNA, 30 bp, Artificial Sequence
  Synthetic oligonucleotide
gcagtttctacttaagtcgaatatcagcac

SEQ ID NO: 469419 - DNA, 30 bp, Artificial Sequence
  Synthetic oligonucleotide
tttgtggccattaggcttgcttttcagcac

SEQ ID NO: 469420 - DNA, 30 bp, Artificial Sequence
  Synthetic oligonucleotide
ttatgacggcatttcggggcgctagagcac

SEQ ID NO: 469421 - DNA, 30 bp, Artificial Sequence
  Synthetic oligonucleotide
ctccaacgggaccatctaacgctcgagcac

SEQ ID NO: 469422 - DNA, 30 bp, Artificial Sequence
  Synthetic oligonucleotide
gtccaccgagcatgtgttagacgggagcac

SEQ ID NO: 469423 - DNA, 30 bp, Artificial Sequence
  Synthetic oligonucleotide
ttgtatacaccttcatacattggggagcac

SEQ ID NO: 469424 - DNA, 30 bp, Artificial Sequence
  Synthetic oligonucleotide
agatactagcgagtcgaataccctgagcac

SEQ ID NO: 469425 - DNA, 30 bp, Artificial Sequence
  Synthetic oligonucleotide
gtgtctattcatggttgttccgcatagcac

SEQ ID NO: 469426 - DNA, 30 bp, Artificial Sequence
  Synthetic oligonucleotide
ctccatttgtcaagttgaagcagatagcac

SEQ ID NO: 469427 - DNA, 30 bp, Artificial Sequence
  Synthetic oligonucleotide
cataccgggtctgtccgttagtcgtagcac

SEQ ID NO: 469428 - DNA, 30 bp, Artificial Sequence
  Synthetic oligonucleotide
cgacttactaaatttgcctcgatgtagcac

SEQ ID NO: 469429 - DNA, 30 bp, Artificial Sequence
  Synthetic oligonucleotide
attcatgcacaatactttgaattttagcac

SEQ ID NO: 469430 - DNA, 30 bp, Artificial Sequence
  Synthetic oligonucleotide
tactgcgcggtattctgggtgacgacgcac

SEQ ID NO: 469431 - DNA, 30 bp, Artificial Sequence
  Synthetic oligonucleotide
ggtctgtttaattggtgctcctatacgcac

SEQ ID NO: 469432 - DNA, 30 bp, Artificial Sequence
  Synthetic oligonucleotide
attagtataaatatacaagcacttacgcac

SEQ ID NO: 469433 - DNA, 30 bp, Artificial Sequence
  Synthetic oligonucleotide
aaatccattagtgtcgtttttgttacgcac

SEQ ID NO: 469434 - DNA, 30 bp, Artificial Sequence
  Synthetic oligonucleotide
ttcataagggaagttgtggagtaaccgcac

SEQ ID NO: 469435 - DNA, 30 bp, Artificial Sequence
  Synthetic oligonucleotide
cgatctcatcttggtggagtggggccgcac

SEQ ID NO: 469436 - DNA, 30 bp, Artificial Sequence
  Synthetic oligonucleotide
gtggacattcagggggtgcgggctccgcac

SEQ ID NO: 469437 - DNA, 30 bp, Artificial Sequence
  Synthetic oligonucleotide
gacgtctgctgatgttttattgttccgcac

SEQ ID NO: 469438 - DNA, 30 bp, Artificial Sequence
  Synthetic oligonucleotide
atacgctctatgtatttccgttttccgcac

SEQ ID NO: 469439 - DNA, 30 bp, Artificial Sequence
  Synthetic oligonucleotide
ttttcaccaactggtaccccacgagcgcac

SEQ ID NO: 469440 - DNA, 30 bp, Artificial Sequence
  Synthetic oligonucleotide
ctacctgatttggggtcggagcacgcgcac

SEQ ID NO: 469441 - DNA, 30 bp, Artificial Sequence
  Synthetic oligonucleotide
gtcaggaggccaaggctgagttaggcgcac

SEQ ID NO: 469442 - DNA, 30 bp, Artificial Sequence
  Synthetic oligonucleotide
acttcgttggttaggtaggaatcggcgcac

SEQ ID NO: 469443 - DNA, 30 bp, Artificial Sequence
  Synthetic oligonucleotide
gtcgcctaaacatcatagacccttgcgcac

SEQ ID NO: 469444 - DNA, 30 bp, Artificial Sequence
  Synthetic oligonucleotide
ggaggtccgcccgcttatgagatatcgcac

SEQ ID NO: 469445 - DNA, 30 bp, Artificial Sequence
  Synthetic oligonucleotide
tttgaaaattatcgcaggagaacctcgcac

SEQ ID NO: 469446 - DNA, 30 bp, Artificial Sequence
  Synthetic oligonucleotide
tcttgattccatgatatcagatgctcgcac

SEQ ID NO: 469447 - DNA, 30 bp, Artificial Sequence
  Synthetic oligonucleotide
gatgaccccttcacaaactattgctcgcac

SEQ ID NO: 469448 - DNA, 30 bp, Artificial Sequence
  Synthetic oligonucleotide
atgtgattatcagcttatatttagtcgcac

SEQ ID NO: 469449 - DNA, 30 bp, Artificial Sequence
  Synthetic oligonucleotide
ccatgccagctccagcctcatctgtcgcac

SEQ ID NO: 469450 - DNA, 30 bp, Artificial Sequence
  Synthetic oligonucleotide
tggtgttgatttgcgtgggttctgtcgcac

SEQ ID NO: 469451 - DNA, 30 bp, Artificial Sequence
  Synthetic oligonucleotide
cccttggttcgacaccaatacttgtcgcac

SEQ ID NO: 469452 - DNA, 30 bp, Artificial Sequence
  Synthetic oligonucleotide
cgggttcgtagtctggcagagctttcgcac

SEQ ID NO: 469453 - DNA, 30 bp, Artificial Sequence
  Synthetic oligonucleotide
ccatccctcctttgggtctatctttcgcac

SEQ ID NO: 469454 - DNA, 30 bp, Artificial Sequence
  Synthetic oligonucleotide
tgcttcatgcgcacgcattgtacaaggcac

SEQ ID NO: 469455 - DNA, 30 bp, Artificial Sequence
  Synthetic oligonucleotide
atgaactgaactaactagaagtagaggcac

SEQ ID NO: 469456 - DNA, 30 bp, Artificial Sequence
  Synthetic oligonucleotide
cttgactatggttgcggtgcgtctaggcac

SEQ ID NO: 469457 - DNA, 30 bp, Artificial Sequence
  Synthetic oligonucleotide
cgttgaaggcataaacgtactggtaggcac

SEQ ID NO: 469458 - DNA, 30 bp, Artificial Sequence
  Synthetic oligonucleotide
ccccatttgctcatcatcgcggaacggcac

SEQ ID NO: 469459 - DNA, 30 bp, Artificial Sequence
  Synthetic oligonucleotide
agggagccctgtattggatagccacggcac

SEQ ID NO: 469460 - DNA, 30 bp, Artificial Sequence
  Synthetic oligonucleotide
taatatgtttggacgtgccgtccccggcac

SEQ ID NO: 469461 - DNA, 30 bp, Artificial Sequence
  Synthetic oligonucleotide
cagtccgctatgtcgggatacctccggcac

SEQ ID NO: 469462 - DNA, 30 bp, Artificial Sequence
  Synthetic oligonucleotide
ttggtcgatggattgcgtctgcagcggcac

SEQ ID NO: 469463 - DNA, 30 bp, Artificial Sequence
  Synthetic oligonucleotide
tttccaagcttgccggattaggtgcggcac

SEQ ID NO: 469464 - DNA, 30 bp, Artificial Sequence
  Synthetic oligonucleotide
ataaagcaacacgcagtcgtgcttcggcac

SEQ ID NO: 469465 - DNA, 30 bp, Artificial Sequence
  Synthetic oligonucleotide
agcatctgagagaagatccggtacgggcac

SEQ ID NO: 469466 - DNA, 30 bp, Artificial Sequence
  Synthetic oligonucleotide
ggcagtaggaaaccatgaaatcccgggcac

SEQ ID NO: 469467 - DNA, 30 bp, Artificial Sequence
  Synthetic oligonucleotide
acgtgcgtacgaggtcttgtcctcgggcac

SEQ ID NO: 469468 - DNA, 30 bp, Artificial Sequence
  Synthetic oligonucleotide
caaatggaggacgcaggggagtcggggcac

SEQ ID NO: 469469 - DNA, 31 bp, Artificial Sequence
  Synthetic oligonucleotide
ggtttggcaagagttcttagtttctgggcac

SEQ ID NO: 469470 - DNA, 30 bp, Artificial Sequence
  Synthetic oligonucleotide
ataagtacaggatcgatttaatcctggcac

SEQ ID NO: 469471 - DNA, 30 bp, Artificial Sequence
  Synthetic oligonucleotide
gtaggtctcttccgatgttttcgctggcac

SEQ ID NO: 469472 - DNA, 30 bp, Artificial Sequence
  Synthetic oligonucleotide
aatgtaggtgggacccgtccagggtggcac

SEQ ID NO: 469473 - DNA, 30 bp, Artificial Sequence
  Synthetic oligonucleotide
cagggatagtataggtatactccttggcac

SEQ ID NO: 469474 - DNA, 30 bp, Artificial Sequence
  Synthetic oligonucleotide
attgagtgctgcagccgacacgcttggcac

SEQ ID NO: 469475 - DNA, 30 bp, Artificial Sequence
  Synthetic oligonucleotide
caaatcgatcacagaggcttgagttggcac

SEQ ID NO: 469476 - DNA, 30 bp, Artificial Sequence
  Synthetic oligonucleotide
actcactctatagttacacacgtttggcac

SEQ ID NO: 469477 - DNA, 30 bp, Artificial Sequence
  Synthetic oligonucleotide
ttaagagtcttggccttctaatcaatgcac

SEQ ID NO: 469478 - DNA, 30 bp, Artificial Sequence
  Synthetic oligonucleotide
ttataccgggtccctgcgtaattcatgcac

SEQ ID NO: 469479 - DNA, 30 bp, Artificial Sequence
  Synthetic oligonucleotide
gaatcagtcattgtagtctagtagatgcac

SEQ ID NO: 469480 - DNA, 30 bp, Artificial Sequence
  Synthetic oligonucleotide
tgtttcccggagagcagtgacaggatgcac

SEQ ID NO: 469481 - DNA, 30 bp, Artificial Sequence
  Synthetic oligonucleotide
cttcgtcgcaggacgcaatgcatgatgcac

SEQ ID NO: 469482 - DNA, 30 bp, Artificial Sequence
  Synthetic oligonucleotide
taacccactcagtcagttcttcatatgcac

SEQ ID NO: 469483 - DNA, 30 bp, Artificial Sequence
  Synthetic oligonucleotide
taagaagttattcttatgtatgatatgcac

SEQ ID NO: 469484 - DNA, 30 bp, Artificial Sequence
  Synthetic oligonucleotide
gatgatgaagctatctggaattatatgcac

SEQ ID NO: 469485 - DNA, 30 bp, Artificial Sequence
  Synthetic oligonucleotide
ctccatcgatggtgcgacggtacgctgcac

SEQ ID NO: 469486 - DNA, 30 bp, Artificial Sequence
  Synthetic oligonucleotide
cccatgccatcgcgctaagggtcgctgcac

SEQ ID NO: 469487 - DNA, 30 bp, Artificial Sequence
  Synthetic oligonucleotide
tgaaatacaaagtcttatccttaagtgcac

SEQ ID NO: 469488 - DNA, 30 bp, Artificial Sequence
  Synthetic oligonucleotide
taatattctgcaggtcacccgagagtgcac

SEQ ID NO: 469489 - DNA, 30 bp, Artificial Sequence
  Synthetic oligonucleotide
ctccacatttgtagatccacgcacgtgcac

SEQ ID NO: 469490 - DNA, 30 bp, Artificial Sequence
  Synthetic oligonucleotide
agacagctatcagtgtatctagccgtgcac

SEQ ID NO: 469491 - DNA, 30 bp, Artificial Sequence
  Synthetic oligonucleotide
gagcttcgtagattaatatctgccgtgcac

SEQ ID NO: 469492 - DNA, 30 bp, Artificial Sequence
  Synthetic oligonucleotide
cagatccccgcgcaccggacataggtgcac

SEQ ID NO: 469493 - DNA, 30 bp, Artificial Sequence
  Synthetic oligonucleotide
gcggcagagccaggtcctatgtaggtgcac

SEQ ID NO: 469494 - DNA, 30 bp, Artificial Sequence
  Synthetic oligonucleotide
ctgtaccttacgaacggagtgctggtgcac

SEQ ID NO: 469495 - DNA, 30 bp, Artificial Sequence
  Synthetic oligonucleotide
gggatgcggtaatagtcgaaattggtgcac

SEQ ID NO: 469496 - DNA, 30 bp, Artificial Sequence
  Synthetic oligonucleotide
gaatcctgacctctgtattcgattgtgcac

SEQ ID NO: 469497 - DNA, 30 bp, Artificial Sequence
  Synthetic oligonucleotide
cagctttacgtatcctcggacgaattgcac

SEQ ID NO: 469498 - DNA, 30 bp, Artificial Sequence
  Synthetic oligonucleotide
gtgtgtgtgtcggatcgacgtttcttgcac

SEQ ID NO: 469499 - DNA, 30 bp, Artificial Sequence
  Synthetic oligonucleotide
gtcggaaatgttgaatgcttctatttgcac

SEQ ID NO: 469500 - DNA, 30 bp, Artificial Sequence
  Synthetic oligonucleotide
cccagaaccggggctccgaggcaaaatcac

SEQ ID NO: 469501 - DNA, 30 bp, Artificial Sequence
  Synthetic oligonucleotide
gaacctagcacatgtggggcttaaaatcac

SEQ ID NO: 469502 - DNA, 30 bp, Artificial Sequence
  Synthetic oligonucleotide
ttctgtgacaattcattgcatcacaatcac

SEQ ID NO: 469503 - DNA, 30 bp, Artificial Sequence
  Synthetic oligonucleotide
agagcggcatacggccgctcagccaatcac

SEQ ID NO: 469504 - DNA, 30 bp, Artificial Sequence
  Synthetic oligonucleotide
ggagtagtcggcttgtatatggggaatcac

SEQ ID NO: 469505 - DNA, 30 bp, Artificial Sequence
  Synthetic oligonucleotide
taatagctcaagagactacaatggaatcac

SEQ ID NO: 469506 - DNA, 30 bp, Artificial Sequence
  Synthetic oligonucleotide
attggtattcgtcgacctcgcatgaatcac

SEQ ID NO: 469507 - DNA, 30 bp, Artificial Sequence
  Synthetic oligonucleotide
tcgaccgctggcttctatactgataatcac

SEQ ID NO: 469508 - DNA, 30 bp, Artificial Sequence
  Synthetic oligonucleotide
ttatagcatccgggttaagcatataatcac

SEQ ID NO: 469509 - DNA, 30 bp, Artificial Sequence
  Synthetic oligonucleotide
gagtcgaagcgactaataatctataatcac

SEQ ID NO: 469510 - DNA, 30 bp, Artificial Sequence
  Synthetic oligonucleotide
aacaaataggccgctacggagtataatcac

SEQ ID NO: 469511 - DNA, 30 bp, Artificial Sequence
  Synthetic oligonucleotide
aactataaacgctttatatacaaacatcac

SEQ ID NO: 469512 - DNA, 30 bp, Artificial Sequence
  Synthetic oligonucleotide
atcagcctaatgtatgttgagtaacatcac

SEQ ID NO: 469513 - DNA, 30 bp, Artificial Sequence
  Synthetic oligonucleotide
gaattctccggtgataggcagatacatcac

SEQ ID NO: 469514 - DNA, 30 bp, Artificial Sequence
  Synthetic oligonucleotide
gacagcggtttctgcagtccatcccatcac

SEQ ID NO: 469515 - DNA, 30 bp, Artificial Sequence
  Synthetic oligonucleotide
aaataataattgctcccacatagccatcac

SEQ ID NO: 469516 - DNA, 30 bp, Artificial Sequence
  Synthetic oligonucleotide
ttacataaatcactcgcatgaggccatcac

SEQ ID NO: 469517 - DNA, 30 bp, Artificial Sequence
  Synthetic oligonucleotide
ttcaggggtcactcaaccgggatccatcac

SEQ ID NO: 469518 - DNA, 30 bp, Artificial Sequence
  Synthetic oligonucleotide
tgcagatgtgccgattccattgagcatcac

SEQ ID NO: 469519 - DNA, 30 bp, Artificial Sequence
  Synthetic oligonucleotide
tactcgcatgcaatcctggacgcgcatcac

SEQ ID NO: 469520 - DNA, 30 bp, Artificial Sequence
  Synthetic oligonucleotide
gtctaaaaccgtgatcctccacacgatcac

SEQ ID NO: 469521 - DNA, 30 bp, Artificial Sequence
  Synthetic oligonucleotide
tgcttcgcatgtgcacccaattgcgatcac

SEQ ID NO: 469522 - DNA, 30 bp, Artificial Sequence
  Synthetic oligonucleotide
tcatggtatcactaagcccttaaggatcac

SEQ ID NO: 469523 - DNA, 30 bp, Artificial Sequence
  Synthetic oligonucleotide
agaggtgaccatccgtgcacatgggatcac

SEQ ID NO: 469524 - DNA, 30 bp, Artificial Sequence
  Synthetic oligonucleotide
aattgttagcactgtggggtttgggatcac

SEQ ID NO: 469525 - DNA, 29 bp, Artificial Sequence
  Synthetic oligonucleotide
tccggagcgtctgcatagggatggatcac

SEQ ID NO: 469526 - DNA, 30 bp, Artificial Sequence
  Synthetic oligonucleotide
aacaatgcacacgcagaatgaaatgatcac

SEQ ID NO: 469527 - DNA, 30 bp, Artificial Sequence
  Synthetic oligonucleotide
aactgggcatgcggtggagccactgatcac

SEQ ID NO: 469528 - DNA, 30 bp, Artificial Sequence
  Synthetic oligonucleotide
cgctgggtatgatggaggaaaccatatcac

SEQ ID NO: 469529 - DNA, 30 bp, Artificial Sequence
  Synthetic oligonucleotide
tggtataagtcgaaaatcggtccatatcac

SEQ ID NO: 469530 - DNA, 30 bp, Artificial Sequence
  Synthetic oligonucleotide
ttcaacggcgctgggattgcctcctatcac

SEQ ID NO: 469531 - DNA, 30 bp, Artificial Sequence
  Synthetic oligonucleotide
gaattaggtttgctcgctaaacgctatcac

SEQ ID NO: 469532 - DNA, 30 bp, Artificial Sequence
  Synthetic oligonucleotide
cctttacaggagctcagtcacgtgtatcac

SEQ ID NO: 469533 - DNA, 30 bp, Artificial Sequence
  Synthetic oligonucleotide
ttccttccaggtggcttttaatattatcac

SEQ ID NO: 469534 - DNA, 30 bp, Artificial Sequence
  Synthetic oligonucleotide
ggctgatgcaacggtggttgcgccactcac

SEQ ID NO: 469535 - DNA, 30 bp, Artificial Sequence
  Synthetic oligonucleotide
taaatggagctcgccgaccttggcactcac

SEQ ID NO: 469536 - DNA, 30 bp, Artificial Sequence
  Synthetic oligonucleotide
cacggttttggagagcgaccccagactcac

SEQ ID NO: 469537 - DNA, 30 bp, Artificial Sequence
  Synthetic oligonucleotide
tttaaggacctgcttttttgcacgactcac

SEQ ID NO: 469538 - DNA, 30 bp, Artificial Sequence
  Synthetic oligonucleotide
agccagtgtacttaacaattaaatactcac

SEQ ID NO: 469539 - DNA, 30 bp, Artificial Sequence
  Synthetic oligonucleotide
acccggccaagcagtagggttcgacctcac

SEQ ID NO: 469540 - DNA, 30 bp, Artificial Sequence
  Synthetic oligonucleotide
accgcagcacgttgatacgactaccctcac

SEQ ID NO: 469541 - DNA, 30 bp, Artificial Sequence
  Synthetic oligonucleotide
cgcggtccttccttccagtaacagcctcac

SEQ ID NO: 469542 - DNA, 30 bp, Artificial Sequence
  Synthetic oligonucleotide
tctctggtctttaaaaatggttcgcctcac

SEQ ID NO: 469543 - DNA, 30 bp, Artificial Sequence
  Synthetic oligonucleotide
ttttcaacctgaaagatctatcctcctcac

SEQ ID NO: 469544 - DNA, 30 bp, Artificial Sequence
  Synthetic oligonucleotide
agtgtttgtgcaagccttattccggctcac

SEQ ID NO: 469545 - DNA, 30 bp, Artificial Sequence
  Synthetic oligonucleotide
ttgacactgtgttataagcccgtggctcac

SEQ ID NO: 469546 - DNA, 30 bp, Artificial Sequence
  Synthetic oligonucleotide
cctcaccgacacgtcttagacaatgctcac

SEQ ID NO: 469547 - DNA, 30 bp, Artificial Sequence
  Synthetic oligonucleotide
tcaattagcgcataccgtcgataatctcac

SEQ ID NO: 469548 - DNA, 30 bp, Artificial Sequence
  Synthetic oligonucleotide
gacgtgatttgtccacctcgcctatctcac

SEQ ID NO: 469549 - DNA, 30 bp, Artificial Sequence
  Synthetic oligonucleotide
gattactcccaataaattatgcgcagtcac

SEQ ID NO: 469550 - DNA, 30 bp, Artificial Sequence
  Synthetic oligonucleotide
gagtaaccacattgtggataggagagtcac

SEQ ID NO: 469551 - DNA, 30 bp, Artificial Sequence
  Synthetic oligonucleotide
ggactagtgacgtactactaggggagtcac

SEQ ID NO: 469552 - DNA, 30 bp, Artificial Sequence
  Synthetic oligonucleotide
gccgaacggttgttcgtgctcgcacgtcac

SEQ ID NO: 469553 - DNA, 30 bp, Artificial Sequence
  Synthetic oligonucleotide
taatcagcttcattggattccgccggtcac

SEQ ID NO: 469554 - DNA, 30 bp, Artificial Sequence
  Synthetic oligonucleotide
gcatttttgagcaaactaacggtcggtcac

SEQ ID NO: 469555 - DNA, 30 bp, Artificial Sequence
  Synthetic oligonucleotide
agcaaattttccggttcggagccgggtcac

SEQ ID NO: 469556 - DNA, 28 bp, Artificial Sequence
  Synthetic oligonucleotide
actctgggttagcaacacttcgggtcac

SEQ ID NO: 469557 - DNA, 30 bp, Artificial Sequence
  Synthetic oligonucleotide
catgcggcctctacttatgagcggggtcac

SEQ ID NO: 469558 - DNA, 30 bp, Artificial Sequence
  Synthetic oligonucleotide
gaccgccatgaagcatccgggctatgtcac

SEQ ID NO: 469559 - DNA, 30 bp, Artificial Sequence
  Synthetic oligonucleotide
ttctgttttcagaataatgagaagtgtcac

SEQ ID NO: 469560 - DNA, 30 bp, Artificial Sequence
  Synthetic oligonucleotide
atcgagtccttgccagcctgtaggtgtcac

SEQ ID NO: 469561 - DNA, 30 bp, Artificial Sequence
  Synthetic oligonucleotide
aacttaaacgttgattgtagtttgtgtcac

SEQ ID NO: 469562 - DNA, 30 bp, Artificial Sequence
  Synthetic oligonucleotide
aacggaggtgtaagcgccgggtcttgtcac

SEQ ID NO: 469563 - DNA, 30 bp, Artificial Sequence
  Synthetic oligonucleotide
atacgccgcgggaaatactaatgcattcac

SEQ ID NO: 469564 - DNA, 30 bp, Artificial Sequence
  Synthetic oligonucleotide
ctttcaatacagtgcgacgttgggattcac

SEQ ID NO: 469565 - DNA, 30 bp, Artificial Sequence
  Synthetic oligonucleotide
aatgctccgcccctcccaagggatattcac

SEQ ID NO: 469566 - DNA, 30 bp, Artificial Sequence
  Synthetic oligonucleotide
atgtatcagcccacgcagaagggtattcac

SEQ ID NO: 469567 - DNA, 30 bp, Artificial Sequence
  Synthetic oligonucleotide
atctctttttaggtctgtatgcttattcac

SEQ ID NO: 469568 - DNA, 30 bp, Artificial Sequence
  Synthetic oligonucleotide
ttactaccaaggatttcaccgccagttcac

SEQ ID NO: 469569 - DNA, 30 bp, Artificial Sequence
  Synthetic oligonucleotide
cgagttggagtgccccaacggcacgttcac

SEQ ID NO: 469570 - DNA, 30 bp, Artificial Sequence
  Synthetic oligonucleotide
caaagcctttgcattggacataccgttcac

SEQ ID NO: 469571 - DNA, 30 bp, Artificial Sequence
  Synthetic oligonucleotide
ccctcttatgcaacgggtcggatcgttcac

SEQ ID NO: 469572 - DNA, 30 bp, Artificial Sequence
  Synthetic oligonucleotide
atttgtatgcagatttaatcgtaggttcac

SEQ ID NO: 469573 - DNA, 30 bp, Artificial Sequence
  Synthetic oligonucleotide
ttgctgtaactgtttgttttttgggttcac

SEQ ID NO: 469574 - DNA, 30 bp, Artificial Sequence
  Synthetic oligonucleotide
gactacacagaacgtgtgtcagatgttcac

SEQ ID NO: 469575 - DNA, 30 bp, Artificial Sequence
  Synthetic oligonucleotide
ttcgacgcaccgttacatttgtgtgttcac

SEQ ID NO: 469576 - DNA, 30 bp, Artificial Sequence
  Synthetic oligonucleotide
caagccaaggattgctttctaattgttcac

SEQ ID NO: 469577 - DNA, 30 bp, Artificial Sequence
  Synthetic oligonucleotide
attaaagtttaagcagtagtaaaatttcac

SEQ ID NO: 469578 - DNA, 30 bp, Artificial Sequence
  Synthetic oligonucleotide
ctccagagaataaaggttatttaatttcac

SEQ ID NO: 469579 - DNA, 30 bp, Artificial Sequence
  Synthetic oligonucleotide
gtgttgtccgtctaaaccgacatatttcac

SEQ ID NO: 469580 - DNA, 30 bp, Artificial Sequence
  Synthetic oligonucleotide
acagctaaccattacgtgggcccctttcac

SEQ ID NO: 469581 - DNA, 30 bp, Artificial Sequence
  Synthetic oligonucleotide
gtttgatactgtcgcatttcagcctttcac

SEQ ID NO: 469582 - DNA, 30 bp, Artificial Sequence
  Synthetic oligonucleotide
aaaaagaccctgtaaggtcgcgagtttcac

SEQ ID NO: 469583 - DNA, 30 bp, Artificial Sequence
  Synthetic oligonucleotide
aggagccttgcttgctgctagccttttcac

SEQ ID NO: 469584 - DNA, 34 bp, Artificial Sequence
  Synthetic oligonucleotide
gatactagaccaccacgtgtccaccagaaaagac

SEQ ID NO: 469585 - DNA, 34 bp, Artificial Sequence
  Synthetic oligonucleotide
gttactagaccaccacgtgtccatcagaaaagac

SEQ ID NO: 469586 - DNA, 34 bp, Artificial Sequence
  Synthetic oligonucleotide
gatactagacctccacgtgtccatcagaaaagac

SEQ ID NO: 469587 - DNA, 34 bp, Artificial Sequence
  Synthetic oligonucleotide
gatactagaccactacgtgtccatcagaaaagac

SEQ ID NO: 469588 - DNA, 34 bp, Artificial Sequence
  Synthetic oligonucleotide
gatactagaccaccgcgtgtccatcagaaaagac

SEQ ID NO: 469589 - DNA, 30 bp, Artificial Sequence
  Synthetic oligonucleotide
tctagtatgtgtttcatcgagggaaaagac

SEQ ID NO: 469590 - DNA, 30 bp, Artificial Sequence
  Synthetic oligonucleotide
gctcaccgtagggatgccgcttgaaaagac

SEQ ID NO: 469591 - DNA, 30 bp, Artificial Sequence
  Synthetic oligonucleotide
cctcgctcagtctcggtctgcctaaaagac

SEQ ID NO: 469592 - DNA, 30 bp, Artificial Sequence
  Synthetic oligonucleotide
aagtgtttgagctctatctgatccaaagac

SEQ ID NO: 469593 - DNA, 30 bp, Artificial Sequence
  Synthetic oligonucleotide
gccttgcaggcaaatagagcctagaaagac

SEQ ID NO: 469594 - DNA, 30 bp, Artificial Sequence
  Synthetic oligonucleotide
aaggagtctccaaataatagtactaaagac

SEQ ID NO: 469595 - DNA, 30 bp, Artificial Sequence
  Synthetic oligonucleotide
cagtgtcctttgtttcggtctgtacaagac

SEQ ID NO: 469596 - DNA, 30 bp, Artificial Sequence
  Synthetic oligonucleotide
aatcttggggcacaatatcacacccaagac

SEQ ID NO: 469597 - DNA, 30 bp, Artificial Sequence
  Synthetic oligonucleotide
gacctacggagcgcagtaaggccccaagac

SEQ ID NO: 469598 - DNA, 30 bp, Artificial Sequence
  Synthetic oligonucleotide
cgttaatggcgtgacatcttgggccaagac

SEQ ID NO: 469599 - DNA, 30 bp, Artificial Sequence
  Synthetic oligonucleotide
gattagcatcatataagtccgccgcaagac

SEQ ID NO: 469600 - DNA, 30 bp, Artificial Sequence
  Synthetic oligonucleotide
aagttggttttttcatattcggggcaagac

SEQ ID NO: 469601 - DNA, 30 bp, Artificial Sequence
  Synthetic oligonucleotide
gggtttgagacgccgttaaggggtcaagac

SEQ ID NO: 469602 - DNA, 30 bp, Artificial Sequence
  Synthetic oligonucleotide
gtttcatttaagtatcaacagcaagaagac

SEQ ID NO: 469603 - DNA, 30 bp, Artificial Sequence
  Synthetic oligonucleotide
gcaaaatgagagactaacgttgaagaagac

SEQ ID NO: 469604 - DNA, 30 bp, Artificial Sequence
  Synthetic oligonucleotide
ttttagagcgggtagccagtgccagaagac

SEQ ID NO: 469605 - DNA, 30 bp, Artificial Sequence
  Synthetic oligonucleotide
agactgcaggtcggacttgatttataagac

SEQ ID NO: 469606 - DNA, 30 bp, Artificial Sequence
  Synthetic oligonucleotide
gaggcgttatgcatcttggggtactaagac

SEQ ID NO: 469607 - DNA, 30 bp, Artificial Sequence
  Synthetic oligonucleotide
cgtagcaggcttgtttgactgatctaagac

SEQ ID NO: 469608 - DNA, 30 bp, Artificial Sequence
  Synthetic oligonucleotide
agtcagcagatactaattgcacggtaagac

SEQ ID NO: 469609 - DNA, 30 bp, Artificial Sequence
  Synthetic oligonucleotide
gacttagaatgtgcggtgttttattaagac

SEQ ID NO: 469610 - DNA, 30 bp, Artificial Sequence
  Synthetic oligonucleotide
gtcagtttgcagctgactgcgtgttaagac

SEQ ID NO: 469611 - DNA, 30 bp, Artificial Sequence
  Synthetic oligonucleotide
aatttagggtcacatcggtcttcaacagac

SEQ ID NO: 469612 - DNA, 30 bp, Artificial Sequence
  Synthetic oligonucleotide
gtccttgatcgagtgagcggcataacagac

SEQ ID NO: 469613 - DNA, 30 bp, Artificial Sequence
  Synthetic oligonucleotide
ctcctatcactgcagaactggtgcacagac

SEQ ID NO: 469614 - DNA, 30 bp, Artificial Sequence
  Synthetic oligonucleotide
tattctcgtattggttgcgattgcacagac

SEQ ID NO: 469615 - DNA, 30 bp, Artificial Sequence
  Synthetic oligonucleotide
ctaggtccccttgtgcggtaactgacagac

SEQ ID NO: 469616 - DNA, 30 bp, Artificial Sequence
  Synthetic oligonucleotide
ggccagtacgcctttcgctatattacagac

SEQ ID NO: 469617 - DNA, 30 bp, Artificial Sequence
  Synthetic oligonucleotide
gattggcaaagcaagtccgttcttacagac

SEQ ID NO: 469618 - DNA, 30 bp, Artificial Sequence
  Synthetic oligonucleotide
ataatcgaacaggagctaccgggcccagac

SEQ ID NO: 469619 - DNA, 30 bp, Artificial Sequence
  Synthetic oligonucleotide
acccagtcaaaggctcttggttctccagac

SEQ ID NO: 469620 - DNA, 30 bp, Artificial Sequence
  Synthetic oligonucleotide
caatgtagattggaggtttcagcagcagac

SEQ ID NO: 469621 - DNA, 30 bp, Artificial Sequence
  Synthetic oligonucleotide
ggccaggaaaatacatctcggtacgcagac

SEQ ID NO: 469622 - DNA, 30 bp, Artificial Sequence
  Synthetic oligonucleotide
aattctaagcatcccatagtatgcgcagac

SEQ ID NO: 469623 - DNA, 30 bp, Artificial Sequence
  Synthetic oligonucleotide
gagtacctagcacgacgtctactcgcagac

SEQ ID NO: 469624 - DNA, 30 bp, Artificial Sequence
  Synthetic oligonucleotide
gtatatatttacaatgtacggtatgcagac

SEQ ID NO: 469625 - DNA, 30 bp, Artificial Sequence
  Synthetic oligonucleotide
tgaattccaaaacctacggttactgcagac

SEQ ID NO: 469626 - DNA, 30 bp, Artificial Sequence
  Synthetic oligonucleotide
gcacctctgccaacttcaacaagtgcagac

SEQ ID NO: 469627 - DNA, 30 bp, Artificial Sequence
  Synthetic oligonucleotide
tgtattatgattttatcctgctcatcagac

SEQ ID NO: 469628 - DNA, 30 bp, Artificial Sequence
  Synthetic oligonucleotide
gcggtattctatgctcacggtatatcagac

SEQ ID NO: 469629 - DNA, 30 bp, Artificial Sequence
  Synthetic oligonucleotide
ccagagcctccattggggcgattatcagac

SEQ ID NO: 469630 - DNA, 30 bp, Artificial Sequence
  Synthetic oligonucleotide
agtgggatcgtagagcttctacggtcagac

SEQ ID NO: 469631 - DNA, 30 bp, Artificial Sequence
  Synthetic oligonucleotide
gtcaagtcggccgacgagtcttaaagagac

SEQ ID NO: 469632 - DNA, 34 bp, Artificial Sequence
  Synthetic oligonucleotide
gatactagaccaccacgtgtccatgagaagagac

SEQ ID NO: 469633 - DNA, 30 bp, Artificial Sequence
  Synthetic oligonucleotide
ggttttataaatgccttcgtcaccagagac

SEQ ID NO: 469634 - DNA, 30 bp, Artificial Sequence
  Synthetic oligonucleotide
agagacaatgtcgagggagtgcgcagagac

SEQ ID NO: 469635 - DNA, 30 bp, Artificial Sequence
  Synthetic oligonucleotide
tgggcgcactcttcctcgacgctcagagac

SEQ ID NO: 469636 - DNA, 30 bp, Artificial Sequence
  Synthetic oligonucleotide
aaccctaatgcaataaagatagcgagagac

SEQ ID NO: 469637 - DNA, 30 bp, Artificial Sequence
  Synthetic oligonucleotide
cagttttttagggcacatgcgtatagagac

SEQ ID NO: 469638 - DNA, 30 bp, Artificial Sequence
  Synthetic oligonucleotide
aaccgggattttcagtgttatggtagagac

SEQ ID NO: 469639 - DNA, 30 bp, Artificial Sequence
  Synthetic oligonucleotide
atgattgcgtccatccaaggtcttagagac

SEQ ID NO: 469640 - DNA, 30 bp, Artificial Sequence
  Synthetic oligonucleotide
caaaggactcattatctatccagacgagac

SEQ ID NO: 469641 - DNA, 30 bp, Artificial Sequence
  Synthetic oligonucleotide
cgggcgccatgagggatatccggacgagac

SEQ ID NO: 469642 - DNA, 30 bp, Artificial Sequence
  Synthetic oligonucleotide
aataatgatttgatgtacaaaatacgagac

SEQ ID NO: 469643 - DNA, 30 bp, Artificial Sequence
  Synthetic oligonucleotide
catgaggaacagtacgcaacggcgcgagac

SEQ ID NO: 469644 - DNA, 30 bp, Artificial Sequence
  Synthetic oligonucleotide
aaatcaagtgtgagttttttgaaaggagac

SEQ ID NO: 469645 - DNA, 30 bp, Artificial Sequence
  Synthetic oligonucleotide
tctaaagaacgcactgcctgtaaaggagac

SEQ ID NO: 469646 - DNA, 30 bp, Artificial Sequence
  Synthetic oligonucleotide
ccgtgggtttgcagctagaagggcggagac

SEQ ID NO: 469647 - DNA, 30 bp, Artificial Sequence
  Synthetic oligonucleotide
agtttattcgtgaaagcagcggtgggagac

SEQ ID NO: 469648 - DNA, 30 bp, Artificial Sequence
  Synthetic oligonucleotide
aatatttcaactcggcattgacaatgagac

SEQ ID NO: 469649 - DNA, 30 bp, Artificial Sequence
  Synthetic oligonucleotide
attgtttattggaaagcacgtcaatgagac

SEQ ID NO: 469650 - DNA, 30 bp, Artificial Sequence
  Synthetic oligonucleotide
gtattgttcacattgcccggctaatgagac

SEQ ID NO: 469651 - DNA, 30 bp, Artificial Sequence
  Synthetic oligonucleotide
ggatttcgtatgttctttgggtgatgagac

SEQ ID NO: 469652 - DNA, 30 bp, Artificial Sequence
  Synthetic oligonucleotide
ttatgatatagtggtaaacagatctgagac

SEQ ID NO: 469653 - DNA, 30 bp, Artificial Sequence
  Synthetic oligonucleotide
aaaagggtgaccgcagtattattctgagac

SEQ ID NO: 469654 - DNA, 30 bp, Artificial Sequence
  Synthetic oligonucleotide
tagatactgcgaccgggtttgtagtgagac

SEQ ID NO: 469655 - DNA, 30 bp, Artificial Sequence
  Synthetic oligonucleotide
catccggggttcattagatagacgtgagac

SEQ ID NO: 469656 - DNA, 30 bp, Artificial Sequence
  Synthetic oligonucleotide
taatacctcctcgcacagccaaggtgagac

SEQ ID NO: 469657 - DNA, 30 bp, Artificial Sequence
  Synthetic oligonucleotide
gtcatttagcgcgtgttgaacctaatagac

SEQ ID NO: 469658 - DNA, 30 bp, Artificial Sequence
  Synthetic oligonucleotide
gaaagcagatctttattcgtcttaatagac

SEQ ID NO: 469659 - DNA, 30 bp, Artificial Sequence
  Synthetic oligonucleotide
acccgttaaagtagtgcctttgccatagac

SEQ ID NO: 469660 - DNA, 30 bp, Artificial Sequence
  Synthetic oligonucleotide
ctaagcagctacagcatttagggcatagac

SEQ ID NO: 469661 - DNA, 30 bp, Artificial Sequence
  Synthetic oligonucleotide
tacggcagtccagccgtgcccgagatagac

SEQ ID NO: 469662 - DNA, 30 bp, Artificial Sequence
  Synthetic oligonucleotide
agcttactcctcggggctttggatatagac

SEQ ID NO: 469663 - DNA, 30 bp, Artificial Sequence
  Synthetic oligonucleotide
gtattaggtcccgtgaggatgtctatagac

SEQ ID NO: 469664 - DNA, 30 bp, Artificial Sequence
  Synthetic oligonucleotide
ttcagaacacgcctgtcacatccactagac

SEQ ID NO: 469665 - DNA, 30 bp, Artificial Sequence
  Synthetic oligonucleotide
tacctgggttcatgacttggcgtcctagac

SEQ ID NO: 469666 - DNA, 30 bp, Artificial Sequence
  Synthetic oligonucleotide
gcatttgtcacgacagcatcggcgctagac

SEQ ID NO: 469667 - DNA, 30 bp, Artificial Sequence
  Synthetic oligonucleotide
actttgatttaatccgacctcgcagtagac

SEQ ID NO: 469668 - DNA, 30 bp, Artificial Sequence
  Synthetic oligonucleotide
gttcccatacgtacagaaaacgtagtagac

SEQ ID NO: 469669 - DNA, 30 bp, Artificial Sequence
  Synthetic oligonucleotide
gggtgtgagacgctgggtttttcggtagac

SEQ ID NO: 469670 - DNA, 30 bp, Artificial Sequence
  Synthetic oligonucleotide
tatgtccaatgccccctcgggttggtagac

SEQ ID NO: 469671 - DNA, 30 bp, Artificial Sequence
  Synthetic oligonucleotide
gagtcctgacatcgtgaggcacgtgtagac

SEQ ID NO: 469672 - DNA, 30 bp, Artificial Sequence
  Synthetic oligonucleotide
ttacatgaaatgataagaacaaggttagac

SEQ ID NO: 469673 - DNA, 30 bp, Artificial Sequence
  Synthetic oligonucleotide
taaaactactgggatttctgaaggttagac

SEQ ID NO: 469674 - DNA, 30 bp, Artificial Sequence
  Synthetic oligonucleotide
cttgtaggcttagaccgactacggttagac

SEQ ID NO: 469675 - DNA, 30 bp, Artificial Sequence
  Synthetic oligonucleotide
ttttgacacaaattccacatatggttagac

SEQ ID NO: 469676 - DNA, 30 bp, Artificial Sequence
  Synthetic oligonucleotide
tattctgtcgcacgtgggtttaatttagac

SEQ ID NO: 469677 - DNA, 30 bp, Artificial Sequence
  Synthetic oligonucleotide
actgttctggatttgtaccagtatttagac

SEQ ID NO: 469678 - DNA, 30 bp, Artificial Sequence
  Synthetic oligonucleotide
gacagcgccacaatctgttgaactttagac

SEQ ID NO: 469679 - DNA, 30 bp, Artificial Sequence
  Synthetic oligonucleotide
atttcagggtccaacgccagctaaaacgac

SEQ ID NO: 469680 - DNA, 30 bp, Artificial Sequence
  Synthetic oligonucleotide
gctgtctagttcagtacgattataaacgac

SEQ ID NO: 469681 - DNA, 30 bp, Artificial Sequence
  Synthetic oligonucleotide
ggtttgcccggtattcaaagccccaacgac

SEQ ID NO: 469682 - DNA, 29 bp, Artificial Sequence
  Synthetic oligonucleotide
ttctcgatgtacggtgttttttcaacgac

SEQ ID NO: 469683 - DNA, 30 bp, Artificial Sequence
  Synthetic oligonucleotide
gggtttgtctatttacgctgcggtaacgac

SEQ ID NO: 469684 - DNA, 30 bp, Artificial Sequence
  Synthetic oligonucleotide
tttagtcacgcgttcttgtcaggacacgac

SEQ ID NO: 469685 - DNA, 30 bp, Artificial Sequence
  Synthetic oligonucleotide
atggtcggcccgcccggggcagaccacgac

SEQ ID NO: 469686 - DNA, 30 bp, Artificial Sequence
  Synthetic oligonucleotide
gcccggctgtaggtactagggccgcacgac

SEQ ID NO: 469687 - DNA, 30 bp, Artificial Sequence
  Synthetic oligonucleotide
aggtcggttaggtctaatgcattgcacgac

SEQ ID NO: 469688 - DNA, 30 bp, Artificial Sequence
  Synthetic oligonucleotide
ccagtgcggtactccacttggagtcacgac

SEQ ID NO: 469689 - DNA, 30 bp, Artificial Sequence
  Synthetic oligonucleotide
gcggaagtctgtggatcttggcttcacgac

SEQ ID NO: 469690 - DNA, 30 bp, Artificial Sequence
  Synthetic oligonucleotide
gggaaactttcagtgcttaggtaagacgac

SEQ ID NO: 469691 - DNA, 30 bp, Artificial Sequence
  Synthetic oligonucleotide
gcctcatcagaccagtgcaggtcagacgac

SEQ ID NO: 469692 - DNA, 30 bp, Artificial Sequence
  Synthetic oligonucleotide
caaccgtcgatcaccctcgggtgagacgac

SEQ ID NO: 469693 - DNA, 30 bp, Artificial Sequence
  Synthetic oligonucleotide
cccctactgggaaagatttcaatagacgac

SEQ ID NO: 469694 - DNA, 30 bp, Artificial Sequence
  Synthetic oligonucleotide
tgaggggaagtagaccgctgcagggacgac

SEQ ID NO: 469695 - DNA, 30 bp, Artificial Sequence
  Synthetic oligonucleotide
taatcaaaattcgaaggttataatgacgac

SEQ ID NO: 469696 - DNA, 30 bp, Artificial Sequence
  Synthetic oligonucleotide
agaaataactatttacgctagcgatacgac

SEQ ID NO: 469697 - DNA, 30 bp, Artificial Sequence
  Synthetic oligonucleotide
gtggtgaggccgcctctgtatatatacgac

SEQ ID NO: 469698 - DNA, 30 bp, Artificial Sequence
  Synthetic oligonucleotide
gaaaccactcatctcctcttttcgtacgac

SEQ ID NO: 469699 - DNA, 30 bp, Artificial Sequence
  Synthetic oligonucleotide
ttcaaaaagtcagctggatcccggtacgac

SEQ ID NO: 469700 - DNA, 30 bp, Artificial Sequence
  Synthetic oligonucleotide
gtcatgtttctatgcacgattcggtacgac

SEQ ID NO: 469701 - DNA, 30 bp, Artificial Sequence
  Synthetic oligonucleotide
gacgcagtcgggtaatacgagttgtacgac

SEQ ID NO: 469702 - DNA, 30 bp, Artificial Sequence
  Synthetic oligonucleotide
acagtttattttaacatctggtgttacgac

SEQ ID NO: 469703 - DNA, 30 bp, Artificial Sequence
  Synthetic oligonucleotide
actcaggtaccgtagatagtactttacgac

SEQ ID NO: 469704 - DNA, 30 bp, Artificial Sequence
  Synthetic oligonucleotide
tcggcgacgcaatactgttggtcaaccgac

SEQ ID NO: 469705 - DNA, 30 bp, Artificial Sequence
  Synthetic oligonucleotide
acttatctagaaatcctactggcgaccgac

SEQ ID NO: 469706 - DNA, 30 bp, Artificial Sequence
  Synthetic oligonucleotide
gaaacagatacggattgtttgtctaccgac

SEQ ID NO: 469707 - DNA, 30 bp, Artificial Sequence
  Synthetic oligonucleotide
gcccgaccgggcgcgtagggaaggcccgac

SEQ ID NO: 469708 - DNA, 30 bp, Artificial Sequence
  Synthetic oligonucleotide
atccttggtcttggttctatgcggcccgac

SEQ ID NO: 469709 - DNA, 30 bp, Artificial Sequence
  Synthetic oligonucleotide
gcaagccgctacctcgggtagaatcccgac

SEQ ID NO: 469710 - DNA, 30 bp, Artificial Sequence
  Synthetic oligonucleotide
cagtgaaggcgcagcacctacgctcccgac

SEQ ID NO: 469711 - DNA, 30 bp, Artificial Sequence
  Synthetic oligonucleotide
gactcgcaagggaggcgaatttacgccgac

SEQ ID NO: 469712 - DNA, 30 bp, Artificial Sequence
  Synthetic oligonucleotide
cccgctaatttggctagacgagaggccgac

SEQ ID NO: 469713 - DNA, 30 bp, Artificial Sequence
  Synthetic oligonucleotide
tacataaagtaacgattttaatgggccgac

SEQ ID NO: 469714 - DNA, 30 bp, Artificial Sequence
  Synthetic oligonucleotide
gctattaagacgtgcacttacgttgccgac

SEQ ID NO: 469715 - DNA, 30 bp, Artificial Sequence
  Synthetic oligonucleotide
gcgaatcaacaagggggttgttcctccgac

SEQ ID NO: 469716 - DNA, 30 bp, Artificial Sequence
  Synthetic oligonucleotide
atcgtgatactcggattctacggttccgac

SEQ ID NO: 469717 - DNA, 30 bp, Artificial Sequence
  Synthetic oligonucleotide
gtttagttcatagcttaacagtaaagcgac

SEQ ID NO: 469718 - DNA, 30 bp, Artificial Sequence
  Synthetic oligonucleotide
gttttagttacatctattcatacaagcgac

SEQ ID NO: 469719 - DNA, 30 bp, Artificial Sequence
  Synthetic oligonucleotide
gtcttcaccctatgtgtgaacgcaagcgac

SEQ ID NO: 469720 - DNA, 30 bp, Artificial Sequence
  Synthetic oligonucleotide
gagaacgctggccaatacacggcaagcgac

SEQ ID NO: 469721 - DNA, 30 bp, Artificial Sequence
  Synthetic oligonucleotide
aagtggtccctttgcaagacccgaagcgac

SEQ ID NO: 469722 - DNA, 30 bp, Artificial Sequence
  Synthetic oligonucleotide
tgctgctgtcatcgacccatgataagcgac

SEQ ID NO: 469723 - DNA, 30 bp, Artificial Sequence
  Synthetic oligonucleotide
caaataagagcatcagtcttttacagcgac

SEQ ID NO: 469724 - DNA, 30 bp, Artificial Sequence
  Synthetic oligonucleotide
tagtcgtggcatccccttattatgagcgac

SEQ ID NO: 469725 - DNA, 30 bp, Artificial Sequence
  Synthetic oligonucleotide
ggcgcccgggtatgtatatctcttagcgac

SEQ ID NO: 469726 - DNA, 30 bp, Artificial Sequence
  Synthetic oligonucleotide
cacctttagaggcgtcagaacgttagcgac

SEQ ID NO: 469727 - DNA, 30 bp, Artificial Sequence
  Synthetic oligonucleotide
gtgaactagtcgtaataatcgtgacgcgac

SEQ ID NO: 469728 - DNA, 30 bp, Artificial Sequence
  Synthetic oligonucleotide
gttgggtaaacttgtcgcttagaccgcgac

SEQ ID NO: 469729 - DNA, 30 bp, Artificial Sequence
  Synthetic oligonucleotide
attccggcgtccgataattctccgcgcgac

SEQ ID NO: 469730 - DNA, 30 bp, Artificial Sequence
  Synthetic oligonucleotide
cggattaagtccgggctcctccggcgcgac

SEQ ID NO: 469731 - DNA, 30 bp, Artificial Sequence
  Synthetic oligonucleotide
gagtcgtcatcactgcggttaagcggcgac

SEQ ID NO: 469732 - DNA, 30 bp, Artificial Sequence
  Synthetic oligonucleotide
gatctgtccaactgtaagcaatgtggcgac

SEQ ID NO: 469733 - DNA, 30 bp, Artificial Sequence
  Synthetic oligonucleotide
gagtgccgaagaggatgcctaaaatgcgac

SEQ ID NO: 469734 - DNA, 30 bp, Artificial Sequence
  Synthetic oligonucleotide
aggattattagggggggaacggtatgcgac

SEQ ID NO: 469735 - DNA, 30 bp, Artificial Sequence
  Synthetic oligonucleotide
ttaaattactacctggcgtaatactgcgac

SEQ ID NO: 469736 - DNA, 30 bp, Artificial Sequence
  Synthetic oligonucleotide
acaatcttcaacatgcaagccgtctgcgac

SEQ ID NO: 469737 - DNA, 30 bp, Artificial Sequence
  Synthetic oligonucleotide
aaataataacacattgcaatcgagtgcgac

SEQ ID NO: 469738 - DNA, 30 bp, Artificial Sequence
  Synthetic oligonucleotide
cgaattgttgttagggccctggtttgcgac

SEQ ID NO: 469739 - DNA, 30 bp, Artificial Sequence
  Synthetic oligonucleotide
gtacttcaccgcgccatcctcttttgcgac

SEQ ID NO: 469740 - DNA, 30 bp, Artificial Sequence
  Synthetic oligonucleotide
tatttcgggtgggctttagggttttgcgac

SEQ ID NO: 469741 - DNA, 30 bp, Artificial Sequence
  Synthetic oligonucleotide
attaaaaccgtagttgtacgtaccatcgac

SEQ ID NO: 469742 - DNA, 30 bp, Artificial Sequence
  Synthetic oligonucleotide
cgagagaggtctcgctatcgggacctcgac

SEQ ID NO: 469743 - DNA, 30 bp, Artificial Sequence
  Synthetic oligonucleotide
aatgccgcgtccacggaaagcgtgctcgac

SEQ ID NO: 469744 - DNA, 30 bp, Artificial Sequence
  Synthetic oligonucleotide
tgttcttgtagtcgaagaccgacggtcgac

SEQ ID NO: 469745 - DNA, 30 bp, Artificial Sequence
  Synthetic oligonucleotide
gacgacagtgacctatctctgccggtcgac

SEQ ID NO: 469746 - DNA, 30 bp, Artificial Sequence
  Synthetic oligonucleotide
gaccacagcgtccgagttaggagggtcgac

SEQ ID NO: 469747 - DNA, 30 bp, Artificial Sequence
  Synthetic oligonucleotide
gcatgaagatcgcaaccgtaatatgtcgac

SEQ ID NO: 469748 - DNA, 30 bp, Artificial Sequence
  Synthetic oligonucleotide
cttatcataacgctaacgacttatgtcgac

SEQ ID NO: 469749 - DNA, 30 bp, Artificial Sequence
  Synthetic oligonucleotide
cggtgtctgtctaagactctggctgtcgac

SEQ ID NO: 469750 - DNA, 30 bp, Artificial Sequence
  Synthetic oligonucleotide
ctgacaacaacgtgaccggggagattcgac

SEQ ID NO: 469751 - DNA, 30 bp, Artificial Sequence
  Synthetic oligonucleotide
ttcttaactataacataaaccgacttcgac

SEQ ID NO: 469752 - DNA, 30 bp, Artificial Sequence
  Synthetic oligonucleotide
tgtgaaggctgcgcatacgcgcccttcgac

SEQ ID NO: 469753 - DNA, 30 bp, Artificial Sequence
  Synthetic oligonucleotide
tgactctatctcacttgtaaaaagttcgac

SEQ ID NO: 469754 - DNA, 30 bp, Artificial Sequence
  Synthetic oligonucleotide
aatccgatgcctgtgagagtaaggttcgac

SEQ ID NO: 469755 - DNA, 30 bp, Artificial Sequence
  Synthetic oligonucleotide
tgttcggggcgctcgcaacggggaaaggac

SEQ ID NO: 469756 - DNA, 30 bp, Artificial Sequence
  Synthetic oligonucleotide
gagccttgacatacggtcccgcgcaaggac

SEQ ID NO: 469757 - DNA, 30 bp, Artificial Sequence
  Synthetic oligonucleotide
cttcaatagtaacttatggcatgcaaggac

SEQ ID NO: 469758 - DNA, 30 bp, Artificial Sequence
  Synthetic oligonucleotide
aagatgcggtggccgccccagatcaaggac

SEQ ID NO: 469759 - DNA, 30 bp, Artificial Sequence
  Synthetic oligonucleotide
tcgatcctgacatgtataacgatcaaggac

SEQ ID NO: 469760 - DNA, 31 bp, Artificial Sequence
  Synthetic oligonucleotide
tgtagactagcatgggcgcagaaggaaggac

SEQ ID NO: 469761 - DNA, 30 bp, Artificial Sequence
  Synthetic oligonucleotide
aattcctcgaggggtgtggcgaggaaggac

SEQ ID NO: 469762 - DNA, 30 bp, Artificial Sequence
  Synthetic oligonucleotide
gcgtcgcaggctatggtgattaaacaggac

SEQ ID NO: 469763 - DNA, 30 bp, Artificial Sequence
  Synthetic oligonucleotide
cctggtttctcaggcaagcagtcgcaggac

SEQ ID NO: 469764 - DNA, 30 bp, Artificial Sequence
  Synthetic oligonucleotide
gccctaaacgatcataaatcgaggcaggac

SEQ ID NO: 469765 - DNA, 30 bp, Artificial Sequence
  Synthetic oligonucleotide
gccggtctaaattgaactttattgcaggac

SEQ ID NO: 469766 - DNA, 30 bp, Artificial Sequence
  Synthetic oligonucleotide
ttactacgcaccaaagcgtgcggtcaggac

SEQ ID NO: 469767 - DNA, 30 bp, Artificial Sequence
  Synthetic oligonucleotide
cggcacacgtagtggccggattgtcaggac

SEQ ID NO: 469768 - DNA, 30 bp, Artificial Sequence
  Synthetic oligonucleotide
cagcgtcacagctggaacttagttcaggac

SEQ ID NO: 469769 - DNA, 30 bp, Artificial Sequence
  Synthetic oligonucleotide
ataaccgagtttgacaggctttttcaggac

SEQ ID NO: 469770 - DNA, 30 bp, Artificial Sequence
  Synthetic oligonucleotide
aagaattcaaaatagcgagtgaaagaggac

SEQ ID NO: 469771 - DNA, 30 bp, Artificial Sequence
  Synthetic oligonucleotide
ctgcacagtgtcctggcgaagtcagaggac

SEQ ID NO: 469772 - DNA, 30 bp, Artificial Sequence
  Synthetic oligonucleotide
aaatagtctcggcgctctgtatgagaggac

SEQ ID NO: 469773 - DNA, 30 bp, Artificial Sequence
  Synthetic oligonucleotide
gcattgatgggtgttgctgctagggaggac

SEQ ID NO: 469774 - DNA, 30 bp, Artificial Sequence
  Synthetic oligonucleotide
gagggcaacggaccattcctcctggaggac

SEQ ID NO: 469775 - DNA, 30 bp, Artificial Sequence
  Synthetic oligonucleotide
agagtatcctccgtttatctaactgaggac

SEQ ID NO: 469776 - DNA, 30 bp, Artificial Sequence
  Synthetic oligonucleotide
actaggaacataaccggtttagttgaggac

SEQ ID NO: 469777 - DNA, 30 bp, Artificial Sequence
  Synthetic oligonucleotide
tcaggactctaacgaaacagtaaataggac

SEQ ID NO: 469778 - DNA, 30 bp, Artificial Sequence
  Synthetic oligonucleotide
aagaatagatgcgttgttatgttataggac

SEQ ID NO: 469779 - DNA, 30 bp, Artificial Sequence
  Synthetic oligonucleotide
accccctctgcaaggaagaaatagtaggac

SEQ ID NO: 469780 - DNA, 30 bp, Artificial Sequence
  Synthetic oligonucleotide
gtcgttccgcaacacccaggggcttaggac

SEQ ID NO: 469781 - DNA, 30 bp, Artificial Sequence
  Synthetic oligonucleotide
aatatattggccaaacttggaaaaacggac

SEQ ID NO: 469782 - DNA, 30 bp, Artificial Sequence
  Synthetic oligonucleotide
gcttagggtgccacgcggctcaccacggac

SEQ ID NO: 469783 - DNA, 31 bp, Artificial Sequence
  Synthetic oligonucleotide
gccaatagtgtggtcacttttggtgacggac

SEQ ID NO: 469784 - DNA, 30 bp, Artificial Sequence
  Synthetic oligonucleotide
agcgaagtcaatatagggcgcgcaccggac

SEQ ID NO: 469785 - DNA, 30 bp, Artificial Sequence
  Synthetic oligonucleotide
ccaagggcgggaaatggaagtgtaccggac

SEQ ID NO: 469786 - DNA, 30 bp, Artificial Sequence
  Synthetic oligonucleotide
taagcccgtacgggtggtcatttaccggac

SEQ ID NO: 469787 - DNA, 30 bp, Artificial Sequence
  Synthetic oligonucleotide
ctccttccctatagtatcatatagccggac

SEQ ID NO: 469788 - DNA, 30 bp, Artificial Sequence
  Synthetic oligonucleotide
ctatgatgcgtttcgttgcgttatccggac

SEQ ID NO: 469789 - DNA, 30 bp, Artificial Sequence
  Synthetic oligonucleotide
atacctctacgcatagtgccttaagcggac

SEQ ID NO: 469790 - DNA, 30 bp, Artificial Sequence
  Synthetic oligonucleotide
gaatttagcgttcggataatttacgcggac

SEQ ID NO: 469791 - DNA, 30 bp, Artificial Sequence
  Synthetic oligonucleotide
cgaatacgaatgagtatggccacggcggac

SEQ ID NO: 469792 - DNA, 30 bp, Artificial Sequence
  Synthetic oligonucleotide
tcgcctgcaagccactgatcgttggcggac

SEQ ID NO: 469793 - DNA, 30 bp, Artificial Sequence
  Synthetic oligonucleotide
ggcagcgaagatggaacgcttagtgcggac

SEQ ID NO: 469794 - DNA, 30 bp, Artificial Sequence
  Synthetic oligonucleotide
gggtgagctgctcggaccggcgtatcggac

SEQ ID NO: 469795 - DNA, 30 bp, Artificial Sequence
  Synthetic oligonucleotide
gctgtgtaacgtcggtaatctttttcggac

SEQ ID NO: 469796 - DNA, 30 bp, Artificial Sequence
  Synthetic oligonucleotide
attgtacgccgccattcgtagccaagggac

SEQ ID NO: 469797 - DNA, 30 bp, Artificial Sequence
  Synthetic oligonucleotide
ccaggttggttttaccaccgctacagggac

SEQ ID NO: 469798 - DNA, 30 bp, Artificial Sequence
  Synthetic oligonucleotide
tgcaacatgattcctggaacaagtagggac

SEQ ID NO: 469799 - DNA, 30 bp, Artificial Sequence
  Synthetic oligonucleotide
tgtcggtatgtggaggcaggaccccgggac

SEQ ID NO: 469800 - DNA, 30 bp, Artificial Sequence
  Synthetic oligonucleotide
ttcctggactacccatgagtgtcccgggac

SEQ ID NO: 469801 - DNA, 30 bp, Artificial Sequence
  Synthetic oligonucleotide
cttcctcacaatagggcttcgcgccgggac

SEQ ID NO: 469802 - DNA, 30 bp, Artificial Sequence
  Synthetic oligonucleotide
tgtccactctcagtagcgtatacgcgggac

SEQ ID NO: 469803 - DNA, 30 bp, Artificial Sequence
  Synthetic oligonucleotide
gtagcagagaccgcctcaggcgggcgggac

SEQ ID NO: 469804 - DNA, 30 bp, Artificial Sequence
  Synthetic oligonucleotide
ttaagacttggaatgggctaaaatcgggac

SEQ ID NO: 469805 - DNA, 30 bp, Artificial Sequence
  Synthetic oligonucleotide
tagaatgctttcaatcctctgattcgggac

SEQ ID NO: 469806 - DNA, 30 bp, Artificial Sequence
  Synthetic oligonucleotide
ccgtatctagattcgatttaatacggggac

SEQ ID NO: 469807 - DNA, 30 bp, Artificial Sequence
  Synthetic oligonucleotide
aaatgttgtgctcagttctcttggggggac

SEQ ID NO: 469808 - DNA, 30 bp, Artificial Sequence
  Synthetic oligonucleotide
cgcgtatccctgtacttaccgagtggggac

SEQ ID NO: 469809 - DNA, 30 bp, Artificial Sequence
  Synthetic oligonucleotide
taacgaaggcgcagaagaccatgtggggac

SEQ ID NO: 469810 - DNA, 30 bp, Artificial Sequence
  Synthetic oligonucleotide
aaatcctaagtctatactttggaatgggac

SEQ ID NO: 469811 - DNA, 30 bp, Artificial Sequence
  Synthetic oligonucleotide
ataggcccgtgtaggaccttctcatgggac

SEQ ID NO: 469812 - DNA, 30 bp, Artificial Sequence
  Synthetic oligonucleotide
actgacagggtctgagggccctcttgggac

SEQ ID NO: 469813 - DNA, 30 bp, Artificial Sequence
  Synthetic oligonucleotide
cgaatcaagtcttggacgagccgttgggac

SEQ ID NO: 469814 - DNA, 30 bp, Artificial Sequence
  Synthetic oligonucleotide
tactagagcggactccaaactttttgggac

SEQ ID NO: 469815 - DNA, 30 bp, Artificial Sequence
  Synthetic oligonucleotide
gctactctcaggtcatttccaaaaatggac

SEQ ID NO: 469816 - DNA, 30 bp, Artificial Sequence
  Synthetic oligonucleotide
cccgtgtcaataggtctcgttccaatggac

SEQ ID NO: 469817 - DNA, 30 bp, Artificial Sequence
  Synthetic oligonucleotide
taagttgctttctctcgctcgcgaatggac

SEQ ID NO: 469818 - DNA, 30 bp, Artificial Sequence
  Synthetic oligonucleotide
ccccctcctattctaagaatcgccatggac

SEQ ID NO: 469819 - DNA, 30 bp, Artificial Sequence
  Synthetic oligonucleotide
attcaataatagtgctctatcaagatggac

SEQ ID NO: 469820 - DNA, 30 bp, Artificial Sequence
  Synthetic oligonucleotide
actgtcaatgtatgcacacgatagatggac

SEQ ID NO: 469821 - DNA, 30 bp, Artificial Sequence
  Synthetic oligonucleotide
gcggccacccttgcgcagtgtaggatggac

SEQ ID NO: 469822 - DNA, 30 bp, Artificial Sequence
  Synthetic oligonucleotide
gctccccatccactcattcttgtgatggac

SEQ ID NO: 469823 - DNA, 30 bp, Artificial Sequence
  Synthetic oligonucleotide
cacagagctatttggcccaagtgtatggac

SEQ ID NO: 469824 - DNA, 30 bp, Artificial Sequence
  Synthetic oligonucleotide
gcagcttgtcccctgcctcaaattatggac

SEQ ID NO: 469825 - DNA, 30 bp, Artificial Sequence
  Synthetic oligonucleotide
gcgaaattttgtcccaggtcgtgactggac

SEQ ID NO: 469826 - DNA, 30 bp, Artificial Sequence
  Synthetic oligonucleotide
taatggaaagcgaaaatgcggcccctggac

SEQ ID NO: 469827 - DNA, 30 bp, Artificial Sequence
  Synthetic oligonucleotide
gaggacggcctcggcagctcagctctggac

SEQ ID NO: 469828 - DNA, 30 bp, Artificial Sequence
  Synthetic oligonucleotide
cacacagaatcaccaccatagaaagtggac

SEQ ID NO: 469829 - DNA, 30 bp, Artificial Sequence
  Synthetic oligonucleotide
cttagagttgatgaggcggacggagtggac

SEQ ID NO: 469830 - DNA, 31 bp, Artificial Sequence
  Synthetic oligonucleotide
gaaagggccaagagacaaaggcaccgtggac

SEQ ID NO: 469831 - DNA, 30 bp, Artificial Sequence
  Synthetic oligonucleotide
ctcgcatgggggtcgggtggtgtcgtggac

SEQ ID NO: 469832 - DNA, 30 bp, Artificial Sequence
  Synthetic oligonucleotide
catttattaaaaccccaaacaaatgtggac

SEQ ID NO: 469833 - DNA, 30 bp, Artificial Sequence
  Synthetic oligonucleotide
cctgtcctattaggagaatctcatgtggac

SEQ ID NO: 469834 - DNA, 30 bp, Artificial Sequence
  Synthetic oligonucleotide
caaacagtttggatagattttactgtggac

SEQ ID NO: 469835 - DNA, 30 bp, Artificial Sequence
  Synthetic oligonucleotide
tgggtaagtctgcttttcgtagttgtggac

SEQ ID NO: 469836 - DNA, 30 bp, Artificial Sequence
  Synthetic oligonucleotide
ggtgattggagtggcggacaaacgttggac

SEQ ID NO: 469837 - DNA, 30 bp, Artificial Sequence
  Synthetic oligonucleotide
tggccctccagcaaagggccctcgttggac

SEQ ID NO: 469838 - DNA, 30 bp, Artificial Sequence
  Synthetic oligonucleotide
gggaactagagatcgccttacatgttggac

SEQ ID NO: 469839 - DNA, 30 bp, Artificial Sequence
  Synthetic oligonucleotide
tcgcaccgaactcggggtaacgctttggac

SEQ ID NO: 469840 - DNA, 30 bp, Artificial Sequence
  Synthetic oligonucleotide
aggccgccatgctatcgcagcgcaaatgac

SEQ ID NO: 469841 - DNA, 30 bp, Artificial Sequence
  Synthetic oligonucleotide
caagcaagcagtccttggccgaccaatgac

SEQ ID NO: 469842 - DNA, 30 bp, Artificial Sequence
  Synthetic oligonucleotide
tggcagatcgcgcatcacagggccaatgac

SEQ ID NO: 469843 - DNA, 30 bp, Artificial Sequence
  Synthetic oligonucleotide
gaaaagtacgtttgatagaagatgaatgac

SEQ ID NO: 469844 - DNA, 30 bp, Artificial Sequence
  Synthetic oligonucleotide
gtccttgatggctgtaaatccaataatgac

SEQ ID NO: 469845 - DNA, 30 bp, Artificial Sequence
  Synthetic oligonucleotide
agtccgttacgtatacctcggagtaatgac

SEQ ID NO: 469846 - DNA, 30 bp, Artificial Sequence
  Synthetic oligonucleotide
tgcattgtcatcggctcttcggaccatgac

SEQ ID NO: 469847 - DNA, 30 bp, Artificial Sequence
  Synthetic oligonucleotide
taggtccggtgcactctcttcttccatgac

SEQ ID NO: 469848 - DNA, 30 bp, Artificial Sequence
  Synthetic oligonucleotide
gcccggtagacttgcggctcctggcatgac

SEQ ID NO: 469849 - DNA, 30 bp, Artificial Sequence
  Synthetic oligonucleotide
gtcagggcattacttgtgtaaattcatgac

SEQ ID NO: 469850 - DNA, 30 bp, Artificial Sequence
  Synthetic oligonucleotide
tctcggctttttataagtccctgagatgac

SEQ ID NO: 469851 - DNA, 30 bp, Artificial Sequence
  Synthetic oligonucleotide
ctctccgtatccacgtgcgctcgcgatgac

SEQ ID NO: 469852 - DNA, 30 bp, Artificial Sequence
  Synthetic oligonucleotide
aggggccctagtgaaagctttttggatgac

SEQ ID NO: 469853 - DNA, 30 bp, Artificial Sequence
  Synthetic oligonucleotide
gagtgatatgtttcgacgagtggtgatgac

SEQ ID NO: 469854 - DNA, 30 bp, Artificial Sequence
  Synthetic oligonucleotide
ttctccgctcgattgcctgcagttgatgac

SEQ ID NO: 469855 - DNA, 30 bp, Artificial Sequence
  Synthetic oligonucleotide
gggttatgacggcaatcgtattaatatgac

SEQ ID NO: 469856 - DNA, 30 bp, Artificial Sequence
  Synthetic oligonucleotide
aatctaaaacaaggtacaaggacatatgac

SEQ ID NO: 469857 - DNA, 30 bp, Artificial Sequence
  Synthetic oligonucleotide
tcaaggataactttttgacttacatatgac

SEQ ID NO: 469858 - DNA, 30 bp, Artificial Sequence
  Synthetic oligonucleotide
ggtggtagctcatgttcgtcaggatatgac

SEQ ID NO: 469859 - DNA, 30 bp, Artificial Sequence
  Synthetic oligonucleotide
gccatgcacaagctgcccctgatatatgac

SEQ ID NO: 469860 - DNA, 30 bp, Artificial Sequence
  Synthetic oligonucleotide
aaaggatgatctacctgtacatactatgac

SEQ ID NO: 469861 - DNA, 30 bp, Artificial Sequence
  Synthetic oligonucleotide
cagttctacgtacctgcaacaagctatgac

SEQ ID NO: 469862 - DNA, 30 bp, Artificial Sequence
  Synthetic oligonucleotide
catctatggttatgacgcgctatctatgac

SEQ ID NO: 469863 - DNA, 30 bp, Artificial Sequence
  Synthetic oligonucleotide
tagcgaaactgcgcacgtgctgtctatgac

SEQ ID NO: 469864 - DNA, 30 bp, Artificial Sequence
  Synthetic oligonucleotide
ttggccctccgattttttccttcgtatgac

SEQ ID NO: 469865 - DNA, 30 bp, Artificial Sequence
  Synthetic oligonucleotide
aaagggttttagcagggtaccatgtatgac

SEQ ID NO: 469866 - DNA, 30 bp, Artificial Sequence
  Synthetic oligonucleotide
actgtaaaatcgcaggcagagatgtatgac

SEQ ID NO: 469867 - DNA, 30 bp, Artificial Sequence
  Synthetic oligonucleotide
ataggtcgcatgaagtgtaaagattatgac

SEQ ID NO: 469868 - DNA, 30 bp, Artificial Sequence
  Synthetic oligonucleotide
gacatgtgagcatatgcatttacaactgac

SEQ ID NO: 469869 - DNA, 30 bp, Artificial Sequence
  Synthetic oligonucleotide
aatgagttattttagtcgtacagaactgac

SEQ ID NO: 469870 - DNA, 30 bp, Artificial Sequence
  Synthetic oligonucleotide
aggacgcgcggaaaggtcagcgtaactgac

SEQ ID NO: 469871 - DNA, 30 bp, Artificial Sequence
  Synthetic oligonucleotide
aagagtagtgacctctttccgcacactgac

SEQ ID NO: 469872 - DNA, 30 bp, Artificial Sequence
  Synthetic oligonucleotide
gatcagacagtgccgccgattgtcactgac

SEQ ID NO: 469873 - DNA, 30 bp, Artificial Sequence
  Synthetic oligonucleotide
gggtcagacacatgtaagggcacgactgac

SEQ ID NO: 469874 - DNA, 30 bp, Artificial Sequence
  Synthetic oligonucleotide
tagatttgtgctaggcctaaaccgactgac

SEQ ID NO: 469875 - DNA, 30 bp, Artificial Sequence
  Synthetic oligonucleotide
tagaagcctgctggttcttttatgactgac

SEQ ID NO: 469876 - DNA, 30 bp, Artificial Sequence
  Synthetic oligonucleotide
gcactgcagcttgtgattaacaatactgac

SEQ ID NO: 469877 - DNA, 30 bp, Artificial Sequence
  Synthetic oligonucleotide
gtcgagatttgcccgttgggctatactgac

SEQ ID NO: 469878 - DNA, 30 bp, Artificial Sequence
  Synthetic oligonucleotide
gcttgactaaagattgttctgttgcctgac

SEQ ID NO: 469879 - DNA, 30 bp, Artificial Sequence
  Synthetic oligonucleotide
gttatatagagtcggaactttgtagctgac

SEQ ID NO: 469880 - DNA, 30 bp, Artificial Sequence
  Synthetic oligonucleotide
gccgacagaagttgacttatagacgctgac

SEQ ID NO: 469881 - DNA, 30 bp, Artificial Sequence
  Synthetic oligonucleotide
caagcagctattccctacctcgtcgctgac

SEQ ID NO: 469882 - DNA, 30 bp, Artificial Sequence
  Synthetic oligonucleotide
cagtatcttagacgggtgccatcggctgac

SEQ ID NO: 469883 - DNA, 30 bp, Artificial Sequence
  Synthetic oligonucleotide
gcataggcatgccagtgtgcaatggctgac

SEQ ID NO: 469884 - DNA, 30 bp, Artificial Sequence
  Synthetic oligonucleotide
tcatattaagcatcagcgtatttggctgac

SEQ ID NO: 469885 - DNA, 30 bp, Artificial Sequence
  Synthetic oligonucleotide
tgcagctatactttacccacggatgctgac

SEQ ID NO: 469886 - DNA, 30 bp, Artificial Sequence
  Synthetic oligonucleotide
aatttttacagccttatcgagtctgctgac

SEQ ID NO: 469887 - DNA, 30 bp, Artificial Sequence
  Synthetic oligonucleotide
acggttagctcaggttatttatttgctgac

SEQ ID NO: 469888 - DNA, 30 bp, Artificial Sequence
  Synthetic oligonucleotide
ggcttttctatctcggtattataatctgac

SEQ ID NO: 469889 - DNA, 30 bp, Artificial Sequence
  Synthetic oligonucleotide
gtattatcactgtaatacaaaccctctgac

SEQ ID NO: 469890 - DNA, 30 bp, Artificial Sequence
  Synthetic oligonucleotide
tgacgcgctggatcacgctagttgtctgac

SEQ ID NO: 469891 - DNA, 30 bp, Artificial Sequence
  Synthetic oligonucleotide
gtgcttttatctaaacctgggtattctgac

SEQ ID NO: 469892 - DNA, 30 bp, Artificial Sequence
  Synthetic oligonucleotide
gaccctcggtttcttattgcaaaaagtgac

SEQ ID NO: 469893 - DNA, 30 bp, Artificial Sequence
  Synthetic oligonucleotide
aacgtataggacgcacgtctgacaagtgac

SEQ ID NO: 469894 - DNA, 30 bp, Artificial Sequence
  Synthetic oligonucleotide
gagaggcaacttgacgtagctacaagtgac

SEQ ID NO: 469895 - DNA, 30 bp, Artificial Sequence
  Synthetic oligonucleotide
aagaaagctcatcgggggctgggaagtgac

SEQ ID NO: 469896 - DNA, 29 bp, Artificial Sequence
  Synthetic oligonucleotide
caatttgagcattctttgtgtacagtgac

SEQ ID NO: 469897 - DNA, 30 bp, Artificial Sequence
  Synthetic oligonucleotide
agtcaaacggcatacgttatgggcagtgac

SEQ ID NO: 469898 - DNA, 30 bp, Artificial Sequence
  Synthetic oligonucleotide
agaggggggatgctgagcactaatagtgac

SEQ ID NO: 469899 - DNA, 30 bp, Artificial Sequence
  Synthetic oligonucleotide
gctcctgtgtggccctggtatccacgtgac

SEQ ID NO: 469900 - DNA, 30 bp, Artificial Sequence
  Synthetic oligonucleotide
agcctacacccgcgaagcacgttacgtgac

SEQ ID NO: 469901 - DNA, 30 bp, Artificial Sequence
  Synthetic oligonucleotide
aatattgccaggaaacggcttggccgtgac

SEQ ID NO: 469902 - DNA, 30 bp, Artificial Sequence
  Synthetic oligonucleotide
acacgcaccacttgagtcacggcaggtgac

SEQ ID NO: 469903 - DNA, 30 bp, Artificial Sequence
  Synthetic oligonucleotide
gcacagagattttctgttagtagcggtgac

SEQ ID NO: 469904 - DNA, 30 bp, Artificial Sequence
  Synthetic oligonucleotide
aacccttgataacttgttccttatggtgac

SEQ ID NO: 469905 - DNA, 30 bp, Artificial Sequence
  Synthetic oligonucleotide
tgtctttcgatagtgtaaacagctggtgac

SEQ ID NO: 469906 - DNA, 30 bp, Artificial Sequence
  Synthetic oligonucleotide
aattctacatcggcgatgtgaaggtgtgac

SEQ ID NO: 469907 - DNA, 30 bp, Artificial Sequence
  Synthetic oligonucleotide
acccgctgtcagggtggacattggtgtgac

SEQ ID NO: 469908 - DNA, 30 bp, Artificial Sequence
  Synthetic oligonucleotide
acgctctggccaatttcttccgattgtgac

SEQ ID NO: 469909 - DNA, 30 bp, Artificial Sequence
  Synthetic oligonucleotide
attgtagagttttgtacagtgatttgtgac

SEQ ID NO: 469910 - DNA, 30 bp, Artificial Sequence
  Synthetic oligonucleotide
gttggtcgccaatttatcgcgataattgac

SEQ ID NO: 469911 - DNA, 30 bp, Artificial Sequence
  Synthetic oligonucleotide
catagggggatgttaggagggcacattgac

SEQ ID NO: 469912 - DNA, 30 bp, Artificial Sequence
  Synthetic oligonucleotide
atttcggtaggtatgagtttcgccattgac

SEQ ID NO: 469913 - DNA, 30 bp, Artificial Sequence
  Synthetic oligonucleotide
gttcagccaatggtgttatgggccattgac

SEQ ID NO: 469914 - DNA, 31 bp, Artificial Sequence
  Synthetic oligonucleotide
agcagcggcgacatagttaaattccattgac

SEQ ID NO: 469915 - DNA, 30 bp, Artificial Sequence
  Synthetic oligonucleotide
ggcccgtacatttagccagcaagcattgac

SEQ ID NO: 469916 - DNA, 30 bp, Artificial Sequence
  Synthetic oligonucleotide
gacgtaaaagcgtgaataatgtgcattgac

SEQ ID NO: 469917 - DNA, 30 bp, Artificial Sequence
  Synthetic oligonucleotide
cgcttgacatatgtatgcatgctgattgac

SEQ ID NO: 469918 - DNA, 30 bp, Artificial Sequence
  Synthetic oligonucleotide
agagtttaccatggcgtttaaatacttgac

SEQ ID NO: 469919 - DNA, 30 bp, Artificial Sequence
  Synthetic oligonucleotide
caccgtctctattgagcgcgaaagcttgac

SEQ ID NO: 469920 - DNA, 30 bp, Artificial Sequence
  Synthetic oligonucleotide
aatgacgcggtttgtctattaaggcttgac

SEQ ID NO: 469921 - DNA, 30 bp, Artificial Sequence
  Synthetic oligonucleotide
agtagcttatatcttgaatgcggtcttgac

SEQ ID NO: 469922 - DNA, 30 bp, Artificial Sequence
  Synthetic oligonucleotide
gcattattcgaataccgggcttgtcttgac

SEQ ID NO: 469923 - DNA, 30 bp, Artificial Sequence
  Synthetic oligonucleotide
tagaccaggccatatcggctgtaagttgac

SEQ ID NO: 469924 - DNA, 30 bp, Artificial Sequence
  Synthetic oligonucleotide
tcaacaggacgcttggatgtagcagttgac

SEQ ID NO: 469925 - DNA, 30 bp, Artificial Sequence
  Synthetic oligonucleotide
taatgtgtcgctaagggatggttcgttgac

SEQ ID NO: 469926 - DNA, 30 bp, Artificial Sequence
  Synthetic oligonucleotide
tccgaaggttagtcttttatctcggttgac

SEQ ID NO: 469927 - DNA, 30 bp, Artificial Sequence
  Synthetic oligonucleotide
atggaggaatacgctcgcgtggaatttgac

SEQ ID NO: 469928 - DNA, 30 bp, Artificial Sequence
  Synthetic oligonucleotide
gacaaatataataacgcgcagcactttgac

SEQ ID NO: 469929 - DNA, 30 bp, Artificial Sequence
  Synthetic oligonucleotide
actttcagcttactttatattgactttgac

SEQ ID NO: 469930 - DNA, 30 bp, Artificial Sequence
  Synthetic oligonucleotide
tggcactatgggtcatactgatcctttgac

SEQ ID NO: 469931 - DNA, 30 bp, Artificial Sequence
  Synthetic oligonucleotide
caattatagttcgcttagtatatctttgac

SEQ ID NO: 469932 - DNA, 30 bp, Artificial Sequence
  Synthetic oligonucleotide
tatcagaaggttcaggggggtgattttgac

SEQ ID NO: 469933 - DNA, 30 bp, Artificial Sequence
  Synthetic oligonucleotide
aatacttttcttggattcgaaggttttgac

SEQ ID NO: 469934 - DNA, 30 bp, Artificial Sequence
  Synthetic oligonucleotide
gaacagctgcgttggtgcccccaaaaatac

SEQ ID NO: 469935 - DNA, 30 bp, Artificial Sequence
  Synthetic oligonucleotide
ggactacggcggggcactgagaacaaatac

SEQ ID NO: 469936 - DNA, 30 bp, Artificial Sequence
  Synthetic oligonucleotide
aggcacgagacaggtgcaacagtcaaatac

SEQ ID NO: 469937 - DNA, 30 bp, Artificial Sequence
  Synthetic oligonucleotide
gttcatttacgctccattacgaagaaatac

SEQ ID NO: 469938 - DNA, 30 bp, Artificial Sequence
  Synthetic oligonucleotide
tgtctcctgccagtcttgtagaataaatac

SEQ ID NO: 469939 - DNA, 30 bp, Artificial Sequence
  Synthetic oligonucleotide
ctgaaagcggcaattagtttatataaatac

SEQ ID NO: 469940 - DNA, 30 bp, Artificial Sequence
  Synthetic oligonucleotide
ttggcgaagctgagacgcacccgtaaatac

SEQ ID NO: 469941 - DNA, 30 bp, Artificial Sequence
  Synthetic oligonucleotide
ttcccggttcctgacattaatcttaaatac

SEQ ID NO: 469942 - DNA, 30 bp, Artificial Sequence
  Synthetic oligonucleotide
caatgtcctaccaacggggtatcacaatac

SEQ ID NO: 469943 - DNA, 30 bp, Artificial Sequence
  Synthetic oligonucleotide
gaggagccggtcatcatctggtaccaatac

SEQ ID NO: 469944 - DNA, 30 bp, Artificial Sequence
  Synthetic oligonucleotide
gcagggggtgtgggaggcacacgccaatac

SEQ ID NO: 469945 - DNA, 30 bp, Artificial Sequence
  Synthetic oligonucleotide
tccgacgctagggttgagagtgtccaatac

SEQ ID NO: 469946 - DNA, 30 bp, Artificial Sequence
  Synthetic oligonucleotide
ttgccacgcaaaggaatggatctgcaatac

SEQ ID NO: 469947 - DNA, 30 bp, Artificial Sequence
  Synthetic oligonucleotide
aaaacaagacggaagattgacaatcaatac

SEQ ID NO: 469948 - DNA, 30 bp, Artificial Sequence
  Synthetic oligonucleotide
ttattcgtttctaacatttcaactcaatac

SEQ ID NO: 469949 - DNA, 30 bp, Artificial Sequence
  Synthetic oligonucleotide
gaagttagtttgaccggaacattcgaatac

SEQ ID NO: 469950 - DNA, 30 bp, Artificial Sequence
  Synthetic oligonucleotide
aaccggtatacgggaatcggcaaggaatac

SEQ ID NO: 469951 - DNA, 30 bp, Artificial Sequence
  Synthetic oligonucleotide
tctttggatcaatagcaatttaaggaatac

SEQ ID NO: 469952 - DNA, 30 bp, Artificial Sequence
  Synthetic oligonucleotide
caaattgtctcggtacggtattaggaatac

SEQ ID NO: 469953 - DNA, 30 bp, Artificial Sequence
  Synthetic oligonucleotide
cgttttataaatgatttgccttaggaatac

SEQ ID NO: 469954 - DNA, 30 bp, Artificial Sequence
  Synthetic oligonucleotide
tttcattcttcagtgatccacagggaatac

SEQ ID NO: 469955 - DNA, 30 bp, Artificial Sequence
  Synthetic oligonucleotide
aatttactggtcacctgcacacgggaatac

SEQ ID NO: 469956 - DNA, 30 bp, Artificial Sequence
  Synthetic oligonucleotide
atggttttgcacacccccaagaatgaatac

SEQ ID NO: 469957 - DNA, 26 bp, Artificial Sequence
  Synthetic oligonucleotide
ggatagtcaatgggccttatgaatac

SEQ ID NO: 469958 - DNA, 30 bp, Artificial Sequence
  Synthetic oligonucleotide
taactgatcacaagagcagacactgaatac

SEQ ID NO: 469959 - DNA, 30 bp, Artificial Sequence
  Synthetic oligonucleotide
atctgtactacgtcttaaccgactgaatac

SEQ ID NO: 469960 - DNA, 30 bp, Artificial Sequence
  Synthetic oligonucleotide
tggactgagctcctgtgtccactataatac

SEQ ID NO: 469961 - DNA, 30 bp, Artificial Sequence
  Synthetic oligonucleotide
gggctatagatacgtgtcctcgtctaatac

SEQ ID NO: 469962 - DNA, 30 bp, Artificial Sequence
  Synthetic oligonucleotide
ttgcttgtcgtatactatagccggtaatac

SEQ ID NO: 469963 - DNA, 31 bp, Artificial Sequence
  Synthetic oligonucleotide
gatcacttttcagcgtagttatttaacatac

SEQ ID NO: 469964 - DNA, 30 bp, Artificial Sequence
  Synthetic oligonucleotide
tttgtaatggttgtgagtcacgccacatac

SEQ ID NO: 469965 - DNA, 30 bp, Artificial Sequence
  Synthetic oligonucleotide
ttgtgaccggagatatccggagtcacatac

SEQ ID NO: 469966 - DNA, 30 bp, Artificial Sequence
  Synthetic oligonucleotide
aaaggcgaattctttaaatgaaagacatac

SEQ ID NO: 469967 - DNA, 30 bp, Artificial Sequence
  Synthetic oligonucleotide
taattcgactcagttatcagcgttacatac

SEQ ID NO: 469968 - DNA, 30 bp, Artificial Sequence
  Synthetic oligonucleotide
aatgcctcagtgtcattttgcgccccatac

SEQ ID NO: 469969 - DNA, 30 bp, Artificial Sequence
  Synthetic oligonucleotide
atctaaccccggggggcatcgtgcccatac

SEQ ID NO: 469970 - DNA, 30 bp, Artificial Sequence
  Synthetic oligonucleotide
ctgaacgatgcatgtcttcaagagccatac

SEQ ID NO: 469971 - DNA, 30 bp, Artificial Sequence
  Synthetic oligonucleotide
gtaaggaaacgtatgagtatcgtgccatac

SEQ ID NO: 469972 - DNA, 30 bp, Artificial Sequence
  Synthetic oligonucleotide
aaataacggccgtactatgactgtccatac

SEQ ID NO: 469973 - DNA, 30 bp, Artificial Sequence
  Synthetic oligonucleotide
cagcacaaaagcgactttgaaattccatac

SEQ ID NO: 469974 - DNA, 30 bp, Artificial Sequence
  Synthetic oligonucleotide
gtagactgcggcggggagaagtttccatac

SEQ ID NO: 469975 - DNA, 30 bp, Artificial Sequence
  Synthetic oligonucleotide
acagtagtgtttggacccgagtttccatac

SEQ ID NO: 469976 - DNA, 30 bp, Artificial Sequence
  Synthetic oligonucleotide
ttccgtctaatcgcgggaattaatgcatac

SEQ ID NO: 469977 - DNA, 30 bp, Artificial Sequence
  Synthetic oligonucleotide
taccgggttagcaggactgtcatctcatac

SEQ ID NO: 469978 - DNA, 30 bp, Artificial Sequence
  Synthetic oligonucleotide
attaggctatggtgtcgcggcgtctcatac

SEQ ID NO: 469979 - DNA, 30 bp, Artificial Sequence
  Synthetic oligonucleotide
attgtcccatgggtaagatgtgtctcatac

SEQ ID NO: 469980 - DNA, 30 bp, Artificial Sequence
  Synthetic oligonucleotide
ttaagtttgatcgattatcagctgtcatac

SEQ ID NO: 469981 - DNA, 30 bp, Artificial Sequence
  Synthetic oligonucleotide
aacttgtgtgtagtatcagtagcttcatac

SEQ ID NO: 469982 - DNA, 30 bp, Artificial Sequence
  Synthetic oligonucleotide
actttagcgtataggcacgccccaagatac

SEQ ID NO: 469983 - DNA, 27 bp, Artificial Sequence
  Synthetic oligonucleotide
ggattcatatactaggatcgaagatac

SEQ ID NO: 469984 - DNA, 30 bp, Artificial Sequence
  Synthetic oligonucleotide
gtcttccaaaatttctttataccgagatac

SEQ ID NO: 469985 - DNA, 30 bp, Artificial Sequence
  Synthetic oligonucleotide
cctcgggacctgccttctcggatgagatac

SEQ ID NO: 469986 - DNA, 30 bp, Artificial Sequence
  Synthetic oligonucleotide
taaatgtcgcccgataatacgaatagatac

SEQ ID NO: 469987 - DNA, 30 bp, Artificial Sequence
  Synthetic oligonucleotide
ctctcaatggctcctgttgtttatagatac

SEQ ID NO: 469988 - DNA, 30 bp, Artificial Sequence
  Synthetic oligonucleotide
tcccctaccttggaacgactaattagatac

SEQ ID NO: 469989 - DNA, 30 bp, Artificial Sequence
  Synthetic oligonucleotide
aaaaaagacacggcactggcttcacgatac

SEQ ID NO: 469990 - DNA, 30 bp, Artificial Sequence
  Synthetic oligonucleotide
accccgaccgggacaggtcgcgagcgatac

SEQ ID NO: 469991 - DNA, 30 bp, Artificial Sequence
  Synthetic oligonucleotide
catgtggcaagtatcctctaatagcgatac

SEQ ID NO: 469992 - DNA, 30 bp, Artificial Sequence
  Synthetic oligonucleotide
ggcttgcatggtcctagcttgtagcgatac

SEQ ID NO: 469993 - DNA, 30 bp, Artificial Sequence
  Synthetic oligonucleotide
tcgtctgagggatatgtagggggcggatac

SEQ ID NO: 469994 - DNA, 30 bp, Artificial Sequence
  Synthetic oligonucleotide
cgcgttgcagaagttagctatgggggatac

SEQ ID NO: 469995 - DNA, 30 bp, Artificial Sequence
  Synthetic oligonucleotide
gaatgacgatctatacaatgattgggatac

SEQ ID NO: 469996 - DNA, 30 bp, Artificial Sequence
  Synthetic oligonucleotide
cagcttgacgcgggcctttattatggatac

SEQ ID NO: 469997 - DNA, 30 bp, Artificial Sequence
  Synthetic oligonucleotide
atcagtagattctgggtctcttatggatac

SEQ ID NO: 469998 - DNA, 30 bp, Artificial Sequence
  Synthetic oligonucleotide
agttagttaaagatctaatgatttggatac

SEQ ID NO: 469999 - DNA, 30 bp, Artificial Sequence
  Synthetic oligonucleotide
ctatctattcacgcactgaaaacatgatac

SEQ ID NO: 470000 - DNA, 30 bp, Artificial Sequence
  Synthetic oligonucleotide
tatttataccggggtaaacgtttatgatac

SEQ ID NO: 470001 - DNA, 30 bp, Artificial Sequence
  Synthetic oligonucleotide
aaaagtagtagtaactctagtcggtgatac

SEQ ID NO: 470002 - DNA, 30 bp, Artificial Sequence
  Synthetic oligonucleotide
ggattcctaaattcctcgtttttgtgatac

SEQ ID NO: 470003 - DNA, 30 bp, Artificial Sequence
  Synthetic oligonucleotide
ctcatgcacaatgcaggtgtgttttgatac

SEQ ID NO: 470004 - DNA, 30 bp, Artificial Sequence
  Synthetic oligonucleotide
tcgtgacatctcgccctaagaaaaatatac

SEQ ID NO: 470005 - DNA, 30 bp, Artificial Sequence
  Synthetic oligonucleotide
atagctacccttaccttaacccaaatatac

SEQ ID NO: 470006 - DNA, 30 bp, Artificial Sequence
  Synthetic oligonucleotide
tcggtaaaatttgggtgttagtaaatatac

SEQ ID NO: 470007 - DNA, 30 bp, Artificial Sequence
  Synthetic oligonucleotide
tgaagtttagtcgtgaatatcacaatatac

SEQ ID NO: 470008 - DNA, 30 bp, Artificial Sequence
  Synthetic oligonucleotide
ttacatgataaaccattctatataatatac

SEQ ID NO: 470009 - DNA, 30 bp, Artificial Sequence
  Synthetic oligonucleotide
aatcacgcatcggcgctttgtctaatatac

SEQ ID NO: 470010 - DNA, 30 bp, Artificial Sequence
  Synthetic oligonucleotide
ttgatctaaaattatctggtccccatatac

SEQ ID NO: 470011 - DNA, 30 bp, Artificial Sequence
  Synthetic oligonucleotide
gagtacgagctgcccttggagtgcatatac

SEQ ID NO: 470012 - DNA, 30 bp, Artificial Sequence
  Synthetic oligonucleotide
tgtaatgatgttatatcgctactcatatac

SEQ ID NO: 470013 - DNA, 30 bp, Artificial Sequence
  Synthetic oligonucleotide
ctggtttcccagaatgccacaacgatatac

SEQ ID NO: 470014 - DNA, 30 bp, Artificial Sequence
  Synthetic oligonucleotide
acttcgttggccctgtgaagagggatatac

SEQ ID NO: 470015 - DNA, 30 bp, Artificial Sequence
  Synthetic oligonucleotide
ggaactactgacgtcacgcagtttatatac

SEQ ID NO: 470016 - DNA, 30 bp, Artificial Sequence
  Synthetic oligonucleotide
gtttacaagtccagtgaacagatactatac

SEQ ID NO: 470017 - DNA, 30 bp, Artificial Sequence
  Synthetic oligonucleotide
tatttagattaatggctaacaagcctatac

SEQ ID NO: 470018 - DNA, 30 bp, Artificial Sequence
  Synthetic oligonucleotide
atgaagattttggatcgcaaacgcctatac

SEQ ID NO: 470019 - DNA, 30 bp, Artificial Sequence
  Synthetic oligonucleotide
aaccaggtcacttacgacgaaccgctatac

SEQ ID NO: 470020 - DNA, 30 bp, Artificial Sequence
  Synthetic oligonucleotide
ggcaaccgtaggaagttccgttctctatac

SEQ ID NO: 470021 - DNA, 30 bp, Artificial Sequence
  Synthetic oligonucleotide
gttaggcatacacacggtgtcggtctatac

SEQ ID NO: 470022 - DNA, 30 bp, Artificial Sequence
  Synthetic oligonucleotide
ctggtagtcggtagtaccacaccagtatac

SEQ ID NO: 470023 - DNA, 30 bp, Artificial Sequence
  Synthetic oligonucleotide
gcttcgccttatgtatggcgttgagtatac

SEQ ID NO: 470024 - DNA, 30 bp, Artificial Sequence
  Synthetic oligonucleotide
gcactaaccgcaggtaagagtttagtatac

SEQ ID NO: 470025 - DNA, 30 bp, Artificial Sequence
  Synthetic oligonucleotide
tggttattccctttcccgctgcacgtatac

SEQ ID NO: 470026 - DNA, 30 bp, Artificial Sequence
  Synthetic oligonucleotide
atggttgcgggtaggcttgcagccgtatac

SEQ ID NO: 470027 - DNA, 30 bp, Artificial Sequence
  Synthetic oligonucleotide
taatgagaagtacaaacgatgcgcgtatac

SEQ ID NO: 470028 - DNA, 30 bp, Artificial Sequence
  Synthetic oligonucleotide
atcttggggggagacgacagaggggtatac

SEQ ID NO: 470029 - DNA, 30 bp, Artificial Sequence
  Synthetic oligonucleotide
cgctttgacgtgtcgtataccgtggtatac

SEQ ID NO: 470030 - DNA, 30 bp, Artificial Sequence
  Synthetic oligonucleotide
ccagttcgagccaagcgaatgttattatac

SEQ ID NO: 470031 - DNA, 30 bp, Artificial Sequence
  Synthetic oligonucleotide
gtgggccgcaggactagtcacgacttatac

SEQ ID NO: 470032 - DNA, 30 bp, Artificial Sequence
  Synthetic oligonucleotide
taacacgcagccaccatgcaagccttatac

SEQ ID NO: 470033 - DNA, 30 bp, Artificial Sequence
  Synthetic oligonucleotide
taaatatctatatcggctaactccttatac

SEQ ID NO: 470034 - DNA, 30 bp, Artificial Sequence
  Synthetic oligonucleotide
tcatggtcagaaaaccggtctgtcttatac

SEQ ID NO: 470035 - DNA, 30 bp, Artificial Sequence
  Synthetic oligonucleotide
atttcctacatggtacgcgagtggttatac

SEQ ID NO: 470036 - DNA, 30 bp, Artificial Sequence
  Synthetic oligonucleotide
caagcgtgcaattggggtccaaatttatac

SEQ ID NO: 470037 - DNA, 30 bp, Artificial Sequence
  Synthetic oligonucleotide
aaggccttaatcaagccgccaactttatac

SEQ ID NO: 470038 - DNA, 30 bp, Artificial Sequence
  Synthetic oligonucleotide
tgtgtgtaaaggtcaggttcttgtttatac

SEQ ID NO: 470039 - DNA, 29 bp, Artificial Sequence
  Synthetic oligonucleotide
actactgggaggtagaggtttaaaactac

SEQ ID NO: 470040 - DNA, 30 bp, Artificial Sequence
  Synthetic oligonucleotide
tcagaataggttgttcgtacttacaactac

SEQ ID NO: 470041 - DNA, 30 bp, Artificial Sequence
  Synthetic oligonucleotide
tttccgaagtttaccgcttcttccaactac

SEQ ID NO: 470042 - DNA, 30 bp, Artificial Sequence
  Synthetic oligonucleotide
gttgtaagtctgcaacatggatgcaactac

SEQ ID NO: 470043 - DNA, 30 bp, Artificial Sequence
  Synthetic oligonucleotide
ataatcagcacgaagttgtgtatcaactac

SEQ ID NO: 470044 - DNA, 30 bp, Artificial Sequence
  Synthetic oligonucleotide
gcctaattagcgcccagtagcttacactac

SEQ ID NO: 470045 - DNA, 30 bp, Artificial Sequence
  Synthetic oligonucleotide
taggaaaaaggtttttgagtataccactac

SEQ ID NO: 470046 - DNA, 30 bp, Artificial Sequence
  Synthetic oligonucleotide
cgtactgcggtacgcagaaagtggcactac

SEQ ID NO: 470047 - DNA, 30 bp, Artificial Sequence
  Synthetic oligonucleotide
gatcggccacctcctttgatggtgcactac

SEQ ID NO: 470048 - DNA, 30 bp, Artificial Sequence
  Synthetic oligonucleotide
tccaacgcttagtcgcaggatccagactac

SEQ ID NO: 470049 - DNA, 30 bp, Artificial Sequence
  Synthetic oligonucleotide
ggtgctaatatcgtcttaataggcgactac

SEQ ID NO: 470050 - DNA, 30 bp, Artificial Sequence
  Synthetic oligonucleotide
tataagttaccttctaggagttctgactac

SEQ ID NO: 470051 - DNA, 30 bp, Artificial Sequence
  Synthetic oligonucleotide
gaaaacagctaatggggcttgtgtgactac

SEQ ID NO: 470052 - DNA, 30 bp, Artificial Sequence
  Synthetic oligonucleotide
gatcctcgacatggtgaagcagttgactac

SEQ ID NO: 470053 - DNA, 30 bp, Artificial Sequence
  Synthetic oligonucleotide
accataacgttgcagtgatatatatactac

SEQ ID NO: 470054 - DNA, 30 bp, Artificial Sequence
  Synthetic oligonucleotide
gcagggacgtcgcgctgtcgcgcctactac

SEQ ID NO: 470055 - DNA, 31 bp, Artificial Sequence
  Synthetic oligonucleotide
ttctgtgactgcgactatggagagctactac

SEQ ID NO: 470056 - DNA, 30 bp, Artificial Sequence
  Synthetic oligonucleotide
ccgtataaccccgagtgggccgggtactac

SEQ ID NO: 470057 - DNA, 30 bp, Artificial Sequence
  Synthetic oligonucleotide
tccagaagaagacacagaaatttgtactac

SEQ ID NO: 470058 - DNA, 30 bp, Artificial Sequence
  Synthetic oligonucleotide
gtaaccatctcacgatgacgtttgtactac

SEQ ID NO: 470059 - DNA, 30 bp, Artificial Sequence
  Synthetic oligonucleotide
actcttgactgcttagtttccacttactac

SEQ ID NO: 470060 - DNA, 29 bp, Artificial Sequence
  Synthetic oligonucleotide
agtacactgagatgagtctcagttactac

SEQ ID NO: 470061 - DNA, 30 bp, Artificial Sequence
  Synthetic oligonucleotide
atttttaaggattcagggagacgttactac

SEQ ID NO: 470062 - DNA, 30 bp, Artificial Sequence
  Synthetic oligonucleotide
atctgggtaaagacaagcgggctttactac

SEQ ID NO: 470063 - DNA, 30 bp, Artificial Sequence
  Synthetic oligonucleotide
aattagaaaattcccctggatataacctac

SEQ ID NO: 470064 - DNA, 30 bp, Artificial Sequence
  Synthetic oligonucleotide
tgcagagatgcgactactggtgccacctac

SEQ ID NO: 470065 - DNA, 30 bp, Artificial Sequence
  Synthetic oligonucleotide
cttatacaggcctgccactatggtacctac

SEQ ID NO: 470066 - DNA, 30 bp, Artificial Sequence
  Synthetic oligonucleotide
acactaagcattgaacgaaactgtacctac

SEQ ID NO: 470067 - DNA, 30 bp, Artificial Sequence
  Synthetic oligonucleotide
gcagatgatcctggtcgcactaaaccctac

SEQ ID NO: 470068 - DNA, 30 bp, Artificial Sequence
  Synthetic oligonucleotide
cttacgcgctgaggttatttggcaccctac

SEQ ID NO: 470069 - DNA, 30 bp, Artificial Sequence
  Synthetic oligonucleotide
aatcccgtacttactggccgcatcccctac

SEQ ID NO: 470070 - DNA, 30 bp, Artificial Sequence
  Synthetic oligonucleotide
taataagcccggtgtatccaggatccctac

SEQ ID NO: 470071 - DNA, 30 bp, Artificial Sequence
  Synthetic oligonucleotide
tgcttgtgcaggacgtggcttactccctac

SEQ ID NO: 470072 - DNA, 30 bp, Artificial Sequence
  Synthetic oligonucleotide
ggttgcggctctcatcggaataaagcctac

SEQ ID NO: 470073 - DNA, 30 bp, Artificial Sequence
  Synthetic oligonucleotide
gttcgtaaaaccgtcttaaggttagcctac

SEQ ID NO: 470074 - DNA, 30 bp, Artificial Sequence
  Synthetic oligonucleotide
tcacagaagcctcttacattcatggcctac

SEQ ID NO: 470075 - DNA, 30 bp, Artificial Sequence
  Synthetic oligonucleotide
attctttatcaggagtgcccagtggcctac

SEQ ID NO: 470076 - DNA, 30 bp, Artificial Sequence
  Synthetic oligonucleotide
atgatactgttaagcaccttagatgcctac

SEQ ID NO: 470077 - DNA, 30 bp, Artificial Sequence
  Synthetic oligonucleotide
gctcacagaaacgccggagaaattgcctac

SEQ ID NO: 470078 - DNA, 30 bp, Artificial Sequence
  Synthetic oligonucleotide
atatatgcctcagcaactgtaatatcctac

SEQ ID NO: 470079 - DNA, 30 bp, Artificial Sequence
  Synthetic oligonucleotide
acccttatctgcgcaatatgctactcctac

SEQ ID NO: 470080 - DNA, 30 bp, Artificial Sequence
  Synthetic oligonucleotide
tcatagaactatgcgtttcaaagctcctac

SEQ ID NO: 470081 - DNA, 30 bp, Artificial Sequence
  Synthetic oligonucleotide
gttacaggataacgtatgcagcattcctac

SEQ ID NO: 470082 - DNA, 30 bp, Artificial Sequence
  Synthetic oligonucleotide
ggcgcagaaccggccgggtgatcttcctac

SEQ ID NO: 470083 - DNA, 30 bp, Artificial Sequence
  Synthetic oligonucleotide
gtcttggttatgagggctgtaggttcctac

SEQ ID NO: 470084 - DNA, 30 bp, Artificial Sequence
  Synthetic oligonucleotide
aggattttcaaactttgcgggtgttcctac

SEQ ID NO: 470085 - DNA, 30 bp, Artificial Sequence
  Synthetic oligonucleotide
ctccttgcgccgtaacgcgcgctttcctac

SEQ ID NO: 470086 - DNA, 30 bp, Artificial Sequence
  Synthetic oligonucleotide
gatcgaatatcgacttaggtacgaagctac

SEQ ID NO: 470087 - DNA, 30 bp, Artificial Sequence
  Synthetic oligonucleotide
ttttaatcagaataagcacagaagagctac

SEQ ID NO: 470088 - DNA, 30 bp, Artificial Sequence
  Synthetic oligonucleotide
agcgaagtgatgaaaagagtaacgagctac

SEQ ID NO: 470089 - DNA, 30 bp, Artificial Sequence
  Synthetic oligonucleotide
gattcggacacacccggtagcacgagctac

SEQ ID NO: 470090 - DNA, 30 bp, Artificial Sequence
  Synthetic oligonucleotide
ccgccgtcgaggccgccagtaaatagctac

SEQ ID NO: 470091 - DNA, 30 bp, Artificial Sequence
  Synthetic oligonucleotide
aatccgcgacgaagcctcgtgaatagctac

SEQ ID NO: 470092 - DNA, 30 bp, Artificial Sequence
  Synthetic oligonucleotide
acagtcgtaggaggcggtcatgttagctac

SEQ ID NO: 470093 - DNA, 30 bp, Artificial Sequence
  Synthetic oligonucleotide
ttaggcttttacacttatagcaaacgctac

SEQ ID NO: 470094 - DNA, 30 bp, Artificial Sequence
  Synthetic oligonucleotide
gactcacgtcagtcttttcaatcacgctac

SEQ ID NO: 470095 - DNA, 30 bp, Artificial Sequence
  Synthetic oligonucleotide
tggagcggttaataatcgacatgacgctac

SEQ ID NO: 470096 - DNA, 30 bp, Artificial Sequence
  Synthetic oligonucleotide
aaaagacagctgctgctgggatgccgctac

SEQ ID NO: 470097 - DNA, 30 bp, Artificial Sequence
  Synthetic oligonucleotide
attaaaagaatttcttctgaagggcgctac

SEQ ID NO: 470098 - DNA, 30 bp, Artificial Sequence
  Synthetic oligonucleotide
tcaactctactaattctgcgtaaaggctac

SEQ ID NO: 470099 - DNA, 30 bp, Artificial Sequence
  Synthetic oligonucleotide
cttgcaatagatgcggtaagtcaaggctac

SEQ ID NO: 470100 - DNA, 30 bp, Artificial Sequence
  Synthetic oligonucleotide
cagcttatttttatcctaaattgaggctac

SEQ ID NO: 470101 - DNA, 30 bp, Artificial Sequence
  Synthetic oligonucleotide
acgcagaatagctctagattaatgggctac

SEQ ID NO: 470102 - DNA, 30 bp, Artificial Sequence
  Synthetic oligonucleotide
gcgataaaggccaactaccttaatggctac

SEQ ID NO: 470103 - DNA, 30 bp, Artificial Sequence
  Synthetic oligonucleotide
cttataatgtattgacggttttctggctac

SEQ ID NO: 470104 - DNA, 30 bp, Artificial Sequence
  Synthetic oligonucleotide
ggtacagcagcatttagtcaacaatgctac

SEQ ID NO: 470105 - DNA, 30 bp, Artificial Sequence
  Synthetic oligonucleotide
atagcagctagattagaccggcgctgctac

SEQ ID NO: 470106 - DNA, 30 bp, Artificial Sequence
  Synthetic oligonucleotide
cgccctctgccgaaggcggttataatctac

SEQ ID NO: 470107 - DNA, 30 bp, Artificial Sequence
  Synthetic oligonucleotide
gtcaattgatcgttttagcctcacatctac

SEQ ID NO: 470108 - DNA, 30 bp, Artificial Sequence
  Synthetic oligonucleotide
cccgatgataagacgtgttttcgcatctac

SEQ ID NO: 470109 - DNA, 30 bp, Artificial Sequence
  Synthetic oligonucleotide
atgttctatatcaatgggtataatatctac

SEQ ID NO: 470110 - DNA, 30 bp, Artificial Sequence
  Synthetic oligonucleotide
gtatgaggggagaaaaggggaatcctctac

SEQ ID NO: 470111 - DNA, 30 bp, Artificial Sequence
  Synthetic oligonucleotide
caatttctcttcgtagcgctcttcctctac

SEQ ID NO: 470112 - DNA, 30 bp, Artificial Sequence
  Synthetic oligonucleotide
tatggaagacttagggccggccaagtctac

SEQ ID NO: 470113 - DNA, 30 bp, Artificial Sequence
  Synthetic oligonucleotide
ttattgaatacctgactcgtggaagtctac

SEQ ID NO: 470114 - DNA, 30 bp, Artificial Sequence
  Synthetic oligonucleotide
gtttgactttgagacacttggtcagtctac

SEQ ID NO: 470115 - DNA, 30 bp, Artificial Sequence
  Synthetic oligonucleotide
ttccggccagacgcgttggtcctagtctac

SEQ ID NO: 470116 - DNA, 30 bp, Artificial Sequence
  Synthetic oligonucleotide
ttaccaatattatagggttataccgtctac

SEQ ID NO: 470117 - DNA, 30 bp, Artificial Sequence
  Synthetic oligonucleotide
gttcagggcggtttagaaatttgtgtctac

SEQ ID NO: 470118 - DNA, 30 bp, Artificial Sequence
  Synthetic oligonucleotide
gaagcagctatgagtaattgcacattctac

SEQ ID NO: 470119 - DNA, 30 bp, Artificial Sequence
  Synthetic oligonucleotide
caaatgggatgttatgacccgggattctac

SEQ ID NO: 470120 - DNA, 30 bp, Artificial Sequence
  Synthetic oligonucleotide
acatgattactttaactataccacttctac

SEQ ID NO: 470121 - DNA, 30 bp, Artificial Sequence
  Synthetic oligonucleotide
agttttaattttcatatccgtgacttctac

SEQ ID NO: 470122 - DNA, 30 bp, Artificial Sequence
  Synthetic oligonucleotide
gagtcctgaactccaatatcatacttctac

SEQ ID NO: 470123 - DNA, 30 bp, Artificial Sequence
  Synthetic oligonucleotide
tggcttgaccgatgcgctggaaccttctac

SEQ ID NO: 470124 - DNA, 30 bp, Artificial Sequence
  Synthetic oligonucleotide
cactggggtaagattttgtaacccttctac

SEQ ID NO: 470125 - DNA, 30 bp, Artificial Sequence
  Synthetic oligonucleotide
ccctattgaggagctattgttcgcttctac

SEQ ID NO: 470126 - DNA, 30 bp, Artificial Sequence
  Synthetic oligonucleotide
tcttggcagtcgtgatttccaggtttctac

SEQ ID NO: 470127 - DNA, 30 bp, Artificial Sequence
  Synthetic oligonucleotide
tttatggttccgttactgtggtaaaagtac

SEQ ID NO: 470128 - DNA, 30 bp, Artificial Sequence
  Synthetic oligonucleotide
cctgagactaacaacagggtcgcaaagtac

SEQ ID NO: 470129 - DNA, 30 bp, Artificial Sequence
  Synthetic oligonucleotide
gtatataggtgatatcaaattgcaaagtac

SEQ ID NO: 470130 - DNA, 30 bp, Artificial Sequence
  Synthetic oligonucleotide
taataacaccccttatacgtaggcaagtac

SEQ ID NO: 470131 - DNA, 30 bp, Artificial Sequence
  Synthetic oligonucleotide
gattcactagggaggatgggttggaagtac

SEQ ID NO: 470132 - DNA, 30 bp, Artificial Sequence
  Synthetic oligonucleotide
cttgctcattaggggggtatcgtgaagtac

SEQ ID NO: 470133 - DNA, 30 bp, Artificial Sequence
  Synthetic oligonucleotide
gattactgaatcccaaacgtcgctaagtac

SEQ ID NO: 470134 - DNA, 30 bp, Artificial Sequence
  Synthetic oligonucleotide
tttgtcactccttaacattcacgacagtac

SEQ ID NO: 470135 - DNA, 30 bp, Artificial Sequence
  Synthetic oligonucleotide
agcgtgcagtctgtgcgaagccaccagtac

SEQ ID NO: 470136 - DNA, 30 bp, Artificial Sequence
  Synthetic oligonucleotide
caaatcagtgtagaaactgtcttccagtac

SEQ ID NO: 470137 - DNA, 30 bp, Artificial Sequence
  Synthetic oligonucleotide
aagcttcttcagattatagatgtgcagtac

SEQ ID NO: 470138 - DNA, 30 bp, Artificial Sequence
  Synthetic oligonucleotide
gtttcatactccgtagtgattcttcagtac

SEQ ID NO: 470139 - DNA, 30 bp, Artificial Sequence
  Synthetic oligonucleotide
ccaagtcgaacataccgtgtatgcgagtac

SEQ ID NO: 470140 - DNA, 30 bp, Artificial Sequence
  Synthetic oligonucleotide
gtaccatccaccgtcattatcatggagtac

SEQ ID NO: 470141 - DNA, 30 bp, Artificial Sequence
  Synthetic oligonucleotide
aaagaaacgggacatagcgagtactagtac

SEQ ID NO: 470142 - DNA, 30 bp, Artificial Sequence
  Synthetic oligonucleotide
ctgaagaacgtatatcgcgaacagtagtac

SEQ ID NO: 470143 - DNA, 30 bp, Artificial Sequence
  Synthetic oligonucleotide
taggtgaagttcacataccagatgtagtac

SEQ ID NO: 470144 - DNA, 30 bp, Artificial Sequence
  Synthetic oligonucleotide
tcccacgctttgaggtaatgcaccacgtac

SEQ ID NO: 470145 - DNA, 30 bp, Artificial Sequence
  Synthetic oligonucleotide
caatagattttgaccagctagggcacgtac

SEQ ID NO: 470146 - DNA, 30 bp, Artificial Sequence
  Synthetic oligonucleotide
atcgggtccgttctaggttgcaggacgtac

SEQ ID NO: 470147 - DNA, 30 bp, Artificial Sequence
  Synthetic oligonucleotide
gagtcgattcacataaccagtattacgtac

SEQ ID NO: 470148 - DNA, 30 bp, Artificial Sequence
  Synthetic oligonucleotide
ttgtcgcactccgatataggaacaccgtac

SEQ ID NO: 470149 - DNA, 30 bp, Artificial Sequence
  Synthetic oligonucleotide
cgtcgctgggtagatctggaacgaccgtac

SEQ ID NO: 470150 - DNA, 30 bp, Artificial Sequence
  Synthetic oligonucleotide
gtatattagcagctagggtgccccccgtac

SEQ ID NO: 470151 - DNA, 30 bp, Artificial Sequence
  Synthetic oligonucleotide
gctgccagccctagttggcaatggccgtac

SEQ ID NO: 470152 - DNA, 30 bp, Artificial Sequence
  Synthetic oligonucleotide
aatatgagtctgccggtcctgcaagcgtac

SEQ ID NO: 470153 - DNA, 30 bp, Artificial Sequence
  Synthetic oligonucleotide
cacaccagtgaaggacacgcggcagcgtac

SEQ ID NO: 470154 - DNA, 30 bp, Artificial Sequence
  Synthetic oligonucleotide
ttccgggtagctcagggtatgaccgcgtac

SEQ ID NO: 470155 - DNA, 30 bp, Artificial Sequence
  Synthetic oligonucleotide
ctacgcttaggtctcacccgttgcgcgtac

SEQ ID NO: 470156 - DNA, 30 bp, Artificial Sequence
  Synthetic oligonucleotide
gggaggaagcagggagtggtagcggcgtac

SEQ ID NO: 470157 - DNA, 30 bp, Artificial Sequence
  Synthetic oligonucleotide
tttatcgccaggcgacgagtaattgcgtac

SEQ ID NO: 470158 - DNA, 30 bp, Artificial Sequence
  Synthetic oligonucleotide
tttgtacccagcaggcggacactatcgtac

SEQ ID NO: 470159 - DNA, 30 bp, Artificial Sequence
  Synthetic oligonucleotide
gtacgcgctgccccaatcgattggtcgtac

SEQ ID NO: 470160 - DNA, 30 bp, Artificial Sequence
  Synthetic oligonucleotide
cagcttcgggaaaaacgacaaagttcgtac

SEQ ID NO: 470161 - DNA, 30 bp, Artificial Sequence
  Synthetic oligonucleotide
gatcggctttgactcgggtacctttcgtac

SEQ ID NO: 470162 - DNA, 30 bp, Artificial Sequence
  Synthetic oligonucleotide
ttcattctccattaatatatagcaaggtac

SEQ ID NO: 470163 - DNA, 30 bp, Artificial Sequence
  Synthetic oligonucleotide
ctagttctatccggcccatggataaggtac

SEQ ID NO: 470164 - DNA, 30 bp, Artificial Sequence
  Synthetic oligonucleotide
accaacatttgtagggtatctttaaggtac

SEQ ID NO: 470165 - DNA, 30 bp, Artificial Sequence
  Synthetic oligonucleotide
gcgtactggccttaacgatcggacaggtac

SEQ ID NO: 470166 - DNA, 30 bp, Artificial Sequence
  Synthetic oligonucleotide
attaccgctggggaccttgacggcaggtac

SEQ ID NO: 470167 - DNA, 30 bp, Artificial Sequence
  Synthetic oligonucleotide
aacgggcgcctgccccgggattttaggtac

SEQ ID NO: 470168 - DNA, 30 bp, Artificial Sequence
  Synthetic oligonucleotide
agcagtactgagatcctactgagacggtac

SEQ ID NO: 470169 - DNA, 30 bp, Artificial Sequence
  Synthetic oligonucleotide
aggctgctcggcagacagtgccagcggtac

SEQ ID NO: 470170 - DNA, 30 bp, Artificial Sequence
  Synthetic oligonucleotide
ttaccataggttcggattgacgagcggtac

SEQ ID NO: 470171 - DNA, 30 bp, Artificial Sequence
  Synthetic oligonucleotide
gttatttagttatcattaactgggcggtac

SEQ ID NO: 470172 - DNA, 30 bp, Artificial Sequence
  Synthetic oligonucleotide
atttgtcgaggccggcttgtactgcggtac

SEQ ID NO: 470173 - DNA, 30 bp, Artificial Sequence
  Synthetic oligonucleotide
tgcaagcgtctttgacattgctatcggtac

SEQ ID NO: 470174 - DNA, 30 bp, Artificial Sequence
  Synthetic oligonucleotide
tctcttaagtaggtgtagtgacctcggtac

SEQ ID NO: 470175 - DNA, 30 bp, Artificial Sequence
  Synthetic oligonucleotide
atgctagaacttcagatcatctgtcggtac

SEQ ID NO: 470176 - DNA, 30 bp, Artificial Sequence
  Synthetic oligonucleotide
tataacccaggtctctaggactttcggtac

SEQ ID NO: 470177 - DNA, 30 bp, Artificial Sequence
  Synthetic oligonucleotide
ttccaacgagccttgcggcgtttagggtac

SEQ ID NO: 470178 - DNA, 30 bp, Artificial Sequence
  Synthetic oligonucleotide
ctctttgtatgaggcggcaataccgggtac

SEQ ID NO: 470179 - DNA, 30 bp, Artificial Sequence
  Synthetic oligonucleotide
aagtattggctgcgcgcctaatccgggtac

SEQ ID NO: 470180 - DNA, 30 bp, Artificial Sequence
  Synthetic oligonucleotide
cgtatcatgtgtatctggccccgcgggtac

SEQ ID NO: 470181 - DNA, 30 bp, Artificial Sequence
  Synthetic oligonucleotide
cgctgcgctccggataggttttgcgggtac

SEQ ID NO: 470182 - DNA, 30 bp, Artificial Sequence
  Synthetic oligonucleotide
acggggatttatccgtcagccgtcgggtac

SEQ ID NO: 470183 - DNA, 30 bp, Artificial Sequence
  Synthetic oligonucleotide
gtcaggttccgttacatctctatggggtac

SEQ ID NO: 470184 - DNA, 30 bp, Artificial Sequence
  Synthetic oligonucleotide
gcttagatacagggccttaggacatggtac

SEQ ID NO: 470185 - DNA, 30 bp, Artificial Sequence
  Synthetic oligonucleotide
gcatcattgttcagaacttgctgctggtac

SEQ ID NO: 470186 - DNA, 30 bp, Artificial Sequence
  Synthetic oligonucleotide
ccccattccgaccggttgcgacattggtac

SEQ ID NO: 470187 - DNA, 30 bp, Artificial Sequence
  Synthetic oligonucleotide
acgtcaatgtaccatgtcggtacttggtac

SEQ ID NO: 470188 - DNA, 30 bp, Artificial Sequence
  Synthetic oligonucleotide
gctaaggtgcccgggggttgcgtttggtac

SEQ ID NO: 470189 - DNA, 30 bp, Artificial Sequence
  Synthetic oligonucleotide
acattgaaatttaaccagtatgtttggtac

SEQ ID NO: 470190 - DNA, 30 bp, Artificial Sequence
  Synthetic oligonucleotide
agtaccgcagccaaaactttgggaatgtac

SEQ ID NO: 470191 - DNA, 30 bp, Artificial Sequence
  Synthetic oligonucleotide
tattcccatagcttattgttttacatgtac

SEQ ID NO: 470192 - DNA, 30 bp, Artificial Sequence
  Synthetic oligonucleotide
gcctataaactttggcaaaccaggatgtac

SEQ ID NO: 470193 - DNA, 30 bp, Artificial Sequence
  Synthetic oligonucleotide
agaaactgacggaaggaagtgcatatgtac

SEQ ID NO: 470194 - DNA, 30 bp, Artificial Sequence
  Synthetic oligonucleotide
ccccgtaaatgacggaaaaattctatgtac

SEQ ID NO: 470195 - DNA, 30 bp, Artificial Sequence
  Synthetic oligonucleotide
tagacgagacctttcgacgatgttatgtac

SEQ ID NO: 470196 - DNA, 30 bp, Artificial Sequence
  Synthetic oligonucleotide
attgtatgggagaaagttgtctgactgtac

SEQ ID NO: 470197 - DNA, 30 bp, Artificial Sequence
  Synthetic oligonucleotide
gggcggaaacgtaggcagcagtgactgtac

SEQ ID NO: 470198 - DNA, 30 bp, Artificial Sequence
  Synthetic oligonucleotide
gtatgtgggtgcctgactcaattcctgtac

SEQ ID NO: 470199 - DNA, 30 bp, Artificial Sequence
  Synthetic oligonucleotide
acgacgtggttcttttgcggcgatctgtac

SEQ ID NO: 470200 - DNA, 30 bp, Artificial Sequence
  Synthetic oligonucleotide
gaggtaacttgaagtgcagtactcgtgtac

SEQ ID NO: 470201 - DNA, 30 bp, Artificial Sequence
  Synthetic oligonucleotide
ttttaatgtcgacagcactatctcgtgtac

SEQ ID NO: 470202 - DNA, 30 bp, Artificial Sequence
  Synthetic oligonucleotide
ataaccgatccttgcagtgaaccggtgtac

SEQ ID NO: 470203 - DNA, 30 bp, Artificial Sequence
  Synthetic oligonucleotide
cattcttctcttgatgagggagatgtgtac

SEQ ID NO: 470204 - DNA, 30 bp, Artificial Sequence
  Synthetic oligonucleotide
aatccgaaaccgggcagtgaaagtgtgtac

SEQ ID NO: 470205 - DNA, 30 bp, Artificial Sequence
  Synthetic oligonucleotide
ggctattccttacgcggggaatacttgtac

SEQ ID NO: 470206 - DNA, 30 bp, Artificial Sequence
  Synthetic oligonucleotide
ccacgcttgggtgtggagtgaaccttgtac

SEQ ID NO: 470207 - DNA, 30 bp, Artificial Sequence
  Synthetic oligonucleotide
ttgctaaccccgggtcttacttccttgtac

SEQ ID NO: 470208 - DNA, 30 bp, Artificial Sequence
  Synthetic oligonucleotide
gacatgttggttcttgtcaaacatttgtac

SEQ ID NO: 470209 - DNA, 30 bp, Artificial Sequence
  Synthetic oligonucleotide
ccctaggggtcgccgggtggacaaaattac

SEQ ID NO: 470210 - DNA, 30 bp, Artificial Sequence
  Synthetic oligonucleotide
ccgctaacatgacggtttactggcaattac

SEQ ID NO: 470211 - DNA, 30 bp, Artificial Sequence
  Synthetic oligonucleotide
taactttgtacttcctacgtagataattac

SEQ ID NO: 470212 - DNA, 30 bp, Artificial Sequence
  Synthetic oligonucleotide
gacgaagccgagcccggcaaaattaattac

SEQ ID NO: 470213 - DNA, 30 bp, Artificial Sequence
  Synthetic oligonucleotide
gccgattaaacagtcaatggcattaattac

SEQ ID NO: 470214 - DNA, 30 bp, Artificial Sequence
  Synthetic oligonucleotide
ttttctaatggtactaaggagattaattac

SEQ ID NO: 470215 - DNA, 30 bp, Artificial Sequence
  Synthetic oligonucleotide
ctttataatcgcgaaagtgtaatacattac

SEQ ID NO: 470216 - DNA, 30 bp, Artificial Sequence
  Synthetic oligonucleotide
ctattagcctactccgcgatagtacattac

SEQ ID NO: 470217 - DNA, 30 bp, Artificial Sequence
  Synthetic oligonucleotide
cccaggaacatgtattgaaggagccattac

SEQ ID NO: 470218 - DNA, 30 bp, Artificial Sequence
  Synthetic oligonucleotide
attccgcaagaccagcatcgacggcattac

SEQ ID NO: 470219 - DNA, 30 bp, Artificial Sequence
  Synthetic oligonucleotide
aagaccggaggctatcgtttgatgcattac

SEQ ID NO: 470220 - DNA, 30 bp, Artificial Sequence
  Synthetic oligonucleotide
tggcgggaataccgcttccctttgcattac

SEQ ID NO: 470221 - DNA, 30 bp, Artificial Sequence
  Synthetic oligonucleotide
ttctaatgttgggtaaacacaactcattac

SEQ ID NO: 470222 - DNA, 30 bp, Artificial Sequence
  Synthetic oligonucleotide
aagtactggcgccgcctatagagtcattac

SEQ ID NO: 470223 - DNA, 30 bp, Artificial Sequence
  Synthetic oligonucleotide
aaatcctacggacagggtggtcaagattac

SEQ ID NO: 470224 - DNA, 30 bp, Artificial Sequence
  Synthetic oligonucleotide
catgtgacttgacgtccatcagcagattac

SEQ ID NO: 470225 - DNA, 30 bp, Artificial Sequence
  Synthetic oligonucleotide
cctacctggggatacgtgagcgtagattac

SEQ ID NO: 470226 - DNA, 30 bp, Artificial Sequence
  Synthetic oligonucleotide
tagaatcgggtttgttcgcctcccgattac

SEQ ID NO: 470227 - DNA, 30 bp, Artificial Sequence
  Synthetic oligonucleotide
agctggatcgcaacattaatctatgattac

SEQ ID NO: 470228 - DNA, 30 bp, Artificial Sequence
  Synthetic oligonucleotide
gtaataggacgacgcggggctgctgattac

SEQ ID NO: 470229 - DNA, 30 bp, Artificial Sequence
  Synthetic oligonucleotide
tactctagctgacgggttctttctgattac

SEQ ID NO: 470230 - DNA, 30 bp, Artificial Sequence
  Synthetic oligonucleotide
cgttgccttaatacaacatcacttgattac

SEQ ID NO: 470231 - DNA, 30 bp, Artificial Sequence
  Synthetic oligonucleotide
ctttactcacaatataaaaaaggatattac

SEQ ID NO: 470232 - DNA, 30 bp, Artificial Sequence
  Synthetic oligonucleotide
ctctgcgtgaatttgatctgcgtatattac

SEQ ID NO: 470233 - DNA, 30 bp, Artificial Sequence
  Synthetic oligonucleotide
taccatgtcacctacaatgaggcctattac

SEQ ID NO: 470234 - DNA, 30 bp, Artificial Sequence
  Synthetic oligonucleotide
actttattctattgctagtcagtctattac

SEQ ID NO: 470235 - DNA, 30 bp, Artificial Sequence
  Synthetic oligonucleotide
tacagagtctctaggacgctcgtctattac

SEQ ID NO: 470236 - DNA, 30 bp, Artificial Sequence
  Synthetic oligonucleotide
cttgttgtgggggtcaacaatccttattac

SEQ ID NO: 470237 - DNA, 30 bp, Artificial Sequence
  Synthetic oligonucleotide
caccttggggccccgatatatcgttattac

SEQ ID NO: 470238 - DNA, 30 bp, Artificial Sequence
  Synthetic oligonucleotide
acgattagatcctagtgcagcatttattac

SEQ ID NO: 470239 - DNA, 30 bp, Artificial Sequence
  Synthetic oligonucleotide
gcaacttaattttaggtctaatgaacttac

SEQ ID NO: 470240 - DNA, 30 bp, Artificial Sequence
  Synthetic oligonucleotide
gttttgagggaaaaattaaattgaacttac

SEQ ID NO: 470241 - DNA, 30 bp, Artificial Sequence
  Synthetic oligonucleotide
gttgcacttggtgcgggaactgtaacttac

SEQ ID NO: 470242 - DNA, 30 bp, Artificial Sequence
  Synthetic oligonucleotide
ccccggtaatgcctcagagggttgacttac

SEQ ID NO: 470243 - DNA, 30 bp, Artificial Sequence
  Synthetic oligonucleotide
cagtaagtaaaaccagagtgtaatacttac

SEQ ID NO: 470244 - DNA, 30 bp, Artificial Sequence
  Synthetic oligonucleotide
gtggctctcgagcagcggaacagtacttac

SEQ ID NO: 470245 - DNA, 30 bp, Artificial Sequence
  Synthetic oligonucleotide
cccggtaataatgttccagtccgaccttac

SEQ ID NO: 470246 - DNA, 30 bp, Artificial Sequence
  Synthetic oligonucleotide
cccgcgtcaacgatatgtagagagccttac

SEQ ID NO: 470247 - DNA, 30 bp, Artificial Sequence
  Synthetic oligonucleotide
gccgttggatctgagcgattgaggccttac

SEQ ID NO: 470248 - DNA, 30 bp, Artificial Sequence
  Synthetic oligonucleotide
gctattgttggcttacgcggattgccttac

SEQ ID NO: 470249 - DNA, 30 bp, Artificial Sequence
  Synthetic oligonucleotide
tgcatagttcagaccggcgttggtccttac

SEQ ID NO: 470250 - DNA, 30 bp, Artificial Sequence
  Synthetic oligonucleotide
atatggttggaccaccttgctacagcttac

SEQ ID NO: 470251 - DNA, 30 bp, Artificial Sequence
  Synthetic oligonucleotide
ctcagccaaagcaccgtgccacaggcttac

SEQ ID NO: 470252 - DNA, 30 bp, Artificial Sequence
  Synthetic oligonucleotide
ttgcgccccgtcccgtttgttgttgcttac

SEQ ID NO: 470253 - DNA, 30 bp, Artificial Sequence
  Synthetic oligonucleotide
ccattgacaattccaagattaaactcttac

SEQ ID NO: 470254 - DNA, 30 bp, Artificial Sequence
  Synthetic oligonucleotide
aactgggaaaaatggccttgttactcttac

SEQ ID NO: 470255 - DNA, 30 bp, Artificial Sequence
  Synthetic oligonucleotide
cattctttagaaagcagactggcgtcttac

SEQ ID NO: 470256 - DNA, 30 bp, Artificial Sequence
  Synthetic oligonucleotide
tgtaggctgtcagcttccttggtgtcttac

SEQ ID NO: 470257 - DNA, 30 bp, Artificial Sequence
  Synthetic oligonucleotide
accgtgttcgcgtctgtttcggattcttac

SEQ ID NO: 470258 - DNA, 29 bp, Artificial Sequence
  Synthetic oligonucleotide
cgtaggaaacgtgcagattggcaagttac

SEQ ID NO: 470259 - DNA, 30 bp, Artificial Sequence
  Synthetic oligonucleotide
tgccgagtcgagcagaacagcagaagttac

SEQ ID NO: 470260 - DNA, 30 bp, Artificial Sequence
  Synthetic oligonucleotide
accacaactcgcgacagtttacgaagttac

SEQ ID NO: 470261 - DNA, 30 bp, Artificial Sequence
  Synthetic oligonucleotide
gcactgaagcacctttactttcacagttac

SEQ ID NO: 470262 - DNA, 30 bp, Artificial Sequence
  Synthetic oligonucleotide
tcaacccgagtccgtaatgtacggagttac

SEQ ID NO: 470263 - DNA, 30 bp, Artificial Sequence
  Synthetic oligonucleotide
gcatagcttccagccagtaaagggagttac

SEQ ID NO: 470264 - DNA, 30 bp, Artificial Sequence
  Synthetic oligonucleotide
aactccatcgtcataagcggctggagttac

SEQ ID NO: 470265 - DNA, 30 bp, Artificial Sequence
  Synthetic oligonucleotide
tttcgttgcagttttgcttgttatagttac

SEQ ID NO: 470266 - DNA, 30 bp, Artificial Sequence
  Synthetic oligonucleotide
aacttacagtgggattccggtagccgttac

SEQ ID NO: 470267 - DNA, 30 bp, Artificial Sequence
  Synthetic oligonucleotide
tacttcattacacggttccaattccgttac

SEQ ID NO: 470268 - DNA, 30 bp, Artificial Sequence
  Synthetic oligonucleotide
aacgctgtgtcccccacgatgacgcgttac

SEQ ID NO: 470269 - DNA, 30 bp, Artificial Sequence
  Synthetic oligonucleotide
agctcagtacggttacaagttgccggttac

SEQ ID NO: 470270 - DNA, 30 bp, Artificial Sequence
  Synthetic oligonucleotide
actgaattaggtgcacttggttagggttac

SEQ ID NO: 470271 - DNA, 30 bp, Artificial Sequence
  Synthetic oligonucleotide
gttgacctatgggaagctctgcggggttac

SEQ ID NO: 470272 - DNA, 30 bp, Artificial Sequence
  Synthetic oligonucleotide
gtcgccatcgtgaacacattctggggttac

SEQ ID NO: 470273 - DNA, 30 bp, Artificial Sequence
  Synthetic oligonucleotide
cgatctctagggattgactgtttgggttac

SEQ ID NO: 470274 - DNA, 30 bp, Artificial Sequence
  Synthetic oligonucleotide
caatatttggttctggtgagtgatggttac

SEQ ID NO: 470275 - DNA, 30 bp, Artificial Sequence
  Synthetic oligonucleotide
gataaatgtgtatgaatatgttctggttac

SEQ ID NO: 470276 - DNA, 30 bp, Artificial Sequence
  Synthetic oligonucleotide
ttcattatctctaaacctctacgtggttac

SEQ ID NO: 470277 - DNA, 30 bp, Artificial Sequence
  Synthetic oligonucleotide
attattagaggctttctcatctactgttac

SEQ ID NO: 470278 - DNA, 30 bp, Artificial Sequence
  Synthetic oligonucleotide
ggaatcggatgcgtgcagttttactgttac

SEQ ID NO: 470279 - DNA, 30 bp, Artificial Sequence
  Synthetic oligonucleotide
ccacgtggaaggtgtggtaagtagtgttac

SEQ ID NO: 470280 - DNA, 30 bp, Artificial Sequence
  Synthetic oligonucleotide
ggagtagtaacacgggttggactttgttac

SEQ ID NO: 470281 - DNA, 30 bp, Artificial Sequence
  Synthetic oligonucleotide
ttctaggggctcctcgtgcgagtttgttac

SEQ ID NO: 470282 - DNA, 30 bp, Artificial Sequence
  Synthetic oligonucleotide
gatagtcctgatgtcggactagtttgttac

SEQ ID NO: 470283 - DNA, 30 bp, Artificial Sequence
  Synthetic oligonucleotide
ccaatcgggaacggtgatctacccatttac

SEQ ID NO: 470284 - DNA, 30 bp, Artificial Sequence
  Synthetic oligonucleotide
ctctcatgattactgaggaacgccatttac

SEQ ID NO: 470285 - DNA, 30 bp, Artificial Sequence
  Synthetic oligonucleotide
ggcatggttgggatatatatgatcatttac

SEQ ID NO: 470286 - DNA, 30 bp, Artificial Sequence
  Synthetic oligonucleotide
cacccggcaatagaactcttgatcatttac

SEQ ID NO: 470287 - DNA, 30 bp, Artificial Sequence
  Synthetic oligonucleotide
aatacaaacgactctcggcaggtgatttac

SEQ ID NO: 470288 - DNA, 30 bp, Artificial Sequence
  Synthetic oligonucleotide
aactgtggatacaatgttgatagtatttac

SEQ ID NO: 470289 - DNA, 30 bp, Artificial Sequence
  Synthetic oligonucleotide
aatggcaggcgtgtacgtagctgtatttac

SEQ ID NO: 470290 - DNA, 30 bp, Artificial Sequence
  Synthetic oligonucleotide
tgaataaccacattaggctgtattatttac

SEQ ID NO: 470291 - DNA, 30 bp, Artificial Sequence
  Synthetic oligonucleotide
ctggatggcctgtcttagacagtactttac

SEQ ID NO: 470292 - DNA, 30 bp, Artificial Sequence
  Synthetic oligonucleotide
gaaccgtgaattgttctcgccagcctttac

SEQ ID NO: 470293 - DNA, 30 bp, Artificial Sequence
  Synthetic oligonucleotide
ccagcagcgggacgtaagctagatctttac

SEQ ID NO: 470294 - DNA, 30 bp, Artificial Sequence
  Synthetic oligonucleotide
attcctgaatgaatcccgatgtatctttac

SEQ ID NO: 470295 - DNA, 30 bp, Artificial Sequence
  Synthetic oligonucleotide
ggcatagttgggattcctcaatctctttac

SEQ ID NO: 470296 - DNA, 30 bp, Artificial Sequence
  Synthetic oligonucleotide
gcctaaatgtacgtaaccaacattctttac

SEQ ID NO: 470297 - DNA, 30 bp, Artificial Sequence
  Synthetic oligonucleotide
cccatgtcacttggtgtggctgttctttac

SEQ ID NO: 470298 - DNA, 30 bp, Artificial Sequence
  Synthetic oligonucleotide
ttctttgcgattcgtgttcggacagtttac

SEQ ID NO: 470299 - DNA, 30 bp, Artificial Sequence
  Synthetic oligonucleotide
aatgtcggatctaatatattcatagtttac

SEQ ID NO: 470300 - DNA, 30 bp, Artificial Sequence
  Synthetic oligonucleotide
tgcatcgtcctggtttaaaatctcgtttac

SEQ ID NO: 470301 - DNA, 30 bp, Artificial Sequence
  Synthetic oligonucleotide
tagggatcctgcataacccttccggtttac

SEQ ID NO: 470302 - DNA, 30 bp, Artificial Sequence
  Synthetic oligonucleotide
attcacttatttagaaaataagttgtttac

SEQ ID NO: 470303 - DNA, 30 bp, Artificial Sequence
  Synthetic oligonucleotide
ctatagagacgggctcaggtaatattttac

SEQ ID NO: 470304 - DNA, 30 bp, Artificial Sequence
  Synthetic oligonucleotide
ctatagttggtcgtgtagccaaacttttac

SEQ ID NO: 470305 - DNA, 30 bp, Artificial Sequence
  Synthetic oligonucleotide
tcgtacctggcgtcccgccctaatttttac

SEQ ID NO: 470306 - DNA, 30 bp, Artificial Sequence
  Synthetic oligonucleotide
gaatccaccgacaggaaatcccatttttac

SEQ ID NO: 470307 - DNA, 30 bp, Artificial Sequence
  Synthetic oligonucleotide
ggagatacagaggattgtaatcctttttac

SEQ ID NO: 470308 - DNA, 30 bp, Artificial Sequence
  Synthetic oligonucleotide
aaataggcatcgaatgatatctctttttac

SEQ ID NO: 470309 - DNA, 30 bp, Artificial Sequence
  Synthetic oligonucleotide
ataacatgcgccactatgtacattttttac

SEQ ID NO: 470310 - DNA, 30 bp, Artificial Sequence
  Synthetic oligonucleotide
gttgtattacaagatcgtctggttttttac

SEQ ID NO: 470311 - DNA, 30 bp, Artificial Sequence
  Synthetic oligonucleotide
ataacctcctaggaattggatgttttttac

SEQ ID NO: 470312 - DNA, 30 bp, Artificial Sequence
  Synthetic oligonucleotide
tcatctccacggcttaggctgtgaaaaacc

SEQ ID NO: 470313 - DNA, 30 bp, Artificial Sequence
  Synthetic oligonucleotide
gggtcggggtctcctcagaggctaaaaacc

SEQ ID NO: 470314 - DNA, 30 bp, Artificial Sequence
  Synthetic oligonucleotide
cgatctgttgccctcataattgtaaaaacc

SEQ ID NO: 470315 - DNA, 30 bp, Artificial Sequence
  Synthetic oligonucleotide
cataaacatagccatcctcagtgcaaaacc

SEQ ID NO: 470316 - DNA, 30 bp, Artificial Sequence
  Synthetic oligonucleotide
atgggtttcgtccaggatacgtagaaaacc

SEQ ID NO: 470317 - DNA, 30 bp, Artificial Sequence
  Synthetic oligonucleotide
tagttcgctgtttctgagaggcggaaaacc

SEQ ID NO: 470318 - DNA, 30 bp, Artificial Sequence
  Synthetic oligonucleotide
gttctggttttgacaaataaatataaaacc

SEQ ID NO: 470319 - DNA, 30 bp, Artificial Sequence
  Synthetic oligonucleotide
gaggttctggtcaggtcctcatgtaaaacc

SEQ ID NO: 470320 - DNA, 30 bp, Artificial Sequence
  Synthetic oligonucleotide
ctaacgcaggttggtaaatctagacaaacc

SEQ ID NO: 470321 - DNA, 30 bp, Artificial Sequence
  Synthetic oligonucleotide
ttagtaatctccttggatgcagtacaaacc

SEQ ID NO: 470322 - DNA, 30 bp, Artificial Sequence
  Synthetic oligonucleotide
tttatgaggtctaggtttagcgcccaaacc

SEQ ID NO: 470323 - DNA, 30 bp, Artificial Sequence
  Synthetic oligonucleotide
tgcggctaaggtatcgaaagaggccaaacc

SEQ ID NO: 470324 - DNA, 30 bp, Artificial Sequence
  Synthetic oligonucleotide
tggcagtacactcccctccacggccaaacc

SEQ ID NO: 470325 - DNA, 30 bp, Artificial Sequence
  Synthetic oligonucleotide
aacagcacaggtgatctgaatgtccaaacc

SEQ ID NO: 470326 - DNA, 30 bp, Artificial Sequence
  Synthetic oligonucleotide
aagcggcaggtggagactattcagcaaacc

SEQ ID NO: 470327 - DNA, 30 bp, Artificial Sequence
  Synthetic oligonucleotide
aagcctgcctaagttaaaatcgagcaaacc

SEQ ID NO: 470328 - DNA, 30 bp, Artificial Sequence
  Synthetic oligonucleotide
aaaatatgtgatagcgaaccgtggcaaacc

SEQ ID NO: 470329 - DNA, 30 bp, Artificial Sequence
  Synthetic oligonucleotide
gaattgtcgagtaggccggtatttcaaacc

SEQ ID NO: 470330 - DNA, 30 bp, Artificial Sequence
  Synthetic oligonucleotide
taaggtacgctttgagagctgtcagaaacc

SEQ ID NO: 470331 - DNA, 30 bp, Artificial Sequence
  Synthetic oligonucleotide
ccgctgcggtctaggtttcgacctgaaacc

SEQ ID NO: 470332 - DNA, 30 bp, Artificial Sequence
  Synthetic oligonucleotide
aaaagttgccgcttcttgagtcctgaaacc

SEQ ID NO: 470333 - DNA, 30 bp, Artificial Sequence
  Synthetic oligonucleotide
tttattaatataggggcagaccgtgaaacc

SEQ ID NO: 470334 - DNA, 30 bp, Artificial Sequence
  Synthetic oligonucleotide
caatgagctatggaggttgaaggataaacc

SEQ ID NO: 470335 - DNA, 30 bp, Artificial Sequence
  Synthetic oligonucleotide
tgtggagacgagttctctcattgataaacc

SEQ ID NO: 470336 - DNA, 30 bp, Artificial Sequence
  Synthetic oligonucleotide
gacctctagccgttgtcatgaatataaacc

SEQ ID NO: 470337 - DNA, 30 bp, Artificial Sequence
  Synthetic oligonucleotide
attcattgacggttcttgccgcactaaacc

SEQ ID NO: 470338 - DNA, 30 bp, Artificial Sequence
  Synthetic oligonucleotide
aattcaggacatccgtgggggcagtaaacc

SEQ ID NO: 470339 - DNA, 30 bp, Artificial Sequence
  Synthetic oligonucleotide
agtttctgattacccgtgacgatgtaaacc

SEQ ID NO: 470340 - DNA, 30 bp, Artificial Sequence
  Synthetic oligonucleotide
atagctctcatagcagacgggatgtaaacc

SEQ ID NO: 470341 - DNA, 30 bp, Artificial Sequence
  Synthetic oligonucleotide
acagtcttggaatcatcatgttgaacaacc

SEQ ID NO: 470342 - DNA, 30 bp, Artificial Sequence
  Synthetic oligonucleotide
gccgtgttagggatccggacagacacaacc

SEQ ID NO: 470343 - DNA, 30 bp, Artificial Sequence
  Synthetic oligonucleotide
ctcttaacgaactcgaaatgacgtacaacc

SEQ ID NO: 470344 - DNA, 30 bp, Artificial Sequence
  Synthetic oligonucleotide
ttccgttaatttccttttactggtacaacc

SEQ ID NO: 470345 - DNA, 30 bp, Artificial Sequence
  Synthetic oligonucleotide
gacagagactatcgttaattgcaaccaacc

SEQ ID NO: 470346 - DNA, 30 bp, Artificial Sequence
  Synthetic oligonucleotide
ataacttgttcacggggctgaggcccaacc

SEQ ID NO: 470347 - DNA, 30 bp, Artificial Sequence
  Synthetic oligonucleotide
gcattttccgttagcttcgaggtcccaacc

SEQ ID NO: 470348 - DNA, 28 bp, Artificial Sequence
  Synthetic oligonucleotide
aatcagttctgttttggtacaagcaacc

SEQ ID NO: 470349 - DNA, 30 bp, Artificial Sequence
  Synthetic oligonucleotide
ttccgggctttggtagttgactaagcaacc

SEQ ID NO: 470350 - DNA, 30 bp, Artificial Sequence
  Synthetic oligonucleotide
caagaaatctacaacgagcttcgagcaacc

SEQ ID NO: 470351 - DNA, 30 bp, Artificial Sequence
  Synthetic oligonucleotide
aagtgtcatccaatacaagctaacgcaacc

SEQ ID NO: 470352 - DNA, 30 bp, Artificial Sequence
  Synthetic oligonucleotide
tgcacggtagagggactcggttaggcaacc

SEQ ID NO: 470353 - DNA, 30 bp, Artificial Sequence
  Synthetic oligonucleotide
gcctttcagtttctggccctagtggcaacc

SEQ ID NO: 470354 - DNA, 30 bp, Artificial Sequence
  Synthetic oligonucleotide
tttgaggacaattattgaccttctgcaacc

SEQ ID NO: 470355 - DNA, 30 bp, Artificial Sequence
  Synthetic oligonucleotide
tactctgatggacacacacaagaatcaacc

SEQ ID NO: 470356 - DNA, 30 bp, Artificial Sequence
  Synthetic oligonucleotide
cgtgatgcggaccatcggctcgagtcaacc

SEQ ID NO: 470357 - DNA, 30 bp, Artificial Sequence
  Synthetic oligonucleotide
ggctgatgttcctgccgaggatagtcaacc

SEQ ID NO: 470358 - DNA, 30 bp, Artificial Sequence
  Synthetic oligonucleotide
ttaggtgcgtagctaagctataggtcaacc

SEQ ID NO: 470359 - DNA, 30 bp, Artificial Sequence
  Synthetic oligonucleotide
ccccatccttgcgagacgagccggtcaacc

SEQ ID NO: 470360 - DNA, 30 bp, Artificial Sequence
  Synthetic oligonucleotide
tcctggttatccgaatacaagcggtcaacc

SEQ ID NO: 470361 - DNA, 30 bp, Artificial Sequence
  Synthetic oligonucleotide
cgtggttagagtagcttcgaagggtcaacc

SEQ ID NO: 470362 - DNA, 30 bp, Artificial Sequence
  Synthetic oligonucleotide
accctatatgaacgaggaaccaattcaacc

SEQ ID NO: 470363 - DNA, 30 bp, Artificial Sequence
  Synthetic oligonucleotide
tgctcacggtgcatttgattgtcttcaacc

SEQ ID NO: 470364 - DNA, 30 bp, Artificial Sequence
  Synthetic oligonucleotide
gcagagatctagagtactagtgtttcaacc

SEQ ID NO: 470365 - DNA, 30 bp, Artificial Sequence
  Synthetic oligonucleotide
tatctctcgatatatcgtatacagagaacc

SEQ ID NO: 470366 - DNA, 30 bp, Artificial Sequence
  Synthetic oligonucleotide
atatctattgatgttctatatgctagaacc

SEQ ID NO: 470367 - DNA, 30 bp, Artificial Sequence
  Synthetic oligonucleotide
ggccctcgccttgctacccggagacgaacc

SEQ ID NO: 470368 - DNA, 30 bp, Artificial Sequence
  Synthetic oligonucleotide
gaattgatagtctgacgaattagccgaacc

SEQ ID NO: 470369 - DNA, 30 bp, Artificial Sequence
  Synthetic oligonucleotide
gttatgacgctcggttacactaggcgaacc

SEQ ID NO: 470370 - DNA, 30 bp, Artificial Sequence
  Synthetic oligonucleotide
ttactccgcagaacccacgactatcgaacc

SEQ ID NO: 470371 - DNA, 30 bp, Artificial Sequence
  Synthetic oligonucleotide
atcacacctctggcggacaaatgtcgaacc

SEQ ID NO: 470372 - DNA, 30 bp, Artificial Sequence
  Synthetic oligonucleotide
agctggtagttgtaaatgtcacttcgaacc

SEQ ID NO: 470373 - DNA, 30 bp, Artificial Sequence
  Synthetic oligonucleotide
ataccttatgtgccttcggtccttcgaacc

SEQ ID NO: 470374 - DNA, 30 bp, Artificial Sequence
  Synthetic oligonucleotide
ttagcagacgtccatgagctagcaggaacc

SEQ ID NO: 470375 - DNA, 30 bp, Artificial Sequence
  Synthetic oligonucleotide
gtcaagtatactgcagcatagcccggaacc

SEQ ID NO: 470376 - DNA, 30 bp, Artificial Sequence
  Synthetic oligonucleotide
cacaaatgtcgcgctgccgaggtcggaacc

SEQ ID NO: 470377 - DNA, 30 bp, Artificial Sequence
  Synthetic oligonucleotide
tgtcgaggcgggagtgacggattcggaacc

SEQ ID NO: 470378 - DNA, 30 bp, Artificial Sequence
  Synthetic oligonucleotide
agttacctcccccggcagggcccgggaacc

SEQ ID NO: 470379 - DNA, 30 bp, Artificial Sequence
  Synthetic oligonucleotide
cgcttatcaaactaaatctggactggaacc

SEQ ID NO: 470380 - DNA, 30 bp, Artificial Sequence
  Synthetic oligonucleotide
gagttgaaatggggtttttacgttggaacc

SEQ ID NO: 470381 - DNA, 30 bp, Artificial Sequence
  Synthetic oligonucleotide
gtcgaaacggttggagtgacgtttggaacc

SEQ ID NO: 470382 - DNA, 30 bp, Artificial Sequence
  Synthetic oligonucleotide
cgcgattttaacattagcattacatgaacc

SEQ ID NO: 470383 - DNA, 30 bp, Artificial Sequence
  Synthetic oligonucleotide
gcagaaactgaaaacaacggatagtgaacc

SEQ ID NO: 470384 - DNA, 30 bp, Artificial Sequence
  Synthetic oligonucleotide
ccacgagctaaaagttcaatgcgcataacc

SEQ ID NO: 470385 - DNA, 30 bp, Artificial Sequence
  Synthetic oligonucleotide
cctgcgtcatggggggtcgttggcataacc

SEQ ID NO: 470386 - DNA, 30 bp, Artificial Sequence
  Synthetic oligonucleotide
agttcctgaccatattgtttatgcataacc

SEQ ID NO: 470387 - DNA, 30 bp, Artificial Sequence
  Synthetic oligonucleotide
tatgatggccacgacagactcctcataacc

SEQ ID NO: 470388 - DNA, 30 bp, Artificial Sequence
  Synthetic oligonucleotide
gagcccaaagcagatcagcaggtcataacc

SEQ ID NO: 470389 - DNA, 30 bp, Artificial Sequence
  Synthetic oligonucleotide
ttggttacggagactggtcaggcgataacc

SEQ ID NO: 470390 - DNA, 30 bp, Artificial Sequence
  Synthetic oligonucleotide
ctggtctgcgtgtgatggcgggatataacc

SEQ ID NO: 470391 - DNA, 30 bp, Artificial Sequence
  Synthetic oligonucleotide
cgtactctagaggaacttgacgcactaacc

SEQ ID NO: 470392 - DNA, 30 bp, Artificial Sequence
  Synthetic oligonucleotide
gagttttgcatatggtatcaaagactaacc

SEQ ID NO: 470393 - DNA, 30 bp, Artificial Sequence
  Synthetic oligonucleotide
aatacacgtaccgggagttcacagctaacc

SEQ ID NO: 470394 - DNA, 30 bp, Artificial Sequence
  Synthetic oligonucleotide
acgtccatgaacaacgtagcagaggtaacc

SEQ ID NO: 470395 - DNA, 30 bp, Artificial Sequence
  Synthetic oligonucleotide
gttactaggcagcatagcgcccgggtaacc

SEQ ID NO: 470396 - DNA, 30 bp, Artificial Sequence
  Synthetic oligonucleotide
ttcctatgttcgtggatgtcgagtgtaacc

SEQ ID NO: 470397 - DNA, 30 bp, Artificial Sequence
  Synthetic oligonucleotide
ctttttttgccacatatatcatgtgtaacc

SEQ ID NO: 470398 - DNA, 30 bp, Artificial Sequence
  Synthetic oligonucleotide
acatcacatttcaggtttgtttacttaacc

SEQ ID NO: 470399 - DNA, 30 bp, Artificial Sequence
  Synthetic oligonucleotide
aagaacgccaaataaccgatccagttaacc

SEQ ID NO: 470400 - DNA, 30 bp, Artificial Sequence
  Synthetic oligonucleotide
gactcctacctagtacctttcccgttaacc

SEQ ID NO: 470401 - DNA, 30 bp, Artificial Sequence
  Synthetic oligonucleotide
atagacggggccaatgttgaatggttaacc

SEQ ID NO: 470402 - DNA, 30 bp, Artificial Sequence
  Synthetic oligonucleotide
tctcatctctctaaatgtttaatgttaacc

SEQ ID NO: 470403 - DNA, 30 bp, Artificial Sequence
  Synthetic oligonucleotide
ttacattaggggcgattcgatttgttaacc

SEQ ID NO: 470404 - DNA, 30 bp, Artificial Sequence
  Synthetic oligonucleotide
tggagcagccaacgaccaggccatttaacc

SEQ ID NO: 470405 - DNA, 30 bp, Artificial Sequence
  Synthetic oligonucleotide
agggtcacctcgttactgcgagatttaacc

SEQ ID NO: 470406 - DNA, 30 bp, Artificial Sequence
  Synthetic oligonucleotide
ggcagctcacgtgccgttccgcgtttaacc

SEQ ID NO: 470407 - DNA, 30 bp, Artificial Sequence
  Synthetic oligonucleotide
gtgatcgaccatctgtgtgcaaacaacacc

SEQ ID NO: 470408 - DNA, 30 bp, Artificial Sequence
  Synthetic oligonucleotide
cgggaaaacaaggtgacatggtcgaacacc

SEQ ID NO: 470409 - DNA, 30 bp, Artificial Sequence
  Synthetic oligonucleotide
atttcgaagctctcgtggctgtcgaacacc

SEQ ID NO: 470410 - DNA, 30 bp, Artificial Sequence
  Synthetic oligonucleotide
taccgctcagtttattcgcgaaggaacacc

SEQ ID NO: 470411 - DNA, 30 bp, Artificial Sequence
  Synthetic oligonucleotide
ggagttcgagggatcagatctcataacacc

SEQ ID NO: 470412 - DNA, 30 bp, Artificial Sequence
  Synthetic oligonucleotide
tatgtcataagtgtccttcggggtaacacc

SEQ ID NO: 470413 - DNA, 30 bp, Artificial Sequence
  Synthetic oligonucleotide
acgtaatttgagaatctatctacacacacc

SEQ ID NO: 470414 - DNA, 30 bp, Artificial Sequence
  Synthetic oligonucleotide
aacttcgcgagtaaaaagccagtacacacc

SEQ ID NO: 470415 - DNA, 30 bp, Artificial Sequence
  Synthetic oligonucleotide
tccggcgaggaccgcccggtggtacacacc

SEQ ID NO: 470416 - DNA, 30 bp, Artificial Sequence
  Synthetic oligonucleotide
tcgcgtaacgggaagatttacccgcacacc

SEQ ID NO: 470417 - DNA, 30 bp, Artificial Sequence
  Synthetic oligonucleotide
actgggagcgtacagacccggtcgcacacc

SEQ ID NO: 470418 - DNA, 30 bp, Artificial Sequence
  Synthetic oligonucleotide
gttgtttaccacattggctagaatcacacc

SEQ ID NO: 470419 - DNA, 30 bp, Artificial Sequence
  Synthetic oligonucleotide
gctcctgaaccatcaattcatgatcacacc

SEQ ID NO: 470420 - DNA, 30 bp, Artificial Sequence
  Synthetic oligonucleotide
tacattttctagtgtgctcaccttcacacc

SEQ ID NO: 470421 - DNA, 30 bp, Artificial Sequence
  Synthetic oligonucleotide
tatctaagtttccagatggataacgacacc

SEQ ID NO: 470422 - DNA, 30 bp, Artificial Sequence
  Synthetic oligonucleotide
ttattacgatatgataagatctgcgacacc

SEQ ID NO: 470423 - DNA, 30 bp, Artificial Sequence
  Synthetic oligonucleotide
cgcggcggttttgtcgatgttagggacacc

SEQ ID NO: 470424 - DNA, 30 bp, Artificial Sequence
  Synthetic oligonucleotide
ctcatttctgcctcgcgagctgatgacacc

SEQ ID NO: 470425 - DNA, 30 bp, Artificial Sequence
  Synthetic oligonucleotide
gcggctcgttgaccgagcacatttgacacc

SEQ ID NO: 470426 - DNA, 30 bp, Artificial Sequence
  Synthetic oligonucleotide
actgtcgcaacgatacgcatgcaatacacc

SEQ ID NO: 470427 - DNA, 30 bp, Artificial Sequence
  Synthetic oligonucleotide
atagggtggcattggtgaggaagatacacc

SEQ ID NO: 470428 - DNA, 30 bp, Artificial Sequence
  Synthetic oligonucleotide
ttaatgtaagaaccttgcagatcgtacacc

SEQ ID NO: 470429 - DNA, 30 bp, Artificial Sequence
  Synthetic oligonucleotide
ttttaggttacacctgtcaacgggtacacc

SEQ ID NO: 470430 - DNA, 30 bp, Artificial Sequence
  Synthetic oligonucleotide
ggtaatgtaacaacctatgtactgtacacc

SEQ ID NO: 470431 - DNA, 30 bp, Artificial Sequence
  Synthetic oligonucleotide
gtatagtgcagtggtagatgtccttacacc

SEQ ID NO: 470432 - DNA, 30 bp, Artificial Sequence
  Synthetic oligonucleotide
ccggccctcaggggcacggtctcttacacc

SEQ ID NO: 470433 - DNA, 30 bp, Artificial Sequence
  Synthetic oligonucleotide
tgggtgtccttaaggttattgggttacacc

SEQ ID NO: 470434 - DNA, 30 bp, Artificial Sequence
  Synthetic oligonucleotide
tttgtccgcggcaattgttggagaaccacc

SEQ ID NO: 470435 - DNA, 30 bp, Artificial Sequence
  Synthetic oligonucleotide
gtgtaccccgtctatctatctcgaaccacc

SEQ ID NO: 470436 - DNA, 30 bp, Artificial Sequence
  Synthetic oligonucleotide
atggatcgaaaagggcgttgcggaaccacc

SEQ ID NO: 470437 - DNA, 30 bp, Artificial Sequence
  Synthetic oligonucleotide
ttaaacgccaccttacaattggtaaccacc

SEQ ID NO: 470438 - DNA, 30 bp, Artificial Sequence
  Synthetic oligonucleotide
ccacacatctggcccagaattaacaccacc

SEQ ID NO: 470439 - DNA, 30 bp, Artificial Sequence
  Synthetic oligonucleotide
tcctgcaaagaagctcgcctattcaccacc

SEQ ID NO: 470440 - DNA, 30 bp, Artificial Sequence
  Synthetic oligonucleotide
cgcagttgtcctaccggcttggcgaccacc

SEQ ID NO: 470441 - DNA, 30 bp, Artificial Sequence
  Synthetic oligonucleotide
gtgaggccaaggcaaggtcatttgaccacc

SEQ ID NO: 470442 - DNA, 30 bp, Artificial Sequence
  Synthetic oligonucleotide
tgtgcatccggcgcccggtttaataccacc

SEQ ID NO: 470443 - DNA, 30 bp, Artificial Sequence
  Synthetic oligonucleotide
tacctgccaacccccctgtaatttaccacc

SEQ ID NO: 470444 - DNA, 30 bp, Artificial Sequence
  Synthetic oligonucleotide
gaaatcataggtttagtattatttaccacc

SEQ ID NO: 470445 - DNA, 30 bp, Artificial Sequence
  Synthetic oligonucleotide
cgcatggattgctgcttgggtaaccccacc

SEQ ID NO: 470446 - DNA, 30 bp, Artificial Sequence
  Synthetic oligonucleotide
acgttcgctatgcagggggctatccccacc

SEQ ID NO: 470447 - DNA, 30 bp, Artificial Sequence
  Synthetic oligonucleotide
tcgtaggtgtccctcctgaacgggcccacc

SEQ ID NO: 470448 - DNA, 30 bp, Artificial Sequence
  Synthetic oligonucleotide
gatgcgacagaccttttctgggaagccacc

SEQ ID NO: 470449 - DNA, 30 bp, Artificial Sequence
  Synthetic oligonucleotide
cataacgtacacaatgaacgctgagccacc

SEQ ID NO: 470450 - DNA, 30 bp, Artificial Sequence
  Synthetic oligonucleotide
tgtcagaagggtaaccatttgtcggccacc

SEQ ID NO: 470451 - DNA, 30 bp, Artificial Sequence
  Synthetic oligonucleotide
gagagagtcggccacgtgccccgggccacc

SEQ ID NO: 470452 - DNA, 30 bp, Artificial Sequence
  Synthetic oligonucleotide
ggtccctgcttccgggattcgagatccacc

SEQ ID NO: 470453 - DNA, 30 bp, Artificial Sequence
  Synthetic oligonucleotide
ttccatcatcatccgtttaatatatccacc

SEQ ID NO: 470454 - DNA, 30 bp, Artificial Sequence
  Synthetic oligonucleotide
ccttcgtcgcagaaaatttgagcctccacc

SEQ ID NO: 470455 - DNA, 30 bp, Artificial Sequence
  Synthetic oligonucleotide
atatgtctgctttcttattgcatgtccacc

SEQ ID NO: 470456 - DNA, 30 bp, Artificial Sequence
  Synthetic oligonucleotide
aaccttcgccttcttcaatcgcgttccacc

SEQ ID NO: 470457 - DNA, 30 bp, Artificial Sequence
  Synthetic oligonucleotide
tgcctgtaccggccaaattaactttccacc

SEQ ID NO: 470458 - DNA, 30 bp, Artificial Sequence
  Synthetic oligonucleotide
tctcatcaaacccgcacgctagtttccacc

SEQ ID NO: 470459 - DNA, 29 bp, Artificial Sequence
  Synthetic oligonucleotide
ataaactaacgttgagatttaaaagcacc

SEQ ID NO: 470460 - DNA, 30 bp, Artificial Sequence
  Synthetic oligonucleotide
acaggaaattaaaggacggtttgaagcacc

SEQ ID NO: 470461 - DNA, 30 bp, Artificial Sequence
  Synthetic oligonucleotide
ctatgaggcgctttggcgatcataagcacc

SEQ ID NO: 470462 - DNA, 30 bp, Artificial Sequence
  Synthetic oligonucleotide
tttttggaccccggcatatctacgagcacc

SEQ ID NO: 470463 - DNA, 30 bp, Artificial Sequence
  Synthetic oligonucleotide
ctataaggggatattgcgtaggggagcacc

SEQ ID NO: 470464 - DNA, 30 bp, Artificial Sequence
  Synthetic oligonucleotide
agctcgcggacagatgattgacgacgcacc

SEQ ID NO: 470465 - DNA, 30 bp, Artificial Sequence
  Synthetic oligonucleotide
ccggcaagtaatatgttaagcggacgcacc

SEQ ID NO: 470466 - DNA, 30 bp, Artificial Sequence
  Synthetic oligonucleotide
acgcgctagacttcgatctatcgccgcacc

SEQ ID NO: 470467 - DNA, 30 bp, Artificial Sequence
  Synthetic oligonucleotide
cgttcatggcagtagatacactgccgcacc

SEQ ID NO: 470468 - DNA, 30 bp, Artificial Sequence
  Synthetic oligonucleotide
gggcttcgccaggcaatgcggtgccgcacc

SEQ ID NO: 470469 - DNA, 30 bp, Artificial Sequence
  Synthetic oligonucleotide
ctcgtaaattggttcgagacttcgcgcacc

SEQ ID NO: 470470 - DNA, 30 bp, Artificial Sequence
  Synthetic oligonucleotide
ctacattttttagattttcggcgtcgcacc

SEQ ID NO: 470471 - DNA, 30 bp, Artificial Sequence
  Synthetic oligonucleotide
gaacagtagcgtgcaatagccattcgcacc

SEQ ID NO: 470472 - DNA, 30 bp, Artificial Sequence
  Synthetic oligonucleotide
aataatgacggtcgcgtcataacaggcacc

SEQ ID NO: 470473 - DNA, 30 bp, Artificial Sequence
  Synthetic oligonucleotide
tgtgctttcgcatccaagacttgcggcacc

SEQ ID NO: 470474 - DNA, 30 bp, Artificial Sequence
  Synthetic oligonucleotide
ttgtccaccagtacaggccgcttcggcacc

SEQ ID NO: 470475 - DNA, 30 bp, Artificial Sequence
  Synthetic oligonucleotide
gactgtaccaattagagggtaggtggcacc

SEQ ID NO: 470476 - DNA, 30 bp, Artificial Sequence
  Synthetic oligonucleotide
catatcaccggttaccgcgactgtggcacc

SEQ ID NO: 470477 - DNA, 30 bp, Artificial Sequence
  Synthetic oligonucleotide
tgtcagccacgggctttggtgtaatgcacc

SEQ ID NO: 470478 - DNA, 30 bp, Artificial Sequence
  Synthetic oligonucleotide
agtagtccgggctttggagcaggatgcacc

SEQ ID NO: 470479 - DNA, 30 bp, Artificial Sequence
  Synthetic oligonucleotide
atgtaaggactgaatacgtcgtcctgcacc

SEQ ID NO: 470480 - DNA, 30 bp, Artificial Sequence
  Synthetic oligonucleotide
gaagcgtggagcgtctgtttctagtgcacc

SEQ ID NO: 470481 - DNA, 30 bp, Artificial Sequence
  Synthetic oligonucleotide
cgccagatgggaacgctcgctgcgtgcacc

SEQ ID NO: 470482 - DNA, 30 bp, Artificial Sequence
  Synthetic oligonucleotide
tcggtctgtccttataggcgcacaatcacc

SEQ ID NO: 470483 - DNA, 30 bp, Artificial Sequence
  Synthetic oligonucleotide
gcgtggtccatatggcgcagaagaatcacc

SEQ ID NO: 470484 - DNA, 30 bp, Artificial Sequence
  Synthetic oligonucleotide
ttgctaataggcgcacgtaccttcatcacc

SEQ ID NO: 470485 - DNA, 30 bp, Artificial Sequence
  Synthetic oligonucleotide
cttttgatgtcgtaacgaaacaggatcacc

SEQ ID NO: 470486 - DNA, 30 bp, Artificial Sequence
  Synthetic oligonucleotide
ggtaaatcctggtcacggaagagtatcacc

SEQ ID NO: 470487 - DNA, 30 bp, Artificial Sequence
  Synthetic oligonucleotide
cagggatttcttgttgaaaaggttatcacc

SEQ ID NO: 470488 - DNA, 30 bp, Artificial Sequence
  Synthetic oligonucleotide
gacttcaaccgcaacgccttaacactcacc

SEQ ID NO: 470489 - DNA, 30 bp, Artificial Sequence
  Synthetic oligonucleotide
aagaatcgccttgcggtctcgcacctcacc

SEQ ID NO: 470490 - DNA, 31 bp, Artificial Sequence
  Synthetic oligonucleotide
atctataaaacgtgcgtaacggcagctcacc

SEQ ID NO: 470491 - DNA, 30 bp, Artificial Sequence
  Synthetic oligonucleotide
caggaatgattcaagcgtatttatctcacc

SEQ ID NO: 470492 - DNA, 30 bp, Artificial Sequence
  Synthetic oligonucleotide
tttagagtgcagaccggtaggcttctcacc

SEQ ID NO: 470493 - DNA, 30 bp, Artificial Sequence
  Synthetic oligonucleotide
gcagattcataactctaatgttcattcacc

SEQ ID NO: 470494 - DNA, 30 bp, Artificial Sequence
  Synthetic oligonucleotide
aacgaaccatcgccagacgcagtattcacc

SEQ ID NO: 470495 - DNA, 30 bp, Artificial Sequence
  Synthetic oligonucleotide
tctacgagcggcgatccaggcaggttcacc

SEQ ID NO: 470496 - DNA, 30 bp, Artificial Sequence
  Synthetic oligonucleotide
ccagggtggtagacatccatcgggttcacc

SEQ ID NO: 470497 - DNA, 30 bp, Artificial Sequence
  Synthetic oligonucleotide
taagtaatcttgtactgtcgatctttcacc

SEQ ID NO: 470498 - DNA, 30 bp, Artificial Sequence
  Synthetic oligonucleotide
ggatttgattcgtttggtggcctcaagacc

SEQ ID NO: 470499 - DNA, 30 bp, Artificial Sequence
  Synthetic oligonucleotide
agaatctaggcttggtataggtagaagacc

SEQ ID NO: 470500 - DNA, 30 bp, Artificial Sequence
  Synthetic oligonucleotide
cttaatactggaaacaacagtgggaagacc

SEQ ID NO: 470501 - DNA, 30 bp, Artificial Sequence
  Synthetic oligonucleotide
acacagtgctgggcccagcaacgtaagacc

SEQ ID NO: 470502 - DNA, 30 bp, Artificial Sequence
  Synthetic oligonucleotide
tgcactttctttggtcctcgtcgacagacc

SEQ ID NO: 470503 - DNA, 30 bp, Artificial Sequence
  Synthetic oligonucleotide
gggtcgcgagattcttcgacttgacagacc

SEQ ID NO: 470504 - DNA, 30 bp, Artificial Sequence
  Synthetic oligonucleotide
gatgtgaccatagcagggaggatacagacc

SEQ ID NO: 470505 - DNA, 30 bp, Artificial Sequence
  Synthetic oligonucleotide
acaattaggtatatcgctgcattacagacc

SEQ ID NO: 470506 - DNA, 30 bp, Artificial Sequence
  Synthetic oligonucleotide
gagctcggcgatacacctgctttacagacc

SEQ ID NO: 470507 - DNA, 30 bp, Artificial Sequence
  Synthetic oligonucleotide
taaccctgttgacatggtgttaaccagacc

SEQ ID NO: 470508 - DNA, 30 bp, Artificial Sequence
  Synthetic oligonucleotide
cttgtctcgttcataggatcagagcagacc

SEQ ID NO: 470509 - DNA, 30 bp, Artificial Sequence
  Synthetic oligonucleotide
gctcttcatttagagttgcggtagcagacc

SEQ ID NO: 470510 - DNA, 30 bp, Artificial Sequence
  Synthetic oligonucleotide
gagggccgccgatcgctatcaaggcagacc

SEQ ID NO: 470511 - DNA, 30 bp, Artificial Sequence
  Synthetic oligonucleotide
tagtattgggttggcgaatgttggcagacc

SEQ ID NO: 470512 - DNA, 30 bp, Artificial Sequence
  Synthetic oligonucleotide
agcgacccggcttaatgactgtatcagacc

SEQ ID NO: 470513 - DNA, 30 bp, Artificial Sequence
  Synthetic oligonucleotide
gttacttcttctttaccggacgctcagacc

SEQ ID NO: 470514 - DNA, 30 bp, Artificial Sequence
  Synthetic oligonucleotide
cgagtctgtctatgtcaccaataagagacc

SEQ ID NO: 470515 - DNA, 30 bp, Artificial Sequence
  Synthetic oligonucleotide
gtgatctcttccacagatcaatgagagacc

SEQ ID NO: 470516 - DNA, 30 bp, Artificial Sequence
  Synthetic oligonucleotide
attcccagtttgggaaattaacaggagacc

SEQ ID NO: 470517 - DNA, 30 bp, Artificial Sequence
  Synthetic oligonucleotide
aaagtcaagcctctgcggcaaagggagacc

SEQ ID NO: 470518 - DNA, 30 bp, Artificial Sequence
  Synthetic oligonucleotide
ggttgattaaggcgatttgccagtgagacc

SEQ ID NO: 470519 - DNA, 30 bp, Artificial Sequence
  Synthetic oligonucleotide
ggtcacggcgtatctaggtctcttgagacc

SEQ ID NO: 470520 - DNA, 30 bp, Artificial Sequence
  Synthetic oligonucleotide
ttcgtaatgttagtttaggactcgtagacc

SEQ ID NO: 470521 - DNA, 30 bp, Artificial Sequence
  Synthetic oligonucleotide
ccgggcatctagcctggcattgtgacgacc

SEQ ID NO: 470522 - DNA, 30 bp, Artificial Sequence
  Synthetic oligonucleotide
tcaaaggggcaatatattaggtcaccgacc

SEQ ID NO: 470523 - DNA, 30 bp, Artificial Sequence
  Synthetic oligonucleotide
gtacacggtaggtgcattaagaatccgacc

SEQ ID NO: 470524 - DNA, 30 bp, Artificial Sequence
  Synthetic oligonucleotide
ccattgatgtggctgaactcggttccgacc

SEQ ID NO: 470525 - DNA, 30 bp, Artificial Sequence
  Synthetic oligonucleotide
acatcggagatcaacgcgtgctaagcgacc

SEQ ID NO: 470526 - DNA, 30 bp, Artificial Sequence
  Synthetic oligonucleotide
attaaccggaacgtgctcatcttagcgacc

SEQ ID NO: 470527 - DNA, 30 bp, Artificial Sequence
  Synthetic oligonucleotide
ggttgttatcatggatgaaagtacgcgacc

SEQ ID NO: 470528 - DNA, 30 bp, Artificial Sequence
  Synthetic oligonucleotide
actagcctggtcgcatggtgtcaggcgacc

SEQ ID NO: 470529 - DNA, 30 bp, Artificial Sequence
  Synthetic oligonucleotide
gctgcgaaggaggtcgaccaacttgcgacc

SEQ ID NO: 470530 - DNA, 30 bp, Artificial Sequence
  Synthetic oligonucleotide
gggtcattccacagatatttggaatcgacc

SEQ ID NO: 470531 - DNA, 30 bp, Artificial Sequence
  Synthetic oligonucleotide
ggtgaagatctagtcacactacactcgacc

SEQ ID NO: 470532 - DNA, 30 bp, Artificial Sequence
  Synthetic oligonucleotide
tcaacatgcagctctgcccttaaaaggacc

SEQ ID NO: 470533 - DNA, 30 bp, Artificial Sequence
  Synthetic oligonucleotide
aaaagacgaactcagcaacgtcaaaggacc

SEQ ID NO: 470534 - DNA, 30 bp, Artificial Sequence
  Synthetic oligonucleotide
tcaccgccaagtttgatgtggcacaggacc

SEQ ID NO: 470535 - DNA, 30 bp, Artificial Sequence
  Synthetic oligonucleotide
aattggggttctctgcaccgtaccaggacc

SEQ ID NO: 470536 - DNA, 30 bp, Artificial Sequence
  Synthetic oligonucleotide
ctcttgccaaaagcgagacccgccaggacc

SEQ ID NO: 470537 - DNA, 30 bp, Artificial Sequence
  Synthetic oligonucleotide
cgagcctgatcagatatacgactcaggacc

SEQ ID NO: 470538 - DNA, 30 bp, Artificial Sequence
  Synthetic oligonucleotide
tttacggcgttggcactctttttgaggacc

SEQ ID NO: 470539 - DNA, 30 bp, Artificial Sequence
  Synthetic oligonucleotide
aacggcgggctgatattccagcataggacc

SEQ ID NO: 470540 - DNA, 30 bp, Artificial Sequence
  Synthetic oligonucleotide
tgtctagcagcgtagtacaacggccggacc

SEQ ID NO: 470541 - DNA, 30 bp, Artificial Sequence
  Synthetic oligonucleotide
ctgtatgcctacagccccatccagcggacc

SEQ ID NO: 470542 - DNA, 30 bp, Artificial Sequence
  Synthetic oligonucleotide
atcggggctcctgaaactgggactcggacc

SEQ ID NO: 470543 - DNA, 30 bp, Artificial Sequence
  Synthetic oligonucleotide
gtggattagacccacgcgtgtcctcggacc

SEQ ID NO: 470544 - DNA, 30 bp, Artificial Sequence
  Synthetic oligonucleotide
gacatgattatacagcagtgaggtcggacc

SEQ ID NO: 470545 - DNA, 30 bp, Artificial Sequence
  Synthetic oligonucleotide
ttacatgaactcaccatcatcgtagggacc

SEQ ID NO: 470546 - DNA, 30 bp, Artificial Sequence
  Synthetic oligonucleotide
ctggccacgtgcatttcgcttaacgggacc

SEQ ID NO: 470547 - DNA, 30 bp, Artificial Sequence
  Synthetic oligonucleotide
catattagaccggtcttggtcagcgggacc

SEQ ID NO: 470548 - DNA, 30 bp, Artificial Sequence
  Synthetic oligonucleotide
gttaacatcgggacggatccccgcgggacc

SEQ ID NO: 470549 - DNA, 30 bp, Artificial Sequence
  Synthetic oligonucleotide
ctgacgcgaagttaatcgcgcaaggggacc

SEQ ID NO: 470550 - DNA, 30 bp, Artificial Sequence
  Synthetic oligonucleotide
acgcgagccccctggcctcagctggggacc

SEQ ID NO: 470551 - DNA, 30 bp, Artificial Sequence
  Synthetic oligonucleotide
ttggtgcgagtcccttcaatcaatgggacc

SEQ ID NO: 470552 - DNA, 30 bp, Artificial Sequence
  Synthetic oligonucleotide
aatgattcaattcaggcctataatgggacc

SEQ ID NO: 470553 - DNA, 30 bp, Artificial Sequence
  Synthetic oligonucleotide
cgttgcacaatacagtcatctgatgggacc

SEQ ID NO: 470554 - DNA, 30 bp, Artificial Sequence
  Synthetic oligonucleotide
gcgcaggtccctaagtataaagcatggacc

SEQ ID NO: 470555 - DNA, 30 bp, Artificial Sequence
  Synthetic oligonucleotide
tttggagtgggaatcgccagggcatggacc

SEQ ID NO: 470556 - DNA, 30 bp, Artificial Sequence
  Synthetic oligonucleotide
ctggagcgggtgttagttaggatatggacc

SEQ ID NO: 470557 - DNA, 30 bp, Artificial Sequence
  Synthetic oligonucleotide
ctccgcagctattaagacttgctatggacc

SEQ ID NO: 470558 - DNA, 30 bp, Artificial Sequence
  Synthetic oligonucleotide
tgtctcgccgaaggattgccattatggacc

SEQ ID NO: 470559 - DNA, 30 bp, Artificial Sequence
  Synthetic oligonucleotide
cggggccaaccggtttgggtggactggacc

SEQ ID NO: 470560 - DNA, 30 bp, Artificial Sequence
  Synthetic oligonucleotide
atttatatgtgctatgacgagtactggacc

SEQ ID NO: 470561 - DNA, 30 bp, Artificial Sequence
  Synthetic oligonucleotide
ttaatataaactacagaccacgtctggacc

SEQ ID NO: 470562 - DNA, 30 bp, Artificial Sequence
  Synthetic oligonucleotide
ggattctttagtctaaagtggttctggacc

SEQ ID NO: 470563 - DNA, 30 bp, Artificial Sequence
  Synthetic oligonucleotide
cttcgccgagcagaattatacgcaatgacc

SEQ ID NO: 470564 - DNA, 30 bp, Artificial Sequence
  Synthetic oligonucleotide
gagtgtaagggtagccttataagaatgacc

SEQ ID NO: 470565 - DNA, 30 bp, Artificial Sequence
  Synthetic oligonucleotide
tatacgtgggaattaggagagttaatgacc

SEQ ID NO: 470566 - DNA, 30 bp, Artificial Sequence
  Synthetic oligonucleotide
aacctattaagggctcagccgaccatgacc

SEQ ID NO: 470567 - DNA, 30 bp, Artificial Sequence
  Synthetic oligonucleotide
acggaacgaaaccaatgttggctactgacc

SEQ ID NO: 470568 - DNA, 30 bp, Artificial Sequence
  Synthetic oligonucleotide
ccaaccgatcggattactgggtgcctgacc

SEQ ID NO: 470569 - DNA, 30 bp, Artificial Sequence
  Synthetic oligonucleotide
taaagttttgaattttaaacttatctgacc

SEQ ID NO: 470570 - DNA, 30 bp, Artificial Sequence
  Synthetic oligonucleotide
accactacattccgcaagccaaaagtgacc

SEQ ID NO: 470571 - DNA, 30 bp, Artificial Sequence
  Synthetic oligonucleotide
gctgtgtttcgtttccgttacaacgtgacc

SEQ ID NO: 470572 - DNA, 30 bp, Artificial Sequence
  Synthetic oligonucleotide
gcagtcatccgtaagctcagcgcggtgacc

SEQ ID NO: 470573 - DNA, 30 bp, Artificial Sequence
  Synthetic oligonucleotide
ctccacactttattagcatttagggtgacc

SEQ ID NO: 470574 - DNA, 30 bp, Artificial Sequence
  Synthetic oligonucleotide
atccatctttgctctacggtccatgtgacc

SEQ ID NO: 470575 - DNA, 30 bp, Artificial Sequence
  Synthetic oligonucleotide
ctttacgacattaggcagactccattgacc

SEQ ID NO: 470576 - DNA, 30 bp, Artificial Sequence
  Synthetic oligonucleotide
gagcctatgacgccaactatatgattgacc

SEQ ID NO: 470577 - DNA, 30 bp, Artificial Sequence
  Synthetic oligonucleotide
tgcatgtgccttaatatgacgcgcttgacc

SEQ ID NO: 470578 - DNA, 30 bp, Artificial Sequence
  Synthetic oligonucleotide
aaggacccgtatgtgtctgggttgttgacc

SEQ ID NO: 470579 - DNA, 30 bp, Artificial Sequence
  Synthetic oligonucleotide
gcaagcaactcacaggagttgaatttgacc

SEQ ID NO: 470580 - DNA, 30 bp, Artificial Sequence
  Synthetic oligonucleotide
aaaagttagatatttcacataattttgacc

SEQ ID NO: 470581 - DNA, 30 bp, Artificial Sequence
  Synthetic oligonucleotide
tcatatgagatcggctctataccaaatacc

SEQ ID NO: 470582 - DNA, 30 bp, Artificial Sequence
  Synthetic oligonucleotide
gtaacaaatgggctatgtaaaataaatacc

SEQ ID NO: 470583 - DNA, 30 bp, Artificial Sequence
  Synthetic oligonucleotide
gttaaaataatgctatgtattgtcaatacc

SEQ ID NO: 470584 - DNA, 30 bp, Artificial Sequence
  Synthetic oligonucleotide
aaagtacgcatctcgagtcttgcgaatacc

SEQ ID NO: 470585 - DNA, 30 bp, Artificial Sequence
  Synthetic oligonucleotide
ggatcggaggaagtggcgggatcgaatacc

SEQ ID NO: 470586 - DNA, 30 bp, Artificial Sequence
  Synthetic oligonucleotide
aactccagcattagggcataaattaatacc

SEQ ID NO: 470587 - DNA, 31 bp, Artificial Sequence
  Synthetic oligonucleotide
ctttccagggacggttgttatcacacatacc

SEQ ID NO: 470588 - DNA, 30 bp, Artificial Sequence
  Synthetic oligonucleotide
aatagtttaacgggtgcccgcatccatacc

SEQ ID NO: 470589 - DNA, 30 bp, Artificial Sequence
  Synthetic oligonucleotide
ttaggatgagtctatttcccactccatacc

SEQ ID NO: 470590 - DNA, 30 bp, Artificial Sequence
  Synthetic oligonucleotide
gacgtagtggtgccatggaaagtccatacc

SEQ ID NO: 470591 - DNA, 30 bp, Artificial Sequence
  Synthetic oligonucleotide
gccgtcagtgcagtttttgaggtccatacc

SEQ ID NO: 470592 - DNA, 30 bp, Artificial Sequence
  Synthetic oligonucleotide
tgttaagtctgcctgggtcagtagcatacc

SEQ ID NO: 470593 - DNA, 30 bp, Artificial Sequence
  Synthetic oligonucleotide
tttgtgcagtgtcaactgctcccgcatacc

SEQ ID NO: 470594 - DNA, 30 bp, Artificial Sequence
  Synthetic oligonucleotide
cgtacgccgtcagttcatgacaggcatacc

SEQ ID NO: 470595 - DNA, 30 bp, Artificial Sequence
  Synthetic oligonucleotide
tggaggccttgtgaatcgttagatcatacc

SEQ ID NO: 470596 - DNA, 30 bp, Artificial Sequence
  Synthetic oligonucleotide
aaacagtttggtatggaatgaactcatacc

SEQ ID NO: 470597 - DNA, 30 bp, Artificial Sequence
  Synthetic oligonucleotide
gggggtatgactcgaacatacactcatacc

SEQ ID NO: 470598 - DNA, 30 bp, Artificial Sequence
  Synthetic oligonucleotide
aaatcattgccggagtatatagttcatacc

SEQ ID NO: 470599 - DNA, 30 bp, Artificial Sequence
  Synthetic oligonucleotide
actattattatactagggttcaaagatacc

SEQ ID NO: 470600 - DNA, 30 bp, Artificial Sequence
  Synthetic oligonucleotide
gttcagataaacatgccatacggagatacc

SEQ ID NO: 470601 - DNA, 30 bp, Artificial Sequence
  Synthetic oligonucleotide
gccgacggcaacagggtcaggtgagatacc

SEQ ID NO: 470602 - DNA, 30 bp, Artificial Sequence
  Synthetic oligonucleotide
tggcaattgattgcgttaaggggggatacc

SEQ ID NO: 470603 - DNA, 30 bp, Artificial Sequence
  Synthetic oligonucleotide
gtaagcttggactggccattccatgatacc

SEQ ID NO: 470604 - DNA, 30 bp, Artificial Sequence
  Synthetic oligonucleotide
tatgtgtgggatcaccaacgcggtgatacc

SEQ ID NO: 470605 - DNA, 30 bp, Artificial Sequence
  Synthetic oligonucleotide
aggaggtcatgcagaccggtatgtgatacc

SEQ ID NO: 470606 - DNA, 30 bp, Artificial Sequence
  Synthetic oligonucleotide
gctcgtcgcaacatttataattaatatacc

SEQ ID NO: 470607 - DNA, 30 bp, Artificial Sequence
  Synthetic oligonucleotide
tcaaaagcagtcaacaagactgcatatacc

SEQ ID NO: 470608 - DNA, 30 bp, Artificial Sequence
  Synthetic oligonucleotide
accttttacggctcgtcaaattcctatacc

SEQ ID NO: 470609 - DNA, 30 bp, Artificial Sequence
  Synthetic oligonucleotide
ggtctacaagtaggcattggcctctatacc

SEQ ID NO: 470610 - DNA, 30 bp, Artificial Sequence
  Synthetic oligonucleotide
tcgactagttaaggcctgcggcggtatacc

SEQ ID NO: 470611 - DNA, 30 bp, Artificial Sequence
  Synthetic oligonucleotide
agatagactgtgctgacaggtatgtatacc

SEQ ID NO: 470612 - DNA, 30 bp, Artificial Sequence
  Synthetic oligonucleotide
accgctcagctccgtattgacgtgtatacc

SEQ ID NO: 470613 - DNA, 30 bp, Artificial Sequence
  Synthetic oligonucleotide
ttatcggcattgtgttggatggtgtatacc

SEQ ID NO: 470614 - DNA, 30 bp, Artificial Sequence
  Synthetic oligonucleotide
aatgaattgacgccatgcgaccgttatacc

SEQ ID NO: 470615 - DNA, 30 bp, Artificial Sequence
  Synthetic oligonucleotide
tctggatccggcccctacataggttatacc

SEQ ID NO: 470616 - DNA, 30 bp, Artificial Sequence
  Synthetic oligonucleotide
gtattctggcgggccctatactgttatacc

SEQ ID NO: 470617 - DNA, 30 bp, Artificial Sequence
  Synthetic oligonucleotide
ggacctatccacagtgggacaccaactacc

SEQ ID NO: 470618 - DNA, 30 bp, Artificial Sequence
  Synthetic oligonucleotide
tcatatccaatgcgcacatggagcactacc

SEQ ID NO: 470619 - DNA, 30 bp, Artificial Sequence
  Synthetic oligonucleotide
tgatattctctgccgcggtaatatactacc

SEQ ID NO: 470620 - DNA, 30 bp, Artificial Sequence
  Synthetic oligonucleotide
ggtaaagagccaacaggtcgttgtactacc

SEQ ID NO: 470621 - DNA, 30 bp, Artificial Sequence
  Synthetic oligonucleotide
cctaaaaactaggacaagtccgttactacc

SEQ ID NO: 470622 - DNA, 30 bp, Artificial Sequence
  Synthetic oligonucleotide
ggtttagttagggtaacagatgttactacc

SEQ ID NO: 470623 - DNA, 30 bp, Artificial Sequence
  Synthetic oligonucleotide
acggttaaagccgctcccaacttccctacc

SEQ ID NO: 470624 - DNA, 30 bp, Artificial Sequence
  Synthetic oligonucleotide
tctaaattttttttgaggaagtcgcctacc

SEQ ID NO: 470625 - DNA, 30 bp, Artificial Sequence
  Synthetic oligonucleotide
gtccaccttttcggcccaggctatcctacc

SEQ ID NO: 470626 - DNA, 30 bp, Artificial Sequence
  Synthetic oligonucleotide
cagttaagctgatgtgtccggttagctacc

SEQ ID NO: 470627 - DNA, 30 bp, Artificial Sequence
  Synthetic oligonucleotide
ctcatgaggcggctattggacctcgctacc

SEQ ID NO: 470628 - DNA, 30 bp, Artificial Sequence
  Synthetic oligonucleotide
aaaactttattctgtcggtagcaggctacc

SEQ ID NO: 470629 - DNA, 30 bp, Artificial Sequence
  Synthetic oligonucleotide
accctagcatccggtcaggtaggtgctacc

SEQ ID NO: 470630 - DNA, 29 bp, Artificial Sequence
  Synthetic oligonucleotide
aatcataagtgtcctagcatatatctacc

SEQ ID NO: 470631 - DNA, 30 bp, Artificial Sequence
  Synthetic oligonucleotide
agcggaaaggccgaacgagagctctctacc

SEQ ID NO: 470632 - DNA, 30 bp, Artificial Sequence
  Synthetic oligonucleotide
gagatatttcatagcaagctcaggtctacc

SEQ ID NO: 470633 - DNA, 30 bp, Artificial Sequence
  Synthetic oligonucleotide
agttagaaatcggactatcgtaattctacc

SEQ ID NO: 470634 - DNA, 30 bp, Artificial Sequence
  Synthetic oligonucleotide
tcccgtaccttacgattccgaggttctacc

SEQ ID NO: 470635 - DNA, 30 bp, Artificial Sequence
  Synthetic oligonucleotide
gtcttcggtcactgctaggagggttctacc

SEQ ID NO: 470636 - DNA, 30 bp, Artificial Sequence
  Synthetic oligonucleotide
gattgtgatttcgagaaagcgcacagtacc

SEQ ID NO: 470637 - DNA, 30 bp, Artificial Sequence
  Synthetic oligonucleotide
gctgctcatatttatcgggcgctcagtacc

SEQ ID NO: 470638 - DNA, 30 bp, Artificial Sequence
  Synthetic oligonucleotide
attaagcacggggcattctcggcgagtacc

SEQ ID NO: 470639 - DNA, 30 bp, Artificial Sequence
  Synthetic oligonucleotide
attagtatgtaaaggacggtgatgagtacc

SEQ ID NO: 470640 - DNA, 30 bp, Artificial Sequence
  Synthetic oligonucleotide
cacgatgcacagtcggtccccaatagtacc

SEQ ID NO: 470641 - DNA, 30 bp, Artificial Sequence
  Synthetic oligonucleotide
cagtacctctacttggcgcccactagtacc

SEQ ID NO: 470642 - DNA, 30 bp, Artificial Sequence
  Synthetic oligonucleotide
agcccggtttgcggtgttctcagtagtacc

SEQ ID NO: 470643 - DNA, 30 bp, Artificial Sequence
  Synthetic oligonucleotide
aatatgaatggtgactaaatttttagtacc

SEQ ID NO: 470644 - DNA, 30 bp, Artificial Sequence
  Synthetic oligonucleotide
agcgtgggcacagtcaatgtgtaccgtacc

SEQ ID NO: 470645 - DNA, 30 bp, Artificial Sequence
  Synthetic oligonucleotide
tagacccatcatggtaatttgacccgtacc

SEQ ID NO: 470646 - DNA, 30 bp, Artificial Sequence
  Synthetic oligonucleotide
tttcatgggtattccggtagtgcccgtacc

SEQ ID NO: 470647 - DNA, 30 bp, Artificial Sequence
  Synthetic oligonucleotide
aagcatgtactcccaccctgggatcgtacc

SEQ ID NO: 470648 - DNA, 30 bp, Artificial Sequence
  Synthetic oligonucleotide
aaaaccacgtcgacatttacatgtcgtacc

SEQ ID NO: 470649 - DNA, 30 bp, Artificial Sequence
  Synthetic oligonucleotide
gcgttaggggacggactattggttcgtacc

SEQ ID NO: 470650 - DNA, 30 bp, Artificial Sequence
  Synthetic oligonucleotide
aacagattagcgattgaagtaccaggtacc

SEQ ID NO: 470651 - DNA, 30 bp, Artificial Sequence
  Synthetic oligonucleotide
ggaggatctcagcacctgtgccgaggtacc

SEQ ID NO: 470652 - DNA, 30 bp, Artificial Sequence
  Synthetic oligonucleotide
tataaccgaattgctactatttacggtacc

SEQ ID NO: 470653 - DNA, 30 bp, Artificial Sequence
  Synthetic oligonucleotide
aatctaaactaaacggccgtggggggtacc

SEQ ID NO: 470654 - DNA, 30 bp, Artificial Sequence
  Synthetic oligonucleotide
ctaacagtagagtcacgtttcgtgggtacc

SEQ ID NO: 470655 - DNA, 30 bp, Artificial Sequence
  Synthetic oligonucleotide
ggcactgcttgtttaataagatgtggtacc

SEQ ID NO: 470656 - DNA, 30 bp, Artificial Sequence
  Synthetic oligonucleotide
gaattccacgtatttgctcgatgtggtacc

SEQ ID NO: 470657 - DNA, 30 bp, Artificial Sequence
  Synthetic oligonucleotide
gggcagactaactaaaaggctcttggtacc

SEQ ID NO: 470658 - DNA, 30 bp, Artificial Sequence
  Synthetic oligonucleotide
caagcgcggcatgccgacatcagctgtacc

SEQ ID NO: 470659 - DNA, 30 bp, Artificial Sequence
  Synthetic oligonucleotide
ctgctaattaggttatttaataagtgtacc

SEQ ID NO: 470660 - DNA, 30 bp, Artificial Sequence
  Synthetic oligonucleotide
ctgtaggtataacacttgaaatgaattacc

SEQ ID NO: 470661 - DNA, 30 bp, Artificial Sequence
  Synthetic oligonucleotide
ttttttggtattgagaggcatttaattacc

SEQ ID NO: 470662 - DNA, 30 bp, Artificial Sequence
  Synthetic oligonucleotide
ctctttttaagacccggttcggccattacc

SEQ ID NO: 470663 - DNA, 30 bp, Artificial Sequence
  Synthetic oligonucleotide
gcaacgtattccgagtcagtctcgattacc

SEQ ID NO: 470664 - DNA, 30 bp, Artificial Sequence
  Synthetic oligonucleotide
atatcgactttttaggtctggctgattacc

SEQ ID NO: 470665 - DNA, 30 bp, Artificial Sequence
  Synthetic oligonucleotide
atagcaggcggtatggggaaaaatattacc

SEQ ID NO: 470666 - DNA, 30 bp, Artificial Sequence
  Synthetic oligonucleotide
aataccccattttggggtcagaatattacc

SEQ ID NO: 470667 - DNA, 30 bp, Artificial Sequence
  Synthetic oligonucleotide
tataacccctcggcagtctctgatattacc

SEQ ID NO: 470668 - DNA, 30 bp, Artificial Sequence
  Synthetic oligonucleotide
tccgagggttcacgcaagcaagctattacc

SEQ ID NO: 470669 - DNA, 30 bp, Artificial Sequence
  Synthetic oligonucleotide
gcaggtgatagggtatgttttattattacc

SEQ ID NO: 470670 - DNA, 30 bp, Artificial Sequence
  Synthetic oligonucleotide
ctcaccattgcctcctaatgagttattacc

SEQ ID NO: 470671 - DNA, 30 bp, Artificial Sequence
  Synthetic oligonucleotide
gaaatcggatctgtcccctgaaaacttacc

SEQ ID NO: 470672 - DNA, 30 bp, Artificial Sequence
  Synthetic oligonucleotide
tgcggctcggtacagagtatttaacttacc

SEQ ID NO: 470673 - DNA, 30 bp, Artificial Sequence
  Synthetic oligonucleotide
acttatttaggtctactttgcttacttacc

SEQ ID NO: 470674 - DNA, 30 bp, Artificial Sequence
  Synthetic oligonucleotide
agagcccaagcagttaagtccccccttacc

SEQ ID NO: 470675 - DNA, 30 bp, Artificial Sequence
  Synthetic oligonucleotide
gtagtttgcaacacgacaatagtccttacc

SEQ ID NO: 470676 - DNA, 30 bp, Artificial Sequence
  Synthetic oligonucleotide
cttcactcttcgggttaaaagcagcttacc

SEQ ID NO: 470677 - DNA, 30 bp, Artificial Sequence
  Synthetic oligonucleotide
gccactccagctatgcagtttaggcttacc

SEQ ID NO: 470678 - DNA, 30 bp, Artificial Sequence
  Synthetic oligonucleotide
gggcccgatcccgtttccagatttcttacc

SEQ ID NO: 470679 - DNA, 30 bp, Artificial Sequence
  Synthetic oligonucleotide
cacattctatatcgatgtgtgcacgttacc

SEQ ID NO: 470680 - DNA, 30 bp, Artificial Sequence
  Synthetic oligonucleotide
ctcccatatcacgacattgtacccgttacc

SEQ ID NO: 470681 - DNA, 30 bp, Artificial Sequence
  Synthetic oligonucleotide
cttgcagtctaagatttcggaatcgttacc

SEQ ID NO: 470682 - DNA, 30 bp, Artificial Sequence
  Synthetic oligonucleotide
atgaaccttttagggctcagttaggttacc

SEQ ID NO: 470683 - DNA, 30 bp, Artificial Sequence
  Synthetic oligonucleotide
attcgatcttcctcggctgcagtggttacc

SEQ ID NO: 470684 - DNA, 30 bp, Artificial Sequence
  Synthetic oligonucleotide
aatggtaaatgtatgtttaaagctgttacc

SEQ ID NO: 470685 - DNA, 30 bp, Artificial Sequence
  Synthetic oligonucleotide
ggaatactttcacgttgcttatgtgttacc

SEQ ID NO: 470686 - DNA, 30 bp, Artificial Sequence
  Synthetic oligonucleotide
tatagggtttaacgtcgtatgtttgttacc

SEQ ID NO: 470687 - DNA, 30 bp, Artificial Sequence
  Synthetic oligonucleotide
atctttccgtatatgttggggtactttacc

SEQ ID NO: 470688 - DNA, 30 bp, Artificial Sequence
  Synthetic oligonucleotide
ctattaattgggctctctaaagcctttacc

SEQ ID NO: 470689 - DNA, 30 bp, Artificial Sequence
  Synthetic oligonucleotide
aggctagtgacgtgaatcgggctctttacc

SEQ ID NO: 470690 - DNA, 30 bp, Artificial Sequence
  Synthetic oligonucleotide
tgagccgcttaatacgcttcctagtttacc

SEQ ID NO: 470691 - DNA, 30 bp, Artificial Sequence
  Synthetic oligonucleotide
tttgcaggatccccgatcaggacgtttacc

SEQ ID NO: 470692 - DNA, 30 bp, Artificial Sequence
  Synthetic oligonucleotide
agccaccatgcttcctgcaaaaggtttacc

SEQ ID NO: 470693 - DNA, 30 bp, Artificial Sequence
  Synthetic oligonucleotide
tatgtcccaataaggctatgacggtttacc

SEQ ID NO: 470694 - DNA, 30 bp, Artificial Sequence
  Synthetic oligonucleotide
ataggactttcagctacgctacggtttacc

SEQ ID NO: 470695 - DNA, 30 bp, Artificial Sequence
  Synthetic oligonucleotide
taatagctctgcatgaaacccctgtttacc

SEQ ID NO: 470696 - DNA, 30 bp, Artificial Sequence
  Synthetic oligonucleotide
tccctctcagccatactttaggcttttacc

SEQ ID NO: 470697 - DNA, 30 bp, Artificial Sequence
  Synthetic oligonucleotide
actccggccttgtagtccaagtcttttacc

SEQ ID NO: 470698 - DNA, 30 bp, Artificial Sequence
  Synthetic oligonucleotide
ggcagcccgagggtagtcttaggttttacc

SEQ ID NO: 470699 - DNA, 30 bp, Artificial Sequence
  Synthetic oligonucleotide
tttgcttaggcatgctaatgatgttttacc

SEQ ID NO: 470700 - DNA, 30 bp, Artificial Sequence
  Synthetic oligonucleotide
tgaggtttataccttaacattctttttacc

SEQ ID NO: 470701 - DNA, 30 bp, Artificial Sequence
  Synthetic oligonucleotide
ggttgtaccatggcaccttctgcgaaaccc

SEQ ID NO: 470702 - DNA, 30 bp, Artificial Sequence
  Synthetic oligonucleotide
tgtctaatgtagaacgaactggtgaaaccc

SEQ ID NO: 470703 - DNA, 30 bp, Artificial Sequence
  Synthetic oligonucleotide
ggattaggcatgtgtgtgatgagtaaaccc

SEQ ID NO: 470704 - DNA, 30 bp, Artificial Sequence
  Synthetic oligonucleotide
catcctatacgtatgggacctgaacaaccc

SEQ ID NO: 470705 - DNA, 30 bp, Artificial Sequence
  Synthetic oligonucleotide
ctaggcgagatcgaacgaaagacacaaccc

SEQ ID NO: 470706 - DNA, 30 bp, Artificial Sequence
  Synthetic oligonucleotide
gctcaccatttgtttagacggccccaaccc

SEQ ID NO: 470707 - DNA, 30 bp, Artificial Sequence
  Synthetic oligonucleotide
ttagtctggagcggccattgcaggcaaccc

SEQ ID NO: 470708 - DNA, 30 bp, Artificial Sequence
  Synthetic oligonucleotide
atgatttgggcgacccactacattcaaccc

SEQ ID NO: 470709 - DNA, 30 bp, Artificial Sequence
  Synthetic oligonucleotide
accccgcgtggttacggtgaataagaaccc

SEQ ID NO: 470710 - DNA, 30 bp, Artificial Sequence
  Synthetic oligonucleotide
ccgggatttgctagtacatacacggaaccc

SEQ ID NO: 470711 - DNA, 30 bp, Artificial Sequence
  Synthetic oligonucleotide
ctaaattgtatctcgcggttttcggaaccc

SEQ ID NO: 470712 - DNA, 31 bp, Artificial Sequence
  Synthetic oligonucleotide
aggttaatagaccgctggtagagtggaaccc

SEQ ID NO: 470713 - DNA, 30 bp, Artificial Sequence
  Synthetic oligonucleotide
acatgactgaccagtagtatggctgaaccc

SEQ ID NO: 470714 - DNA, 30 bp, Artificial Sequence
  Synthetic oligonucleotide
cctgcaagagccaccacggtttcataaccc

SEQ ID NO: 470715 - DNA, 30 bp, Artificial Sequence
  Synthetic oligonucleotide
gctctcaagtacattcctggaacgtaaccc

SEQ ID NO: 470716 - DNA, 30 bp, Artificial Sequence
  Synthetic oligonucleotide
gccgggtcccgaaccatattacattaaccc

SEQ ID NO: 470717 - DNA, 30 bp, Artificial Sequence
  Synthetic oligonucleotide
taaatagatttcaagaggcgctccacaccc

SEQ ID NO: 470718 - DNA, 30 bp, Artificial Sequence
  Synthetic oligonucleotide
cttaggacattatctcagcaggatacaccc

SEQ ID NO: 470719 - DNA, 30 bp, Artificial Sequence
  Synthetic oligonucleotide
attaaggggactcgtaggtccccaccaccc

SEQ ID NO: 470720 - DNA, 30 bp, Artificial Sequence
  Synthetic oligonucleotide
atggcgtttcagtgggcagcggacccaccc

SEQ ID NO: 470721 - DNA, 30 bp, Artificial Sequence
  Synthetic oligonucleotide
ttacgggaacctgggaggtattgcccaccc

SEQ ID NO: 470722 - DNA, 30 bp, Artificial Sequence
  Synthetic oligonucleotide
tcggcagtttcagatgaggcacaagcaccc

SEQ ID NO: 470723 - DNA, 30 bp, Artificial Sequence
  Synthetic oligonucleotide
cccatttatcgaccgctaaagtacgcaccc

SEQ ID NO: 470724 - DNA, 30 bp, Artificial Sequence
  Synthetic oligonucleotide
ttctacaggttgaggtccccagtggcaccc

SEQ ID NO: 470725 - DNA, 30 bp, Artificial Sequence
  Synthetic oligonucleotide
ggcccggccttcatgcgtatcaatgcaccc

SEQ ID NO: 470726 - DNA, 30 bp, Artificial Sequence
  Synthetic oligonucleotide
cagcgcctaacggcgtagtcccatgcaccc

SEQ ID NO: 470727 - DNA, 30 bp, Artificial Sequence
  Synthetic oligonucleotide
aacagacttacgtgagctgcggctgcaccc

SEQ ID NO: 470728 - DNA, 30 bp, Artificial Sequence
  Synthetic oligonucleotide
tgcgatttcgaacatcaatcaccaagaccc

SEQ ID NO: 470729 - DNA, 30 bp, Artificial Sequence
  Synthetic oligonucleotide
atggtaggcagcaaccctttgtgaagaccc

SEQ ID NO: 470730 - DNA, 30 bp, Artificial Sequence
  Synthetic oligonucleotide
gtccaggcgctcggaggcaacattagaccc

SEQ ID NO: 470731 - DNA, 30 bp, Artificial Sequence
  Synthetic oligonucleotide
cccactgcgtcgaagccacctgtacgaccc

SEQ ID NO: 470732 - DNA, 30 bp, Artificial Sequence
  Synthetic oligonucleotide
agttgcagcgggcatacattcgaccgaccc

SEQ ID NO: 470733 - DNA, 30 bp, Artificial Sequence
  Synthetic oligonucleotide
tggcgcgactgtcgcaagcaggcccgaccc

SEQ ID NO: 470734 - DNA, 30 bp, Artificial Sequence
  Synthetic oligonucleotide
ctgcgatccgaagttttggatcgtcgaccc

SEQ ID NO: 470735 - DNA, 30 bp, Artificial Sequence
  Synthetic oligonucleotide
tgaagccggtagattccacatggcggaccc

SEQ ID NO: 470736 - DNA, 30 bp, Artificial Sequence
  Synthetic oligonucleotide
tcgaataccactgcgtggtagtagggaccc

SEQ ID NO: 470737 - DNA, 30 bp, Artificial Sequence
  Synthetic oligonucleotide
tggggccaggggatattctacccgggaccc

SEQ ID NO: 470738 - DNA, 30 bp, Artificial Sequence
  Synthetic oligonucleotide
tgctgcatagtgctagcgactgcgggaccc

SEQ ID NO: 470739 - DNA, 30 bp, Artificial Sequence
  Synthetic oligonucleotide
tgtacgccaggcgtcttcgaaaggggaccc

SEQ ID NO: 470740 - DNA, 30 bp, Artificial Sequence
  Synthetic oligonucleotide
taatccatgttctgtcctcctattggaccc

SEQ ID NO: 470741 - DNA, 30 bp, Artificial Sequence
  Synthetic oligonucleotide
cggacatgccttcgattgtcgcaatgaccc

SEQ ID NO: 470742 - DNA, 30 bp, Artificial Sequence
  Synthetic oligonucleotide
tcgtactttaggtagtcgccgatctgaccc

SEQ ID NO: 470743 - DNA, 30 bp, Artificial Sequence
  Synthetic oligonucleotide
gataaaccgctgctagggcagaattgaccc

SEQ ID NO: 470744 - DNA, 30 bp, Artificial Sequence
  Synthetic oligonucleotide
gaataattccgtattggatcgttttgaccc

SEQ ID NO: 470745 - DNA, 30 bp, Artificial Sequence
  Synthetic oligonucleotide
ttctatgcacatacctttgtttcaataccc

SEQ ID NO: 470746 - DNA, 30 bp, Artificial Sequence
  Synthetic oligonucleotide
attcactttcctgttacgaggggaataccc

SEQ ID NO: 470747 - DNA, 30 bp, Artificial Sequence
  Synthetic oligonucleotide
ggaagcgcaggatattgtaatctaataccc

SEQ ID NO: 470748 - DNA, 30 bp, Artificial Sequence
  Synthetic oligonucleotide
atgccccatgcaagagaaggtcccataccc

SEQ ID NO: 470749 - DNA, 30 bp, Artificial Sequence
  Synthetic oligonucleotide
cgccccatataatcaacccttctcataccc

SEQ ID NO: 470750 - DNA, 30 bp, Artificial Sequence
  Synthetic oligonucleotide
ttgtatatgaagttctctagctggataccc

SEQ ID NO: 470751 - DNA, 30 bp, Artificial Sequence
  Synthetic oligonucleotide
gcagcatctccaaatttgctctggataccc

SEQ ID NO: 470752 - DNA, 30 bp, Artificial Sequence
  Synthetic oligonucleotide
actctaatagtgcctagcggatttataccc

SEQ ID NO: 470753 - DNA, 30 bp, Artificial Sequence
  Synthetic oligonucleotide
gagtataatcccaacaaaccctttataccc

SEQ ID NO: 470754 - DNA, 30 bp, Artificial Sequence
  Synthetic oligonucleotide
caaagatgggtttagtgatgcccactaccc

SEQ ID NO: 470755 - DNA, 30 bp, Artificial Sequence
  Synthetic oligonucleotide
agtacagttgcaatgggtttgattgtaccc

SEQ ID NO: 470756 - DNA, 30 bp, Artificial Sequence
  Synthetic oligonucleotide
cttatggccaaggtagaacaatttgtaccc

SEQ ID NO: 470757 - DNA, 30 bp, Artificial Sequence
  Synthetic oligonucleotide
ttagtttgtgtacacggatttgaattaccc

SEQ ID NO: 470758 - DNA, 30 bp, Artificial Sequence
  Synthetic oligonucleotide
tatggtgacccaaaaacacaataattaccc

SEQ ID NO: 470759 - DNA, 30 bp, Artificial Sequence
  Synthetic oligonucleotide
gactaaatctcactagagttaaacttaccc

SEQ ID NO: 470760 - DNA, 31 bp, Artificial Sequence
  Synthetic oligonucleotide
tcgctgatacactctgtcgcagagcttaccc

SEQ ID NO: 470761 - DNA, 30 bp, Artificial Sequence
  Synthetic oligonucleotide
gcaagtggataagtttcgaaaggcttaccc

SEQ ID NO: 470762 - DNA, 30 bp, Artificial Sequence
  Synthetic oligonucleotide
gaggtatgctgaccaaacgtaccgttaccc

SEQ ID NO: 470763 - DNA, 30 bp, Artificial Sequence
  Synthetic oligonucleotide
gtaagataagggacggtgcttccgttaccc

SEQ ID NO: 470764 - DNA, 30 bp, Artificial Sequence
  Synthetic oligonucleotide
ccggtctatctcatgaattccggaaacccc

SEQ ID NO: 470765 - DNA, 29 bp, Artificial Sequence
  Synthetic oligonucleotide
atgcgtaacggttgcaagtatgcaacccc

SEQ ID NO: 470766 - DNA, 30 bp, Artificial Sequence
  Synthetic oligonucleotide
aatgcgcactacacttcggggcctaacccc

SEQ ID NO: 470767 - DNA, 30 bp, Artificial Sequence
  Synthetic oligonucleotide
atttctcagtggtcacgaaaagtgcacccc

SEQ ID NO: 470768 - DNA, 30 bp, Artificial Sequence
  Synthetic oligonucleotide
attgaacctccctgaaagcactatcacccc

SEQ ID NO: 470769 - DNA, 31 bp, Artificial Sequence
  Synthetic oligonucleotide
gacgcattttataccaccagggcctcacccc

SEQ ID NO: 470770 - DNA, 30 bp, Artificial Sequence
  Synthetic oligonucleotide
cttcacagttgaatcagggagtctcacccc

SEQ ID NO: 470771 - DNA, 30 bp, Artificial Sequence
  Synthetic oligonucleotide
aataaattcgatttattgatccgtcacccc

SEQ ID NO: 470772 - DNA, 30 bp, Artificial Sequence
  Synthetic oligonucleotide
tgccagtgggcaaagtgccctgcagacccc

SEQ ID NO: 470773 - DNA, 30 bp, Artificial Sequence
  Synthetic oligonucleotide
ggggctcgcctggtttggcattgagacccc

SEQ ID NO: 470774 - DNA, 30 bp, Artificial Sequence
  Synthetic oligonucleotide
tgccgcgatgtcttcatgcgggtggacccc

SEQ ID NO: 470775 - DNA, 30 bp, Artificial Sequence
  Synthetic oligonucleotide
tacccgcccttaaatcaacctcatgacccc

SEQ ID NO: 470776 - DNA, 30 bp, Artificial Sequence
  Synthetic oligonucleotide
cgggcccttttggattacaggcgtgacccc

SEQ ID NO: 470777 - DNA, 30 bp, Artificial Sequence
  Synthetic oligonucleotide
aatgcacagaggtacgacccggtctacccc

SEQ ID NO: 470778 - DNA, 30 bp, Artificial Sequence
  Synthetic oligonucleotide
atttgcgagttcacgcggctggtctacccc

SEQ ID NO: 470779 - DNA, 30 bp, Artificial Sequence
  Synthetic oligonucleotide
aatgtaagtagcctagcagtaacgtacccc

SEQ ID NO: 470780 - DNA, 30 bp, Artificial Sequence
  Synthetic oligonucleotide
agccaccccaaatagaataaagcgtacccc

SEQ ID NO: 470781 - DNA, 30 bp, Artificial Sequence
  Synthetic oligonucleotide
ctttgagacaaggaagcagttagttacccc

SEQ ID NO: 470782 - DNA, 30 bp, Artificial Sequence
  Synthetic oligonucleotide
ccatttagggggaatgtaacattaaccccc

SEQ ID NO: 470783 - DNA, 30 bp, Artificial Sequence
  Synthetic oligonucleotide
ttaagtgtgtgacgcccgcccaacaccccc

SEQ ID NO: 470784 - DNA, 30 bp, Artificial Sequence
  Synthetic oligonucleotide
ccgtgcgcatatccgttgcaaagtaccccc

SEQ ID NO: 470785 - DNA, 30 bp, Artificial Sequence
  Synthetic oligonucleotide
catagaccccttttatggagctcacccccc

SEQ ID NO: 470786 - DNA, 30 bp, Artificial Sequence
  Synthetic oligonucleotide
cttttggtggatattggatgctcacccccc

SEQ ID NO: 470787 - DNA, 30 bp, Artificial Sequence
  Synthetic oligonucleotide
gtttccagtttgggccacatgggacccccc

SEQ ID NO: 470788 - DNA, 30 bp, Artificial Sequence
  Synthetic oligonucleotide
tgcaagagggtcctgcgatttatacccccc

SEQ ID NO: 470789 - DNA, 30 bp, Artificial Sequence
  Synthetic oligonucleotide
aaactcgtaatagccaccgcgatccccccc

SEQ ID NO: 470790 - DNA, 30 bp, Artificial Sequence
  Synthetic oligonucleotide
tggggacaatttcattgctacgggcccccc

SEQ ID NO: 470791 - DNA, 30 bp, Artificial Sequence
  Synthetic oligonucleotide
aagatgtgagatataggggctccggccccc

SEQ ID NO: 470792 - DNA, 30 bp, Artificial Sequence
  Synthetic oligonucleotide
gaaaaggtgccagagagaagcagggccccc

SEQ ID NO: 470793 - DNA, 30 bp, Artificial Sequence
  Synthetic oligonucleotide
cccgatgtagaatccggacgcagggccccc

SEQ ID NO: 470794 - DNA, 30 bp, Artificial Sequence
  Synthetic oligonucleotide
attaactaacaggaggatggcattgccccc

SEQ ID NO: 470795 - DNA, 30 bp, Artificial Sequence
  Synthetic oligonucleotide
cgcagtgcttcttaagttccgctctccccc

SEQ ID NO: 470796 - DNA, 30 bp, Artificial Sequence
  Synthetic oligonucleotide
cgggttgggggacattctatctggtccccc

SEQ ID NO: 470797 - DNA, 30 bp, Artificial Sequence
  Synthetic oligonucleotide
aaagcatccgcactagatgagcaaagcccc

SEQ ID NO: 470798 - DNA, 30 bp, Artificial Sequence
  Synthetic oligonucleotide
gacggttggaccgttgcgtagcacagcccc

SEQ ID NO: 470799 - DNA, 30 bp, Artificial Sequence
  Synthetic oligonucleotide
cattgtgtccctgttccgtagagcagcccc

SEQ ID NO: 470800 - DNA, 30 bp, Artificial Sequence
  Synthetic oligonucleotide
gttttcagccagcacggtaaatgcagcccc

SEQ ID NO: 470801 - DNA, 30 bp, Artificial Sequence
  Synthetic oligonucleotide
gacacttgtggataatggtttgagagcccc

SEQ ID NO: 470802 - DNA, 30 bp, Artificial Sequence
  Synthetic oligonucleotide
ccgtcccctccggcacgcacggcgagcccc

SEQ ID NO: 470803 - DNA, 30 bp, Artificial Sequence
  Synthetic oligonucleotide
ggtacaggatagacatacccctggagcccc

SEQ ID NO: 470804 - DNA, 30 bp, Artificial Sequence
  Synthetic oligonucleotide
tctggcctccaggggcacgtgtggagcccc

SEQ ID NO: 470805 - DNA, 31 bp, Artificial Sequence
  Synthetic oligonucleotide
atagtacccggcttaaaggtcactgagcccc

SEQ ID NO: 470806 - DNA, 30 bp, Artificial Sequence
  Synthetic oligonucleotide
gagcatggcagcttgacgaagctgagcccc

SEQ ID NO: 470807 - DNA, 30 bp, Artificial Sequence
  Synthetic oligonucleotide
aggtcacggtaagcacttcgcgtgagcccc

SEQ ID NO: 470808 - DNA, 30 bp, Artificial Sequence
  Synthetic oligonucleotide
taaagagtatcgcggctgtgagctagcccc

SEQ ID NO: 470809 - DNA, 30 bp, Artificial Sequence
  Synthetic oligonucleotide
gggtatcggcaggcctactcacgtagcccc

SEQ ID NO: 470810 - DNA, 30 bp, Artificial Sequence
  Synthetic oligonucleotide
ctctgtactggaaatcaggatcgtagcccc

SEQ ID NO: 470811 - DNA, 30 bp, Artificial Sequence
  Synthetic oligonucleotide
agcgtgttatgccctcggtagtcccgcccc

SEQ ID NO: 470812 - DNA, 30 bp, Artificial Sequence
  Synthetic oligonucleotide
acccctctggcattctggtcttagcgcccc

SEQ ID NO: 470813 - DNA, 30 bp, Artificial Sequence
  Synthetic oligonucleotide
tgcacatacttaacgacttaccttcgcccc

SEQ ID NO: 470814 - DNA, 30 bp, Artificial Sequence
  Synthetic oligonucleotide
aatctactggattaattgatccagggcccc

SEQ ID NO: 470815 - DNA, 29 bp, Artificial Sequence
  Synthetic oligonucleotide
gactatttgtttaacgagaacctggcccc

SEQ ID NO: 470816 - DNA, 30 bp, Artificial Sequence
  Synthetic oligonucleotide
agatgcataacatatatttgttgatgcccc

SEQ ID NO: 470817 - DNA, 30 bp, Artificial Sequence
  Synthetic oligonucleotide
tttagagggatgcgcactttgctgtgcccc

SEQ ID NO: 470818 - DNA, 30 bp, Artificial Sequence
  Synthetic oligonucleotide
gtctaatcgcactggccgatgataatcccc

SEQ ID NO: 470819 - DNA, 31 bp, Artificial Sequence
  Synthetic oligonucleotide
ttatgtcgcaattttatgcaaacgcatcccc

SEQ ID NO: 470820 - DNA, 30 bp, Artificial Sequence
  Synthetic oligonucleotide
cttcttctgtcttgctttcaaaagatcccc

SEQ ID NO: 470821 - DNA, 30 bp, Artificial Sequence
  Synthetic oligonucleotide
tcccccggggtattagactacaagatcccc

SEQ ID NO: 470822 - DNA, 30 bp, Artificial Sequence
  Synthetic oligonucleotide
gagcgctttgcagcatattataagatcccc

SEQ ID NO: 470823 - DNA, 30 bp, Artificial Sequence
  Synthetic oligonucleotide
gatttgccgtggggtggagcgatgatcccc

SEQ ID NO: 470824 - DNA, 30 bp, Artificial Sequence
  Synthetic oligonucleotide
ggcagttgcagtaattatcccaatatcccc

SEQ ID NO: 470825 - DNA, 30 bp, Artificial Sequence
  Synthetic oligonucleotide
gactgtcggtagttagattatgatatcccc

SEQ ID NO: 470826 - DNA, 30 bp, Artificial Sequence
  Synthetic oligonucleotide
gcaacaggttacaacgccctcggtatcccc

SEQ ID NO: 470827 - DNA, 30 bp, Artificial Sequence
  Synthetic oligonucleotide
agtaagattcacgcacaaggatccctcccc

SEQ ID NO: 470828 - DNA, 30 bp, Artificial Sequence
  Synthetic oligonucleotide
gaggcgagtgtcggggactcattcctcccc

SEQ ID NO: 470829 - DNA, 30 bp, Artificial Sequence
  Synthetic oligonucleotide
ggtcaagggtaagttgccggtttcctcccc

SEQ ID NO: 470830 - DNA, 30 bp, Artificial Sequence
  Synthetic oligonucleotide
aacttttaggtcttgatcccagggctcccc

SEQ ID NO: 470831 - DNA, 30 bp, Artificial Sequence
  Synthetic oligonucleotide
aaatattacgttggttcgtttattctcccc

SEQ ID NO: 470832 - DNA, 30 bp, Artificial Sequence
  Synthetic oligonucleotide
tctttggcattcgggtccaaaccagtcccc

SEQ ID NO: 470833 - DNA, 30 bp, Artificial Sequence
  Synthetic oligonucleotide
taggaagaaaggggacgtgattccgtcccc

SEQ ID NO: 470834 - DNA, 30 bp, Artificial Sequence
  Synthetic oligonucleotide
tgaataattagagacggcggagtcgtcccc

SEQ ID NO: 470835 - DNA, 30 bp, Artificial Sequence
  Synthetic oligonucleotide
atgcactagacacgttgttcgcagttcccc

SEQ ID NO: 470836 - DNA, 30 bp, Artificial Sequence
  Synthetic oligonucleotide
gcccatgggtctcgcgaaatcgagttcccc

SEQ ID NO: 470837 - DNA, 30 bp, Artificial Sequence
  Synthetic oligonucleotide
aaggttgcctagtgtgataggattttcccc

SEQ ID NO: 470838 - DNA, 30 bp, Artificial Sequence
  Synthetic oligonucleotide
agctaatttctatttattcatgttttcccc

SEQ ID NO: 470839 - DNA, 30 bp, Artificial Sequence
  Synthetic oligonucleotide
gtctggaatcttgtgaggtcaaacaagccc

SEQ ID NO: 470840 - DNA, 30 bp, Artificial Sequence
  Synthetic oligonucleotide
gcctttaggggttgcactttctggaagccc

SEQ ID NO: 470841 - DNA, 30 bp, Artificial Sequence
  Synthetic oligonucleotide
attctgggcgactcgacattcactaagccc

SEQ ID NO: 470842 - DNA, 30 bp, Artificial Sequence
  Synthetic oligonucleotide
ggggctagagttactggaggaagtaagccc

SEQ ID NO: 470843 - DNA, 30 bp, Artificial Sequence
  Synthetic oligonucleotide
aatcagctttacgtctaccctgttaagccc

SEQ ID NO: 470844 - DNA, 29 bp, Artificial Sequence
  Synthetic oligonucleotide
cttctacaatctggacgggtcaacagccc

SEQ ID NO: 470845 - DNA, 30 bp, Artificial Sequence
  Synthetic oligonucleotide
tccgccagcagcactggaatatcccagccc

SEQ ID NO: 470846 - DNA, 30 bp, Artificial Sequence
  Synthetic oligonucleotide
gcgggcttatccctaaatacaccgcagccc

SEQ ID NO: 470847 - DNA, 30 bp, Artificial Sequence
  Synthetic oligonucleotide
tgcatcaaattgtttaggagacctcagccc

SEQ ID NO: 470848 - DNA, 30 bp, Artificial Sequence
  Synthetic oligonucleotide
ggtcggatatatcgcgcagagggtcagccc

SEQ ID NO: 470849 - DNA, 30 bp, Artificial Sequence
  Synthetic oligonucleotide
cgcgcatcagcactacgcctattcgagccc

SEQ ID NO: 470850 - DNA, 30 bp, Artificial Sequence
  Synthetic oligonucleotide
gagtcacggacaaccgtggccgaggagccc

SEQ ID NO: 470851 - DNA, 30 bp, Artificial Sequence
  Synthetic oligonucleotide
tacataggctggcgagggcaatgggagccc

SEQ ID NO: 470852 - DNA, 30 bp, Artificial Sequence
  Synthetic oligonucleotide
gcagcgtctcgtggtcgtcatcaatagccc

SEQ ID NO: 470853 - DNA, 30 bp, Artificial Sequence
  Synthetic oligonucleotide
tctgcaatggctaggcttgatcgatagccc

SEQ ID NO: 470854 - DNA, 30 bp, Artificial Sequence
  Synthetic oligonucleotide
ttttgcagtgaataagtatgcggatagccc

SEQ ID NO: 470855 - DNA, 30 bp, Artificial Sequence
  Synthetic oligonucleotide
gtatgtatgaccgtcctttgtaggtagccc

SEQ ID NO: 470856 - DNA, 31 bp, Artificial Sequence
  Synthetic oligonucleotide
ccatcagtcgaacggagcaactacaacgccc

SEQ ID NO: 470857 - DNA, 30 bp, Artificial Sequence
  Synthetic oligonucleotide
ttctgtggttgacggtacgcggccacgccc

SEQ ID NO: 470858 - DNA, 30 bp, Artificial Sequence
  Synthetic oligonucleotide
acctagtcattttctatcggtctcacgccc

SEQ ID NO: 470859 - DNA, 30 bp, Artificial Sequence
  Synthetic oligonucleotide
gcatcatcctatctggtctggtagacgccc

SEQ ID NO: 470860 - DNA, 30 bp, Artificial Sequence
  Synthetic oligonucleotide
aattgttattcgcaagaaaatctgacgccc

SEQ ID NO: 470861 - DNA, 30 bp, Artificial Sequence
  Synthetic oligonucleotide
tatcatgtccaaatctttgaagatacgccc

SEQ ID NO: 470862 - DNA, 30 bp, Artificial Sequence
  Synthetic oligonucleotide
gcgacgcacagaattaagggatacccgccc

SEQ ID NO: 470863 - DNA, 30 bp, Artificial Sequence
  Synthetic oligonucleotide
gaacgcctgggaagggtatgcagcccgccc

SEQ ID NO: 470864 - DNA, 30 bp, Artificial Sequence
  Synthetic oligonucleotide
gggttggcaggattacgggtttcgccgccc

SEQ ID NO: 470865 - DNA, 30 bp, Artificial Sequence
  Synthetic oligonucleotide
catctgtcgctgagcctataggggccgccc

SEQ ID NO: 470866 - DNA, 30 bp, Artificial Sequence
  Synthetic oligonucleotide
cttaaacattacggatgctggtcagcgccc

SEQ ID NO: 470867 - DNA, 30 bp, Artificial Sequence
  Synthetic oligonucleotide
gtcccataatcctagtgcaggaacgcgccc

SEQ ID NO: 470868 - DNA, 30 bp, Artificial Sequence
  Synthetic oligonucleotide
cggagaatgcatggatttctagacgcgccc

SEQ ID NO: 470869 - DNA, 30 bp, Artificial Sequence
  Synthetic oligonucleotide
atttgtttggggtcattttacgactcgccc

SEQ ID NO: 470870 - DNA, 30 bp, Artificial Sequence
  Synthetic oligonucleotide
cgcggcagatcctattaaatactctcgccc

SEQ ID NO: 470871 - DNA, 30 bp, Artificial Sequence
  Synthetic oligonucleotide
tcagcccttatcagcattttatcaaggccc

SEQ ID NO: 470872 - DNA, 30 bp, Artificial Sequence
  Synthetic oligonucleotide
gagatgtggattgggctatgtataaggccc

SEQ ID NO: 470873 - DNA, 30 bp, Artificial Sequence
  Synthetic oligonucleotide
ggtctttgatgcacctccgaagggaggccc

SEQ ID NO: 470874 - DNA, 30 bp, Artificial Sequence
  Synthetic oligonucleotide
gtaatgcccagatggtcgaattggaggccc

SEQ ID NO: 470875 - DNA, 30 bp, Artificial Sequence
  Synthetic oligonucleotide
actcccttccataacagatccagtaggccc

SEQ ID NO: 470876 - DNA, 30 bp, Artificial Sequence
  Synthetic oligonucleotide
cattggcctagatcctcctagagtaggccc

SEQ ID NO: 470877 - DNA, 30 bp, Artificial Sequence
  Synthetic oligonucleotide
caaggaccttattctcgccggtgccggccc

SEQ ID NO: 470878 - DNA, 30 bp, Artificial Sequence
  Synthetic oligonucleotide
aaacagaaccagagtgccgctaagcggccc

SEQ ID NO: 470879 - DNA, 30 bp, Artificial Sequence
  Synthetic oligonucleotide
ccggagttttatccctagtcacatcggccc

SEQ ID NO: 470880 - DNA, 30 bp, Artificial Sequence
  Synthetic oligonucleotide
agccacgccccttaccacgagtccgggccc

SEQ ID NO: 470881 - DNA, 30 bp, Artificial Sequence
  Synthetic oligonucleotide
ggagtgctgcgaaccacgcccagggggccc

SEQ ID NO: 470882 - DNA, 30 bp, Artificial Sequence
  Synthetic oligonucleotide
ttactctcatcgaccgcacacgttgggccc

SEQ ID NO: 470883 - DNA, 30 bp, Artificial Sequence
  Synthetic oligonucleotide
aagtcgaggttgggatacaaggttgggccc

SEQ ID NO: 470884 - DNA, 30 bp, Artificial Sequence
  Synthetic oligonucleotide
gttttcggggacccctttattgcctggccc

SEQ ID NO: 470885 - DNA, 30 bp, Artificial Sequence
  Synthetic oligonucleotide
gtgtataagctttttttttaccgttggccc

SEQ ID NO: 470886 - DNA, 30 bp, Artificial Sequence
  Synthetic oligonucleotide
gagggctcctacgccaagttaggaatgccc

SEQ ID NO: 470887 - DNA, 30 bp, Artificial Sequence
  Synthetic oligonucleotide
tgacagcagaatgctagtgtttgaatgccc

SEQ ID NO: 470888 - DNA, 30 bp, Artificial Sequence
  Synthetic oligonucleotide
gatctaatcacaagttccatgaccatgccc

SEQ ID NO: 470889 - DNA, 30 bp, Artificial Sequence
  Synthetic oligonucleotide
atatcaaatttacagtaggattccatgccc

SEQ ID NO: 470890 - DNA, 30 bp, Artificial Sequence
  Synthetic oligonucleotide
gggcccttgatgtaactggtgcatatgccc

SEQ ID NO: 470891 - DNA, 30 bp, Artificial Sequence
  Synthetic oligonucleotide
gacagggaggattgcccgaaggcactgccc

SEQ ID NO: 470892 - DNA, 30 bp, Artificial Sequence
  Synthetic oligonucleotide
tcactccctggataactcttatatctgccc

SEQ ID NO: 470893 - DNA, 30 bp, Artificial Sequence
  Synthetic oligonucleotide
aactcctccgattgacatcggggagtgccc

SEQ ID NO: 470894 - DNA, 30 bp, Artificial Sequence
  Synthetic oligonucleotide
gagagattggcaaggggtactttagtgccc

SEQ ID NO: 470895 - DNA, 30 bp, Artificial Sequence
  Synthetic oligonucleotide
cccgtgtttctgcggggtcaggaggtgccc

SEQ ID NO: 470896 - DNA, 30 bp, Artificial Sequence
  Synthetic oligonucleotide
cttcgcccccatctatattttgctgtgccc

SEQ ID NO: 470897 - DNA, 30 bp, Artificial Sequence
  Synthetic oligonucleotide
gctaaaagatttcgtcatagccccttgccc

SEQ ID NO: 470898 - DNA, 30 bp, Artificial Sequence
  Synthetic oligonucleotide
ggttctggttggggcggggcgcggttgccc

SEQ ID NO: 470899 - DNA, 30 bp, Artificial Sequence
  Synthetic oligonucleotide
agttccgggctctaccagcagtttttgccc

SEQ ID NO: 470900 - DNA, 30 bp, Artificial Sequence
  Synthetic oligonucleotide
actactgtatgtgtgcggcgagcaaatccc

SEQ ID NO: 470901 - DNA, 30 bp, Artificial Sequence
  Synthetic oligonucleotide
gtcagaacttagatcccgatttcaaatccc

SEQ ID NO: 470902 - DNA, 30 bp, Artificial Sequence
  Synthetic oligonucleotide
gctctgccaatgaattggcagcacaatccc

SEQ ID NO: 470903 - DNA, 30 bp, Artificial Sequence
  Synthetic oligonucleotide
agtgatgaccgtctctgtataagcaatccc

SEQ ID NO: 470904 - DNA, 30 bp, Artificial Sequence
  Synthetic oligonucleotide
tttggggaaggtgcctgcatactcaatccc

SEQ ID NO: 470905 - DNA, 30 bp, Artificial Sequence
  Synthetic oligonucleotide
gtcctgcccggtatgtgcagttcgaatccc

SEQ ID NO: 470906 - DNA, 30 bp, Artificial Sequence
  Synthetic oligonucleotide
gcaggagttaaatggtgctttgaccatccc

SEQ ID NO: 470907 - DNA, 30 bp, Artificial Sequence
  Synthetic oligonucleotide
gtactattgcgacactacttgacccatccc

SEQ ID NO: 470908 - DNA, 30 bp, Artificial Sequence
  Synthetic oligonucleotide
ggtccgttgcagctagcaactttgcatccc

SEQ ID NO: 470909 - DNA, 30 bp, Artificial Sequence
  Synthetic oligonucleotide
ctgtgttcggtaccgtgcgccaaagatccc

SEQ ID NO: 470910 - DNA, 30 bp, Artificial Sequence
  Synthetic oligonucleotide
ccccagatggtaggaatcattagcgatccc

SEQ ID NO: 470911 - DNA, 30 bp, Artificial Sequence
  Synthetic oligonucleotide
aaaactccggagtgtcgagacctcgatccc

SEQ ID NO: 470912 - DNA, 30 bp, Artificial Sequence
  Synthetic oligonucleotide
gtcattacgtagtcattttggagggatccc

SEQ ID NO: 470913 - DNA, 30 bp, Artificial Sequence
  Synthetic oligonucleotide
atatagcggtagatattttaagaatatccc

SEQ ID NO: 470914 - DNA, 30 bp, Artificial Sequence
  Synthetic oligonucleotide
ctcggccagcaatggaaattgggatatccc

SEQ ID NO: 470915 - DNA, 30 bp, Artificial Sequence
  Synthetic oligonucleotide
attctatttctcctatataacatatatccc

SEQ ID NO: 470916 - DNA, 30 bp, Artificial Sequence
  Synthetic oligonucleotide
catcttaccgctggtcagtccaattatccc

SEQ ID NO: 470917 - DNA, 30 bp, Artificial Sequence
  Synthetic oligonucleotide
cttgcactctcgcctagtagcccttatccc

SEQ ID NO: 470918 - DNA, 30 bp, Artificial Sequence
  Synthetic oligonucleotide
ttagctcgaacttgtgtattgaaaactccc

SEQ ID NO: 470919 - DNA, 30 bp, Artificial Sequence
  Synthetic oligonucleotide
gtttaagtggaagaaacctgcgcaactccc

SEQ ID NO: 470920 - DNA, 30 bp, Artificial Sequence
  Synthetic oligonucleotide
tgtcaccgccaatcacgttatatcactccc

SEQ ID NO: 470921 - DNA, 30 bp, Artificial Sequence
  Synthetic oligonucleotide
gtattaattggcagccggtgactcactccc

SEQ ID NO: 470922 - DNA, 30 bp, Artificial Sequence
  Synthetic oligonucleotide
gcctggacttgtggacgctagttcactccc

SEQ ID NO: 470923 - DNA, 30 bp, Artificial Sequence
  Synthetic oligonucleotide
catcatgttactgcgcacgcaaggactccc

SEQ ID NO: 470924 - DNA, 30 bp, Artificial Sequence
  Synthetic oligonucleotide
ttgcaggagggtgacaatggcaggactccc

SEQ ID NO: 470925 - DNA, 30 bp, Artificial Sequence
  Synthetic oligonucleotide
agccccattaagttacacaactttactccc

SEQ ID NO: 470926 - DNA, 30 bp, Artificial Sequence
  Synthetic oligonucleotide
aggctccgcagctctggactgcgacctccc

SEQ ID NO: 470927 - DNA, 30 bp, Artificial Sequence
  Synthetic oligonucleotide
acaggagaaatcaagtggtatatccctccc

SEQ ID NO: 470928 - DNA, 30 bp, Artificial Sequence
  Synthetic oligonucleotide
gccaaggatttacttcaccaccggcctccc

SEQ ID NO: 470929 - DNA, 30 bp, Artificial Sequence
  Synthetic oligonucleotide
gtcaccctctagatgctgggctccgctccc

SEQ ID NO: 470930 - DNA, 30 bp, Artificial Sequence
  Synthetic oligonucleotide
aattaccctagaggatgcccaatggctccc

SEQ ID NO: 470931 - DNA, 30 bp, Artificial Sequence
  Synthetic oligonucleotide
gaaaacttcggccgggctattattgctccc

SEQ ID NO: 470932 - DNA, 30 bp, Artificial Sequence
  Synthetic oligonucleotide
tcgaatactccgtccggcgttcttgctccc

SEQ ID NO: 470933 - DNA, 30 bp, Artificial Sequence
  Synthetic oligonucleotide
gacggtgccccgccgtgcaaaggctctccc

SEQ ID NO: 470934 - DNA, 30 bp, Artificial Sequence
  Synthetic oligonucleotide
gatacaaagtatgaagctctgttttctccc

SEQ ID NO: 470935 - DNA, 30 bp, Artificial Sequence
  Synthetic oligonucleotide
gttccatgatggtaaaatgtattaagtccc

SEQ ID NO: 470936 - DNA, 30 bp, Artificial Sequence
  Synthetic oligonucleotide
ccgatctctgagcgccttcaggatagtccc

SEQ ID NO: 470937 - DNA, 30 bp, Artificial Sequence
  Synthetic oligonucleotide
gtgaaaaccataaggcttggatgtagtccc

SEQ ID NO: 470938 - DNA, 30 bp, Artificial Sequence
  Synthetic oligonucleotide
aataagtttggatctttaaaataacgtccc

SEQ ID NO: 470939 - DNA, 30 bp, Artificial Sequence
  Synthetic oligonucleotide
actaagtcaacgctccaggggctacgtccc

SEQ ID NO: 470940 - DNA, 30 bp, Artificial Sequence
  Synthetic oligonucleotide
gtaacgctattggtccagggcgaccgtccc

SEQ ID NO: 470941 - DNA, 30 bp, Artificial Sequence
  Synthetic oligonucleotide
acccggaacctcgctgaacgctcccgtccc

SEQ ID NO: 470942 - DNA, 30 bp, Artificial Sequence
  Synthetic oligonucleotide
aatttgtccggggtttaagcgtatcgtccc

SEQ ID NO: 470943 - DNA, 30 bp, Artificial Sequence
  Synthetic oligonucleotide
gcaggacagctgcaatccggtcctcgtccc

SEQ ID NO: 470944 - DNA, 30 bp, Artificial Sequence
  Synthetic oligonucleotide
atatcaaactgcttacccggttgaggtccc

SEQ ID NO: 470945 - DNA, 30 bp, Artificial Sequence
  Synthetic oligonucleotide
tagtgggtatggagcagcatctccggtccc

SEQ ID NO: 470946 - DNA, 30 bp, Artificial Sequence
  Synthetic oligonucleotide
tccggcgtgttgtcgactccgatcggtccc

SEQ ID NO: 470947 - DNA, 31 bp, Artificial Sequence
  Synthetic oligonucleotide
tcaacaccctgcactcttagtcgtcggtccc

SEQ ID NO: 470948 - DNA, 30 bp, Artificial Sequence
  Synthetic oligonucleotide
tttgaagtcagtgtagtggtctatggtccc

SEQ ID NO: 470949 - DNA, 30 bp, Artificial Sequence
  Synthetic oligonucleotide
tgaagtgacccccctggggggggatgtccc

SEQ ID NO: 470950 - DNA, 30 bp, Artificial Sequence
  Synthetic oligonucleotide
catcttcgttcaataataaccagttgtccc

SEQ ID NO: 470951 - DNA, 30 bp, Artificial Sequence
  Synthetic oligonucleotide
ggttttggttcggaatcgaataaaattccc

SEQ ID NO: 470952 - DNA, 30 bp, Artificial Sequence
  Synthetic oligonucleotide
cccgtttgataatggattatcccaattccc

SEQ ID NO: 470953 - DNA, 30 bp, Artificial Sequence
  Synthetic oligonucleotide
gaccagggtcgtgagtcccatggaattccc

SEQ ID NO: 470954 - DNA, 30 bp, Artificial Sequence
  Synthetic oligonucleotide
gtgaaaaccctggctctatgtaaccttccc

SEQ ID NO: 470955 - DNA, 30 bp, Artificial Sequence
  Synthetic oligonucleotide
ttgtggggaactgacgagtttttccttccc

SEQ ID NO: 470956 - DNA, 30 bp, Artificial Sequence
  Synthetic oligonucleotide
ctatcacgctttaagggatgctcgcttccc

SEQ ID NO: 470957 - DNA, 30 bp, Artificial Sequence
  Synthetic oligonucleotide
agtcatatcttgtaggagtagtggcttccc

SEQ ID NO: 470958 - DNA, 30 bp, Artificial Sequence
  Synthetic oligonucleotide
ccctatcagtcgacagcacataatcttccc

SEQ ID NO: 470959 - DNA, 30 bp, Artificial Sequence
  Synthetic oligonucleotide
tgcattcctacaagggcaggtattcttccc

SEQ ID NO: 470960 - DNA, 30 bp, Artificial Sequence
  Synthetic oligonucleotide
tctgggagcatgacctgtgtcccagttccc

SEQ ID NO: 470961 - DNA, 30 bp, Artificial Sequence
  Synthetic oligonucleotide
agcagtacatcggcacgaaggaaatttccc

SEQ ID NO: 470962 - DNA, 30 bp, Artificial Sequence
  Synthetic oligonucleotide
tgcagtttagtcactgatatcgactttccc

SEQ ID NO: 470963 - DNA, 30 bp, Artificial Sequence
  Synthetic oligonucleotide
tatgtggtctgacagaagtgttactttccc

SEQ ID NO: 470964 - DNA, 30 bp, Artificial Sequence
  Synthetic oligonucleotide
ctatgttccgcgtagagtgtcagctttccc

SEQ ID NO: 470965 - DNA, 30 bp, Artificial Sequence
  Synthetic oligonucleotide
gttcaaaggaggattatacgatattttccc

SEQ ID NO: 470966 - DNA, 31 bp, Artificial Sequence
  Synthetic oligonucleotide
tactcttcgggatagcgcaatcatttttccc

SEQ ID NO: 470967 - DNA, 30 bp, Artificial Sequence
  Synthetic oligonucleotide
aagcggcctgtacgtctaacttcaaaagcc

SEQ ID NO: 470968 - DNA, 30 bp, Artificial Sequence
  Synthetic oligonucleotide
tcaaaaacttcccgcttccgggtaaaagcc

SEQ ID NO: 470969 - DNA, 30 bp, Artificial Sequence
  Synthetic oligonucleotide
taagtgggctgaaccacctctttaaaagcc

SEQ ID NO: 470970 - DNA, 30 bp, Artificial Sequence
  Synthetic oligonucleotide
ttctttcttcgcgaccgtttgcgcaaagcc

SEQ ID NO: 470971 - DNA, 30 bp, Artificial Sequence
  Synthetic oligonucleotide
cgccagcgttcgtacgattagtagaaagcc

SEQ ID NO: 470972 - DNA, 30 bp, Artificial Sequence
  Synthetic oligonucleotide
tgcgcatctggtgcgccaccagtgaaagcc

SEQ ID NO: 470973 - DNA, 30 bp, Artificial Sequence
  Synthetic oligonucleotide
gtttttgttggcccggatttagtgaaagcc

SEQ ID NO: 470974 - DNA, 30 bp, Artificial Sequence
  Synthetic oligonucleotide
aactttagtgtacgtcattaacctaaagcc

SEQ ID NO: 470975 - DNA, 30 bp, Artificial Sequence
  Synthetic oligonucleotide
gaccccgatttgtcttcgcagattaaagcc

SEQ ID NO: 470976 - DNA, 30 bp, Artificial Sequence
  Synthetic oligonucleotide
ccggtatttctcaccaagcgctttaaagcc

SEQ ID NO: 470977 - DNA, 30 bp, Artificial Sequence
  Synthetic oligonucleotide
aacgggatgtcacgatgacattcacaagcc

SEQ ID NO: 470978 - DNA, 30 bp, Artificial Sequence
  Synthetic oligonucleotide
tttaagccgcgcgactcttaggagcaagcc

SEQ ID NO: 470979 - DNA, 30 bp, Artificial Sequence
  Synthetic oligonucleotide
cttattgcgtatggacacacatcgcaagcc

SEQ ID NO: 470980 - DNA, 30 bp, Artificial Sequence
  Synthetic oligonucleotide
agtttaggcattaaccctctagggcaagcc

SEQ ID NO: 470981 - DNA, 30 bp, Artificial Sequence
  Synthetic oligonucleotide
gataattttaattcaaaagctgtgcaagcc

SEQ ID NO: 470982 - DNA, 30 bp, Artificial Sequence
  Synthetic oligonucleotide
aattagaagggttatacatcttaagaagcc

SEQ ID NO: 470983 - DNA, 30 bp, Artificial Sequence
  Synthetic oligonucleotide
attcttgcgtacaaaaagtgttcagaagcc

SEQ ID NO: 470984 - DNA, 30 bp, Artificial Sequence
  Synthetic oligonucleotide
gtactcctctgggttcgctcgcatgaagcc

SEQ ID NO: 470985 - DNA, 30 bp, Artificial Sequence
  Synthetic oligonucleotide
tgcccttctgagcgtacggtcagtgaagcc

SEQ ID NO: 470986 - DNA, 30 bp, Artificial Sequence
  Synthetic oligonucleotide
ccccagcttatgtgacttagtgagtaagcc

SEQ ID NO: 470987 - DNA, 30 bp, Artificial Sequence
  Synthetic oligonucleotide
atcttttggagacccggccacagttaagcc

SEQ ID NO: 470988 - DNA, 30 bp, Artificial Sequence
  Synthetic oligonucleotide
acaatggcttctgccacgtgggtttaagcc

SEQ ID NO: 470989 - DNA, 30 bp, Artificial Sequence
  Synthetic oligonucleotide
cagaaggcggtgggaacagtaccgacagcc

SEQ ID NO: 470990 - DNA, 30 bp, Artificial Sequence
  Synthetic oligonucleotide
ggattagagggccatctataagcgacagcc

SEQ ID NO: 470991 - DNA, 30 bp, Artificial Sequence
  Synthetic oligonucleotide
ggatactcttgacacaggcggcgtacagcc

SEQ ID NO: 470992 - DNA, 30 bp, Artificial Sequence
  Synthetic oligonucleotide
gccgacgccttcgaccgggggtgtacagcc

SEQ ID NO: 470993 - DNA, 30 bp, Artificial Sequence
  Synthetic oligonucleotide
gccgccttcttgaccaactaaataccagcc

SEQ ID NO: 470994 - DNA, 30 bp, Artificial Sequence
  Synthetic oligonucleotide
gctgcatacgctcgagatttgagcccagcc

SEQ ID NO: 470995 - DNA, 30 bp, Artificial Sequence
  Synthetic oligonucleotide
gtgtcggtgtatattgaaagtagtccagcc

SEQ ID NO: 470996 - DNA, 30 bp, Artificial Sequence
  Synthetic oligonucleotide
tacattgtagtgataaaattgcgtccagcc

SEQ ID NO: 470997 - DNA, 30 bp, Artificial Sequence
  Synthetic oligonucleotide
aatggtcgtagtacgtctgttcgtccagcc

SEQ ID NO: 470998 - DNA, 30 bp, Artificial Sequence
  Synthetic oligonucleotide
caagtataagccaggagccgaatagcagcc

SEQ ID NO: 470999 - DNA, 30 bp, Artificial Sequence
  Synthetic oligonucleotide
agacactaggtaggagccgtttccgcagcc

SEQ ID NO: 471000 - DNA, 30 bp, Artificial Sequence
  Synthetic oligonucleotide
cctaacgcagcaaagattgtcagcgcagcc

SEQ ID NO: 471001 - DNA, 30 bp, Artificial Sequence
  Synthetic oligonucleotide
tccggcagtgttatgtgaagcttcgcagcc

SEQ ID NO: 471002 - DNA, 30 bp, Artificial Sequence
  Synthetic oligonucleotide
tctttatgcaatcgttactgataggcagcc

SEQ ID NO: 471003 - DNA, 30 bp, Artificial Sequence
  Synthetic oligonucleotide
gaaagcgagtattttaccatcgcggcagcc

SEQ ID NO: 471004 - DNA, 30 bp, Artificial Sequence
  Synthetic oligonucleotide
caaaacacgttatgcgtcctcagggcagcc

SEQ ID NO: 471005 - DNA, 30 bp, Artificial Sequence
  Synthetic oligonucleotide
gtgattgcaggacgttagcttggggcagcc

SEQ ID NO: 471006 - DNA, 30 bp, Artificial Sequence
  Synthetic oligonucleotide
cggcgcccggagcccaattcatgggcagcc

SEQ ID NO: 471007 - DNA, 31 bp, Artificial Sequence
  Synthetic oligonucleotide
aaacattaaaactagacgattgtctgcagcc

SEQ ID NO: 471008 - DNA, 30 bp, Artificial Sequence
  Synthetic oligonucleotide
gagagcaaactgtcggcatagaactcagcc

SEQ ID NO: 471009 - DNA, 30 bp, Artificial Sequence
  Synthetic oligonucleotide
gtaagttgtgttactaattatgactcagcc

SEQ ID NO: 471010 - DNA, 30 bp, Artificial Sequence
  Synthetic oligonucleotide
atttgtttcgagtcaccggactactcagcc

SEQ ID NO: 471011 - DNA, 30 bp, Artificial Sequence
  Synthetic oligonucleotide
aaatcccgatcgttataagggaaaagagcc

SEQ ID NO: 471012 - DNA, 30 bp, Artificial Sequence
  Synthetic oligonucleotide
gatctgatcttaccagactgggaaagagcc

SEQ ID NO: 471013 - DNA, 30 bp, Artificial Sequence
  Synthetic oligonucleotide
ccaggtctctattcagggggttgaagagcc

SEQ ID NO: 471014 - DNA, 30 bp, Artificial Sequence
  Synthetic oligonucleotide
ggattgcaggactgttcgtccgggagagcc

SEQ ID NO: 471015 - DNA, 30 bp, Artificial Sequence
  Synthetic oligonucleotide
ctcgttagcgcaaccttgtatcatagagcc

SEQ ID NO: 471016 - DNA, 30 bp, Artificial Sequence
  Synthetic oligonucleotide
gtaccgagcggatcattttaataccgagcc

SEQ ID NO: 471017 - DNA, 30 bp, Artificial Sequence
  Synthetic oligonucleotide
aggcctcgtgaaccactattgacgcgagcc

SEQ ID NO: 471018 - DNA, 30 bp, Artificial Sequence
  Synthetic oligonucleotide
tccgctctcgagacatgacgctcgcgagcc

SEQ ID NO: 471019 - DNA, 30 bp, Artificial Sequence
  Synthetic oligonucleotide
tttccacggtatcggcaatcgtttcgagcc

SEQ ID NO: 471020 - DNA, 30 bp, Artificial Sequence
  Synthetic oligonucleotide
caccttgccatatttctcgtgaacggagcc

SEQ ID NO: 471021 - DNA, 30 bp, Artificial Sequence
  Synthetic oligonucleotide
gaatatatgtggcggtctaacgacggagcc

SEQ ID NO: 471022 - DNA, 30 bp, Artificial Sequence
  Synthetic oligonucleotide
aagtgtcatgtctaatccaagagcggagcc

SEQ ID NO: 471023 - DNA, 30 bp, Artificial Sequence
  Synthetic oligonucleotide
tgtgatccgctcagtaagggtaagggagcc

SEQ ID NO: 471024 - DNA, 30 bp, Artificial Sequence
  Synthetic oligonucleotide
aagttggccgtacccggaccgccgggagcc

SEQ ID NO: 471025 - DNA, 30 bp, Artificial Sequence
  Synthetic oligonucleotide
tatgctgtacatggcagctacaggggagcc

SEQ ID NO: 471026 - DNA, 30 bp, Artificial Sequence
  Synthetic oligonucleotide
cgtcaaggaatgtccgttttctggggagcc

SEQ ID NO: 471027 - DNA, 30 bp, Artificial Sequence
  Synthetic oligonucleotide
gtggctattatagttttcgacttatgagcc

SEQ ID NO: 471028 - DNA, 30 bp, Artificial Sequence
  Synthetic oligonucleotide
aaagatgatcttgttaataacaattgagcc

SEQ ID NO: 471029 - DNA, 30 bp, Artificial Sequence
  Synthetic oligonucleotide
cacattttatggtcgaatttagcttgagcc

SEQ ID NO: 471030 - DNA, 30 bp, Artificial Sequence
  Synthetic oligonucleotide
gttagggaaaactgcactcgggcttgagcc

SEQ ID NO: 471031 - DNA, 30 bp, Artificial Sequence
  Synthetic oligonucleotide
tccacaattagacgcacatcaacaatagcc

SEQ ID NO: 471032 - DNA, 30 bp, Artificial Sequence
  Synthetic oligonucleotide
tggttttcccgtgagccgtatggaatagcc

SEQ ID NO: 471033 - DNA, 30 bp, Artificial Sequence
  Synthetic oligonucleotide
gcgctttggtaatgaggctctttaatagcc

SEQ ID NO: 471034 - DNA, 30 bp, Artificial Sequence
  Synthetic oligonucleotide
gctgcataggcaggcaaacaatacatagcc

SEQ ID NO: 471035 - DNA, 30 bp, Artificial Sequence
  Synthetic oligonucleotide
ctgcgtgcttcccttctgccgtacatagcc

SEQ ID NO: 471036 - DNA, 30 bp, Artificial Sequence
  Synthetic oligonucleotide
gctttaacatgctggcttcaaatgatagcc

SEQ ID NO: 471037 - DNA, 30 bp, Artificial Sequence
  Synthetic oligonucleotide
ctatggtatgaactttcaaagaatatagcc

SEQ ID NO: 471038 - DNA, 30 bp, Artificial Sequence
  Synthetic oligonucleotide
taacctttaggagtcaaaagtcctatagcc

SEQ ID NO: 471039 - DNA, 30 bp, Artificial Sequence
  Synthetic oligonucleotide
aaccgttatcacggggagcattctatagcc

SEQ ID NO: 471040 - DNA, 30 bp, Artificial Sequence
  Synthetic oligonucleotide
atccctttccgattggatctagttatagcc

SEQ ID NO: 471041 - DNA, 30 bp, Artificial Sequence
  Synthetic oligonucleotide
tccgtctgagtatctattaaaggcctagcc

SEQ ID NO: 471042 - DNA, 30 bp, Artificial Sequence
  Synthetic oligonucleotide
tggtggttttagctgcgcaacaggctagcc

SEQ ID NO: 471043 - DNA, 30 bp, Artificial Sequence
  Synthetic oligonucleotide
gcaagttgaaggtgtggtaggcttctagcc

SEQ ID NO: 471044 - DNA, 30 bp, Artificial Sequence
  Synthetic oligonucleotide
cctttaactcttctggattactttctagcc

SEQ ID NO: 471045 - DNA, 30 bp, Artificial Sequence
  Synthetic oligonucleotide
gtaaccaatacccgactgcctgcagtagcc

SEQ ID NO: 471046 - DNA, 30 bp, Artificial Sequence
  Synthetic oligonucleotide
atccgggtaataatctgctcaggcgtagcc

SEQ ID NO: 471047 - DNA, 30 bp, Artificial Sequence
  Synthetic oligonucleotide
aagtgtgatatgactacgcaggaggtagcc

SEQ ID NO: 471048 - DNA, 30 bp, Artificial Sequence
  Synthetic oligonucleotide
tcttttaatgaatgtggtggaaatgtagcc

SEQ ID NO: 471049 - DNA, 30 bp, Artificial Sequence
  Synthetic oligonucleotide
gagtactgtgctgactcaatagcattagcc

SEQ ID NO: 471050 - DNA, 31 bp, Artificial Sequence
  Synthetic oligonucleotide
gtacttcggatgccacaactgccccttagcc

SEQ ID NO: 471051 - DNA, 30 bp, Artificial Sequence
  Synthetic oligonucleotide
accatgttcgcataggtcggtcgcttagcc

SEQ ID NO: 471052 - DNA, 30 bp, Artificial Sequence
  Synthetic oligonucleotide
ccgtatccctttcgatgattttagttagcc

SEQ ID NO: 471053 - DNA, 30 bp, Artificial Sequence
  Synthetic oligonucleotide
cttcttacatggggataactagatttagcc

SEQ ID NO: 471054 - DNA, 30 bp, Artificial Sequence
  Synthetic oligonucleotide
ccgacttttattgaatggcccactttagcc

SEQ ID NO: 471055 - DNA, 30 bp, Artificial Sequence
  Synthetic oligonucleotide
ggccgctttaaggctgtcacctttttagcc

SEQ ID NO: 471056 - DNA, 30 bp, Artificial Sequence
  Synthetic oligonucleotide
atttcgagctacggccaatatgcaaacgcc

SEQ ID NO: 471057 - DNA, 30 bp, Artificial Sequence
  Synthetic oligonucleotide
catcagtacggcttgacattaagaaacgcc

SEQ ID NO: 471058 - DNA, 30 bp, Artificial Sequence
  Synthetic oligonucleotide
acttcgtctgatgggctaatgcgaaacgcc

SEQ ID NO: 471059 - DNA, 30 bp, Artificial Sequence
  Synthetic oligonucleotide
tttagtcaataatcgatgtagctaaacgcc

SEQ ID NO: 471060 - DNA, 30 bp, Artificial Sequence
  Synthetic oligonucleotide
gcggttttaagattggacgcattaaacgcc

SEQ ID NO: 471061 - DNA, 30 bp, Artificial Sequence
  Synthetic oligonucleotide
ccaaatgaagctccccgctcgcccaacgcc

SEQ ID NO: 471062 - DNA, 30 bp, Artificial Sequence
  Synthetic oligonucleotide
ttcactccgcgtatatccagtctcaacgcc

SEQ ID NO: 471063 - DNA, 30 bp, Artificial Sequence
  Synthetic oligonucleotide
gacaagaatggataggtttattggaacgcc

SEQ ID NO: 471064 - DNA, 30 bp, Artificial Sequence
  Synthetic oligonucleotide
ataatgtaggtaacgtatcagtctaacgcc

SEQ ID NO: 471065 - DNA, 30 bp, Artificial Sequence
  Synthetic oligonucleotide
gatcgccatcattgtgggggacaacacgcc

SEQ ID NO: 471066 - DNA, 30 bp, Artificial Sequence
  Synthetic oligonucleotide
ctaatgatggagaaaaaaatcgcacacgcc

SEQ ID NO: 471067 - DNA, 30 bp, Artificial Sequence
  Synthetic oligonucleotide
gtgccctctaaaaataccgttcgacacgcc

SEQ ID NO: 471068 - DNA, 30 bp, Artificial Sequence
  Synthetic oligonucleotide
ggcggaaagcattttattcaaaagcacgcc

SEQ ID NO: 471069 - DNA, 30 bp, Artificial Sequence
  Synthetic oligonucleotide
tagaacttaagccccaatacccgagacgcc

SEQ ID NO: 471070 - DNA, 30 bp, Artificial Sequence
  Synthetic oligonucleotide
gtttccagattcgccggtgttgacgacgcc

SEQ ID NO: 471071 - DNA, 30 bp, Artificial Sequence
  Synthetic oligonucleotide
ctaaagtcccttgaaaatcggaccgacgcc

SEQ ID NO: 471072 - DNA, 30 bp, Artificial Sequence
  Synthetic oligonucleotide
gtcgggcgcagtacaccaggcaaatacgcc

SEQ ID NO: 471073 - DNA, 30 bp, Artificial Sequence
  Synthetic oligonucleotide
ctttacccgtttaagcctagtaaatacgcc

SEQ ID NO: 471074 - DNA, 30 bp, Artificial Sequence
  Synthetic oligonucleotide
attagacaacgacgcgccgatctgtacgcc

SEQ ID NO: 471075 - DNA, 30 bp, Artificial Sequence
  Synthetic oligonucleotide
cagtgtgtttgtaagttgattctgtacgcc

SEQ ID NO: 471076 - DNA, 30 bp, Artificial Sequence
  Synthetic oligonucleotide
atgacactgtggtcctttgggttgtacgcc

SEQ ID NO: 471077 - DNA, 30 bp, Artificial Sequence
  Synthetic oligonucleotide
tgaggagcaggacggcgtcaatgttacgcc

SEQ ID NO: 471078 - DNA, 30 bp, Artificial Sequence
  Synthetic oligonucleotide
cctatcttgatggtagtcaacctttacgcc

SEQ ID NO: 471079 - DNA, 30 bp, Artificial Sequence
  Synthetic oligonucleotide
ttactgccacatatagttttgcagaccgcc

SEQ ID NO: 471080 - DNA, 30 bp, Artificial Sequence
  Synthetic oligonucleotide
gtagcttggccaaattagcaattgaccgcc

SEQ ID NO: 471081 - DNA, 30 bp, Artificial Sequence
  Synthetic oligonucleotide
gggtgtgaccgcgcatgggagattaccgcc

SEQ ID NO: 471082 - DNA, 30 bp, Artificial Sequence
  Synthetic oligonucleotide
gttgtattttactaaagtaaaggacccgcc

SEQ ID NO: 471083 - DNA, 30 bp, Artificial Sequence
  Synthetic oligonucleotide
aatacctctcacaattaagaagtccccgcc

SEQ ID NO: 471084 - DNA, 30 bp, Artificial Sequence
  Synthetic oligonucleotide
atactaggggcgggcagttctaatcccgcc

SEQ ID NO: 471085 - DNA, 30 bp, Artificial Sequence
  Synthetic oligonucleotide
tatatttgattacagccttattttcccgcc

SEQ ID NO: 471086 - DNA, 30 bp, Artificial Sequence
  Synthetic oligonucleotide
gctttgaactagtacgacgtaatagccgcc

SEQ ID NO: 471087 - DNA, 30 bp, Artificial Sequence
  Synthetic oligonucleotide
aatccagcatggctgaagcttggcgccgcc

SEQ ID NO: 471088 - DNA, 30 bp, Artificial Sequence
  Synthetic oligonucleotide
ctctgactgagaatctggatcttggccgcc

SEQ ID NO: 471089 - DNA, 30 bp, Artificial Sequence
  Synthetic oligonucleotide
aagcgacaaaggcgatgccttgactccgcc

SEQ ID NO: 471090 - DNA, 30 bp, Artificial Sequence
  Synthetic oligonucleotide
gcgaggataaagttattgaccgtgtccgcc

SEQ ID NO: 471091 - DNA, 30 bp, Artificial Sequence
  Synthetic oligonucleotide
gagttccttcttgattctaatgaaagcgcc

SEQ ID NO: 471092 - DNA, 30 bp, Artificial Sequence
  Synthetic oligonucleotide
ctagtcgcgtgtagcgtgcaggtaagcgcc

SEQ ID NO: 471093 - DNA, 30 bp, Artificial Sequence
  Synthetic oligonucleotide
tagacgacattcatagaagacgacagcgcc

SEQ ID NO: 471094 - DNA, 30 bp, Artificial Sequence
  Synthetic oligonucleotide
gtctgggagctgttccgccggatcagcgcc

SEQ ID NO: 471095 - DNA, 30 bp, Artificial Sequence
  Synthetic oligonucleotide
aggcgtaatacccattaaaatgggagcgcc

SEQ ID NO: 471096 - DNA, 30 bp, Artificial Sequence
  Synthetic oligonucleotide
ctctaaaatacattacccgactgacgcgcc

SEQ ID NO: 471097 - DNA, 30 bp, Artificial Sequence
  Synthetic oligonucleotide
cagttcttttttgatattgcggatggcgcc

SEQ ID NO: 471098 - DNA, 30 bp, Artificial Sequence
  Synthetic oligonucleotide
agggcgcggctcttggcataacctggcgcc

SEQ ID NO: 471099 - DNA, 30 bp, Artificial Sequence
  Synthetic oligonucleotide
gcagcaatagatttttcgggcccgatcgcc

SEQ ID NO: 471100 - DNA, 30 bp, Artificial Sequence
  Synthetic oligonucleotide
tgtatcctttggtagatctttaggatcgcc

SEQ ID NO: 471101 - DNA, 30 bp, Artificial Sequence
  Synthetic oligonucleotide
ggtacgtactgcagtgggtccagtatcgcc

SEQ ID NO: 471102 - DNA, 30 bp, Artificial Sequence
  Synthetic oligonucleotide
gcattccctgtcttcagttcgcgtatcgcc

SEQ ID NO: 471103 - DNA, 30 bp, Artificial Sequence
  Synthetic oligonucleotide
ttaatccagtgaagtccttactgtatcgcc

SEQ ID NO: 471104 - DNA, 30 bp, Artificial Sequence
  Synthetic oligonucleotide
catttagacttctgcaaagaggaactcgcc

SEQ ID NO: 471105 - DNA, 29 bp, Artificial Sequence
  Synthetic oligonucleotide
gtttacttgcactgtacaggggactcgcc

SEQ ID NO: 471106 - DNA, 30 bp, Artificial Sequence
  Synthetic oligonucleotide
tagtccgtatatcgagctgacaccctcgcc

SEQ ID NO: 471107 - DNA, 30 bp, Artificial Sequence
  Synthetic oligonucleotide
ggatatctgaatagccgaggcaggctcgcc

SEQ ID NO: 471108 - DNA, 30 bp, Artificial Sequence
  Synthetic oligonucleotide
gacggtcacgacgccgtgaatcggctcgcc

SEQ ID NO: 471109 - DNA, 30 bp, Artificial Sequence
  Synthetic oligonucleotide
tacctcaaaaggaaacgttacgacgtcgcc

SEQ ID NO: 471110 - DNA, 30 bp, Artificial Sequence
  Synthetic oligonucleotide
gaacaacttttagtgttcttccgggtcgcc

SEQ ID NO: 471111 - DNA, 30 bp, Artificial Sequence
  Synthetic oligonucleotide
aagtccccggcaaacgaatatcgggtcgcc

SEQ ID NO: 471112 - DNA, 30 bp, Artificial Sequence
  Synthetic oligonucleotide
attcttgaggcagcgaaaactggggtcgcc

SEQ ID NO: 471113 - DNA, 30 bp, Artificial Sequence
  Synthetic oligonucleotide
gcacggtgcacacaaagaggctgtgtcgcc

SEQ ID NO: 471114 - DNA, 30 bp, Artificial Sequence
  Synthetic oligonucleotide
tagatatacgattaatactagcttgtcgcc

SEQ ID NO: 471115 - DNA, 30 bp, Artificial Sequence
  Synthetic oligonucleotide
atacgctgtgcggcattgtacctcttcgcc

SEQ ID NO: 471116 - DNA, 30 bp, Artificial Sequence
  Synthetic oligonucleotide
ctggttaacaaaagaaattctaatttcgcc

SEQ ID NO: 471117 - DNA, 30 bp, Artificial Sequence
  Synthetic oligonucleotide
aaatgacagctcgttatgtctactttcgcc

SEQ ID NO: 471118 - DNA, 30 bp, Artificial Sequence
  Synthetic oligonucleotide
gaatcgaattcgcattgttattctttcgcc

SEQ ID NO: 471119 - DNA, 30 bp, Artificial Sequence
  Synthetic oligonucleotide
gctgtccttgttcgcatcttcggaaaggcc

SEQ ID NO: 471120 - DNA, 30 bp, Artificial Sequence
  Synthetic oligonucleotide
cgcaggttacaggtaggattccacaaggcc

SEQ ID NO: 471121 - DNA, 30 bp, Artificial Sequence
  Synthetic oligonucleotide
tcaggaaatctggtcggcgtgtccaaggcc

SEQ ID NO: 471122 - DNA, 30 bp, Artificial Sequence
  Synthetic oligonucleotide
acctttatggatgtttgctgtaataaggcc

SEQ ID NO: 471123 - DNA, 30 bp, Artificial Sequence
  Synthetic oligonucleotide
tgaacgtatatagcagagtatattaaggcc

SEQ ID NO: 471124 - DNA, 30 bp, Artificial Sequence
  Synthetic oligonucleotide
accgatcccatatatgtcacgagccaggcc

SEQ ID NO: 471125 - DNA, 30 bp, Artificial Sequence
  Synthetic oligonucleotide
ctccgactgcaggggaatgccgtgcaggcc

SEQ ID NO: 471126 - DNA, 29 bp, Artificial Sequence
  Synthetic oligonucleotide
gcaacttttcgcatagactatgtcaggcc

SEQ ID NO: 471127 - DNA, 30 bp, Artificial Sequence
  Synthetic oligonucleotide
ttgtattatcacccagtatgagaagaggcc

SEQ ID NO: 471128 - DNA, 30 bp, Artificial Sequence
  Synthetic oligonucleotide
gtgttccagcttgttaggttctcagaggcc

SEQ ID NO: 471129 - DNA, 30 bp, Artificial Sequence
  Synthetic oligonucleotide
aattttgctacaagtgaccgcctagaggcc

SEQ ID NO: 471130 - DNA, 30 bp, Artificial Sequence
  Synthetic oligonucleotide
tattgaactaccgcttagtgtctagaggcc

SEQ ID NO: 471131 - DNA, 30 bp, Artificial Sequence
  Synthetic oligonucleotide
atctgcgcgtcttagcccgaatacgaggcc

SEQ ID NO: 471132 - DNA, 30 bp, Artificial Sequence
  Synthetic oligonucleotide
gcagcgattcgctcacaagtgtatgaggcc

SEQ ID NO: 471133 - DNA, 29 bp, Artificial Sequence
  Synthetic oligonucleotide
aaagggagagacttctcgcttaataggcc

SEQ ID NO: 471134 - DNA, 30 bp, Artificial Sequence
  Synthetic oligonucleotide
aaactctcatgatctacagtcagataggcc

SEQ ID NO: 471135 - DNA, 30 bp, Artificial Sequence
  Synthetic oligonucleotide
ttccaagtcgcattggcaagtttataggcc

SEQ ID NO: 471136 - DNA, 30 bp, Artificial Sequence
  Synthetic oligonucleotide
ggaggcaagctattgaggtggcgctaggcc

SEQ ID NO: 471137 - DNA, 30 bp, Artificial Sequence
  Synthetic oligonucleotide
ggttgcaggtgcccccgcatcttctaggcc

SEQ ID NO: 471138 - DNA, 30 bp, Artificial Sequence
  Synthetic oligonucleotide
tcggtagggaatcccctacggctgtaggcc

SEQ ID NO: 471139 - DNA, 30 bp, Artificial Sequence
  Synthetic oligonucleotide
atgtgctcggtggcacaccaggtttaggcc

SEQ ID NO: 471140 - DNA, 30 bp, Artificial Sequence
  Synthetic oligonucleotide
gagttattccggacagcccctgaaacggcc

SEQ ID NO: 471141 - DNA, 30 bp, Artificial Sequence
  Synthetic oligonucleotide
gacagtcatcgacccagaactgccacggcc

SEQ ID NO: 471142 - DNA, 30 bp, Artificial Sequence
  Synthetic oligonucleotide
aaagttatgcctagtcggaggcagacggcc

SEQ ID NO: 471143 - DNA, 30 bp, Artificial Sequence
  Synthetic oligonucleotide
atgtaaccataagggaataaggatacggcc

SEQ ID NO: 471144 - DNA, 30 bp, Artificial Sequence
  Synthetic oligonucleotide
ggtatggaattcatgatgctttctacggcc

SEQ ID NO: 471145 - DNA, 30 bp, Artificial Sequence
  Synthetic oligonucleotide
attggtcacaactccgtactgcgtacggcc

SEQ ID NO: 471146 - DNA, 30 bp, Artificial Sequence
  Synthetic oligonucleotide
agactctgcagtggaggctccgaaccggcc

SEQ ID NO: 471147 - DNA, 30 bp, Artificial Sequence
  Synthetic oligonucleotide
atgtaattaatatttatagtcgtaccggcc

SEQ ID NO: 471148 - DNA, 30 bp, Artificial Sequence
  Synthetic oligonucleotide
atcgttgaccacgaacagcgccacccggcc

SEQ ID NO: 471149 - DNA, 30 bp, Artificial Sequence
  Synthetic oligonucleotide
ttttggagcgagaagctcgggtacccggcc

SEQ ID NO: 471150 - DNA, 30 bp, Artificial Sequence
  Synthetic oligonucleotide
gactcgtactcttatatgggatgcccggcc

SEQ ID NO: 471151 - DNA, 30 bp, Artificial Sequence
  Synthetic oligonucleotide
tatgtaactggatttatagtgctgccggcc

SEQ ID NO: 471152 - DNA, 30 bp, Artificial Sequence
  Synthetic oligonucleotide
gtcctgtactagtacctaactgatccggcc

SEQ ID NO: 471153 - DNA, 30 bp, Artificial Sequence
  Synthetic oligonucleotide
tgatttggacaagtggtgtgtcgtccggcc

SEQ ID NO: 471154 - DNA, 30 bp, Artificial Sequence
  Synthetic oligonucleotide
cgttatacgtaagacagtacggttccggcc

SEQ ID NO: 471155 - DNA, 30 bp, Artificial Sequence
  Synthetic oligonucleotide
aaggtcacaaggattttgtgatttccggcc

SEQ ID NO: 471156 - DNA, 30 bp, Artificial Sequence
  Synthetic oligonucleotide
tgtaggcctcgaaaatggacgcaagcggcc

SEQ ID NO: 471157 - DNA, 30 bp, Artificial Sequence
  Synthetic oligonucleotide
cgtccatggccagtgcttacaggagcggcc

SEQ ID NO: 471158 - DNA, 30 bp, Artificial Sequence
  Synthetic oligonucleotide
ggcaggggcggtttcacttgaaccgcggcc

SEQ ID NO: 471159 - DNA, 30 bp, Artificial Sequence
  Synthetic oligonucleotide
acctacgttactcattatggatgcgcggcc

SEQ ID NO: 471160 - DNA, 30 bp, Artificial Sequence
  Synthetic oligonucleotide
tcccaaaagtggggcgccttgtgcgcggcc

SEQ ID NO: 471161 - DNA, 30 bp, Artificial Sequence
  Synthetic oligonucleotide
tcatggaccacttgtgcatggatcgcggcc

SEQ ID NO: 471162 - DNA, 30 bp, Artificial Sequence
  Synthetic oligonucleotide
gccccaatgccctgtctctatacggcggcc

SEQ ID NO: 471163 - DNA, 30 bp, Artificial Sequence
  Synthetic oligonucleotide
gtcctttattcattagtgtttggggcggcc

SEQ ID NO: 471164 - DNA, 30 bp, Artificial Sequence
  Synthetic oligonucleotide
ggagggaggagctggcttggtctggcggcc

SEQ ID NO: 471165 - DNA, 30 bp, Artificial Sequence
  Synthetic oligonucleotide
ttggactaaggggtcttgggtcatgcggcc

SEQ ID NO: 471166 - DNA, 30 bp, Artificial Sequence
  Synthetic oligonucleotide
taaattgtttctcccagagtccgtgcggcc

SEQ ID NO: 471167 - DNA, 30 bp, Artificial Sequence
  Synthetic oligonucleotide
tttcgcacggtccggaccgccggatcggcc

SEQ ID NO: 471168 - DNA, 30 bp, Artificial Sequence
  Synthetic oligonucleotide
cttggcagggcgaactgtaagaactcggcc

SEQ ID NO: 471169 - DNA, 30 bp, Artificial Sequence
  Synthetic oligonucleotide
aaggggccacaaaggcaaggaacctcggcc

SEQ ID NO: 471170 - DNA, 30 bp, Artificial Sequence
  Synthetic oligonucleotide
tatacagttatggcgctgacggtgtcggcc

SEQ ID NO: 471171 - DNA, 30 bp, Artificial Sequence
  Synthetic oligonucleotide
atgcttgaatcgggattcccgggaagggcc

SEQ ID NO: 471172 - DNA, 30 bp, Artificial Sequence
  Synthetic oligonucleotide
gatttacaggagaggtcttcggacagggcc

SEQ ID NO: 471173 - DNA, 30 bp, Artificial Sequence
  Synthetic oligonucleotide
tgccacgatgacgttagcattgttagggcc

SEQ ID NO: 471174 - DNA, 30 bp, Artificial Sequence
  Synthetic oligonucleotide
gaggacgaagtaaggttaggcaaacgggcc

SEQ ID NO: 471175 - DNA, 30 bp, Artificial Sequence
  Synthetic oligonucleotide
cagctactgctgcagattgattgacgggcc

SEQ ID NO: 471176 - DNA, 30 bp, Artificial Sequence
  Synthetic oligonucleotide
ggcgggtttcgctgcgcctccacccgggcc

SEQ ID NO: 471177 - DNA, 30 bp, Artificial Sequence
  Synthetic oligonucleotide
aagttgtggcccctcaaaacagagcgggcc

SEQ ID NO: 471178 - DNA, 30 bp, Artificial Sequence
  Synthetic oligonucleotide
tgacgatggggagaaggggtcagtcgggcc

SEQ ID NO: 471179 - DNA, 30 bp, Artificial Sequence
  Synthetic oligonucleotide
gtagcttttctgggccacatgtgtcgggcc

SEQ ID NO: 471180 - DNA, 30 bp, Artificial Sequence
  Synthetic oligonucleotide
agccccaatcgattattggggcttcgggcc

SEQ ID NO: 471181 - DNA, 30 bp, Artificial Sequence
  Synthetic oligonucleotide
attcattaggtattcctcggggaaggggcc

SEQ ID NO: 471182 - DNA, 30 bp, Artificial Sequence
  Synthetic oligonucleotide
agcgttaacggatcatgacctgcaggggcc

SEQ ID NO: 471183 - DNA, 30 bp, Artificial Sequence
  Synthetic oligonucleotide
gcaggagaccgtaatcgtaatctcggggcc

SEQ ID NO: 471184 - DNA, 30 bp, Artificial Sequence
  Synthetic oligonucleotide
cgccaatatttaaacctcgacccgggggcc

SEQ ID NO: 471185 - DNA, 30 bp, Artificial Sequence
  Synthetic oligonucleotide
acatgacgggtaaacctcttttggggggcc

SEQ ID NO: 471186 - DNA, 30 bp, Artificial Sequence
  Synthetic oligonucleotide
cgcaggccttgtatcttatgttcatgggcc

SEQ ID NO: 471187 - DNA, 30 bp, Artificial Sequence
  Synthetic oligonucleotide
aaatcttgctggcgtagtaagagatgggcc

SEQ ID NO: 471188 - DNA, 30 bp, Artificial Sequence
  Synthetic oligonucleotide
gtatctcttccagtcactgtcctctgggcc

SEQ ID NO: 471189 - DNA, 30 bp, Artificial Sequence
  Synthetic oligonucleotide
ctttttatcgataatccggtgcggtgggcc

SEQ ID NO: 471190 - DNA, 30 bp, Artificial Sequence
  Synthetic oligonucleotide
gcccttaggtgttaagatacctattgggcc

SEQ ID NO: 471191 - DNA, 30 bp, Artificial Sequence
  Synthetic oligonucleotide
aattacctgttgttaggttgcccttgggcc

SEQ ID NO: 471192 - DNA, 30 bp, Artificial Sequence
  Synthetic oligonucleotide
ccgttgaacagcaatctgaccccaatggcc

SEQ ID NO: 471193 - DNA, 30 bp, Artificial Sequence
  Synthetic oligonucleotide
ttgcgtaatcatcttatatagattatggcc

SEQ ID NO: 471194 - DNA, 30 bp, Artificial Sequence
  Synthetic oligonucleotide
aagagaaaaataatggcagggcttatggcc

SEQ ID NO: 471195 - DNA, 30 bp, Artificial Sequence
  Synthetic oligonucleotide
tgttgaaagccgccgctcagataactggcc

SEQ ID NO: 471196 - DNA, 30 bp, Artificial Sequence
  Synthetic oligonucleotide
gtatcaactccttgtcgtgggatactggcc

SEQ ID NO: 471197 - DNA, 30 bp, Artificial Sequence
  Synthetic oligonucleotide
cgtactagcggaagtcacctcatcctggcc

SEQ ID NO: 471198 - DNA, 30 bp, Artificial Sequence
  Synthetic oligonucleotide
cggttaccctgtacgcggcgatggctggcc

SEQ ID NO: 471199 - DNA, 30 bp, Artificial Sequence
  Synthetic oligonucleotide
agcttgaagccctgatttctgatgctggcc

SEQ ID NO: 471200 - DNA, 30 bp, Artificial Sequence
  Synthetic oligonucleotide
ttgcaggcgtgcagcacaccactgctggcc

SEQ ID NO: 471201 - DNA, 30 bp, Artificial Sequence
  Synthetic oligonucleotide
cctgacttagtcactcggagattgctggcc

SEQ ID NO: 471202 - DNA, 30 bp, Artificial Sequence
  Synthetic oligonucleotide
tcgcacatatttggacccatcagtctggcc

SEQ ID NO: 471203 - DNA, 30 bp, Artificial Sequence
  Synthetic oligonucleotide
aaatccacactccacaatgtggacgtggcc

SEQ ID NO: 471204 - DNA, 30 bp, Artificial Sequence
  Synthetic oligonucleotide
tagggcttgcgggcccttacgagcgtggcc

SEQ ID NO: 471205 - DNA, 30 bp, Artificial Sequence
  Synthetic oligonucleotide
gggtttatagaccctccgaagtttgtggcc

SEQ ID NO: 471206 - DNA, 30 bp, Artificial Sequence
  Synthetic oligonucleotide
gggggtaggttatggcggtatgaattggcc

SEQ ID NO: 471207 - DNA, 30 bp, Artificial Sequence
  Synthetic oligonucleotide
gtctcgtcagtataatgtacgacattggcc

SEQ ID NO: 471208 - DNA, 30 bp, Artificial Sequence
  Synthetic oligonucleotide
ctacgccgggcgttaacacgctacttggcc

SEQ ID NO: 471209 - DNA, 30 bp, Artificial Sequence
  Synthetic oligonucleotide
ggttcccattataagcctaaggccttggcc

SEQ ID NO: 471210 - DNA, 30 bp, Artificial Sequence
  Synthetic oligonucleotide
ttgtataaattcgtttcacggagcttggcc

SEQ ID NO: 471211 - DNA, 30 bp, Artificial Sequence
  Synthetic oligonucleotide
tcagtaatctgagctattcgtctgttggcc

SEQ ID NO: 471212 - DNA, 30 bp, Artificial Sequence
  Synthetic oligonucleotide
accggccagctctccacaagatctttggcc

SEQ ID NO: 471213 - DNA, 30 bp, Artificial Sequence
  Synthetic oligonucleotide
tttcctcgtattattattcgcggtttggcc

SEQ ID NO: 471214 - DNA, 30 bp, Artificial Sequence
  Synthetic oligonucleotide
aaagagacgcttagttcggcagttttggcc

SEQ ID NO: 471215 - DNA, 30 bp, Artificial Sequence
  Synthetic oligonucleotide
tatctgtgactagtcgacccgggaaatgcc

SEQ ID NO: 471216 - DNA, 30 bp, Artificial Sequence
  Synthetic oligonucleotide
tcaaattaacgaccgtattgcgacaatgcc

SEQ ID NO: 471217 - DNA, 30 bp, Artificial Sequence
  Synthetic oligonucleotide
cttggttaatatcggcgtagatacaatgcc

SEQ ID NO: 471218 - DNA, 30 bp, Artificial Sequence
  Synthetic oligonucleotide
gaagccgtgagccacgcggcacagaatgcc

SEQ ID NO: 471219 - DNA, 30 bp, Artificial Sequence
  Synthetic oligonucleotide
catcccgcatgcgacgttagagcgaatgcc

SEQ ID NO: 471220 - DNA, 30 bp, Artificial Sequence
  Synthetic oligonucleotide
ggattgatgtgtcaccgctgtaggcatgcc

SEQ ID NO: 471221 - DNA, 30 bp, Artificial Sequence
  Synthetic oligonucleotide
tttacttgcaacgcggacttacatcatgcc

SEQ ID NO: 471222 - DNA, 30 bp, Artificial Sequence
  Synthetic oligonucleotide
ggctagatactggagcagatgcttcatgcc

SEQ ID NO: 471223 - DNA, 30 bp, Artificial Sequence
  Synthetic oligonucleotide
attcacaactccgctactaacacagatgcc

SEQ ID NO: 471224 - DNA, 30 bp, Artificial Sequence
  Synthetic oligonucleotide
gaacttctcctctcgtgattaagagatgcc

SEQ ID NO: 471225 - DNA, 30 bp, Artificial Sequence
  Synthetic oligonucleotide
agacccgtagagattattctttgagatgcc

SEQ ID NO: 471226 - DNA, 30 bp, Artificial Sequence
  Synthetic oligonucleotide
ggcatctgaaatttgacagattccgatgcc

SEQ ID NO: 471227 - DNA, 30 bp, Artificial Sequence
  Synthetic oligonucleotide
gatggtagctgctgcagagcgatggatgcc

SEQ ID NO: 471228 - DNA, 30 bp, Artificial Sequence
  Synthetic oligonucleotide
tatcagtttttgtaatcactcttggatgcc

SEQ ID NO: 471229 - DNA, 30 bp, Artificial Sequence
  Synthetic oligonucleotide
gaatcatgtaatggaagcgataatgatgcc

SEQ ID NO: 471230 - DNA, 30 bp, Artificial Sequence
  Synthetic oligonucleotide
ccgctgtggtaagagccgcgggatgatgcc

SEQ ID NO: 471231 - DNA, 30 bp, Artificial Sequence
  Synthetic oligonucleotide
gttcatccggccgcgtcaatagctgatgcc

SEQ ID NO: 471232 - DNA, 30 bp, Artificial Sequence
  Synthetic oligonucleotide
tttcatgaaaaaggccagatcttatatgcc

SEQ ID NO: 471233 - DNA, 30 bp, Artificial Sequence
  Synthetic oligonucleotide
catcgtggtatcttacgatggttatatgcc

SEQ ID NO: 471234 - DNA, 30 bp, Artificial Sequence
  Synthetic oligonucleotide
tttatatgaagattcgggtatacgtatgcc

SEQ ID NO: 471235 - DNA, 30 bp, Artificial Sequence
  Synthetic oligonucleotide
ctcggcatgcttctagtttattggtatgcc

SEQ ID NO: 471236 - DNA, 30 bp, Artificial Sequence
  Synthetic oligonucleotide
agggcattttatgtcatgcattattatgcc

SEQ ID NO: 471237 - DNA, 30 bp, Artificial Sequence
  Synthetic oligonucleotide
gtgatactagttgtagcatcgcgttatgcc

SEQ ID NO: 471238 - DNA, 30 bp, Artificial Sequence
  Synthetic oligonucleotide
cttcacagtaagggcgcaatggtttatgcc

SEQ ID NO: 471239 - DNA, 30 bp, Artificial Sequence
  Synthetic oligonucleotide
tagaatgatgatttcactttttaaactgcc

SEQ ID NO: 471240 - DNA, 30 bp, Artificial Sequence
  Synthetic oligonucleotide
agcttcatgcgctgtgagaattcacctgcc

SEQ ID NO: 471241 - DNA, 30 bp, Artificial Sequence
  Synthetic oligonucleotide
tgaccgtggtaagaaaattggtcccctgcc

SEQ ID NO: 471242 - DNA, 30 bp, Artificial Sequence
  Synthetic oligonucleotide
gagcgattttcttatcaccagtcgcctgcc

SEQ ID NO: 471243 - DNA, 30 bp, Artificial Sequence
  Synthetic oligonucleotide
gaccgctttcccgctacgctaacagctgcc

SEQ ID NO: 471244 - DNA, 30 bp, Artificial Sequence
  Synthetic oligonucleotide
ttttaactcaagtgaacaatgagagctgcc

SEQ ID NO: 471245 - DNA, 30 bp, Artificial Sequence
  Synthetic oligonucleotide
gacactgaacttcgccgaggcatagctgcc

SEQ ID NO: 471246 - DNA, 30 bp, Artificial Sequence
  Synthetic oligonucleotide
ggaggacgtcaggagcggtcgtacgctgcc

SEQ ID NO: 471247 - DNA, 30 bp, Artificial Sequence
  Synthetic oligonucleotide
cacataccctggaggctccggtttgctgcc

SEQ ID NO: 471248 - DNA, 30 bp, Artificial Sequence
  Synthetic oligonucleotide
cgaataactgctgttaggctgtttgctgcc

SEQ ID NO: 471249 - DNA, 30 bp, Artificial Sequence
  Synthetic oligonucleotide
agcagatatttcgtcctgcgaacatctgcc

SEQ ID NO: 471250 - DNA, 30 bp, Artificial Sequence
  Synthetic oligonucleotide
cgttatgcctgcacacagtcatgatctgcc

SEQ ID NO: 471251 - DNA, 30 bp, Artificial Sequence
  Synthetic oligonucleotide
atcatgtatgtaggggatacagtctctgcc

SEQ ID NO: 471252 - DNA, 30 bp, Artificial Sequence
  Synthetic oligonucleotide
tactatgattcaaacgtatgggtctctgcc

SEQ ID NO: 471253 - DNA, 30 bp, Artificial Sequence
  Synthetic oligonucleotide
cgcttggatgttacgagaaatctttctgcc

SEQ ID NO: 471254 - DNA, 29 bp, Artificial Sequence
  Synthetic oligonucleotide
cattgactccaggaagattgtcaagtgcc

SEQ ID NO: 471255 - DNA, 30 bp, Artificial Sequence
  Synthetic oligonucleotide
cgcaaggccacattaccgttagtaagtgcc

SEQ ID NO: 471256 - DNA, 30 bp, Artificial Sequence
  Synthetic oligonucleotide
cttggccgggtatagtcgacccgcagtgcc

SEQ ID NO: 471257 - DNA, 30 bp, Artificial Sequence
  Synthetic oligonucleotide
taatgatgtgcaccatttaaatggagtgcc

SEQ ID NO: 471258 - DNA, 30 bp, Artificial Sequence
  Synthetic oligonucleotide
acgtattcgcggaccttggtacatagtgcc

SEQ ID NO: 471259 - DNA, 30 bp, Artificial Sequence
  Synthetic oligonucleotide
cgccatttatgcgggcatatatgtagtgcc

SEQ ID NO: 471260 - DNA, 30 bp, Artificial Sequence
  Synthetic oligonucleotide
ctccaggtagtgtcctgacctattagtgcc

SEQ ID NO: 471261 - DNA, 30 bp, Artificial Sequence
  Synthetic oligonucleotide
aaaagtcaatatgctttgattcaacgtgcc

SEQ ID NO: 471262 - DNA, 30 bp, Artificial Sequence
  Synthetic oligonucleotide
gcccatagcatgaggccggtcacacgtgcc

SEQ ID NO: 471263 - DNA, 30 bp, Artificial Sequence
  Synthetic oligonucleotide
gggtgactagagtatcaggttttacgtgcc

SEQ ID NO: 471264 - DNA, 31 bp, Artificial Sequence
  Synthetic oligonucleotide
aggaatccatacgtcatgcgcagcccgtgcc

SEQ ID NO: 471265 - DNA, 30 bp, Artificial Sequence
  Synthetic oligonucleotide
tctatggataatcgtaagtcagggcgtgcc

SEQ ID NO: 471266 - DNA, 30 bp, Artificial Sequence
  Synthetic oligonucleotide
gggatcttgggggcgatgtagcttcgtgcc

SEQ ID NO: 471267 - DNA, 30 bp, Artificial Sequence
  Synthetic oligonucleotide
ggggatggtatgcgtcgtggatcaggtgcc

SEQ ID NO: 471268 - DNA, 30 bp, Artificial Sequence
  Synthetic oligonucleotide
cttctgggacgcgccccacagaactgtgcc

SEQ ID NO: 471269 - DNA, 30 bp, Artificial Sequence
  Synthetic oligonucleotide
cgcttctcatggaatagcgcagcgtgtgcc

SEQ ID NO: 471270 - DNA, 30 bp, Artificial Sequence
  Synthetic oligonucleotide
gttagtcatcggcctgccaccaccattgcc

SEQ ID NO: 471271 - DNA, 30 bp, Artificial Sequence
  Synthetic oligonucleotide
actttagttagtaggagttgatgcattgcc

SEQ ID NO: 471272 - DNA, 30 bp, Artificial Sequence
  Synthetic oligonucleotide
ttagctgatgtctccacaggaaggattgcc

SEQ ID NO: 471273 - DNA, 30 bp, Artificial Sequence
  Synthetic oligonucleotide
aacaatgtacgctgacatttcatgattgcc

SEQ ID NO: 471274 - DNA, 30 bp, Artificial Sequence
  Synthetic oligonucleotide
cacttgaggcgacgagaagtctatattgcc

SEQ ID NO: 471275 - DNA, 30 bp, Artificial Sequence
  Synthetic oligonucleotide
gaataatccgcacggagtctcagtattgcc

SEQ ID NO: 471276 - DNA, 30 bp, Artificial Sequence
  Synthetic oligonucleotide
gattgcctgggcgccatggcataacttgcc

SEQ ID NO: 471277 - DNA, 30 bp, Artificial Sequence
  Synthetic oligonucleotide
gcacaatagtgtttgcgattttgacttgcc

SEQ ID NO: 471278 - DNA, 30 bp, Artificial Sequence
  Synthetic oligonucleotide
ggaaatcgtatcggcaagaagtaccttgcc

SEQ ID NO: 471279 - DNA, 30 bp, Artificial Sequence
  Synthetic oligonucleotide
ggcggggcgcttgctcgaggaccgcttgcc

SEQ ID NO: 471280 - DNA, 30 bp, Artificial Sequence
  Synthetic oligonucleotide
aaaccaataccaacgatcgaggcgcttgcc

SEQ ID NO: 471281 - DNA, 30 bp, Artificial Sequence
  Synthetic oligonucleotide
cactggcatttcggtcccatgttgcttgcc

SEQ ID NO: 471282 - DNA, 30 bp, Artificial Sequence
  Synthetic oligonucleotide
atggattttattagaggcttacttcttgcc

SEQ ID NO: 471283 - DNA, 30 bp, Artificial Sequence
  Synthetic oligonucleotide
tatcccgtggcatgcggaatatttcttgcc

SEQ ID NO: 471284 - DNA, 30 bp, Artificial Sequence
  Synthetic oligonucleotide
tctgctatgtaggttttttaatccgttgcc

SEQ ID NO: 471285 - DNA, 30 bp, Artificial Sequence
  Synthetic oligonucleotide
ggcacggaattggtcccaatgattgttgcc

SEQ ID NO: 471286 - DNA, 30 bp, Artificial Sequence
  Synthetic oligonucleotide
gaaaccgcccgggcgcgggttgaatttgcc

SEQ ID NO: 471287 - DNA, 30 bp, Artificial Sequence
  Synthetic oligonucleotide
tcaatttatttctggacggattgatttgcc

SEQ ID NO: 471288 - DNA, 30 bp, Artificial Sequence
  Synthetic oligonucleotide
atctgtcccgggtaaaatggaatatttgcc

SEQ ID NO: 471289 - DNA, 30 bp, Artificial Sequence
  Synthetic oligonucleotide
gtacagcgccagcagtttgccatctttgcc

SEQ ID NO: 471290 - DNA, 30 bp, Artificial Sequence
  Synthetic oligonucleotide
cttggcccgcgtaaggtcctgctctttgcc

SEQ ID NO: 471291 - DNA, 30 bp, Artificial Sequence
  Synthetic oligonucleotide
ctgtgacttaggtctagttgggagtttgcc

SEQ ID NO: 471292 - DNA, 30 bp, Artificial Sequence
  Synthetic oligonucleotide
atgcggtaggtgagtctgcagtcgtttgcc

SEQ ID NO: 471293 - DNA, 30 bp, Artificial Sequence
  Synthetic oligonucleotide
atctcttacgggatgctcgattggtttgcc

SEQ ID NO: 471294 - DNA, 30 bp, Artificial Sequence
  Synthetic oligonucleotide
ctgcaaatagcccatttgaggctgtttgcc

SEQ ID NO: 471295 - DNA, 30 bp, Artificial Sequence
  Synthetic oligonucleotide
cttgcggtttatctgctcatgctgtttgcc

SEQ ID NO: 471296 - DNA, 30 bp, Artificial Sequence
  Synthetic oligonucleotide
tcccgatgtgatctcacgatgtcaaaatcc

SEQ ID NO: 471297 - DNA, 30 bp, Artificial Sequence
  Synthetic oligonucleotide
ttcgtgatgctgacaggtattcgaaaatcc

SEQ ID NO: 471298 - DNA, 30 bp, Artificial Sequence
  Synthetic oligonucleotide
aaagctggtttttgtcgctgagccaaatcc

SEQ ID NO: 471299 - DNA, 30 bp, Artificial Sequence
  Synthetic oligonucleotide
gctgccgtttaacagctgctgtagaaatcc

SEQ ID NO: 471300 - DNA, 30 bp, Artificial Sequence
  Synthetic oligonucleotide
ttctcagtatctggtgttgaggcgaaatcc

SEQ ID NO: 471301 - DNA, 30 bp, Artificial Sequence
  Synthetic oligonucleotide
atcaccatgggtattgtactatataaatcc

SEQ ID NO: 471302 - DNA, 30 bp, Artificial Sequence
  Synthetic oligonucleotide
ccttaggatgtggggcacttcacacaatcc

SEQ ID NO: 471303 - DNA, 30 bp, Artificial Sequence
  Synthetic oligonucleotide
aaagtacagctagggaggttctcccaatcc

SEQ ID NO: 471304 - DNA, 30 bp, Artificial Sequence
  Synthetic oligonucleotide
cttagatgctacgttcttctgacgcaatcc

SEQ ID NO: 471305 - DNA, 30 bp, Artificial Sequence
  Synthetic oligonucleotide
attgctcacggttgggtgaggattcaatcc

SEQ ID NO: 471306 - DNA, 30 bp, Artificial Sequence
  Synthetic oligonucleotide
tatcagcgccagcaatactgaacagaatcc

SEQ ID NO: 471307 - DNA, 30 bp, Artificial Sequence
  Synthetic oligonucleotide
gatcaaaggttcgttgtgtgtccagaatcc

SEQ ID NO: 471308 - DNA, 30 bp, Artificial Sequence
  Synthetic oligonucleotide
caatagactttcactaacttttcagaatcc

SEQ ID NO: 471309 - DNA, 30 bp, Artificial Sequence
  Synthetic oligonucleotide
atccgtattaagaccttgtatttagaatcc

SEQ ID NO: 471310 - DNA, 30 bp, Artificial Sequence
  Synthetic oligonucleotide
cgcagggacagagcattcgctcacgaatcc

SEQ ID NO: 471311 - DNA, 30 bp, Artificial Sequence
  Synthetic oligonucleotide
atgatggccctcacgtttgcggaggaatcc

SEQ ID NO: 471312 - DNA, 30 bp, Artificial Sequence
  Synthetic oligonucleotide
tggcacacacttttaagggttaaataatcc

SEQ ID NO: 471313 - DNA, 30 bp, Artificial Sequence
  Synthetic oligonucleotide
agttcggctcaggcgtttcttcactaatcc

SEQ ID NO: 471314 - DNA, 30 bp, Artificial Sequence
  Synthetic oligonucleotide
attttgtagagccgtggcctgacctaatcc

SEQ ID NO: 471315 - DNA, 30 bp, Artificial Sequence
  Synthetic oligonucleotide
aaacatctatatatggtttaatcctaatcc

SEQ ID NO: 471316 - DNA, 30 bp, Artificial Sequence
  Synthetic oligonucleotide
atcttcgttcacagagtggacagctaatcc

SEQ ID NO: 471317 - DNA, 30 bp, Artificial Sequence
  Synthetic oligonucleotide
gctaccagttgatcgtttctgggctaatcc

SEQ ID NO: 471318 - DNA, 30 bp, Artificial Sequence
  Synthetic oligonucleotide
tatatagaacctcataaggtcctctaatcc

SEQ ID NO: 471319 - DNA, 30 bp, Artificial Sequence
  Synthetic oligonucleotide
tctacttctgttaaaacacgttcgtaatcc

SEQ ID NO: 471320 - DNA, 30 bp, Artificial Sequence
  Synthetic oligonucleotide
ttacgtgtttaatggtcttagcggtaatcc

SEQ ID NO: 471321 - DNA, 30 bp, Artificial Sequence
  Synthetic oligonucleotide
ttccgttcacgagccagggctatgtaatcc

SEQ ID NO: 471322 - DNA, 30 bp, Artificial Sequence
  Synthetic oligonucleotide
tagcgttataatgtcgagatgcattaatcc

SEQ ID NO: 471323 - DNA, 30 bp, Artificial Sequence
  Synthetic oligonucleotide
tgagtctacctcccataagggtattaatcc

SEQ ID NO: 471324 - DNA, 30 bp, Artificial Sequence
  Synthetic oligonucleotide
gaattataaaacagtacgtcaggttaatcc

SEQ ID NO: 471325 - DNA, 30 bp, Artificial Sequence
  Synthetic oligonucleotide
atccccgtctaggctttgaagggttaatcc

SEQ ID NO: 471326 - DNA, 30 bp, Artificial Sequence
  Synthetic oligonucleotide
atccatgtttgttaatagacgcgaacatcc

SEQ ID NO: 471327 - DNA, 30 bp, Artificial Sequence
  Synthetic oligonucleotide
attggaagcccttcacgcagctgaacatcc

SEQ ID NO: 471328 - DNA, 30 bp, Artificial Sequence
  Synthetic oligonucleotide
gttgattacctcgcagtaatgggcacatcc

SEQ ID NO: 471329 - DNA, 30 bp, Artificial Sequence
  Synthetic oligonucleotide
taaagctcgactggactcgacaggacatcc

SEQ ID NO: 471330 - DNA, 30 bp, Artificial Sequence
  Synthetic oligonucleotide
ttttacccttaattgctcatattgacatcc

SEQ ID NO: 471331 - DNA, 30 bp, Artificial Sequence
  Synthetic oligonucleotide
ccgtctcactatttccacagtgctacatcc

SEQ ID NO: 471332 - DNA, 30 bp, Artificial Sequence
  Synthetic oligonucleotide
ttccgctggatgccggcttcgagtacatcc

SEQ ID NO: 471333 - DNA, 30 bp, Artificial Sequence
  Synthetic oligonucleotide
gtttcacaatctggatatttctcgccatcc

SEQ ID NO: 471334 - DNA, 30 bp, Artificial Sequence
  Synthetic oligonucleotide
gtgcttctttattttaccagccatccatcc

SEQ ID NO: 471335 - DNA, 30 bp, Artificial Sequence
  Synthetic oligonucleotide
caatccacggagcagattcatagcgcatcc

SEQ ID NO: 471336 - DNA, 30 bp, Artificial Sequence
  Synthetic oligonucleotide
cgcctactaggtagtggatgcaatgcatcc

SEQ ID NO: 471337 - DNA, 30 bp, Artificial Sequence
  Synthetic oligonucleotide
caagcgcttgcaatactttacgatgcatcc

SEQ ID NO: 471338 - DNA, 30 bp, Artificial Sequence
  Synthetic oligonucleotide
ggtacacgtaacggcagcgagtgctcatcc

SEQ ID NO: 471339 - DNA, 30 bp, Artificial Sequence
  Synthetic oligonucleotide
ttgagacatgcattagttggatggtcatcc

SEQ ID NO: 471340 - DNA, 28 bp, Artificial Sequence
  Synthetic oligonucleotide
gattgcatttttgatcataggttcatcc

SEQ ID NO: 471341 - DNA, 30 bp, Artificial Sequence
  Synthetic oligonucleotide
ctaaaggtgttcccgctgcgtctttcatcc

SEQ ID NO: 471342 - DNA, 30 bp, Artificial Sequence
  Synthetic oligonucleotide
tttccttgactcgtgctgactttttcatcc

SEQ ID NO: 471343 - DNA, 30 bp, Artificial Sequence
  Synthetic oligonucleotide
gcatctcacactgggtttcattaaagatcc

SEQ ID NO: 471344 - DNA, 30 bp, Artificial Sequence
  Synthetic oligonucleotide
gagaagcggtactgtgttctctctagatcc

SEQ ID NO: 471345 - DNA, 30 bp, Artificial Sequence
  Synthetic oligonucleotide
ggaatatgctagtggtagaaccgtagatcc

SEQ ID NO: 471346 - DNA, 30 bp, Artificial Sequence
  Synthetic oligonucleotide
aagtccacgcatggcatcgggggtagatcc

SEQ ID NO: 471347 - DNA, 30 bp, Artificial Sequence
  Synthetic oligonucleotide
atacggtgaactcggcgtagggagcgatcc

SEQ ID NO: 471348 - DNA, 30 bp, Artificial Sequence
  Synthetic oligonucleotide
gtgaactttggaaggaatttcactcgatcc

SEQ ID NO: 471349 - DNA, 30 bp, Artificial Sequence
  Synthetic oligonucleotide
ggagttttggcgcttcagctctgtcgatcc

SEQ ID NO: 471350 - DNA, 30 bp, Artificial Sequence
  Synthetic oligonucleotide
tatattagtgtaagttcgggaacaggatcc

SEQ ID NO: 471351 - DNA, 30 bp, Artificial Sequence
  Synthetic oligonucleotide
ttttgctcccagggccgtcacgcaggatcc

SEQ ID NO: 471352 - DNA, 30 bp, Artificial Sequence
  Synthetic oligonucleotide
tactttgggcggtaagaattaagaggatcc

SEQ ID NO: 471353 - DNA, 30 bp, Artificial Sequence
  Synthetic oligonucleotide
tatatggctcccactcgctaacccggatcc

SEQ ID NO: 471354 - DNA, 26 bp, Artificial Sequence
  Synthetic oligonucleotide
gcccactaaggggcaagttcggatcc

SEQ ID NO: 471355 - DNA, 30 bp, Artificial Sequence
  Synthetic oligonucleotide
cagggcgccgcactgtcgaccctgtgatcc

SEQ ID NO: 471356 - DNA, 30 bp, Artificial Sequence
  Synthetic oligonucleotide
gcaccaagacgttaggatcactattgatcc

SEQ ID NO: 471357 - DNA, 30 bp, Artificial Sequence
  Synthetic oligonucleotide
gacttcagctgaacacagcccggttgatcc

SEQ ID NO: 471358 - DNA, 30 bp, Artificial Sequence
  Synthetic oligonucleotide
tctgcgcttgaaagccgtatgataatatcc

SEQ ID NO: 471359 - DNA, 30 bp, Artificial Sequence
  Synthetic oligonucleotide
tactggcgctttccggatttcctaatatcc

SEQ ID NO: 471360 - DNA, 30 bp, Artificial Sequence
  Synthetic oligonucleotide
gtgcgtcgtaactgctcgaccatcatatcc

SEQ ID NO: 471361 - DNA, 30 bp, Artificial Sequence
  Synthetic oligonucleotide
attttcttagcaataattttagtcatatcc

SEQ ID NO: 471362 - DNA, 30 bp, Artificial Sequence
  Synthetic oligonucleotide
cggggcaatggttcggatacggagatatcc

SEQ ID NO: 471363 - DNA, 30 bp, Artificial Sequence
  Synthetic oligonucleotide
accggcctctgcgggccggaggtgatatcc

SEQ ID NO: 471364 - DNA, 30 bp, Artificial Sequence
  Synthetic oligonucleotide
caatcggcgttcgtccgcaacagtatatcc

SEQ ID NO: 471365 - DNA, 30 bp, Artificial Sequence
  Synthetic oligonucleotide
atgagggcatctataataccgttcctatcc

SEQ ID NO: 471366 - DNA, 30 bp, Artificial Sequence
  Synthetic oligonucleotide
atagatatcatccgggctcagcggctatcc

SEQ ID NO: 471367 - DNA, 30 bp, Artificial Sequence
  Synthetic oligonucleotide
tcgttgtaaaagcggtcgcttgcagtatcc

SEQ ID NO: 471368 - DNA, 30 bp, Artificial Sequence
  Synthetic oligonucleotide
gttagaccgaatcccgtttccctagtatcc

SEQ ID NO: 471369 - DNA, 30 bp, Artificial Sequence
  Synthetic oligonucleotide
gaaaagccctaatttgcgcagtacgtatcc

SEQ ID NO: 471370 - DNA, 30 bp, Artificial Sequence
  Synthetic oligonucleotide
tcgatctatcgagggaagctgaaggtatcc

SEQ ID NO: 471371 - DNA, 30 bp, Artificial Sequence
  Synthetic oligonucleotide
gcataagctcacggcgatcagtaggtatcc

SEQ ID NO: 471372 - DNA, 30 bp, Artificial Sequence
  Synthetic oligonucleotide
ttccatgtacgctaaattgagggggtatcc

SEQ ID NO: 471373 - DNA, 30 bp, Artificial Sequence
  Synthetic oligonucleotide
tcctagtccctctctcaacggggggtatcc

SEQ ID NO: 471374 - DNA, 30 bp, Artificial Sequence
  Synthetic oligonucleotide
ccgtgggtaatgacattcagatgggtatcc

SEQ ID NO: 471375 - DNA, 30 bp, Artificial Sequence
  Synthetic oligonucleotide
cctgaagcgcaggagtacttcatcttatcc

SEQ ID NO: 471376 - DNA, 30 bp, Artificial Sequence
  Synthetic oligonucleotide
ggtgcggacggaaagctacgtgggttatcc

SEQ ID NO: 471377 - DNA, 30 bp, Artificial Sequence
  Synthetic oligonucleotide
taggttcaagcacgcgtcttgcatttatcc

SEQ ID NO: 471378 - DNA, 30 bp, Artificial Sequence
  Synthetic oligonucleotide
gaatagattgagctttcaggtcatttatcc

SEQ ID NO: 471379 - DNA, 30 bp, Artificial Sequence
  Synthetic oligonucleotide
gtcatgtgacgcgtgcccggtcatttatcc

SEQ ID NO: 471380 - DNA, 30 bp, Artificial Sequence
  Synthetic oligonucleotide
gggtgagccttgaggggctcagccaactcc

SEQ ID NO: 471381 - DNA, 30 bp, Artificial Sequence
  Synthetic oligonucleotide
agttccaccgtgataggtcagccgaactcc

SEQ ID NO: 471382 - DNA, 30 bp, Artificial Sequence
  Synthetic oligonucleotide
aaacttgcgttttgacatcttgcgaactcc

SEQ ID NO: 471383 - DNA, 30 bp, Artificial Sequence
  Synthetic oligonucleotide
gacgggccctgtgacgaatgtgctaactcc

SEQ ID NO: 471384 - DNA, 30 bp, Artificial Sequence
  Synthetic oligonucleotide
ttaaagtgaaacgtttggggtggtaactcc

SEQ ID NO: 471385 - DNA, 30 bp, Artificial Sequence
  Synthetic oligonucleotide
aagtatgtgcgacttcagaagggacactcc

SEQ ID NO: 471386 - DNA, 30 bp, Artificial Sequence
  Synthetic oligonucleotide
ggagagctagctccacggcctctacactcc

SEQ ID NO: 471387 - DNA, 30 bp, Artificial Sequence
  Synthetic oligonucleotide
tatctgctaccactattttatccgcactcc

SEQ ID NO: 471388 - DNA, 30 bp, Artificial Sequence
  Synthetic oligonucleotide
taaccttctcgcccatgcctcaggcactcc

SEQ ID NO: 471389 - DNA, 30 bp, Artificial Sequence
  Synthetic oligonucleotide
agtgtttccgtaccttggcagcatcactcc

SEQ ID NO: 471390 - DNA, 30 bp, Artificial Sequence
  Synthetic oligonucleotide
ttaccaattacatgtacttttcatcactcc

SEQ ID NO: 471391 - DNA, 30 bp, Artificial Sequence
  Synthetic oligonucleotide
cagagttcgtcacgcgttcctcgagactcc

SEQ ID NO: 471392 - DNA, 30 bp, Artificial Sequence
  Synthetic oligonucleotide
cgcccgcgaaaagtgctcaatttagactcc

SEQ ID NO: 471393 - DNA, 30 bp, Artificial Sequence
  Synthetic oligonucleotide
ataccccgagatcgaacgagctcggactcc

SEQ ID NO: 471394 - DNA, 30 bp, Artificial Sequence
  Synthetic oligonucleotide
ctgactttagtccaagagtcatctgactcc

SEQ ID NO: 471395 - DNA, 30 bp, Artificial Sequence
  Synthetic oligonucleotide
ccattagggtgggatcctaaacactactcc

SEQ ID NO: 471396 - DNA, 30 bp, Artificial Sequence
  Synthetic oligonucleotide
aggagtaatgtagagattacacgctactcc

SEQ ID NO: 471397 - DNA, 30 bp, Artificial Sequence
  Synthetic oligonucleotide
tgtagctctgtttgtcccctccgctactcc

SEQ ID NO: 471398 - DNA, 30 bp, Artificial Sequence
  Synthetic oligonucleotide
gaacccccaaacgcgggtgatgcgtactcc

SEQ ID NO: 471399 - DNA, 30 bp, Artificial Sequence
  Synthetic oligonucleotide
taggtcattaaattgttcgctgcgtactcc

SEQ ID NO: 471400 - DNA, 30 bp, Artificial Sequence
  Synthetic oligonucleotide
ccagcctagtggcaagttcccgggtactcc

SEQ ID NO: 471401 - DNA, 30 bp, Artificial Sequence
  Synthetic oligonucleotide
tattgagttgtgtattctttttggtactcc

SEQ ID NO: 471402 - DNA, 30 bp, Artificial Sequence
  Synthetic oligonucleotide
tctcttgatgtggatgcacgaatgtactcc

SEQ ID NO: 471403 - DNA, 30 bp, Artificial Sequence
  Synthetic oligonucleotide
cgcttgatcaccctagggaaggcaacctcc

SEQ ID NO: 471404 - DNA, 30 bp, Artificial Sequence
  Synthetic oligonucleotide
catgttgacgtgtaggtacatgctacctcc

SEQ ID NO: 471405 - DNA, 30 bp, Artificial Sequence
  Synthetic oligonucleotide
acctgtaccactacaaccacaacaccctcc

SEQ ID NO: 471406 - DNA, 30 bp, Artificial Sequence
  Synthetic oligonucleotide
ctaattccgtcgctgctccgaggaccctcc

SEQ ID NO: 471407 - DNA, 30 bp, Artificial Sequence
  Synthetic oligonucleotide
ttctgggaaaatcattgcagggtggcctcc

SEQ ID NO: 471408 - DNA, 30 bp, Artificial Sequence
  Synthetic oligonucleotide
aaaggacgcatcccccattacgcctcctcc

SEQ ID NO: 471409 - DNA, 30 bp, Artificial Sequence
  Synthetic oligonucleotide
tatctccctaatggaacaacggcttcctcc

SEQ ID NO: 471410 - DNA, 30 bp, Artificial Sequence
  Synthetic oligonucleotide
agcgatctctcttgacgatgcgcaagctcc

SEQ ID NO: 471411 - DNA, 30 bp, Artificial Sequence
  Synthetic oligonucleotide
gtatacgcaggataggccgcagagagctcc

SEQ ID NO: 471412 - DNA, 30 bp, Artificial Sequence
  Synthetic oligonucleotide
cagcaaaaacgccttcacatttggagctcc

SEQ ID NO: 471413 - DNA, 30 bp, Artificial Sequence
  Synthetic oligonucleotide
gagcgactaaactatcgttagtatagctcc

SEQ ID NO: 471414 - DNA, 30 bp, Artificial Sequence
  Synthetic oligonucleotide
gatactcctggtaggctgaagcgtagctcc

SEQ ID NO: 471415 - DNA, 30 bp, Artificial Sequence
  Synthetic oligonucleotide
gcaggtggtacgcttgacctagaacgctcc

SEQ ID NO: 471416 - DNA, 30 bp, Artificial Sequence
  Synthetic oligonucleotide
atatgccagcgtctggacgacatacgctcc

SEQ ID NO: 471417 - DNA, 30 bp, Artificial Sequence
  Synthetic oligonucleotide
accatagcctaagccaggtaattccgctcc

SEQ ID NO: 471418 - DNA, 30 bp, Artificial Sequence
  Synthetic oligonucleotide
atttaagagaggtttaatagctaaggctcc

SEQ ID NO: 471419 - DNA, 30 bp, Artificial Sequence
  Synthetic oligonucleotide
tgttcaattcgtctagatatacgcggctcc

SEQ ID NO: 471420 - DNA, 30 bp, Artificial Sequence
  Synthetic oligonucleotide
ggagatgctaacgctgtagtgcagggctcc

SEQ ID NO: 471421 - DNA, 30 bp, Artificial Sequence
  Synthetic oligonucleotide
gtgtatcttgcgattactagtgaatgctcc

SEQ ID NO: 471422 - DNA, 30 bp, Artificial Sequence
  Synthetic oligonucleotide
cttcagcggatgatgtaccacaagtgctcc

SEQ ID NO: 471423 - DNA, 30 bp, Artificial Sequence
  Synthetic oligonucleotide
tgttgttgtggtaatgccagcttaatctcc

SEQ ID NO: 471424 - DNA, 30 bp, Artificial Sequence
  Synthetic oligonucleotide
agaacttatactatcgtgtttttgatctcc

SEQ ID NO: 471425 - DNA, 30 bp, Artificial Sequence
  Synthetic oligonucleotide
acccaatctgctgtgctttgatgtatctcc

SEQ ID NO: 471426 - DNA, 30 bp, Artificial Sequence
  Synthetic oligonucleotide
tgtataacgcaaggggatagttttatctcc

SEQ ID NO: 471427 - DNA, 30 bp, Artificial Sequence
  Synthetic oligonucleotide
ccttaggccgtgagagttatttttatctcc

SEQ ID NO: 471428 - DNA, 30 bp, Artificial Sequence
  Synthetic oligonucleotide
acgtcctagatcttcgagatcgcagtctcc

SEQ ID NO: 471429 - DNA, 30 bp, Artificial Sequence
  Synthetic oligonucleotide
aacgacttgggaggcgcagtatgcgtctcc

SEQ ID NO: 471430 - DNA, 30 bp, Artificial Sequence
  Synthetic oligonucleotide
aactccgttggtggcaagatggaggtctcc

SEQ ID NO: 471431 - DNA, 30 bp, Artificial Sequence
  Synthetic oligonucleotide
ggggttggtaacgggggatagtacttctcc

SEQ ID NO: 471432 - DNA, 30 bp, Artificial Sequence
  Synthetic oligonucleotide
cgttggtatttcaggaagcgtctcttctcc

SEQ ID NO: 471433 - DNA, 30 bp, Artificial Sequence
  Synthetic oligonucleotide
aggctcacccttaggttctatcacaagtcc

SEQ ID NO: 471434 - DNA, 30 bp, Artificial Sequence
  Synthetic oligonucleotide
gtttggacgtcacgcctaccgcccaagtcc

SEQ ID NO: 471435 - DNA, 30 bp, Artificial Sequence
  Synthetic oligonucleotide
ctgcctattccggcgctagataataagtcc

SEQ ID NO: 471436 - DNA, 30 bp, Artificial Sequence
  Synthetic oligonucleotide
acttatgagcgatcaacgggttataagtcc

SEQ ID NO: 471437 - DNA, 30 bp, Artificial Sequence
  Synthetic oligonucleotide
gacaggcacgcggtgcccggctaacagtcc

SEQ ID NO: 471438 - DNA, 30 bp, Artificial Sequence
  Synthetic oligonucleotide
ggtaagtagctgcgctacgatctacagtcc

SEQ ID NO: 471439 - DNA, 30 bp, Artificial Sequence
  Synthetic oligonucleotide
ttgggtttgagctgcttcccggagcagtcc

SEQ ID NO: 471440 - DNA, 30 bp, Artificial Sequence
  Synthetic oligonucleotide
gcatggactgttatcctcggtcatcagtcc

SEQ ID NO: 471441 - DNA, 30 bp, Artificial Sequence
  Synthetic oligonucleotide
cagctttgtgcatgatgggcgactcagtcc

SEQ ID NO: 471442 - DNA, 30 bp, Artificial Sequence
  Synthetic oligonucleotide
atacatgtagtttcttgggcaagcgagtcc

SEQ ID NO: 471443 - DNA, 30 bp, Artificial Sequence
  Synthetic oligonucleotide
tactgtcttggtcggactttctgcgagtcc

SEQ ID NO: 471444 - DNA, 30 bp, Artificial Sequence
  Synthetic oligonucleotide
aaaaaagtttagttaagtattgaggagtcc

SEQ ID NO: 471445 - DNA, 30 bp, Artificial Sequence
  Synthetic oligonucleotide
tcaatgtcccagaagtggatcagggagtcc

SEQ ID NO: 471446 - DNA, 30 bp, Artificial Sequence
  Synthetic oligonucleotide
cgcactattctagcaggaacgcaatagtcc

SEQ ID NO: 471447 - DNA, 30 bp, Artificial Sequence
  Synthetic oligonucleotide
gtagtttataaaggccaacgataatagtcc

SEQ ID NO: 471448 - DNA, 30 bp, Artificial Sequence
  Synthetic oligonucleotide
agcgcagtgttaagacgaattttatagtcc

SEQ ID NO: 471449 - DNA, 30 bp, Artificial Sequence
  Synthetic oligonucleotide
ggaaacatgagagcactgtgcacttagtcc

SEQ ID NO: 471450 - DNA, 30 bp, Artificial Sequence
  Synthetic oligonucleotide
tccgttatacaatgttacatgccttagtcc

SEQ ID NO: 471451 - DNA, 30 bp, Artificial Sequence
  Synthetic oligonucleotide
ttccggcgggggatccgtcgaaaaacgtcc

SEQ ID NO: 471452 - DNA, 30 bp, Artificial Sequence
  Synthetic oligonucleotide
gcttcgtcctcagacggcagctggacgtcc

SEQ ID NO: 471453 - DNA, 30 bp, Artificial Sequence
  Synthetic oligonucleotide
cccagacaggaggtagtatggactacgtcc

SEQ ID NO: 471454 - DNA, 30 bp, Artificial Sequence
  Synthetic oligonucleotide
ttaaatttggacgaaataatatttacgtcc

SEQ ID NO: 471455 - DNA, 30 bp, Artificial Sequence
  Synthetic oligonucleotide
gccccttttgagacaagatcggggccgtcc

SEQ ID NO: 471456 - DNA, 30 bp, Artificial Sequence
  Synthetic oligonucleotide
actcgcacagggcccccagcaaaagcgtcc

SEQ ID NO: 471457 - DNA, 30 bp, Artificial Sequence
  Synthetic oligonucleotide
ctttaaggggtgaagggaggagacgcgtcc

SEQ ID NO: 471458 - DNA, 30 bp, Artificial Sequence
  Synthetic oligonucleotide
gatatgataccaagggactaaaaggcgtcc

SEQ ID NO: 471459 - DNA, 30 bp, Artificial Sequence
  Synthetic oligonucleotide
ccgcgcgtactagcgcagacatatgcgtcc

SEQ ID NO: 471460 - DNA, 30 bp, Artificial Sequence
  Synthetic oligonucleotide
atcttaagcatgaccggtctgtttgcgtcc

SEQ ID NO: 471461 - DNA, 30 bp, Artificial Sequence
  Synthetic oligonucleotide
gaaaatgcagggcttaacatgacatcgtcc

SEQ ID NO: 471462 - DNA, 30 bp, Artificial Sequence
  Synthetic oligonucleotide
tgtgaaatgtgcatcaggagtaagtcgtcc

SEQ ID NO: 471463 - DNA, 30 bp, Artificial Sequence
  Synthetic oligonucleotide
taaccataatcttgcacccagcggtcgtcc

SEQ ID NO: 471464 - DNA, 30 bp, Artificial Sequence
  Synthetic oligonucleotide
ggttcggattctgtcaccccttggtcgtcc

SEQ ID NO: 471465 - DNA, 30 bp, Artificial Sequence
  Synthetic oligonucleotide
ctgcgtgtaatcttatgcaatatgtcgtcc

SEQ ID NO: 471466 - DNA, 30 bp, Artificial Sequence
  Synthetic oligonucleotide
tcggggtagaggcccttaccgacttcgtcc

SEQ ID NO: 471467 - DNA, 30 bp, Artificial Sequence
  Synthetic oligonucleotide
taatcaagctagacgctataatgttcgtcc

SEQ ID NO: 471468 - DNA, 30 bp, Artificial Sequence
  Synthetic oligonucleotide
aagtgttctcttgcggttgattacaggtcc

SEQ ID NO: 471469 - DNA, 30 bp, Artificial Sequence
  Synthetic oligonucleotide
atcttcgaaacgggcagaggactcaggtcc

SEQ ID NO: 471470 - DNA, 30 bp, Artificial Sequence
  Synthetic oligonucleotide
gcctcacgcgagagcgtgtaccctaggtcc

SEQ ID NO: 471471 - DNA, 30 bp, Artificial Sequence
  Synthetic oligonucleotide
gtctatggcaaactatattacgttaggtcc

SEQ ID NO: 471472 - DNA, 30 bp, Artificial Sequence
  Synthetic oligonucleotide
cattacttaagccattgtgtggttaggtcc

SEQ ID NO: 471473 - DNA, 30 bp, Artificial Sequence
  Synthetic oligonucleotide
caaattccacgaggcggacgtggacggtcc

SEQ ID NO: 471474 - DNA, 30 bp, Artificial Sequence
  Synthetic oligonucleotide
cactaagatttcccgtcacatgctcggtcc

SEQ ID NO: 471475 - DNA, 30 bp, Artificial Sequence
  Synthetic oligonucleotide
catcgaccggtcacgccagagcacgggtcc

SEQ ID NO: 471476 - DNA, 30 bp, Artificial Sequence
  Synthetic oligonucleotide
tttcgcagtgcctttcgacgatgggggtcc

SEQ ID NO: 471477 - DNA, 30 bp, Artificial Sequence
  Synthetic oligonucleotide
agagatgtattttatcgccgcaatgggtcc

SEQ ID NO: 471478 - DNA, 30 bp, Artificial Sequence
  Synthetic oligonucleotide
acaacggtgtatcattacctcagtgggtcc

SEQ ID NO: 471479 - DNA, 30 bp, Artificial Sequence
  Synthetic oligonucleotide
tattcctacgacctgtgtgtaacatggtcc

SEQ ID NO: 471480 - DNA, 30 bp, Artificial Sequence
  Synthetic oligonucleotide
atcagctcagcgcaactgcactgatggtcc

SEQ ID NO: 471481 - DNA, 30 bp, Artificial Sequence
  Synthetic oligonucleotide
agatagctatgccgatgtatgctgtggtcc

SEQ ID NO: 471482 - DNA, 30 bp, Artificial Sequence
  Synthetic oligonucleotide
tagccaggttgcctcggaacgtgaatgtcc

SEQ ID NO: 471483 - DNA, 30 bp, Artificial Sequence
  Synthetic oligonucleotide
cttggtgtggtgactgaggacaccatgtcc

SEQ ID NO: 471484 - DNA, 30 bp, Artificial Sequence
  Synthetic oligonucleotide
gatcacagctagaactttgagaagatgtcc

SEQ ID NO: 471485 - DNA, 30 bp, Artificial Sequence
  Synthetic oligonucleotide
gttctaatattatggttactagcgatgtcc

SEQ ID NO: 471486 - DNA, 30 bp, Artificial Sequence
  Synthetic oligonucleotide
atgcccggttcctcaggtacttacctgtcc

SEQ ID NO: 471487 - DNA, 30 bp, Artificial Sequence
  Synthetic oligonucleotide
atacgggagggccaggcaccgggtctgtcc

SEQ ID NO: 471488 - DNA, 30 bp, Artificial Sequence
  Synthetic oligonucleotide
attccctgtcacttgtctagactagtgtcc

SEQ ID NO: 471489 - DNA, 30 bp, Artificial Sequence
  Synthetic oligonucleotide
ttaggtggattcctctagggccgcgtgtcc

SEQ ID NO: 471490 - DNA, 30 bp, Artificial Sequence
  Synthetic oligonucleotide
tagagcccgctggacgccctcgatgtgtcc

SEQ ID NO: 471491 - DNA, 30 bp, Artificial Sequence
  Synthetic oligonucleotide
atattattagaatttagtaggtaattgtcc

SEQ ID NO: 471492 - DNA, 30 bp, Artificial Sequence
  Synthetic oligonucleotide
acagcatcgaccaatctggggtaattgtcc

SEQ ID NO: 471493 - DNA, 30 bp, Artificial Sequence
  Synthetic oligonucleotide
catcattaagaaataatttctggattgtcc

SEQ ID NO: 471494 - DNA, 30 bp, Artificial Sequence
  Synthetic oligonucleotide
taacgtaacaaggcaggtggactcttgtcc

SEQ ID NO: 471495 - DNA, 30 bp, Artificial Sequence
  Synthetic oligonucleotide
gggggagggggctaataggcgttcttgtcc

SEQ ID NO: 471496 - DNA, 30 bp, Artificial Sequence
  Synthetic oligonucleotide
agaatttcaactctgtgccttttgttgtcc

SEQ ID NO: 471497 - DNA, 30 bp, Artificial Sequence
  Synthetic oligonucleotide
gtcaacagataatttccgactattttgtcc

SEQ ID NO: 471498 - DNA, 30 bp, Artificial Sequence
  Synthetic oligonucleotide
agatgagtcggctaacagttcttaaattcc

SEQ ID NO: 471499 - DNA, 30 bp, Artificial Sequence
  Synthetic oligonucleotide
tagttcactatcggcacaactctcaattcc

SEQ ID NO: 471500 - DNA, 30 bp, Artificial Sequence
  Synthetic oligonucleotide
attccggaattaaaataaattgtcaattcc

SEQ ID NO: 471501 - DNA, 30 bp, Artificial Sequence
  Synthetic oligonucleotide
attgaggctagtggtacgattcataattcc

SEQ ID NO: 471502 - DNA, 30 bp, Artificial Sequence
  Synthetic oligonucleotide
ggtggtgatgagaatgtctcagctaattcc

SEQ ID NO: 471503 - DNA, 30 bp, Artificial Sequence
  Synthetic oligonucleotide
ctttgactctctcctaaagtcggtaattcc

SEQ ID NO: 471504 - DNA, 30 bp, Artificial Sequence
  Synthetic oligonucleotide
cgatgccgggtcctttgattgtttaattcc

SEQ ID NO: 471505 - DNA, 30 bp, Artificial Sequence
  Synthetic oligonucleotide
ctcttcttcgagtcagctaatccccattcc

SEQ ID NO: 471506 - DNA, 31 bp, Artificial Sequence
  Synthetic oligonucleotide
gcccatgaggtctaactgatgccgccattcc

SEQ ID NO: 471507 - DNA, 30 bp, Artificial Sequence
  Synthetic oligonucleotide
atttgaagatggcccgaatccaagcattcc

SEQ ID NO: 471508 - DNA, 30 bp, Artificial Sequence
  Synthetic oligonucleotide
ccgcttgaagccgagcctggcacgcattcc

SEQ ID NO: 471509 - DNA, 30 bp, Artificial Sequence
  Synthetic oligonucleotide
catctgtggttggccttaatggggcattcc

SEQ ID NO: 471510 - DNA, 30 bp, Artificial Sequence
  Synthetic oligonucleotide
agttgggcccataccctctatttagattcc

SEQ ID NO: 471511 - DNA, 30 bp, Artificial Sequence
  Synthetic oligonucleotide
tatgcacccgctaagtaggactacgattcc

SEQ ID NO: 471512 - DNA, 30 bp, Artificial Sequence
  Synthetic oligonucleotide
cgttgcagaacactatgcagagatgattcc

SEQ ID NO: 471513 - DNA, 30 bp, Artificial Sequence
  Synthetic oligonucleotide
taaagttccggcggctcaatcgaatattcc

SEQ ID NO: 471514 - DNA, 30 bp, Artificial Sequence
  Synthetic oligonucleotide
atagtggcacgttcggctcatctctattcc

SEQ ID NO: 471515 - DNA, 30 bp, Artificial Sequence
  Synthetic oligonucleotide
gttcgcaggcaccttatcatagtctattcc

SEQ ID NO: 471516 - DNA, 30 bp, Artificial Sequence
  Synthetic oligonucleotide
ggtcggatttcggcaacgagtgtctattcc

SEQ ID NO: 471517 - DNA, 30 bp, Artificial Sequence
  Synthetic oligonucleotide
gcggtcgcttaatgacaggtaaagtattcc

SEQ ID NO: 471518 - DNA, 30 bp, Artificial Sequence
  Synthetic oligonucleotide
aaatcattgattctaagtgcactgtattcc

SEQ ID NO: 471519 - DNA, 30 bp, Artificial Sequence
  Synthetic oligonucleotide
gtgcgtgataatttaccagggggttattcc

SEQ ID NO: 471520 - DNA, 30 bp, Artificial Sequence
  Synthetic oligonucleotide
atgacgcttgaaagggtggacctttattcc

SEQ ID NO: 471521 - DNA, 30 bp, Artificial Sequence
  Synthetic oligonucleotide
tcacacaaaatgtgtaacaatttttattcc

SEQ ID NO: 471522 - DNA, 30 bp, Artificial Sequence
  Synthetic oligonucleotide
taaagaagttgatggtttcgaagcacttcc

SEQ ID NO: 471523 - DNA, 30 bp, Artificial Sequence
  Synthetic oligonucleotide
cgcttcatatacgtgctacggtgcacttcc

SEQ ID NO: 471524 - DNA, 30 bp, Artificial Sequence
  Synthetic oligonucleotide
ggttgacgagcttgcgtgggggagacttcc

SEQ ID NO: 471525 - DNA, 30 bp, Artificial Sequence
  Synthetic oligonucleotide
ggcccgtcccagatgcatctggagacttcc

SEQ ID NO: 471526 - DNA, 30 bp, Artificial Sequence
  Synthetic oligonucleotide
gttattcttttgtacaacccgtttacttcc

SEQ ID NO: 471527 - DNA, 30 bp, Artificial Sequence
  Synthetic oligonucleotide
gctacaagctcattcaaattttcaccttcc

SEQ ID NO: 471528 - DNA, 30 bp, Artificial Sequence
  Synthetic oligonucleotide
tgttgaatttggggtccggctagaccttcc

SEQ ID NO: 471529 - DNA, 30 bp, Artificial Sequence
  Synthetic oligonucleotide
aaatagcatgtccctgatctgttaccttcc

SEQ ID NO: 471530 - DNA, 30 bp, Artificial Sequence
  Synthetic oligonucleotide
ggtcaccatagtgtagtttacgtgccttcc

SEQ ID NO: 471531 - DNA, 30 bp, Artificial Sequence
  Synthetic oligonucleotide
tgagtaggcgctgagggataaagtccttcc

SEQ ID NO: 471532 - DNA, 30 bp, Artificial Sequence
  Synthetic oligonucleotide
tgggatgataggacaggttgcccagcttcc

SEQ ID NO: 471533 - DNA, 30 bp, Artificial Sequence
  Synthetic oligonucleotide
acacattactataagcgcacttaggcttcc

SEQ ID NO: 471534 - DNA, 30 bp, Artificial Sequence
  Synthetic oligonucleotide
accatcttagtatatatgctaccggcttcc

SEQ ID NO: 471535 - DNA, 30 bp, Artificial Sequence
  Synthetic oligonucleotide
aagccggctgcagtaaacagtagggcttcc

SEQ ID NO: 471536 - DNA, 30 bp, Artificial Sequence
  Synthetic oligonucleotide
agagcttactattttaatactgtggcttcc

SEQ ID NO: 471537 - DNA, 30 bp, Artificial Sequence
  Synthetic oligonucleotide
atcagagaagtatttcagctcgcatcttcc

SEQ ID NO: 471538 - DNA, 30 bp, Artificial Sequence
  Synthetic oligonucleotide
aagtcttcgcctagttggcccagatcttcc

SEQ ID NO: 471539 - DNA, 30 bp, Artificial Sequence
  Synthetic oligonucleotide
tcgggaacataggtgcagccgagatcttcc

SEQ ID NO: 471540 - DNA, 30 bp, Artificial Sequence
  Synthetic oligonucleotide
gctggtcgacgcacgcaaggttgatcttcc

SEQ ID NO: 471541 - DNA, 30 bp, Artificial Sequence
  Synthetic oligonucleotide
cctaagtggcggtgcacaccgctatcttcc

SEQ ID NO: 471542 - DNA, 30 bp, Artificial Sequence
  Synthetic oligonucleotide
ccattgaataaactgtgggtacgctcttcc

SEQ ID NO: 471543 - DNA, 30 bp, Artificial Sequence
  Synthetic oligonucleotide
agcgactctaagcgtagcacacagtcttcc

SEQ ID NO: 471544 - DNA, 30 bp, Artificial Sequence
  Synthetic oligonucleotide
ttagcgccagggttgatattttcaagttcc

SEQ ID NO: 471545 - DNA, 30 bp, Artificial Sequence
  Synthetic oligonucleotide
tttgcttccgcttgacgtatgtacagttcc

SEQ ID NO: 471546 - DNA, 30 bp, Artificial Sequence
  Synthetic oligonucleotide
gcattattatcaggagacaaacgtagttcc

SEQ ID NO: 471547 - DNA, 30 bp, Artificial Sequence
  Synthetic oligonucleotide
cagctcagtcttcatgcagaaggtagttcc

SEQ ID NO: 471548 - DNA, 30 bp, Artificial Sequence
  Synthetic oligonucleotide
gaaatacgacttcgatcacgaggtagttcc

SEQ ID NO: 471549 - DNA, 29 bp, Artificial Sequence
  Synthetic oligonucleotide
aacgctgggatacgtccagactacgttcc

SEQ ID NO: 471550 - DNA, 30 bp, Artificial Sequence
  Synthetic oligonucleotide
aaaaaagagaagattaataggtctcgttcc

SEQ ID NO: 471551 - DNA, 30 bp, Artificial Sequence
  Synthetic oligonucleotide
cccaacagtattctgtcaaagattcgttcc

SEQ ID NO: 471552 - DNA, 30 bp, Artificial Sequence
  Synthetic oligonucleotide
ttacctttcggtataaatacaaaaggttcc

SEQ ID NO: 471553 - DNA, 30 bp, Artificial Sequence
  Synthetic oligonucleotide
aataatgactcgtatcaataaggtggttcc

SEQ ID NO: 471554 - DNA, 30 bp, Artificial Sequence
  Synthetic oligonucleotide
aagctggacaccagattatgcggtggttcc

SEQ ID NO: 471555 - DNA, 30 bp, Artificial Sequence
  Synthetic oligonucleotide
aaatagatcgttggctacctgtactgttcc

SEQ ID NO: 471556 - DNA, 30 bp, Artificial Sequence
  Synthetic oligonucleotide
aaaaatggtcaagaatatattatctgttcc

SEQ ID NO: 471557 - DNA, 30 bp, Artificial Sequence
  Synthetic oligonucleotide
gtgtgatattctcacatcgatgtgtgttcc

SEQ ID NO: 471558 - DNA, 30 bp, Artificial Sequence
  Synthetic oligonucleotide
aggtttagacccgttaatggtatttgttcc

SEQ ID NO: 471559 - DNA, 30 bp, Artificial Sequence
  Synthetic oligonucleotide
acttaaatttattaaaagcgcaaaatttcc

SEQ ID NO: 471560 - DNA, 30 bp, Artificial Sequence
  Synthetic oligonucleotide
aaaggtctacggttctccttgaaaatttcc

SEQ ID NO: 471561 - DNA, 30 bp, Artificial Sequence
  Synthetic oligonucleotide
ggttgcagcagaagcacgtccataatttcc

SEQ ID NO: 471562 - DNA, 30 bp, Artificial Sequence
  Synthetic oligonucleotide
tttacgtgctttatccctggtcacatttcc

SEQ ID NO: 471563 - DNA, 30 bp, Artificial Sequence
  Synthetic oligonucleotide
gaacgcaacaccatacgggtttacatttcc

SEQ ID NO: 471564 - DNA, 30 bp, Artificial Sequence
  Synthetic oligonucleotide
aactcgaaggtcaacttgaaaatcatttcc

SEQ ID NO: 471565 - DNA, 30 bp, Artificial Sequence
  Synthetic oligonucleotide
gctagtagaataccgcaacgaacgatttcc

SEQ ID NO: 471566 - DNA, 30 bp, Artificial Sequence
  Synthetic oligonucleotide
atgttcattagttttggcgtctcgatttcc

SEQ ID NO: 471567 - DNA, 30 bp, Artificial Sequence
  Synthetic oligonucleotide
gctacatatgtacctgtagcccatatttcc

SEQ ID NO: 471568 - DNA, 30 bp, Artificial Sequence
  Synthetic oligonucleotide
tcagcagtaccacgtacagggtctatttcc

SEQ ID NO: 471569 - DNA, 30 bp, Artificial Sequence
  Synthetic oligonucleotide
gtaagatagaaatctggggcccgtatttcc

SEQ ID NO: 471570 - DNA, 30 bp, Artificial Sequence
  Synthetic oligonucleotide
gaggtaaatgaaatgagaagttttatttcc

SEQ ID NO: 471571 - DNA, 31 bp, Artificial Sequence
  Synthetic oligonucleotide
acaggcgcagcatgatatgcgtcaactttcc

SEQ ID NO: 471572 - DNA, 30 bp, Artificial Sequence
  Synthetic oligonucleotide
gctcccggcggatatttcttcaacctttcc

SEQ ID NO: 471573 - DNA, 30 bp, Artificial Sequence
  Synthetic oligonucleotide
gagaagataagtgctccttgtgccctttcc

SEQ ID NO: 471574 - DNA, 30 bp, Artificial Sequence
  Synthetic oligonucleotide
caactatagggttacggtaagctcctttcc

SEQ ID NO: 471575 - DNA, 30 bp, Artificial Sequence
  Synthetic oligonucleotide
agcgccgcttgcggcagtatcaggctttcc

SEQ ID NO: 471576 - DNA, 30 bp, Artificial Sequence
  Synthetic oligonucleotide
ctgctgacatttcgatagcaggaagtttcc

SEQ ID NO: 471577 - DNA, 30 bp, Artificial Sequence
  Synthetic oligonucleotide
gtcgtcatactggaggaacattaagtttcc

SEQ ID NO: 471578 - DNA, 30 bp, Artificial Sequence
  Synthetic oligonucleotide
ctcgtatatacgtggccacgtagagtttcc

SEQ ID NO: 471579 - DNA, 30 bp, Artificial Sequence
  Synthetic oligonucleotide
gaagccaggattcacctggagaaggtttcc

SEQ ID NO: 471580 - DNA, 30 bp, Artificial Sequence
  Synthetic oligonucleotide
cggatttttgcgacatgatggtatgtttcc

SEQ ID NO: 471581 - DNA, 30 bp, Artificial Sequence
  Synthetic oligonucleotide
tgcggttaacaactagttaaaccattttcc

SEQ ID NO: 471582 - DNA, 30 bp, Artificial Sequence
  Synthetic oligonucleotide
gtggaatcgtcgtacaatcgaagattttcc

SEQ ID NO: 471583 - DNA, 30 bp, Artificial Sequence
  Synthetic oligonucleotide
agaggaagagcccggtatagctgattttcc

SEQ ID NO: 471584 - DNA, 30 bp, Artificial Sequence
  Synthetic oligonucleotide
tttctacgagtggcgagaaccttcttttcc

SEQ ID NO: 471585 - DNA, 30 bp, Artificial Sequence
  Synthetic oligonucleotide
gcatcggtcaacttcgtgtaatagttttcc

SEQ ID NO: 471586 - DNA, 40 bp, Artificial Sequence
  Synthetic oligonucleotide
atgaatattagatcgaggcaagcttttaataaggttttcc

SEQ ID NO: 471587 - DNA, 30 bp, Artificial Sequence
  Synthetic oligonucleotide
atattttcacataggaaatatggaaaaagc

SEQ ID NO: 471588 - DNA, 30 bp, Artificial Sequence
  Synthetic oligonucleotide
cttccgtccttgccccctaacttaaaaagc

SEQ ID NO: 471589 - DNA, 30 bp, Artificial Sequence
  Synthetic oligonucleotide
atgtgacccttaggagtttatgacaaaagc

SEQ ID NO: 471590 - DNA, 30 bp, Artificial Sequence
  Synthetic oligonucleotide
tactccactatggggcggcggcccaaaagc

SEQ ID NO: 471591 - DNA, 30 bp, Artificial Sequence
  Synthetic oligonucleotide
aacttctaatggatgtggaggcagaaaagc

SEQ ID NO: 471592 - DNA, 30 bp, Artificial Sequence
  Synthetic oligonucleotide
aactactggattttcagaaagaggaaaagc

SEQ ID NO: 471593 - DNA, 30 bp, Artificial Sequence
  Synthetic oligonucleotide
ccatagggccagtagcacgcgctgaaaagc

SEQ ID NO: 471594 - DNA, 30 bp, Artificial Sequence
  Synthetic oligonucleotide
ggccgctgactatttatagtcgctaaaagc

SEQ ID NO: 471595 - DNA, 30 bp, Artificial Sequence
  Synthetic oligonucleotide
taggttggtgcgatatctttgttacaaagc

SEQ ID NO: 471596 - DNA, 30 bp, Artificial Sequence
  Synthetic oligonucleotide
ggttttgcgcccggacttatataccaaagc

SEQ ID NO: 471597 - DNA, 30 bp, Artificial Sequence
  Synthetic oligonucleotide
tagcattcttcatacagtgtagtccaaagc

SEQ ID NO: 471598 - DNA, 30 bp, Artificial Sequence
  Synthetic oligonucleotide
aatccagattttacctgtttgttgcaaagc

SEQ ID NO: 471599 - DNA, 30 bp, Artificial Sequence
  Synthetic oligonucleotide
gcagcatagtgtgaatcggagaatcaaagc

SEQ ID NO: 471600 - DNA, 30 bp, Artificial Sequence
  Synthetic oligonucleotide
ttgtgattatttcgtccactgaatcaaagc

SEQ ID NO: 471601 - DNA, 30 bp, Artificial Sequence
  Synthetic oligonucleotide
aacgatttgtgactggagggcccagaaagc

SEQ ID NO: 471602 - DNA, 30 bp, Artificial Sequence
  Synthetic oligonucleotide
aatcaaccggggcggcttcatatagaaagc

SEQ ID NO: 471603 - DNA, 30 bp, Artificial Sequence
  Synthetic oligonucleotide
agtgcaggttcgcggtaggtgaacgaaagc

SEQ ID NO: 471604 - DNA, 30 bp, Artificial Sequence
  Synthetic oligonucleotide
gttcatttaacgagtagccttatggaaagc

SEQ ID NO: 471605 - DNA, 30 bp, Artificial Sequence
  Synthetic oligonucleotide
attaactcaagggttttattaactgaaagc

SEQ ID NO: 471606 - DNA, 30 bp, Artificial Sequence
  Synthetic oligonucleotide
ctaatcctggaactcgagtcagctgaaagc

SEQ ID NO: 471607 - DNA, 30 bp, Artificial Sequence
  Synthetic oligonucleotide
gaatgtcttaacagcccgcctgttgaaagc

SEQ ID NO: 471608 - DNA, 30 bp, Artificial Sequence
  Synthetic oligonucleotide
gctcgtaacacgatgggagtgttataaagc

SEQ ID NO: 471609 - DNA, 30 bp, Artificial Sequence
  Synthetic oligonucleotide
ttaggcagaggagctacttatttctaaagc

SEQ ID NO: 471610 - DNA, 30 bp, Artificial Sequence
  Synthetic oligonucleotide
ccgccgacagtttgtccggctgtgtaaagc

SEQ ID NO: 471611 - DNA, 30 bp, Artificial Sequence
  Synthetic oligonucleotide
cagcagatatactgatgacgtttgtaaagc

SEQ ID NO: 471612 - DNA, 29 bp, Artificial Sequence
  Synthetic oligonucleotide
atttaaatcagtacaaatcccattaaagc

SEQ ID NO: 471613 - DNA, 30 bp, Artificial Sequence
  Synthetic oligonucleotide
ccggcagacttgtaaactagaacttaaagc

SEQ ID NO: 471614 - DNA, 30 bp, Artificial Sequence
  Synthetic oligonucleotide
acgattcaggacacagagcagctaacaagc

SEQ ID NO: 471615 - DNA, 30 bp, Artificial Sequence
  Synthetic oligonucleotide
aaagtcgcactcgatgtgtcatacacaagc

SEQ ID NO: 471616 - DNA, 30 bp, Artificial Sequence
  Synthetic oligonucleotide
gagttccctatgtttagtcgccagacaagc

SEQ ID NO: 471617 - DNA, 30 bp, Artificial Sequence
  Synthetic oligonucleotide
aaggagaggcgcagggcctgtacgacaagc

SEQ ID NO: 471618 - DNA, 30 bp, Artificial Sequence
  Synthetic oligonucleotide
agtcaggactcacgacgctggttgacaagc

SEQ ID NO: 471619 - DNA, 30 bp, Artificial Sequence
  Synthetic oligonucleotide
tatttattgccgcctttggcggatacaagc

SEQ ID NO: 471620 - DNA, 30 bp, Artificial Sequence
  Synthetic oligonucleotide
tatagtacaccaggagcgttgcacccaagc

SEQ ID NO: 471621 - DNA, 30 bp, Artificial Sequence
  Synthetic oligonucleotide
caggtgggagtaaccgtacagttcccaagc

SEQ ID NO: 471622 - DNA, 30 bp, Artificial Sequence
  Synthetic oligonucleotide
tctgtttgaagcagacgtattaggccaagc

SEQ ID NO: 471623 - DNA, 30 bp, Artificial Sequence
  Synthetic oligonucleotide
tatgcaactttcaagttgtatttagcaagc

SEQ ID NO: 471624 - DNA, 30 bp, Artificial Sequence
  Synthetic oligonucleotide
ttcttatgtgacagttcccgtgacgcaagc

SEQ ID NO: 471625 - DNA, 30 bp, Artificial Sequence
  Synthetic oligonucleotide
caagggtttgcggttcttcggaccgcaagc

SEQ ID NO: 471626 - DNA, 30 bp, Artificial Sequence
  Synthetic oligonucleotide
ttcctttggaacggccatgaggtcgcaagc

SEQ ID NO: 471627 - DNA, 30 bp, Artificial Sequence
  Synthetic oligonucleotide
ctcggccatgtcggagctgggacggcaagc

SEQ ID NO: 471628 - DNA, 30 bp, Artificial Sequence
  Synthetic oligonucleotide
ccccttgcgtggtgtttgagaaatgcaagc

SEQ ID NO: 471629 - DNA, 30 bp, Artificial Sequence
  Synthetic oligonucleotide
cgggttcttcatttcatcccctaatcaagc

SEQ ID NO: 471630 - DNA, 30 bp, Artificial Sequence
  Synthetic oligonucleotide
aagcagtggttgctgtggtacatatcaagc

SEQ ID NO: 471631 - DNA, 30 bp, Artificial Sequence
  Synthetic oligonucleotide
ggttaacgagcgtgtcaaatatactcaagc

SEQ ID NO: 471632 - DNA, 30 bp, Artificial Sequence
  Synthetic oligonucleotide
gacccattaaagtaacgcatttcgtcaagc

SEQ ID NO: 471633 - DNA, 30 bp, Artificial Sequence
  Synthetic oligonucleotide
attacaaattctacccgttgtaattcaagc

SEQ ID NO: 471634 - DNA, 30 bp, Artificial Sequence
  Synthetic oligonucleotide
agtgattttagaggcttggtcgcttcaagc

SEQ ID NO: 471635 - DNA, 30 bp, Artificial Sequence
  Synthetic oligonucleotide
gctgtcgtcagaagcttgacgggaagaagc

SEQ ID NO: 471636 - DNA, 30 bp, Artificial Sequence
  Synthetic oligonucleotide
caatttttatacaaagactcatacagaagc

SEQ ID NO: 471637 - DNA, 30 bp, Artificial Sequence
  Synthetic oligonucleotide
gtgcatcgtcagagtttttaagcgagaagc

SEQ ID NO: 471638 - DNA, 30 bp, Artificial Sequence
  Synthetic oligonucleotide
aggttatggctgccggaccggttgagaagc

SEQ ID NO: 471639 - DNA, 30 bp, Artificial Sequence
  Synthetic oligonucleotide
tttcagccctctgtggaaatatatagaagc

SEQ ID NO: 471640 - DNA, 30 bp, Artificial Sequence
  Synthetic oligonucleotide
ctgaaagaacagaccgcggaagctagaagc

SEQ ID NO: 471641 - DNA, 30 bp, Artificial Sequence
  Synthetic oligonucleotide
ataaaggtctgggaccctagtagtagaagc

SEQ ID NO: 471642 - DNA, 30 bp, Artificial Sequence
  Synthetic oligonucleotide
cgagcagggcgctaaacacagcttagaagc

SEQ ID NO: 471643 - DNA, 30 bp, Artificial Sequence
  Synthetic oligonucleotide
atcatcttgtctgtttcttggatacgaagc

SEQ ID NO: 471644 - DNA, 30 bp, Artificial Sequence
  Synthetic oligonucleotide
gggggcgcagaggttggacagggccgaagc

SEQ ID NO: 471645 - DNA, 30 bp, Artificial Sequence
  Synthetic oligonucleotide
tattcacgcttatagccacagtccggaagc

SEQ ID NO: 471646 - DNA, 30 bp, Artificial Sequence
  Synthetic oligonucleotide
gtttaagcgttactgaatttttgcggaagc

SEQ ID NO: 471647 - DNA, 30 bp, Artificial Sequence
  Synthetic oligonucleotide
actaggttgacggctataacagagggaagc

SEQ ID NO: 471648 - DNA, 30 bp, Artificial Sequence
  Synthetic oligonucleotide
cacagctaccgtcgattaatatctggaagc

SEQ ID NO: 471649 - DNA, 30 bp, Artificial Sequence
  Synthetic oligonucleotide
gtgtgtttgggggctccacttcaatgaagc

SEQ ID NO: 471650 - DNA, 30 bp, Artificial Sequence
  Synthetic oligonucleotide
cggcgaaggccccctccggtgggctgaagc

SEQ ID NO: 471651 - DNA, 30 bp, Artificial Sequence
  Synthetic oligonucleotide
tctagcgcacacagcagatcgcggtgaagc

SEQ ID NO: 471652 - DNA, 30 bp, Artificial Sequence
  Synthetic oligonucleotide
ttcaaggagatatgctcaacactgtgaagc

SEQ ID NO: 471653 - DNA, 30 bp, Artificial Sequence
  Synthetic oligonucleotide
aaattctggtggagaaacagatattgaagc

SEQ ID NO: 471654 - DNA, 30 bp, Artificial Sequence
  Synthetic oligonucleotide
gctttctacgagcgggtcctgcgttgaagc

SEQ ID NO: 471655 - DNA, 30 bp, Artificial Sequence
  Synthetic oligonucleotide
tactcccgtttgtcatgcgatcgttgaagc

SEQ ID NO: 471656 - DNA, 30 bp, Artificial Sequence
  Synthetic oligonucleotide
ttctgcagtaagtgtaggaagttaataagc

SEQ ID NO: 471657 - DNA, 30 bp, Artificial Sequence
  Synthetic oligonucleotide
cggtagtagatcctaatacacaacataagc

SEQ ID NO: 471658 - DNA, 30 bp, Artificial Sequence
  Synthetic oligonucleotide
gctaacttaatgaaggaaaaactcataagc

SEQ ID NO: 471659 - DNA, 30 bp, Artificial Sequence
  Synthetic oligonucleotide
atgcgctcagaatgcagattcgaactaagc

SEQ ID NO: 471660 - DNA, 30 bp, Artificial Sequence
  Synthetic oligonucleotide
tatgctcttgtaactgtttacgtactaagc

SEQ ID NO: 471661 - DNA, 30 bp, Artificial Sequence
  Synthetic oligonucleotide
atatgtttctcgtgtctggctatcctaagc

SEQ ID NO: 471662 - DNA, 30 bp, Artificial Sequence
  Synthetic oligonucleotide
agtgttggaaagcttgagcaggtcctaagc

SEQ ID NO: 471663 - DNA, 30 bp, Artificial Sequence
  Synthetic oligonucleotide
taactattcgtccccgtcttctatctaagc

SEQ ID NO: 471664 - DNA, 30 bp, Artificial Sequence
  Synthetic oligonucleotide
tatagatgattgaagcggatttaagtaagc

SEQ ID NO: 471665 - DNA, 30 bp, Artificial Sequence
  Synthetic oligonucleotide
tcctacaaagcctggacattgtccgtaagc

SEQ ID NO: 471666 - DNA, 30 bp, Artificial Sequence
  Synthetic oligonucleotide
actccacatcctcctactgttcgggtaagc

SEQ ID NO: 471667 - DNA, 30 bp, Artificial Sequence
  Synthetic oligonucleotide
tatgcatgacagtttatcagctatgtaagc

SEQ ID NO: 471668 - DNA, 30 bp, Artificial Sequence
  Synthetic oligonucleotide
gagttcctgatagacctaatgtctgtaagc

SEQ ID NO: 471669 - DNA, 30 bp, Artificial Sequence
  Synthetic oligonucleotide
gcaacacgcttctgtatgtgtcttgtaagc

SEQ ID NO: 471670 - DNA, 30 bp, Artificial Sequence
  Synthetic oligonucleotide
acttcgttccagcttctgaatttcttaagc

SEQ ID NO: 471671 - DNA, 30 bp, Artificial Sequence
  Synthetic oligonucleotide
gaggtgtagtacttggagcagacgttaagc

SEQ ID NO: 471672 - DNA, 30 bp, Artificial Sequence
  Synthetic oligonucleotide
tgtttataaagggggacctctacgttaagc

SEQ ID NO: 471673 - DNA, 30 bp, Artificial Sequence
  Synthetic oligonucleotide
taagcgtccgtatggacgacagatttaagc

SEQ ID NO: 471674 - DNA, 30 bp, Artificial Sequence
  Synthetic oligonucleotide
atgtcagatctcccagataatgatttaagc

SEQ ID NO: 471675 - DNA, 30 bp, Artificial Sequence
  Synthetic oligonucleotide
gaggcagcttgttatgcaaaatatttaagc

SEQ ID NO: 471676 - DNA, 30 bp, Artificial Sequence
  Synthetic oligonucleotide
gatatgaataacttgcagatctctttaagc

SEQ ID NO: 471677 - DNA, 30 bp, Artificial Sequence
  Synthetic oligonucleotide
gcccctgaattcatctcaaggggtttaagc

SEQ ID NO: 471678 - DNA, 30 bp, Artificial Sequence
  Synthetic oligonucleotide
ggtttggcatgttcgtacacggcaaacagc

SEQ ID NO: 471679 - DNA, 30 bp, Artificial Sequence
  Synthetic oligonucleotide
agttctaacagcatttcaccgtgaaacagc

SEQ ID NO: 471680 - DNA, 30 bp, Artificial Sequence
  Synthetic oligonucleotide
ttagtttaccttctcgacgaacgcaacagc

SEQ ID NO: 471681 - DNA, 30 bp, Artificial Sequence
  Synthetic oligonucleotide
atcaatcagcagacaatgttcatcaacagc

SEQ ID NO: 471682 - DNA, 30 bp, Artificial Sequence
  Synthetic oligonucleotide
gccggggtctattagcaaattaaccacagc

SEQ ID NO: 471683 - DNA, 30 bp, Artificial Sequence
  Synthetic oligonucleotide
ggagtagcgtgtctttccaagaagcacagc

SEQ ID NO: 471684 - DNA, 30 bp, Artificial Sequence
  Synthetic oligonucleotide
ttagggggccgcttataaaataggcacagc

SEQ ID NO: 471685 - DNA, 30 bp, Artificial Sequence
  Synthetic oligonucleotide
ggctatttgaacaaaatttagtggcacagc

SEQ ID NO: 471686 - DNA, 30 bp, Artificial Sequence
  Synthetic oligonucleotide
gtatacatcagacctctgggtgctcacagc

SEQ ID NO: 471687 - DNA, 30 bp, Artificial Sequence
  Synthetic oligonucleotide
ttttggatctccgccggcgtaacagacagc

SEQ ID NO: 471688 - DNA, 30 bp, Artificial Sequence
  Synthetic oligonucleotide
tacgtgtaggacgctttcgtcgtagacagc

SEQ ID NO: 471689 - DNA, 30 bp, Artificial Sequence
  Synthetic oligonucleotide
ggcagggcctccgcgagcgtaacggacagc

SEQ ID NO: 471690 - DNA, 30 bp, Artificial Sequence
  Synthetic oligonucleotide
gtccacgtcgagggacgccccttatacagc

SEQ ID NO: 471691 - DNA, 30 bp, Artificial Sequence
  Synthetic oligonucleotide
ggtcgctagcgtcacggagtagtctacagc

SEQ ID NO: 471692 - DNA, 30 bp, Artificial Sequence
  Synthetic oligonucleotide
aaatttagctccgctgattgcgtctacagc

SEQ ID NO: 471693 - DNA, 30 bp, Artificial Sequence
  Synthetic oligonucleotide
atatttgggaagagagcagatctttacagc

SEQ ID NO: 471694 - DNA, 30 bp, Artificial Sequence
  Synthetic oligonucleotide
ttacatcatctgcggagcctggtttacagc

SEQ ID NO: 471695 - DNA, 30 bp, Artificial Sequence
  Synthetic oligonucleotide
aggtagtcgacggttgtgataaacaccagc

SEQ ID NO: 471696 - DNA, 30 bp, Artificial Sequence
  Synthetic oligonucleotide
aaatctaatgattcatgggggcacaccagc

SEQ ID NO: 471697 - DNA, 30 bp, Artificial Sequence
  Synthetic oligonucleotide
tagttgcagatgtatcccccaaaccccagc

SEQ ID NO: 471698 - DNA, 30 bp, Artificial Sequence
  Synthetic oligonucleotide
accgggaagacacagcagagttggcccagc

SEQ ID NO: 471699 - DNA, 30 bp, Artificial Sequence
  Synthetic oligonucleotide
catccgaacgtagtacggcctacagccagc

SEQ ID NO: 471700 - DNA, 30 bp, Artificial Sequence
  Synthetic oligonucleotide
acaataacacaagccgccacaggagccagc

SEQ ID NO: 471701 - DNA, 30 bp, Artificial Sequence
  Synthetic oligonucleotide
ggtataaggggagtcggggcgccggccagc

SEQ ID NO: 471702 - DNA, 30 bp, Artificial Sequence
  Synthetic oligonucleotide
tggccaggtccgggatccttaagggccagc

SEQ ID NO: 471703 - DNA, 30 bp, Artificial Sequence
  Synthetic oligonucleotide
gaactagctggtacgtcgaaagctgccagc

SEQ ID NO: 471704 - DNA, 30 bp, Artificial Sequence
  Synthetic oligonucleotide
gagtctataggaataatatgccgtgccagc

SEQ ID NO: 471705 - DNA, 30 bp, Artificial Sequence
  Synthetic oligonucleotide
tccacgaagtccccaatttagaaatccagc

SEQ ID NO: 471706 - DNA, 30 bp, Artificial Sequence
  Synthetic oligonucleotide
ttggttgcaccatgtagaacatcctccagc

SEQ ID NO: 471707 - DNA, 30 bp, Artificial Sequence
  Synthetic oligonucleotide
ttcaatcccccttcgcctcagctgtccagc

SEQ ID NO: 471708 - DNA, 30 bp, Artificial Sequence
  Synthetic oligonucleotide
gccctttgaccgggtgaacgtttgtccagc

SEQ ID NO: 471709 - DNA, 30 bp, Artificial Sequence
  Synthetic oligonucleotide
gtttctgaccccagatatcatagaagcagc

SEQ ID NO: 471710 - DNA, 30 bp, Artificial Sequence
  Synthetic oligonucleotide
tccggatcaaaacatctcacccgcagcagc

SEQ ID NO: 471711 - DNA, 30 bp, Artificial Sequence
  Synthetic oligonucleotide
gatcgccgcgggggccactcgagacgcagc

SEQ ID NO: 471712 - DNA, 30 bp, Artificial Sequence
  Synthetic oligonucleotide
tgaagtgaacgtctaatatacagccgcagc

SEQ ID NO: 471713 - DNA, 30 bp, Artificial Sequence
  Synthetic oligonucleotide
gagtggaggggatctttacatagccgcagc

SEQ ID NO: 471714 - DNA, 30 bp, Artificial Sequence
  Synthetic oligonucleotide
actgttccggagagatttcagcgccgcagc

SEQ ID NO: 471715 - DNA, 30 bp, Artificial Sequence
  Synthetic oligonucleotide
gttccaactgcgacgcggagcaagcgcagc

SEQ ID NO: 471716 - DNA, 30 bp, Artificial Sequence
  Synthetic oligonucleotide
ttgagaagtatgtagcgctttaggcgcagc

SEQ ID NO: 471717 - DNA, 27 bp, Artificial Sequence
  Synthetic oligonucleotide
gggcgctgttccgcacgcactcgcagc

SEQ ID NO: 471718 - DNA, 30 bp, Artificial Sequence
  Synthetic oligonucleotide
aatttaaactgacataatgccagtcgcagc

SEQ ID NO: 471719 - DNA, 30 bp, Artificial Sequence
  Synthetic oligonucleotide
tagttttactgtagaccgtgtggcggcagc

SEQ ID NO: 471720 - DNA, 30 bp, Artificial Sequence
  Synthetic oligonucleotide
agaccagttttcgggttttgcatgggcagc

SEQ ID NO: 471721 - DNA, 30 bp, Artificial Sequence
  Synthetic oligonucleotide
tccttgtaaaatcgagccttacatggcagc

SEQ ID NO: 471722 - DNA, 30 bp, Artificial Sequence
  Synthetic oligonucleotide
tctaacgtgccctcagcagtctcatgcagc

SEQ ID NO: 471723 - DNA, 30 bp, Artificial Sequence
  Synthetic oligonucleotide
atgaaagatccttgggttgaacactgcagc

SEQ ID NO: 471724 - DNA, 30 bp, Artificial Sequence
  Synthetic oligonucleotide
aaaacttggggtcacacgattgactgcagc

SEQ ID NO: 471725 - DNA, 30 bp, Artificial Sequence
  Synthetic oligonucleotide
catgaccctacgtatgcaggactgtgcagc

SEQ ID NO: 471726 - DNA, 30 bp, Artificial Sequence
  Synthetic oligonucleotide
aagttgtagcatcaatgaggttacatcagc

SEQ ID NO: 471727 - DNA, 30 bp, Artificial Sequence
  Synthetic oligonucleotide
atgtttctatacctctttatgtctatcagc

SEQ ID NO: 471728 - DNA, 30 bp, Artificial Sequence
  Synthetic oligonucleotide
tgcctctattctcgaggctttttactcagc

SEQ ID NO: 471729 - DNA, 30 bp, Artificial Sequence
  Synthetic oligonucleotide
atccccactgctaggaacacggagctcagc

SEQ ID NO: 471730 - DNA, 30 bp, Artificial Sequence
  Synthetic oligonucleotide
gaaagcacgctgctctctcgtgagctcagc

SEQ ID NO: 471731 - DNA, 30 bp, Artificial Sequence
  Synthetic oligonucleotide
aaagaaatacctttgtgattaatagtcagc

SEQ ID NO: 471732 - DNA, 30 bp, Artificial Sequence
  Synthetic oligonucleotide
ggttttcggaccggtgaaatgaacgtcagc

SEQ ID NO: 471733 - DNA, 30 bp, Artificial Sequence
  Synthetic oligonucleotide
ttcaaactggcaccgaactttttcgtcagc

SEQ ID NO: 471734 - DNA, 30 bp, Artificial Sequence
  Synthetic oligonucleotide
caatactcaactgtggtttctactgtcagc

SEQ ID NO: 471735 - DNA, 30 bp, Artificial Sequence
  Synthetic oligonucleotide
ctaaggggctgtgcccatcggtcattcagc

SEQ ID NO: 471736 - DNA, 30 bp, Artificial Sequence
  Synthetic oligonucleotide
tatatttggtgatgttagtacatattcagc

SEQ ID NO: 471737 - DNA, 30 bp, Artificial Sequence
  Synthetic oligonucleotide
aacgttaggcatcagccacacttattcagc

SEQ ID NO: 471738 - DNA, 30 bp, Artificial Sequence
  Synthetic oligonucleotide
ttttctatgcaacgcatgcgtttcttcagc

SEQ ID NO: 471739 - DNA, 30 bp, Artificial Sequence
  Synthetic oligonucleotide
aagcgaacctggatgctagtcgcgttcagc

SEQ ID NO: 471740 - DNA, 30 bp, Artificial Sequence
  Synthetic oligonucleotide
ctcatttatgtaagttaacctctgttcagc

SEQ ID NO: 471741 - DNA, 30 bp, Artificial Sequence
  Synthetic oligonucleotide
atgcacggttctagtgttatcgctttcagc

SEQ ID NO: 471742 - DNA, 30 bp, Artificial Sequence
  Synthetic oligonucleotide
actttagttatacatcggatggctttcagc

SEQ ID NO: 471743 - DNA, 30 bp, Artificial Sequence
  Synthetic oligonucleotide
atcctggggcccccgaattcaattttcagc

SEQ ID NO: 471744 - DNA, 30 bp, Artificial Sequence
  Synthetic oligonucleotide
atctcgagcgttgttacgatctgcaagagc

SEQ ID NO: 471745 - DNA, 30 bp, Artificial Sequence
  Synthetic oligonucleotide
gtcggtaccttctgcgcgaggaagaagagc

SEQ ID NO: 471746 - DNA, 30 bp, Artificial Sequence
  Synthetic oligonucleotide
atcttattctacgtggggcaaccgaagagc

SEQ ID NO: 471747 - DNA, 30 bp, Artificial Sequence
  Synthetic oligonucleotide
tcagggcctgaaaagtagactggtaagagc

SEQ ID NO: 471748 - DNA, 30 bp, Artificial Sequence
  Synthetic oligonucleotide
ctgctgctcgataagcgtcgctatcagagc

SEQ ID NO: 471749 - DNA, 30 bp, Artificial Sequence
  Synthetic oligonucleotide
cttctaagcgcatctcatcctgtcgagagc

SEQ ID NO: 471750 - DNA, 30 bp, Artificial Sequence
  Synthetic oligonucleotide
gcaatccgcttttccctagaaaaggagagc

SEQ ID NO: 471751 - DNA, 30 bp, Artificial Sequence
  Synthetic oligonucleotide
gtccagctccgtaatctgtgcgaggagagc

SEQ ID NO: 471752 - DNA, 30 bp, Artificial Sequence
  Synthetic oligonucleotide
gggatttagggaggggcatgaagtgagagc

SEQ ID NO: 471753 - DNA, 30 bp, Artificial Sequence
  Synthetic oligonucleotide
gcgtccttgttctcgaccggttttgagagc

SEQ ID NO: 471754 - DNA, 30 bp, Artificial Sequence
  Synthetic oligonucleotide
ggtgctttacgccatgcctataagtagagc

SEQ ID NO: 471755 - DNA, 30 bp, Artificial Sequence
  Synthetic oligonucleotide
ggttacgtatgggctgaagttacgtagagc

SEQ ID NO: 471756 - DNA, 30 bp, Artificial Sequence
  Synthetic oligonucleotide
tcagacagccgggtctacttctcgtagagc

SEQ ID NO: 471757 - DNA, 30 bp, Artificial Sequence
  Synthetic oligonucleotide
agcggctgtggcgtagtggtaaggtagagc

SEQ ID NO: 471758 - DNA, 30 bp, Artificial Sequence
  Synthetic oligonucleotide
ctggaccctcgtgcaacctggtaaacgagc

SEQ ID NO: 471759 - DNA, 30 bp, Artificial Sequence
  Synthetic oligonucleotide
gtcataatgacgaacctaccaccgacgagc

SEQ ID NO: 471760 - DNA, 30 bp, Artificial Sequence
  Synthetic oligonucleotide
tttctcgatgcgtccgtggggctgacgagc

SEQ ID NO: 471761 - DNA, 30 bp, Artificial Sequence
  Synthetic oligonucleotide
gtgtggtgagatcgcagtctcgtgacgagc

SEQ ID NO: 471762 - DNA, 30 bp, Artificial Sequence
  Synthetic oligonucleotide
ggaaaaaccatatgtggacgacttacgagc

SEQ ID NO: 471763 - DNA, 30 bp, Artificial Sequence
  Synthetic oligonucleotide
aattgccctcgattatgctaatcaccgagc

SEQ ID NO: 471764 - DNA, 30 bp, Artificial Sequence
  Synthetic oligonucleotide
gccattaccgtcacagtagcttagccgagc

SEQ ID NO: 471765 - DNA, 30 bp, Artificial Sequence
  Synthetic oligonucleotide
tacgccaatattttagattggcgtccgagc

SEQ ID NO: 471766 - DNA, 30 bp, Artificial Sequence
  Synthetic oligonucleotide
gccactgcatcacggtacttttaagcgagc

SEQ ID NO: 471767 - DNA, 30 bp, Artificial Sequence
  Synthetic oligonucleotide
ctctctaaggctcagctgacctcagcgagc

SEQ ID NO: 471768 - DNA, 30 bp, Artificial Sequence
  Synthetic oligonucleotide
tgtggccgccttaggatggagaagtcgagc

SEQ ID NO: 471769 - DNA, 30 bp, Artificial Sequence
  Synthetic oligonucleotide
tgcccacgaccagagattatctagtcgagc

SEQ ID NO: 471770 - DNA, 30 bp, Artificial Sequence
  Synthetic oligonucleotide
tcactcgtcgttccatcgtgtacgtcgagc

SEQ ID NO: 471771 - DNA, 30 bp, Artificial Sequence
  Synthetic oligonucleotide
ggcaagctcttgtgacgtgggaaaaggagc

SEQ ID NO: 471772 - DNA, 30 bp, Artificial Sequence
  Synthetic oligonucleotide
ccgcgagtttccggttcgttcggaaggagc

SEQ ID NO: 471773 - DNA, 30 bp, Artificial Sequence
  Synthetic oligonucleotide
atttaccttgtgcaccctaggctaaggagc

SEQ ID NO: 471774 - DNA, 30 bp, Artificial Sequence
  Synthetic oligonucleotide
ttaacactcaacgtagtcacggtaaggagc

SEQ ID NO: 471775 - DNA, 30 bp, Artificial Sequence
  Synthetic oligonucleotide
ctaaagtcgaaatacacttcatacaggagc

SEQ ID NO: 471776 - DNA, 30 bp, Artificial Sequence
  Synthetic oligonucleotide
ccgatttttgaaaaattatatcggaggagc

SEQ ID NO: 471777 - DNA, 30 bp, Artificial Sequence
  Synthetic oligonucleotide
atatttcctcggagtcgcaccttgaggagc

SEQ ID NO: 471778 - DNA, 30 bp, Artificial Sequence
  Synthetic oligonucleotide
gacctttatggggttctttgacctaggagc

SEQ ID NO: 471779 - DNA, 30 bp, Artificial Sequence
  Synthetic oligonucleotide
tgaaagttgaggtacggcaggtaacggagc

SEQ ID NO: 471780 - DNA, 30 bp, Artificial Sequence
  Synthetic oligonucleotide
tcctaaaccctgggaagggggcaccggagc

SEQ ID NO: 471781 - DNA, 30 bp, Artificial Sequence
  Synthetic oligonucleotide
tttgagttcattttcgccgtataccggagc

SEQ ID NO: 471782 - DNA, 30 bp, Artificial Sequence
  Synthetic oligonucleotide
acggtcgccagctgactggacaagcggagc

SEQ ID NO: 471783 - DNA, 30 bp, Artificial Sequence
  Synthetic oligonucleotide
gtctccaaaatggcggaccagacgcggagc

SEQ ID NO: 471784 - DNA, 30 bp, Artificial Sequence
  Synthetic oligonucleotide
catttagcgcggcgtgtactaaggcggagc

SEQ ID NO: 471785 - DNA, 30 bp, Artificial Sequence
  Synthetic oligonucleotide
aattagtaaaacttctatggtttgcggagc

SEQ ID NO: 471786 - DNA, 30 bp, Artificial Sequence
  Synthetic oligonucleotide
ctgatttacatcagcgagtcaatagggagc

SEQ ID NO: 471787 - DNA, 30 bp, Artificial Sequence
  Synthetic oligonucleotide
gtttttggttcagcgaattgtttagggagc

SEQ ID NO: 471788 - DNA, 30 bp, Artificial Sequence
  Synthetic oligonucleotide
gacgttaagcgtcctccccctctcgggagc

SEQ ID NO: 471789 - DNA, 30 bp, Artificial Sequence
  Synthetic oligonucleotide
cctatcgcagataaggtatataaggggagc

SEQ ID NO: 471790 - DNA, 30 bp, Artificial Sequence
  Synthetic oligonucleotide
aaacacgctacccctctatcttaggggagc

SEQ ID NO: 471791 - DNA, 30 bp, Artificial Sequence
  Synthetic oligonucleotide
ttgttactcttatgtgtatgtgcggggagc

SEQ ID NO: 471792 - DNA, 31 bp, Artificial Sequence
  Synthetic oligonucleotide
atcaattagtcattagtcgaccagggggagc

SEQ ID NO: 471793 - DNA, 30 bp, Artificial Sequence
  Synthetic oligonucleotide
gagtgccaagctgtatagttggttgggagc

SEQ ID NO: 471794 - DNA, 30 bp, Artificial Sequence
  Synthetic oligonucleotide
tggatcagacggggcaggaagcaatggagc

SEQ ID NO: 471795 - DNA, 30 bp, Artificial Sequence
  Synthetic oligonucleotide
aatcagggaaagttcgtcgtcgcatggagc

SEQ ID NO: 471796 - DNA, 30 bp, Artificial Sequence
  Synthetic oligonucleotide
tcaacaggcccgtccgattaatgatggagc

SEQ ID NO: 471797 - DNA, 30 bp, Artificial Sequence
  Synthetic oligonucleotide
gagtcataggacgcgtcgtagccctggagc

SEQ ID NO: 471798 - DNA, 30 bp, Artificial Sequence
  Synthetic oligonucleotide
caaattacaccttctatagaaatgtggagc

SEQ ID NO: 471799 - DNA, 30 bp, Artificial Sequence
  Synthetic oligonucleotide
gcggccctcacaccaagttgggtgtggagc

SEQ ID NO: 471800 - DNA, 30 bp, Artificial Sequence
  Synthetic oligonucleotide
gggtaagctccagtatgcgttaattggagc

SEQ ID NO: 471801 - DNA, 30 bp, Artificial Sequence
  Synthetic oligonucleotide
cttgaatagattggaccagcgtcttggagc

SEQ ID NO: 471802 - DNA, 30 bp, Artificial Sequence
  Synthetic oligonucleotide
gcgtaattttcctctcttgacgaaatgagc

SEQ ID NO: 471803 - DNA, 30 bp, Artificial Sequence
  Synthetic oligonucleotide
actcaaaacctctttaaaggcggaatgagc

SEQ ID NO: 471804 - DNA, 30 bp, Artificial Sequence
  Synthetic oligonucleotide
cgccattatcgtttaggatggacgatgagc

SEQ ID NO: 471805 - DNA, 30 bp, Artificial Sequence
  Synthetic oligonucleotide
gcggtgacgcaggggaaaatacctatgagc

SEQ ID NO: 471806 - DNA, 30 bp, Artificial Sequence
  Synthetic oligonucleotide
gtctgccggaaaggatctcagtctatgagc

SEQ ID NO: 471807 - DNA, 30 bp, Artificial Sequence
  Synthetic oligonucleotide
gacaccgcacaacgaggcctgtgtatgagc

SEQ ID NO: 471808 - DNA, 30 bp, Artificial Sequence
  Synthetic oligonucleotide
atggtctcaaactacttagtgctactgagc

SEQ ID NO: 471809 - DNA, 30 bp, Artificial Sequence
  Synthetic oligonucleotide
ctcttgtagtaaatttaagtgtacctgagc

SEQ ID NO: 471810 - DNA, 30 bp, Artificial Sequence
  Synthetic oligonucleotide
tagctatgttgattccgattttgcctgagc

SEQ ID NO: 471811 - DNA, 30 bp, Artificial Sequence
  Synthetic oligonucleotide
ctgctttcagcttcatatattgggctgagc

SEQ ID NO: 471812 - DNA, 30 bp, Artificial Sequence
  Synthetic oligonucleotide
catctccactgcggaacagcgctagtgagc

SEQ ID NO: 471813 - DNA, 30 bp, Artificial Sequence
  Synthetic oligonucleotide
aaaatcaacgagccgcttcgcgtagtgagc

SEQ ID NO: 471814 - DNA, 30 bp, Artificial Sequence
  Synthetic oligonucleotide
aattaagacccggtataaaggcacgtgagc

SEQ ID NO: 471815 - DNA, 30 bp, Artificial Sequence
  Synthetic oligonucleotide
gatagctatgtcacttggaaagccgtgagc

SEQ ID NO: 471816 - DNA, 30 bp, Artificial Sequence
  Synthetic oligonucleotide
atcttctcgaactctcagcggtaggtgagc

SEQ ID NO: 471817 - DNA, 30 bp, Artificial Sequence
  Synthetic oligonucleotide
ttataataaaatgtaggagcgcttgtgagc

SEQ ID NO: 471818 - DNA, 30 bp, Artificial Sequence
  Synthetic oligonucleotide
tttctgtttgacgaggcgaaagcattgagc

SEQ ID NO: 471819 - DNA, 30 bp, Artificial Sequence
  Synthetic oligonucleotide
cggctcttcaatatcgcagtttcattgagc

SEQ ID NO: 471820 - DNA, 30 bp, Artificial Sequence
  Synthetic oligonucleotide
aaccttggctgacagagcacaggattgagc

SEQ ID NO: 471821 - DNA, 30 bp, Artificial Sequence
  Synthetic oligonucleotide
tctagacgcttggtcagttgtcccttgagc

SEQ ID NO: 471822 - DNA, 30 bp, Artificial Sequence
  Synthetic oligonucleotide
cagcgcagctgcgcttcatggcaaaatagc

SEQ ID NO: 471823 - DNA, 30 bp, Artificial Sequence
  Synthetic oligonucleotide
ttattgcttctaatactatatgccaatagc

SEQ ID NO: 471824 - DNA, 30 bp, Artificial Sequence
  Synthetic oligonucleotide
atttcacgtcctataaaatcaagtaatagc

SEQ ID NO: 471825 - DNA, 30 bp, Artificial Sequence
  Synthetic oligonucleotide
catccctttcagccggctagcttccatagc

SEQ ID NO: 471826 - DNA, 30 bp, Artificial Sequence
  Synthetic oligonucleotide
gcttaggcctttgagattagtacgcatagc

SEQ ID NO: 471827 - DNA, 30 bp, Artificial Sequence
  Synthetic oligonucleotide
tcgttgtaaatggaagcgaccgatcatagc

SEQ ID NO: 471828 - DNA, 30 bp, Artificial Sequence
  Synthetic oligonucleotide
cagcggtaatgccgggaacgtcgtcatagc

SEQ ID NO: 471829 - DNA, 30 bp, Artificial Sequence
  Synthetic oligonucleotide
ttccgatttcggattggggcagacgatagc

SEQ ID NO: 471830 - DNA, 30 bp, Artificial Sequence
  Synthetic oligonucleotide
tcggagggcagcttctatgccgaggatagc

SEQ ID NO: 471831 - DNA, 30 bp, Artificial Sequence
  Synthetic oligonucleotide
atttgacaagagccttgcgactgggatagc

SEQ ID NO: 471832 - DNA, 30 bp, Artificial Sequence
  Synthetic oligonucleotide
actaatagtagcaggggtatgctggatagc

SEQ ID NO: 471833 - DNA, 30 bp, Artificial Sequence
  Synthetic oligonucleotide
ttcacacagaatttagtgtgatctgatagc

SEQ ID NO: 471834 - DNA, 30 bp, Artificial Sequence
  Synthetic oligonucleotide
gactcaaccacgtgtgggggagactatagc

SEQ ID NO: 471835 - DNA, 30 bp, Artificial Sequence
  Synthetic oligonucleotide
tagacaaaagggggtcgtaacccctatagc

SEQ ID NO: 471836 - DNA, 30 bp, Artificial Sequence
  Synthetic oligonucleotide
aatgagtgttgccgtacaaacagctatagc

SEQ ID NO: 471837 - DNA, 30 bp, Artificial Sequence
  Synthetic oligonucleotide
tgataaaaggtttgtatttaagcgtatagc

SEQ ID NO: 471838 - DNA, 30 bp, Artificial Sequence
  Synthetic oligonucleotide
cttattgtttgatagctaatttggtatagc

SEQ ID NO: 471839 - DNA, 30 bp, Artificial Sequence
  Synthetic oligonucleotide
ctgacgctgagatgcatcccattgtatagc

SEQ ID NO: 471840 - DNA, 30 bp, Artificial Sequence
  Synthetic oligonucleotide
caggcagacggcccagaggggtcttatagc

SEQ ID NO: 471841 - DNA, 30 bp, Artificial Sequence
  Synthetic oligonucleotide
aaccgggctatgttcccggtcataactagc

SEQ ID NO: 471842 - DNA, 30 bp, Artificial Sequence
  Synthetic oligonucleotide
gggaatcgaaactaaatctatattactagc

SEQ ID NO: 471843 - DNA, 30 bp, Artificial Sequence
  Synthetic oligonucleotide
gttacggggattctgagcggaatccctagc

SEQ ID NO: 471844 - DNA, 30 bp, Artificial Sequence
  Synthetic oligonucleotide
ctataggtccggacagtggttttccctagc

SEQ ID NO: 471845 - DNA, 30 bp, Artificial Sequence
  Synthetic oligonucleotide
acccccaattgacgtggacgtactcctagc

SEQ ID NO: 471846 - DNA, 30 bp, Artificial Sequence
  Synthetic oligonucleotide
acatctctttggggcgtggacgctcctagc

SEQ ID NO: 471847 - DNA, 30 bp, Artificial Sequence
  Synthetic oligonucleotide
gcagttaggaagacaatttactttcctagc

SEQ ID NO: 471848 - DNA, 30 bp, Artificial Sequence
  Synthetic oligonucleotide
tatttaattggacatctgacgacagctagc

SEQ ID NO: 471849 - DNA, 30 bp, Artificial Sequence
  Synthetic oligonucleotide
gctaacagtttgccatagtattgagctagc

SEQ ID NO: 471850 - DNA, 30 bp, Artificial Sequence
  Synthetic oligonucleotide
ggtgtattgagcttactatgtaaggctagc

SEQ ID NO: 471851 - DNA, 30 bp, Artificial Sequence
  Synthetic oligonucleotide
tacgctacggctccacgaagatgggctagc

SEQ ID NO: 471852 - DNA, 30 bp, Artificial Sequence
  Synthetic oligonucleotide
actcgatatttgccgcggcatgtggctagc

SEQ ID NO: 471853 - DNA, 30 bp, Artificial Sequence
  Synthetic oligonucleotide
ctctgtgggtatattgagttacgatctagc

SEQ ID NO: 471854 - DNA, 30 bp, Artificial Sequence
  Synthetic oligonucleotide
ggtatcttgataggatagcggggatctagc

SEQ ID NO: 471855 - DNA, 30 bp, Artificial Sequence
  Synthetic oligonucleotide
aagcatcccaacgaacgccggccctctagc

SEQ ID NO: 471856 - DNA, 30 bp, Artificial Sequence
  Synthetic oligonucleotide
attatgccgagcgttaccttacgctctagc

SEQ ID NO: 471857 - DNA, 26 bp, Artificial Sequence
  Synthetic oligonucleotide
taagtttcaataattggttctctagc

SEQ ID NO: 471858 - DNA, 30 bp, Artificial Sequence
  Synthetic oligonucleotide
aataaaatatgtttttctagggagtctagc

SEQ ID NO: 471859 - DNA, 30 bp, Artificial Sequence
  Synthetic oligonucleotide
tgattgggtttgcgagctaaatggtctagc

SEQ ID NO: 471860 - DNA, 30 bp, Artificial Sequence
  Synthetic oligonucleotide
tatgagaccgtctcaatttctcaaagtagc

SEQ ID NO: 471861 - DNA, 30 bp, Artificial Sequence
  Synthetic oligonucleotide
taggtaaaattattagccgctccaagtagc

SEQ ID NO: 471862 - DNA, 30 bp, Artificial Sequence
  Synthetic oligonucleotide
aggtccttttttaccgcgcgttgcagtagc

SEQ ID NO: 471863 - DNA, 30 bp, Artificial Sequence
  Synthetic oligonucleotide
cggtgcctagtagcctagactgggagtagc

SEQ ID NO: 471864 - DNA, 30 bp, Artificial Sequence
  Synthetic oligonucleotide
cacagcctataccagaacagttatagtagc

SEQ ID NO: 471865 - DNA, 30 bp, Artificial Sequence
  Synthetic oligonucleotide
gattacgatggcttggataaacatcgtagc

SEQ ID NO: 471866 - DNA, 30 bp, Artificial Sequence
  Synthetic oligonucleotide
atttcaccacaatcttcgattcatcgtagc

SEQ ID NO: 471867 - DNA, 30 bp, Artificial Sequence
  Synthetic oligonucleotide
gcgcacgccgatcggatcccggctcgtagc

SEQ ID NO: 471868 - DNA, 30 bp, Artificial Sequence
  Synthetic oligonucleotide
gactgttactatacgactaagcgaggtagc

SEQ ID NO: 471869 - DNA, 30 bp, Artificial Sequence
  Synthetic oligonucleotide
atctatcttactgaagtcacatgaggtagc

SEQ ID NO: 471870 - DNA, 30 bp, Artificial Sequence
  Synthetic oligonucleotide
caaagtcgaacagtgtcctgtaacggtagc

SEQ ID NO: 471871 - DNA, 30 bp, Artificial Sequence
  Synthetic oligonucleotide
cccgcaaataaatgctagtttcgcggtagc

SEQ ID NO: 471872 - DNA, 30 bp, Artificial Sequence
  Synthetic oligonucleotide
ttgctaggagactgcacgctgatcggtagc

SEQ ID NO: 471873 - DNA, 30 bp, Artificial Sequence
  Synthetic oligonucleotide
acgggcatagatcgtcagaaaaggggtagc

SEQ ID NO: 471874 - DNA, 30 bp, Artificial Sequence
  Synthetic oligonucleotide
ataatataatccagttggtactaatgtagc

SEQ ID NO: 471875 - DNA, 30 bp, Artificial Sequence
  Synthetic oligonucleotide
atctagtactcatactaggaacgatgtagc

SEQ ID NO: 471876 - DNA, 30 bp, Artificial Sequence
  Synthetic oligonucleotide
cacctatctttcgcgtcgaaacactgtagc

SEQ ID NO: 471877 - DNA, 30 bp, Artificial Sequence
  Synthetic oligonucleotide
gtgtctggcttttgttggtgaatttgtagc

SEQ ID NO: 471878 - DNA, 30 bp, Artificial Sequence
  Synthetic oligonucleotide
attcgaaggactccttttaatacaattagc

SEQ ID NO: 471879 - DNA, 30 bp, Artificial Sequence
  Synthetic oligonucleotide
cggagcagcgggtcgacacatcgaattagc

SEQ ID NO: 471880 - DNA, 30 bp, Artificial Sequence
  Synthetic oligonucleotide
gtaccacggcatccttatggttgaattagc

SEQ ID NO: 471881 - DNA, 30 bp, Artificial Sequence
  Synthetic oligonucleotide
gttcatcaggcgcgcgcccgtcgcattagc

SEQ ID NO: 471882 - DNA, 30 bp, Artificial Sequence
  Synthetic oligonucleotide
attttaacgttcctctcgtacgtcattagc

SEQ ID NO: 471883 - DNA, 30 bp, Artificial Sequence
  Synthetic oligonucleotide
gtgtaaacttatgtttcacggtcgattagc

SEQ ID NO: 471884 - DNA, 30 bp, Artificial Sequence
  Synthetic oligonucleotide
atgtataggcagggaggttaaaggattagc

SEQ ID NO: 471885 - DNA, 30 bp, Artificial Sequence
  Synthetic oligonucleotide
atattataagggatcctattacatattagc

SEQ ID NO: 471886 - DNA, 31 bp, Artificial Sequence
  Synthetic oligonucleotide
aaaattgatccaatcaggcagacctattagc

SEQ ID NO: 471887 - DNA, 30 bp, Artificial Sequence
  Synthetic oligonucleotide
ttagtactcataatacttataggacttagc

SEQ ID NO: 471888 - DNA, 30 bp, Artificial Sequence
  Synthetic oligonucleotide
atggaaaaggggatcctaggatatcttagc

SEQ ID NO: 471889 - DNA, 30 bp, Artificial Sequence
  Synthetic oligonucleotide
acggaaccttttacctcttagtctcttagc

SEQ ID NO: 471890 - DNA, 30 bp, Artificial Sequence
  Synthetic oligonucleotide
gagcgtctctttggcttgccactagttagc

SEQ ID NO: 471891 - DNA, 30 bp, Artificial Sequence
  Synthetic oligonucleotide
gagactctgccgttggtggagtccgttagc

SEQ ID NO: 471892 - DNA, 30 bp, Artificial Sequence
  Synthetic oligonucleotide
attcacagtcatattcgaaatgtcgttagc

SEQ ID NO: 471893 - DNA, 30 bp, Artificial Sequence
  Synthetic oligonucleotide
gatctgcagatttacgatgctgcggttagc

SEQ ID NO: 471894 - DNA, 30 bp, Artificial Sequence
  Synthetic oligonucleotide
tacacacagtaggccgctacagtggttagc

SEQ ID NO: 471895 - DNA, 30 bp, Artificial Sequence
  Synthetic oligonucleotide
atcagtgtgataggacggaggtctgttagc

SEQ ID NO: 471896 - DNA, 30 bp, Artificial Sequence
  Synthetic oligonucleotide
gcccgggttggatttgggaattgatttagc

SEQ ID NO: 471897 - DNA, 30 bp, Artificial Sequence
  Synthetic oligonucleotide
tttccggggggtgctcagatccactttagc

SEQ ID NO: 471898 - DNA, 30 bp, Artificial Sequence
  Synthetic oligonucleotide
ctctggatggatcaacagtgttcttttagc

SEQ ID NO: 471899 - DNA, 30 bp, Artificial Sequence
  Synthetic oligonucleotide
tcaaatatcgcgctgctggctatttttagc

SEQ ID NO: 471900 - DNA, 30 bp, Artificial Sequence
  Synthetic oligonucleotide
tgacagataaataagggcggtatttttagc

SEQ ID NO: 471901 - DNA, 30 bp, Artificial Sequence
  Synthetic oligonucleotide
gttacagaggattttcagggagaaaaacgc

SEQ ID NO: 471902 - DNA, 30 bp, Artificial Sequence
  Synthetic oligonucleotide
ggcgaataaaaggtgtatatgtcaaaacgc

SEQ ID NO: 471903 - DNA, 30 bp, Artificial Sequence
  Synthetic oligonucleotide
aatacatggagaaaaacgtagcgaaaacgc

SEQ ID NO: 471904 - DNA, 30 bp, Artificial Sequence
  Synthetic oligonucleotide
ggtgttagtgtttagcgccttggaaaacgc

SEQ ID NO: 471905 - DNA, 30 bp, Artificial Sequence
  Synthetic oligonucleotide
ttatttagggtcaagattaagtagaaacgc

SEQ ID NO: 471906 - DNA, 30 bp, Artificial Sequence
  Synthetic oligonucleotide
tttctgctcaacactctgatcaggaaacgc

SEQ ID NO: 471907 - DNA, 30 bp, Artificial Sequence
  Synthetic oligonucleotide
gctcgaattacaaggcgccgctataaacgc

SEQ ID NO: 471908 - DNA, 30 bp, Artificial Sequence
  Synthetic oligonucleotide
agcttgacgcgatcctgactgactaaacgc

SEQ ID NO: 471909 - DNA, 30 bp, Artificial Sequence
  Synthetic oligonucleotide
gacagattcatgttagtatggatacaacgc

SEQ ID NO: 471910 - DNA, 30 bp, Artificial Sequence
  Synthetic oligonucleotide
taattgactctgtagttgatataccaacgc

SEQ ID NO: 471911 - DNA, 30 bp, Artificial Sequence
  Synthetic oligonucleotide
agttattgtcggtaggcaaaacgccaacgc

SEQ ID NO: 471912 - DNA, 30 bp, Artificial Sequence
  Synthetic oligonucleotide
ttctaccccattattgcgggcaagcaacgc

SEQ ID NO: 471913 - DNA, 30 bp, Artificial Sequence
  Synthetic oligonucleotide
cggactgtaggccgtggttcggtagaacgc

SEQ ID NO: 471914 - DNA, 30 bp, Artificial Sequence
  Synthetic oligonucleotide
agattatagtttgcgtgcccgttagaacgc

SEQ ID NO: 471915 - DNA, 30 bp, Artificial Sequence
  Synthetic oligonucleotide
atttttgccgagtgtgcagcaaacgaacgc

SEQ ID NO: 471916 - DNA, 30 bp, Artificial Sequence
  Synthetic oligonucleotide
tgacgataaactcgccatcctcacgaacgc

SEQ ID NO: 471917 - DNA, 30 bp, Artificial Sequence
  Synthetic oligonucleotide
gaaggagcgacccgattctgatcggaacgc

SEQ ID NO: 471918 - DNA, 30 bp, Artificial Sequence
  Synthetic oligonucleotide
tcagtttggtattcttgattgctggaacgc

SEQ ID NO: 471919 - DNA, 30 bp, Artificial Sequence
  Synthetic oligonucleotide
gctttcggttgatctgcttaatctgaacgc

SEQ ID NO: 471920 - DNA, 30 bp, Artificial Sequence
  Synthetic oligonucleotide
ttacggccggattcactgaggagtgaacgc

SEQ ID NO: 471921 - DNA, 30 bp, Artificial Sequence
  Synthetic oligonucleotide
gaatgcgcgtcggggtttcgcggtgaacgc

SEQ ID NO: 471922 - DNA, 30 bp, Artificial Sequence
  Synthetic oligonucleotide
gtatgactgcgggtggtcaaagaataacgc

SEQ ID NO: 471923 - DNA, 30 bp, Artificial Sequence
  Synthetic oligonucleotide
ttccgcagtatttcatttgcaagataacgc

SEQ ID NO: 471924 - DNA, 30 bp, Artificial Sequence
  Synthetic oligonucleotide
ttcattgcagacaagcccgtcgagtaacgc

SEQ ID NO: 471925 - DNA, 30 bp, Artificial Sequence
  Synthetic oligonucleotide
gcatacgcatacccagaaccgcggtaacgc

SEQ ID NO: 471926 - DNA, 30 bp, Artificial Sequence
  Synthetic oligonucleotide
agcccagtttcacccggcttgaaaacacgc

SEQ ID NO: 471927 - DNA, 31 bp, Artificial Sequence
  Synthetic oligonucleotide
tagacgacgataagaatcgtctggaacacgc

SEQ ID NO: 471928 - DNA, 30 bp, Artificial Sequence
  Synthetic oligonucleotide
gctgtattgataacggcaccctttacacgc

SEQ ID NO: 471929 - DNA, 30 bp, Artificial Sequence
  Synthetic oligonucleotide
aagaatgctgcatttctatacgcgccacgc

SEQ ID NO: 471930 - DNA, 30 bp, Artificial Sequence
  Synthetic oligonucleotide
agtgtgcgaaagccattatagtctccacgc

SEQ ID NO: 471931 - DNA, 30 bp, Artificial Sequence
  Synthetic oligonucleotide
tttactagcaattactcttatggagcacgc

SEQ ID NO: 471932 - DNA, 30 bp, Artificial Sequence
  Synthetic oligonucleotide
gtagtactggaccaatatttgatagcacgc

SEQ ID NO: 471933 - DNA, 30 bp, Artificial Sequence
  Synthetic oligonucleotide
atgataataggcgtagagtccgacgcacgc

SEQ ID NO: 471934 - DNA, 30 bp, Artificial Sequence
  Synthetic oligonucleotide
ttattcctaataatacttatttccgcacgc

SEQ ID NO: 471935 - DNA, 30 bp, Artificial Sequence
  Synthetic oligonucleotide
gaggcttacgccgtgtacaagaaggcacgc

SEQ ID NO: 471936 - DNA, 30 bp, Artificial Sequence
  Synthetic oligonucleotide
agttgcgtccagttcaattataaggcacgc

SEQ ID NO: 471937 - DNA, 30 bp, Artificial Sequence
  Synthetic oligonucleotide
cgaagcagctctgcggttgaaccggcacgc

SEQ ID NO: 471938 - DNA, 30 bp, Artificial Sequence
  Synthetic oligonucleotide
cacctggcctgagattttccctatgcacgc

SEQ ID NO: 471939 - DNA, 30 bp, Artificial Sequence
  Synthetic oligonucleotide
attgtgctgaagggatagacgtgatcacgc

SEQ ID NO: 471940 - DNA, 30 bp, Artificial Sequence
  Synthetic oligonucleotide
gtctgcgtgcgtgggggccaattatcacgc

SEQ ID NO: 471941 - DNA, 30 bp, Artificial Sequence
  Synthetic oligonucleotide
gctgccttcggcgggcggtggttatcacgc

SEQ ID NO: 471942 - DNA, 30 bp, Artificial Sequence
  Synthetic oligonucleotide
ctgtagtgaaggtaagtacgcgtttcacgc

SEQ ID NO: 471943 - DNA, 30 bp, Artificial Sequence
  Synthetic oligonucleotide
ctgtcgggctccaacgtaacatcaagacgc

SEQ ID NO: 471944 - DNA, 30 bp, Artificial Sequence
  Synthetic oligonucleotide
ttcgcacactaagataaagtgtgaagacgc

SEQ ID NO: 471945 - DNA, 30 bp, Artificial Sequence
  Synthetic oligonucleotide
ctgctaaagtgatggtcataggccagacgc

SEQ ID NO: 471946 - DNA, 30 bp, Artificial Sequence
  Synthetic oligonucleotide
gagagctagctggggagtagatcgagacgc

SEQ ID NO: 471947 - DNA, 30 bp, Artificial Sequence
  Synthetic oligonucleotide
agaccgaagtggtccgggtattggagacgc

SEQ ID NO: 471948 - DNA, 30 bp, Artificial Sequence
  Synthetic oligonucleotide
gcgatttggcagagagcggcactgagacgc

SEQ ID NO: 471949 - DNA, 30 bp, Artificial Sequence
  Synthetic oligonucleotide
cctgcaagataatcaagttgagatagacgc

SEQ ID NO: 471950 - DNA, 30 bp, Artificial Sequence
  Synthetic oligonucleotide
agttggtacctggaagtgatagatagacgc

SEQ ID NO: 471951 - DNA, 30 bp, Artificial Sequence
  Synthetic oligonucleotide
gtaggacatcgcatgagtgtccgtagacgc

SEQ ID NO: 471952 - DNA, 30 bp, Artificial Sequence
  Synthetic oligonucleotide
ggtgggaatctcacggtgtgccaccgacgc

SEQ ID NO: 471953 - DNA, 30 bp, Artificial Sequence
  Synthetic oligonucleotide
tcgcttaaatcgtacttacatctgcgacgc

SEQ ID NO: 471954 - DNA, 30 bp, Artificial Sequence
  Synthetic oligonucleotide
acacgggcactcccttaacacgtgcgacgc

SEQ ID NO: 471955 - DNA, 30 bp, Artificial Sequence
  Synthetic oligonucleotide
aaagcccacatgcgtctcggacatcgacgc

SEQ ID NO: 471956 - DNA, 30 bp, Artificial Sequence
  Synthetic oligonucleotide
taatctcatattacctcggcatatcgacgc

SEQ ID NO: 471957 - DNA, 30 bp, Artificial Sequence
  Synthetic oligonucleotide
gcgaaagagctttgcagatcacttcgacgc

SEQ ID NO: 471958 - DNA, 30 bp, Artificial Sequence
  Synthetic oligonucleotide
ccccatgtactctctcgctacgttcgacgc

SEQ ID NO: 471959 - DNA, 30 bp, Artificial Sequence
  Synthetic oligonucleotide
gtttctccgagctcggtggttcaaggacgc

SEQ ID NO: 471960 - DNA, 30 bp, Artificial Sequence
  Synthetic oligonucleotide
ccggtcacgctttaatcagtcacaggacgc

SEQ ID NO: 471961 - DNA, 30 bp, Artificial Sequence
  Synthetic oligonucleotide
ggctagacttgagaaggcaccagaggacgc

SEQ ID NO: 471962 - DNA, 30 bp, Artificial Sequence
  Synthetic oligonucleotide
tagctagcctccttatgatatgtaggacgc

SEQ ID NO: 471963 - DNA, 30 bp, Artificial Sequence
  Synthetic oligonucleotide
atagctaaagagcttattgcgtccggacgc

SEQ ID NO: 471964 - DNA, 30 bp, Artificial Sequence
  Synthetic oligonucleotide
tactctgaagtgctccttgagaagggacgc

SEQ ID NO: 471965 - DNA, 30 bp, Artificial Sequence
  Synthetic oligonucleotide
tagcaggacggcaaacaagcccagggacgc

SEQ ID NO: 471966 - DNA, 30 bp, Artificial Sequence
  Synthetic oligonucleotide
cacattgcaaccactattggaacgggacgc

SEQ ID NO: 471967 - DNA, 30 bp, Artificial Sequence
  Synthetic oligonucleotide
tcggctaagaaggaggtatctttgggacgc

SEQ ID NO: 471968 - DNA, 30 bp, Artificial Sequence
  Synthetic oligonucleotide
gcgaattatcgactgtcaagtgatggacgc

SEQ ID NO: 471969 - DNA, 30 bp, Artificial Sequence
  Synthetic oligonucleotide
ttctgaatagttaggaaaggaactggacgc

SEQ ID NO: 471970 - DNA, 30 bp, Artificial Sequence
  Synthetic oligonucleotide
ctacacagaaaccaatgacattctggacgc

SEQ ID NO: 471971 - DNA, 30 bp, Artificial Sequence
  Synthetic oligonucleotide
atccgaggtctcagagggcaacgtggacgc

SEQ ID NO: 471972 - DNA, 30 bp, Artificial Sequence
  Synthetic oligonucleotide
ctggagagggagatcgcggtgtgtggacgc

SEQ ID NO: 471973 - DNA, 30 bp, Artificial Sequence
  Synthetic oligonucleotide
ttcagatggcgtagtttattagttggacgc

SEQ ID NO: 471974 - DNA, 30 bp, Artificial Sequence
  Synthetic oligonucleotide
agggttctacacaagtgaagcggatgacgc

SEQ ID NO: 471975 - DNA, 30 bp, Artificial Sequence
  Synthetic oligonucleotide
aaagaccgcccctatgtggcgttatgacgc

SEQ ID NO: 471976 - DNA, 30 bp, Artificial Sequence
  Synthetic oligonucleotide
ccacatggcacacgacgtgacacctgacgc

SEQ ID NO: 471977 - DNA, 30 bp, Artificial Sequence
  Synthetic oligonucleotide
ccggcttccagaacatccttcacctgacgc

SEQ ID NO: 471978 - DNA, 30 bp, Artificial Sequence
  Synthetic oligonucleotide
tagtgctctgcttacggacatcgctgacgc

SEQ ID NO: 471979 - DNA, 30 bp, Artificial Sequence
  Synthetic oligonucleotide
gccgtaattgctttggtaagcggctgacgc

SEQ ID NO: 471980 - DNA, 30 bp, Artificial Sequence
  Synthetic oligonucleotide
tgggcagccatcttataactttgctgacgc

SEQ ID NO: 471981 - DNA, 30 bp, Artificial Sequence
  Synthetic oligonucleotide
gggaaagttgtcaaaaaggatggttgacgc

SEQ ID NO: 471982 - DNA, 30 bp, Artificial Sequence
  Synthetic oligonucleotide
ccttggcataaagcctgtaagtgttgacgc

SEQ ID NO: 471983 - DNA, 30 bp, Artificial Sequence
  Synthetic oligonucleotide
gtaacgacaccaaagccccccctttgacgc

SEQ ID NO: 471984 - DNA, 30 bp, Artificial Sequence
  Synthetic oligonucleotide
tgcttgctagcaacgtcgttctaaatacgc

SEQ ID NO: 471985 - DNA, 30 bp, Artificial Sequence
  Synthetic oligonucleotide
gctagtaatgtatgaactcagacaatacgc

SEQ ID NO: 471986 - DNA, 30 bp, Artificial Sequence
  Synthetic oligonucleotide
ttttaaggtaacagggcctacggaatacgc

SEQ ID NO: 471987 - DNA, 30 bp, Artificial Sequence
  Synthetic oligonucleotide
ctctgaaagtgtttgacagatcgcatacgc

SEQ ID NO: 471988 - DNA, 30 bp, Artificial Sequence
  Synthetic oligonucleotide
actgactcggcttgtgatacccggatacgc

SEQ ID NO: 471989 - DNA, 30 bp, Artificial Sequence
  Synthetic oligonucleotide
gataatgggaggttgagagtatggatacgc

SEQ ID NO: 471990 - DNA, 30 bp, Artificial Sequence
  Synthetic oligonucleotide
gattgtgggttcaaaaaatgaggtatacgc

SEQ ID NO: 471991 - DNA, 30 bp, Artificial Sequence
  Synthetic oligonucleotide
gtattcgaatgccacgggactcttatacgc

SEQ ID NO: 471992 - DNA, 30 bp, Artificial Sequence
  Synthetic oligonucleotide
ttcgcatgattagaggtgcgtagactacgc

SEQ ID NO: 471993 - DNA, 30 bp, Artificial Sequence
  Synthetic oligonucleotide
gcgagcatcgttaagggtctgctactacgc

SEQ ID NO: 471994 - DNA, 30 bp, Artificial Sequence
  Synthetic oligonucleotide
ggtatgttggcgaagctttgcaagctacgc

SEQ ID NO: 471995 - DNA, 30 bp, Artificial Sequence
  Synthetic oligonucleotide
gtcccttgcgaatcttgcatgaggctacgc

SEQ ID NO: 471996 - DNA, 30 bp, Artificial Sequence
  Synthetic oligonucleotide
cgccatgcattgtcgcatccacggctacgc

SEQ ID NO: 471997 - DNA, 30 bp, Artificial Sequence
  Synthetic oligonucleotide
tgtaaaaataattgagggtctttagtacgc

SEQ ID NO: 471998 - DNA, 30 bp, Artificial Sequence
  Synthetic oligonucleotide
cgatggcccccctattatgggtgcgtacgc

SEQ ID NO: 471999 - DNA, 30 bp, Artificial Sequence
  Synthetic oligonucleotide
attatctggattctaacaagtgaggtacgc

SEQ ID NO: 472000 - DNA, 30 bp, Artificial Sequence
  Synthetic oligonucleotide
tatccgggttcttagtcgccgttggtacgc

SEQ ID NO: 472001 - DNA, 30 bp, Artificial Sequence
  Synthetic oligonucleotide
tactccttgatacaatagaagactgtacgc

SEQ ID NO: 472002 - DNA, 30 bp, Artificial Sequence
  Synthetic oligonucleotide
aagtcgcatgagaggtgtctttaattacgc

SEQ ID NO: 472003 - DNA, 30 bp, Artificial Sequence
  Synthetic oligonucleotide
ttcttcttacacaacaaagacccattacgc

SEQ ID NO: 472004 - DNA, 30 bp, Artificial Sequence
  Synthetic oligonucleotide
tctattaagtctttccgaccgcccttacgc

SEQ ID NO: 472005 - DNA, 30 bp, Artificial Sequence
  Synthetic oligonucleotide
gaatgtgtgagcaatctatgaaatttacgc

SEQ ID NO: 472006 - DNA, 30 bp, Artificial Sequence
  Synthetic oligonucleotide
cagaaccggacaggattcaaacatttacgc

SEQ ID NO: 472007 - DNA, 30 bp, Artificial Sequence
  Synthetic oligonucleotide
tctcgctctcactcgggttacgatttacgc

SEQ ID NO: 472008 - DNA, 30 bp, Artificial Sequence
  Synthetic oligonucleotide
gaaatatgtcgccgagtgctattaaaccgc

SEQ ID NO: 472009 - DNA, 30 bp, Artificial Sequence
  Synthetic oligonucleotide
cacccgcctcctgtggtggtaggtaaccgc

SEQ ID NO: 472010 - DNA, 30 bp, Artificial Sequence
  Synthetic oligonucleotide
cccgtcccggtttatagcttgtgtaaccgc

SEQ ID NO: 472011 - DNA, 30 bp, Artificial Sequence
  Synthetic oligonucleotide
taacgagacatttacttgtcgacgcaccgc

SEQ ID NO: 472012 - DNA, 30 bp, Artificial Sequence
  Synthetic oligonucleotide
gtacagcagcgaataccgtgtacgcaccgc

SEQ ID NO: 472013 - DNA, 30 bp, Artificial Sequence
  Synthetic oligonucleotide
gagttttgatgtctgcttagcgatcaccgc

SEQ ID NO: 472014 - DNA, 30 bp, Artificial Sequence
  Synthetic oligonucleotide
gtgtttgtttaacctcgggtcgctcaccgc

SEQ ID NO: 472015 - DNA, 30 bp, Artificial Sequence
  Synthetic oligonucleotide
gccgctatagcctaaatgatccgggaccgc

SEQ ID NO: 472016 - DNA, 30 bp, Artificial Sequence
  Synthetic oligonucleotide
gattgacgatcaccatatgctattgaccgc

SEQ ID NO: 472017 - DNA, 30 bp, Artificial Sequence
  Synthetic oligonucleotide
gagaccaatttgcgacggcattttgaccgc

SEQ ID NO: 472018 - DNA, 30 bp, Artificial Sequence
  Synthetic oligonucleotide
gacctcagccggggtcacatagaataccgc

SEQ ID NO: 472019 - DNA, 30 bp, Artificial Sequence
  Synthetic oligonucleotide
ccacccgaccgccctttccgggtctaccgc

SEQ ID NO: 472020 - DNA, 30 bp, Artificial Sequence
  Synthetic oligonucleotide
agtcgcggcgggctcagtgagccttaccgc

SEQ ID NO: 472021 - DNA, 30 bp, Artificial Sequence
  Synthetic oligonucleotide
gtgctgtcgcatcctcgggcttgaacccgc

SEQ ID NO: 472022 - DNA, 30 bp, Artificial Sequence
  Synthetic oligonucleotide
gggacagacattttgatgaggcagacccgc

SEQ ID NO: 472023 - DNA, 30 bp, Artificial Sequence
  Synthetic oligonucleotide
aaggggtatttctgctgtacaggtccccgc

SEQ ID NO: 472024 - DNA, 30 bp, Artificial Sequence
  Synthetic oligonucleotide
agagtcggagcacggtcggtcagagcccgc

SEQ ID NO: 472025 - DNA, 30 bp, Artificial Sequence
  Synthetic oligonucleotide
gctattctactagtatttacaacggcccgc

SEQ ID NO: 472026 - DNA, 30 bp, Artificial Sequence
  Synthetic oligonucleotide
aattggtgtgtgctcgttccggggtcccgc

SEQ ID NO: 472027 - DNA, 30 bp, Artificial Sequence
  Synthetic oligonucleotide
agtaactctgcagatccagtcggttcccgc

SEQ ID NO: 472028 - DNA, 30 bp, Artificial Sequence
  Synthetic oligonucleotide
ggccgcttggtgtagggatttctttcccgc

SEQ ID NO: 472029 - DNA, 30 bp, Artificial Sequence
  Synthetic oligonucleotide
agttgtgctggcccctcgacaccaagccgc

SEQ ID NO: 472030 - DNA, 30 bp, Artificial Sequence
  Synthetic oligonucleotide
gtaccctagtccgcctcggtctgcagccgc

SEQ ID NO: 472031 - DNA, 30 bp, Artificial Sequence
  Synthetic oligonucleotide
gagggaaacaacgggggcccagggagccgc

SEQ ID NO: 472032 - DNA, 30 bp, Artificial Sequence
  Synthetic oligonucleotide
tagaggatatacaacagattggttagccgc

SEQ ID NO: 472033 - DNA, 30 bp, Artificial Sequence
  Synthetic oligonucleotide
agtgcgccggctagcgaaagcgaacgccgc

SEQ ID NO: 472034 - DNA, 30 bp, Artificial Sequence
  Synthetic oligonucleotide
acagggcagccgcttctcaggtaacgccgc

SEQ ID NO: 472035 - DNA, 30 bp, Artificial Sequence
  Synthetic oligonucleotide
gtcacgagtatatgcaaacagttacgccgc

SEQ ID NO: 472036 - DNA, 30 bp, Artificial Sequence
  Synthetic oligonucleotide
gaattcgaagaaattctttcggtaggccgc

SEQ ID NO: 472037 - DNA, 30 bp, Artificial Sequence
  Synthetic oligonucleotide
ttcggtaggggtagtggatgaaccggccgc

SEQ ID NO: 472038 - DNA, 30 bp, Artificial Sequence
  Synthetic oligonucleotide
tgatttcagcatacgtctttgaatggccgc

SEQ ID NO: 472039 - DNA, 30 bp, Artificial Sequence
  Synthetic oligonucleotide
aggtagatgattggtcgcccctgtggccgc

SEQ ID NO: 472040 - DNA, 31 bp, Artificial Sequence
  Synthetic oligonucleotide
cccttaggatattatgtctgcggaatgccgc

SEQ ID NO: 472041 - DNA, 30 bp, Artificial Sequence
  Synthetic oligonucleotide
cgcggccgcagtattgtgtcttaatgccgc

SEQ ID NO: 472042 - DNA, 30 bp, Artificial Sequence
  Synthetic oligonucleotide
ttatatgagtccagtgtagtttgatgccgc

SEQ ID NO: 472043 - DNA, 30 bp, Artificial Sequence
  Synthetic oligonucleotide
agccgattgctaagtacactttggtgccgc

SEQ ID NO: 472044 - DNA, 30 bp, Artificial Sequence
  Synthetic oligonucleotide
tttccttttgttaaggttcgtgtgtgccgc

SEQ ID NO: 472045 - DNA, 30 bp, Artificial Sequence
  Synthetic oligonucleotide
cgcggacgcggacgagagttctccatccgc

SEQ ID NO: 472046 - DNA, 30 bp, Artificial Sequence
  Synthetic oligonucleotide
gttatttatcacccggagctggagatccgc

SEQ ID NO: 472047 - DNA, 30 bp, Artificial Sequence
  Synthetic oligonucleotide
atgtgatatgtgtatacacactatatccgc

SEQ ID NO: 472048 - DNA, 30 bp, Artificial Sequence
  Synthetic oligonucleotide
ttacttcctgtgtttcttcacggtatccgc

SEQ ID NO: 472049 - DNA, 29 bp, Artificial Sequence
  Synthetic oligonucleotide
ttgtagatgttgcgcattcttgtatccgc

SEQ ID NO: 472050 - DNA, 30 bp, Artificial Sequence
  Synthetic oligonucleotide
tgtctcagagggtctcctcgtgagctccgc

SEQ ID NO: 472051 - DNA, 31 bp, Artificial Sequence
  Synthetic oligonucleotide
ggaaacttgaaaggaggcagctcttctccgc

SEQ ID NO: 472052 - DNA, 30 bp, Artificial Sequence
  Synthetic oligonucleotide
gtctcacggggcaaccgccgcacagtccgc

SEQ ID NO: 472053 - DNA, 30 bp, Artificial Sequence
  Synthetic oligonucleotide
tttttagcttcggtaaaaaagtaggtccgc

SEQ ID NO: 472054 - DNA, 30 bp, Artificial Sequence
  Synthetic oligonucleotide
ctttaattgtgtatctggttgtcggtccgc

SEQ ID NO: 472055 - DNA, 30 bp, Artificial Sequence
  Synthetic oligonucleotide
actgcggtagcatatagaacgcctgtccgc

SEQ ID NO: 472056 - DNA, 30 bp, Artificial Sequence
  Synthetic oligonucleotide
tatcttttctgagcccgggactctgtccgc

SEQ ID NO: 472057 - DNA, 30 bp, Artificial Sequence
  Synthetic oligonucleotide
cctggcagcgagcggacgcacacattccgc

SEQ ID NO: 472058 - DNA, 30 bp, Artificial Sequence
  Synthetic oligonucleotide
acagatattttattcaccgccgatttccgc

SEQ ID NO: 472059 - DNA, 30 bp, Artificial Sequence
  Synthetic oligonucleotide
cttcaggatccatgtaatgcgcttttccgc

SEQ ID NO: 472060 - DNA, 30 bp, Artificial Sequence
  Synthetic oligonucleotide
taaaggccctggctttgttacttaaagcgc

SEQ ID NO: 472061 - DNA, 30 bp, Artificial Sequence
  Synthetic oligonucleotide
gttgttagtatcctatagttaatcaagcgc

SEQ ID NO: 472062 - DNA, 30 bp, Artificial Sequence
  Synthetic oligonucleotide
ccaggatcgagggcccgatatgggaagcgc

SEQ ID NO: 472063 - DNA, 30 bp, Artificial Sequence
  Synthetic oligonucleotide
acacggttcgtgctcaccttgatgaagcgc

SEQ ID NO: 472064 - DNA, 30 bp, Artificial Sequence
  Synthetic oligonucleotide
gttatcttcaacccagacagaaataagcgc

SEQ ID NO: 472065 - DNA, 30 bp, Artificial Sequence
  Synthetic oligonucleotide
aagcataaggaaaacgacagggataagcgc

SEQ ID NO: 472066 - DNA, 30 bp, Artificial Sequence
  Synthetic oligonucleotide
gaatagattatataagagacaaaacagcgc

SEQ ID NO: 472067 - DNA, 30 bp, Artificial Sequence
  Synthetic oligonucleotide
tctctccatcctactataaacagccagcgc

SEQ ID NO: 472068 - DNA, 30 bp, Artificial Sequence
  Synthetic oligonucleotide
ggccaccagggctgcgtatgcctgcagcgc

SEQ ID NO: 472069 - DNA, 30 bp, Artificial Sequence
  Synthetic oligonucleotide
tagctgcacgtccggaaccagaatcagcgc

SEQ ID NO: 472070 - DNA, 30 bp, Artificial Sequence
  Synthetic oligonucleotide
agacactcggacattagacggactcagcgc

SEQ ID NO: 472071 - DNA, 30 bp, Artificial Sequence
  Synthetic oligonucleotide
tattggtggccattgattcaatgtcagcgc

SEQ ID NO: 472072 - DNA, 30 bp, Artificial Sequence
  Synthetic oligonucleotide
cttaagatggggtctccaatcattcagcgc

SEQ ID NO: 472073 - DNA, 30 bp, Artificial Sequence
  Synthetic oligonucleotide
gagattgcgcaaggtaaaatgcaagagcgc

SEQ ID NO: 472074 - DNA, 30 bp, Artificial Sequence
  Synthetic oligonucleotide
taaacctcgtccgactaccgttacgagcgc

SEQ ID NO: 472075 - DNA, 30 bp, Artificial Sequence
  Synthetic oligonucleotide
actccttccactgggaataaaatcgagcgc

SEQ ID NO: 472076 - DNA, 30 bp, Artificial Sequence
  Synthetic oligonucleotide
tatattgtgagtcgttttaaagtcgagcgc

SEQ ID NO: 472077 - DNA, 30 bp, Artificial Sequence
  Synthetic oligonucleotide
ttcgaacggaaagtctgtctgacggagcgc

SEQ ID NO: 472078 - DNA, 30 bp, Artificial Sequence
  Synthetic oligonucleotide
gactctcgggatgaacacatgccggagcgc

SEQ ID NO: 472079 - DNA, 30 bp, Artificial Sequence
  Synthetic oligonucleotide
cgtttaaattatttaagcccggcggagcgc

SEQ ID NO: 472080 - DNA, 30 bp, Artificial Sequence
  Synthetic oligonucleotide
atacaagtcgcatattttcaactggagcgc

SEQ ID NO: 472081 - DNA, 30 bp, Artificial Sequence
  Synthetic oligonucleotide
cgtcggtgataggccattttttctgagcgc

SEQ ID NO: 472082 - DNA, 30 bp, Artificial Sequence
  Synthetic oligonucleotide
gtagtgtataatgggccttcaacatagcgc

SEQ ID NO: 472083 - DNA, 30 bp, Artificial Sequence
  Synthetic oligonucleotide
cacaaccgtggagtcaaaatgtaaacgcgc

SEQ ID NO: 472084 - DNA, 30 bp, Artificial Sequence
  Synthetic oligonucleotide
cggtgtttccatcgcattaatgtaacgcgc

SEQ ID NO: 472085 - DNA, 30 bp, Artificial Sequence
  Synthetic oligonucleotide
cttacacacaaacagatattcgtcacgcgc

SEQ ID NO: 472086 - DNA, 30 bp, Artificial Sequence
  Synthetic oligonucleotide
agccgcgttaatatggtgaattagacgcgc

SEQ ID NO: 472087 - DNA, 30 bp, Artificial Sequence
  Synthetic oligonucleotide
ggagcattgtcgtcttgatcaaggacgcgc

SEQ ID NO: 472088 - DNA, 30 bp, Artificial Sequence
  Synthetic oligonucleotide
taataacgtccgccctgtggccatacgcgc

SEQ ID NO: 472089 - DNA, 30 bp, Artificial Sequence
  Synthetic oligonucleotide
tgtcttcacttaacgccttgcgatccgcgc

SEQ ID NO: 472090 - DNA, 30 bp, Artificial Sequence
  Synthetic oligonucleotide
agtaaagtattccttgcgggtatagcgcgc

SEQ ID NO: 472091 - DNA, 30 bp, Artificial Sequence
  Synthetic oligonucleotide
ccttgcaaccgcttgagaattaacgcgcgc

SEQ ID NO: 472092 - DNA, 30 bp, Artificial Sequence
  Synthetic oligonucleotide
atccctaaatcagtatattattgggcgcgc

SEQ ID NO: 472093 - DNA, 30 bp, Artificial Sequence
  Synthetic oligonucleotide
aagtttattcgaaggctataatactcgcgc

SEQ ID NO: 472094 - DNA, 30 bp, Artificial Sequence
  Synthetic oligonucleotide
tctgttttacaggtagcatcgacctcgcgc

SEQ ID NO: 472095 - DNA, 30 bp, Artificial Sequence
  Synthetic oligonucleotide
aacggcgatgtgagtagtagaaggtcgcgc

SEQ ID NO: 472096 - DNA, 31 bp, Artificial Sequence
  Synthetic oligonucleotide
aatccgcggtcccgtctagccctggtcgcgc

SEQ ID NO: 472097 - DNA, 30 bp, Artificial Sequence
  Synthetic oligonucleotide
gttgcacgtgctgctggattagcaaggcgc

SEQ ID NO: 472098 - DNA, 30 bp, Artificial Sequence
  Synthetic oligonucleotide
cgcccgggtgtctctctctggagaaggcgc

SEQ ID NO: 472099 - DNA, 30 bp, Artificial Sequence
  Synthetic oligonucleotide
aattagaacgtacgttatgtgctcaggcgc

SEQ ID NO: 472100 - DNA, 30 bp, Artificial Sequence
  Synthetic oligonucleotide
aggggttctgacagtgggagggtcaggcgc

SEQ ID NO: 472101 - DNA, 30 bp, Artificial Sequence
  Synthetic oligonucleotide
attatggacagaggtccgtgtttgaggcgc

SEQ ID NO: 472102 - DNA, 30 bp, Artificial Sequence
  Synthetic oligonucleotide
aaactgacctgcatctccccctataggcgc

SEQ ID NO: 472103 - DNA, 30 bp, Artificial Sequence
  Synthetic oligonucleotide
gaacgcttgcaattaatgtcgctccggcgc

SEQ ID NO: 472104 - DNA, 30 bp, Artificial Sequence
  Synthetic oligonucleotide
acaagttcctcattttgttacacgcggcgc

SEQ ID NO: 472105 - DNA, 30 bp, Artificial Sequence
  Synthetic oligonucleotide
ggccgtccctaggggtagccaagcgggcgc

SEQ ID NO: 472106 - DNA, 30 bp, Artificial Sequence
  Synthetic oligonucleotide
tataggattaaggatacggccagcgggcgc

SEQ ID NO: 472107 - DNA, 30 bp, Artificial Sequence
  Synthetic oligonucleotide
caaacgcttccgggtgattgaatcgggcgc

SEQ ID NO: 472108 - DNA, 30 bp, Artificial Sequence
  Synthetic oligonucleotide
agcagaagctatgccgggtgtcaggggcgc

SEQ ID NO: 472109 - DNA, 30 bp, Artificial Sequence
  Synthetic oligonucleotide
gcgggcgcgggtatcagccaggaggggcgc

SEQ ID NO: 472110 - DNA, 30 bp, Artificial Sequence
  Synthetic oligonucleotide
gaactcataagggtcggggcataggggcgc

SEQ ID NO: 472111 - DNA, 30 bp, Artificial Sequence
  Synthetic oligonucleotide
atctgcagcgggtacccggttatggggcgc

SEQ ID NO: 472112 - DNA, 30 bp, Artificial Sequence
  Synthetic oligonucleotide
ttgggtatcaggacatcgcctgatgggcgc

SEQ ID NO: 472113 - DNA, 30 bp, Artificial Sequence
  Synthetic oligonucleotide
ttggggtcccggtctggggcgaaatggcgc

SEQ ID NO: 472114 - DNA, 30 bp, Artificial Sequence
  Synthetic oligonucleotide
aaatatgaagccagaccacgataatggcgc

SEQ ID NO: 472115 - DNA, 30 bp, Artificial Sequence
  Synthetic oligonucleotide
gtgccgagcatgaacgccccaggatggcgc

SEQ ID NO: 472116 - DNA, 30 bp, Artificial Sequence
  Synthetic oligonucleotide
tatggaattactgggagattaaactggcgc

SEQ ID NO: 472117 - DNA, 30 bp, Artificial Sequence
  Synthetic oligonucleotide
gttttgccgctaatacgtagtagctggcgc

SEQ ID NO: 472118 - DNA, 30 bp, Artificial Sequence
  Synthetic oligonucleotide
tgtaggcctcactcaggctttaagtggcgc

SEQ ID NO: 472119 - DNA, 30 bp, Artificial Sequence
  Synthetic oligonucleotide
cgcggttcaagtgaaacagggcagtggcgc

SEQ ID NO: 472120 - DNA, 30 bp, Artificial Sequence
  Synthetic oligonucleotide
cattaaacgatatttgcactagggtggcgc

SEQ ID NO: 472121 - DNA, 30 bp, Artificial Sequence
  Synthetic oligonucleotide
ctctggtaacagtcggagggttattggcgc

SEQ ID NO: 472122 - DNA, 30 bp, Artificial Sequence
  Synthetic oligonucleotide
ggagtttaaagaccctacctgtgcatgcgc

SEQ ID NO: 472123 - DNA, 30 bp, Artificial Sequence
  Synthetic oligonucleotide
gaccgggaggttggctaaaatttgatgcgc

SEQ ID NO: 472124 - DNA, 30 bp, Artificial Sequence
  Synthetic oligonucleotide
cttactgtaatgtgatattttcatatgcgc

SEQ ID NO: 472125 - DNA, 30 bp, Artificial Sequence
  Synthetic oligonucleotide
gaggtcagcccccaaggtttaggtatgcgc

SEQ ID NO: 472126 - DNA, 30 bp, Artificial Sequence
  Synthetic oligonucleotide
ttctacgtatagatgataatggttatgcgc

SEQ ID NO: 472127 - DNA, 30 bp, Artificial Sequence
  Synthetic oligonucleotide
gaatatccatggttactaaagtgtctgcgc

SEQ ID NO: 472128 - DNA, 30 bp, Artificial Sequence
  Synthetic oligonucleotide
cagctgctcgcgcacgttatatacttgcgc

SEQ ID NO: 472129 - DNA, 30 bp, Artificial Sequence
  Synthetic oligonucleotide
aaagtaattaagtttccccgttacttgcgc

SEQ ID NO: 472130 - DNA, 30 bp, Artificial Sequence
  Synthetic oligonucleotide
ggtctgctgccttcaacgaggatcttgcgc

SEQ ID NO: 472131 - DNA, 30 bp, Artificial Sequence
  Synthetic oligonucleotide
gttcttcgtcctgagtacaatatgttgcgc

SEQ ID NO: 472132 - DNA, 30 bp, Artificial Sequence
  Synthetic oligonucleotide
cttccagagctgaaaatcaactctttgcgc

SEQ ID NO: 472133 - DNA, 30 bp, Artificial Sequence
  Synthetic oligonucleotide
cggagttttagccacagtctcaacaatcgc

SEQ ID NO: 472134 - DNA, 30 bp, Artificial Sequence
  Synthetic oligonucleotide
atgatacggagtgtccttggctgtaatcgc

SEQ ID NO: 472135 - DNA, 30 bp, Artificial Sequence
  Synthetic oligonucleotide
ggatttcaagaccggttagcgtcacatcgc

SEQ ID NO: 472136 - DNA, 30 bp, Artificial Sequence
  Synthetic oligonucleotide
ccgccgcagtcacgggctcagtgacatcgc

SEQ ID NO: 472137 - DNA, 30 bp, Artificial Sequence
  Synthetic oligonucleotide
ttcagactgtagcttcgttgtctacatcgc

SEQ ID NO: 472138 - DNA, 30 bp, Artificial Sequence
  Synthetic oligonucleotide
gccggcgatagcccgtttaagcgccatcgc

SEQ ID NO: 472139 - DNA, 30 bp, Artificial Sequence
  Synthetic oligonucleotide
gggtggtaggccgtccaccgtggccatcgc

SEQ ID NO: 472140 - DNA, 27 bp, Artificial Sequence
  Synthetic oligonucleotide
tggtcctcttgagttggaaggcatcgc

SEQ ID NO: 472141 - DNA, 30 bp, Artificial Sequence
  Synthetic oligonucleotide
agttgattgtgtgagactaacaggcatcgc

SEQ ID NO: 472142 - DNA, 30 bp, Artificial Sequence
  Synthetic oligonucleotide
gacgcccaagaagtcatactatggcatcgc

SEQ ID NO: 472143 - DNA, 30 bp, Artificial Sequence
  Synthetic oligonucleotide
ggtcgcggttcttaatatgtccatcatcgc

SEQ ID NO: 472144 - DNA, 30 bp, Artificial Sequence
  Synthetic oligonucleotide
gggcgatgcatggtttgttaatatcatcgc

SEQ ID NO: 472145 - DNA, 30 bp, Artificial Sequence
  Synthetic oligonucleotide
cagcagtgcctcgtggtgccccctcatcgc

SEQ ID NO: 472146 - DNA, 30 bp, Artificial Sequence
  Synthetic oligonucleotide
tactgcccgttttttaacggttcagatcgc

SEQ ID NO: 472147 - DNA, 30 bp, Artificial Sequence
  Synthetic oligonucleotide
gaagtttaactggcggatttattcgatcgc

SEQ ID NO: 472148 - DNA, 30 bp, Artificial Sequence
  Synthetic oligonucleotide
tgcattgtgcggagaacggaaaaggatcgc

SEQ ID NO: 472149 - DNA, 30 bp, Artificial Sequence
  Synthetic oligonucleotide
tccactgtacttatacttggcgcggatcgc

SEQ ID NO: 472150 - DNA, 29 bp, Artificial Sequence
  Synthetic oligonucleotide
ggcgcacatgatcgattaacctggatcgc

SEQ ID NO: 472151 - DNA, 30 bp, Artificial Sequence
  Synthetic oligonucleotide
tctacgctacgaggtccataagttgatcgc

SEQ ID NO: 472152 - DNA, 30 bp, Artificial Sequence
  Synthetic oligonucleotide
aacttctagtcgacgcacactaaatatcgc

SEQ ID NO: 472153 - DNA, 30 bp, Artificial Sequence
  Synthetic oligonucleotide
atgttaatacgtctgtggctgtaatatcgc

SEQ ID NO: 472154 - DNA, 30 bp, Artificial Sequence
  Synthetic oligonucleotide
tggaggagtttataatgagtatactatcgc

SEQ ID NO: 472155 - DNA, 30 bp, Artificial Sequence
  Synthetic oligonucleotide
gggttttgaaacatatgttgatgctatcgc

SEQ ID NO: 472156 - DNA, 30 bp, Artificial Sequence
  Synthetic oligonucleotide
gatgtccaggttagtatttagtggtatcgc

SEQ ID NO: 472157 - DNA, 30 bp, Artificial Sequence
  Synthetic oligonucleotide
ttattaggtgccgctagcgcatgttatcgc

SEQ ID NO: 472158 - DNA, 30 bp, Artificial Sequence
  Synthetic oligonucleotide
atttctttgatgacgacgcctttttatcgc

SEQ ID NO: 472159 - DNA, 30 bp, Artificial Sequence
  Synthetic oligonucleotide
acaatgtattataatttatacctgactcgc

SEQ ID NO: 472160 - DNA, 30 bp, Artificial Sequence
  Synthetic oligonucleotide
ggaatactgctcttatattagcgtactcgc

SEQ ID NO: 472161 - DNA, 30 bp, Artificial Sequence
  Synthetic oligonucleotide
tccgctacacggcagcttgcgaaacctcgc

SEQ ID NO: 472162 - DNA, 30 bp, Artificial Sequence
  Synthetic oligonucleotide
ttgtgataatacgtacatttatgccctcgc

SEQ ID NO: 472163 - DNA, 30 bp, Artificial Sequence
  Synthetic oligonucleotide
tgtgacgcgtcatgccctcagctccctcgc

SEQ ID NO: 472164 - DNA, 30 bp, Artificial Sequence
  Synthetic oligonucleotide
tccggccggacactggggtcggggcctcgc

SEQ ID NO: 472165 - DNA, 30 bp, Artificial Sequence
  Synthetic oligonucleotide
tttgccttgcattccattcaaattcctcgc

SEQ ID NO: 472166 - DNA, 30 bp, Artificial Sequence
  Synthetic oligonucleotide
tggttataaaaggctcgcgtgcaggctcgc

SEQ ID NO: 472167 - DNA, 30 bp, Artificial Sequence
  Synthetic oligonucleotide
ataagttctgggctttttgtatctgctcgc

SEQ ID NO: 472168 - DNA, 30 bp, Artificial Sequence
  Synthetic oligonucleotide
ttacgtgttctgactataggtctcagtcgc

SEQ ID NO: 472169 - DNA, 30 bp, Artificial Sequence
  Synthetic oligonucleotide
attgaaattgttgtaactacaaggagtcgc

SEQ ID NO: 472170 - DNA, 30 bp, Artificial Sequence
  Synthetic oligonucleotide
gctttacccataagggccttggatagtcgc

SEQ ID NO: 472171 - DNA, 30 bp, Artificial Sequence
  Synthetic oligonucleotide
gcatataagatacccaccaattgtagtcgc

SEQ ID NO: 472172 - DNA, 29 bp, Artificial Sequence
  Synthetic oligonucleotide
gcccagccatgtctgggcgctaacgtcgc

SEQ ID NO: 472173 - DNA, 30 bp, Artificial Sequence
  Synthetic oligonucleotide
acattggcgcaacacacgtgtaaccgtcgc

SEQ ID NO: 472174 - DNA, 30 bp, Artificial Sequence
  Synthetic oligonucleotide
ggacattttcacggcgagccaaatcgtcgc

SEQ ID NO: 472175 - DNA, 30 bp, Artificial Sequence
  Synthetic oligonucleotide
cccgcaattttcagcatagcacacggtcgc

SEQ ID NO: 472176 - DNA, 30 bp, Artificial Sequence
  Synthetic oligonucleotide
cccgggctttagcgccttatttacggtcgc

SEQ ID NO: 472177 - DNA, 30 bp, Artificial Sequence
  Synthetic oligonucleotide
cttgagaacattgacgggtacgcgggtcgc

SEQ ID NO: 472178 - DNA, 30 bp, Artificial Sequence
  Synthetic oligonucleotide
tttccgtctaggttttatattgcgggtcgc

SEQ ID NO: 472179 - DNA, 30 bp, Artificial Sequence
  Synthetic oligonucleotide
ctgttagcgactaagggccctcctggtcgc

SEQ ID NO: 472180 - DNA, 30 bp, Artificial Sequence
  Synthetic oligonucleotide
gtattcagatagcaatccgaatctggtcgc

SEQ ID NO: 472181 - DNA, 30 bp, Artificial Sequence
  Synthetic oligonucleotide
aggtggcagctagcgtagactacatgtcgc

SEQ ID NO: 472182 - DNA, 30 bp, Artificial Sequence
  Synthetic oligonucleotide
taagattttatagatgctaccgcatgtcgc

SEQ ID NO: 472183 - DNA, 30 bp, Artificial Sequence
  Synthetic oligonucleotide
attttccaacgtgtgggacctggctgtcgc

SEQ ID NO: 472184 - DNA, 29 bp, Artificial Sequence
  Synthetic oligonucleotide
gttgaaatgacttgagtggtggctgtcgc

SEQ ID NO: 472185 - DNA, 30 bp, Artificial Sequence
  Synthetic oligonucleotide
acatctcttgtcagattatccatctgtcgc

SEQ ID NO: 472186 - DNA, 30 bp, Artificial Sequence
  Synthetic oligonucleotide
acatgactgcatattcgggacggttgtcgc

SEQ ID NO: 472187 - DNA, 30 bp, Artificial Sequence
  Synthetic oligonucleotide
ggtttgtcgtcgccagggctatgcattcgc

SEQ ID NO: 472188 - DNA, 30 bp, Artificial Sequence
  Synthetic oligonucleotide
cccacgattgcccttttgtatgatattcgc

SEQ ID NO: 472189 - DNA, 30 bp, Artificial Sequence
  Synthetic oligonucleotide
tttgacaaaggacgctggtgcgcgcttcgc

SEQ ID NO: 472190 - DNA, 30 bp, Artificial Sequence
  Synthetic oligonucleotide
aacaaacatgcgttacgcaggtggcttcgc

SEQ ID NO: 472191 - DNA, 30 bp, Artificial Sequence
  Synthetic oligonucleotide
gcggtcacaattctcagcttcccagttcgc

SEQ ID NO: 472192 - DNA, 30 bp, Artificial Sequence
  Synthetic oligonucleotide
aagcgcttgtcccagcgggttttcgttcgc

SEQ ID NO: 472193 - DNA, 30 bp, Artificial Sequence
  Synthetic oligonucleotide
gagtaaagcacgtttgagggtagctttcgc

SEQ ID NO: 472194 - DNA, 30 bp, Artificial Sequence
  Synthetic oligonucleotide
cgcaacatggattaggttgaaccgtttcgc

SEQ ID NO: 472195 - DNA, 30 bp, Artificial Sequence
  Synthetic oligonucleotide
tgggatagcgatgtatggttgttgtttcgc

SEQ ID NO: 472196 - DNA, 30 bp, Artificial Sequence
  Synthetic oligonucleotide
ttatgtttataggtaatgttaaaaaaaggc

SEQ ID NO: 472197 - DNA, 30 bp, Artificial Sequence
  Synthetic oligonucleotide
actatcttcgcacatcttcacacaaaaggc

SEQ ID NO: 472198 - DNA, 30 bp, Artificial Sequence
  Synthetic oligonucleotide
cagaagtacactcgaagcagaccaaaaggc

SEQ ID NO: 472199 - DNA, 30 bp, Artificial Sequence
  Synthetic oligonucleotide
aacctaagtacacttaggatcgcaaaaggc

SEQ ID NO: 472200 - DNA, 34 bp, Artificial Sequence
  Synthetic oligonucleotide
gatactagaccaccacgtgtccatcagaaaaggc

SEQ ID NO: 472201 - DNA, 30 bp, Artificial Sequence
  Synthetic oligonucleotide
aagtctatcaacctcttgaaaggaaaaggc

SEQ ID NO: 472202 - DNA, 30 bp, Artificial Sequence
  Synthetic oligonucleotide
tagataaactatgacggacttttaaaaggc

SEQ ID NO: 472203 - DNA, 30 bp, Artificial Sequence
  Synthetic oligonucleotide
ggttacgttattgtccgccttggcaaaggc

SEQ ID NO: 472204 - DNA, 30 bp, Artificial Sequence
  Synthetic oligonucleotide
tccgggcgttgtgaaacggaatcgaaaggc

SEQ ID NO: 472205 - DNA, 30 bp, Artificial Sequence
  Synthetic oligonucleotide
gattcgctacaagttatcgaaactaaaggc

SEQ ID NO: 472206 - DNA, 30 bp, Artificial Sequence
  Synthetic oligonucleotide
gaatcaaatggttgtcaccttgcacaaggc

SEQ ID NO: 472207 - DNA, 30 bp, Artificial Sequence
  Synthetic oligonucleotide
gcttgttggattgaagcgtgtggtcaaggc

SEQ ID NO: 472208 - DNA, 30 bp, Artificial Sequence
  Synthetic oligonucleotide
cttcgtggatatttaaacggagtagaaggc

SEQ ID NO: 472209 - DNA, 30 bp, Artificial Sequence
  Synthetic oligonucleotide
gttcgtacttcgaagtcaattgtcgaaggc

SEQ ID NO: 472210 - DNA, 30 bp, Artificial Sequence
  Synthetic oligonucleotide
aacgaagagccgcaagccttacgggaaggc

SEQ ID NO: 472211 - DNA, 30 bp, Artificial Sequence
  Synthetic oligonucleotide
gaacctaagcagtcaaattagtgggaaggc

SEQ ID NO: 472212 - DNA, 30 bp, Artificial Sequence
  Synthetic oligonucleotide
ttcttgatgaaagatgcagaggctgaaggc

SEQ ID NO: 472213 - DNA, 30 bp, Artificial Sequence
  Synthetic oligonucleotide
cgcaaaatcctggaatagagttctgaaggc

SEQ ID NO: 472214 - DNA, 30 bp, Artificial Sequence
  Synthetic oligonucleotide
gctgcatatcgttgcggcaacgcctaaggc

SEQ ID NO: 472215 - DNA, 30 bp, Artificial Sequence
  Synthetic oligonucleotide
ggtcgatcacgggtgctcaggaagtaaggc

SEQ ID NO: 472216 - DNA, 30 bp, Artificial Sequence
  Synthetic oligonucleotide
ctgggtataggtgcatgccatacgtaaggc

SEQ ID NO: 472217 - DNA, 30 bp, Artificial Sequence
  Synthetic oligonucleotide
ggcctgcgcttcgaacacttgtgttaaggc

SEQ ID NO: 472218 - DNA, 30 bp, Artificial Sequence
  Synthetic oligonucleotide
ttggcgaagacgaaattcagtataacaggc

SEQ ID NO: 472219 - DNA, 30 bp, Artificial Sequence
  Synthetic oligonucleotide
acagatacttggcgcccatgcgccacaggc

SEQ ID NO: 472220 - DNA, 30 bp, Artificial Sequence
  Synthetic oligonucleotide
agctaaggtcgatttcgagggcagacaggc

SEQ ID NO: 472221 - DNA, 30 bp, Artificial Sequence
  Synthetic oligonucleotide
cggactcatttgggtccttgactgacaggc

SEQ ID NO: 472222 - DNA, 30 bp, Artificial Sequence
  Synthetic oligonucleotide
agtgacgcggacggctcatgtttgacaggc

SEQ ID NO: 472223 - DNA, 30 bp, Artificial Sequence
  Synthetic oligonucleotide
gctgattggcaacgtgttttggtgccaggc

SEQ ID NO: 472224 - DNA, 30 bp, Artificial Sequence
  Synthetic oligonucleotide
taggttggggcatcgggaggcggtccaggc

SEQ ID NO: 472225 - DNA, 30 bp, Artificial Sequence
  Synthetic oligonucleotide
aatccgaatataaggtttgagcttccaggc

SEQ ID NO: 472226 - DNA, 30 bp, Artificial Sequence
  Synthetic oligonucleotide
tctaagactatagccccgtttccagcaggc

SEQ ID NO: 472227 - DNA, 30 bp, Artificial Sequence
  Synthetic oligonucleotide
ggttaagtaccctgtactcccgcagcaggc

SEQ ID NO: 472228 - DNA, 30 bp, Artificial Sequence
  Synthetic oligonucleotide
atcggttgaccttgaagtgcaaacgcaggc

SEQ ID NO: 472229 - DNA, 30 bp, Artificial Sequence
  Synthetic oligonucleotide
gtcgttataacctccgtgttgcgcgcaggc

SEQ ID NO: 472230 - DNA, 30 bp, Artificial Sequence
  Synthetic oligonucleotide
gccatgtcatggttgggaacatgcgcaggc

SEQ ID NO: 472231 - DNA, 30 bp, Artificial Sequence
  Synthetic oligonucleotide
ggtggacttcaaaccctggggtaggcaggc

SEQ ID NO: 472232 - DNA, 30 bp, Artificial Sequence
  Synthetic oligonucleotide
aaaaactgccgctccgacacgcatgcaggc

SEQ ID NO: 472233 - DNA, 30 bp, Artificial Sequence
  Synthetic oligonucleotide
tttccctgaaggtccagtaaaggtgcaggc

SEQ ID NO: 472234 - DNA, 30 bp, Artificial Sequence
  Synthetic oligonucleotide
ctctgtaatagcatgtatctcctatcaggc

SEQ ID NO: 472235 - DNA, 30 bp, Artificial Sequence
  Synthetic oligonucleotide
cgttcctagtcggaaggataggcctcaggc

SEQ ID NO: 472236 - DNA, 30 bp, Artificial Sequence
  Synthetic oligonucleotide
cgttaatatttttgcagggtcgtttcaggc

SEQ ID NO: 472237 - DNA, 30 bp, Artificial Sequence
  Synthetic oligonucleotide
gcggtaaagtccctttgatttaaaagaggc

SEQ ID NO: 472238 - DNA, 30 bp, Artificial Sequence
  Synthetic oligonucleotide
cgcggcctggcgccataacgggcaagaggc

SEQ ID NO: 472239 - DNA, 30 bp, Artificial Sequence
  Synthetic oligonucleotide
gggagcgcttctatactttagcgaagaggc

SEQ ID NO: 472240 - DNA, 30 bp, Artificial Sequence
  Synthetic oligonucleotide
aggttacggcctcccgatatggcgagaggc

SEQ ID NO: 472241 - DNA, 30 bp, Artificial Sequence
  Synthetic oligonucleotide
agcacaaggcaataaccgatgattagaggc

SEQ ID NO: 472242 - DNA, 30 bp, Artificial Sequence
  Synthetic oligonucleotide
caaacttacgtggacacccaataccgaggc

SEQ ID NO: 472243 - DNA, 30 bp, Artificial Sequence
  Synthetic oligonucleotide
aaaatgttccatctgacccctgcccgaggc

SEQ ID NO: 472244 - DNA, 30 bp, Artificial Sequence
  Synthetic oligonucleotide
gtccgtggcttcctttcattccgtcgaggc

SEQ ID NO: 472245 - DNA, 25 bp, Artificial Sequence
  Synthetic oligonucleotide
gttattcaggcctgttcgtcgaggc

SEQ ID NO: 472246 - DNA, 30 bp, Artificial Sequence
  Synthetic oligonucleotide
ctttgtgaaccgacaacacattgtcgaggc

SEQ ID NO: 472247 - DNA, 30 bp, Artificial Sequence
  Synthetic oligonucleotide
ggaatgatataaagtttgaattaaggaggc

SEQ ID NO: 472248 - DNA, 31 bp, Artificial Sequence
  Synthetic oligonucleotide
cttttagcttaattagaagttgtgaggaggc

SEQ ID NO: 472249 - DNA, 30 bp, Artificial Sequence
  Synthetic oligonucleotide
cgaaggtattttcgtcgggttctcggaggc

SEQ ID NO: 472250 - DNA, 30 bp, Artificial Sequence
  Synthetic oligonucleotide
gcctcttactaaatgctgtacaagggaggc

SEQ ID NO: 472251 - DNA, 30 bp, Artificial Sequence
  Synthetic oligonucleotide
tggatattaacagaacccgtaacgggaggc

SEQ ID NO: 472252 - DNA, 30 bp, Artificial Sequence
  Synthetic oligonucleotide
ttcttaggttagtacctaacgcctggaggc

SEQ ID NO: 472253 - DNA, 30 bp, Artificial Sequence
  Synthetic oligonucleotide
gcgattgttttttcgccattttttggaggc

SEQ ID NO: 472254 - DNA, 30 bp, Artificial Sequence
  Synthetic oligonucleotide
ttgccacgcaggaataaggaagaatgaggc

SEQ ID NO: 472255 - DNA, 30 bp, Artificial Sequence
  Synthetic oligonucleotide
ttcttacaggatccaaggcggtaatgaggc

SEQ ID NO: 472256 - DNA, 30 bp, Artificial Sequence
  Synthetic oligonucleotide
aattatggacgttgcataatcacatgaggc

SEQ ID NO: 472257 - DNA, 30 bp, Artificial Sequence
  Synthetic oligonucleotide
ggagttggaaaatatcacgccccatgaggc

SEQ ID NO: 472258 - DNA, 30 bp, Artificial Sequence
  Synthetic oligonucleotide
ggcgaggatcctctcaacctggcatgaggc

SEQ ID NO: 472259 - DNA, 30 bp, Artificial Sequence
  Synthetic oligonucleotide
aaagcgaccacccgggtccgcacttgaggc

SEQ ID NO: 472260 - DNA, 30 bp, Artificial Sequence
  Synthetic oligonucleotide
acacggcgtgtgtcgaagaaaccttgaggc

SEQ ID NO: 472261 - DNA, 30 bp, Artificial Sequence
  Synthetic oligonucleotide
agcctatttctcgcacctagcgcaataggc

SEQ ID NO: 472262 - DNA, 30 bp, Artificial Sequence
  Synthetic oligonucleotide
cattagtgtgaatgcagacaggacataggc

SEQ ID NO: 472263 - DNA, 30 bp, Artificial Sequence
  Synthetic oligonucleotide
tccctttctttgtctcctgcccagataggc

SEQ ID NO: 472264 - DNA, 30 bp, Artificial Sequence
  Synthetic oligonucleotide
tgtttttcaacctcgtgaccggctataggc

SEQ ID NO: 472265 - DNA, 30 bp, Artificial Sequence
  Synthetic oligonucleotide
gacgggggtatttccataggcagtataggc

SEQ ID NO: 472266 - DNA, 30 bp, Artificial Sequence
  Synthetic oligonucleotide
aactctgtcgaagctgtctgcgttataggc

SEQ ID NO: 472267 - DNA, 30 bp, Artificial Sequence
  Synthetic oligonucleotide
tttcatacagcggcatcgcatgcactaggc

SEQ ID NO: 472268 - DNA, 30 bp, Artificial Sequence
  Synthetic oligonucleotide
tggttgggtgacgaccgtctatgcctaggc

SEQ ID NO: 472269 - DNA, 30 bp, Artificial Sequence
  Synthetic oligonucleotide
atcactttctttgcgttgccaccgctaggc

SEQ ID NO: 472270 - DNA, 30 bp, Artificial Sequence
  Synthetic oligonucleotide
tggtggagtcccatgaagggagggctaggc

SEQ ID NO: 472271 - DNA, 30 bp, Artificial Sequence
  Synthetic oligonucleotide
ttataattggtttcgattgtacctctaggc

SEQ ID NO: 472272 - DNA, 30 bp, Artificial Sequence
  Synthetic oligonucleotide
tcggaagggcgaggcaagcatcttctaggc

SEQ ID NO: 472273 - DNA, 30 bp, Artificial Sequence
  Synthetic oligonucleotide
attaatgcctccatacccgcgggagtaggc

SEQ ID NO: 472274 - DNA, 30 bp, Artificial Sequence
  Synthetic oligonucleotide
aatcttcagacctagggatcgcaggtaggc

SEQ ID NO: 472275 - DNA, 30 bp, Artificial Sequence
  Synthetic oligonucleotide
agtcgtgccatagacgcagttcctgtaggc

SEQ ID NO: 472276 - DNA, 30 bp, Artificial Sequence
  Synthetic oligonucleotide
ggctgctggtacgctgggttcctattaggc

SEQ ID NO: 472277 - DNA, 30 bp, Artificial Sequence
  Synthetic oligonucleotide
cattcggaggtacaaaccatcatgttaggc

SEQ ID NO: 472278 - DNA, 30 bp, Artificial Sequence
  Synthetic oligonucleotide
tagctcgaggaactctggaggtctttaggc

SEQ ID NO: 472279 - DNA, 30 bp, Artificial Sequence
  Synthetic oligonucleotide
gcgatggttgttccgctcagaagtttaggc

SEQ ID NO: 472280 - DNA, 30 bp, Artificial Sequence
  Synthetic oligonucleotide
ggaccgctagcactcgagtcccttttaggc

SEQ ID NO: 472281 - DNA, 30 bp, Artificial Sequence
  Synthetic oligonucleotide
tttctcaggatcggtaggttttttttaggc

SEQ ID NO: 472282 - DNA, 30 bp, Artificial Sequence
  Synthetic oligonucleotide
attggatataggtccttgcggccaaacggc

SEQ ID NO: 472283 - DNA, 30 bp, Artificial Sequence
  Synthetic oligonucleotide
attctggttgacagttatatgttaaacggc

SEQ ID NO: 472284 - DNA, 30 bp, Artificial Sequence
  Synthetic oligonucleotide
aatataattagcggaattcatttaaacggc

SEQ ID NO: 472285 - DNA, 30 bp, Artificial Sequence
  Synthetic oligonucleotide
gtttcgcaggggtcagttcaatacaacggc

SEQ ID NO: 472286 - DNA, 30 bp, Artificial Sequence
  Synthetic oligonucleotide
aggatgcaaggccctattagaaggaacggc

SEQ ID NO: 472287 - DNA, 30 bp, Artificial Sequence
  Synthetic oligonucleotide
ctgggggcgaaaaatacgacattgaacggc

SEQ ID NO: 472288 - DNA, 30 bp, Artificial Sequence
  Synthetic oligonucleotide
ggggtctagggattggaatctgctaacggc

SEQ ID NO: 472289 - DNA, 30 bp, Artificial Sequence
  Synthetic oligonucleotide
tgcgtccgcctgcgccggcagtttaacggc

SEQ ID NO: 472290 - DNA, 30 bp, Artificial Sequence
  Synthetic oligonucleotide
caacttttatgtcgtcgacctttacacggc

SEQ ID NO: 472291 - DNA, 30 bp, Artificial Sequence
  Synthetic oligonucleotide
acccacgtataacccggttcgagccacggc

SEQ ID NO: 472292 - DNA, 30 bp, Artificial Sequence
  Synthetic oligonucleotide
gggccgtgaaggcgtctagttcgccacggc

SEQ ID NO: 472293 - DNA, 30 bp, Artificial Sequence
  Synthetic oligonucleotide
tatgtgccgtcaattattaacgagcacggc

SEQ ID NO: 472294 - DNA, 30 bp, Artificial Sequence
  Synthetic oligonucleotide
ataatgggccgtccggggactgagcacggc

SEQ ID NO: 472295 - DNA, 30 bp, Artificial Sequence
  Synthetic oligonucleotide
ggccctggggaggcggggggcgggcacggc

SEQ ID NO: 472296 - DNA, 30 bp, Artificial Sequence
  Synthetic oligonucleotide
ctagggaatcagggttaatcgggtcacggc

SEQ ID NO: 472297 - DNA, 31 bp, Artificial Sequence
  Synthetic oligonucleotide
tgttggtccctaaaaactttgaacagacggc

SEQ ID NO: 472298 - DNA, 30 bp, Artificial Sequence
  Synthetic oligonucleotide
tgaacgcgctcttgattgaggacagacggc

SEQ ID NO: 472299 - DNA, 30 bp, Artificial Sequence
  Synthetic oligonucleotide
aattttcaacttgtccgccggtccgacggc

SEQ ID NO: 472300 - DNA, 30 bp, Artificial Sequence
  Synthetic oligonucleotide
tgtgtcaggtctaagttgagctaggacggc

SEQ ID NO: 472301 - DNA, 30 bp, Artificial Sequence
  Synthetic oligonucleotide
ccaagtatgtgtcgcatacctcgggacggc

SEQ ID NO: 472302 - DNA, 30 bp, Artificial Sequence
  Synthetic oligonucleotide
aaggggctggactcgacgggtcgtgacggc

SEQ ID NO: 472303 - DNA, 30 bp, Artificial Sequence
  Synthetic oligonucleotide
agccgggtattctactattcaattgacggc

SEQ ID NO: 472304 - DNA, 30 bp, Artificial Sequence
  Synthetic oligonucleotide
aaatagatttttgacatgttacgatacggc

SEQ ID NO: 472305 - DNA, 30 bp, Artificial Sequence
  Synthetic oligonucleotide
catttttcaaactaacctaactggtacggc

SEQ ID NO: 472306 - DNA, 30 bp, Artificial Sequence
  Synthetic oligonucleotide
tacctctgggggaggtggaataattacggc

SEQ ID NO: 472307 - DNA, 30 bp, Artificial Sequence
  Synthetic oligonucleotide
gatatgctcatggtaaactgctcttacggc

SEQ ID NO: 472308 - DNA, 30 bp, Artificial Sequence
  Synthetic oligonucleotide
gccataacgcgacactagttactttacggc

SEQ ID NO: 472309 - DNA, 30 bp, Artificial Sequence
  Synthetic oligonucleotide
gcttctcacggtagagcgaaaccgaccggc

SEQ ID NO: 472310 - DNA, 30 bp, Artificial Sequence
  Synthetic oligonucleotide
atgcctaacggtcgcaagttaccgaccggc

SEQ ID NO: 472311 - DNA, 30 bp, Artificial Sequence
  Synthetic oligonucleotide
tctgcccggtcatctgtcgtggctaccggc

SEQ ID NO: 472312 - DNA, 30 bp, Artificial Sequence
  Synthetic oligonucleotide
gcagtatcggggacaactatagatcccggc

SEQ ID NO: 472313 - DNA, 30 bp, Artificial Sequence
  Synthetic oligonucleotide
ttagcagaggggttagattggttagccggc

SEQ ID NO: 472314 - DNA, 30 bp, Artificial Sequence
  Synthetic oligonucleotide
gggtccataaagggccgtgaatcggccggc

SEQ ID NO: 472315 - DNA, 30 bp, Artificial Sequence
  Synthetic oligonucleotide
aattatcacctcaagggaggtgtggccggc

SEQ ID NO: 472316 - DNA, 30 bp, Artificial Sequence
  Synthetic oligonucleotide
aataggtatgtttactcgagtgctgccggc

SEQ ID NO: 472317 - DNA, 30 bp, Artificial Sequence
  Synthetic oligonucleotide
tattcataatattagccaagagcgtccggc

SEQ ID NO: 472318 - DNA, 30 bp, Artificial Sequence
  Synthetic oligonucleotide
cgccttgccaatgaaatgggcaggtccggc

SEQ ID NO: 472319 - DNA, 30 bp, Artificial Sequence
  Synthetic oligonucleotide
tccccggcgactcgtgaaattgggtccggc

SEQ ID NO: 472320 - DNA, 30 bp, Artificial Sequence
  Synthetic oligonucleotide
gtccgggctgtctgtataccccattccggc

SEQ ID NO: 472321 - DNA, 30 bp, Artificial Sequence
  Synthetic oligonucleotide
catcggccggccaatggctaataaagcggc

SEQ ID NO: 472322 - DNA, 30 bp, Artificial Sequence
  Synthetic oligonucleotide
attttcttcctcaaaattttctaaagcggc

SEQ ID NO: 472323 - DNA, 30 bp, Artificial Sequence
  Synthetic oligonucleotide
cgcgggtgcttcatcaggggctgaagcggc

SEQ ID NO: 472324 - DNA, 30 bp, Artificial Sequence
  Synthetic oligonucleotide
acaaagcgccttagcctgggctagagcggc

SEQ ID NO: 472325 - DNA, 30 bp, Artificial Sequence
  Synthetic oligonucleotide
gacagggatacgtatctttggtatagcggc

SEQ ID NO: 472326 - DNA, 30 bp, Artificial Sequence
  Synthetic oligonucleotide
attgatttagtcaacgtaaaacgtagcggc

SEQ ID NO: 472327 - DNA, 30 bp, Artificial Sequence
  Synthetic oligonucleotide
agtgtgtacgggagtactggttgtagcggc

SEQ ID NO: 472328 - DNA, 30 bp, Artificial Sequence
  Synthetic oligonucleotide
agagtatagggtctccggattcttagcggc

SEQ ID NO: 472329 - DNA, 30 bp, Artificial Sequence
  Synthetic oligonucleotide
gcatcgcagaatcggtgcgggacccgcggc

SEQ ID NO: 472330 - DNA, 30 bp, Artificial Sequence
  Synthetic oligonucleotide
tcgcagcccagtgtactattctcccgcggc

SEQ ID NO: 472331 - DNA, 30 bp, Artificial Sequence
  Synthetic oligonucleotide
tcctggtgtccaatagaaagaatccgcggc

SEQ ID NO: 472332 - DNA, 30 bp, Artificial Sequence
  Synthetic oligonucleotide
ccttagccactggttctaactcagcgcggc

SEQ ID NO: 472333 - DNA, 30 bp, Artificial Sequence
  Synthetic oligonucleotide
gtaccgggtggccgtggtaaaagtcgcggc

SEQ ID NO: 472334 - DNA, 30 bp, Artificial Sequence
  Synthetic oligonucleotide
gcatttgaccctggtctcgggattcgcggc

SEQ ID NO: 472335 - DNA, 30 bp, Artificial Sequence
  Synthetic oligonucleotide
gaatttccgtgcgatagtcttcttcgcggc

SEQ ID NO: 472336 - DNA, 30 bp, Artificial Sequence
  Synthetic oligonucleotide
aaactgtgcttattggctgcccaaggcggc

SEQ ID NO: 472337 - DNA, 30 bp, Artificial Sequence
  Synthetic oligonucleotide
gaggctcggtaatagcagattcgaggcggc

SEQ ID NO: 472338 - DNA, 30 bp, Artificial Sequence
  Synthetic oligonucleotide
gccgagcccttgcgtattttttacggcggc

SEQ ID NO: 472339 - DNA, 30 bp, Artificial Sequence
  Synthetic oligonucleotide
gaaaggggaggcagcgcatgtcgcggcggc

SEQ ID NO: 472340 - DNA, 30 bp, Artificial Sequence
  Synthetic oligonucleotide
gaaagtttctgccgtgacgccgcgggcggc

SEQ ID NO: 472341 - DNA, 29 bp, Artificial Sequence
  Synthetic oligonucleotide
tcgtctcacggatgtttttgtgctgcggc

SEQ ID NO: 472342 - DNA, 30 bp, Artificial Sequence
  Synthetic oligonucleotide
caaaggataactacagttttaacgtgcggc

SEQ ID NO: 472343 - DNA, 30 bp, Artificial Sequence
  Synthetic oligonucleotide
ttgtggactttgtagcagcgttggtgcggc

SEQ ID NO: 472344 - DNA, 30 bp, Artificial Sequence
  Synthetic oligonucleotide
gtcgtaccaagttaaccgaaatgttgcggc

SEQ ID NO: 472345 - DNA, 30 bp, Artificial Sequence
  Synthetic oligonucleotide
aatcctcgcgcgttcttatgtggaatcggc

SEQ ID NO: 472346 - DNA, 30 bp, Artificial Sequence
  Synthetic oligonucleotide
ttggtaatcatgcggcgagcccggatcggc

SEQ ID NO: 472347 - DNA, 30 bp, Artificial Sequence
  Synthetic oligonucleotide
cgtcgtttatgagaaagccgtatgatcggc

SEQ ID NO: 472348 - DNA, 30 bp, Artificial Sequence
  Synthetic oligonucleotide
gagttaggtatatagcaggggactatcggc

SEQ ID NO: 472349 - DNA, 30 bp, Artificial Sequence
  Synthetic oligonucleotide
cagctattttgggtactattcgctatcggc

SEQ ID NO: 472350 - DNA, 30 bp, Artificial Sequence
  Synthetic oligonucleotide
ggtgggattttcttcgacggttgtatcggc

SEQ ID NO: 472351 - DNA, 30 bp, Artificial Sequence
  Synthetic oligonucleotide
attatatgtttgtggcgacatcccctcggc

SEQ ID NO: 472352 - DNA, 30 bp, Artificial Sequence
  Synthetic oligonucleotide
ttcccgctggcaccgtcccgtcagctcggc

SEQ ID NO: 472353 - DNA, 30 bp, Artificial Sequence
  Synthetic oligonucleotide
gagatttgctctgagcgaccttcgctcggc

SEQ ID NO: 472354 - DNA, 30 bp, Artificial Sequence
  Synthetic oligonucleotide
tctgggactaactgtataacgaggctcggc

SEQ ID NO: 472355 - DNA, 30 bp, Artificial Sequence
  Synthetic oligonucleotide
tagtacctcttggtcgacgggaatctcggc

SEQ ID NO: 472356 - DNA, 30 bp, Artificial Sequence
  Synthetic oligonucleotide
ttaattagtcctggaatggagactctcggc

SEQ ID NO: 472357 - DNA, 30 bp, Artificial Sequence
  Synthetic oligonucleotide
atttgactaggtgtgtcaaatccagtcggc

SEQ ID NO: 472358 - DNA, 30 bp, Artificial Sequence
  Synthetic oligonucleotide
tgaatgaagttagggcgattcatagtcggc

SEQ ID NO: 472359 - DNA, 30 bp, Artificial Sequence
  Synthetic oligonucleotide
tctagtctttatgtgcactagaaggtcggc

SEQ ID NO: 472360 - DNA, 30 bp, Artificial Sequence
  Synthetic oligonucleotide
atgacgatcatctgtagcaaaacggtcggc

SEQ ID NO: 472361 - DNA, 30 bp, Artificial Sequence
  Synthetic oligonucleotide
cgaatgtccagctatatgtttactgtcggc

SEQ ID NO: 472362 - DNA, 30 bp, Artificial Sequence
  Synthetic oligonucleotide
aaaatataggagaaacacggttggttcggc

SEQ ID NO: 472363 - DNA, 30 bp, Artificial Sequence
  Synthetic oligonucleotide
aacccctccaaggggcattatcgtttcggc

SEQ ID NO: 472364 - DNA, 30 bp, Artificial Sequence
  Synthetic oligonucleotide
atattctgtgtcacggtattgtaaaagggc

SEQ ID NO: 472365 - DNA, 30 bp, Artificial Sequence
  Synthetic oligonucleotide
gtcctgttggccccaaacctatgaaagggc

SEQ ID NO: 472366 - DNA, 30 bp, Artificial Sequence
  Synthetic oligonucleotide
ttagatggattgagacacggacgcaagggc

SEQ ID NO: 472367 - DNA, 30 bp, Artificial Sequence
  Synthetic oligonucleotide
ggattgatgaagcagactgtgctcaagggc

SEQ ID NO: 472368 - DNA, 30 bp, Artificial Sequence
  Synthetic oligonucleotide
aagatgttctaatagcatgtaaagaagggc

SEQ ID NO: 472369 - DNA, 30 bp, Artificial Sequence
  Synthetic oligonucleotide
aacgccggaactcaaacagatcgtaagggc

SEQ ID NO: 472370 - DNA, 30 bp, Artificial Sequence
  Synthetic oligonucleotide
ggccaggttgatactccttattttaagggc

SEQ ID NO: 472371 - DNA, 30 bp, Artificial Sequence
  Synthetic oligonucleotide
gcgtgggactcttactctgtaaagcagggc

SEQ ID NO: 472372 - DNA, 30 bp, Artificial Sequence
  Synthetic oligonucleotide
aaccgttgggctagatattaacctcagggc

SEQ ID NO: 472373 - DNA, 30 bp, Artificial Sequence
  Synthetic oligonucleotide
gcagacatagctcggctcgtctcagagggc

SEQ ID NO: 472374 - DNA, 30 bp, Artificial Sequence
  Synthetic oligonucleotide
atttcgcttatcactctaggtaccgagggc

SEQ ID NO: 472375 - DNA, 30 bp, Artificial Sequence
  Synthetic oligonucleotide
cggccttatcgcgcgtttagagctgagggc

SEQ ID NO: 472376 - DNA, 30 bp, Artificial Sequence
  Synthetic oligonucleotide
tctcctagtaggccggagggcaagtagggc

SEQ ID NO: 472377 - DNA, 30 bp, Artificial Sequence
  Synthetic oligonucleotide
acatcacgctgcacccacgatgagtagggc

SEQ ID NO: 472378 - DNA, 30 bp, Artificial Sequence
  Synthetic oligonucleotide
cctccaacggcggtgcccatcacgtagggc

SEQ ID NO: 472379 - DNA, 30 bp, Artificial Sequence
  Synthetic oligonucleotide
gcagcgggcgacgccaggatccggtagggc

SEQ ID NO: 472380 - DNA, 30 bp, Artificial Sequence
  Synthetic oligonucleotide
tataccttcgggctcagactccgttagggc

SEQ ID NO: 472381 - DNA, 30 bp, Artificial Sequence
  Synthetic oligonucleotide
gtccctcaggtttcataatacctttagggc

SEQ ID NO: 472382 - DNA, 30 bp, Artificial Sequence
  Synthetic oligonucleotide
gaaacgctggcgtaactccgcctttagggc

SEQ ID NO: 472383 - DNA, 30 bp, Artificial Sequence
  Synthetic oligonucleotide
gaatgacatttctacagaggtctttagggc

SEQ ID NO: 472384 - DNA, 30 bp, Artificial Sequence
  Synthetic oligonucleotide
gccttagtcccgtctatgtcgttttagggc

SEQ ID NO: 472385 - DNA, 30 bp, Artificial Sequence
  Synthetic oligonucleotide
caagtcgttacgacagccccgagaacgggc

SEQ ID NO: 472386 - DNA, 29 bp, Artificial Sequence
  Synthetic oligonucleotide
ttcacggagttctaccagccataacgggc

SEQ ID NO: 472387 - DNA, 30 bp, Artificial Sequence
  Synthetic oligonucleotide
attgcaggttggtgagccgagtacacgggc

SEQ ID NO: 472388 - DNA, 31 bp, Artificial Sequence
  Synthetic oligonucleotide
tgctagcactgtgcgtcattttagcacgggc

SEQ ID NO: 472389 - DNA, 30 bp, Artificial Sequence
  Synthetic oligonucleotide
gggtaaattacatcccgacttattacgggc

SEQ ID NO: 472390 - DNA, 30 bp, Artificial Sequence
  Synthetic oligonucleotide
aacatacccgtgagctctgcgtttacgggc

SEQ ID NO: 472391 - DNA, 30 bp, Artificial Sequence
  Synthetic oligonucleotide
ggttgttgctttcgggacgtaagcccgggc

SEQ ID NO: 472392 - DNA, 30 bp, Artificial Sequence
  Synthetic oligonucleotide
gtgcgcccgtgattagccggcctcccgggc

SEQ ID NO: 472393 - DNA, 30 bp, Artificial Sequence
  Synthetic oligonucleotide
gcaaaggagcgttctctcggaacgccgggc

SEQ ID NO: 472394 - DNA, 30 bp, Artificial Sequence
  Synthetic oligonucleotide
acaaccatgccgcgttttacgtcgccgggc

SEQ ID NO: 472395 - DNA, 30 bp, Artificial Sequence
  Synthetic oligonucleotide
tgatacgttccactgcgaacgtttccgggc

SEQ ID NO: 472396 - DNA, 30 bp, Artificial Sequence
  Synthetic oligonucleotide
aattaagggcgcataaccgtaatcgcgggc

SEQ ID NO: 472397 - DNA, 30 bp, Artificial Sequence
  Synthetic oligonucleotide
acttttacagtgttagctcccctcgcgggc

SEQ ID NO: 472398 - DNA, 30 bp, Artificial Sequence
  Synthetic oligonucleotide
aagggactagtcgacggccgtttggcgggc

SEQ ID NO: 472399 - DNA, 30 bp, Artificial Sequence
  Synthetic oligonucleotide
ttggtgtaagatgtttggttgcttgcgggc

SEQ ID NO: 472400 - DNA, 30 bp, Artificial Sequence
  Synthetic oligonucleotide
ctagccccaccaggcgtttgatttgcgggc

SEQ ID NO: 472401 - DNA, 31 bp, Artificial Sequence
  Synthetic oligonucleotide
tgcggtggcccccatcatgaagctatcgggc

SEQ ID NO: 472402 - DNA, 30 bp, Artificial Sequence
  Synthetic oligonucleotide
tgtccttacaattcaatactaacgtcgggc

SEQ ID NO: 472403 - DNA, 30 bp, Artificial Sequence
  Synthetic oligonucleotide
gccgtaagtccgctaggcatcccttcgggc

SEQ ID NO: 472404 - DNA, 30 bp, Artificial Sequence
  Synthetic oligonucleotide
tggaatggggagcaggaaacgggaaggggc

SEQ ID NO: 472405 - DNA, 30 bp, Artificial Sequence
  Synthetic oligonucleotide
aaaatatgcggttacccgcgtgccaggggc

SEQ ID NO: 472406 - DNA, 30 bp, Artificial Sequence
  Synthetic oligonucleotide
gatgcagtactatcacctctcgcgaggggc

SEQ ID NO: 472407 - DNA, 30 bp, Artificial Sequence
  Synthetic oligonucleotide
gaaaatggtcgggaagcagcctcgaggggc

SEQ ID NO: 472408 - DNA, 30 bp, Artificial Sequence
  Synthetic oligonucleotide
tagtagttcgacgtggtgagtgtgaggggc

SEQ ID NO: 472409 - DNA, 30 bp, Artificial Sequence
  Synthetic oligonucleotide
taaaaaaattctgacccaattcataggggc

SEQ ID NO: 472410 - DNA, 30 bp, Artificial Sequence
  Synthetic oligonucleotide
gcggtggtgtattgttaacaccgtaggggc

SEQ ID NO: 472411 - DNA, 30 bp, Artificial Sequence
  Synthetic oligonucleotide
gtcatacgccgcgggccagtatgccggggc

SEQ ID NO: 472412 - DNA, 30 bp, Artificial Sequence
  Synthetic oligonucleotide
ttacttcctgggtacgtgatctgccggggc

SEQ ID NO: 472413 - DNA, 30 bp, Artificial Sequence
  Synthetic oligonucleotide
cagggagcaggcctatagaaacgtcggggc

SEQ ID NO: 472414 - DNA, 30 bp, Artificial Sequence
  Synthetic oligonucleotide
aatgtaaaagttttcgtacgctttcggggc

SEQ ID NO: 472415 - DNA, 30 bp, Artificial Sequence
  Synthetic oligonucleotide
gtgggtcgtgagtgatgtagttgcgggggc

SEQ ID NO: 472416 - DNA, 30 bp, Artificial Sequence
  Synthetic oligonucleotide
cgggtcgaacgggtctggggaggggggggc

SEQ ID NO: 472417 - DNA, 30 bp, Artificial Sequence
  Synthetic oligonucleotide
gggccgtatatgtcagagttgatggggggc

SEQ ID NO: 472418 - DNA, 30 bp, Artificial Sequence
  Synthetic oligonucleotide
cccgcggagaggtcgattttaggatggggc

SEQ ID NO: 472419 - DNA, 30 bp, Artificial Sequence
  Synthetic oligonucleotide
tttagctgcaaacaaagtgtgtgatggggc

SEQ ID NO: 472420 - DNA, 30 bp, Artificial Sequence
  Synthetic oligonucleotide
cttgcgtaataaatgagtgtaacctggggc

SEQ ID NO: 472421 - DNA, 30 bp, Artificial Sequence
  Synthetic oligonucleotide
gaaaaggagctcagagcgttagcctggggc

SEQ ID NO: 472422 - DNA, 30 bp, Artificial Sequence
  Synthetic oligonucleotide
aaattgcgggatcgggccaccgcgtggggc

SEQ ID NO: 472423 - DNA, 30 bp, Artificial Sequence
  Synthetic oligonucleotide
gacgctatgggtgcccgtcagcattggggc

SEQ ID NO: 472424 - DNA, 30 bp, Artificial Sequence
  Synthetic oligonucleotide
taaccaagttatcgtaagtcgttttggggc

SEQ ID NO: 472425 - DNA, 30 bp, Artificial Sequence
  Synthetic oligonucleotide
attcctttcgcgacagactgccccatgggc

SEQ ID NO: 472426 - DNA, 30 bp, Artificial Sequence
  Synthetic oligonucleotide
gggcaacttttagcggcggtggggatgggc

SEQ ID NO: 472427 - DNA, 30 bp, Artificial Sequence
  Synthetic oligonucleotide
atccaagtgtccgatagcgtacctatgggc

SEQ ID NO: 472428 - DNA, 30 bp, Artificial Sequence
  Synthetic oligonucleotide
tggcttgacgctcgggtgaaagctatgggc

SEQ ID NO: 472429 - DNA, 30 bp, Artificial Sequence
  Synthetic oligonucleotide
ggcagtaaatttattctccgggttatgggc

SEQ ID NO: 472430 - DNA, 30 bp, Artificial Sequence
  Synthetic oligonucleotide
gtgttatattttgaatgtctagtactgggc

SEQ ID NO: 472431 - DNA, 30 bp, Artificial Sequence
  Synthetic oligonucleotide
gacaagttgtaagcatcccgattgctgggc

SEQ ID NO: 472432 - DNA, 30 bp, Artificial Sequence
  Synthetic oligonucleotide
tagagataacgctaacagccagcagtgggc

SEQ ID NO: 472433 - DNA, 30 bp, Artificial Sequence
  Synthetic oligonucleotide
cccgtaccagagccctggttcttcgtgggc

SEQ ID NO: 472434 - DNA, 30 bp, Artificial Sequence
  Synthetic oligonucleotide
tgtgcgcacggcgccccacaccaggtgggc

SEQ ID NO: 472435 - DNA, 30 bp, Artificial Sequence
  Synthetic oligonucleotide
aatctacggagcaccgccgttcaggtgggc

SEQ ID NO: 472436 - DNA, 30 bp, Artificial Sequence
  Synthetic oligonucleotide
ggtgcagtcatcttccttgagatggtgggc

SEQ ID NO: 472437 - DNA, 30 bp, Artificial Sequence
  Synthetic oligonucleotide
tcagacgttgctgtaagccattatgtgggc

SEQ ID NO: 472438 - DNA, 30 bp, Artificial Sequence
  Synthetic oligonucleotide
cggagtagaatggcggtcagccctgtgggc

SEQ ID NO: 472439 - DNA, 30 bp, Artificial Sequence
  Synthetic oligonucleotide
cattcgtctatgagagtcttgctattgggc

SEQ ID NO: 472440 - DNA, 30 bp, Artificial Sequence
  Synthetic oligonucleotide
ttggattatccggcccttttagacttgggc

SEQ ID NO: 472441 - DNA, 30 bp, Artificial Sequence
  Synthetic oligonucleotide
agggacctatacgcagccctcgggttgggc

SEQ ID NO: 472442 - DNA, 30 bp, Artificial Sequence
  Synthetic oligonucleotide
tttaaattgcacaccgacctatggttgggc

SEQ ID NO: 472443 - DNA, 30 bp, Artificial Sequence
  Synthetic oligonucleotide
cgattctagcacgactcattccatttgggc

SEQ ID NO: 472444 - DNA, 30 bp, Artificial Sequence
  Synthetic oligonucleotide
gtcttttcattgggaccagggggtttgggc

SEQ ID NO: 472445 - DNA, 30 bp, Artificial Sequence
  Synthetic oligonucleotide
caagcaccaactaattagggttttttgggc

SEQ ID NO: 472446 - DNA, 30 bp, Artificial Sequence
  Synthetic oligonucleotide
gtatccgcggctaggcagctatcaaatggc

SEQ ID NO: 472447 - DNA, 30 bp, Artificial Sequence
  Synthetic oligonucleotide
cgagtccgtcttttaatgccaataaatggc

SEQ ID NO: 472448 - DNA, 30 bp, Artificial Sequence
  Synthetic oligonucleotide
agtcgatggagcgccgtggccagtaatggc

SEQ ID NO: 472449 - DNA, 30 bp, Artificial Sequence
  Synthetic oligonucleotide
tgtagaatcactttagttgagcgtaatggc

SEQ ID NO: 472450 - DNA, 30 bp, Artificial Sequence
  Synthetic oligonucleotide
gctatcatgaatgattgacttattaatggc

SEQ ID NO: 472451 - DNA, 30 bp, Artificial Sequence
  Synthetic oligonucleotide
ggttctaggttaatctaccagaaacatggc

SEQ ID NO: 472452 - DNA, 30 bp, Artificial Sequence
  Synthetic oligonucleotide
gggacagctccctacatgtagtaacatggc

SEQ ID NO: 472453 - DNA, 30 bp, Artificial Sequence
  Synthetic oligonucleotide
tgggtaagcgtcgacacgcctgcccatggc

SEQ ID NO: 472454 - DNA, 30 bp, Artificial Sequence
  Synthetic oligonucleotide
tgggactgactgctagcaacctgtcatggc

SEQ ID NO: 472455 - DNA, 30 bp, Artificial Sequence
  Synthetic oligonucleotide
cgtagccatccggtacctccaggagatggc

SEQ ID NO: 472456 - DNA, 30 bp, Artificial Sequence
  Synthetic oligonucleotide
gtggaagccgcaggcatgttctctgatggc

SEQ ID NO: 472457 - DNA, 30 bp, Artificial Sequence
  Synthetic oligonucleotide
tattggtaagcagtgatttgtcgtgatggc

SEQ ID NO: 472458 - DNA, 30 bp, Artificial Sequence
  Synthetic oligonucleotide
gggccctgcccgggtgccacatgtgatggc

SEQ ID NO: 472459 - DNA, 30 bp, Artificial Sequence
  Synthetic oligonucleotide
attctcgtttaacgctgaatgggatatggc

SEQ ID NO: 472460 - DNA, 30 bp, Artificial Sequence
  Synthetic oligonucleotide
cctagcattttgttacctaatggatatggc

SEQ ID NO: 472461 - DNA, 30 bp, Artificial Sequence
  Synthetic oligonucleotide
aatcctttggggcgctccttaacctatggc

SEQ ID NO: 472462 - DNA, 30 bp, Artificial Sequence
  Synthetic oligonucleotide
agtctgcaggtcgtctgaaaagcctatggc

SEQ ID NO: 472463 - DNA, 30 bp, Artificial Sequence
  Synthetic oligonucleotide
gagtgtggatgagccatcgcagaaactggc

SEQ ID NO: 472464 - DNA, 30 bp, Artificial Sequence
  Synthetic oligonucleotide
ccaacaactgtccgctttcctaccactggc

SEQ ID NO: 472465 - DNA, 30 bp, Artificial Sequence
  Synthetic oligonucleotide
ttggttggactgtttacggacgccactggc

SEQ ID NO: 472466 - DNA, 30 bp, Artificial Sequence
  Synthetic oligonucleotide
tagcatctttaggcccggattttcactggc

SEQ ID NO: 472467 - DNA, 30 bp, Artificial Sequence
  Synthetic oligonucleotide
agaggactcatatgtcgcagacgtactggc

SEQ ID NO: 472468 - DNA, 31 bp, Artificial Sequence
  Synthetic oligonucleotide
tcgccaatgtgaatgccccgcttatgctggc

SEQ ID NO: 472469 - DNA, 30 bp, Artificial Sequence
  Synthetic oligonucleotide
ctgcaatagagcctaatgacgtcatctggc

SEQ ID NO: 472470 - DNA, 30 bp, Artificial Sequence
  Synthetic oligonucleotide
tgggttaataatcatcgtgaattgtctggc

SEQ ID NO: 472471 - DNA, 30 bp, Artificial Sequence
  Synthetic oligonucleotide
ggtttcgtttgtggccttggatcaagtggc

SEQ ID NO: 472472 - DNA, 30 bp, Artificial Sequence
  Synthetic oligonucleotide
ctccacttacggctgtagtacggaagtggc

SEQ ID NO: 472473 - DNA, 30 bp, Artificial Sequence
  Synthetic oligonucleotide
ttaagcagtagccttccggtgcatagtggc

SEQ ID NO: 472474 - DNA, 30 bp, Artificial Sequence
  Synthetic oligonucleotide
cccagggtagaaccgcgtggaactagtggc

SEQ ID NO: 472475 - DNA, 30 bp, Artificial Sequence
  Synthetic oligonucleotide
ggggagcgcagctgtaatgttacacgtggc

SEQ ID NO: 472476 - DNA, 30 bp, Artificial Sequence
  Synthetic oligonucleotide
taagccgggggctatgtactgttacgtggc

SEQ ID NO: 472477 - DNA, 30 bp, Artificial Sequence
  Synthetic oligonucleotide
ggttttggatcttgtaatggtatccgtggc

SEQ ID NO: 472478 - DNA, 30 bp, Artificial Sequence
  Synthetic oligonucleotide
caccccggatgcccaatttaagggcgtggc

SEQ ID NO: 472479 - DNA, 30 bp, Artificial Sequence
  Synthetic oligonucleotide
tgcaaacgaaagcggcttattagtcgtggc

SEQ ID NO: 472480 - DNA, 30 bp, Artificial Sequence
  Synthetic oligonucleotide
ttcgatttattggcggattgtattcgtggc

SEQ ID NO: 472481 - DNA, 30 bp, Artificial Sequence
  Synthetic oligonucleotide
acagagcatgccacctattccaccggtggc

SEQ ID NO: 472482 - DNA, 30 bp, Artificial Sequence
  Synthetic oligonucleotide
cagaagataagccatttgggttccggtggc

SEQ ID NO: 472483 - DNA, 30 bp, Artificial Sequence
  Synthetic oligonucleotide
gcccttcgtcagaacatcataagcggtggc

SEQ ID NO: 472484 - DNA, 30 bp, Artificial Sequence
  Synthetic oligonucleotide
gaatcaatttcggttcatctaggcggtggc

SEQ ID NO: 472485 - DNA, 30 bp, Artificial Sequence
  Synthetic oligonucleotide
ttaaaattaactcgtcgacgattgggtggc

SEQ ID NO: 472486 - DNA, 30 bp, Artificial Sequence
  Synthetic oligonucleotide
aaatctcgatgtccaacctttcatggtggc

SEQ ID NO: 472487 - DNA, 30 bp, Artificial Sequence
  Synthetic oligonucleotide
tatgcaaattcttctatcggtattggtggc

SEQ ID NO: 472488 - DNA, 30 bp, Artificial Sequence
  Synthetic oligonucleotide
tggtgtccggtggggagcgattagtgtggc

SEQ ID NO: 472489 - DNA, 30 bp, Artificial Sequence
  Synthetic oligonucleotide
tagacgcatcgctccgcagtacggtgtggc

SEQ ID NO: 472490 - DNA, 30 bp, Artificial Sequence
  Synthetic oligonucleotide
ctcctcaaagataatttatatcattgtggc

SEQ ID NO: 472491 - DNA, 30 bp, Artificial Sequence
  Synthetic oligonucleotide
gagagaagacataaataagttgcttgtggc

SEQ ID NO: 472492 - DNA, 30 bp, Artificial Sequence
  Synthetic oligonucleotide
taagagttgagatgaggcaggtcaattggc

SEQ ID NO: 472493 - DNA, 30 bp, Artificial Sequence
  Synthetic oligonucleotide
ggtgattgttacaccgcagattccattggc

SEQ ID NO: 472494 - DNA, 30 bp, Artificial Sequence
  Synthetic oligonucleotide
gcatggaggcaacatgctaatattattggc

SEQ ID NO: 472495 - DNA, 30 bp, Artificial Sequence
  Synthetic oligonucleotide
atatcaagagagatcccttttgttattggc

SEQ ID NO: 472496 - DNA, 30 bp, Artificial Sequence
  Synthetic oligonucleotide
ggcaggctcttaacgagcaattgacttggc

SEQ ID NO: 472497 - DNA, 30 bp, Artificial Sequence
  Synthetic oligonucleotide
accttttctggagctgctagcccgcttggc

SEQ ID NO: 472498 - DNA, 30 bp, Artificial Sequence
  Synthetic oligonucleotide
atagcctaaacttgtgtgtgaattcttggc

SEQ ID NO: 472499 - DNA, 30 bp, Artificial Sequence
  Synthetic oligonucleotide
gaggagagggtcccccgagtccttcttggc

SEQ ID NO: 472500 - DNA, 30 bp, Artificial Sequence
  Synthetic oligonucleotide
aggtctgcaggattagaaggaatagttggc

SEQ ID NO: 472501 - DNA, 30 bp, Artificial Sequence
  Synthetic oligonucleotide
acagcacctacgcaggcgttgatagttggc

SEQ ID NO: 472502 - DNA, 30 bp, Artificial Sequence
  Synthetic oligonucleotide
ggggatggctggaatttttaatccgttggc

SEQ ID NO: 472503 - DNA, 30 bp, Artificial Sequence
  Synthetic oligonucleotide
accatgttatatatatactcccgcgttggc

SEQ ID NO: 472504 - DNA, 30 bp, Artificial Sequence
  Synthetic oligonucleotide
tgcggacaacgcttaaattttcaggttggc

SEQ ID NO: 472505 - DNA, 30 bp, Artificial Sequence
  Synthetic oligonucleotide
gctttctattcgatgaggccgagtgttggc

SEQ ID NO: 472506 - DNA, 30 bp, Artificial Sequence
  Synthetic oligonucleotide
catcctccatttctagtggaacgtgttggc

SEQ ID NO: 472507 - DNA, 30 bp, Artificial Sequence
  Synthetic oligonucleotide
aatatggtgcgcattcaggagcaatttggc

SEQ ID NO: 472508 - DNA, 30 bp, Artificial Sequence
  Synthetic oligonucleotide
cgttttccgccgaaccggggtcaatttggc

SEQ ID NO: 472509 - DNA, 30 bp, Artificial Sequence
  Synthetic oligonucleotide
acaagttctttggtaagcactgactttggc

SEQ ID NO: 472510 - DNA, 30 bp, Artificial Sequence
  Synthetic oligonucleotide
cccataaattggagtcaagttttgtttggc

SEQ ID NO: 472511 - DNA, 30 bp, Artificial Sequence
  Synthetic oligonucleotide
acatgagcaaaatataactctctttttggc

SEQ ID NO: 472512 - DNA, 30 bp, Artificial Sequence
  Synthetic oligonucleotide
atactaatccatagggtcgagttttttggc

SEQ ID NO: 472513 - DNA, 30 bp, Artificial Sequence
  Synthetic oligonucleotide
tgcaacaggtaatgtaccatttacaaatgc

SEQ ID NO: 472514 - DNA, 30 bp, Artificial Sequence
  Synthetic oligonucleotide
cgaaacatgctgtgcccgcaatccaaatgc

SEQ ID NO: 472515 - DNA, 30 bp, Artificial Sequence
  Synthetic oligonucleotide
gactgtagggatgcatagggaattaaatgc

SEQ ID NO: 472516 - DNA, 30 bp, Artificial Sequence
  Synthetic oligonucleotide
gcgctcgtctctctttaatttgcacaatgc

SEQ ID NO: 472517 - DNA, 30 bp, Artificial Sequence
  Synthetic oligonucleotide
gtccggtcttgacggaatctgacgcaatgc

SEQ ID NO: 472518 - DNA, 30 bp, Artificial Sequence
  Synthetic oligonucleotide
tgcaggctatgcgatctttacgatcaatgc

SEQ ID NO: 472519 - DNA, 30 bp, Artificial Sequence
  Synthetic oligonucleotide
actaatatggcggcgcaaagataagaatgc

SEQ ID NO: 472520 - DNA, 31 bp, Artificial Sequence
  Synthetic oligonucleotide
gactgacgccaggaaagggtaaccagaatgc

SEQ ID NO: 472521 - DNA, 30 bp, Artificial Sequence
  Synthetic oligonucleotide
ttcaaaagtatggtacgtataagagaatgc

SEQ ID NO: 472522 - DNA, 30 bp, Artificial Sequence
  Synthetic oligonucleotide
ggtcgcttacccgagggtcttaccgaatgc

SEQ ID NO: 472523 - DNA, 29 bp, Artificial Sequence
  Synthetic oligonucleotide
ttaccactctttgatgacgttgggaatgc

SEQ ID NO: 472524 - DNA, 30 bp, Artificial Sequence
  Synthetic oligonucleotide
gccctacgctctaaacatactaatgaatgc

SEQ ID NO: 472525 - DNA, 30 bp, Artificial Sequence
  Synthetic oligonucleotide
gccctccgactcgaagacaaccgataatgc

SEQ ID NO: 472526 - DNA, 30 bp, Artificial Sequence
  Synthetic oligonucleotide
tattcaggcgggtttgagtttcgctaatgc

SEQ ID NO: 472527 - DNA, 30 bp, Artificial Sequence
  Synthetic oligonucleotide
atgactcaggctttaaaggtcatctaatgc

SEQ ID NO: 472528 - DNA, 30 bp, Artificial Sequence
  Synthetic oligonucleotide
ttccgagtaggtcctatttcattctaatgc

SEQ ID NO: 472529 - DNA, 30 bp, Artificial Sequence
  Synthetic oligonucleotide
gagtatcgaatcactgacacccagtaatgc

SEQ ID NO: 472530 - DNA, 30 bp, Artificial Sequence
  Synthetic oligonucleotide
gcgttggctgaaagggagacgcagtaatgc

SEQ ID NO: 472531 - DNA, 30 bp, Artificial Sequence
  Synthetic oligonucleotide
aaaaggcgtgatacttcaacggagtaatgc

SEQ ID NO: 472532 - DNA, 30 bp, Artificial Sequence
  Synthetic oligonucleotide
gttcgcctgtacaagaactgtttgtaatgc

SEQ ID NO: 472533 - DNA, 30 bp, Artificial Sequence
  Synthetic oligonucleotide
aattgagagcacacattatgaggttaatgc

SEQ ID NO: 472534 - DNA, 30 bp, Artificial Sequence
  Synthetic oligonucleotide
ctgggagaagtaacatcgtggctaacatgc

SEQ ID NO: 472535 - DNA, 30 bp, Artificial Sequence
  Synthetic oligonucleotide
gtatatctgcatgcctgtacacgcacatgc

SEQ ID NO: 472536 - DNA, 30 bp, Artificial Sequence
  Synthetic oligonucleotide
gaaatatgtcaaaaagctatgatgacatgc

SEQ ID NO: 472537 - DNA, 27 bp, Artificial Sequence
  Synthetic oligonucleotide
attctaattttgttctgtcgaccatgc

SEQ ID NO: 472538 - DNA, 30 bp, Artificial Sequence
  Synthetic oligonucleotide
agacccatttaagttgtaccgcacccatgc

SEQ ID NO: 472539 - DNA, 30 bp, Artificial Sequence
  Synthetic oligonucleotide
gagccaactcgctagatgttcagcccatgc

SEQ ID NO: 472540 - DNA, 30 bp, Artificial Sequence
  Synthetic oligonucleotide
attcagtgcgtatctgtttaacagccatgc

SEQ ID NO: 472541 - DNA, 30 bp, Artificial Sequence
  Synthetic oligonucleotide
gtagtcgaagcaacgctgtgatagccatgc

SEQ ID NO: 472542 - DNA, 30 bp, Artificial Sequence
  Synthetic oligonucleotide
gaaaagaagagacatgaaggtcttccatgc

SEQ ID NO: 472543 - DNA, 30 bp, Artificial Sequence
  Synthetic oligonucleotide
tcacctgaaggcgcagatcaaagcgcatgc

SEQ ID NO: 472544 - DNA, 30 bp, Artificial Sequence
  Synthetic oligonucleotide
tctcagacgcaggggaaactcattgcatgc

SEQ ID NO: 472545 - DNA, 30 bp, Artificial Sequence
  Synthetic oligonucleotide
gcagtgcttgcaggtagcctgccatcatgc

SEQ ID NO: 472546 - DNA, 30 bp, Artificial Sequence
  Synthetic oligonucleotide
tacgcgaaggtttttatggttggatcatgc

SEQ ID NO: 472547 - DNA, 30 bp, Artificial Sequence
  Synthetic oligonucleotide
ggtaatgacgtgcagaagctcctatcatgc

SEQ ID NO: 472548 - DNA, 30 bp, Artificial Sequence
  Synthetic oligonucleotide
gaaatagggtgcggttcatagcactcatgc

SEQ ID NO: 472549 - DNA, 30 bp, Artificial Sequence
  Synthetic oligonucleotide
ggattctcgctcaccagctacgggtcatgc

SEQ ID NO: 472550 - DNA, 30 bp, Artificial Sequence
  Synthetic oligonucleotide
gagtccgcaggatgttgtacagtgtcatgc

SEQ ID NO: 472551 - DNA, 28 bp, Artificial Sequence
  Synthetic oligonucleotide
ctgtttaggttcgcgaccgcattcatgc

SEQ ID NO: 472552 - DNA, 30 bp, Artificial Sequence
  Synthetic oligonucleotide
tatgtcccagtagatgagggaagttcatgc

SEQ ID NO: 472553 - DNA, 30 bp, Artificial Sequence
  Synthetic oligonucleotide
aattcctgtgatgcattgtgaggtagatgc

SEQ ID NO: 472554 - DNA, 30 bp, Artificial Sequence
  Synthetic oligonucleotide
tactgcttttcaagggtcgttattagatgc

SEQ ID NO: 472555 - DNA, 30 bp, Artificial Sequence
  Synthetic oligonucleotide
gactgagtattacgatgaatcttccgatgc

SEQ ID NO: 472556 - DNA, 30 bp, Artificial Sequence
  Synthetic oligonucleotide
agcgtaattcactcatttggacagcgatgc

SEQ ID NO: 472557 - DNA, 30 bp, Artificial Sequence
  Synthetic oligonucleotide
gtaccctaaatggtttttagcattcgatgc

SEQ ID NO: 472558 - DNA, 30 bp, Artificial Sequence
  Synthetic oligonucleotide
cagcgcaggttttctggatcgtttcgatgc

SEQ ID NO: 472559 - DNA, 30 bp, Artificial Sequence
  Synthetic oligonucleotide
cactgcatcaagtctcgatgcatcggatgc

SEQ ID NO: 472560 - DNA, 30 bp, Artificial Sequence
  Synthetic oligonucleotide
gatgcaataacactatttggtgtcggatgc

SEQ ID NO: 472561 - DNA, 30 bp, Artificial Sequence
  Synthetic oligonucleotide
gtcggcttagttcgcccagcctagggatgc

SEQ ID NO: 472562 - DNA, 30 bp, Artificial Sequence
  Synthetic oligonucleotide
gttcgtgcatatggctggatggcgggatgc

SEQ ID NO: 472563 - DNA, 30 bp, Artificial Sequence
  Synthetic oligonucleotide
aataagtaagagaataacttggcgggatgc

SEQ ID NO: 472564 - DNA, 30 bp, Artificial Sequence
  Synthetic oligonucleotide
cttgagtaagagcagttcgcgatgggatgc

SEQ ID NO: 472565 - DNA, 30 bp, Artificial Sequence
  Synthetic oligonucleotide
gacatgaagtctgccgctgaagatggatgc

SEQ ID NO: 472566 - DNA, 30 bp, Artificial Sequence
  Synthetic oligonucleotide
tggtgggggggattgcagcgtggtggatgc

SEQ ID NO: 472567 - DNA, 30 bp, Artificial Sequence
  Synthetic oligonucleotide
gaaagtgcgcgtaactttcgttgtggatgc

SEQ ID NO: 472568 - DNA, 30 bp, Artificial Sequence
  Synthetic oligonucleotide
ttcgtttcatcatccaaatttttatgatgc

SEQ ID NO: 472569 - DNA, 30 bp, Artificial Sequence
  Synthetic oligonucleotide
gtgcggccacaggcaaccgtgcactgatgc

SEQ ID NO: 472570 - DNA, 30 bp, Artificial Sequence
  Synthetic oligonucleotide
cattaatgcgcgggcgcctctccctgatgc

SEQ ID NO: 472571 - DNA, 30 bp, Artificial Sequence
  Synthetic oligonucleotide
gtggtatattcgatttctataacaatatgc

SEQ ID NO: 472572 - DNA, 30 bp, Artificial Sequence
  Synthetic oligonucleotide
gctgcttatactatatagtaatgaatatgc

SEQ ID NO: 472573 - DNA, 30 bp, Artificial Sequence
  Synthetic oligonucleotide
gacttcaattcttacgtgagacacatatgc

SEQ ID NO: 472574 - DNA, 30 bp, Artificial Sequence
  Synthetic oligonucleotide
gatctttaggcgttaggtgtctacatatgc

SEQ ID NO: 472575 - DNA, 30 bp, Artificial Sequence
  Synthetic oligonucleotide
ctcaagtatcaccaggggccctgcatatgc

SEQ ID NO: 472576 - DNA, 30 bp, Artificial Sequence
  Synthetic oligonucleotide
caatgtggattcagagtaaaagcgatatgc

SEQ ID NO: 472577 - DNA, 30 bp, Artificial Sequence
  Synthetic oligonucleotide
agtcgccaactagcagcttccaggatatgc

SEQ ID NO: 472578 - DNA, 30 bp, Artificial Sequence
  Synthetic oligonucleotide
gtgcattatgtgacccagaggtgtatatgc

SEQ ID NO: 472579 - DNA, 30 bp, Artificial Sequence
  Synthetic oligonucleotide
atatgtaagatgaggtagggcattatatgc

SEQ ID NO: 472580 - DNA, 30 bp, Artificial Sequence
  Synthetic oligonucleotide
tatgggtccctgtttcgcttcccactatgc

SEQ ID NO: 472581 - DNA, 30 bp, Artificial Sequence
  Synthetic oligonucleotide
tgttgtattagattctgtggcacagtatgc

SEQ ID NO: 472582 - DNA, 30 bp, Artificial Sequence
  Synthetic oligonucleotide
gctcctattacgggcggaggtccagtatgc

SEQ ID NO: 472583 - DNA, 30 bp, Artificial Sequence
  Synthetic oligonucleotide
gttttatctaaccaccggaacgctgtatgc

SEQ ID NO: 472584 - DNA, 30 bp, Artificial Sequence
  Synthetic oligonucleotide
aaaccagcttaaaacatattaagtgtatgc

SEQ ID NO: 472585 - DNA, 30 bp, Artificial Sequence
  Synthetic oligonucleotide
gttttaacaatctgcatagtctacttatgc

SEQ ID NO: 472586 - DNA, 30 bp, Artificial Sequence
  Synthetic oligonucleotide
acggtcagccaaaggctggtctacttatgc

SEQ ID NO: 472587 - DNA, 30 bp, Artificial Sequence
  Synthetic oligonucleotide
cagcgatcctaggtccaaaggaccttatgc

SEQ ID NO: 472588 - DNA, 30 bp, Artificial Sequence
  Synthetic oligonucleotide
agtttaatacgcatagttcaagagttatgc

SEQ ID NO: 472589 - DNA, 30 bp, Artificial Sequence
  Synthetic oligonucleotide
agttagtactatttttattaaacgttatgc

SEQ ID NO: 472590 - DNA, 30 bp, Artificial Sequence
  Synthetic oligonucleotide
cccactttctaatttcagaggaggttatgc

SEQ ID NO: 472591 - DNA, 30 bp, Artificial Sequence
  Synthetic oligonucleotide
tatggatgtaaaggattagaccggttatgc

SEQ ID NO: 472592 - DNA, 30 bp, Artificial Sequence
  Synthetic oligonucleotide
aagtacgcgctgcggcgccgatggttatgc

SEQ ID NO: 472593 - DNA, 30 bp, Artificial Sequence
  Synthetic oligonucleotide
gtctaggggcccaatacgggatctttatgc

SEQ ID NO: 472594 - DNA, 30 bp, Artificial Sequence
  Synthetic oligonucleotide
ttcaagggcgctggagggttttgtttatgc

SEQ ID NO: 472595 - DNA, 30 bp, Artificial Sequence
  Synthetic oligonucleotide
attcagtacctactcttgtataaaaactgc

SEQ ID NO: 472596 - DNA, 30 bp, Artificial Sequence
  Synthetic oligonucleotide
ggtacggctctcctgggccaataaaactgc

SEQ ID NO: 472597 - DNA, 30 bp, Artificial Sequence
  Synthetic oligonucleotide
ctttcttgaaatgaatgcgcatgaaactgc

SEQ ID NO: 472598 - DNA, 30 bp, Artificial Sequence
  Synthetic oligonucleotide
caacattttaacttgtaactattaaactgc

SEQ ID NO: 472599 - DNA, 30 bp, Artificial Sequence
  Synthetic oligonucleotide
aataatcatgcaatcatcaggtccaactgc

SEQ ID NO: 472600 - DNA, 30 bp, Artificial Sequence
  Synthetic oligonucleotide
gagtcattgcagactcagtacgagaactgc

SEQ ID NO: 472601 - DNA, 30 bp, Artificial Sequence
  Synthetic oligonucleotide
ttttcataaccttatgataggacgaactgc

SEQ ID NO: 472602 - DNA, 30 bp, Artificial Sequence
  Synthetic oligonucleotide
aagcagttggctgtatgcgagcctaactgc

SEQ ID NO: 472603 - DNA, 30 bp, Artificial Sequence
  Synthetic oligonucleotide
aatatcataacgttggaactgagtaactgc

SEQ ID NO: 472604 - DNA, 30 bp, Artificial Sequence
  Synthetic oligonucleotide
accgtagcacaccagcaatacgtccactgc

SEQ ID NO: 472605 - DNA, 30 bp, Artificial Sequence
  Synthetic oligonucleotide
tggtgctgttcatttgttggtgagcactgc

SEQ ID NO: 472606 - DNA, 30 bp, Artificial Sequence
  Synthetic oligonucleotide
cccatttagagcccctgtaagtagcactgc

SEQ ID NO: 472607 - DNA, 30 bp, Artificial Sequence
  Synthetic oligonucleotide
tagtcggaatccgcgcgtagtttgcactgc

SEQ ID NO: 472608 - DNA, 30 bp, Artificial Sequence
  Synthetic oligonucleotide
tacatttttggtgccgctctttctcactgc

SEQ ID NO: 472609 - DNA, 30 bp, Artificial Sequence
  Synthetic oligonucleotide
accagaaccctgcgtattttgggagactgc

SEQ ID NO: 472610 - DNA, 30 bp, Artificial Sequence
  Synthetic oligonucleotide
tatgtgttcctgccgactgccagcgactgc

SEQ ID NO: 472611 - DNA, 30 bp, Artificial Sequence
  Synthetic oligonucleotide
ctaccatggcgtcaaagtcaattcgactgc

SEQ ID NO: 472612 - DNA, 30 bp, Artificial Sequence
  Synthetic oligonucleotide
ggttttggatttgctttggtctgtgactgc

SEQ ID NO: 472613 - DNA, 30 bp, Artificial Sequence
  Synthetic oligonucleotide
atgtgcagcagagttctaactcaatactgc

SEQ ID NO: 472614 - DNA, 30 bp, Artificial Sequence
  Synthetic oligonucleotide
tgtgggagcagtcacgcagtaccctactgc

SEQ ID NO: 472615 - DNA, 30 bp, Artificial Sequence
  Synthetic oligonucleotide
atgcagcgcctcaatcattgtctgtactgc

SEQ ID NO: 472616 - DNA, 30 bp, Artificial Sequence
  Synthetic oligonucleotide
caaaaggatgatgtaacggttcgttactgc

SEQ ID NO: 472617 - DNA, 30 bp, Artificial Sequence
  Synthetic oligonucleotide
aagaagccttgtttctatgcctgttactgc

SEQ ID NO: 472618 - DNA, 30 bp, Artificial Sequence
  Synthetic oligonucleotide
acaccccacgatgagtgggcggtttactgc

SEQ ID NO: 472619 - DNA, 30 bp, Artificial Sequence
  Synthetic oligonucleotide
acccgcctgccccaagataaattttactgc

SEQ ID NO: 472620 - DNA, 30 bp, Artificial Sequence
  Synthetic oligonucleotide
aatttggccgtgatggactaattaacctgc

SEQ ID NO: 472621 - DNA, 30 bp, Artificial Sequence
  Synthetic oligonucleotide
cctataggcatgctgtcaagtttaacctgc

SEQ ID NO: 472622 - DNA, 30 bp, Artificial Sequence
  Synthetic oligonucleotide
gcgcggacctaacctttcgggttcacctgc

SEQ ID NO: 472623 - DNA, 30 bp, Artificial Sequence
  Synthetic oligonucleotide
ttggtgtaggatcacgccgatattacctgc

SEQ ID NO: 472624 - DNA, 30 bp, Artificial Sequence
  Synthetic oligonucleotide
tgggcagcgcgaccggtgttaaccccctgc

SEQ ID NO: 472625 - DNA, 30 bp, Artificial Sequence
  Synthetic oligonucleotide
gaatctagacccacaattggagcgccctgc

SEQ ID NO: 472626 - DNA, 30 bp, Artificial Sequence
  Synthetic oligonucleotide
cttttcaaggcaaaggacctagctccctgc

SEQ ID NO: 472627 - DNA, 30 bp, Artificial Sequence
  Synthetic oligonucleotide
aaactggatggattcgcaggttcagcctgc

SEQ ID NO: 472628 - DNA, 30 bp, Artificial Sequence
  Synthetic oligonucleotide
ttcttagaccgtgaacgtcgcgacgcctgc

SEQ ID NO: 472629 - DNA, 30 bp, Artificial Sequence
  Synthetic oligonucleotide
gcagcctgtccgcccccctctgcggcctgc

SEQ ID NO: 472630 - DNA, 30 bp, Artificial Sequence
  Synthetic oligonucleotide
gcacagatacgcaccgcgctgtgtgcctgc

SEQ ID NO: 472631 - DNA, 30 bp, Artificial Sequence
  Synthetic oligonucleotide
atctggagctcatacgcggccacatcctgc

SEQ ID NO: 472632 - DNA, 30 bp, Artificial Sequence
  Synthetic oligonucleotide
ttggtgtacgcagggggtttatcctcctgc

SEQ ID NO: 472633 - DNA, 30 bp, Artificial Sequence
  Synthetic oligonucleotide
gccgcatcttggaaccaatcaagttcctgc

SEQ ID NO: 472634 - DNA, 31 bp, Artificial Sequence
  Synthetic oligonucleotide
tatcaggcgccgatgcatggaattttcctgc

SEQ ID NO: 472635 - DNA, 30 bp, Artificial Sequence
  Synthetic oligonucleotide
cgttaacttaataataggtcgcggagctgc

SEQ ID NO: 472636 - DNA, 30 bp, Artificial Sequence
  Synthetic oligonucleotide
gattgcaggcgggagccaaccccacgctgc

SEQ ID NO: 472637 - DNA, 30 bp, Artificial Sequence
  Synthetic oligonucleotide
caataaaagtcgggtctatctgcacgctgc

SEQ ID NO: 472638 - DNA, 30 bp, Artificial Sequence
  Synthetic oligonucleotide
ggcgacggcatgtgcgtccattcacgctgc

SEQ ID NO: 472639 - DNA, 30 bp, Artificial Sequence
  Synthetic oligonucleotide
aatgcccctggacgttatgggggacgctgc

SEQ ID NO: 472640 - DNA, 30 bp, Artificial Sequence
  Synthetic oligonucleotide
gagtcgcccattatattgagcaaccgctgc

SEQ ID NO: 472641 - DNA, 30 bp, Artificial Sequence
  Synthetic oligonucleotide
gccgttgtgtttaaaaacaccctccgctgc

SEQ ID NO: 472642 - DNA, 30 bp, Artificial Sequence
  Synthetic oligonucleotide
aacgatttctccctatttatgtctcgctgc

SEQ ID NO: 472643 - DNA, 30 bp, Artificial Sequence
  Synthetic oligonucleotide
tctggacggtacagtggcgtatgaggctgc

SEQ ID NO: 472644 - DNA, 30 bp, Artificial Sequence
  Synthetic oligonucleotide
gtataggttcttacgacgtttctgggctgc

SEQ ID NO: 472645 - DNA, 30 bp, Artificial Sequence
  Synthetic oligonucleotide
ggtactcgtacaatttactcaagtggctgc

SEQ ID NO: 472646 - DNA, 30 bp, Artificial Sequence
  Synthetic oligonucleotide
gatctgcaaaatgcatacaatatatgctgc

SEQ ID NO: 472647 - DNA, 30 bp, Artificial Sequence
  Synthetic oligonucleotide
gtgtctgaagcttgggctcgaaactgctgc

SEQ ID NO: 472648 - DNA, 30 bp, Artificial Sequence
  Synthetic oligonucleotide
agtagtcgaaatctttaattctcctgctgc

SEQ ID NO: 472649 - DNA, 30 bp, Artificial Sequence
  Synthetic oligonucleotide
ttgatagcgctgccaaggttgaattgctgc

SEQ ID NO: 472650 - DNA, 30 bp, Artificial Sequence
  Synthetic oligonucleotide
gctccaccggcctcgcccgcggcttgctgc

SEQ ID NO: 472651 - DNA, 30 bp, Artificial Sequence
  Synthetic oligonucleotide
caaattgtcttgaagcctagttcttgctgc

SEQ ID NO: 472652 - DNA, 30 bp, Artificial Sequence
  Synthetic oligonucleotide
actaaatttcatcctgcattttccatctgc

SEQ ID NO: 472653 - DNA, 30 bp, Artificial Sequence
  Synthetic oligonucleotide
gtgggctaaatcccgcgcttactcatctgc

SEQ ID NO: 472654 - DNA, 30 bp, Artificial Sequence
  Synthetic oligonucleotide
gtgcctacaatccgtcatgcacgtatctgc

SEQ ID NO: 472655 - DNA, 30 bp, Artificial Sequence
  Synthetic oligonucleotide
aaaacaaggttcattcatgaatgactctgc

SEQ ID NO: 472656 - DNA, 30 bp, Artificial Sequence
  Synthetic oligonucleotide
tgtcaaagcggatacaggcgatagctctgc

SEQ ID NO: 472657 - DNA, 30 bp, Artificial Sequence
  Synthetic oligonucleotide
agttaaatttcatttgtttgtacgctctgc

SEQ ID NO: 472658 - DNA, 30 bp, Artificial Sequence
  Synthetic oligonucleotide
tgccggtcctgctagatcaaagatctctgc

SEQ ID NO: 472659 - DNA, 30 bp, Artificial Sequence
  Synthetic oligonucleotide
ctttattagttggcgacttacaaagtctgc

SEQ ID NO: 472660 - DNA, 30 bp, Artificial Sequence
  Synthetic oligonucleotide
acaaatggtgtgcttggttgcggagtctgc

SEQ ID NO: 472661 - DNA, 31 bp, Artificial Sequence
  Synthetic oligonucleotide
ctctgaggttggaatgacggaggtagtctgc

SEQ ID NO: 472662 - DNA, 30 bp, Artificial Sequence
  Synthetic oligonucleotide
tgtgacggtgagaaaggtcgacacgtctgc

SEQ ID NO: 472663 - DNA, 30 bp, Artificial Sequence
  Synthetic oligonucleotide
attgagttaatttggatttagtgcgtctgc

SEQ ID NO: 472664 - DNA, 30 bp, Artificial Sequence
  Synthetic oligonucleotide
attcgcgttaggttaagctctaaattctgc

SEQ ID NO: 472665 - DNA, 30 bp, Artificial Sequence
  Synthetic oligonucleotide
tatagcgacgacttttatgagtaattctgc

SEQ ID NO: 472666 - DNA, 30 bp, Artificial Sequence
  Synthetic oligonucleotide
tctatacagaaggatgcgtaccgcttctgc

SEQ ID NO: 472667 - DNA, 30 bp, Artificial Sequence
  Synthetic oligonucleotide
atcgtaggttcgcgggaccacccgttctgc

SEQ ID NO: 472668 - DNA, 30 bp, Artificial Sequence
  Synthetic oligonucleotide
ccccccttaggcaagaccgtagcgttctgc

SEQ ID NO: 472669 - DNA, 30 bp, Artificial Sequence
  Synthetic oligonucleotide
ttgtgtacacgttctgagggctcgttctgc

SEQ ID NO: 472670 - DNA, 30 bp, Artificial Sequence
  Synthetic oligonucleotide
ggttgcatgggcagtactaaaattttctgc

SEQ ID NO: 472671 - DNA, 30 bp, Artificial Sequence
  Synthetic oligonucleotide
cacataagcctatgatgacagcaaaagtgc

SEQ ID NO: 472672 - DNA, 30 bp, Artificial Sequence
  Synthetic oligonucleotide
cgaacgctccaagtaacacgttgaaagtgc

SEQ ID NO: 472673 - DNA, 30 bp, Artificial Sequence
  Synthetic oligonucleotide
gtctagatctttcattacatttgaaagtgc

SEQ ID NO: 472674 - DNA, 30 bp, Artificial Sequence
  Synthetic oligonucleotide
gttcgatcagccagcccttgtgtaaagtgc

SEQ ID NO: 472675 - DNA, 30 bp, Artificial Sequence
  Synthetic oligonucleotide
gaaaatctatcatctaggtcgcgcaagtgc

SEQ ID NO: 472676 - DNA, 30 bp, Artificial Sequence
  Synthetic oligonucleotide
cagaattgttcttcgggctctgcgaagtgc

SEQ ID NO: 472677 - DNA, 30 bp, Artificial Sequence
  Synthetic oligonucleotide
ccccactttgcacagggattgagtaagtgc

SEQ ID NO: 472678 - DNA, 30 bp, Artificial Sequence
  Synthetic oligonucleotide
atacttagaccgtataactgatgtaagtgc

SEQ ID NO: 472679 - DNA, 30 bp, Artificial Sequence
  Synthetic oligonucleotide
tagcctcctgcaaccctagtgtttaagtgc

SEQ ID NO: 472680 - DNA, 30 bp, Artificial Sequence
  Synthetic oligonucleotide
cagggtccgtggggtataacaggacagtgc

SEQ ID NO: 472681 - DNA, 30 bp, Artificial Sequence
  Synthetic oligonucleotide
gtctatttccagtcgaccaggatacagtgc

SEQ ID NO: 472682 - DNA, 30 bp, Artificial Sequence
  Synthetic oligonucleotide
tagcggctcatgtgttaccctcaccagtgc

SEQ ID NO: 472683 - DNA, 30 bp, Artificial Sequence
  Synthetic oligonucleotide
gcttccgtgtacagcgtgtacgggcagtgc

SEQ ID NO: 472684 - DNA, 30 bp, Artificial Sequence
  Synthetic oligonucleotide
gggattagccagcagcggctatggcagtgc

SEQ ID NO: 472685 - DNA, 30 bp, Artificial Sequence
  Synthetic oligonucleotide
agacagctgatcggcttagttgtcgagtgc

SEQ ID NO: 472686 - DNA, 30 bp, Artificial Sequence
  Synthetic oligonucleotide
ggtaagctactttttgttcgaaaggagtgc

SEQ ID NO: 472687 - DNA, 30 bp, Artificial Sequence
  Synthetic oligonucleotide
acgtggcgtccggacgcagaaccggagtgc

SEQ ID NO: 472688 - DNA, 30 bp, Artificial Sequence
  Synthetic oligonucleotide
cccctgagctgcagaagcgccaagtagtgc

SEQ ID NO: 472689 - DNA, 30 bp, Artificial Sequence
  Synthetic oligonucleotide
aagttcggtttgcgtaaataaatgtagtgc

SEQ ID NO: 472690 - DNA, 30 bp, Artificial Sequence
  Synthetic oligonucleotide
gtcgagctgccctgccaaccctattagtgc

SEQ ID NO: 472691 - DNA, 30 bp, Artificial Sequence
  Synthetic oligonucleotide
gtgtcgaagtttctttacaggtgttagtgc

SEQ ID NO: 472692 - DNA, 30 bp, Artificial Sequence
  Synthetic oligonucleotide
tggtttattacgcacctgtagccaacgtgc

SEQ ID NO: 472693 - DNA, 30 bp, Artificial Sequence
  Synthetic oligonucleotide
aaattgttggcccctccaacattcacgtgc

SEQ ID NO: 472694 - DNA, 30 bp, Artificial Sequence
  Synthetic oligonucleotide
cccgtatgtggtcgttttgggtcgacgtgc

SEQ ID NO: 472695 - DNA, 30 bp, Artificial Sequence
  Synthetic oligonucleotide
tgatactaccctctgtggtagtttacgtgc

SEQ ID NO: 472696 - DNA, 30 bp, Artificial Sequence
  Synthetic oligonucleotide
agagttgtataaatttgaattatcccgtgc

SEQ ID NO: 472697 - DNA, 30 bp, Artificial Sequence
  Synthetic oligonucleotide
gcacactggttgtgtacaagcacagcgtgc

SEQ ID NO: 472698 - DNA, 30 bp, Artificial Sequence
  Synthetic oligonucleotide
acgaatgtatagtctcgctgttcagcgtgc

SEQ ID NO: 472699 - DNA, 30 bp, Artificial Sequence
  Synthetic oligonucleotide
ctaattatatatcacaaatttagagcgtgc

SEQ ID NO: 472700 - DNA, 30 bp, Artificial Sequence
  Synthetic oligonucleotide
cgggtcctagcgggatggaggcacgcgtgc

SEQ ID NO: 472701 - DNA, 30 bp, Artificial Sequence
  Synthetic oligonucleotide
aatcaaacttgcagtggtggcgacgcgtgc

SEQ ID NO: 472702 - DNA, 30 bp, Artificial Sequence
  Synthetic oligonucleotide
cggcagcatcgttgatcgtcgctcgcgtgc

SEQ ID NO: 472703 - DNA, 30 bp, Artificial Sequence
  Synthetic oligonucleotide
cgccaagtacggcggcgacagcaggcgtgc

SEQ ID NO: 472704 - DNA, 30 bp, Artificial Sequence
  Synthetic oligonucleotide
ccgtgtcagacaccgcctgattcggcgtgc

SEQ ID NO: 472705 - DNA, 30 bp, Artificial Sequence
  Synthetic oligonucleotide
taattctcatatcaggcccaaagggcgtgc

SEQ ID NO: 472706 - DNA, 30 bp, Artificial Sequence
  Synthetic oligonucleotide
gagtcaagcactcggcagtgctttgcgtgc

SEQ ID NO: 472707 - DNA, 30 bp, Artificial Sequence
  Synthetic oligonucleotide
gaccccgtggagccgtgtaattcctcgtgc

SEQ ID NO: 472708 - DNA, 30 bp, Artificial Sequence
  Synthetic oligonucleotide
tataggtggctcgcacgtatgtgctcgtgc

SEQ ID NO: 472709 - DNA, 30 bp, Artificial Sequence
  Synthetic oligonucleotide
aggacggacttgcaaccccgtcggtcgtgc

SEQ ID NO: 472710 - DNA, 30 bp, Artificial Sequence
  Synthetic oligonucleotide
taggtccgattttcagggcctcgttcgtgc

SEQ ID NO: 472711 - DNA, 30 bp, Artificial Sequence
  Synthetic oligonucleotide
cgcgaagggagtgcatgcacgaccaggtgc

SEQ ID NO: 472712 - DNA, 30 bp, Artificial Sequence
  Synthetic oligonucleotide
agacacgtggcctttacgaaggccaggtgc

SEQ ID NO: 472713 - DNA, 30 bp, Artificial Sequence
  Synthetic oligonucleotide
ttcacataacttatacgtatacgcaggtgc

SEQ ID NO: 472714 - DNA, 30 bp, Artificial Sequence
  Synthetic oligonucleotide
ttttacgatctgctttcgggccgcaggtgc

SEQ ID NO: 472715 - DNA, 30 bp, Artificial Sequence
  Synthetic oligonucleotide
gagggttgggcctggcaggcttgcaggtgc

SEQ ID NO: 472716 - DNA, 30 bp, Artificial Sequence
  Synthetic oligonucleotide
gcgatcagggattacgcagctcagaggtgc

SEQ ID NO: 472717 - DNA, 30 bp, Artificial Sequence
  Synthetic oligonucleotide
gcaagagtagggattaatacatggaggtgc

SEQ ID NO: 472718 - DNA, 30 bp, Artificial Sequence
  Synthetic oligonucleotide
tattgtgcggccacactaccagataggtgc

SEQ ID NO: 472719 - DNA, 30 bp, Artificial Sequence
  Synthetic oligonucleotide
tagtacatcgcactatgctttgataggtgc

SEQ ID NO: 472720 - DNA, 30 bp, Artificial Sequence
  Synthetic oligonucleotide
tagctaataggtcggggggtaattaggtgc

SEQ ID NO: 472721 - DNA, 30 bp, Artificial Sequence
  Synthetic oligonucleotide
cgagctgataatcacaaagactttaggtgc

SEQ ID NO: 472722 - DNA, 30 bp, Artificial Sequence
  Synthetic oligonucleotide
aaggggatccataaaataaaccctcggtgc

SEQ ID NO: 472723 - DNA, 30 bp, Artificial Sequence
  Synthetic oligonucleotide
gcccgggctcgtaggcagacttcagggtgc

SEQ ID NO: 472724 - DNA, 30 bp, Artificial Sequence
  Synthetic oligonucleotide
ttatcaagaggcctcgtacacgaggggtgc

SEQ ID NO: 472725 - DNA, 30 bp, Artificial Sequence
  Synthetic oligonucleotide
catggctccgttggtaaacactaggggtgc

SEQ ID NO: 472726 - DNA, 30 bp, Artificial Sequence
  Synthetic oligonucleotide
ctttcctggcaatagggcgcagtggggtgc

SEQ ID NO: 472727 - DNA, 30 bp, Artificial Sequence
  Synthetic oligonucleotide
tataggggcacaccgctagcgcgtgggtgc

SEQ ID NO: 472728 - DNA, 30 bp, Artificial Sequence
  Synthetic oligonucleotide
gtaaggatgcaacgcacaaactgtgggtgc

SEQ ID NO: 472729 - DNA, 30 bp, Artificial Sequence
  Synthetic oligonucleotide
cccggtagtcaccgttgcgtgtcatggtgc

SEQ ID NO: 472730 - DNA, 30 bp, Artificial Sequence
  Synthetic oligonucleotide
ttctcttagttgggcgagcgacgatggtgc

SEQ ID NO: 472731 - DNA, 30 bp, Artificial Sequence
  Synthetic oligonucleotide
taacagtacagcactgggtcctagtggtgc

SEQ ID NO: 472732 - DNA, 30 bp, Artificial Sequence
  Synthetic oligonucleotide
acctgtcagttgacccattaccgttggtgc

SEQ ID NO: 472733 - DNA, 30 bp, Artificial Sequence
  Synthetic oligonucleotide
cgaggggtaatgtggttcgagtccatgtgc

SEQ ID NO: 472734 - DNA, 30 bp, Artificial Sequence
  Synthetic oligonucleotide
ggctcgtgtgtcctcttagtctcactgtgc

SEQ ID NO: 472735 - DNA, 30 bp, Artificial Sequence
  Synthetic oligonucleotide
tccagtgtagcagctattacttacctgtgc

SEQ ID NO: 472736 - DNA, 30 bp, Artificial Sequence
  Synthetic oligonucleotide
gtggttcgtggtgagcgcggcatcctgtgc

SEQ ID NO: 472737 - DNA, 30 bp, Artificial Sequence
  Synthetic oligonucleotide
gcatgatcgcactaactcacgtcgctgtgc

SEQ ID NO: 472738 - DNA, 30 bp, Artificial Sequence
  Synthetic oligonucleotide
aataattgaaggtgatgtgagatgctgtgc

SEQ ID NO: 472739 - DNA, 30 bp, Artificial Sequence
  Synthetic oligonucleotide
tggtcttctgtgctgtgtgcgtgattgtgc

SEQ ID NO: 472740 - DNA, 30 bp, Artificial Sequence
  Synthetic oligonucleotide
gttctgttattaaagtaaagcctgttgtgc

SEQ ID NO: 472741 - DNA, 30 bp, Artificial Sequence
  Synthetic oligonucleotide
atatgcatttggtgacgctgttatttgtgc

SEQ ID NO: 472742 - DNA, 30 bp, Artificial Sequence
  Synthetic oligonucleotide
ttctcaatcggaccgccgatttgaaattgc

SEQ ID NO: 472743 - DNA, 30 bp, Artificial Sequence
  Synthetic oligonucleotide
caaatagatcgcgacacaattataaattgc

SEQ ID NO: 472744 - DNA, 30 bp, Artificial Sequence
  Synthetic oligonucleotide
gtagtccttacacgtagccaatgcaattgc

SEQ ID NO: 472745 - DNA, 30 bp, Artificial Sequence
  Synthetic oligonucleotide
ctttagagagagctttcgcaggagaattgc

SEQ ID NO: 472746 - DNA, 30 bp, Artificial Sequence
  Synthetic oligonucleotide
aaccccgtggagcatctacgggggaattgc

SEQ ID NO: 472747 - DNA, 30 bp, Artificial Sequence
  Synthetic oligonucleotide
agttgaacccgcatcacgaaaaataattgc

SEQ ID NO: 472748 - DNA, 30 bp, Artificial Sequence
  Synthetic oligonucleotide
tgattttaatatttctcattggaacattgc

SEQ ID NO: 472749 - DNA, 30 bp, Artificial Sequence
  Synthetic oligonucleotide
aaatgcgtctaaacaagagccgtgcattgc

SEQ ID NO: 472750 - DNA, 30 bp, Artificial Sequence
  Synthetic oligonucleotide
catccggaacatctccgagtaccggattgc

SEQ ID NO: 472751 - DNA, 30 bp, Artificial Sequence
  Synthetic oligonucleotide
gtggaagtagcatgactcctccatgattgc

SEQ ID NO: 472752 - DNA, 30 bp, Artificial Sequence
  Synthetic oligonucleotide
tttaggaggcgggcagactacgatgattgc

SEQ ID NO: 472753 - DNA, 28 bp, Artificial Sequence
  Synthetic oligonucleotide
ttgcaattgaggtcctaactactattgc

SEQ ID NO: 472754 - DNA, 30 bp, Artificial Sequence
  Synthetic oligonucleotide
agaatggacgccatgctagtgcattattgc

SEQ ID NO: 472755 - DNA, 30 bp, Artificial Sequence
  Synthetic oligonucleotide
aattgctttgcagcgaacccgctttattgc

SEQ ID NO: 472756 - DNA, 30 bp, Artificial Sequence
  Synthetic oligonucleotide
gagggccgaagtgagactcagttttattgc

SEQ ID NO: 472757 - DNA, 30 bp, Artificial Sequence
  Synthetic oligonucleotide
ctaagtcgacatatcaataatttttattgc

SEQ ID NO: 472758 - DNA, 30 bp, Artificial Sequence
  Synthetic oligonucleotide
gaattgattctcagggtttttccaacttgc

SEQ ID NO: 472759 - DNA, 30 bp, Artificial Sequence
  Synthetic oligonucleotide
actgttatgttttattaaagaagcacttgc

SEQ ID NO: 472760 - DNA, 30 bp, Artificial Sequence
  Synthetic oligonucleotide
cgctggtggtatgccgagtgcctcacttgc

SEQ ID NO: 472761 - DNA, 30 bp, Artificial Sequence
  Synthetic oligonucleotide
acagtacaaaaggcttctttcttgacttgc

SEQ ID NO: 472762 - DNA, 30 bp, Artificial Sequence
  Synthetic oligonucleotide
atacaagatttgcagtgtcgcattacttgc

SEQ ID NO: 472763 - DNA, 30 bp, Artificial Sequence
  Synthetic oligonucleotide
cttattgcttaaaataagtcgtttacttgc

SEQ ID NO: 472764 - DNA, 30 bp, Artificial Sequence
  Synthetic oligonucleotide
gagccttcagccttgtcattatgaccttgc

SEQ ID NO: 472765 - DNA, 30 bp, Artificial Sequence
  Synthetic oligonucleotide
atcaactatcgccgcaggctagggccttgc

SEQ ID NO: 472766 - DNA, 30 bp, Artificial Sequence
  Synthetic oligonucleotide
tattatcgggaagcccctttggtgccttgc

SEQ ID NO: 472767 - DNA, 30 bp, Artificial Sequence
  Synthetic oligonucleotide
agaagacgcgttttggcgcggacagcttgc

SEQ ID NO: 472768 - DNA, 30 bp, Artificial Sequence
  Synthetic oligonucleotide
atatcatgtataagccttacccgagcttgc

SEQ ID NO: 472769 - DNA, 30 bp, Artificial Sequence
  Synthetic oligonucleotide
gagtggacttcttaggggacgtcggcttgc

SEQ ID NO: 472770 - DNA, 26 bp, Artificial Sequence
  Synthetic oligonucleotide
gaatggcctatgctagcaatgcttgc

SEQ ID NO: 472771 - DNA, 30 bp, Artificial Sequence
  Synthetic oligonucleotide
atactaaatttgccgcctggaagtgcttgc

SEQ ID NO: 472772 - DNA, 30 bp, Artificial Sequence
  Synthetic oligonucleotide
acgcgtgtcggtcaacctgtacttgcttgc

SEQ ID NO: 472773 - DNA, 30 bp, Artificial Sequence
  Synthetic oligonucleotide
tattgatcgtattatcgcgtatgctcttgc

SEQ ID NO: 472774 - DNA, 30 bp, Artificial Sequence
  Synthetic oligonucleotide
gaaaaggactgaagcgggcgatagtcttgc

SEQ ID NO: 472775 - DNA, 30 bp, Artificial Sequence
  Synthetic oligonucleotide
atttaattgggtctaaatcctttgtcttgc

SEQ ID NO: 472776 - DNA, 30 bp, Artificial Sequence
  Synthetic oligonucleotide
ggctatatattgggtagataccccagttgc

SEQ ID NO: 472777 - DNA, 30 bp, Artificial Sequence
  Synthetic oligonucleotide
gcatcgggtattcctcagggaggcagttgc

SEQ ID NO: 472778 - DNA, 30 bp, Artificial Sequence
  Synthetic oligonucleotide
ttccttcgctcagcacattgtcaacgttgc

SEQ ID NO: 472779 - DNA, 30 bp, Artificial Sequence
  Synthetic oligonucleotide
tttagagtaaacatatgctactgacgttgc

SEQ ID NO: 472780 - DNA, 30 bp, Artificial Sequence
  Synthetic oligonucleotide
atctgactcagtagttaggtactacgttgc

SEQ ID NO: 472781 - DNA, 30 bp, Artificial Sequence
  Synthetic oligonucleotide
ggtatggagtcgccgcaatcggaccgttgc

SEQ ID NO: 472782 - DNA, 30 bp, Artificial Sequence
  Synthetic oligonucleotide
gtgcaagggtctacctaaggtgaccgttgc

SEQ ID NO: 472783 - DNA, 30 bp, Artificial Sequence
  Synthetic oligonucleotide
tgtcagaccaacgtcgatttaatgcgttgc

SEQ ID NO: 472784 - DNA, 30 bp, Artificial Sequence
  Synthetic oligonucleotide
tagcaagcgcaactagaaacctgtcgttgc

SEQ ID NO: 472785 - DNA, 30 bp, Artificial Sequence
  Synthetic oligonucleotide
ttaaagtttgctaaaagcataaaaggttgc

SEQ ID NO: 472786 - DNA, 30 bp, Artificial Sequence
  Synthetic oligonucleotide
cctttcctaacagacgcgacctcaggttgc

SEQ ID NO: 472787 - DNA, 30 bp, Artificial Sequence
  Synthetic oligonucleotide
gtggaacaatatggttaaaatttaggttgc

SEQ ID NO: 472788 - DNA, 30 bp, Artificial Sequence
  Synthetic oligonucleotide
aagaatcaacgtactttccttaacggttgc

SEQ ID NO: 472789 - DNA, 30 bp, Artificial Sequence
  Synthetic oligonucleotide
tatgaaccatgcaaccgttgaagtggttgc

SEQ ID NO: 472790 - DNA, 30 bp, Artificial Sequence
  Synthetic oligonucleotide
aaacatgtgttaagatctgtaacatgttgc

SEQ ID NO: 472791 - DNA, 30 bp, Artificial Sequence
  Synthetic oligonucleotide
aaaataccccgaatgtaacttttatgttgc

SEQ ID NO: 472792 - DNA, 30 bp, Artificial Sequence
  Synthetic oligonucleotide
ctcgaacgccccacccgcctcgactgttgc

SEQ ID NO: 472793 - DNA, 30 bp, Artificial Sequence
  Synthetic oligonucleotide
cttcgtgatccacacgcatccccaatttgc

SEQ ID NO: 472794 - DNA, 30 bp, Artificial Sequence
  Synthetic oligonucleotide
tcacctccggtgatggttggaagaatttgc

SEQ ID NO: 472795 - DNA, 30 bp, Artificial Sequence
  Synthetic oligonucleotide
ctattgtatactatatgtattagcatttgc

SEQ ID NO: 472796 - DNA, 30 bp, Artificial Sequence
  Synthetic oligonucleotide
gcattctatggttaaaaagctcagatttgc

SEQ ID NO: 472797 - DNA, 30 bp, Artificial Sequence
  Synthetic oligonucleotide
taatgtgggacaccttatcacgagatttgc

SEQ ID NO: 472798 - DNA, 30 bp, Artificial Sequence
  Synthetic oligonucleotide
catcttacgtaggcaactatgtttatttgc

SEQ ID NO: 472799 - DNA, 30 bp, Artificial Sequence
  Synthetic oligonucleotide
actgacccggcccggggtataaaactttgc

SEQ ID NO: 472800 - DNA, 31 bp, Artificial Sequence
  Synthetic oligonucleotide
ccgaagccataggggaagcaccgaactttgc

SEQ ID NO: 472801 - DNA, 30 bp, Artificial Sequence
  Synthetic oligonucleotide
aatggaacaacagctatggttacactttgc

SEQ ID NO: 472802 - DNA, 30 bp, Artificial Sequence
  Synthetic oligonucleotide
agagacgtttgcagtatacatctcctttgc

SEQ ID NO: 472803 - DNA, 30 bp, Artificial Sequence
  Synthetic oligonucleotide
ggccaactcatcggttgtccggtcctttgc

SEQ ID NO: 472804 - DNA, 30 bp, Artificial Sequence
  Synthetic oligonucleotide
gcgctcggcgggagactggtctaagtttgc

SEQ ID NO: 472805 - DNA, 30 bp, Artificial Sequence
  Synthetic oligonucleotide
cctatcaattgacacctggaaacggtttgc

SEQ ID NO: 472806 - DNA, 30 bp, Artificial Sequence
  Synthetic oligonucleotide
tacggggctcttaagacggttacggtttgc

SEQ ID NO: 472807 - DNA, 30 bp, Artificial Sequence
  Synthetic oligonucleotide
aagctcataaagctttcggggatggtttgc

SEQ ID NO: 472808 - DNA, 30 bp, Artificial Sequence
  Synthetic oligonucleotide
gaattcgctggttgggtacaaaatgtttgc

SEQ ID NO: 472809 - DNA, 30 bp, Artificial Sequence
  Synthetic oligonucleotide
gcccaatgtttttcatggaccggtgtttgc

SEQ ID NO: 472810 - DNA, 30 bp, Artificial Sequence
  Synthetic oligonucleotide
ggggccgcaagagtgacaacttgtgtttgc

SEQ ID NO: 472811 - DNA, 30 bp, Artificial Sequence
  Synthetic oligonucleotide
tattcacttcgttacgactgaaaattttgc

SEQ ID NO: 472812 - DNA, 30 bp, Artificial Sequence
  Synthetic oligonucleotide
tttagttctcatctgtaagagtaattttgc

SEQ ID NO: 472813 - DNA, 30 bp, Artificial Sequence
  Synthetic oligonucleotide
aataactagaaacggccctatgtattttgc

SEQ ID NO: 472814 - DNA, 30 bp, Artificial Sequence
  Synthetic oligonucleotide
agatcatcccccgacgcacgacacttttgc

SEQ ID NO: 472815 - DNA, 30 bp, Artificial Sequence
  Synthetic oligonucleotide
gcttgacatcgatgtttgtccctcttttgc

SEQ ID NO: 472816 - DNA, 30 bp, Artificial Sequence
  Synthetic oligonucleotide
aatctgtggccgttaatgtatttcttttgc

SEQ ID NO: 472817 - DNA, 30 bp, Artificial Sequence
  Synthetic oligonucleotide
ctctgaacggatgggctaagatcgttttgc

SEQ ID NO: 472818 - DNA, 30 bp, Artificial Sequence
  Synthetic oligonucleotide
tttaatggtctgggtgtcaaacctttttgc

SEQ ID NO: 472819 - DNA, 30 bp, Artificial Sequence
  Synthetic oligonucleotide
gcgtgcctgtccgcggccgcacgtttttgc

SEQ ID NO: 472820 - DNA, 30 bp, Artificial Sequence
  Synthetic oligonucleotide
aaccggtgaaaactggagttccgtttttgc

SEQ ID NO: 472821 - DNA, 29 bp, Artificial Sequence
  Synthetic oligonucleotide
ccctatgggaatgcaccgcagaaaaaatc

SEQ ID NO: 472822 - DNA, 30 bp, Artificial Sequence
  Synthetic oligonucleotide
atctatatctggtgtggattcttaaaaatc

SEQ ID NO: 472823 - DNA, 30 bp, Artificial Sequence
  Synthetic oligonucleotide
gtgggtacattgttcgctcctctcaaaatc

SEQ ID NO: 472824 - DNA, 31 bp, Artificial Sequence
  Synthetic oligonucleotide
actcactttagtttgctggctaaggaaaatc

SEQ ID NO: 472825 - DNA, 30 bp, Artificial Sequence
  Synthetic oligonucleotide
tgcagccgttcagacaaagcggtgaaaatc

SEQ ID NO: 472826 - DNA, 30 bp, Artificial Sequence
  Synthetic oligonucleotide
ttgatcgctcatcgcaacatatttaaaatc

SEQ ID NO: 472827 - DNA, 30 bp, Artificial Sequence
  Synthetic oligonucleotide
ggtatttagggggttcgggcaagacaaatc

SEQ ID NO: 472828 - DNA, 30 bp, Artificial Sequence
  Synthetic oligonucleotide
tctaatccgctgaacgcgcggaagcaaatc

SEQ ID NO: 472829 - DNA, 30 bp, Artificial Sequence
  Synthetic oligonucleotide
cagtgatcacacagggtttgcacgcaaatc

SEQ ID NO: 472830 - DNA, 30 bp, Artificial Sequence
  Synthetic oligonucleotide
agtctttttatctgccggcaaaggcaaatc

SEQ ID NO: 472831 - DNA, 30 bp, Artificial Sequence
  Synthetic oligonucleotide
atgctataaactaccaaccacgggcaaatc

SEQ ID NO: 472832 - DNA, 30 bp, Artificial Sequence
  Synthetic oligonucleotide
acagagccacttgtgagtctctggcaaatc

SEQ ID NO: 472833 - DNA, 29 bp, Artificial Sequence
  Synthetic oligonucleotide
tattctcaatctgtttaaaaagtcaaatc

SEQ ID NO: 472834 - DNA, 30 bp, Artificial Sequence
  Synthetic oligonucleotide
cattcttataggggtcaattcggtcaaatc

SEQ ID NO: 472835 - DNA, 29 bp, Artificial Sequence
  Synthetic oligonucleotide
ttactggtcgttctacgatcgttcaaatc

SEQ ID NO: 472836 - DNA, 30 bp, Artificial Sequence
  Synthetic oligonucleotide
cctcttgtttagtctaggtagttagaaatc

SEQ ID NO: 472837 - DNA, 30 bp, Artificial Sequence
  Synthetic oligonucleotide
tttctcacctcttagtgagccctggaaatc

SEQ ID NO: 472838 - DNA, 30 bp, Artificial Sequence
  Synthetic oligonucleotide
tcttgcaagtgcctgacgcgcggtgaaatc

SEQ ID NO: 472839 - DNA, 30 bp, Artificial Sequence
  Synthetic oligonucleotide
actcttttgtggccgtacggcagataaatc

SEQ ID NO: 472840 - DNA, 31 bp, Artificial Sequence
  Synthetic oligonucleotide
atgcgaccccggggaataaatgagctaaatc

SEQ ID NO: 472841 - DNA, 30 bp, Artificial Sequence
  Synthetic oligonucleotide
gacgcgtcggatctcagcatcgcaacaatc

SEQ ID NO: 472842 - DNA, 30 bp, Artificial Sequence
  Synthetic oligonucleotide
gtaagtttcggtaagtcggcccgcacaatc

SEQ ID NO: 472843 - DNA, 30 bp, Artificial Sequence
  Synthetic oligonucleotide
cagtaacatacatacgcagtaggcacaatc

SEQ ID NO: 472844 - DNA, 30 bp, Artificial Sequence
  Synthetic oligonucleotide
aatcgccttaatggttcacagcatacaatc

SEQ ID NO: 472845 - DNA, 30 bp, Artificial Sequence
  Synthetic oligonucleotide
gctatattgacgtgactgccattaccaatc

SEQ ID NO: 472846 - DNA, 30 bp, Artificial Sequence
  Synthetic oligonucleotide
ttctgacatctgccggtacgatacccaatc

SEQ ID NO: 472847 - DNA, 30 bp, Artificial Sequence
  Synthetic oligonucleotide
gtgtatgggtcccatcttttagccccaatc

SEQ ID NO: 472848 - DNA, 30 bp, Artificial Sequence
  Synthetic oligonucleotide
gtttttagtgtaaggtatccatatccaatc

SEQ ID NO: 472849 - DNA, 30 bp, Artificial Sequence
  Synthetic oligonucleotide
gaagcttgcggcggcagctggcctccaatc

SEQ ID NO: 472850 - DNA, 30 bp, Artificial Sequence
  Synthetic oligonucleotide
gaggtcactgatactgcggcaagtccaatc

SEQ ID NO: 472851 - DNA, 30 bp, Artificial Sequence
  Synthetic oligonucleotide
gacggctctagtgtcggacagtgtccaatc

SEQ ID NO: 472852 - DNA, 30 bp, Artificial Sequence
  Synthetic oligonucleotide
acaagcccggactattatataatagcaatc

SEQ ID NO: 472853 - DNA, 30 bp, Artificial Sequence
  Synthetic oligonucleotide
ggcgccgcacaacagatgttcttagcaatc

SEQ ID NO: 472854 - DNA, 30 bp, Artificial Sequence
  Synthetic oligonucleotide
tgaaaagttaattttttctgggacgcaatc

SEQ ID NO: 472855 - DNA, 30 bp, Artificial Sequence
  Synthetic oligonucleotide
gggacttcaccgacgatatagcccgcaatc

SEQ ID NO: 472856 - DNA, 30 bp, Artificial Sequence
  Synthetic oligonucleotide
aagggcactttaagttgaaaccaggcaatc

SEQ ID NO: 472857 - DNA, 30 bp, Artificial Sequence
  Synthetic oligonucleotide
aaaacgctccattcacagacaccggcaatc

SEQ ID NO: 472858 - DNA, 30 bp, Artificial Sequence
  Synthetic oligonucleotide
cgtcagaagcggcacttgcctatggcaatc

SEQ ID NO: 472859 - DNA, 30 bp, Artificial Sequence
  Synthetic oligonucleotide
atgtggttgggcaaagcaccggaatcaatc

SEQ ID NO: 472860 - DNA, 30 bp, Artificial Sequence
  Synthetic oligonucleotide
gattattagagccggagttattgatcaatc

SEQ ID NO: 472861 - DNA, 30 bp, Artificial Sequence
  Synthetic oligonucleotide
gctagggtttgaatctcaaatctatcaatc

SEQ ID NO: 472862 - DNA, 30 bp, Artificial Sequence
  Synthetic oligonucleotide
tttgaagtggatcgagtccagaattcaatc

SEQ ID NO: 472863 - DNA, 30 bp, Artificial Sequence
  Synthetic oligonucleotide
gcgccggggcctgctatgtttccttcaatc

SEQ ID NO: 472864 - DNA, 30 bp, Artificial Sequence
  Synthetic oligonucleotide
cttccaaatgaggaactggacgtttcaatc

SEQ ID NO: 472865 - DNA, 30 bp, Artificial Sequence
  Synthetic oligonucleotide
catgaaagctcttgtataatcaaaagaatc

SEQ ID NO: 472866 - DNA, 30 bp, Artificial Sequence
  Synthetic oligonucleotide
gctttcgaccgcaaagcaaagtcaagaatc

SEQ ID NO: 472867 - DNA, 30 bp, Artificial Sequence
  Synthetic oligonucleotide
gtcttcgaaggataattcaagtgaagaatc

SEQ ID NO: 472868 - DNA, 30 bp, Artificial Sequence
  Synthetic oligonucleotide
gccagatttggatggggtcgtttaagaatc

SEQ ID NO: 472869 - DNA, 30 bp, Artificial Sequence
  Synthetic oligonucleotide
aacgcagaaagagtccaattctccagaatc

SEQ ID NO: 472870 - DNA, 30 bp, Artificial Sequence
  Synthetic oligonucleotide
gagtagacgattataacaacgcgcagaatc

SEQ ID NO: 472871 - DNA, 30 bp, Artificial Sequence
  Synthetic oligonucleotide
aagaactcgtaacagagcagaatgagaatc

SEQ ID NO: 472872 - DNA, 30 bp, Artificial Sequence
  Synthetic oligonucleotide
ctaaaaagcctacgcttcgactatagaatc

SEQ ID NO: 472873 - DNA, 29 bp, Artificial Sequence
  Synthetic oligonucleotide
ttcagatggacgtgtattaagctagaatc

SEQ ID NO: 472874 - DNA, 30 bp, Artificial Sequence
  Synthetic oligonucleotide
tcaagttcaagattcggctcctaccgaatc

SEQ ID NO: 472875 - DNA, 30 bp, Artificial Sequence
  Synthetic oligonucleotide
attaaatcgcatcggaacaggtagcgaatc

SEQ ID NO: 472876 - DNA, 30 bp, Artificial Sequence
  Synthetic oligonucleotide
gttctggctaggcgaacagattggcgaatc

SEQ ID NO: 472877 - DNA, 30 bp, Artificial Sequence
  Synthetic oligonucleotide
accttttggccgaacagctgggatcgaatc

SEQ ID NO: 472878 - DNA, 30 bp, Artificial Sequence
  Synthetic oligonucleotide
gtatttatacaatttggacacactcgaatc

SEQ ID NO: 472879 - DNA, 30 bp, Artificial Sequence
  Synthetic oligonucleotide
ggatctttcctaaggtcacggtatggaatc

SEQ ID NO: 472880 - DNA, 30 bp, Artificial Sequence
  Synthetic oligonucleotide
gttgcgaactttgatacattacctggaatc

SEQ ID NO: 472881 - DNA, 30 bp, Artificial Sequence
  Synthetic oligonucleotide
tatgtgtaccaattctcgcacggtggaatc

SEQ ID NO: 472882 - DNA, 30 bp, Artificial Sequence
  Synthetic oligonucleotide
gtcacagccatacgcacgtgtctatgaatc

SEQ ID NO: 472883 - DNA, 30 bp, Artificial Sequence
  Synthetic oligonucleotide
accgctgggtgggttcagttattctgaatc

SEQ ID NO: 472884 - DNA, 30 bp, Artificial Sequence
  Synthetic oligonucleotide
caaagctcggatcagggctttaattgaatc

SEQ ID NO: 472885 - DNA, 30 bp, Artificial Sequence
  Synthetic oligonucleotide
cgtatcctgaaaaaagttttttgttgaatc

SEQ ID NO: 472886 - DNA, 30 bp, Artificial Sequence
  Synthetic oligonucleotide
atgctctgttggtttctgctgttttgaatc

SEQ ID NO: 472887 - DNA, 30 bp, Artificial Sequence
  Synthetic oligonucleotide
ctttcttttccgaggaatataaacataatc

SEQ ID NO: 472888 - DNA, 30 bp, Artificial Sequence
  Synthetic oligonucleotide
gtctactaatgatgattgtccatcataatc

SEQ ID NO: 472889 - DNA, 30 bp, Artificial Sequence
  Synthetic oligonucleotide
accagaagtagattaggtgtgggtataatc

SEQ ID NO: 472890 - DNA, 30 bp, Artificial Sequence
  Synthetic oligonucleotide
tttatcgcagcgctaaaatatacactaatc

SEQ ID NO: 472891 - DNA, 30 bp, Artificial Sequence
  Synthetic oligonucleotide
aagggcctagtaagcctgtccagactaatc

SEQ ID NO: 472892 - DNA, 30 bp, Artificial Sequence
  Synthetic oligonucleotide
gacgccaggcagagcagcctaatactaatc

SEQ ID NO: 472893 - DNA, 30 bp, Artificial Sequence
  Synthetic oligonucleotide
cccgggggcgctcgcaccattcccctaatc

SEQ ID NO: 472894 - DNA, 30 bp, Artificial Sequence
  Synthetic oligonucleotide
ctaaaggcctgtccttgcccccatctaatc

SEQ ID NO: 472895 - DNA, 30 bp, Artificial Sequence
  Synthetic oligonucleotide
gagcattaggacctaaatagttatctaatc

SEQ ID NO: 472896 - DNA, 30 bp, Artificial Sequence
  Synthetic oligonucleotide
tcggtactatcttttgacaaagctctaatc

SEQ ID NO: 472897 - DNA, 30 bp, Artificial Sequence
  Synthetic oligonucleotide
atcattgaggacttatacttgagtctaatc

SEQ ID NO: 472898 - DNA, 30 bp, Artificial Sequence
  Synthetic oligonucleotide
acaatgatacacgatgcagatagcgtaatc

SEQ ID NO: 472899 - DNA, 30 bp, Artificial Sequence
  Synthetic oligonucleotide
atacatatcggaataggctcggcggtaatc

SEQ ID NO: 472900 - DNA, 31 bp, Artificial Sequence
  Synthetic oligonucleotide
tactacatttagtagttcgaatgcggtaatc

SEQ ID NO: 472901 - DNA, 30 bp, Artificial Sequence
  Synthetic oligonucleotide
tcttatccgccgggcaagttgtatgtaatc

SEQ ID NO: 472902 - DNA, 30 bp, Artificial Sequence
  Synthetic oligonucleotide
ggctgccttgctaaatccgagggtgtaatc

SEQ ID NO: 472903 - DNA, 30 bp, Artificial Sequence
  Synthetic oligonucleotide
tgttgacccaagcgtggattttaattaatc

SEQ ID NO: 472904 - DNA, 30 bp, Artificial Sequence
  Synthetic oligonucleotide
cggtagagtatgcaggatgtaccattaatc

SEQ ID NO: 472905 - DNA, 30 bp, Artificial Sequence
  Synthetic oligonucleotide
acctagcttttaaagacaacgccattaatc

SEQ ID NO: 472906 - DNA, 30 bp, Artificial Sequence
  Synthetic oligonucleotide
aaaccagctgtcgataaaggcagattaatc

SEQ ID NO: 472907 - DNA, 30 bp, Artificial Sequence
  Synthetic oligonucleotide
agcatggtataatgatagcgtatattaatc

SEQ ID NO: 472908 - DNA, 30 bp, Artificial Sequence
  Synthetic oligonucleotide
taaaaggtagtgtttttcttaaacttaatc

SEQ ID NO: 472909 - DNA, 29 bp, Artificial Sequence
  Synthetic oligonucleotide
gacggatttctacccagctgtacttaatc

SEQ ID NO: 472910 - DNA, 30 bp, Artificial Sequence
  Synthetic oligonucleotide
cagactaatgcctagtctaacgccttaatc

SEQ ID NO: 472911 - DNA, 30 bp, Artificial Sequence
  Synthetic oligonucleotide
tttgcaatatgttgtatataaagcttaatc

SEQ ID NO: 472912 - DNA, 30 bp, Artificial Sequence
  Synthetic oligonucleotide
agccgcagatgttctctgtaatgcttaatc

SEQ ID NO: 472913 - DNA, 30 bp, Artificial Sequence
  Synthetic oligonucleotide
ccgggtaaaaaaagtgggtggaagttaatc

SEQ ID NO: 472914 - DNA, 30 bp, Artificial Sequence
  Synthetic oligonucleotide
accgcagtgtgaccacggagtaagttaatc

SEQ ID NO: 472915 - DNA, 30 bp, Artificial Sequence
  Synthetic oligonucleotide
aaccaaaccggttcctagtgtcctttaatc

SEQ ID NO: 472916 - DNA, 30 bp, Artificial Sequence
  Synthetic oligonucleotide
taataacgtcaacgtgaagacgctttaatc

SEQ ID NO: 472917 - DNA, 30 bp, Artificial Sequence
  Synthetic oligonucleotide
aaccgcgcgtctgtttccgatgctttaatc

SEQ ID NO: 472918 - DNA, 30 bp, Artificial Sequence
  Synthetic oligonucleotide
gtaacgaaaaaagcattcattggtttaatc

SEQ ID NO: 472919 - DNA, 30 bp, Artificial Sequence
  Synthetic oligonucleotide
tagtgatgaaggacggagcaagcaaacatc

SEQ ID NO: 472920 - DNA, 30 bp, Artificial Sequence
  Synthetic oligonucleotide
tattactttaccccgctttaacacaacatc

SEQ ID NO: 472921 - DNA, 30 bp, Artificial Sequence
  Synthetic oligonucleotide
tttttaaacctgaaccagctatgcaacatc

SEQ ID NO: 472922 - DNA, 30 bp, Artificial Sequence
  Synthetic oligonucleotide
aaagacattgtcgaaaaaacgaagaacatc

SEQ ID NO: 472923 - DNA, 30 bp, Artificial Sequence
  Synthetic oligonucleotide
gattttaccgtttcgggctggttgaacatc

SEQ ID NO: 472924 - DNA, 30 bp, Artificial Sequence
  Synthetic oligonucleotide
atatttcagtttattctgtgtcgccacatc

SEQ ID NO: 472925 - DNA, 30 bp, Artificial Sequence
  Synthetic oligonucleotide
cttcgatagttgtcgctgcacggtcacatc

SEQ ID NO: 472926 - DNA, 30 bp, Artificial Sequence
  Synthetic oligonucleotide
ccggtaacagatatgcaggaacttcacatc

SEQ ID NO: 472927 - DNA, 30 bp, Artificial Sequence
  Synthetic oligonucleotide
tgttatagagccggcacagcgggggacatc

SEQ ID NO: 472928 - DNA, 30 bp, Artificial Sequence
  Synthetic oligonucleotide
gcttttcgattataattggggtatgacatc

SEQ ID NO: 472929 - DNA, 30 bp, Artificial Sequence
  Synthetic oligonucleotide
acttaaatatttggcacagaatgtgacatc

SEQ ID NO: 472930 - DNA, 30 bp, Artificial Sequence
  Synthetic oligonucleotide
cgccgtaattttaggcaattatgatacatc

SEQ ID NO: 472931 - DNA, 30 bp, Artificial Sequence
  Synthetic oligonucleotide
gtagattacacagttttgaattgctacatc

SEQ ID NO: 472932 - DNA, 29 bp, Artificial Sequence
  Synthetic oligonucleotide
ttacttcctaagtcctgaagcgttacatc

SEQ ID NO: 472933 - DNA, 30 bp, Artificial Sequence
  Synthetic oligonucleotide
gtgagagtaactgtttggggtcgttacatc

SEQ ID NO: 472934 - DNA, 30 bp, Artificial Sequence
  Synthetic oligonucleotide
actcctccacacagaggtggaggaaccatc

SEQ ID NO: 472935 - DNA, 30 bp, Artificial Sequence
  Synthetic oligonucleotide
aaaacctttactaggcgaccgatcaccatc

SEQ ID NO: 472936 - DNA, 30 bp, Artificial Sequence
  Synthetic oligonucleotide
cacacccctgtcgctgcgaggttcaccatc

SEQ ID NO: 472937 - DNA, 30 bp, Artificial Sequence
  Synthetic oligonucleotide
cgggcggggcgaaatccctcgccgaccatc

SEQ ID NO: 472938 - DNA, 30 bp, Artificial Sequence
  Synthetic oligonucleotide
tgggccctggtctttcggaataggaccatc

SEQ ID NO: 472939 - DNA, 30 bp, Artificial Sequence
  Synthetic oligonucleotide
gttgcaaaattgtatggctctcctaccatc

SEQ ID NO: 472940 - DNA, 30 bp, Artificial Sequence
  Synthetic oligonucleotide
gtaaattacacggaagaaagttttaccatc

SEQ ID NO: 472941 - DNA, 30 bp, Artificial Sequence
  Synthetic oligonucleotide
tcaatttgatagcacggtaacagccccatc

SEQ ID NO: 472942 - DNA, 30 bp, Artificial Sequence
  Synthetic oligonucleotide
agtgcctcatgcaggagggccgagcccatc

SEQ ID NO: 472943 - DNA, 30 bp, Artificial Sequence
  Synthetic oligonucleotide
gggttatcaggccgatcaggcaatcccatc

SEQ ID NO: 472944 - DNA, 30 bp, Artificial Sequence
  Synthetic oligonucleotide
tagatgcttatgtccgtttttagtcccatc

SEQ ID NO: 472945 - DNA, 30 bp, Artificial Sequence
  Synthetic oligonucleotide
gtggatgagcatgaaaggccagaggccatc

SEQ ID NO: 472946 - DNA, 30 bp, Artificial Sequence
  Synthetic oligonucleotide
tgaaggcaggcaaagatcgaataggccatc

SEQ ID NO: 472947 - DNA, 31 bp, Artificial Sequence
  Synthetic oligonucleotide
aacgcaaatgcgtttaaaggtctaggccatc

SEQ ID NO: 472948 - DNA, 30 bp, Artificial Sequence
  Synthetic oligonucleotide
aaagctgggcagaaagtgttgagatccatc

SEQ ID NO: 472949 - DNA, 30 bp, Artificial Sequence
  Synthetic oligonucleotide
gaaaatatattggacattttctgctccatc

SEQ ID NO: 472950 - DNA, 30 bp, Artificial Sequence
  Synthetic oligonucleotide
tgtagggagatgtattttaacacttccatc

SEQ ID NO: 472951 - DNA, 30 bp, Artificial Sequence
  Synthetic oligonucleotide
aaagctcgcctgacttcgtattaaagcatc

SEQ ID NO: 472952 - DNA, 30 bp, Artificial Sequence
  Synthetic oligonucleotide
gctaccacgagtcagaaagtgagcagcatc

SEQ ID NO: 472953 - DNA, 30 bp, Artificial Sequence
  Synthetic oligonucleotide
caaaatggaccctagaagccccggagcatc

SEQ ID NO: 472954 - DNA, 30 bp, Artificial Sequence
  Synthetic oligonucleotide
gcagatttcaactgtttcgatcaacgcatc

SEQ ID NO: 472955 - DNA, 30 bp, Artificial Sequence
  Synthetic oligonucleotide
aatcatacgtatagccacagcggacgcatc

SEQ ID NO: 472956 - DNA, 30 bp, Artificial Sequence
  Synthetic oligonucleotide
ggaagttttcggatcagctcgttacgcatc

SEQ ID NO: 472957 - DNA, 30 bp, Artificial Sequence
  Synthetic oligonucleotide
cggtggtgataggcgagtggaaaccgcatc

SEQ ID NO: 472958 - DNA, 30 bp, Artificial Sequence
  Synthetic oligonucleotide
tggtgatattcaactggtaaaacgcgcatc

SEQ ID NO: 472959 - DNA, 30 bp, Artificial Sequence
  Synthetic oligonucleotide
cgaccgtaaatgcgcgcagatgttcgcatc

SEQ ID NO: 472960 - DNA, 30 bp, Artificial Sequence
  Synthetic oligonucleotide
aaaatgacgccgttaacgggctaaggcatc

SEQ ID NO: 472961 - DNA, 30 bp, Artificial Sequence
  Synthetic oligonucleotide
gagagtccgtcatgccaggattcgggcatc

SEQ ID NO: 472962 - DNA, 30 bp, Artificial Sequence
  Synthetic oligonucleotide
gacctttcattagactttcaacatggcatc

SEQ ID NO: 472963 - DNA, 30 bp, Artificial Sequence
  Synthetic oligonucleotide
aaaaatataaaggtatgccaccttggcatc

SEQ ID NO: 472964 - DNA, 30 bp, Artificial Sequence
  Synthetic oligonucleotide
cattttagaagctactacctggtttgcatc

SEQ ID NO: 472965 - DNA, 30 bp, Artificial Sequence
  Synthetic oligonucleotide
tatgttcctaaaacaggatagtcaatcatc

SEQ ID NO: 472966 - DNA, 30 bp, Artificial Sequence
  Synthetic oligonucleotide
gctcgagcattgaagcaccagggcatcatc

SEQ ID NO: 472967 - DNA, 30 bp, Artificial Sequence
  Synthetic oligonucleotide
attgacaaatcgtccttggcagagatcatc

SEQ ID NO: 472968 - DNA, 30 bp, Artificial Sequence
  Synthetic oligonucleotide
ttagcggaagcggattaatctgggatcatc

SEQ ID NO: 472969 - DNA, 30 bp, Artificial Sequence
  Synthetic oligonucleotide
gctatgtgtctggccgctgtaatgatcatc

SEQ ID NO: 472970 - DNA, 30 bp, Artificial Sequence
  Synthetic oligonucleotide
tgtacagtttccgtctcgcatcgcctcatc

SEQ ID NO: 472971 - DNA, 30 bp, Artificial Sequence
  Synthetic oligonucleotide
attttgtgtagcgtcatatagatcctcatc

SEQ ID NO: 472972 - DNA, 30 bp, Artificial Sequence
  Synthetic oligonucleotide
caattgttttggggggagtagatcctcatc

SEQ ID NO: 472973 - DNA, 30 bp, Artificial Sequence
  Synthetic oligonucleotide
gaggcctttcgcattagctcttagctcatc

SEQ ID NO: 472974 - DNA, 30 bp, Artificial Sequence
  Synthetic oligonucleotide
tagtatacggccccacatcacgggctcatc

SEQ ID NO: 472975 - DNA, 30 bp, Artificial Sequence
  Synthetic oligonucleotide
gagctatcggccacaattctacgtctcatc

SEQ ID NO: 472976 - DNA, 30 bp, Artificial Sequence
  Synthetic oligonucleotide
tgaggatacaatacacaagatcttctcatc

SEQ ID NO: 472977 - DNA, 30 bp, Artificial Sequence
  Synthetic oligonucleotide
aaccggacgaattttgtttgcgcagtcatc

SEQ ID NO: 472978 - DNA, 30 bp, Artificial Sequence
  Synthetic oligonucleotide
tgtgtcaatataactcagagggtagtcatc

SEQ ID NO: 472979 - DNA, 30 bp, Artificial Sequence
  Synthetic oligonucleotide
aaaagctcgtgattgcaactcggcgtcatc

SEQ ID NO: 472980 - DNA, 30 bp, Artificial Sequence
  Synthetic oligonucleotide
tataaaaaggagcaggcaactttggtcatc

SEQ ID NO: 472981 - DNA, 30 bp, Artificial Sequence
  Synthetic oligonucleotide
gtagaagtcgcttaatgcacgcatgtcatc

SEQ ID NO: 472982 - DNA, 30 bp, Artificial Sequence
  Synthetic oligonucleotide
acgggagcgtagatgctgcgatatgtcatc

SEQ ID NO: 472983 - DNA, 30 bp, Artificial Sequence
  Synthetic oligonucleotide
tctatattccaggacgggtaagttgtcatc

SEQ ID NO: 472984 - DNA, 30 bp, Artificial Sequence
  Synthetic oligonucleotide
atttctgctcaatgttgcgcacaattcatc

SEQ ID NO: 472985 - DNA, 30 bp, Artificial Sequence
  Synthetic oligonucleotide
gcttcagacacgccgttgtcatacttcatc

SEQ ID NO: 472986 - DNA, 30 bp, Artificial Sequence
  Synthetic oligonucleotide
ggggtatgttgattctatttacccttcatc

SEQ ID NO: 472987 - DNA, 30 bp, Artificial Sequence
  Synthetic oligonucleotide
ggggcttcatacacgcagggggccttcatc

SEQ ID NO: 472988 - DNA, 30 bp, Artificial Sequence
  Synthetic oligonucleotide
gtagtcacgctgagccgcgtctccttcatc

SEQ ID NO: 472989 - DNA, 30 bp, Artificial Sequence
  Synthetic oligonucleotide
caacataatttctataacggtatgttcatc

SEQ ID NO: 472990 - DNA, 30 bp, Artificial Sequence
  Synthetic oligonucleotide
ttggcattgaaggctgccaggcatttcatc

SEQ ID NO: 472991 - DNA, 30 bp, Artificial Sequence
  Synthetic oligonucleotide
caggataaaatgacctctgatcatttcatc

SEQ ID NO: 472992 - DNA, 30 bp, Artificial Sequence
  Synthetic oligonucleotide
atacaggatctccgtactcacggtttcatc

SEQ ID NO: 472993 - DNA, 30 bp, Artificial Sequence
  Synthetic oligonucleotide
gctatattcgtaccagagataaccaagatc

SEQ ID NO: 472994 - DNA, 30 bp, Artificial Sequence
  Synthetic oligonucleotide
aggtctctttcacgcagccacgtgaagatc

SEQ ID NO: 472995 - DNA, 30 bp, Artificial Sequence
  Synthetic oligonucleotide
atcatacactttgctcccctttaacagatc

SEQ ID NO: 472996 - DNA, 30 bp, Artificial Sequence
  Synthetic oligonucleotide
tgcacggcgctcgctagtccgtagcagatc

SEQ ID NO: 472997 - DNA, 30 bp, Artificial Sequence
  Synthetic oligonucleotide
gtccgaaagcgctcagtccgttggcagatc

SEQ ID NO: 472998 - DNA, 30 bp, Artificial Sequence
  Synthetic oligonucleotide
gtagcgaccgcacttgtccaggtgcagatc

SEQ ID NO: 472999 - DNA, 30 bp, Artificial Sequence
  Synthetic oligonucleotide
ttgtgtacttaagttggaaactctcagatc

SEQ ID NO: 473000 - DNA, 30 bp, Artificial Sequence
  Synthetic oligonucleotide
gagccgtgttctttgttacagaaagagatc

SEQ ID NO: 473001 - DNA, 30 bp, Artificial Sequence
  Synthetic oligonucleotide
cgatgctaaagctaagggtaccacgagatc

SEQ ID NO: 473002 - DNA, 30 bp, Artificial Sequence
  Synthetic oligonucleotide
tgcaaggactcctgctccgtctaggagatc

SEQ ID NO: 473003 - DNA, 30 bp, Artificial Sequence
  Synthetic oligonucleotide
ttttctcctcattagtctttttgggagatc

SEQ ID NO: 473004 - DNA, 30 bp, Artificial Sequence
  Synthetic oligonucleotide
gacactgagtgcagatgagaggctgagatc

SEQ ID NO: 473005 - DNA, 30 bp, Artificial Sequence
  Synthetic oligonucleotide
tgacaaattcgaacgcagctaattgagatc

SEQ ID NO: 473006 - DNA, 30 bp, Artificial Sequence
  Synthetic oligonucleotide
gtgacgggactagatcactgtcttgagatc

SEQ ID NO: 473007 - DNA, 30 bp, Artificial Sequence
  Synthetic oligonucleotide
tatacattcgatccgtgtaagatatagatc

SEQ ID NO: 473008 - DNA, 30 bp, Artificial Sequence
  Synthetic oligonucleotide
tgataatgttgcagactagtcgagtagatc

SEQ ID NO: 473009 - DNA, 30 bp, Artificial Sequence
  Synthetic oligonucleotide
tgttggagtatcaattgcaccaattagatc

SEQ ID NO: 473010 - DNA, 30 bp, Artificial Sequence
  Synthetic oligonucleotide
gttttcgtcgcggaaatgacaatttagatc

SEQ ID NO: 473011 - DNA, 30 bp, Artificial Sequence
  Synthetic oligonucleotide
gggaggttgtattgcttgggcatttagatc

SEQ ID NO: 473012 - DNA, 30 bp, Artificial Sequence
  Synthetic oligonucleotide
ttggtgtacctattcagcacgcacacgatc

SEQ ID NO: 473013 - DNA, 30 bp, Artificial Sequence
  Synthetic oligonucleotide
ggtgacttggtcttcccaccgggcacgatc

SEQ ID NO: 473014 - DNA, 30 bp, Artificial Sequence
  Synthetic oligonucleotide
agtattcgggaaggcagcaatgcgacgatc

SEQ ID NO: 473015 - DNA, 30 bp, Artificial Sequence
  Synthetic oligonucleotide
gatttactcctggtttctagactgacgatc

SEQ ID NO: 473016 - DNA, 30 bp, Artificial Sequence
  Synthetic oligonucleotide
gtgctggtgtattgtggttccttgacgatc

SEQ ID NO: 473017 - DNA, 30 bp, Artificial Sequence
  Synthetic oligonucleotide
attgcgggagtgtgtggttttaatacgatc

SEQ ID NO: 473018 - DNA, 30 bp, Artificial Sequence
  Synthetic oligonucleotide
gatagggtgtgtaccggaagtggtacgatc

SEQ ID NO: 473019 - DNA, 30 bp, Artificial Sequence
  Synthetic oligonucleotide
tggattgccctctgctgctctctaccgatc

SEQ ID NO: 473020 - DNA, 30 bp, Artificial Sequence
  Synthetic oligonucleotide
atcggcgcggttatacacctcgagccgatc

SEQ ID NO: 473021 - DNA, 30 bp, Artificial Sequence
  Synthetic oligonucleotide
cgcatatcgaatcagctagattttccgatc

SEQ ID NO: 473022 - DNA, 30 bp, Artificial Sequence
  Synthetic oligonucleotide
gcaagggtcgatgttgtgacaacagcgatc

SEQ ID NO: 473023 - DNA, 30 bp, Artificial Sequence
  Synthetic oligonucleotide
aaaatcaaacggttatgttggatagcgatc

SEQ ID NO: 473024 - DNA, 30 bp, Artificial Sequence
  Synthetic oligonucleotide
acgcgttcgatttagcggaaccccgcgatc

SEQ ID NO: 473025 - DNA, 30 bp, Artificial Sequence
  Synthetic oligonucleotide
cctgatcccggatgtaacaaatccgcgatc

SEQ ID NO: 473026 - DNA, 30 bp, Artificial Sequence
  Synthetic oligonucleotide
ggtacgcctagatcgtgtggggttgcgatc

SEQ ID NO: 473027 - DNA, 30 bp, Artificial Sequence
  Synthetic oligonucleotide
ttcatccccaatatcgattggccctcgatc

SEQ ID NO: 473028 - DNA, 30 bp, Artificial Sequence
  Synthetic oligonucleotide
tcaggggttatcgcttttagctcctcgatc

SEQ ID NO: 473029 - DNA, 30 bp, Artificial Sequence
  Synthetic oligonucleotide
aaagccgagcgacacatttgctggtcgatc

SEQ ID NO: 473030 - DNA, 30 bp, Artificial Sequence
  Synthetic oligonucleotide
tcctccttttgaagtttgagaccttcgatc

SEQ ID NO: 473031 - DNA, 30 bp, Artificial Sequence
  Synthetic oligonucleotide
tgcatctctatactaatggataaaaggatc

SEQ ID NO: 473032 - DNA, 30 bp, Artificial Sequence
  Synthetic oligonucleotide
cgtaatactggtgcagctagatacaggatc

SEQ ID NO: 473033 - DNA, 30 bp, Artificial Sequence
  Synthetic oligonucleotide
cacagacttttcaatgttggttacaggatc

SEQ ID NO: 473034 - DNA, 30 bp, Artificial Sequence
  Synthetic oligonucleotide
aaccctctagatattctccctacgaggatc

SEQ ID NO: 473035 - DNA, 30 bp, Artificial Sequence
  Synthetic oligonucleotide
tagattgtcgtctcccgggccttgaggatc

SEQ ID NO: 473036 - DNA, 30 bp, Artificial Sequence
  Synthetic oligonucleotide
ttctctttgctgtgatcgccacgtaggatc

SEQ ID NO: 473037 - DNA, 30 bp, Artificial Sequence
  Synthetic oligonucleotide
gttccagatgcagttaatattgtacggatc

SEQ ID NO: 473038 - DNA, 30 bp, Artificial Sequence
  Synthetic oligonucleotide
gcatagattggggcggggcgtgcccggatc

SEQ ID NO: 473039 - DNA, 30 bp, Artificial Sequence
  Synthetic oligonucleotide
tatgaatgtagcagtgccacacgccggatc

SEQ ID NO: 473040 - DNA, 30 bp, Artificial Sequence
  Synthetic oligonucleotide
ggacccgtaggagtccgcattaagcggatc

SEQ ID NO: 473041 - DNA, 30 bp, Artificial Sequence
  Synthetic oligonucleotide
gatatcatgtgctaagcctagcagcggatc

SEQ ID NO: 473042 - DNA, 30 bp, Artificial Sequence
  Synthetic oligonucleotide
cttgctttagtcctatgaatgacgcggatc

SEQ ID NO: 473043 - DNA, 30 bp, Artificial Sequence
  Synthetic oligonucleotide
tttgtgtactgctcgtagtatggtcggatc

SEQ ID NO: 473044 - DNA, 30 bp, Artificial Sequence
  Synthetic oligonucleotide
tacccttgcgtacactacagcgtagggatc

SEQ ID NO: 473045 - DNA, 30 bp, Artificial Sequence
  Synthetic oligonucleotide
taattcagtttgcgtcttagcttagggatc

SEQ ID NO: 473046 - DNA, 30 bp, Artificial Sequence
  Synthetic oligonucleotide
atgacatagacgattatgctcagcgggatc

SEQ ID NO: 473047 - DNA, 30 bp, Artificial Sequence
  Synthetic oligonucleotide
cttctgcgatcaatgaattttgtggggatc

SEQ ID NO: 473048 - DNA, 30 bp, Artificial Sequence
  Synthetic oligonucleotide
gatcaacacccaggcggaggcttggggatc

SEQ ID NO: 473049 - DNA, 30 bp, Artificial Sequence
  Synthetic oligonucleotide
ctcactctgtaccatagtccctaatggatc

SEQ ID NO: 473050 - DNA, 30 bp, Artificial Sequence
  Synthetic oligonucleotide
cacgaggacacggctatccagtcatggatc

SEQ ID NO: 473051 - DNA, 30 bp, Artificial Sequence
  Synthetic oligonucleotide
acgcaatgctttgaccgtagcgagtggatc

SEQ ID NO: 473052 - DNA, 30 bp, Artificial Sequence
  Synthetic oligonucleotide
gcctagcataaccacctttacacgtggatc

SEQ ID NO: 473053 - DNA, 30 bp, Artificial Sequence
  Synthetic oligonucleotide
gactttcagggtaattacaaagcttggatc

SEQ ID NO: 473054 - DNA, 30 bp, Artificial Sequence
  Synthetic oligonucleotide
gaagtccttgtaagtccacgcttttggatc

SEQ ID NO: 473055 - DNA, 30 bp, Artificial Sequence
  Synthetic oligonucleotide
agtaaacaaccggtaaatttggaaatgatc

SEQ ID NO: 473056 - DNA, 30 bp, Artificial Sequence
  Synthetic oligonucleotide
gtgcgttgattgaacgtagcccgaatgatc

SEQ ID NO: 473057 - DNA, 30 bp, Artificial Sequence
  Synthetic oligonucleotide
ccacctggacctaatccaggatacatgatc

SEQ ID NO: 473058 - DNA, 30 bp, Artificial Sequence
  Synthetic oligonucleotide
agccgaagcggagtggctccttgcatgatc

SEQ ID NO: 473059 - DNA, 30 bp, Artificial Sequence
  Synthetic oligonucleotide
tggtacttccgtcccaagcacgatatgatc

SEQ ID NO: 473060 - DNA, 30 bp, Artificial Sequence
  Synthetic oligonucleotide
gaattggctggcagtagtagaggtatgatc

SEQ ID NO: 473061 - DNA, 30 bp, Artificial Sequence
  Synthetic oligonucleotide
aataggcagcaaaccttacggcttatgatc

SEQ ID NO: 473062 - DNA, 30 bp, Artificial Sequence
  Synthetic oligonucleotide
ttgtgtctctttggtgagattacactgatc

SEQ ID NO: 473063 - DNA, 30 bp, Artificial Sequence
  Synthetic oligonucleotide
tgcaggataaatctgccgataagactgatc

SEQ ID NO: 473064 - DNA, 30 bp, Artificial Sequence
  Synthetic oligonucleotide
ccgttcagccttatttgtcgaagcctgatc

SEQ ID NO: 473065 - DNA, 30 bp, Artificial Sequence
  Synthetic oligonucleotide
gattgatctagtgtcgttaagactctgatc

SEQ ID NO: 473066 - DNA, 30 bp, Artificial Sequence
  Synthetic oligonucleotide
cactgccctacgcagacggagtaagtgatc

SEQ ID NO: 473067 - DNA, 30 bp, Artificial Sequence
  Synthetic oligonucleotide
aaaacggtacccgaccggtcagccgtgatc

SEQ ID NO: 473068 - DNA, 30 bp, Artificial Sequence
  Synthetic oligonucleotide
ttccatggggacctgtagaacgcggtgatc

SEQ ID NO: 473069 - DNA, 30 bp, Artificial Sequence
  Synthetic oligonucleotide
ggtagcatctctaattggttggcggtgatc

SEQ ID NO: 473070 - DNA, 30 bp, Artificial Sequence
  Synthetic oligonucleotide
aagattgttgatttgcacagcagtgtgatc

SEQ ID NO: 473071 - DNA, 30 bp, Artificial Sequence
  Synthetic oligonucleotide
atatttatgtgatgtagcaaataattgatc

SEQ ID NO: 473072 - DNA, 30 bp, Artificial Sequence
  Synthetic oligonucleotide
aggccgtaaatcatgtaactggtattgatc

SEQ ID NO: 473073 - DNA, 30 bp, Artificial Sequence
  Synthetic oligonucleotide
ctatagggcctcttactctccatcttgatc

SEQ ID NO: 473074 - DNA, 30 bp, Artificial Sequence
  Synthetic oligonucleotide
ccgtttgactcagtggccgttagtttgatc

SEQ ID NO: 473075 - DNA, 30 bp, Artificial Sequence
  Synthetic oligonucleotide
cggctctggcatcgtcattgactcaatatc

SEQ ID NO: 473076 - DNA, 30 bp, Artificial Sequence
  Synthetic oligonucleotide
ttatccacgcggagacgtaatggtaatatc

SEQ ID NO: 473077 - DNA, 30 bp, Artificial Sequence
  Synthetic oligonucleotide
ctgtatcataccatgcactactgacatatc

SEQ ID NO: 473078 - DNA, 30 bp, Artificial Sequence
  Synthetic oligonucleotide
cgactacaggccgcgtaaatttttcatatc

SEQ ID NO: 473079 - DNA, 30 bp, Artificial Sequence
  Synthetic oligonucleotide
ctgacacaagggtatcgagttcccgatatc

SEQ ID NO: 473080 - DNA, 30 bp, Artificial Sequence
  Synthetic oligonucleotide
catacacgaatctcttttcctactgatatc

SEQ ID NO: 473081 - DNA, 30 bp, Artificial Sequence
  Synthetic oligonucleotide
atcgatcaggtgagtaatgtatcatatatc

SEQ ID NO: 473082 - DNA, 30 bp, Artificial Sequence
  Synthetic oligonucleotide
cgagattcactcggtggccgctactatatc

SEQ ID NO: 473083 - DNA, 30 bp, Artificial Sequence
  Synthetic oligonucleotide
gcctgataaggtgatgccccatgctatatc

SEQ ID NO: 473084 - DNA, 31 bp, Artificial Sequence
  Synthetic oligonucleotide
tattgctcgctatccatatagctagtatatc

SEQ ID NO: 473085 - DNA, 30 bp, Artificial Sequence
  Synthetic oligonucleotide
ctagtagtgtgaccccgacatgggtatatc

SEQ ID NO: 473086 - DNA, 30 bp, Artificial Sequence
  Synthetic oligonucleotide
aaaggctggtaccgcgtagtgttgtatatc

SEQ ID NO: 473087 - DNA, 30 bp, Artificial Sequence
  Synthetic oligonucleotide
gattgtcgatcctggaaaacaggttatatc

SEQ ID NO: 473088 - DNA, 30 bp, Artificial Sequence
  Synthetic oligonucleotide
actgatctaagttcggtcatttacactatc

SEQ ID NO: 473089 - DNA, 30 bp, Artificial Sequence
  Synthetic oligonucleotide
tctttctatggtactcgagccaggactatc

SEQ ID NO: 473090 - DNA, 30 bp, Artificial Sequence
  Synthetic oligonucleotide
atatagatagttctggagcctcggactatc

SEQ ID NO: 473091 - DNA, 30 bp, Artificial Sequence
  Synthetic oligonucleotide
atatctgtgttaatcactgcggggactatc

SEQ ID NO: 473092 - DNA, 30 bp, Artificial Sequence
  Synthetic oligonucleotide
gatttgagtatagtgagtataatgactatc

SEQ ID NO: 473093 - DNA, 30 bp, Artificial Sequence
  Synthetic oligonucleotide
gtcagagttttgcggagggggatgactatc

SEQ ID NO: 473094 - DNA, 30 bp, Artificial Sequence
  Synthetic oligonucleotide
ttagcagagtgatagaacatacaacctatc

SEQ ID NO: 473095 - DNA, 30 bp, Artificial Sequence
  Synthetic oligonucleotide
tatacgaggctgcggcattcagcacctatc

SEQ ID NO: 473096 - DNA, 30 bp, Artificial Sequence
  Synthetic oligonucleotide
caagaatggtcgcatagtccgcgacctatc

SEQ ID NO: 473097 - DNA, 30 bp, Artificial Sequence
  Synthetic oligonucleotide
cgttccgttcgcgatagggcctgacctatc

SEQ ID NO: 473098 - DNA, 30 bp, Artificial Sequence
  Synthetic oligonucleotide
gagtgatgtgcgaatgttcgctaccctatc

SEQ ID NO: 473099 - DNA, 30 bp, Artificial Sequence
  Synthetic oligonucleotide
gggttacttgttctagaaatctgccctatc

SEQ ID NO: 473100 - DNA, 30 bp, Artificial Sequence
  Synthetic oligonucleotide
ctacaattttgtcgtgccgtactccctatc

SEQ ID NO: 473101 - DNA, 30 bp, Artificial Sequence
  Synthetic oligonucleotide
catggcttagagcgcttgagtgtccctatc

SEQ ID NO: 473102 - DNA, 30 bp, Artificial Sequence
  Synthetic oligonucleotide
ggttatactgggcgtcgtgttcgagctatc

SEQ ID NO: 473103 - DNA, 30 bp, Artificial Sequence
  Synthetic oligonucleotide
cagtgccgaaagcaattgctgagcgctatc

SEQ ID NO: 473104 - DNA, 30 bp, Artificial Sequence
  Synthetic oligonucleotide
tgagaagtttggttgaaggctctcgctatc

SEQ ID NO: 473105 - DNA, 30 bp, Artificial Sequence
  Synthetic oligonucleotide
tgccagcatcaatgcccttctgaggctatc

SEQ ID NO: 473106 - DNA, 30 bp, Artificial Sequence
  Synthetic oligonucleotide
atctgaacgattcgccgcttcagggctatc

SEQ ID NO: 473107 - DNA, 30 bp, Artificial Sequence
  Synthetic oligonucleotide
ggtaagcattagatgttattgaaatctatc

SEQ ID NO: 473108 - DNA, 30 bp, Artificial Sequence
  Synthetic oligonucleotide
agtcctattagttagctacaacgatctatc

SEQ ID NO: 473109 - DNA, 30 bp, Artificial Sequence
  Synthetic oligonucleotide
agacccgagtcctacgctggccgatctatc

SEQ ID NO: 473110 - DNA, 30 bp, Artificial Sequence
  Synthetic oligonucleotide
agattagtagtccgctcatgaacctctatc

SEQ ID NO: 473111 - DNA, 30 bp, Artificial Sequence
  Synthetic oligonucleotide
aacccgtttcagcgcctgcgcggctctatc

SEQ ID NO: 473112 - DNA, 30 bp, Artificial Sequence
  Synthetic oligonucleotide
gactcgcatgcctaatggcattattctatc

SEQ ID NO: 473113 - DNA, 30 bp, Artificial Sequence
  Synthetic oligonucleotide
gtgcccatttctttcctgagatcttctatc

SEQ ID NO: 473114 - DNA, 30 bp, Artificial Sequence
  Synthetic oligonucleotide
atcagaggccagccacgccagtaaagtatc

SEQ ID NO: 473115 - DNA, 30 bp, Artificial Sequence
  Synthetic oligonucleotide
ggatatcgcaccctagggctcccaagtatc

SEQ ID NO: 473116 - DNA, 30 bp, Artificial Sequence
  Synthetic oligonucleotide
ccatatttgcgcagtcaaagccgaagtatc

SEQ ID NO: 473117 - DNA, 30 bp, Artificial Sequence
  Synthetic oligonucleotide
aggggatgggctgaccacggacatagtatc

SEQ ID NO: 473118 - DNA, 30 bp, Artificial Sequence
  Synthetic oligonucleotide
caaattcggccggtagggccctgtagtatc

SEQ ID NO: 473119 - DNA, 30 bp, Artificial Sequence
  Synthetic oligonucleotide
tagcgatatcgctaggaccgtcttagtatc

SEQ ID NO: 473120 - DNA, 30 bp, Artificial Sequence
  Synthetic oligonucleotide
aacttaatttaggatactcttcgacgtatc

SEQ ID NO: 473121 - DNA, 30 bp, Artificial Sequence
  Synthetic oligonucleotide
gagtgcttgtgcgagcctcctcaccgtatc

SEQ ID NO: 473122 - DNA, 30 bp, Artificial Sequence
  Synthetic oligonucleotide
gtctgcaaacggatgtaaactcgccgtatc

SEQ ID NO: 473123 - DNA, 30 bp, Artificial Sequence
  Synthetic oligonucleotide
ttatagcccaaagcggagaccgggcgtatc

SEQ ID NO: 473124 - DNA, 30 bp, Artificial Sequence
  Synthetic oligonucleotide
gttgcaggccgtcgcctgttaaatcgtatc

SEQ ID NO: 473125 - DNA, 30 bp, Artificial Sequence
  Synthetic oligonucleotide
atattgagtaggtgcccgcagtttcgtatc

SEQ ID NO: 473126 - DNA, 30 bp, Artificial Sequence
  Synthetic oligonucleotide
ttaaaacttgcgggattgcggagaggtatc

SEQ ID NO: 473127 - DNA, 30 bp, Artificial Sequence
  Synthetic oligonucleotide
tcgtacagtgaagaatacctgtgaggtatc

SEQ ID NO: 473128 - DNA, 30 bp, Artificial Sequence
  Synthetic oligonucleotide
ctcttagggattgactgtcctgacggtatc

SEQ ID NO: 473129 - DNA, 30 bp, Artificial Sequence
  Synthetic oligonucleotide
gggcattggtacgaggaagggatcggtatc

SEQ ID NO: 473130 - DNA, 30 bp, Artificial Sequence
  Synthetic oligonucleotide
atttcacacttacatggcttgatatgtatc

SEQ ID NO: 473131 - DNA, 30 bp, Artificial Sequence
  Synthetic oligonucleotide
tttcaagctgcccgtttttgtagctgtatc

SEQ ID NO: 473132 - DNA, 30 bp, Artificial Sequence
  Synthetic oligonucleotide
gttaagagctatctatataacgtctgtatc

SEQ ID NO: 473133 - DNA, 30 bp, Artificial Sequence
  Synthetic oligonucleotide
ctcttgcggagaagacagccagtttgtatc

SEQ ID NO: 473134 - DNA, 30 bp, Artificial Sequence
  Synthetic oligonucleotide
tgtttaaatgctagatggcaattttgtatc

SEQ ID NO: 473135 - DNA, 30 bp, Artificial Sequence
  Synthetic oligonucleotide
ggtcgtctgattcacttgctcaaaattatc

SEQ ID NO: 473136 - DNA, 30 bp, Artificial Sequence
  Synthetic oligonucleotide
tagcaaattccgttatggcttcaaattatc

SEQ ID NO: 473137 - DNA, 30 bp, Artificial Sequence
  Synthetic oligonucleotide
tcttggtgtctctaacaacgaaagattatc

SEQ ID NO: 473138 - DNA, 30 bp, Artificial Sequence
  Synthetic oligonucleotide
gtaccataggacgcagaggctccgattatc

SEQ ID NO: 473139 - DNA, 30 bp, Artificial Sequence
  Synthetic oligonucleotide
ccctgtttgtttcaagaagagatgattatc

SEQ ID NO: 473140 - DNA, 30 bp, Artificial Sequence
  Synthetic oligonucleotide
gcatagcagtatggcgacccggctattatc

SEQ ID NO: 473141 - DNA, 30 bp, Artificial Sequence
  Synthetic oligonucleotide
gatacgtattgggttttttaaccacttatc

SEQ ID NO: 473142 - DNA, 30 bp, Artificial Sequence
  Synthetic oligonucleotide
acgagagtgggatgatgtaacccacttatc

SEQ ID NO: 473143 - DNA, 30 bp, Artificial Sequence
  Synthetic oligonucleotide
atctgaacctcttccactgtatgccttatc

SEQ ID NO: 473144 - DNA, 30 bp, Artificial Sequence
  Synthetic oligonucleotide
cgaatgaccagagggagaggcgcgcttatc

SEQ ID NO: 473145 - DNA, 30 bp, Artificial Sequence
  Synthetic oligonucleotide
ccagaaaagtgttcactcagctcgcttatc

SEQ ID NO: 473146 - DNA, 30 bp, Artificial Sequence
  Synthetic oligonucleotide
ggtttcgtgcttactgtgtattggcttatc

SEQ ID NO: 473147 - DNA, 30 bp, Artificial Sequence
  Synthetic oligonucleotide
ataaggcgggttggggcgagcactcttatc

SEQ ID NO: 473148 - DNA, 30 bp, Artificial Sequence
  Synthetic oligonucleotide
acaggtatctcgacgcaattcccagttatc

SEQ ID NO: 473149 - DNA, 30 bp, Artificial Sequence
  Synthetic oligonucleotide
actgatgattttatagtttctggagttatc

SEQ ID NO: 473150 - DNA, 30 bp, Artificial Sequence
  Synthetic oligonucleotide
tcacaggtttcagtgaaagtacgggttatc

SEQ ID NO: 473151 - DNA, 30 bp, Artificial Sequence
  Synthetic oligonucleotide
agcgctggttacgtaagcagtcgtgttatc

SEQ ID NO: 473152 - DNA, 30 bp, Artificial Sequence
  Synthetic oligonucleotide
cgggctatttaccagtgtgctattgttatc

SEQ ID NO: 473153 - DNA, 30 bp, Artificial Sequence
  Synthetic oligonucleotide
attgtagagaggggcagtttacgatttatc

SEQ ID NO: 473154 - DNA, 30 bp, Artificial Sequence
  Synthetic oligonucleotide
cctgtagtattttatatgtctggatttatc

SEQ ID NO: 473155 - DNA, 30 bp, Artificial Sequence
  Synthetic oligonucleotide
acataagctagttcggcgacgctatttatc

SEQ ID NO: 473156 - DNA, 30 bp, Artificial Sequence
  Synthetic oligonucleotide
catggactgcaacatacgtagcagtttatc

SEQ ID NO: 473157 - DNA, 30 bp, Artificial Sequence
  Synthetic oligonucleotide
cccagcctggtttggcagctacggtttatc

SEQ ID NO: 473158 - DNA, 30 bp, Artificial Sequence
  Synthetic oligonucleotide
gtttttcggatggacgctacacattttatc

SEQ ID NO: 473159 - DNA, 30 bp, Artificial Sequence
  Synthetic oligonucleotide
taaacctaaggcctgaaaggtggttttatc

SEQ ID NO: 473160 - DNA, 30 bp, Artificial Sequence
  Synthetic oligonucleotide
attaagacaaagtttcatctgtgttttatc

SEQ ID NO: 473161 - DNA, 30 bp, Artificial Sequence
  Synthetic oligonucleotide
agcttaacacttattgtacggatttttatc

SEQ ID NO: 473162 - DNA, 30 bp, Artificial Sequence
  Synthetic oligonucleotide
ccagttcggctgccatgggccgaaaaactc

SEQ ID NO: 473163 - DNA, 30 bp, Artificial Sequence
  Synthetic oligonucleotide
tattactcagttcgctcattctaaaaactc

SEQ ID NO: 473164 - DNA, 30 bp, Artificial Sequence
  Synthetic oligonucleotide
cagagttgaattgtattgtatagaaaactc

SEQ ID NO: 473165 - DNA, 30 bp, Artificial Sequence
  Synthetic oligonucleotide
cgcaatgtcgcttccttggagttgaaactc

SEQ ID NO: 473166 - DNA, 30 bp, Artificial Sequence
  Synthetic oligonucleotide
cttaaacgtctatcttgaaaagataaactc

SEQ ID NO: 473167 - DNA, 30 bp, Artificial Sequence
  Synthetic oligonucleotide
ttcctgcacatatcagcgtatgttaaactc

SEQ ID NO: 473168 - DNA, 30 bp, Artificial Sequence
  Synthetic oligonucleotide
cacaattaggcaaaatttgggctccaactc

SEQ ID NO: 473169 - DNA, 30 bp, Artificial Sequence
  Synthetic oligonucleotide
atgccgcattggacagacttgcagcaactc

SEQ ID NO: 473170 - DNA, 30 bp, Artificial Sequence
  Synthetic oligonucleotide
acagagttttggaattctgggatgcaactc

SEQ ID NO: 473171 - DNA, 30 bp, Artificial Sequence
  Synthetic oligonucleotide
aaacattgctcttgaagttcggtgcaactc

SEQ ID NO: 473172 - DNA, 30 bp, Artificial Sequence
  Synthetic oligonucleotide
atggtgcatcggggaggctatcctcaactc

SEQ ID NO: 473173 - DNA, 30 bp, Artificial Sequence
  Synthetic oligonucleotide
cgtatactaaccatgattacctcagaactc

SEQ ID NO: 473174 - DNA, 30 bp, Artificial Sequence
  Synthetic oligonucleotide
ggctttaatgtaacgagataattagaactc

SEQ ID NO: 473175 - DNA, 30 bp, Artificial Sequence
  Synthetic oligonucleotide
ctttttggccttaggtaaatacccgaactc

SEQ ID NO: 473176 - DNA, 30 bp, Artificial Sequence
  Synthetic oligonucleotide
gaagttaatggcgaggcaaacttcgaactc

SEQ ID NO: 473177 - DNA, 30 bp, Artificial Sequence
  Synthetic oligonucleotide
gtctattcttctaagcgtcgacatgaactc

SEQ ID NO: 473178 - DNA, 30 bp, Artificial Sequence
  Synthetic oligonucleotide
acagggctctccgctttgcagcctgaactc

SEQ ID NO: 473179 - DNA, 30 bp, Artificial Sequence
  Synthetic oligonucleotide
tgtgggcagtttgtaaggaaagcataactc

SEQ ID NO: 473180 - DNA, 30 bp, Artificial Sequence
  Synthetic oligonucleotide
attcatctccgagatttcttggtataactc

SEQ ID NO: 473181 - DNA, 30 bp, Artificial Sequence
  Synthetic oligonucleotide
gtcatttgtcctagagtgatacagtaactc

SEQ ID NO: 473182 - DNA, 30 bp, Artificial Sequence
  Synthetic oligonucleotide
ttacaaggttccttaaaaagcacgtaactc

SEQ ID NO: 473183 - DNA, 30 bp, Artificial Sequence
  Synthetic oligonucleotide
gatatttcagtaaacgtagcgctgtaactc

SEQ ID NO: 473184 - DNA, 30 bp, Artificial Sequence
  Synthetic oligonucleotide
tggatcaaaatgcgaagctgagtgtaactc

SEQ ID NO: 473185 - DNA, 30 bp, Artificial Sequence
  Synthetic oligonucleotide
aattgatctgccgctacagtatgaacactc

SEQ ID NO: 473186 - DNA, 30 bp, Artificial Sequence
  Synthetic oligonucleotide
tacaatatgcgcaatgctgaattaacactc

SEQ ID NO: 473187 - DNA, 30 bp, Artificial Sequence
  Synthetic oligonucleotide
acttagctgtaccggagaacaaccacactc

SEQ ID NO: 473188 - DNA, 30 bp, Artificial Sequence
  Synthetic oligonucleotide
gatcagaatgagaaccgctcggtcacactc

SEQ ID NO: 473189 - DNA, 30 bp, Artificial Sequence
  Synthetic oligonucleotide
aatcctccattcactgctgagcctacactc

SEQ ID NO: 473190 - DNA, 30 bp, Artificial Sequence
  Synthetic oligonucleotide
gcgggtgcttgtgcaccccttagtacactc

SEQ ID NO: 473191 - DNA, 30 bp, Artificial Sequence
  Synthetic oligonucleotide
ctgcagacatattaaccttagttaccactc

SEQ ID NO: 473192 - DNA, 30 bp, Artificial Sequence
  Synthetic oligonucleotide
gtccctactctgaaggtatgcgggccactc

SEQ ID NO: 473193 - DNA, 30 bp, Artificial Sequence
  Synthetic oligonucleotide
gttcgcgctttcgagctcatatatccactc

SEQ ID NO: 473194 - DNA, 30 bp, Artificial Sequence
  Synthetic oligonucleotide
ctattaatactcgttaagggcgctccactc

SEQ ID NO: 473195 - DNA, 30 bp, Artificial Sequence
  Synthetic oligonucleotide
tggtttggtaggttttttgtacgagcactc

SEQ ID NO: 473196 - DNA, 30 bp, Artificial Sequence
  Synthetic oligonucleotide
tattcatttttgtgtggacgctcggcactc

SEQ ID NO: 473197 - DNA, 30 bp, Artificial Sequence
  Synthetic oligonucleotide
ctgtgggggtccgttgtggccggggcactc

SEQ ID NO: 473198 - DNA, 30 bp, Artificial Sequence
  Synthetic oligonucleotide
atgtcatgaactatgatttccgatgcactc

SEQ ID NO: 473199 - DNA, 30 bp, Artificial Sequence
  Synthetic oligonucleotide
tgtattgacggccgtagatgagttgcactc

SEQ ID NO: 473200 - DNA, 30 bp, Artificial Sequence
  Synthetic oligonucleotide
tacaagtaccgtttgcatgcgtaatcactc

SEQ ID NO: 473201 - DNA, 30 bp, Artificial Sequence
  Synthetic oligonucleotide
ccgaagtttttcggtaatataccctcactc

SEQ ID NO: 473202 - DNA, 30 bp, Artificial Sequence
  Synthetic oligonucleotide
aaactaattgccgtacttggcctttcactc

SEQ ID NO: 473203 - DNA, 30 bp, Artificial Sequence
  Synthetic oligonucleotide
tgaatatacctgaaaggagacgcaagactc

SEQ ID NO: 473204 - DNA, 30 bp, Artificial Sequence
  Synthetic oligonucleotide
ggtggctcgatagtcgtgcactccagactc

SEQ ID NO: 473205 - DNA, 30 bp, Artificial Sequence
  Synthetic oligonucleotide
aacaagagtccattgtttccctcgagactc

SEQ ID NO: 473206 - DNA, 30 bp, Artificial Sequence
  Synthetic oligonucleotide
agctccacttccggtccgcggtggagactc

SEQ ID NO: 473207 - DNA, 30 bp, Artificial Sequence
  Synthetic oligonucleotide
taatagaatcatggacgttgcatgagactc

SEQ ID NO: 473208 - DNA, 30 bp, Artificial Sequence
  Synthetic oligonucleotide
agagcaattagaggacccgttcatagactc

SEQ ID NO: 473209 - DNA, 30 bp, Artificial Sequence
  Synthetic oligonucleotide
tcttaattgtataaaatgccagttagactc

SEQ ID NO: 473210 - DNA, 30 bp, Artificial Sequence
  Synthetic oligonucleotide
accctatcaccgtgtgatcagaaacgactc

SEQ ID NO: 473211 - DNA, 30 bp, Artificial Sequence
  Synthetic oligonucleotide
tatcaggccgcaggtacgagtaaccgactc

SEQ ID NO: 473212 - DNA, 30 bp, Artificial Sequence
  Synthetic oligonucleotide
cccaattatcaagggtagtcaccccgactc

SEQ ID NO: 473213 - DNA, 30 bp, Artificial Sequence
  Synthetic oligonucleotide
gtactaactagttatatatatccaggactc

SEQ ID NO: 473214 - DNA, 30 bp, Artificial Sequence
  Synthetic oligonucleotide
ctttctctagtatatgggcgaaagggactc

SEQ ID NO: 473215 - DNA, 30 bp, Artificial Sequence
  Synthetic oligonucleotide
gcgaagtttctcctgtccgtagatggactc

SEQ ID NO: 473216 - DNA, 30 bp, Artificial Sequence
  Synthetic oligonucleotide
ctaaacggtgttatagcgaggggatgactc

SEQ ID NO: 473217 - DNA, 30 bp, Artificial Sequence
  Synthetic oligonucleotide
agcccttccctgtgctgcgcaccctgactc

SEQ ID NO: 473218 - DNA, 30 bp, Artificial Sequence
  Synthetic oligonucleotide
ttttctgtttgaccacaaatagagtgactc

SEQ ID NO: 473219 - DNA, 30 bp, Artificial Sequence
  Synthetic oligonucleotide
tttccgccatgagcagccttaacgtgactc

SEQ ID NO: 473220 - DNA, 30 bp, Artificial Sequence
  Synthetic oligonucleotide
ttaaattgatggagactgctagtgtgactc

SEQ ID NO: 473221 - DNA, 30 bp, Artificial Sequence
  Synthetic oligonucleotide
tgggatggcgtttacgattattattgactc

SEQ ID NO: 473222 - DNA, 30 bp, Artificial Sequence
  Synthetic oligonucleotide
tagagtagtaaaaccacggcttcttgactc

SEQ ID NO: 473223 - DNA, 30 bp, Artificial Sequence
  Synthetic oligonucleotide
aatatacggtcaactcagcacagttgactc

SEQ ID NO: 473224 - DNA, 30 bp, Artificial Sequence
  Synthetic oligonucleotide
ccatgtttggagtcgaaggtctcaatactc

SEQ ID NO: 473225 - DNA, 30 bp, Artificial Sequence
  Synthetic oligonucleotide
aattatttgaaatggtccctcgacatactc

SEQ ID NO: 473226 - DNA, 30 bp, Artificial Sequence
  Synthetic oligonucleotide
gccgtggaatcagagaatggactcatactc

SEQ ID NO: 473227 - DNA, 30 bp, Artificial Sequence
  Synthetic oligonucleotide
atcgtgaatcgctggaaagaagtcatactc

SEQ ID NO: 473228 - DNA, 30 bp, Artificial Sequence
  Synthetic oligonucleotide
attgctgtaacaaggttggcgacgatactc

SEQ ID NO: 473229 - DNA, 30 bp, Artificial Sequence
  Synthetic oligonucleotide
acccccttttaaatgagtagcgggatactc

SEQ ID NO: 473230 - DNA, 30 bp, Artificial Sequence
  Synthetic oligonucleotide
agataagcacaagagattgtatctatactc

SEQ ID NO: 473231 - DNA, 30 bp, Artificial Sequence
  Synthetic oligonucleotide
tacgcaaacgaagcggcgtgttgtatactc

SEQ ID NO: 473232 - DNA, 30 bp, Artificial Sequence
  Synthetic oligonucleotide
tcttccgtccgccttgtggacgggctactc

SEQ ID NO: 473233 - DNA, 30 bp, Artificial Sequence
  Synthetic oligonucleotide
ccagttgtcgtatcgaacagacctctactc

SEQ ID NO: 473234 - DNA, 30 bp, Artificial Sequence
  Synthetic oligonucleotide
ttaggtatgaattgaggtcaagacgtactc

SEQ ID NO: 473235 - DNA, 30 bp, Artificial Sequence
  Synthetic oligonucleotide
cccgaccggcggaaaggcaggcgggtactc

SEQ ID NO: 473236 - DNA, 30 bp, Artificial Sequence
  Synthetic oligonucleotide
gatttcctcggtaaaatgcaatgggtactc

SEQ ID NO: 473237 - DNA, 30 bp, Artificial Sequence
  Synthetic oligonucleotide
cagccacacgtggtatgcagacaattactc

SEQ ID NO: 473238 - DNA, 30 bp, Artificial Sequence
  Synthetic oligonucleotide
aactccaaccaggaactagtagaattactc

SEQ ID NO: 473239 - DNA, 30 bp, Artificial Sequence
  Synthetic oligonucleotide
gaatgtagacggtagtaggcactattactc

SEQ ID NO: 473240 - DNA, 30 bp, Artificial Sequence
  Synthetic oligonucleotide
actatcagtaactgaaaaaaagtattactc

SEQ ID NO: 473241 - DNA, 30 bp, Artificial Sequence
  Synthetic oligonucleotide
ggcgctcctcggagtcgcgtccgtttactc

SEQ ID NO: 473242 - DNA, 30 bp, Artificial Sequence
  Synthetic oligonucleotide
gaaaaatgcaactactagccccttttactc

SEQ ID NO: 473243 - DNA, 30 bp, Artificial Sequence
  Synthetic oligonucleotide
aggtttctcagttatcagtcggacaacctc

SEQ ID NO: 473244 - DNA, 30 bp, Artificial Sequence
  Synthetic oligonucleotide
caggcgattctttgaatcgacggacacctc

SEQ ID NO: 473245 - DNA, 30 bp, Artificial Sequence
  Synthetic oligonucleotide
aaatttaactgtacatgttaaggccacctc

SEQ ID NO: 473246 - DNA, 30 bp, Artificial Sequence
  Synthetic oligonucleotide
tacagggtatgtcccttgccgttgcacctc

SEQ ID NO: 473247 - DNA, 30 bp, Artificial Sequence
  Synthetic oligonucleotide
atatgtataactaacagctatattcacctc

SEQ ID NO: 473248 - DNA, 30 bp, Artificial Sequence
  Synthetic oligonucleotide
aggtaacgtacgcatgtggtataagacctc

SEQ ID NO: 473249 - DNA, 30 bp, Artificial Sequence
  Synthetic oligonucleotide
gtacgatctcgcagggtggttatcgacctc

SEQ ID NO: 473250 - DNA, 30 bp, Artificial Sequence
  Synthetic oligonucleotide
tgcctagtccctgactggtacatggacctc

SEQ ID NO: 473251 - DNA, 30 bp, Artificial Sequence
  Synthetic oligonucleotide
aaagttggggattaactttcgatggacctc

SEQ ID NO: 473252 - DNA, 30 bp, Artificial Sequence
  Synthetic oligonucleotide
gatcattaaaggtctagacaatcctacctc

SEQ ID NO: 473253 - DNA, 30 bp, Artificial Sequence
  Synthetic oligonucleotide
tgaggaatttatgatatgatcggctacctc

SEQ ID NO: 473254 - DNA, 30 bp, Artificial Sequence
  Synthetic oligonucleotide
ttagcagcacgacgggttgtacgaaccctc

SEQ ID NO: 473255 - DNA, 30 bp, Artificial Sequence
  Synthetic oligonucleotide
taagcgggtcctgtgaccaatgtcaccctc

SEQ ID NO: 473256 - DNA, 30 bp, Artificial Sequence
  Synthetic oligonucleotide
ctttatgctcaagaccgggcctcgaccctc

SEQ ID NO: 473257 - DNA, 30 bp, Artificial Sequence
  Synthetic oligonucleotide
cattcgccgcgagcggtcgatgtgaccctc

SEQ ID NO: 473258 - DNA, 30 bp, Artificial Sequence
  Synthetic oligonucleotide
aacccaatcgttatctatagggataccctc

SEQ ID NO: 473259 - DNA, 30 bp, Artificial Sequence
  Synthetic oligonucleotide
taaagtgttattcacgatttaccacccctc

SEQ ID NO: 473260 - DNA, 30 bp, Artificial Sequence
  Synthetic oligonucleotide
taaataatgcaccccgtactgaggcccctc

SEQ ID NO: 473261 - DNA, 30 bp, Artificial Sequence
  Synthetic oligonucleotide
gaatcgttttggaggtcatgtcacgccctc

SEQ ID NO: 473262 - DNA, 30 bp, Artificial Sequence
  Synthetic oligonucleotide
gcgtgacacaaaggggaaggcagcgccctc

SEQ ID NO: 473263 - DNA, 30 bp, Artificial Sequence
  Synthetic oligonucleotide
cagccctttatgtttaactcatgcgccctc

SEQ ID NO: 473264 - DNA, 30 bp, Artificial Sequence
  Synthetic oligonucleotide
cagttggacctgcgggtcacggatgccctc

SEQ ID NO: 473265 - DNA, 30 bp, Artificial Sequence
  Synthetic oligonucleotide
ttcaaactccagctaggatctactgccctc

SEQ ID NO: 473266 - DNA, 30 bp, Artificial Sequence
  Synthetic oligonucleotide
ggcgagcaagagatcacatagcttgccctc

SEQ ID NO: 473267 - DNA, 30 bp, Artificial Sequence
  Synthetic oligonucleotide
ggggagtggatttatggaaaataatccctc

SEQ ID NO: 473268 - DNA, 30 bp, Artificial Sequence
  Synthetic oligonucleotide
ctcaagagacaggtggagggataatccctc

SEQ ID NO: 473269 - DNA, 30 bp, Artificial Sequence
  Synthetic oligonucleotide
aatcaatggacgcatattaattaatccctc

SEQ ID NO: 473270 - DNA, 30 bp, Artificial Sequence
  Synthetic oligonucleotide
tactactttttctgaagggtggcttccctc

SEQ ID NO: 473271 - DNA, 30 bp, Artificial Sequence
  Synthetic oligonucleotide
ttgttcgaggcgaatctatccataagcctc

SEQ ID NO: 473272 - DNA, 30 bp, Artificial Sequence
  Synthetic oligonucleotide
gcaagaagatgatggatactcatcagcctc

SEQ ID NO: 473273 - DNA, 30 bp, Artificial Sequence
  Synthetic oligonucleotide
ggattttagggaaatgaacccttcagcctc

SEQ ID NO: 473274 - DNA, 30 bp, Artificial Sequence
  Synthetic oligonucleotide
gagccgactcccgccgctcatattagcctc

SEQ ID NO: 473275 - DNA, 30 bp, Artificial Sequence
  Synthetic oligonucleotide
tccattggccaacccatgcagacacgcctc

SEQ ID NO: 473276 - DNA, 30 bp, Artificial Sequence
  Synthetic oligonucleotide
taagtattattgaggctgaaggaccgcctc

SEQ ID NO: 473277 - DNA, 30 bp, Artificial Sequence
  Synthetic oligonucleotide
cgagcagtacgtttttgtttctaccgcctc

SEQ ID NO: 473278 - DNA, 30 bp, Artificial Sequence
  Synthetic oligonucleotide
tagcgccacataatatgtgctccaggcctc

SEQ ID NO: 473279 - DNA, 30 bp, Artificial Sequence
  Synthetic oligonucleotide
tgctccgcaggctcggtgcccagaggcctc

SEQ ID NO: 473280 - DNA, 30 bp, Artificial Sequence
  Synthetic oligonucleotide
atattgagataaatgaagaggcgcggcctc

SEQ ID NO: 473281 - DNA, 30 bp, Artificial Sequence
  Synthetic oligonucleotide
tcgactcgctgagcgcatgcaggcggcctc

SEQ ID NO: 473282 - DNA, 30 bp, Artificial Sequence
  Synthetic oligonucleotide
tagatccggcctaaaaggtcgtgcggcctc

SEQ ID NO: 473283 - DNA, 30 bp, Artificial Sequence
  Synthetic oligonucleotide
tgccatgctctctacgcagacgcgggcctc

SEQ ID NO: 473284 - DNA, 30 bp, Artificial Sequence
  Synthetic oligonucleotide
gggtttacatacttctaccgggatggcctc

SEQ ID NO: 473285 - DNA, 30 bp, Artificial Sequence
  Synthetic oligonucleotide
caggcgcacagcaagcatacatatggcctc

SEQ ID NO: 473286 - DNA, 30 bp, Artificial Sequence
  Synthetic oligonucleotide
gtatcgtgcgcctccaggatttttggcctc

SEQ ID NO: 473287 - DNA, 30 bp, Artificial Sequence
  Synthetic oligonucleotide
ctgcgcagagagaaagcataattctgcctc

SEQ ID NO: 473288 - DNA, 30 bp, Artificial Sequence
  Synthetic oligonucleotide
aagatgacaacctaaggaagcgcttgcctc

SEQ ID NO: 473289 - DNA, 30 bp, Artificial Sequence
  Synthetic oligonucleotide
aaaaattatgcgcatgagtgcccaatcctc

SEQ ID NO: 473290 - DNA, 30 bp, Artificial Sequence
  Synthetic oligonucleotide
ggttttatgaaatcgtgcaggaaactcctc

SEQ ID NO: 473291 - DNA, 30 bp, Artificial Sequence
  Synthetic oligonucleotide
ctaactcgccttcgttttatcagcctcctc

SEQ ID NO: 473292 - DNA, 30 bp, Artificial Sequence
  Synthetic oligonucleotide
tataaatgaataaagcttgcgtcgctcctc

SEQ ID NO: 473293 - DNA, 30 bp, Artificial Sequence
  Synthetic oligonucleotide
tgtggggtaacgcttcgtatcaatctcctc

SEQ ID NO: 473294 - DNA, 30 bp, Artificial Sequence
  Synthetic oligonucleotide
gacaaaaagttttggcctaaacatctcctc

SEQ ID NO: 473295 - DNA, 30 bp, Artificial Sequence
  Synthetic oligonucleotide
ttatgccgagagtgtataaaataagtcctc

SEQ ID NO: 473296 - DNA, 30 bp, Artificial Sequence
  Synthetic oligonucleotide
ccttttctgattgggccagggaccgtcctc

SEQ ID NO: 473297 - DNA, 30 bp, Artificial Sequence
  Synthetic oligonucleotide
cttccgatctaatgcttcaggagattcctc

SEQ ID NO: 473298 - DNA, 30 bp, Artificial Sequence
  Synthetic oligonucleotide
aattgccttatcaacctgtgactattcctc

SEQ ID NO: 473299 - DNA, 30 bp, Artificial Sequence
  Synthetic oligonucleotide
tgttggtctagcgaggaaggcgcgttcctc

SEQ ID NO: 473300 - DNA, 30 bp, Artificial Sequence
  Synthetic oligonucleotide
gttggtctacgtgtagcatcttcaaagctc

SEQ ID NO: 473301 - DNA, 30 bp, Artificial Sequence
  Synthetic oligonucleotide
tgtattactttcctaaaaacttgaaagctc

SEQ ID NO: 473302 - DNA, 30 bp, Artificial Sequence
  Synthetic oligonucleotide
ttcctttctttactgctactatgtaagctc

SEQ ID NO: 473303 - DNA, 30 bp, Artificial Sequence
  Synthetic oligonucleotide
ttttacttaatattagactgttgtaagctc

SEQ ID NO: 473304 - DNA, 30 bp, Artificial Sequence
  Synthetic oligonucleotide
gctctgggccgccctagtggcaaacagctc

SEQ ID NO: 473305 - DNA, 30 bp, Artificial Sequence
  Synthetic oligonucleotide
cccccggtggttcgcaccgaagaacagctc

SEQ ID NO: 473306 - DNA, 30 bp, Artificial Sequence
  Synthetic oligonucleotide
tgcctgcgtcgtctagtaaatgaccagctc

SEQ ID NO: 473307 - DNA, 30 bp, Artificial Sequence
  Synthetic oligonucleotide
ccgctggggtcactctagtcaccccagctc

SEQ ID NO: 473308 - DNA, 30 bp, Artificial Sequence
  Synthetic oligonucleotide
ggcgaagtatgtgcgaacactacgcagctc

SEQ ID NO: 473309 - DNA, 30 bp, Artificial Sequence
  Synthetic oligonucleotide
ggggtcaaattgggtggtacagcgcagctc

SEQ ID NO: 473310 - DNA, 30 bp, Artificial Sequence
  Synthetic oligonucleotide
atccactgtagatatgcaggcaggcagctc

SEQ ID NO: 473311 - DNA, 30 bp, Artificial Sequence
  Synthetic oligonucleotide
atgggtctggaagggaagatatggcagctc

SEQ ID NO: 473312 - DNA, 30 bp, Artificial Sequence
  Synthetic oligonucleotide
atcgcctattttccgcgtagaatgcagctc

SEQ ID NO: 473313 - DNA, 30 bp, Artificial Sequence
  Synthetic oligonucleotide
cagaacgcgccactggttttcttgcagctc

SEQ ID NO: 473314 - DNA, 30 bp, Artificial Sequence
  Synthetic oligonucleotide
ggtgatggactcaactgtagtcacgagctc

SEQ ID NO: 473315 - DNA, 30 bp, Artificial Sequence
  Synthetic oligonucleotide
tttcagagcttcagaaaaacccgtgagctc

SEQ ID NO: 473316 - DNA, 30 bp, Artificial Sequence
  Synthetic oligonucleotide
atgcccaagggcccaagtgatccatagctc

SEQ ID NO: 473317 - DNA, 30 bp, Artificial Sequence
  Synthetic oligonucleotide
aatattatacgcacaatgtgcctatagctc

SEQ ID NO: 473318 - DNA, 30 bp, Artificial Sequence
  Synthetic oligonucleotide
gaatggctgcacgaagttggaggctagctc

SEQ ID NO: 473319 - DNA, 30 bp, Artificial Sequence
  Synthetic oligonucleotide
ttgatatggatgttagctagtgagtagctc

SEQ ID NO: 473320 - DNA, 30 bp, Artificial Sequence
  Synthetic oligonucleotide
tttggggatgtcccggcccgggcgtagctc

SEQ ID NO: 473321 - DNA, 30 bp, Artificial Sequence
  Synthetic oligonucleotide
gagggaagctatagtcaaagcagaacgctc

SEQ ID NO: 473322 - DNA, 30 bp, Artificial Sequence
  Synthetic oligonucleotide
tatctagtgacggaacgatgacccacgctc

SEQ ID NO: 473323 - DNA, 30 bp, Artificial Sequence
  Synthetic oligonucleotide
caagacgtctctaacgcccgcctcacgctc

SEQ ID NO: 473324 - DNA, 30 bp, Artificial Sequence
  Synthetic oligonucleotide
gcgagatcgaatattctgatgaagacgctc

SEQ ID NO: 473325 - DNA, 30 bp, Artificial Sequence
  Synthetic oligonucleotide
caaactacagaacatcatggtaagacgctc

SEQ ID NO: 473326 - DNA, 30 bp, Artificial Sequence
  Synthetic oligonucleotide
gagcaggaagtaatgattctaatgacgctc

SEQ ID NO: 473327 - DNA, 30 bp, Artificial Sequence
  Synthetic oligonucleotide
atactatttttaaagcaaactcacccgctc

SEQ ID NO: 473328 - DNA, 30 bp, Artificial Sequence
  Synthetic oligonucleotide
tgcaaatttgtagggtctatcgatccgctc

SEQ ID NO: 473329 - DNA, 30 bp, Artificial Sequence
  Synthetic oligonucleotide
aaggcaacggtacaacggttggacgcgctc

SEQ ID NO: 473330 - DNA, 30 bp, Artificial Sequence
  Synthetic oligonucleotide
ccgtctttcgacaccacgccgcatgcgctc

SEQ ID NO: 473331 - DNA, 30 bp, Artificial Sequence
  Synthetic oligonucleotide
cagctgtgaaagatacagggtatctcgctc

SEQ ID NO: 473332 - DNA, 30 bp, Artificial Sequence
  Synthetic oligonucleotide
gtgtcaggatcggacagagacgcttcgctc

SEQ ID NO: 473333 - DNA, 30 bp, Artificial Sequence
  Synthetic oligonucleotide
aacgaaaaatcaggatgaggcttttcgctc

SEQ ID NO: 473334 - DNA, 30 bp, Artificial Sequence
  Synthetic oligonucleotide
cggggcagcgtgcttccgggaacaaggctc

SEQ ID NO: 473335 - DNA, 30 bp, Artificial Sequence
  Synthetic oligonucleotide
gaatagaggagtggatgtaggttaaggctc

SEQ ID NO: 473336 - DNA, 30 bp, Artificial Sequence
  Synthetic oligonucleotide
cagtatcgggaaccatcgggaaacaggctc

SEQ ID NO: 473337 - DNA, 30 bp, Artificial Sequence
  Synthetic oligonucleotide
gtttggatgtgataggatatgtcgaggctc

SEQ ID NO: 473338 - DNA, 30 bp, Artificial Sequence
  Synthetic oligonucleotide
atgatagcggcctggggagaagttaggctc

SEQ ID NO: 473339 - DNA, 30 bp, Artificial Sequence
  Synthetic oligonucleotide
aagaacgtacaacgatagttacaacggctc

SEQ ID NO: 473340 - DNA, 30 bp, Artificial Sequence
  Synthetic oligonucleotide
gcagtttggtttgtgcgtaagtcacggctc

SEQ ID NO: 473341 - DNA, 30 bp, Artificial Sequence
  Synthetic oligonucleotide
ttgagtctgtctgcactgtaccgacggctc

SEQ ID NO: 473342 - DNA, 30 bp, Artificial Sequence
  Synthetic oligonucleotide
catctatttgttccgggtaagctccggctc

SEQ ID NO: 473343 - DNA, 30 bp, Artificial Sequence
  Synthetic oligonucleotide
cagagccggagacgtggtcgtgggcggctc

SEQ ID NO: 473344 - DNA, 30 bp, Artificial Sequence
  Synthetic oligonucleotide
gatgtgctattgggggtgggtctgcggctc

SEQ ID NO: 473345 - DNA, 30 bp, Artificial Sequence
  Synthetic oligonucleotide
gacgagccgaaggattaattatatcggctc

SEQ ID NO: 473346 - DNA, 30 bp, Artificial Sequence
  Synthetic oligonucleotide
gacgtgtactgtatgcagtctgttcggctc

SEQ ID NO: 473347 - DNA, 30 bp, Artificial Sequence
  Synthetic oligonucleotide
actgaaacgccggacccattgtttcggctc

SEQ ID NO: 473348 - DNA, 30 bp, Artificial Sequence
  Synthetic oligonucleotide
acagcacttccggtaagatggaaagggctc

SEQ ID NO: 473349 - DNA, 30 bp, Artificial Sequence
  Synthetic oligonucleotide
atgctcctatgtcacaattagtgagggctc

SEQ ID NO: 473350 - DNA, 30 bp, Artificial Sequence
  Synthetic oligonucleotide
gaatactgctcaacgctacatttagggctc

SEQ ID NO: 473351 - DNA, 30 bp, Artificial Sequence
  Synthetic oligonucleotide
gggagttattcaggtgttactactgggctc

SEQ ID NO: 473352 - DNA, 30 bp, Artificial Sequence
  Synthetic oligonucleotide
ttagccacgcccaaatccttccctgggctc

SEQ ID NO: 473353 - DNA, 31 bp, Artificial Sequence
  Synthetic oligonucleotide
ttattccagtagtctgagtctgcactggctc

SEQ ID NO: 473354 - DNA, 30 bp, Artificial Sequence
  Synthetic oligonucleotide
gttcgcaaatagcagctcccatactggctc

SEQ ID NO: 473355 - DNA, 30 bp, Artificial Sequence
  Synthetic oligonucleotide
gattcttggtggttgcctgtactgtggctc

SEQ ID NO: 473356 - DNA, 30 bp, Artificial Sequence
  Synthetic oligonucleotide
tgatatagttctgtaagccgctgttggctc

SEQ ID NO: 473357 - DNA, 30 bp, Artificial Sequence
  Synthetic oligonucleotide
tcatttctcaacttatatcctttaatgctc

SEQ ID NO: 473358 - DNA, 30 bp, Artificial Sequence
  Synthetic oligonucleotide
atctgtgtaatagaagtgatttcgatgctc

SEQ ID NO: 473359 - DNA, 30 bp, Artificial Sequence
  Synthetic oligonucleotide
caggattttggcgctatattatggatgctc

SEQ ID NO: 473360 - DNA, 30 bp, Artificial Sequence
  Synthetic oligonucleotide
atattgatcttgttggatactttgatgctc

SEQ ID NO: 473361 - DNA, 30 bp, Artificial Sequence
  Synthetic oligonucleotide
taatgtccagcgcgtctattgcatatgctc

SEQ ID NO: 473362 - DNA, 30 bp, Artificial Sequence
  Synthetic oligonucleotide
tgtcatcggtgatagcttgcatatatgctc

SEQ ID NO: 473363 - DNA, 30 bp, Artificial Sequence
  Synthetic oligonucleotide
cgtatggttatcacaatgtactgtatgctc

SEQ ID NO: 473364 - DNA, 30 bp, Artificial Sequence
  Synthetic oligonucleotide
gcgggtaattctatgtgcaccgttatgctc

SEQ ID NO: 473365 - DNA, 30 bp, Artificial Sequence
  Synthetic oligonucleotide
aggactgctgcctggctgtcctgactgctc

SEQ ID NO: 473366 - DNA, 30 bp, Artificial Sequence
  Synthetic oligonucleotide
gtttgagctaaaacggccttaatgctgctc

SEQ ID NO: 473367 - DNA, 30 bp, Artificial Sequence
  Synthetic oligonucleotide
ctgagttaggcgcaaagcagtttgctgctc

SEQ ID NO: 473368 - DNA, 30 bp, Artificial Sequence
  Synthetic oligonucleotide
ttgttttgggtcaagtgtgtatatctgctc

SEQ ID NO: 473369 - DNA, 30 bp, Artificial Sequence
  Synthetic oligonucleotide
agtcccataaatgtcctgaacattctgctc

SEQ ID NO: 473370 - DNA, 30 bp, Artificial Sequence
  Synthetic oligonucleotide
tcatgacagagcatgagtcatgaggtgctc

SEQ ID NO: 473371 - DNA, 30 bp, Artificial Sequence
  Synthetic oligonucleotide
gatctccgcaacagttaggcgaatgtgctc

SEQ ID NO: 473372 - DNA, 30 bp, Artificial Sequence
  Synthetic oligonucleotide
tatctgtacggcccgaagacatatgtgctc

SEQ ID NO: 473373 - DNA, 30 bp, Artificial Sequence
  Synthetic oligonucleotide
gtagacgtttagtaccgcgcgattgtgctc

SEQ ID NO: 473374 - DNA, 30 bp, Artificial Sequence
  Synthetic oligonucleotide
tcgtgggtcagtgcaattgaataattgctc

SEQ ID NO: 473375 - DNA, 30 bp, Artificial Sequence
  Synthetic oligonucleotide
catctagctgtttgcatatgtatattgctc

SEQ ID NO: 473376 - DNA, 30 bp, Artificial Sequence
  Synthetic oligonucleotide
tgaattctttattttcaacgtatcttgctc

SEQ ID NO: 473377 - DNA, 30 bp, Artificial Sequence
  Synthetic oligonucleotide
aatgatgatcggtctaactcttcaaatctc

SEQ ID NO: 473378 - DNA, 30 bp, Artificial Sequence
  Synthetic oligonucleotide
gcgcgtaccgctcccatgcacggcaatctc

SEQ ID NO: 473379 - DNA, 30 bp, Artificial Sequence
  Synthetic oligonucleotide
attcgacttttctcagacacgggtaatctc

SEQ ID NO: 473380 - DNA, 30 bp, Artificial Sequence
  Synthetic oligonucleotide
ggccctagatttcattaaattattaatctc

SEQ ID NO: 473381 - DNA, 30 bp, Artificial Sequence
  Synthetic oligonucleotide
tattccacctaccaactgggtgttaatctc

SEQ ID NO: 473382 - DNA, 30 bp, Artificial Sequence
  Synthetic oligonucleotide
tatgctgagaaggaacagattaaccatctc

SEQ ID NO: 473383 - DNA, 30 bp, Artificial Sequence
  Synthetic oligonucleotide
ctacctgcgtttcacagtgcagtccatctc

SEQ ID NO: 473384 - DNA, 30 bp, Artificial Sequence
  Synthetic oligonucleotide
tggcggttacacctgttgagacagcatctc

SEQ ID NO: 473385 - DNA, 30 bp, Artificial Sequence
  Synthetic oligonucleotide
ccttggcgacgttcctgtttaacgcatctc

SEQ ID NO: 473386 - DNA, 30 bp, Artificial Sequence
  Synthetic oligonucleotide
gattccctcttgaggtgcaagaggcatctc

SEQ ID NO: 473387 - DNA, 30 bp, Artificial Sequence
  Synthetic oligonucleotide
acttacgcgattagcaatggttatcatctc

SEQ ID NO: 473388 - DNA, 30 bp, Artificial Sequence
  Synthetic oligonucleotide
attatcgtatccgcttgtagacgagatctc

SEQ ID NO: 473389 - DNA, 30 bp, Artificial Sequence
  Synthetic oligonucleotide
catcgaacaaggatgagcgcaacggatctc

SEQ ID NO: 473390 - DNA, 30 bp, Artificial Sequence
  Synthetic oligonucleotide
gactcgccatcgtccggatctagtgatctc

SEQ ID NO: 473391 - DNA, 30 bp, Artificial Sequence
  Synthetic oligonucleotide
gcagtagccagacatgttatgctatatctc

SEQ ID NO: 473392 - DNA, 30 bp, Artificial Sequence
  Synthetic oligonucleotide
attctgttctttaccctatccgtatatctc

SEQ ID NO: 473393 - DNA, 30 bp, Artificial Sequence
  Synthetic oligonucleotide
ctcgtccgtgtgtttagaggcaactatctc

SEQ ID NO: 473394 - DNA, 30 bp, Artificial Sequence
  Synthetic oligonucleotide
ggaacgctgcaggggtaggaggcctatctc

SEQ ID NO: 473395 - DNA, 30 bp, Artificial Sequence
  Synthetic oligonucleotide
cagcaggccgtgggtggcatgggctatctc

SEQ ID NO: 473396 - DNA, 30 bp, Artificial Sequence
  Synthetic oligonucleotide
atggcagaacaatctctcgcagagtatctc

SEQ ID NO: 473397 - DNA, 30 bp, Artificial Sequence
  Synthetic oligonucleotide
ttggggtcgtagcgttagcgcatgtatctc

SEQ ID NO: 473398 - DNA, 30 bp, Artificial Sequence
  Synthetic oligonucleotide
gttagctcttgtgtagcataggattatctc

SEQ ID NO: 473399 - DNA, 30 bp, Artificial Sequence
  Synthetic oligonucleotide
agtttctaacattgtcggattagttatctc

SEQ ID NO: 473400 - DNA, 30 bp, Artificial Sequence
  Synthetic oligonucleotide
ccgcaagcggtaatgccgtgcggttatctc

SEQ ID NO: 473401 - DNA, 28 bp, Artificial Sequence
  Synthetic oligonucleotide
ctcttctctgccccctgttttttatctc

SEQ ID NO: 473402 - DNA, 30 bp, Artificial Sequence
  Synthetic oligonucleotide
ggcagagcgctctgcacgtgcataactctc

SEQ ID NO: 473403 - DNA, 30 bp, Artificial Sequence
  Synthetic oligonucleotide
cccggatccttgccttggggtgggactctc

SEQ ID NO: 473404 - DNA, 30 bp, Artificial Sequence
  Synthetic oligonucleotide
cttagcggataattgtaataagatactctc

SEQ ID NO: 473405 - DNA, 30 bp, Artificial Sequence
  Synthetic oligonucleotide
ggacgtagccgcggtcttatttatactctc

SEQ ID NO: 473406 - DNA, 30 bp, Artificial Sequence
  Synthetic oligonucleotide
aacattaggctggattgctaataacctctc

SEQ ID NO: 473407 - DNA, 30 bp, Artificial Sequence
  Synthetic oligonucleotide
ggagctgcacgagaatatgttgcagctctc

SEQ ID NO: 473408 - DNA, 30 bp, Artificial Sequence
  Synthetic oligonucleotide
ggattgtacgctactaatttgcaggctctc

SEQ ID NO: 473409 - DNA, 30 bp, Artificial Sequence
  Synthetic oligonucleotide
ggtatagcacagagtgcctttgcggctctc

SEQ ID NO: 473410 - DNA, 30 bp, Artificial Sequence
  Synthetic oligonucleotide
gaaacagtcgtccgctagcgagtggctctc

SEQ ID NO: 473411 - DNA, 30 bp, Artificial Sequence
  Synthetic oligonucleotide
gctatataactccaatactggatttctctc

SEQ ID NO: 473412 - DNA, 30 bp, Artificial Sequence
  Synthetic oligonucleotide
tatctgcgaggactgacaagactttctctc

SEQ ID NO: 473413 - DNA, 30 bp, Artificial Sequence
  Synthetic oligonucleotide
ggatatgaacgccccggttgcataagtctc

SEQ ID NO: 473414 - DNA, 30 bp, Artificial Sequence
  Synthetic oligonucleotide
ctcaagagccattccccccaagacagtctc

SEQ ID NO: 473415 - DNA, 30 bp, Artificial Sequence
  Synthetic oligonucleotide
ccttgacttctcgcggtagagaccagtctc

SEQ ID NO: 473416 - DNA, 30 bp, Artificial Sequence
  Synthetic oligonucleotide
gaagttggctggtcgatgattcgcagtctc

SEQ ID NO: 473417 - DNA, 30 bp, Artificial Sequence
  Synthetic oligonucleotide
acaatgaatcgaaatttttcgaagagtctc

SEQ ID NO: 473418 - DNA, 30 bp, Artificial Sequence
  Synthetic oligonucleotide
aagagttaactgtagtgctctttgagtctc

SEQ ID NO: 473419 - DNA, 30 bp, Artificial Sequence
  Synthetic oligonucleotide
gtgtccgagtctttctcaagatgtagtctc

SEQ ID NO: 473420 - DNA, 30 bp, Artificial Sequence
  Synthetic oligonucleotide
gcatgtctgccgtctaaatcttgacgtctc

SEQ ID NO: 473421 - DNA, 30 bp, Artificial Sequence
  Synthetic oligonucleotide
acttcgatgcagagccactcttgacgtctc

SEQ ID NO: 473422 - DNA, 30 bp, Artificial Sequence
  Synthetic oligonucleotide
tgcgagccgcaggatttcttgtgccgtctc

SEQ ID NO: 473423 - DNA, 30 bp, Artificial Sequence
  Synthetic oligonucleotide
gcagagatgagcagtttcgtatggcgtctc

SEQ ID NO: 473424 - DNA, 30 bp, Artificial Sequence
  Synthetic oligonucleotide
ggtgcccaaatttaattttactatcgtctc

SEQ ID NO: 473425 - DNA, 30 bp, Artificial Sequence
  Synthetic oligonucleotide
cagaggtgtcgcactgtgtccagcggtctc

SEQ ID NO: 473426 - DNA, 30 bp, Artificial Sequence
  Synthetic oligonucleotide
gtcatgagcacctccccggaggagggtctc

SEQ ID NO: 473427 - DNA, 30 bp, Artificial Sequence
  Synthetic oligonucleotide
acggttaactaagtcaaattcgggggtctc

SEQ ID NO: 473428 - DNA, 30 bp, Artificial Sequence
  Synthetic oligonucleotide
cttgttttggcggtgacgtttttgggtctc

SEQ ID NO: 473429 - DNA, 30 bp, Artificial Sequence
  Synthetic oligonucleotide
ctggtatttcggcaaagccagccctgtctc

SEQ ID NO: 473430 - DNA, 30 bp, Artificial Sequence
  Synthetic oligonucleotide
ccgccgctggaatttgccagagggtgtctc

SEQ ID NO: 473431 - DNA, 30 bp, Artificial Sequence
  Synthetic oligonucleotide
ccgggaaccgattgtgctttattgtgtctc

SEQ ID NO: 473432 - DNA, 30 bp, Artificial Sequence
  Synthetic oligonucleotide
gtcactttcgaggttcgatccttgtgtctc

SEQ ID NO: 473433 - DNA, 30 bp, Artificial Sequence
  Synthetic oligonucleotide
ctcactatggtctgtttcctcaattgtctc

SEQ ID NO: 473434 - DNA, 30 bp, Artificial Sequence
  Synthetic oligonucleotide
aaggcttaatttaactcagcctaaattctc

SEQ ID NO: 473435 - DNA, 30 bp, Artificial Sequence
  Synthetic oligonucleotide
gtgcagtggggggcaacccggagaattctc

SEQ ID NO: 473436 - DNA, 30 bp, Artificial Sequence
  Synthetic oligonucleotide
gtttagttctgaacgaggcccaacattctc

SEQ ID NO: 473437 - DNA, 30 bp, Artificial Sequence
  Synthetic oligonucleotide
aaccgctttatcttggtaataaggattctc

SEQ ID NO: 473438 - DNA, 30 bp, Artificial Sequence
  Synthetic oligonucleotide
attaatcggtctgtgtcaattatgattctc

SEQ ID NO: 473439 - DNA, 30 bp, Artificial Sequence
  Synthetic oligonucleotide
gctgagccgagagtcgtcaagactattctc

SEQ ID NO: 473440 - DNA, 30 bp, Artificial Sequence
  Synthetic oligonucleotide
ccatcagcatataccatgacagctattctc

SEQ ID NO: 473441 - DNA, 30 bp, Artificial Sequence
  Synthetic oligonucleotide
ttagatcaggcactctgggctgttattctc

SEQ ID NO: 473442 - DNA, 30 bp, Artificial Sequence
  Synthetic oligonucleotide
tgtttaaacaagtcttagaaggtacttctc

SEQ ID NO: 473443 - DNA, 30 bp, Artificial Sequence
  Synthetic oligonucleotide
ttaggatcgttcgcgagcaacgtgcttctc

SEQ ID NO: 473444 - DNA, 30 bp, Artificial Sequence
  Synthetic oligonucleotide
ctatatacatcgactatgcatactcttctc

SEQ ID NO: 473445 - DNA, 30 bp, Artificial Sequence
  Synthetic oligonucleotide
atagccccggaatgaatgatagttcttctc

SEQ ID NO: 473446 - DNA, 30 bp, Artificial Sequence
  Synthetic oligonucleotide
ctttatatgctacaaaggtaactagttctc

SEQ ID NO: 473447 - DNA, 30 bp, Artificial Sequence
  Synthetic oligonucleotide
aaaagcactggtttggcaggattcgttctc

SEQ ID NO: 473448 - DNA, 30 bp, Artificial Sequence
  Synthetic oligonucleotide
gttggtcatggtgtgggactagaggttctc

SEQ ID NO: 473449 - DNA, 30 bp, Artificial Sequence
  Synthetic oligonucleotide
acgaaggtttcggtttcacttcgtgttctc

SEQ ID NO: 473450 - DNA, 30 bp, Artificial Sequence
  Synthetic oligonucleotide
ctgcagaaatagtcccgatccaggtttctc

SEQ ID NO: 473451 - DNA, 30 bp, Artificial Sequence
  Synthetic oligonucleotide
agaaaccattaatatctgctaatttttctc

SEQ ID NO: 473452 - DNA, 30 bp, Artificial Sequence
  Synthetic oligonucleotide
gtggttaagccgttaacggacagaaaagtc

SEQ ID NO: 473453 - DNA, 30 bp, Artificial Sequence
  Synthetic oligonucleotide
tacggcttgtttatcctagctagaaaagtc

SEQ ID NO: 473454 - DNA, 30 bp, Artificial Sequence
  Synthetic oligonucleotide
accccttcacatagcacggatagcaaagtc

SEQ ID NO: 473455 - DNA, 30 bp, Artificial Sequence
  Synthetic oligonucleotide
atctagggtccatgctgcctcatcaaagtc

SEQ ID NO: 473456 - DNA, 30 bp, Artificial Sequence
  Synthetic oligonucleotide
ttgggcagacgccatatacttaagaaagtc

SEQ ID NO: 473457 - DNA, 30 bp, Artificial Sequence
  Synthetic oligonucleotide
gcgtgtcgaaatgttggcgtacagaaagtc

SEQ ID NO: 473458 - DNA, 30 bp, Artificial Sequence
  Synthetic oligonucleotide
tcccaaatatattgggcataagggaaagtc

SEQ ID NO: 473459 - DNA, 30 bp, Artificial Sequence
  Synthetic oligonucleotide
tcgacttattactaccggttctataaagtc

SEQ ID NO: 473460 - DNA, 30 bp, Artificial Sequence
  Synthetic oligonucleotide
tgatttgattgtggcagactgactaaagtc

SEQ ID NO: 473461 - DNA, 30 bp, Artificial Sequence
  Synthetic oligonucleotide
ttatacattttagtgcactgggcccaagtc

SEQ ID NO: 473462 - DNA, 30 bp, Artificial Sequence
  Synthetic oligonucleotide
ctcaaaatacaggaattccgacagcaagtc

SEQ ID NO: 473463 - DNA, 30 bp, Artificial Sequence
  Synthetic oligonucleotide
agcgcccatggacgccccaaccaagaagtc

SEQ ID NO: 473464 - DNA, 30 bp, Artificial Sequence
  Synthetic oligonucleotide
gggggttatagtgtggctcaggcagaagtc

SEQ ID NO: 473465 - DNA, 30 bp, Artificial Sequence
  Synthetic oligonucleotide
cgaatactcttgacgtagtggatagaagtc

SEQ ID NO: 473466 - DNA, 30 bp, Artificial Sequence
  Synthetic oligonucleotide
gttaattgtagcccgctgatgctagaagtc

SEQ ID NO: 473467 - DNA, 30 bp, Artificial Sequence
  Synthetic oligonucleotide
gaatgttgtaagacgctctccagcgaagtc

SEQ ID NO: 473468 - DNA, 30 bp, Artificial Sequence
  Synthetic oligonucleotide
atcggagcgtatctcgacaatatggaagtc

SEQ ID NO: 473469 - DNA, 30 bp, Artificial Sequence
  Synthetic oligonucleotide
gatccgcaccgccactcagtagtggaagtc

SEQ ID NO: 473470 - DNA, 30 bp, Artificial Sequence
  Synthetic oligonucleotide
gcccccctgaatgctccaaggcttgaagtc

SEQ ID NO: 473471 - DNA, 30 bp, Artificial Sequence
  Synthetic oligonucleotide
tcagcttttcgatccgtttatgttgaagtc

SEQ ID NO: 473472 - DNA, 30 bp, Artificial Sequence
  Synthetic oligonucleotide
gccgcacagcggtgcggccctggataagtc

SEQ ID NO: 473473 - DNA, 30 bp, Artificial Sequence
  Synthetic oligonucleotide
tttatttgataaccgcgagttgagtaagtc

SEQ ID NO: 473474 - DNA, 30 bp, Artificial Sequence
  Synthetic oligonucleotide
tcctggcgggctgtagcgagaatgtaagtc

SEQ ID NO: 473475 - DNA, 30 bp, Artificial Sequence
  Synthetic oligonucleotide
tttgaacaggaaactctgcagcattaagtc

SEQ ID NO: 473476 - DNA, 30 bp, Artificial Sequence
  Synthetic oligonucleotide
gcaatgtggcggtcgcctattcattaagtc

SEQ ID NO: 473477 - DNA, 30 bp, Artificial Sequence
  Synthetic oligonucleotide
tgacgccatagctccgggtcagattaagtc

SEQ ID NO: 473478 - DNA, 30 bp, Artificial Sequence
  Synthetic oligonucleotide
gactagcacaggcttctgtcgagcacagtc

SEQ ID NO: 473479 - DNA, 30 bp, Artificial Sequence
  Synthetic oligonucleotide
tgggtgccgctgcaccgatagacgacagtc

SEQ ID NO: 473480 - DNA, 30 bp, Artificial Sequence
  Synthetic oligonucleotide
tgtactaccagacgttaggtcttgccagtc

SEQ ID NO: 473481 - DNA, 30 bp, Artificial Sequence
  Synthetic oligonucleotide
ccaatccgcttaacctgacagcttccagtc

SEQ ID NO: 473482 - DNA, 30 bp, Artificial Sequence
  Synthetic oligonucleotide
agttagtgggcgtatgaatcgtcagcagtc

SEQ ID NO: 473483 - DNA, 30 bp, Artificial Sequence
  Synthetic oligonucleotide
gcagcacgttaaatgcagagacgagcagtc

SEQ ID NO: 473484 - DNA, 30 bp, Artificial Sequence
  Synthetic oligonucleotide
ggattagagaatctagcttctgccgcagtc

SEQ ID NO: 473485 - DNA, 30 bp, Artificial Sequence
  Synthetic oligonucleotide
ccactttacctggcccgactgtaggcagtc

SEQ ID NO: 473486 - DNA, 30 bp, Artificial Sequence
  Synthetic oligonucleotide
tttagcctcgtgtctgcgcgtttggcagtc

SEQ ID NO: 473487 - DNA, 30 bp, Artificial Sequence
  Synthetic oligonucleotide
cgaaccttaataaggtgttaaggtgcagtc

SEQ ID NO: 473488 - DNA, 30 bp, Artificial Sequence
  Synthetic oligonucleotide
ttggaatcgcgcacgatttctattgcagtc

SEQ ID NO: 473489 - DNA, 30 bp, Artificial Sequence
  Synthetic oligonucleotide
ttgactgctggctagacggggaaatcagtc

SEQ ID NO: 473490 - DNA, 30 bp, Artificial Sequence
  Synthetic oligonucleotide
tgagcgctccttactagtaaacgctcagtc

SEQ ID NO: 473491 - DNA, 30 bp, Artificial Sequence
  Synthetic oligonucleotide
gcgatggggagggttaagggaccgtcagtc

SEQ ID NO: 473492 - DNA, 30 bp, Artificial Sequence
  Synthetic oligonucleotide
gtaggcacggtctcctcaattggttcagtc

SEQ ID NO: 473493 - DNA, 30 bp, Artificial Sequence
  Synthetic oligonucleotide
gagaccttccgaaatacagtggtttcagtc

SEQ ID NO: 473494 - DNA, 30 bp, Artificial Sequence
  Synthetic oligonucleotide
tatatgctgatcataaaacgtgtttcagtc

SEQ ID NO: 473495 - DNA, 30 bp, Artificial Sequence
  Synthetic oligonucleotide
tcaagctatttttgtcactcctaaagagtc

SEQ ID NO: 473496 - DNA, 30 bp, Artificial Sequence
  Synthetic oligonucleotide
cggcgtcaaatagggaataaacccagagtc

SEQ ID NO: 473497 - DNA, 30 bp, Artificial Sequence
  Synthetic oligonucleotide
aatcttggagcgtgccgtcagacacgagtc

SEQ ID NO: 473498 - DNA, 30 bp, Artificial Sequence
  Synthetic oligonucleotide
gcaagaccgcagatatacacccgccgagtc

SEQ ID NO: 473499 - DNA, 30 bp, Artificial Sequence
  Synthetic oligonucleotide
gtcggtatgccgcgaagcgcttagcgagtc

SEQ ID NO: 473500 - DNA, 30 bp, Artificial Sequence
  Synthetic oligonucleotide
agccccgtctggcgggggttaccgcgagtc

SEQ ID NO: 473501 - DNA, 30 bp, Artificial Sequence
  Synthetic oligonucleotide
tccagtccgttttgaactaaacctcgagtc

SEQ ID NO: 473502 - DNA, 30 bp, Artificial Sequence
  Synthetic oligonucleotide
agaggtagcatgcactttccagtaggagtc

SEQ ID NO: 473503 - DNA, 30 bp, Artificial Sequence
  Synthetic oligonucleotide
tagatgtcagcatcggcacacgtaggagtc

SEQ ID NO: 473504 - DNA, 30 bp, Artificial Sequence
  Synthetic oligonucleotide
gttctggtctctaacacgctgagcggagtc

SEQ ID NO: 473505 - DNA, 30 bp, Artificial Sequence
  Synthetic oligonucleotide
cgaccccggggactcttgtttaagggagtc

SEQ ID NO: 473506 - DNA, 30 bp, Artificial Sequence
  Synthetic oligonucleotide
tagatgtgtttagcccttttaacgggagtc

SEQ ID NO: 473507 - DNA, 30 bp, Artificial Sequence
  Synthetic oligonucleotide
ggcataatgtacgcgacttcagggggagtc

SEQ ID NO: 473508 - DNA, 30 bp, Artificial Sequence
  Synthetic oligonucleotide
agaaacgttccgattgggtatcctggagtc

SEQ ID NO: 473509 - DNA, 30 bp, Artificial Sequence
  Synthetic oligonucleotide
aactcgggcgcgcttatcgtgtctggagtc

SEQ ID NO: 473510 - DNA, 30 bp, Artificial Sequence
  Synthetic oligonucleotide
tagacttctatcgttcatcatagtggagtc

SEQ ID NO: 473511 - DNA, 30 bp, Artificial Sequence
  Synthetic oligonucleotide
tcgggatttgtctaacgacattttggagtc

SEQ ID NO: 473512 - DNA, 30 bp, Artificial Sequence
  Synthetic oligonucleotide
tgctgcgtattcttagacgtacactgagtc

SEQ ID NO: 473513 - DNA, 30 bp, Artificial Sequence
  Synthetic oligonucleotide
aatactccgctaccatggttctggtgagtc

SEQ ID NO: 473514 - DNA, 30 bp, Artificial Sequence
  Synthetic oligonucleotide
aaccgccttcttacaagggtaacaatagtc

SEQ ID NO: 473515 - DNA, 30 bp, Artificial Sequence
  Synthetic oligonucleotide
cgtctatgtaggtactgacgtagcatagtc

SEQ ID NO: 473516 - DNA, 30 bp, Artificial Sequence
  Synthetic oligonucleotide
cgtagaatcccgagatattctgtgatagtc

SEQ ID NO: 473517 - DNA, 30 bp, Artificial Sequence
  Synthetic oligonucleotide
aactgggggtctattcgtcaagaactagtc

SEQ ID NO: 473518 - DNA, 30 bp, Artificial Sequence
  Synthetic oligonucleotide
gtagggcttgcaatatttataacactagtc

SEQ ID NO: 473519 - DNA, 30 bp, Artificial Sequence
  Synthetic oligonucleotide
actcaaggccagcttaggcgttgactagtc

SEQ ID NO: 473520 - DNA, 30 bp, Artificial Sequence
  Synthetic oligonucleotide
gaacacagactaatggatataatcctagtc

SEQ ID NO: 473521 - DNA, 30 bp, Artificial Sequence
  Synthetic oligonucleotide
taatgctgtagatgcagattgtctctagtc

SEQ ID NO: 473522 - DNA, 30 bp, Artificial Sequence
  Synthetic oligonucleotide
acgttgtcggcagcagaggcaaaagtagtc

SEQ ID NO: 473523 - DNA, 30 bp, Artificial Sequence
  Synthetic oligonucleotide
ttttacgagtgagagaaataacgagtagtc

SEQ ID NO: 473524 - DNA, 30 bp, Artificial Sequence
  Synthetic oligonucleotide
cagtaggttgagatatctttgtgagtagtc

SEQ ID NO: 473525 - DNA, 30 bp, Artificial Sequence
  Synthetic oligonucleotide
actgcaggggctccggacggtccggtagtc

SEQ ID NO: 473526 - DNA, 30 bp, Artificial Sequence
  Synthetic oligonucleotide
aaacgaccctgtattctgacgagtgtagtc

SEQ ID NO: 473527 - DNA, 30 bp, Artificial Sequence
  Synthetic oligonucleotide
cgtacatgtaggtttgtacgcaaattagtc

SEQ ID NO: 473528 - DNA, 30 bp, Artificial Sequence
  Synthetic oligonucleotide
tataaatttcgaatcgctgaagaattagtc

SEQ ID NO: 473529 - DNA, 30 bp, Artificial Sequence
  Synthetic oligonucleotide
actctaacataagcgataggcaacttagtc

SEQ ID NO: 473530 - DNA, 30 bp, Artificial Sequence
  Synthetic oligonucleotide
aaattatatcggaaatggcgtcccttagtc

SEQ ID NO: 473531 - DNA, 30 bp, Artificial Sequence
  Synthetic oligonucleotide
tcccaaagcactgagctataatccttagtc

SEQ ID NO: 473532 - DNA, 30 bp, Artificial Sequence
  Synthetic oligonucleotide
atctggtaagaatgcagacggagcttagtc

SEQ ID NO: 473533 - DNA, 30 bp, Artificial Sequence
  Synthetic oligonucleotide
tgatacggtcggagtggcatatgcttagtc

SEQ ID NO: 473534 - DNA, 30 bp, Artificial Sequence
  Synthetic oligonucleotide
ccacaattcttggctgctggcctcttagtc

SEQ ID NO: 473535 - DNA, 30 bp, Artificial Sequence
  Synthetic oligonucleotide
actaactttgtgcggctcttatagttagtc

SEQ ID NO: 473536 - DNA, 30 bp, Artificial Sequence
  Synthetic oligonucleotide
tcaggcccacaaattatgatcgtgttagtc

SEQ ID NO: 473537 - DNA, 30 bp, Artificial Sequence
  Synthetic oligonucleotide
tagtgactgtgttcttcagttcatttagtc

SEQ ID NO: 473538 - DNA, 30 bp, Artificial Sequence
  Synthetic oligonucleotide
gaatgtttacttagcataattactttagtc

SEQ ID NO: 473539 - DNA, 30 bp, Artificial Sequence
  Synthetic oligonucleotide
aaaaggctgaagagccggttgggtttagtc

SEQ ID NO: 473540 - DNA, 30 bp, Artificial Sequence
  Synthetic oligonucleotide
gtcctgctatgtataattacatttttagtc

SEQ ID NO: 473541 - DNA, 30 bp, Artificial Sequence
  Synthetic oligonucleotide
ctccaattagctcagtcgccgtcaaacgtc

SEQ ID NO: 473542 - DNA, 30 bp, Artificial Sequence
  Synthetic oligonucleotide
gacacacgacttattggtttggtaaacgtc

SEQ ID NO: 473543 - DNA, 30 bp, Artificial Sequence
  Synthetic oligonucleotide
gaaacttcaatgttctaatgattaaacgtc

SEQ ID NO: 473544 - DNA, 30 bp, Artificial Sequence
  Synthetic oligonucleotide
tggtatagaaagcagtaataatgcaacgtc

SEQ ID NO: 473545 - DNA, 30 bp, Artificial Sequence
  Synthetic oligonucleotide
tgagtagactagtagacacgtttgaacgtc

SEQ ID NO: 473546 - DNA, 30 bp, Artificial Sequence
  Synthetic oligonucleotide
acctgcggacgtgaccgtatgtataacgtc

SEQ ID NO: 473547 - DNA, 30 bp, Artificial Sequence
  Synthetic oligonucleotide
gaaaacgtgtaggaagttaccactaacgtc

SEQ ID NO: 473548 - DNA, 30 bp, Artificial Sequence
  Synthetic oligonucleotide
tgccggatacacccgcgttatagtaacgtc

SEQ ID NO: 473549 - DNA, 30 bp, Artificial Sequence
  Synthetic oligonucleotide
gcacggcataaaaccgcagtgtttaacgtc

SEQ ID NO: 473550 - DNA, 30 bp, Artificial Sequence
  Synthetic oligonucleotide
aagaggcgtcgtgtacgcgtcggccacgtc

SEQ ID NO: 473551 - DNA, 30 bp, Artificial Sequence
  Synthetic oligonucleotide
tggaatggagtccaaagagtcgtgcacgtc

SEQ ID NO: 473552 - DNA, 30 bp, Artificial Sequence
  Synthetic oligonucleotide
acctagcgcggggcgctggcgcaagacgtc

SEQ ID NO: 473553 - DNA, 30 bp, Artificial Sequence
  Synthetic oligonucleotide
tataaaagcgcgtgagaacttccagacgtc

SEQ ID NO: 473554 - DNA, 30 bp, Artificial Sequence
  Synthetic oligonucleotide
gtacttattgccatcgcgcgttgagacgtc

SEQ ID NO: 473555 - DNA, 30 bp, Artificial Sequence
  Synthetic oligonucleotide
taatgttgggactgtttcttaatagacgtc

SEQ ID NO: 473556 - DNA, 30 bp, Artificial Sequence
  Synthetic oligonucleotide
gtaagaaaagacgtcaggcacgtagacgtc

SEQ ID NO: 473557 - DNA, 30 bp, Artificial Sequence
  Synthetic oligonucleotide
ttcccggcattcttaatgaaagcggacgtc

SEQ ID NO: 473558 - DNA, 30 bp, Artificial Sequence
  Synthetic oligonucleotide
gagacgtcagggttaaaatgggtggacgtc

SEQ ID NO: 473559 - DNA, 30 bp, Artificial Sequence
  Synthetic oligonucleotide
gcggactaaagttgtttatttctatacgtc

SEQ ID NO: 473560 - DNA, 30 bp, Artificial Sequence
  Synthetic oligonucleotide
attaaatcggttgacctcgcaaggtacgtc

SEQ ID NO: 473561 - DNA, 30 bp, Artificial Sequence
  Synthetic oligonucleotide
taaatgggaaatactcctagtgggtacgtc

SEQ ID NO: 473562 - DNA, 30 bp, Artificial Sequence
  Synthetic oligonucleotide
atgtggagttcgcagggagatttttacgtc

SEQ ID NO: 473563 - DNA, 30 bp, Artificial Sequence
  Synthetic oligonucleotide
cagaagttcaattgcttttaaacgaccgtc

SEQ ID NO: 473564 - DNA, 30 bp, Artificial Sequence
  Synthetic oligonucleotide
gataccggcttttggaaccgacggaccgtc

SEQ ID NO: 473565 - DNA, 30 bp, Artificial Sequence
  Synthetic oligonucleotide
aactgcaaagcgtggaacgaaatgaccgtc

SEQ ID NO: 473566 - DNA, 30 bp, Artificial Sequence
  Synthetic oligonucleotide
tatatctattaaggtctattaatacccgtc

SEQ ID NO: 473567 - DNA, 30 bp, Artificial Sequence
  Synthetic oligonucleotide
cgttcccaggatacaactcgtcaccccgtc

SEQ ID NO: 473568 - DNA, 30 bp, Artificial Sequence
  Synthetic oligonucleotide
gggcgcctagcgcatttaaatgcccccgtc

SEQ ID NO: 473569 - DNA, 30 bp, Artificial Sequence
  Synthetic oligonucleotide
ctaatggtctaatatcctgtcgacgccgtc

SEQ ID NO: 473570 - DNA, 30 bp, Artificial Sequence
  Synthetic oligonucleotide
ggagaacgagtcagctaacccctcgccgtc

SEQ ID NO: 473571 - DNA, 30 bp, Artificial Sequence
  Synthetic oligonucleotide
gggaggtgctagcgcttggccgctgccgtc

SEQ ID NO: 473572 - DNA, 30 bp, Artificial Sequence
  Synthetic oligonucleotide
cgctcgcatgggcagcgttctgctgccgtc

SEQ ID NO: 473573 - DNA, 30 bp, Artificial Sequence
  Synthetic oligonucleotide
cttcgcagtaccgcctccccatctgccgtc

SEQ ID NO: 473574 - DNA, 30 bp, Artificial Sequence
  Synthetic oligonucleotide
tagtcgtgggtgctttatatacgatccgtc

SEQ ID NO: 473575 - DNA, 30 bp, Artificial Sequence
  Synthetic oligonucleotide
attttttttccgccagtgtttatctccgtc

SEQ ID NO: 473576 - DNA, 30 bp, Artificial Sequence
  Synthetic oligonucleotide
gtcagtcgttcgctactggttaagtccgtc

SEQ ID NO: 473577 - DNA, 30 bp, Artificial Sequence
  Synthetic oligonucleotide
acctaggctactacggatatattttccgtc

SEQ ID NO: 473578 - DNA, 30 bp, Artificial Sequence
  Synthetic oligonucleotide
gccggactaaacacgttagacacgagcgtc

SEQ ID NO: 473579 - DNA, 30 bp, Artificial Sequence
  Synthetic oligonucleotide
aactcaccgactgcaagggcatatagcgtc

SEQ ID NO: 473580 - DNA, 30 bp, Artificial Sequence
  Synthetic oligonucleotide
gttgaaggctttatcacgagccctagcgtc

SEQ ID NO: 473581 - DNA, 30 bp, Artificial Sequence
  Synthetic oligonucleotide
ttttgtaataactacgacggttgtagcgtc

SEQ ID NO: 473582 - DNA, 30 bp, Artificial Sequence
  Synthetic oligonucleotide
atctagaggtgctcttgacaaatccgcgtc

SEQ ID NO: 473583 - DNA, 30 bp, Artificial Sequence
  Synthetic oligonucleotide
tagacctggattttcctgttgttccgcgtc

SEQ ID NO: 473584 - DNA, 30 bp, Artificial Sequence
  Synthetic oligonucleotide
tgatatattcacggcgaaatacatcgcgtc

SEQ ID NO: 473585 - DNA, 30 bp, Artificial Sequence
  Synthetic oligonucleotide
cttttcgtatgcaagcctacgtgtcgcgtc

SEQ ID NO: 473586 - DNA, 30 bp, Artificial Sequence
  Synthetic oligonucleotide
ttacccgggcaaaacgtcgcccgcggcgtc

SEQ ID NO: 473587 - DNA, 30 bp, Artificial Sequence
  Synthetic oligonucleotide
gcacctcgcataggtttcagccgcggcgtc

SEQ ID NO: 473588 - DNA, 30 bp, Artificial Sequence
  Synthetic oligonucleotide
tctgagtcaaagaaactttccttcggcgtc

SEQ ID NO: 473589 - DNA, 30 bp, Artificial Sequence
  Synthetic oligonucleotide
gctctgggcccaatgcaaatgacgggcgtc

SEQ ID NO: 473590 - DNA, 30 bp, Artificial Sequence
  Synthetic oligonucleotide
ccgttgcgcacaggcgcgcactctggcgtc

SEQ ID NO: 473591 - DNA, 30 bp, Artificial Sequence
  Synthetic oligonucleotide
cccgccgtacacgcaaacataccatgcgtc

SEQ ID NO: 473592 - DNA, 30 bp, Artificial Sequence
  Synthetic oligonucleotide
agggtcaagcagacgggtcccctatgcgtc

SEQ ID NO: 473593 - DNA, 30 bp, Artificial Sequence
  Synthetic oligonucleotide
aactgacgggggtcatcgataggctgcgtc

SEQ ID NO: 473594 - DNA, 31 bp, Artificial Sequence
  Synthetic oligonucleotide
ctggccaccaggggttaagtcaatctgcgtc

SEQ ID NO: 473595 - DNA, 30 bp, Artificial Sequence
  Synthetic oligonucleotide
ccctgcttggagttgcacgcaccttgcgtc

SEQ ID NO: 473596 - DNA, 30 bp, Artificial Sequence
  Synthetic oligonucleotide
gggggcacgcaaggggacgagcccatcgtc

SEQ ID NO: 473597 - DNA, 30 bp, Artificial Sequence
  Synthetic oligonucleotide
ccccgttcccgcatggagatgcggatcgtc

SEQ ID NO: 473598 - DNA, 30 bp, Artificial Sequence
  Synthetic oligonucleotide
gaagcgggttctcaagagttgattatcgtc

SEQ ID NO: 473599 - DNA, 30 bp, Artificial Sequence
  Synthetic oligonucleotide
gcttatttctttagtgttgcctaactcgtc

SEQ ID NO: 473600 - DNA, 30 bp, Artificial Sequence
  Synthetic oligonucleotide
tgttattgcgtagatcggaggaggctcgtc

SEQ ID NO: 473601 - DNA, 30 bp, Artificial Sequence
  Synthetic oligonucleotide
ctccgctgcctgtaagaaagaccggtcgtc

SEQ ID NO: 473602 - DNA, 29 bp, Artificial Sequence
  Synthetic oligonucleotide
cccgttctatatacgactatttggtcgtc

SEQ ID NO: 473603 - DNA, 30 bp, Artificial Sequence
  Synthetic oligonucleotide
atcatgtcgggcttccggatccatgtcgtc

SEQ ID NO: 473604 - DNA, 30 bp, Artificial Sequence
  Synthetic oligonucleotide
gtacttatagccgtagcgcttgctgtcgtc

SEQ ID NO: 473605 - DNA, 30 bp, Artificial Sequence
  Synthetic oligonucleotide
cgtcaaagctggtaccactcagcattcgtc

SEQ ID NO: 473606 - DNA, 30 bp, Artificial Sequence
  Synthetic oligonucleotide
agttgtagacgagcaagatgtagcttcgtc

SEQ ID NO: 473607 - DNA, 30 bp, Artificial Sequence
  Synthetic oligonucleotide
gccttcagatctaaacgcttagatttcgtc

SEQ ID NO: 473608 - DNA, 30 bp, Artificial Sequence
  Synthetic oligonucleotide
cctatgcccagatctttagatcgtaaggtc

SEQ ID NO: 473609 - DNA, 30 bp, Artificial Sequence
  Synthetic oligonucleotide
atacgattttataatctgtgttgtaaggtc

SEQ ID NO: 473610 - DNA, 30 bp, Artificial Sequence
  Synthetic oligonucleotide
aggttacatttacattccggaattaaggtc

SEQ ID NO: 473611 - DNA, 30 bp, Artificial Sequence
  Synthetic oligonucleotide
agttacgaaacaaccatggtacgccaggtc

SEQ ID NO: 473612 - DNA, 30 bp, Artificial Sequence
  Synthetic oligonucleotide
tactgcgcaacctgagttttaggccaggtc

SEQ ID NO: 473613 - DNA, 30 bp, Artificial Sequence
  Synthetic oligonucleotide
ccgaagttgcactgacgtgaggtccaggtc

SEQ ID NO: 473614 - DNA, 30 bp, Artificial Sequence
  Synthetic oligonucleotide
gccctcgaattcttgaaattcactcaggtc

SEQ ID NO: 473615 - DNA, 30 bp, Artificial Sequence
  Synthetic oligonucleotide
gcccttctcctgtcactggtcattcaggtc

SEQ ID NO: 473616 - DNA, 30 bp, Artificial Sequence
  Synthetic oligonucleotide
gacctggtactccatacccgggttcaggtc

SEQ ID NO: 473617 - DNA, 30 bp, Artificial Sequence
  Synthetic oligonucleotide
tttgtcagactatgaggtttctcagaggtc

SEQ ID NO: 473618 - DNA, 30 bp, Artificial Sequence
  Synthetic oligonucleotide
agaacccggcagcagacaggcctcgaggtc

SEQ ID NO: 473619 - DNA, 30 bp, Artificial Sequence
  Synthetic oligonucleotide
gatagggatgggagtaaatcctaggaggtc

SEQ ID NO: 473620 - DNA, 30 bp, Artificial Sequence
  Synthetic oligonucleotide
ccaggctgcaatgtagatgaatgggaggtc

SEQ ID NO: 473621 - DNA, 30 bp, Artificial Sequence
  Synthetic oligonucleotide
cataattacttgccgcagagattggaggtc

SEQ ID NO: 473622 - DNA, 30 bp, Artificial Sequence
  Synthetic oligonucleotide
gctcggcttcgtggtggcagcgactaggtc

SEQ ID NO: 473623 - DNA, 30 bp, Artificial Sequence
  Synthetic oligonucleotide
ttatggctatcaagtgggtgtacgtaggtc

SEQ ID NO: 473624 - DNA, 30 bp, Artificial Sequence
  Synthetic oligonucleotide
gagttgaaatcattctatgtaagaacggtc

SEQ ID NO: 473625 - DNA, 30 bp, Artificial Sequence
  Synthetic oligonucleotide
ctcaacaccgtggaaaagagggtcacggtc

SEQ ID NO: 473626 - DNA, 30 bp, Artificial Sequence
  Synthetic oligonucleotide
tatgtttttagtggtcagctttcgacggtc

SEQ ID NO: 473627 - DNA, 30 bp, Artificial Sequence
  Synthetic oligonucleotide
ttcgacaacatggtgatcccgatgacggtc

SEQ ID NO: 473628 - DNA, 30 bp, Artificial Sequence
  Synthetic oligonucleotide
ctcgcacgcccttcagtgaccgatacggtc

SEQ ID NO: 473629 - DNA, 30 bp, Artificial Sequence
  Synthetic oligonucleotide
cccattcctccataggtccgtactacggtc

SEQ ID NO: 473630 - DNA, 30 bp, Artificial Sequence
  Synthetic oligonucleotide
ggcgctctgtgaatgctggaaagtacggtc

SEQ ID NO: 473631 - DNA, 30 bp, Artificial Sequence
  Synthetic oligonucleotide
agtatatgcgagctgtagagtgacccggtc

SEQ ID NO: 473632 - DNA, 30 bp, Artificial Sequence
  Synthetic oligonucleotide
gagctgcgccgggggcggggtatcccggtc

SEQ ID NO: 473633 - DNA, 31 bp, Artificial Sequence
  Synthetic oligonucleotide
ggagtttggacacgagctacgtcagccggtc

SEQ ID NO: 473634 - DNA, 30 bp, Artificial Sequence
  Synthetic oligonucleotide
ggaactctacagtgcagcttctttccggtc

SEQ ID NO: 473635 - DNA, 30 bp, Artificial Sequence
  Synthetic oligonucleotide
gtagacgctggtcagggggcccacgcggtc

SEQ ID NO: 473636 - DNA, 30 bp, Artificial Sequence
  Synthetic oligonucleotide
caagctacaaagtggacatatcaggcggtc

SEQ ID NO: 473637 - DNA, 30 bp, Artificial Sequence
  Synthetic oligonucleotide
ctggaagttcatggatgggggccggcggtc

SEQ ID NO: 473638 - DNA, 30 bp, Artificial Sequence
  Synthetic oligonucleotide
ccatatgctggcccgtgaatggctgcggtc

SEQ ID NO: 473639 - DNA, 30 bp, Artificial Sequence
  Synthetic oligonucleotide
ctccgcgtgtcagaccatgtaagatcggtc

SEQ ID NO: 473640 - DNA, 30 bp, Artificial Sequence
  Synthetic oligonucleotide
ggcgtcagttacatgtggcgattttcggtc

SEQ ID NO: 473641 - DNA, 30 bp, Artificial Sequence
  Synthetic oligonucleotide
gcggctatctggtagcgtgaaaccagggtc

SEQ ID NO: 473642 - DNA, 30 bp, Artificial Sequence
  Synthetic oligonucleotide
ctgttgatgaggttcatctggacgagggtc

SEQ ID NO: 473643 - DNA, 30 bp, Artificial Sequence
  Synthetic oligonucleotide
gccatctttcttgcccatttcaatagggtc

SEQ ID NO: 473644 - DNA, 30 bp, Artificial Sequence
  Synthetic oligonucleotide
atatcctaattcggcctttcccatagggtc

SEQ ID NO: 473645 - DNA, 30 bp, Artificial Sequence
  Synthetic oligonucleotide
attgttactccctgcaatccgtatagggtc

SEQ ID NO: 473646 - DNA, 30 bp, Artificial Sequence
  Synthetic oligonucleotide
aactcattattactgtgttgagttagggtc

SEQ ID NO: 473647 - DNA, 30 bp, Artificial Sequence
  Synthetic oligonucleotide
attaccgcttcgccaggctagacacgggtc

SEQ ID NO: 473648 - DNA, 30 bp, Artificial Sequence
  Synthetic oligonucleotide
tttagggccgtatgctattgggtacgggtc

SEQ ID NO: 473649 - DNA, 30 bp, Artificial Sequence
  Synthetic oligonucleotide
catcgtaaaaccccttttaggttacgggtc

SEQ ID NO: 473650 - DNA, 30 bp, Artificial Sequence
  Synthetic oligonucleotide
attccccgatctacgctctagatccgggtc

SEQ ID NO: 473651 - DNA, 30 bp, Artificial Sequence
  Synthetic oligonucleotide
aatgtgcggagaaccttgtcgtcgcgggtc

SEQ ID NO: 473652 - DNA, 30 bp, Artificial Sequence
  Synthetic oligonucleotide
ccccggggagtgatatcttgaatgcgggtc

SEQ ID NO: 473653 - DNA, 30 bp, Artificial Sequence
  Synthetic oligonucleotide
cgtgggaaaagaagttataaagtgcgggtc

SEQ ID NO: 473654 - DNA, 30 bp, Artificial Sequence
  Synthetic oligonucleotide
tccaatggccaacatagccttttgcgggtc

SEQ ID NO: 473655 - DNA, 30 bp, Artificial Sequence
  Synthetic oligonucleotide
cccagaaattctataggcggcaccggggtc

SEQ ID NO: 473656 - DNA, 30 bp, Artificial Sequence
  Synthetic oligonucleotide
aggcaggtgtgaatacctgtcatgggggtc

SEQ ID NO: 473657 - DNA, 30 bp, Artificial Sequence
  Synthetic oligonucleotide
cgctcgacaccaggttcaatggtgggggtc

SEQ ID NO: 473658 - DNA, 30 bp, Artificial Sequence
  Synthetic oligonucleotide
atgtgtaagactccagcggaccatggggtc

SEQ ID NO: 473659 - DNA, 30 bp, Artificial Sequence
  Synthetic oligonucleotide
gggatagtctcacaggggcgacctggggtc

SEQ ID NO: 473660 - DNA, 30 bp, Artificial Sequence
  Synthetic oligonucleotide
tacgcatgccacctaagcatgcaatgggtc

SEQ ID NO: 473661 - DNA, 30 bp, Artificial Sequence
  Synthetic oligonucleotide
atagtggataggaatgggcgactatgggtc

SEQ ID NO: 473662 - DNA, 30 bp, Artificial Sequence
  Synthetic oligonucleotide
gggctttcagccacaacggggcattgggtc

SEQ ID NO: 473663 - DNA, 30 bp, Artificial Sequence
  Synthetic oligonucleotide
accctctcctcaccgcgtattccttgggtc

SEQ ID NO: 473664 - DNA, 30 bp, Artificial Sequence
  Synthetic oligonucleotide
attgcctccttagattaaaccctttgggtc

SEQ ID NO: 473665 - DNA, 30 bp, Artificial Sequence
  Synthetic oligonucleotide
gttatcttgctatgtgaaatagcaatggtc

SEQ ID NO: 473666 - DNA, 30 bp, Artificial Sequence
  Synthetic oligonucleotide
aaacctcctgttgactaacgcaacatggtc

SEQ ID NO: 473667 - DNA, 30 bp, Artificial Sequence
  Synthetic oligonucleotide
aacgccacccaacatatccttgggatggtc

SEQ ID NO: 473668 - DNA, 30 bp, Artificial Sequence
  Synthetic oligonucleotide
caattactcgacgcctgctgacgactggtc

SEQ ID NO: 473669 - DNA, 30 bp, Artificial Sequence
  Synthetic oligonucleotide
ttacagttaacaatgggcaacggcctggtc

SEQ ID NO: 473670 - DNA, 30 bp, Artificial Sequence
  Synthetic oligonucleotide
ctgatcgctgtagccaaagagcatctggtc

SEQ ID NO: 473671 - DNA, 30 bp, Artificial Sequence
  Synthetic oligonucleotide
gatactgatcccgatatgatgtttctggtc

SEQ ID NO: 473672 - DNA, 30 bp, Artificial Sequence
  Synthetic oligonucleotide
gggtcgggatcccgtggcgcgtacgtggtc

SEQ ID NO: 473673 - DNA, 30 bp, Artificial Sequence
  Synthetic oligonucleotide
gcacgggacccagcactgtggtccgtggtc

SEQ ID NO: 473674 - DNA, 30 bp, Artificial Sequence
  Synthetic oligonucleotide
ggctctttataaaaacctttaaaggtggtc

SEQ ID NO: 473675 - DNA, 30 bp, Artificial Sequence
  Synthetic oligonucleotide
aaactcaggcgtacacgctcttcggtggtc

SEQ ID NO: 473676 - DNA, 30 bp, Artificial Sequence
  Synthetic oligonucleotide
attataggtatgtgcggtgaaggtgtggtc

SEQ ID NO: 473677 - DNA, 30 bp, Artificial Sequence
  Synthetic oligonucleotide
ggttgacatgcaatagccgttatattggtc

SEQ ID NO: 473678 - DNA, 30 bp, Artificial Sequence
  Synthetic oligonucleotide
gatgagcagactagagtcgagttattggtc

SEQ ID NO: 473679 - DNA, 30 bp, Artificial Sequence
  Synthetic oligonucleotide
atccaaaaggtttgatgcaaaaacttggtc

SEQ ID NO: 473680 - DNA, 30 bp, Artificial Sequence
  Synthetic oligonucleotide
ctagggaaatatttattggtacacttggtc

SEQ ID NO: 473681 - DNA, 30 bp, Artificial Sequence
  Synthetic oligonucleotide
tctttccttcctaatccccagcccttggtc

SEQ ID NO: 473682 - DNA, 30 bp, Artificial Sequence
  Synthetic oligonucleotide
gccgcccacacatcagctttacggttggtc

SEQ ID NO: 473683 - DNA, 30 bp, Artificial Sequence
  Synthetic oligonucleotide
ggaaggcgggctctaattgagcttttggtc

SEQ ID NO: 473684 - DNA, 30 bp, Artificial Sequence
  Synthetic oligonucleotide
cgatccatcattgtacgcggccgaaatgtc

SEQ ID NO: 473685 - DNA, 30 bp, Artificial Sequence
  Synthetic oligonucleotide
atagttgctaccctgccgggtcgaaatgtc

SEQ ID NO: 473686 - DNA, 30 bp, Artificial Sequence
  Synthetic oligonucleotide
gtcttcggccaagtagttgccaacaatgtc

SEQ ID NO: 473687 - DNA, 30 bp, Artificial Sequence
  Synthetic oligonucleotide
caactgtggtactcccaggttaacaatgtc

SEQ ID NO: 473688 - DNA, 30 bp, Artificial Sequence
  Synthetic oligonucleotide
aagcacattgcggcttaggtcggtaatgtc

SEQ ID NO: 473689 - DNA, 30 bp, Artificial Sequence
  Synthetic oligonucleotide
gttgcgccggcgcagaaagggggtaatgtc

SEQ ID NO: 473690 - DNA, 30 bp, Artificial Sequence
  Synthetic oligonucleotide
atctggcaaaccggcaagcctccccatgtc

SEQ ID NO: 473691 - DNA, 30 bp, Artificial Sequence
  Synthetic oligonucleotide
ccgggagaacggtgcgggacggagcatgtc

SEQ ID NO: 473692 - DNA, 30 bp, Artificial Sequence
  Synthetic oligonucleotide
caacacatttgggggggggaaacgcatgtc

SEQ ID NO: 473693 - DNA, 30 bp, Artificial Sequence
  Synthetic oligonucleotide
ttaaattgacgcgatcagggaattcatgtc

SEQ ID NO: 473694 - DNA, 30 bp, Artificial Sequence
  Synthetic oligonucleotide
caggctatcctctttgtgacattagatgtc

SEQ ID NO: 473695 - DNA, 30 bp, Artificial Sequence
  Synthetic oligonucleotide
gtttaatgctgaagctgcactcgggatgtc

SEQ ID NO: 473696 - DNA, 30 bp, Artificial Sequence
  Synthetic oligonucleotide
actcatgatgtcgagaggcgtaatgatgtc

SEQ ID NO: 473697 - DNA, 30 bp, Artificial Sequence
  Synthetic oligonucleotide
gcttcagtatcatgtaggcacgatgatgtc

SEQ ID NO: 473698 - DNA, 30 bp, Artificial Sequence
  Synthetic oligonucleotide
tacgcttaggagatcatacgtgatgatgtc

SEQ ID NO: 473699 - DNA, 30 bp, Artificial Sequence
  Synthetic oligonucleotide
tatttggcaattagcgtacacgtctatgtc

SEQ ID NO: 473700 - DNA, 30 bp, Artificial Sequence
  Synthetic oligonucleotide
gacgctggcccaccagagcctaggtatgtc

SEQ ID NO: 473701 - DNA, 30 bp, Artificial Sequence
  Synthetic oligonucleotide
gcaacataaaagtagaagtgctcttatgtc

SEQ ID NO: 473702 - DNA, 30 bp, Artificial Sequence
  Synthetic oligonucleotide
agaagggggcaagcggttacgtcttatgtc

SEQ ID NO: 473703 - DNA, 30 bp, Artificial Sequence
  Synthetic oligonucleotide
gcagacgatttgctgacttttcgttatgtc

SEQ ID NO: 473704 - DNA, 30 bp, Artificial Sequence
  Synthetic oligonucleotide
gaatattctgttagatcgcatatttatgtc

SEQ ID NO: 473705 - DNA, 30 bp, Artificial Sequence
  Synthetic oligonucleotide
gagcatttcatcggcgtgcgactaactgtc

SEQ ID NO: 473706 - DNA, 30 bp, Artificial Sequence
  Synthetic oligonucleotide
gatttcccggtttccaaggaacagactgtc

SEQ ID NO: 473707 - DNA, 30 bp, Artificial Sequence
  Synthetic oligonucleotide
attttaggatattcctatcaccgacctgtc

SEQ ID NO: 473708 - DNA, 30 bp, Artificial Sequence
  Synthetic oligonucleotide
ctctataatatttcagtttctggacctgtc

SEQ ID NO: 473709 - DNA, 30 bp, Artificial Sequence
  Synthetic oligonucleotide
accgcgaccggggcagcggacctacctgtc

SEQ ID NO: 473710 - DNA, 30 bp, Artificial Sequence
  Synthetic oligonucleotide
agcattacctgacagttgagcctccctgtc

SEQ ID NO: 473711 - DNA, 30 bp, Artificial Sequence
  Synthetic oligonucleotide
cactttctctgtcgctctttgcggcctgtc

SEQ ID NO: 473712 - DNA, 30 bp, Artificial Sequence
  Synthetic oligonucleotide
tgatccaatgtgttaccagggtctcctgtc

SEQ ID NO: 473713 - DNA, 30 bp, Artificial Sequence
  Synthetic oligonucleotide
ggaacagatttagtagaagctcgagctgtc

SEQ ID NO: 473714 - DNA, 30 bp, Artificial Sequence
  Synthetic oligonucleotide
ggcccggggtaggcgtgcgacggagctgtc

SEQ ID NO: 473715 - DNA, 30 bp, Artificial Sequence
  Synthetic oligonucleotide
taaaatcattgccggatcaaggacgctgtc

SEQ ID NO: 473716 - DNA, 29 bp, Artificial Sequence
  Synthetic oligonucleotide
ggtcttttaagcgactgcacttcgctgtc

SEQ ID NO: 473717 - DNA, 30 bp, Artificial Sequence
  Synthetic oligonucleotide
attaaatagtgaatcgttggacaggctgtc

SEQ ID NO: 473718 - DNA, 30 bp, Artificial Sequence
  Synthetic oligonucleotide
ggaaggacgttgagcaatctagaggctgtc

SEQ ID NO: 473719 - DNA, 30 bp, Artificial Sequence
  Synthetic oligonucleotide
gtatgatgtagtacataggaactggctgtc

SEQ ID NO: 473720 - DNA, 30 bp, Artificial Sequence
  Synthetic oligonucleotide
caaggcgtctatcaagattacagatctgtc

SEQ ID NO: 473721 - DNA, 30 bp, Artificial Sequence
  Synthetic oligonucleotide
taaactggtgaaccagccaatttatctgtc

SEQ ID NO: 473722 - DNA, 30 bp, Artificial Sequence
  Synthetic oligonucleotide
gcccttcctaaggagccggccccctctgtc

SEQ ID NO: 473723 - DNA, 30 bp, Artificial Sequence
  Synthetic oligonucleotide
tttgcttccgtgtggtcttcatcaagtgtc

SEQ ID NO: 473724 - DNA, 30 bp, Artificial Sequence
  Synthetic oligonucleotide
gcaataaaatcgctcatgctgggaagtgtc

SEQ ID NO: 473725 - DNA, 30 bp, Artificial Sequence
  Synthetic oligonucleotide
gctatcttgaggggagtagactggagtgtc

SEQ ID NO: 473726 - DNA, 30 bp, Artificial Sequence
  Synthetic oligonucleotide
aatcgcaagcgctactttcgcctgagtgtc

SEQ ID NO: 473727 - DNA, 30 bp, Artificial Sequence
  Synthetic oligonucleotide
atatagtcataacaccgctgggatagtgtc

SEQ ID NO: 473728 - DNA, 30 bp, Artificial Sequence
  Synthetic oligonucleotide
actgagtctccgacttgttcccggcgtgtc

SEQ ID NO: 473729 - DNA, 30 bp, Artificial Sequence
  Synthetic oligonucleotide
cgccatgctagagtcgacctatgtcgtgtc

SEQ ID NO: 473730 - DNA, 30 bp, Artificial Sequence
  Synthetic oligonucleotide
agtggatatgtgggtccgggctgtcgtgtc

SEQ ID NO: 473731 - DNA, 30 bp, Artificial Sequence
  Synthetic oligonucleotide
aaggccgcacgagagggcccgattcgtgtc

SEQ ID NO: 473732 - DNA, 30 bp, Artificial Sequence
  Synthetic oligonucleotide
gtcgaccgactagaccctttaaatggtgtc

SEQ ID NO: 473733 - DNA, 30 bp, Artificial Sequence
  Synthetic oligonucleotide
aataggtgttacgggagcagcggctgtgtc

SEQ ID NO: 473734 - DNA, 30 bp, Artificial Sequence
  Synthetic oligonucleotide
catactgatatgcattttgcgatctgtgtc

SEQ ID NO: 473735 - DNA, 30 bp, Artificial Sequence
  Synthetic oligonucleotide
agataatcgccgacagcattatagtgtgtc

SEQ ID NO: 473736 - DNA, 30 bp, Artificial Sequence
  Synthetic oligonucleotide
gttcgtgttaacgcagaaactgcgtgtgtc

SEQ ID NO: 473737 - DNA, 30 bp, Artificial Sequence
  Synthetic oligonucleotide
ggacctggacccactcaggttaattgtgtc

SEQ ID NO: 473738 - DNA, 30 bp, Artificial Sequence
  Synthetic oligonucleotide
ttcgtgctaactgagtgacgggcttgtgtc

SEQ ID NO: 473739 - DNA, 30 bp, Artificial Sequence
  Synthetic oligonucleotide
ttcccgaaccgcgtaagtgcccgttgtgtc

SEQ ID NO: 473740 - DNA, 30 bp, Artificial Sequence
  Synthetic oligonucleotide
gttcataattcacgtccgcacatttgtgtc

SEQ ID NO: 473741 - DNA, 30 bp, Artificial Sequence
  Synthetic oligonucleotide
ggcacatttagtttcgcaatcctttgtgtc

SEQ ID NO: 473742 - DNA, 30 bp, Artificial Sequence
  Synthetic oligonucleotide
cactctacaccgcaagatgcaggaattgtc

SEQ ID NO: 473743 - DNA, 30 bp, Artificial Sequence
  Synthetic oligonucleotide
gtcgtggaacagctcacttggttaattgtc

SEQ ID NO: 473744 - DNA, 30 bp, Artificial Sequence
  Synthetic oligonucleotide
actagtctttggtatcatgcatagattgtc

SEQ ID NO: 473745 - DNA, 30 bp, Artificial Sequence
  Synthetic oligonucleotide
gaatttcttgctctttctcctccgattgtc

SEQ ID NO: 473746 - DNA, 30 bp, Artificial Sequence
  Synthetic oligonucleotide
tatcatacttctcgagcattcttgattgtc

SEQ ID NO: 473747 - DNA, 30 bp, Artificial Sequence
  Synthetic oligonucleotide
gcacgttggttggtgggttaatgtattgtc

SEQ ID NO: 473748 - DNA, 30 bp, Artificial Sequence
  Synthetic oligonucleotide
gggcacacggagcatacacaggcacttgtc

SEQ ID NO: 473749 - DNA, 30 bp, Artificial Sequence
  Synthetic oligonucleotide
gggtaagatgcatcacagatttcacttgtc

SEQ ID NO: 473750 - DNA, 30 bp, Artificial Sequence
  Synthetic oligonucleotide
ggcggttgtactcttaaggtggcccttgtc

SEQ ID NO: 473751 - DNA, 30 bp, Artificial Sequence
  Synthetic oligonucleotide
cccggacttctgcttctgtgaaagcttgtc

SEQ ID NO: 473752 - DNA, 30 bp, Artificial Sequence
  Synthetic oligonucleotide
tttcaactaaaagcgaatcgcaagcttgtc

SEQ ID NO: 473753 - DNA, 30 bp, Artificial Sequence
  Synthetic oligonucleotide
caacgaactcgagcgagtcttattcttgtc

SEQ ID NO: 473754 - DNA, 30 bp, Artificial Sequence
  Synthetic oligonucleotide
tgtattgcttataggtgctttgcagttgtc

SEQ ID NO: 473755 - DNA, 30 bp, Artificial Sequence
  Synthetic oligonucleotide
ttaactctttacggttaattttgagttgtc

SEQ ID NO: 473756 - DNA, 30 bp, Artificial Sequence
  Synthetic oligonucleotide
agtttcgtggcgcggagccaagtagttgtc

SEQ ID NO: 473757 - DNA, 30 bp, Artificial Sequence
  Synthetic oligonucleotide
atcttgcatcgatgaggtatgcaggttgtc

SEQ ID NO: 473758 - DNA, 30 bp, Artificial Sequence
  Synthetic oligonucleotide
ctgcgtgtaatttgttcttatacggttgtc

SEQ ID NO: 473759 - DNA, 30 bp, Artificial Sequence
  Synthetic oligonucleotide
ttattcaattttcccttcttgcttgttgtc

SEQ ID NO: 473760 - DNA, 30 bp, Artificial Sequence
  Synthetic oligonucleotide
gaagataagggaaagctggctagctttgtc

SEQ ID NO: 473761 - DNA, 30 bp, Artificial Sequence
  Synthetic oligonucleotide
ccctctgttgaaacagtagcatagtttgtc

SEQ ID NO: 473762 - DNA, 30 bp, Artificial Sequence
  Synthetic oligonucleotide
ttgccactgagtgctccagactcgtttgtc

SEQ ID NO: 473763 - DNA, 30 bp, Artificial Sequence
  Synthetic oligonucleotide
gcggaatcgtctatgcagacgtgttttgtc

SEQ ID NO: 473764 - DNA, 30 bp, Artificial Sequence
  Synthetic oligonucleotide
gatgaatgcaaggtcccttgaccaaaattc

SEQ ID NO: 473765 - DNA, 30 bp, Artificial Sequence
  Synthetic oligonucleotide
gaggatatatttcgtagtcaaagaaaattc

SEQ ID NO: 473766 - DNA, 30 bp, Artificial Sequence
  Synthetic oligonucleotide
tccacattcactaccccgaagagaaaattc

SEQ ID NO: 473767 - DNA, 30 bp, Artificial Sequence
  Synthetic oligonucleotide
cggccatggacccggtctgggataaaattc

SEQ ID NO: 473768 - DNA, 30 bp, Artificial Sequence
  Synthetic oligonucleotide
tcttacaaatcgcacgtttgaacgaaattc

SEQ ID NO: 473769 - DNA, 30 bp, Artificial Sequence
  Synthetic oligonucleotide
tccctgctccggtttctcatcggacaattc

SEQ ID NO: 473770 - DNA, 30 bp, Artificial Sequence
  Synthetic oligonucleotide
atacaaaaaggaacttgggattcccaattc

SEQ ID NO: 473771 - DNA, 30 bp, Artificial Sequence
  Synthetic oligonucleotide
tacatccgcacggcgtataattctcaattc

SEQ ID NO: 473772 - DNA, 30 bp, Artificial Sequence
  Synthetic oligonucleotide
tttgctgtcatgaatatctgcattcaattc

SEQ ID NO: 473773 - DNA, 30 bp, Artificial Sequence
  Synthetic oligonucleotide
gagagggggagcagtgggctttcagaattc

SEQ ID NO: 473774 - DNA, 30 bp, Artificial Sequence
  Synthetic oligonucleotide
aagtcctcgcggtcctatggcactgaattc

SEQ ID NO: 473775 - DNA, 30 bp, Artificial Sequence
  Synthetic oligonucleotide
cagtcactcatagaacaaggctgataattc

SEQ ID NO: 473776 - DNA, 30 bp, Artificial Sequence
  Synthetic oligonucleotide
cgcctcgagctcttgccagtaatataattc

SEQ ID NO: 473777 - DNA, 30 bp, Artificial Sequence
  Synthetic oligonucleotide
gtgtacctaattggccattctggctaattc

SEQ ID NO: 473778 - DNA, 30 bp, Artificial Sequence
  Synthetic oligonucleotide
agtcctacagagtaagaagttctctaattc

SEQ ID NO: 473779 - DNA, 30 bp, Artificial Sequence
  Synthetic oligonucleotide
ccatctggtgtctacgcggcgacgtaattc

SEQ ID NO: 473780 - DNA, 30 bp, Artificial Sequence
  Synthetic oligonucleotide
gcggtgttggatcatggacaggggtaattc

SEQ ID NO: 473781 - DNA, 30 bp, Artificial Sequence
  Synthetic oligonucleotide
ctcacgcgcctatccagagactggtaattc

SEQ ID NO: 473782 - DNA, 30 bp, Artificial Sequence
  Synthetic oligonucleotide
aagataaaagggcacatatacaattaattc

SEQ ID NO: 473783 - DNA, 30 bp, Artificial Sequence
  Synthetic oligonucleotide
agaaggacacgttagaccgtgttttaattc

SEQ ID NO: 473784 - DNA, 30 bp, Artificial Sequence
  Synthetic oligonucleotide
acaatgattcataaccctaaaaaaacattc

SEQ ID NO: 473785 - DNA, 30 bp, Artificial Sequence
  Synthetic oligonucleotide
cgttattaccgcttgcagatcaaaacattc

SEQ ID NO: 473786 - DNA, 30 bp, Artificial Sequence
  Synthetic oligonucleotide
tagtaaggtagttgtgtattgcaaacattc

SEQ ID NO: 473787 - DNA, 30 bp, Artificial Sequence
  Synthetic oligonucleotide
ggaaacccttcccgttaaaacgtaacattc

SEQ ID NO: 473788 - DNA, 30 bp, Artificial Sequence
  Synthetic oligonucleotide
agctttcgtgtgcactgcgcgttaacattc

SEQ ID NO: 473789 - DNA, 30 bp, Artificial Sequence
  Synthetic oligonucleotide
cacgcatagtttaagcgagtggccacattc

SEQ ID NO: 473790 - DNA, 30 bp, Artificial Sequence
  Synthetic oligonucleotide
tataataagaccgtaatatcatatacattc

SEQ ID NO: 473791 - DNA, 30 bp, Artificial Sequence
  Synthetic oligonucleotide
acagaaaccgtctacaccggcactacattc

SEQ ID NO: 473792 - DNA, 30 bp, Artificial Sequence
  Synthetic oligonucleotide
caccaaccgttctccagtcggagtacattc

SEQ ID NO: 473793 - DNA, 30 bp, Artificial Sequence
  Synthetic oligonucleotide
cacaagctattatgaagcgtgtttacattc

SEQ ID NO: 473794 - DNA, 30 bp, Artificial Sequence
  Synthetic oligonucleotide
gaaaggcgctatcacagatcttaaccattc

SEQ ID NO: 473795 - DNA, 30 bp, Artificial Sequence
  Synthetic oligonucleotide
ctttacaactggaaaaggcatcagccattc

SEQ ID NO: 473796 - DNA, 28 bp, Artificial Sequence
  Synthetic oligonucleotide
atggtacctgcggttcgcgctgccattc

SEQ ID NO: 473797 - DNA, 30 bp, Artificial Sequence
  Synthetic oligonucleotide
tgtttagagttatcttacatggtgccattc

SEQ ID NO: 473798 - DNA, 30 bp, Artificial Sequence
  Synthetic oligonucleotide
aaaaacatgcgcataatgctctatccattc

SEQ ID NO: 473799 - DNA, 30 bp, Artificial Sequence
  Synthetic oligonucleotide
tggatcgattcttagaactgtgaagcattc

SEQ ID NO: 473800 - DNA, 30 bp, Artificial Sequence
  Synthetic oligonucleotide
tggtaaaagcgcaggctcgatgacgcattc

SEQ ID NO: 473801 - DNA, 30 bp, Artificial Sequence
  Synthetic oligonucleotide
tacttggtcgttcttgcaaaagccgcattc

SEQ ID NO: 473802 - DNA, 30 bp, Artificial Sequence
  Synthetic oligonucleotide
gcttacgcggccgattcacgcgtcgcattc

SEQ ID NO: 473803 - DNA, 30 bp, Artificial Sequence
  Synthetic oligonucleotide
agagcaattcgatgagcacttcaggcattc

SEQ ID NO: 473804 - DNA, 30 bp, Artificial Sequence
  Synthetic oligonucleotide
cgacctacggcggacgcaccgaaatcattc

SEQ ID NO: 473805 - DNA, 30 bp, Artificial Sequence
  Synthetic oligonucleotide
gtgtgaggcccaaccggggttaaatcattc

SEQ ID NO: 473806 - DNA, 30 bp, Artificial Sequence
  Synthetic oligonucleotide
cggttgcgggccggaatgattctatcattc

SEQ ID NO: 473807 - DNA, 30 bp, Artificial Sequence
  Synthetic oligonucleotide
ttgaatctgagggcctcataaaactcattc

SEQ ID NO: 473808 - DNA, 30 bp, Artificial Sequence
  Synthetic oligonucleotide
ggatgatcatatcggagcaaatggtcattc

SEQ ID NO: 473809 - DNA, 30 bp, Artificial Sequence
  Synthetic oligonucleotide
acgccacctacgaattcccaatgttcattc

SEQ ID NO: 473810 - DNA, 30 bp, Artificial Sequence
  Synthetic oligonucleotide
aatctctttttcacggaataggaaagattc

SEQ ID NO: 473811 - DNA, 30 bp, Artificial Sequence
  Synthetic oligonucleotide
attcctcattcagcgcacacctgaagattc

SEQ ID NO: 473812 - DNA, 30 bp, Artificial Sequence
  Synthetic oligonucleotide
cgtatcacttttttttgccgttccagattc

SEQ ID NO: 473813 - DNA, 30 bp, Artificial Sequence
  Synthetic oligonucleotide
ttcgtgtgatctatgctccgaccgagattc

SEQ ID NO: 473814 - DNA, 30 bp, Artificial Sequence
  Synthetic oligonucleotide
cctctagagcacgcacacggagcgagattc

SEQ ID NO: 473815 - DNA, 30 bp, Artificial Sequence
  Synthetic oligonucleotide
cttctcactcttgagtaatctttgagattc

SEQ ID NO: 473816 - DNA, 30 bp, Artificial Sequence
  Synthetic oligonucleotide
ggacgatattaattatttaactatagattc

SEQ ID NO: 473817 - DNA, 30 bp, Artificial Sequence
  Synthetic oligonucleotide
tgtccccggaagtgttttgcgcaacgattc

SEQ ID NO: 473818 - DNA, 30 bp, Artificial Sequence
  Synthetic oligonucleotide
aagctcacacggttcgctttaggacgattc

SEQ ID NO: 473819 - DNA, 30 bp, Artificial Sequence
  Synthetic oligonucleotide
aagtgttttaggtgttctttatgacgattc

SEQ ID NO: 473820 - DNA, 30 bp, Artificial Sequence
  Synthetic oligonucleotide
agtccgaaaggacagttccttacgcgattc

SEQ ID NO: 473821 - DNA, 31 bp, Artificial Sequence
  Synthetic oligonucleotide
tggctcccgtagtgaatatcgtaggcgattc

SEQ ID NO: 473822 - DNA, 30 bp, Artificial Sequence
  Synthetic oligonucleotide
ttttggcgcgtcttgacaaccaagggattc

SEQ ID NO: 473823 - DNA, 30 bp, Artificial Sequence
  Synthetic oligonucleotide
aggatctcatgcaggaaagcaactggattc

SEQ ID NO: 473824 - DNA, 30 bp, Artificial Sequence
  Synthetic oligonucleotide
ataatctgtaagcttgagactggtggattc

SEQ ID NO: 473825 - DNA, 30 bp, Artificial Sequence
  Synthetic oligonucleotide
gagtcccgaccagcgtagggcaaatgattc

SEQ ID NO: 473826 - DNA, 30 bp, Artificial Sequence
  Synthetic oligonucleotide
agtagtcagagcatcggttagttatgattc

SEQ ID NO: 473827 - DNA, 30 bp, Artificial Sequence
  Synthetic oligonucleotide
ttttatcgaaaaccggtttgagtctgattc

SEQ ID NO: 473828 - DNA, 30 bp, Artificial Sequence
  Synthetic oligonucleotide
cgcgcaattatccgtgaagagccttgattc

SEQ ID NO: 473829 - DNA, 30 bp, Artificial Sequence
  Synthetic oligonucleotide
ggtgggcggtggttatggcctttttgattc

SEQ ID NO: 473830 - DNA, 30 bp, Artificial Sequence
  Synthetic oligonucleotide
tgataaacactaatgcgggaaaaaatattc

SEQ ID NO: 473831 - DNA, 30 bp, Artificial Sequence
  Synthetic oligonucleotide
cccccttctcttgcaatgcaaataatattc

SEQ ID NO: 473832 - DNA, 30 bp, Artificial Sequence
  Synthetic oligonucleotide
tcagggcattccggcataagttacatattc

SEQ ID NO: 473833 - DNA, 30 bp, Artificial Sequence
  Synthetic oligonucleotide
cacccttagaccaacgcaggaaccatattc

SEQ ID NO: 473834 - DNA, 30 bp, Artificial Sequence
  Synthetic oligonucleotide
tttaatgtttggtacctctcgtccatattc

SEQ ID NO: 473835 - DNA, 30 bp, Artificial Sequence
  Synthetic oligonucleotide
gggactcatccgactgggggtttcatattc

SEQ ID NO: 473836 - DNA, 30 bp, Artificial Sequence
  Synthetic oligonucleotide
tagtctgcgccatactgtatccggatattc

SEQ ID NO: 473837 - DNA, 30 bp, Artificial Sequence
  Synthetic oligonucleotide
tcgggtactcctatgaggcgtctgatattc

SEQ ID NO: 473838 - DNA, 30 bp, Artificial Sequence
  Synthetic oligonucleotide
atcaacttacttaggcctgcagatatattc

SEQ ID NO: 473839 - DNA, 30 bp, Artificial Sequence
  Synthetic oligonucleotide
agtaagggcaatggtcctgtctatatattc

SEQ ID NO: 473840 - DNA, 30 bp, Artificial Sequence
  Synthetic oligonucleotide
gacttcttggaagacctggcaactatattc

SEQ ID NO: 473841 - DNA, 30 bp, Artificial Sequence
  Synthetic oligonucleotide
caggtaagaagttgcatgttgggtatattc

SEQ ID NO: 473842 - DNA, 30 bp, Artificial Sequence
  Synthetic oligonucleotide
agaatgagctcgcctgagagcatactattc

SEQ ID NO: 473843 - DNA, 30 bp, Artificial Sequence
  Synthetic oligonucleotide
ttgatggagtattaagttcttatactattc

SEQ ID NO: 473844 - DNA, 30 bp, Artificial Sequence
  Synthetic oligonucleotide
accgataaggtacctctcgcgtacctattc

SEQ ID NO: 473845 - DNA, 30 bp, Artificial Sequence
  Synthetic oligonucleotide
taagaaccatgtaatttagtaatcctattc

SEQ ID NO: 473846 - DNA, 30 bp, Artificial Sequence
  Synthetic oligonucleotide
cagcatgcgtatagccggtcaaagctattc

SEQ ID NO: 473847 - DNA, 30 bp, Artificial Sequence
  Synthetic oligonucleotide
gccgagttcttgatgacatcaggtctattc

SEQ ID NO: 473848 - DNA, 30 bp, Artificial Sequence
  Synthetic oligonucleotide
cacccgaatcggctgtcggaactagtattc

SEQ ID NO: 473849 - DNA, 30 bp, Artificial Sequence
  Synthetic oligonucleotide
agaacctattatacgaaggggctagtattc

SEQ ID NO: 473850 - DNA, 30 bp, Artificial Sequence
  Synthetic oligonucleotide
aagaccacagcgagagtagcgatcgtattc

SEQ ID NO: 473851 - DNA, 30 bp, Artificial Sequence
  Synthetic oligonucleotide
accattggaatccttaagattgtcgtattc

SEQ ID NO: 473852 - DNA, 30 bp, Artificial Sequence
  Synthetic oligonucleotide
tttttaggagcaaatagcaggttcgtattc

SEQ ID NO: 473853 - DNA, 30 bp, Artificial Sequence
  Synthetic oligonucleotide
aaggcgagaaggcacacccaaactgtattc

SEQ ID NO: 473854 - DNA, 30 bp, Artificial Sequence
  Synthetic oligonucleotide
gtttgagggatgtgaattatcggtgtattc

SEQ ID NO: 473855 - DNA, 30 bp, Artificial Sequence
  Synthetic oligonucleotide
gacccccagagatgtcctctgtttgtattc

SEQ ID NO: 473856 - DNA, 30 bp, Artificial Sequence
  Synthetic oligonucleotide
ggaagtataatgttgtaatcgctattattc

SEQ ID NO: 473857 - DNA, 30 bp, Artificial Sequence
  Synthetic oligonucleotide
caaacacggttgtggtttctgatcttattc

SEQ ID NO: 473858 - DNA, 30 bp, Artificial Sequence
  Synthetic oligonucleotide
gcgctaattgaaagagcatctgagttattc

SEQ ID NO: 473859 - DNA, 30 bp, Artificial Sequence
  Synthetic oligonucleotide
aactcccatgacatgattcgttatttattc

SEQ ID NO: 473860 - DNA, 30 bp, Artificial Sequence
  Synthetic oligonucleotide
tattgcgtaattttattcggtcctttattc

SEQ ID NO: 473861 - DNA, 30 bp, Artificial Sequence
  Synthetic oligonucleotide
taagctacctcacataacgtatttttattc

SEQ ID NO: 473862 - DNA, 30 bp, Artificial Sequence
  Synthetic oligonucleotide
caagatgtaagcggccataaataaaacttc

SEQ ID NO: 473863 - DNA, 30 bp, Artificial Sequence
  Synthetic oligonucleotide
atagaaatacgagcagatagcacaaacttc

SEQ ID NO: 473864 - DNA, 30 bp, Artificial Sequence
  Synthetic oligonucleotide
ataggaacgcttggatgctgacgaaacttc

SEQ ID NO: 473865 - DNA, 30 bp, Artificial Sequence
  Synthetic oligonucleotide
gaaaggttattgctatgagtctgaaacttc

SEQ ID NO: 473866 - DNA, 30 bp, Artificial Sequence
  Synthetic oligonucleotide
aatgaagtccgctgggttgaactaaacttc

SEQ ID NO: 473867 - DNA, 30 bp, Artificial Sequence
  Synthetic oligonucleotide
gagcttctacatgaccctagagtaaacttc

SEQ ID NO: 473868 - DNA, 30 bp, Artificial Sequence
  Synthetic oligonucleotide
agtcttcatttcttttgagtgtgcaacttc

SEQ ID NO: 473869 - DNA, 30 bp, Artificial Sequence
  Synthetic oligonucleotide
agcgttggtttaggcttgaatcagaacttc

SEQ ID NO: 473870 - DNA, 30 bp, Artificial Sequence
  Synthetic oligonucleotide
tcaacaatagtccggcacctgccgaacttc

SEQ ID NO: 473871 - DNA, 30 bp, Artificial Sequence
  Synthetic oligonucleotide
gcgccgtaagagattgttacggcgaacttc

SEQ ID NO: 473872 - DNA, 30 bp, Artificial Sequence
  Synthetic oligonucleotide
gctagcttcggcagggtctccgataacttc

SEQ ID NO: 473873 - DNA, 30 bp, Artificial Sequence
  Synthetic oligonucleotide
gtactttacgctctcggagagtgtaacttc

SEQ ID NO: 473874 - DNA, 30 bp, Artificial Sequence
  Synthetic oligonucleotide
tgcatggccatcatgccgaacatacacttc

SEQ ID NO: 473875 - DNA, 30 bp, Artificial Sequence
  Synthetic oligonucleotide
ggctgcaccttctttgtttggtgccacttc

SEQ ID NO: 473876 - DNA, 30 bp, Artificial Sequence
  Synthetic oligonucleotide
tttgaagaacgtgtatgaaaaaagcacttc

SEQ ID NO: 473877 - DNA, 30 bp, Artificial Sequence
  Synthetic oligonucleotide
atgcagagctttcgaaactgagaagacttc

SEQ ID NO: 473878 - DNA, 30 bp, Artificial Sequence
  Synthetic oligonucleotide
gctggtactcgcagtaataccacagacttc

SEQ ID NO: 473879 - DNA, 30 bp, Artificial Sequence
  Synthetic oligonucleotide
gttcagacgctcctagggcgcgacgacttc

SEQ ID NO: 473880 - DNA, 30 bp, Artificial Sequence
  Synthetic oligonucleotide
gccaacaccgtaggggatgtttaatacttc

SEQ ID NO: 473881 - DNA, 30 bp, Artificial Sequence
  Synthetic oligonucleotide
gaacttgctgtaacaggaatattatacttc

SEQ ID NO: 473882 - DNA, 30 bp, Artificial Sequence
  Synthetic oligonucleotide
cgctactttgtagacctattggggtacttc

SEQ ID NO: 473883 - DNA, 30 bp, Artificial Sequence
  Synthetic oligonucleotide
gctaaatcaatgttcgtctctgcttacttc

SEQ ID NO: 473884 - DNA, 30 bp, Artificial Sequence
  Synthetic oligonucleotide
ctgaggtgcatggttatttaaaaaaccttc

SEQ ID NO: 473885 - DNA, 30 bp, Artificial Sequence
  Synthetic oligonucleotide
ctagcggagccttagggactattgaccttc

SEQ ID NO: 473886 - DNA, 30 bp, Artificial Sequence
  Synthetic oligonucleotide
cccctgtatggatcaaaactatctaccttc

SEQ ID NO: 473887 - DNA, 30 bp, Artificial Sequence
  Synthetic oligonucleotide
tctcagtagcggctgacaattcgacccttc

SEQ ID NO: 473888 - DNA, 30 bp, Artificial Sequence
  Synthetic oligonucleotide
catgggcccgtaagtttgtatttacccttc

SEQ ID NO: 473889 - DNA, 30 bp, Artificial Sequence
  Synthetic oligonucleotide
caagctacaattagtgtcactttacccttc

SEQ ID NO: 473890 - DNA, 30 bp, Artificial Sequence
  Synthetic oligonucleotide
cctgggtttctccggtatactgaagccttc

SEQ ID NO: 473891 - DNA, 30 bp, Artificial Sequence
  Synthetic oligonucleotide
atagctggtatttcggaatgataagccttc

SEQ ID NO: 473892 - DNA, 30 bp, Artificial Sequence
  Synthetic oligonucleotide
catgggcacgagacttgtttgagggccttc

SEQ ID NO: 473893 - DNA, 30 bp, Artificial Sequence
  Synthetic oligonucleotide
tagggatcgcttatgaccaagtgtgccttc

SEQ ID NO: 473894 - DNA, 30 bp, Artificial Sequence
  Synthetic oligonucleotide
gactgctggacagggagcctacactccttc

SEQ ID NO: 473895 - DNA, 30 bp, Artificial Sequence
  Synthetic oligonucleotide
ctctcgacgaggcctaagtctggctccttc

SEQ ID NO: 473896 - DNA, 30 bp, Artificial Sequence
  Synthetic oligonucleotide
ctcaccggggccggagatatttagtccttc

SEQ ID NO: 473897 - DNA, 30 bp, Artificial Sequence
  Synthetic oligonucleotide
cccatcttcgctaccgggttaaggtccttc

SEQ ID NO: 473898 - DNA, 30 bp, Artificial Sequence
  Synthetic oligonucleotide
agaggatttcttgcgcccagcatgtccttc

SEQ ID NO: 473899 - DNA, 30 bp, Artificial Sequence
  Synthetic oligonucleotide
tcaagatacgaatataatataggaagcttc

SEQ ID NO: 473900 - DNA, 30 bp, Artificial Sequence
  Synthetic oligonucleotide
ccaccccaggtatgtggtatgtgaagcttc

SEQ ID NO: 473901 - DNA, 30 bp, Artificial Sequence
  Synthetic oligonucleotide
accggacgggtcggtcaggtgaacagcttc

SEQ ID NO: 473902 - DNA, 30 bp, Artificial Sequence
  Synthetic oligonucleotide
tcggaaaaaagaacaacgatacctagcttc

SEQ ID NO: 473903 - DNA, 30 bp, Artificial Sequence
  Synthetic oligonucleotide
gtgacgtcggaaagcgtttcaattagcttc

SEQ ID NO: 473904 - DNA, 30 bp, Artificial Sequence
  Synthetic oligonucleotide
ttcatgtcagtggtatcagttagacgcttc

SEQ ID NO: 473905 - DNA, 30 bp, Artificial Sequence
  Synthetic oligonucleotide
cattacgcgctaggataggccttccgcttc

SEQ ID NO: 473906 - DNA, 30 bp, Artificial Sequence
  Synthetic oligonucleotide
agggtggcgcggtctatccggaggcgcttc

SEQ ID NO: 473907 - DNA, 30 bp, Artificial Sequence
  Synthetic oligonucleotide
gctgtgttcgacctagggtgacggcgcttc

SEQ ID NO: 473908 - DNA, 30 bp, Artificial Sequence
  Synthetic oligonucleotide
ggaatagtatggtttgcaacgatgcgcttc

SEQ ID NO: 473909 - DNA, 30 bp, Artificial Sequence
  Synthetic oligonucleotide
gtgatgaagaccttttatttttgtcgcttc

SEQ ID NO: 473910 - DNA, 30 bp, Artificial Sequence
  Synthetic oligonucleotide
gcattataactcaagccgtagttcggcttc

SEQ ID NO: 473911 - DNA, 30 bp, Artificial Sequence
  Synthetic oligonucleotide
cgttctccgttccggagtcagctgggcttc

SEQ ID NO: 473912 - DNA, 30 bp, Artificial Sequence
  Synthetic oligonucleotide
tgacgacctttgggtcgtccacatggcttc

SEQ ID NO: 473913 - DNA, 30 bp, Artificial Sequence
  Synthetic oligonucleotide
ggaacgctatactatgtagtagtatgcttc

SEQ ID NO: 473914 - DNA, 30 bp, Artificial Sequence
  Synthetic oligonucleotide
cagatagttattacttccttgtaaatcttc

SEQ ID NO: 473915 - DNA, 30 bp, Artificial Sequence
  Synthetic oligonucleotide
tcagtactagcgtttttcgcaatcatcttc

SEQ ID NO: 473916 - DNA, 30 bp, Artificial Sequence
  Synthetic oligonucleotide
aacttgagttaattaatgaaacagatcttc

SEQ ID NO: 473917 - DNA, 30 bp, Artificial Sequence
  Synthetic oligonucleotide
aatcggtctcttaaattataagtactcttc

SEQ ID NO: 473918 - DNA, 30 bp, Artificial Sequence
  Synthetic oligonucleotide
agtgagtgtcttcagcttaatttgctcttc

SEQ ID NO: 473919 - DNA, 30 bp, Artificial Sequence
  Synthetic oligonucleotide
caatttcctgtatccacgcggcacgtcttc

SEQ ID NO: 473920 - DNA, 30 bp, Artificial Sequence
  Synthetic oligonucleotide
gtttcaaaatgatactagaattacgtcttc

SEQ ID NO: 473921 - DNA, 30 bp, Artificial Sequence
  Synthetic oligonucleotide
gctgtaccggtcggttataaggccgtcttc

SEQ ID NO: 473922 - DNA, 30 bp, Artificial Sequence
  Synthetic oligonucleotide
ggggcgtttccgcctcgccagacggtcttc

SEQ ID NO: 473923 - DNA, 30 bp, Artificial Sequence
  Synthetic oligonucleotide
cgcagagcactttatgcggacagggtcttc

SEQ ID NO: 473924 - DNA, 30 bp, Artificial Sequence
  Synthetic oligonucleotide
gcgtagcggggagtccgtatccgtgtcttc

SEQ ID NO: 473925 - DNA, 30 bp, Artificial Sequence
  Synthetic oligonucleotide
gattaacacgtaataggcaggtgattcttc

SEQ ID NO: 473926 - DNA, 28 bp, Artificial Sequence
  Synthetic oligonucleotide
actttgtgtacggcgtaaagtattcttc

SEQ ID NO: 473927 - DNA, 30 bp, Artificial Sequence
  Synthetic oligonucleotide
gttttttggaacaagtagtcgatcttcttc

SEQ ID NO: 473928 - DNA, 30 bp, Artificial Sequence
  Synthetic oligonucleotide
ttacttacattagtcggagaatatttcttc

SEQ ID NO: 473929 - DNA, 30 bp, Artificial Sequence
  Synthetic oligonucleotide
gtcggaaagtcggtttggttggctttcttc

SEQ ID NO: 473930 - DNA, 30 bp, Artificial Sequence
  Synthetic oligonucleotide
tacagatgcggcggatctcgccaaaagttc

SEQ ID NO: 473931 - DNA, 30 bp, Artificial Sequence
  Synthetic oligonucleotide
atcaaccctccattacggagataaaagttc

SEQ ID NO: 473932 - DNA, 30 bp, Artificial Sequence
  Synthetic oligonucleotide
aagccggaagattgacctaagacaaagttc

SEQ ID NO: 473933 - DNA, 30 bp, Artificial Sequence
  Synthetic oligonucleotide
caccccctgacctcgtacgcttacaagttc

SEQ ID NO: 473934 - DNA, 30 bp, Artificial Sequence
  Synthetic oligonucleotide
agtaggcgaacttgtattagggccaagttc

SEQ ID NO: 473935 - DNA, 30 bp, Artificial Sequence
  Synthetic oligonucleotide
actatattctgtagcggagatcagaagttc

SEQ ID NO: 473936 - DNA, 30 bp, Artificial Sequence
  Synthetic oligonucleotide
attgtaactgactagttggatcagaagttc

SEQ ID NO: 473937 - DNA, 30 bp, Artificial Sequence
  Synthetic oligonucleotide
aacctaatgtttttgacgcgatctaagttc

SEQ ID NO: 473938 - DNA, 30 bp, Artificial Sequence
  Synthetic oligonucleotide
ggattctttgagggtattagaggacagttc

SEQ ID NO: 473939 - DNA, 30 bp, Artificial Sequence
  Synthetic oligonucleotide
gaacttaagtggttgcgatcactacagttc

SEQ ID NO: 473940 - DNA, 30 bp, Artificial Sequence
  Synthetic oligonucleotide
aatagtggtttttactcgcttttccagttc

SEQ ID NO: 473941 - DNA, 30 bp, Artificial Sequence
  Synthetic oligonucleotide
gaggagttctgcaagtactcagtgcagttc

SEQ ID NO: 473942 - DNA, 30 bp, Artificial Sequence
  Synthetic oligonucleotide
ttcccccatggttagtgaactggagagttc

SEQ ID NO: 473943 - DNA, 30 bp, Artificial Sequence
  Synthetic oligonucleotide
acatgcagcattaccaattggcacgagttc

SEQ ID NO: 473944 - DNA, 30 bp, Artificial Sequence
  Synthetic oligonucleotide
gattcgacgtgaccccgatgggtcgagttc

SEQ ID NO: 473945 - DNA, 30 bp, Artificial Sequence
  Synthetic oligonucleotide
aaggaaatatacggtgcggtagaatagttc

SEQ ID NO: 473946 - DNA, 30 bp, Artificial Sequence
  Synthetic oligonucleotide
cgtgccatgagcggcgcacaggcatagttc

SEQ ID NO: 473947 - DNA, 30 bp, Artificial Sequence
  Synthetic oligonucleotide
gtgactcctcatggcgactagtcatagttc

SEQ ID NO: 473948 - DNA, 30 bp, Artificial Sequence
  Synthetic oligonucleotide
agtaaacgcaagagtagtccacactagttc

SEQ ID NO: 473949 - DNA, 30 bp, Artificial Sequence
  Synthetic oligonucleotide
tctagcacctctacgaagaaggactagttc

SEQ ID NO: 473950 - DNA, 30 bp, Artificial Sequence
  Synthetic oligonucleotide
gccaattttaaacaaagttttagctagttc

SEQ ID NO: 473951 - DNA, 30 bp, Artificial Sequence
  Synthetic oligonucleotide
tgcgtcgtctggtacggtgaatgctagttc

SEQ ID NO: 473952 - DNA, 30 bp, Artificial Sequence
  Synthetic oligonucleotide
aagccttgacggccgaatagatattagttc

SEQ ID NO: 473953 - DNA, 30 bp, Artificial Sequence
  Synthetic oligonucleotide
ctctagcgccccagcgttgcccgcacgttc

SEQ ID NO: 473954 - DNA, 30 bp, Artificial Sequence
  Synthetic oligonucleotide
aaatttcctcctgacttcgaatgcacgttc

SEQ ID NO: 473955 - DNA, 30 bp, Artificial Sequence
  Synthetic oligonucleotide
aagtggttggtgtgggagcgaaccccgttc

SEQ ID NO: 473956 - DNA, 30 bp, Artificial Sequence
  Synthetic oligonucleotide
agaggagggatgcgaaaacattggccgttc

SEQ ID NO: 473957 - DNA, 30 bp, Artificial Sequence
  Synthetic oligonucleotide
gtggcgcagattcgccagcaagaagcgttc

SEQ ID NO: 473958 - DNA, 30 bp, Artificial Sequence
  Synthetic oligonucleotide
gtcgggcgcggcagagcaatatgagcgttc

SEQ ID NO: 473959 - DNA, 30 bp, Artificial Sequence
  Synthetic oligonucleotide
caaatgtctcagacattacgtgacgcgttc

SEQ ID NO: 473960 - DNA, 30 bp, Artificial Sequence
  Synthetic oligonucleotide
gcaatcgcgtgttcaaacacgatcgcgttc

SEQ ID NO: 473961 - DNA, 30 bp, Artificial Sequence
  Synthetic oligonucleotide
gccctgctcacgcaacttgatacggcgttc

SEQ ID NO: 473962 - DNA, 30 bp, Artificial Sequence
  Synthetic oligonucleotide
agctccttgtccacggactccgcggcgttc

SEQ ID NO: 473963 - DNA, 30 bp, Artificial Sequence
  Synthetic oligonucleotide
atcacgcatggggttctaatggtggcgttc

SEQ ID NO: 473964 - DNA, 30 bp, Artificial Sequence
  Synthetic oligonucleotide
aatattaagctttcgggcaaggctgcgttc

SEQ ID NO: 473965 - DNA, 30 bp, Artificial Sequence
  Synthetic oligonucleotide
attaaagcgacgaaggcagtaagtgcgttc

SEQ ID NO: 473966 - DNA, 30 bp, Artificial Sequence
  Synthetic oligonucleotide
aggcagaggcgatatggccacatatcgttc

SEQ ID NO: 473967 - DNA, 30 bp, Artificial Sequence
  Synthetic oligonucleotide
gcttgcttggtgcaactgatcttgtcgttc

SEQ ID NO: 473968 - DNA, 30 bp, Artificial Sequence
  Synthetic oligonucleotide
taggcagagtcgattaagatctcaaggttc

SEQ ID NO: 473969 - DNA, 30 bp, Artificial Sequence
  Synthetic oligonucleotide
aaagcttgggactcggccgcctgaaggttc

SEQ ID NO: 473970 - DNA, 30 bp, Artificial Sequence
  Synthetic oligonucleotide
atcatgaacactgggggattcgccaggttc

SEQ ID NO: 473971 - DNA, 30 bp, Artificial Sequence
  Synthetic oligonucleotide
aaccctttacaatttctcagcgcgaggttc

SEQ ID NO: 473972 - DNA, 30 bp, Artificial Sequence
  Synthetic oligonucleotide
actggcgcttcatggtctaggatgaggttc

SEQ ID NO: 473973 - DNA, 30 bp, Artificial Sequence
  Synthetic oligonucleotide
ttccacttaaggtgggataaccataggttc

SEQ ID NO: 473974 - DNA, 30 bp, Artificial Sequence
  Synthetic oligonucleotide
tatacgatttatcctataatgtataggttc

SEQ ID NO: 473975 - DNA, 30 bp, Artificial Sequence
  Synthetic oligonucleotide
tgagcgtatggcatcgatttcgcacggttc

SEQ ID NO: 473976 - DNA, 30 bp, Artificial Sequence
  Synthetic oligonucleotide
atcactctgttcggggggagccgccggttc

SEQ ID NO: 473977 - DNA, 30 bp, Artificial Sequence
  Synthetic oligonucleotide
taggaatgtcaatcagattgcaagcggttc

SEQ ID NO: 473978 - DNA, 30 bp, Artificial Sequence
  Synthetic oligonucleotide
ttagatcgtttcttcttcttgtatcggttc

SEQ ID NO: 473979 - DNA, 30 bp, Artificial Sequence
  Synthetic oligonucleotide
gcctcattatgccagtataatactcggttc

SEQ ID NO: 473980 - DNA, 30 bp, Artificial Sequence
  Synthetic oligonucleotide
ataatatcctacagtggtatgagtcggttc

SEQ ID NO: 473981 - DNA, 30 bp, Artificial Sequence
  Synthetic oligonucleotide
gccacaactatcaatagcccaccggggttc

SEQ ID NO: 473982 - DNA, 30 bp, Artificial Sequence
  Synthetic oligonucleotide
attgtcattggatatgcgctgagggggttc

SEQ ID NO: 473983 - DNA, 30 bp, Artificial Sequence
  Synthetic oligonucleotide
gccgaaccctcggataagacaaaatggttc

SEQ ID NO: 473984 - DNA, 30 bp, Artificial Sequence
  Synthetic oligonucleotide
ttattctcgcattcagcttagtaatggttc

SEQ ID NO: 473985 - DNA, 30 bp, Artificial Sequence
  Synthetic oligonucleotide
cgatgtatttctatatgtactttatggttc

SEQ ID NO: 473986 - DNA, 30 bp, Artificial Sequence
  Synthetic oligonucleotide
actggattcggccaaccatggacctggttc

SEQ ID NO: 473987 - DNA, 30 bp, Artificial Sequence
  Synthetic oligonucleotide
acccccatgaatttttgcttcccctggttc

SEQ ID NO: 473988 - DNA, 30 bp, Artificial Sequence
  Synthetic oligonucleotide
tgtatctcaaggactatcataatgtggttc

SEQ ID NO: 473989 - DNA, 30 bp, Artificial Sequence
  Synthetic oligonucleotide
taagcaaaggtaaaataactgtattggttc

SEQ ID NO: 473990 - DNA, 30 bp, Artificial Sequence
  Synthetic oligonucleotide
tctagatttccttggtcccattgttggttc

SEQ ID NO: 473991 - DNA, 30 bp, Artificial Sequence
  Synthetic oligonucleotide
gtttcataccgcatttgaaagttttggttc

SEQ ID NO: 473992 - DNA, 30 bp, Artificial Sequence
  Synthetic oligonucleotide
ggcattgtccaggtctgggttgaaatgttc

SEQ ID NO: 473993 - DNA, 30 bp, Artificial Sequence
  Synthetic oligonucleotide
tacttttggcgccagctcaaatgcatgttc

SEQ ID NO: 473994 - DNA, 30 bp, Artificial Sequence
  Synthetic oligonucleotide
ttttcgggatgcattaagaagccgatgttc

SEQ ID NO: 473995 - DNA, 30 bp, Artificial Sequence
  Synthetic oligonucleotide
gacattgtttcatgtgatgcgttgatgttc

SEQ ID NO: 473996 - DNA, 30 bp, Artificial Sequence
  Synthetic oligonucleotide
tcttcttcacatctacagtatcatatgttc

SEQ ID NO: 473997 - DNA, 30 bp, Artificial Sequence
  Synthetic oligonucleotide
attaggcgggtatcctggatagatatgttc

SEQ ID NO: 473998 - DNA, 30 bp, Artificial Sequence
  Synthetic oligonucleotide
aaaattccgtgtgcgggctagactatgttc

SEQ ID NO: 473999 - DNA, 30 bp, Artificial Sequence
  Synthetic oligonucleotide
taactggctttgtaacgcaggccactgttc

SEQ ID NO: 474000 - DNA, 30 bp, Artificial Sequence
  Synthetic oligonucleotide
agtaaaaatgctgcaattaaggtactgttc

SEQ ID NO: 474001 - DNA, 30 bp, Artificial Sequence
  Synthetic oligonucleotide
agtggtctagcattttctaaaagcctgttc

SEQ ID NO: 474002 - DNA, 30 bp, Artificial Sequence
  Synthetic oligonucleotide
ccatatatgatggaagtaaacgtcctgttc

SEQ ID NO: 474003 - DNA, 30 bp, Artificial Sequence
  Synthetic oligonucleotide
ttcatgctgaggtccgtttggaggctgttc

SEQ ID NO: 474004 - DNA, 30 bp, Artificial Sequence
  Synthetic oligonucleotide
tgaccaacgttcatgtggagcgcagtgttc

SEQ ID NO: 474005 - DNA, 30 bp, Artificial Sequence
  Synthetic oligonucleotide
gaactaataattacaagacattgtgtgttc

SEQ ID NO: 474006 - DNA, 30 bp, Artificial Sequence
  Synthetic oligonucleotide
gggcctcagcacttagcaaagattgtgttc

SEQ ID NO: 474007 - DNA, 30 bp, Artificial Sequence
  Synthetic oligonucleotide
actccctttgaaatttaacagcaattgttc

SEQ ID NO: 474008 - DNA, 30 bp, Artificial Sequence
  Synthetic oligonucleotide
ctccattaacgtagatgttcttaattgttc

SEQ ID NO: 474009 - DNA, 30 bp, Artificial Sequence
  Synthetic oligonucleotide
aggtaagaatttcggggttctgcattgttc

SEQ ID NO: 474010 - DNA, 30 bp, Artificial Sequence
  Synthetic oligonucleotide
aaatagcgcgaaaccctcttgatattgttc

SEQ ID NO: 474011 - DNA, 30 bp, Artificial Sequence
  Synthetic oligonucleotide
cggtacaccgcgcacgggtcacacttgttc

SEQ ID NO: 474012 - DNA, 31 bp, Artificial Sequence
  Synthetic oligonucleotide
agttgacgagtttggtttgataaccttgttc

SEQ ID NO: 474013 - DNA, 30 bp, Artificial Sequence
  Synthetic oligonucleotide
tcatttctatggtcctggccacccttgttc

SEQ ID NO: 474014 - DNA, 30 bp, Artificial Sequence
  Synthetic oligonucleotide
aaactttcaattttggagagcagcttgttc

SEQ ID NO: 474015 - DNA, 30 bp, Artificial Sequence
  Synthetic oligonucleotide
tttccagacccctcaatcggtggcttgttc

SEQ ID NO: 474016 - DNA, 30 bp, Artificial Sequence
  Synthetic oligonucleotide
atgtctatgttaaaaatttaacatttgttc

SEQ ID NO: 474017 - DNA, 30 bp, Artificial Sequence
  Synthetic oligonucleotide
ttctcttgcggcctaggtatcactttgttc

SEQ ID NO: 474018 - DNA, 30 bp, Artificial Sequence
  Synthetic oligonucleotide
ggttgtagaatgcggcacctccctttgttc

SEQ ID NO: 474019 - DNA, 30 bp, Artificial Sequence
  Synthetic oligonucleotide
ctagaggtccagtactgcctagaaaatttc

SEQ ID NO: 474020 - DNA, 30 bp, Artificial Sequence
  Synthetic oligonucleotide
tgacgtgagtgagtagttggtgcaaatttc

SEQ ID NO: 474021 - DNA, 30 bp, Artificial Sequence
  Synthetic oligonucleotide
ataatttcggttcggtctccgtcaaatttc

SEQ ID NO: 474022 - DNA, 30 bp, Artificial Sequence
  Synthetic oligonucleotide
tatcggggtaatgcgtcctgttcaaatttc

SEQ ID NO: 474023 - DNA, 30 bp, Artificial Sequence
  Synthetic oligonucleotide
tgtacaatagaaagccaaagccgaaatttc

SEQ ID NO: 474024 - DNA, 30 bp, Artificial Sequence
  Synthetic oligonucleotide
taaatctatatatgctacacacgcaatttc

SEQ ID NO: 474025 - DNA, 30 bp, Artificial Sequence
  Synthetic oligonucleotide
tttgttctttcggggttaatgttcaatttc

SEQ ID NO: 474026 - DNA, 30 bp, Artificial Sequence
  Synthetic oligonucleotide
atagcattctgttaatcatgaagtaatttc

SEQ ID NO: 474027 - DNA, 30 bp, Artificial Sequence
  Synthetic oligonucleotide
gacttagtagcacatgttaatggtaatttc

SEQ ID NO: 474028 - DNA, 30 bp, Artificial Sequence
  Synthetic oligonucleotide
atatacgcattcctcgtgtaataacatttc

SEQ ID NO: 474029 - DNA, 30 bp, Artificial Sequence
  Synthetic oligonucleotide
taatatcaacaatcttgttacagacatttc

SEQ ID NO: 474030 - DNA, 30 bp, Artificial Sequence
  Synthetic oligonucleotide
atttacaggcgagactaagagttacatttc

SEQ ID NO: 474031 - DNA, 30 bp, Artificial Sequence
  Synthetic oligonucleotide
tgatctgagggggtcaagcgttaccatttc

SEQ ID NO: 474032 - DNA, 30 bp, Artificial Sequence
  Synthetic oligonucleotide
tgttactagttccgaccccagcgccatttc

SEQ ID NO: 474033 - DNA, 30 bp, Artificial Sequence
  Synthetic oligonucleotide
gaataaacgacccttgccgcatgccatttc

SEQ ID NO: 474034 - DNA, 30 bp, Artificial Sequence
  Synthetic oligonucleotide
gatgaggcccctgtcgatatcccgcatttc

SEQ ID NO: 474035 - DNA, 30 bp, Artificial Sequence
  Synthetic oligonucleotide
ttgtactcggcagaactctcggggcatttc

SEQ ID NO: 474036 - DNA, 30 bp, Artificial Sequence
  Synthetic oligonucleotide
ccgggcccttctcccggtttgttgcatttc

SEQ ID NO: 474037 - DNA, 30 bp, Artificial Sequence
  Synthetic oligonucleotide
gagaaattaaagccgtgcatcggcgatttc

SEQ ID NO: 474038 - DNA, 30 bp, Artificial Sequence
  Synthetic oligonucleotide
ctgcatctgaggtcatgggaacatgatttc

SEQ ID NO: 474039 - DNA, 30 bp, Artificial Sequence
  Synthetic oligonucleotide
caccgacatacagaagccccgggtgatttc

SEQ ID NO: 474040 - DNA, 30 bp, Artificial Sequence
  Synthetic oligonucleotide
cacggaggtctccaaatcaaacttgatttc

SEQ ID NO: 474041 - DNA, 30 bp, Artificial Sequence
  Synthetic oligonucleotide
ttttagatagcatgagtatagaaatatttc

SEQ ID NO: 474042 - DNA, 30 bp, Artificial Sequence
  Synthetic oligonucleotide
gtacggaagacccatgcgtttaaatatttc

SEQ ID NO: 474043 - DNA, 30 bp, Artificial Sequence
  Synthetic oligonucleotide
atggcgagaggtctcaccttgtcatatttc

SEQ ID NO: 474044 - DNA, 30 bp, Artificial Sequence
  Synthetic oligonucleotide
tatctggatagatgacgcgagagatatttc

SEQ ID NO: 474045 - DNA, 30 bp, Artificial Sequence
  Synthetic oligonucleotide
ggtcaccaggacggagtatagagatatttc

SEQ ID NO: 474046 - DNA, 30 bp, Artificial Sequence
  Synthetic oligonucleotide
gggcagaattaatatgtcgtgtcttatttc

SEQ ID NO: 474047 - DNA, 30 bp, Artificial Sequence
  Synthetic oligonucleotide
tttctatacagaactccgggtggttatttc

SEQ ID NO: 474048 - DNA, 30 bp, Artificial Sequence
  Synthetic oligonucleotide
cgcgcaatgtgatggtaagcttgaactttc

SEQ ID NO: 474049 - DNA, 30 bp, Artificial Sequence
  Synthetic oligonucleotide
acggaatggtagtgactttttgacactttc

SEQ ID NO: 474050 - DNA, 30 bp, Artificial Sequence
  Synthetic oligonucleotide
ttaggggaaccaaggtccttgtacactttc

SEQ ID NO: 474051 - DNA, 30 bp, Artificial Sequence
  Synthetic oligonucleotide
acagtgtgtgcaaagtgcattggcactttc

SEQ ID NO: 474052 - DNA, 30 bp, Artificial Sequence
  Synthetic oligonucleotide
gtatgggttgtgcgataggtgtagactttc

SEQ ID NO: 474053 - DNA, 30 bp, Artificial Sequence
  Synthetic oligonucleotide
cacagtagaatcgcatgcagttagactttc

SEQ ID NO: 474054 - DNA, 30 bp, Artificial Sequence
  Synthetic oligonucleotide
gctactttcaataatttcaagtggactttc

SEQ ID NO: 474055 - DNA, 30 bp, Artificial Sequence
  Synthetic oligonucleotide
cggggatctcaagagcgctaattgactttc

SEQ ID NO: 474056 - DNA, 30 bp, Artificial Sequence
  Synthetic oligonucleotide
cgaggaaaaacatgcaaatccaatactttc

SEQ ID NO: 474057 - DNA, 30 bp, Artificial Sequence
  Synthetic oligonucleotide
ggttgtttggggagagtgtctctacctttc

SEQ ID NO: 474058 - DNA, 30 bp, Artificial Sequence
  Synthetic oligonucleotide
gtgtcaggtcactatgtctccttacctttc

SEQ ID NO: 474059 - DNA, 30 bp, Artificial Sequence
  Synthetic oligonucleotide
cccggggccaggtagcgagctaagcctttc

SEQ ID NO: 474060 - DNA, 30 bp, Artificial Sequence
  Synthetic oligonucleotide
ataaaaagggagcgagtccccgcgcctttc

SEQ ID NO: 474061 - DNA, 30 bp, Artificial Sequence
  Synthetic oligonucleotide
tgtagggtaggtagggcgccccggcctttc

SEQ ID NO: 474062 - DNA, 30 bp, Artificial Sequence
  Synthetic oligonucleotide
gttgacggcatcgggagtgtgtatcctttc

SEQ ID NO: 474063 - DNA, 30 bp, Artificial Sequence
  Synthetic oligonucleotide
ctttatagtaatacgcggttgtatcctttc

SEQ ID NO: 474064 - DNA, 30 bp, Artificial Sequence
  Synthetic oligonucleotide
gcaacactttcaagggacggcggagctttc

SEQ ID NO: 474065 - DNA, 30 bp, Artificial Sequence
  Synthetic oligonucleotide
ccttcaatggtccagtaacattgggctttc

SEQ ID NO: 474066 - DNA, 30 bp, Artificial Sequence
  Synthetic oligonucleotide
ctaagtatggtatcatctacttgggctttc

SEQ ID NO: 474067 - DNA, 30 bp, Artificial Sequence
  Synthetic oligonucleotide
acgtgctataatgactccttggtggctttc

SEQ ID NO: 474068 - DNA, 30 bp, Artificial Sequence
  Synthetic oligonucleotide
gacgggggaggaggacaaatattggctttc

SEQ ID NO: 474069 - DNA, 30 bp, Artificial Sequence
  Synthetic oligonucleotide
agcagcgaaaggtgacctacgaatgctttc

SEQ ID NO: 474070 - DNA, 30 bp, Artificial Sequence
  Synthetic oligonucleotide
aattagtggtcatcgcaaatcgcatctttc

SEQ ID NO: 474071 - DNA, 30 bp, Artificial Sequence
  Synthetic oligonucleotide
ttcgcaataaatctggtctaccactctttc

SEQ ID NO: 474072 - DNA, 30 bp, Artificial Sequence
  Synthetic oligonucleotide
gtgatgatataattgtacggtgactctttc

SEQ ID NO: 474073 - DNA, 30 bp, Artificial Sequence
  Synthetic oligonucleotide
catcagcgcggagaaaaatcgaggtctttc

SEQ ID NO: 474074 - DNA, 30 bp, Artificial Sequence
  Synthetic oligonucleotide
aagcagatgtggacgtgggcgatgtctttc

SEQ ID NO: 474075 - DNA, 30 bp, Artificial Sequence
  Synthetic oligonucleotide
cccggtatgggtgggaaatcaccttctttc

SEQ ID NO: 474076 - DNA, 30 bp, Artificial Sequence
  Synthetic oligonucleotide
atgttcttactcaactgatctccttctttc

SEQ ID NO: 474077 - DNA, 30 bp, Artificial Sequence
  Synthetic oligonucleotide
taagtagaactttgggtatttttttctttc

SEQ ID NO: 474078 - DNA, 30 bp, Artificial Sequence
  Synthetic oligonucleotide
aacatcttcttctgtccttcgctaagtttc

SEQ ID NO: 474079 - DNA, 30 bp, Artificial Sequence
  Synthetic oligonucleotide
catccgcttaagaagtctcgtcacagtttc

SEQ ID NO: 474080 - DNA, 30 bp, Artificial Sequence
  Synthetic oligonucleotide
tgcgtacttaagatcctactcggcagtttc

SEQ ID NO: 474081 - DNA, 30 bp, Artificial Sequence
  Synthetic oligonucleotide
cttgtaactcagcttgacccctgcagtttc

SEQ ID NO: 474082 - DNA, 30 bp, Artificial Sequence
  Synthetic oligonucleotide
tctctaagcccgttatgggcgctgagtttc

SEQ ID NO: 474083 - DNA, 30 bp, Artificial Sequence
  Synthetic oligonucleotide
gatatagcctaggtttcattctgtagtttc

SEQ ID NO: 474084 - DNA, 30 bp, Artificial Sequence
  Synthetic oligonucleotide
aaacgtgcttagctctggagctttagtttc

SEQ ID NO: 474085 - DNA, 30 bp, Artificial Sequence
  Synthetic oligonucleotide
gtacgacctggcgagataagcccacgtttc

SEQ ID NO: 474086 - DNA, 30 bp, Artificial Sequence
  Synthetic oligonucleotide
aagctcaagaactaaaatgtgttacgtttc

SEQ ID NO: 474087 - DNA, 30 bp, Artificial Sequence
  Synthetic oligonucleotide
gacttatttggtaatacccccaggcgtttc

SEQ ID NO: 474088 - DNA, 30 bp, Artificial Sequence
  Synthetic oligonucleotide
gtggactaagttagaaggcccaggcgtttc

SEQ ID NO: 474089 - DNA, 30 bp, Artificial Sequence
  Synthetic oligonucleotide
cttttgcgccttgtcattcgaaatcgtttc

SEQ ID NO: 474090 - DNA, 30 bp, Artificial Sequence
  Synthetic oligonucleotide
acactagaaactgcaggggtcgatcgtttc

SEQ ID NO: 474091 - DNA, 30 bp, Artificial Sequence
  Synthetic oligonucleotide
ctgttagagtaaactcaccaatcaggtttc

SEQ ID NO: 474092 - DNA, 30 bp, Artificial Sequence
  Synthetic oligonucleotide
aatctttaggggccttataactcaggtttc

SEQ ID NO: 474093 - DNA, 30 bp, Artificial Sequence
  Synthetic oligonucleotide
ttgattgatgtctcatggccaggcggtttc

SEQ ID NO: 474094 - DNA, 30 bp, Artificial Sequence
  Synthetic oligonucleotide
tgtctcgacacccagtaaattttcggtttc

SEQ ID NO: 474095 - DNA, 30 bp, Artificial Sequence
  Synthetic oligonucleotide
tcaaatcaatgcgaggctatttagggtttc

SEQ ID NO: 474096 - DNA, 30 bp, Artificial Sequence
  Synthetic oligonucleotide
accaaggagatcgtgtgcacacggggtttc

SEQ ID NO: 474097 - DNA, 30 bp, Artificial Sequence
  Synthetic oligonucleotide
tcagatcaaagtgtatactctcttggtttc

SEQ ID NO: 474098 - DNA, 30 bp, Artificial Sequence
  Synthetic oligonucleotide
cagattgtacttaatatgggcccatgtttc

SEQ ID NO: 474099 - DNA, 30 bp, Artificial Sequence
  Synthetic oligonucleotide
gaagttcagaaattcatggtactatgtttc

SEQ ID NO: 474100 - DNA, 30 bp, Artificial Sequence
  Synthetic oligonucleotide
aaaactttttaggatggaaagccctgtttc

SEQ ID NO: 474101 - DNA, 30 bp, Artificial Sequence
  Synthetic oligonucleotide
tggcgaatgagatcggtaatcatctgtttc

SEQ ID NO: 474102 - DNA, 30 bp, Artificial Sequence
  Synthetic oligonucleotide
aactcccatcacttccatatagtctgtttc

SEQ ID NO: 474103 - DNA, 30 bp, Artificial Sequence
  Synthetic oligonucleotide
aactatcgctaaggctagtcattctgtttc

SEQ ID NO: 474104 - DNA, 30 bp, Artificial Sequence
  Synthetic oligonucleotide
tgcaactacttacgaacggttacgtgtttc

SEQ ID NO: 474105 - DNA, 30 bp, Artificial Sequence
  Synthetic oligonucleotide
aattcggtattttcgttgagagtaattttc

SEQ ID NO: 474106 - DNA, 30 bp, Artificial Sequence
  Synthetic oligonucleotide
tagaataaccatatatcagctatcattttc

SEQ ID NO: 474107 - DNA, 31 bp, Artificial Sequence
  Synthetic oligonucleotide
taggcgcgctgttaagaaggccttcattttc

SEQ ID NO: 474108 - DNA, 30 bp, Artificial Sequence
  Synthetic oligonucleotide
aggccagctttctccgttcacgggattttc

SEQ ID NO: 474109 - DNA, 30 bp, Artificial Sequence
  Synthetic oligonucleotide
cgctggcctatgtacagctatgggattttc

SEQ ID NO: 474110 - DNA, 30 bp, Artificial Sequence
  Synthetic oligonucleotide
tcggttagaatgtccacttgttcccttttc

SEQ ID NO: 474111 - DNA, 30 bp, Artificial Sequence
  Synthetic oligonucleotide
taaatctactgcgttaccttagcgcttttc

SEQ ID NO: 474112 - DNA, 30 bp, Artificial Sequence
  Synthetic oligonucleotide
cctgttttcttcaggagaggaattcttttc

SEQ ID NO: 474113 - DNA, 30 bp, Artificial Sequence
  Synthetic oligonucleotide
ttgagtaggcagagacgatgtcttcttttc

SEQ ID NO: 474114 - DNA, 30 bp, Artificial Sequence
  Synthetic oligonucleotide
ttgggttaatttggcaggaggacagttttc

SEQ ID NO: 474115 - DNA, 30 bp, Artificial Sequence
  Synthetic oligonucleotide
cacagctgctgacttctagaaagagttttc

SEQ ID NO: 474116 - DNA, 30 bp, Artificial Sequence
  Synthetic oligonucleotide
ccatccagtgcagcgtcttcaggagttttc

SEQ ID NO: 474117 - DNA, 30 bp, Artificial Sequence
  Synthetic oligonucleotide
ctggcctctgcagaaacaatagcggttttc

SEQ ID NO: 474118 - DNA, 30 bp, Artificial Sequence
  Synthetic oligonucleotide
accccagtcgcgcgggtctacgtggttttc

SEQ ID NO: 474119 - DNA, 30 bp, Artificial Sequence
  Synthetic oligonucleotide
gtgaacgacgtagtctcgtccactgttttc

SEQ ID NO: 474120 - DNA, 30 bp, Artificial Sequence
  Synthetic oligonucleotide
tgagacgcctggtataatggcggatttttc

SEQ ID NO: 474121 - DNA, 30 bp, Artificial Sequence
  Synthetic oligonucleotide
gtgggggtggcggaatctagagtctttttc

SEQ ID NO: 474122 - DNA, 30 bp, Artificial Sequence
  Synthetic oligonucleotide
gtggcagacaactcgtgaacacagtttttc

SEQ ID NO: 474123 - DNA, 30 bp, Artificial Sequence
  Synthetic oligonucleotide
cccccattccgaaggtcaggccggtttttc

SEQ ID NO: 474124 - DNA, 30 bp, Artificial Sequence
  Synthetic oligonucleotide
gggtttagctgttctttggttctgtttttc

SEQ ID NO: 474125 - DNA, 30 bp, Artificial Sequence
  Synthetic oligonucleotide
gtggagatgatgtttctgtttgtgtttttc

SEQ ID NO: 474126 - DNA, 30 bp, Artificial Sequence
  Synthetic oligonucleotide
gcccaaaagacgccaaagattttgtttttc

SEQ ID NO: 474127 - DNA, 30 bp, Artificial Sequence
  Synthetic oligonucleotide
ggcggatgccccatagtcgaagattttttc

SEQ ID NO: 474128 - DNA, 30 bp, Artificial Sequence
  Synthetic oligonucleotide
cgaaaggaaaatacctgaacactttttttc

SEQ ID NO: 474129 - DNA, 30 bp, Artificial Sequence
  Synthetic oligonucleotide
tgtattagagagttttggactgaaaaaaag

SEQ ID NO: 474130 - DNA, 30 bp, Artificial Sequence
  Synthetic oligonucleotide
cgatggtcctagatagtattcaacaaaaag

SEQ ID NO: 474131 - DNA, 30 bp, Artificial Sequence
  Synthetic oligonucleotide
atcatgattagcggtatgcagtcccaaaag

SEQ ID NO: 474132 - DNA, 30 bp, Artificial Sequence
  Synthetic oligonucleotide
gaatcaatgtgaagtgaacaaatccaaaag

SEQ ID NO: 474133 - DNA, 30 bp, Artificial Sequence
  Synthetic oligonucleotide
ttgagtattgttctgggcatccggcaaaag

SEQ ID NO: 474134 - DNA, 30 bp, Artificial Sequence
  Synthetic oligonucleotide
gctatcgtcctctaaggaggacatcaaaag

SEQ ID NO: 474135 - DNA, 30 bp, Artificial Sequence
  Synthetic oligonucleotide
ttctttggaaagtcagcacgtcctcaaaag

SEQ ID NO: 474136 - DNA, 30 bp, Artificial Sequence
  Synthetic oligonucleotide
gcattctgccatagaaccggagctcaaaag

SEQ ID NO: 474137 - DNA, 30 bp, Artificial Sequence
  Synthetic oligonucleotide
gttctcttggaaagcgagtgacaagaaaag

SEQ ID NO: 474138 - DNA, 30 bp, Artificial Sequence
  Synthetic oligonucleotide
cacaatacgcgaccggccagcatagaaaag

SEQ ID NO: 474139 - DNA, 30 bp, Artificial Sequence
  Synthetic oligonucleotide
gtactcttttgttttcgggtttgcgaaaag

SEQ ID NO: 474140 - DNA, 30 bp, Artificial Sequence
  Synthetic oligonucleotide
ggtttttatagggaagcacgttgtgaaaag

SEQ ID NO: 474141 - DNA, 30 bp, Artificial Sequence
  Synthetic oligonucleotide
taaaggactagcaacaggtagacataaaag

SEQ ID NO: 474142 - DNA, 30 bp, Artificial Sequence
  Synthetic oligonucleotide
caagaggtaagaaccattcgatcataaaag

SEQ ID NO: 474143 - DNA, 30 bp, Artificial Sequence
  Synthetic oligonucleotide
taaggtctcataaggaccggacactaaaag

SEQ ID NO: 474144 - DNA, 30 bp, Artificial Sequence
  Synthetic oligonucleotide
tgtcaacataggttggatagctactaaaag

SEQ ID NO: 474145 - DNA, 30 bp, Artificial Sequence
  Synthetic oligonucleotide
gaaatttttatggcctatattcgctaaaag

SEQ ID NO: 474146 - DNA, 30 bp, Artificial Sequence
  Synthetic oligonucleotide
taatttactcacgcgaacgttgtctaaaag

SEQ ID NO: 474147 - DNA, 30 bp, Artificial Sequence
  Synthetic oligonucleotide
gcacgctttgaagaccctgttgagtaaaag

SEQ ID NO: 474148 - DNA, 30 bp, Artificial Sequence
  Synthetic oligonucleotide
cgatcggacagttccagccctttgtaaaag

SEQ ID NO: 474149 - DNA, 30 bp, Artificial Sequence
  Synthetic oligonucleotide
gcagggggacgtagcgacacaaattaaaag

SEQ ID NO: 474150 - DNA, 30 bp, Artificial Sequence
  Synthetic oligonucleotide
atgccatagtatatgctttacgattaaaag

SEQ ID NO: 474151 - DNA, 30 bp, Artificial Sequence
  Synthetic oligonucleotide
cttcggtgtgaaggtccgtctgtttaaaag

SEQ ID NO: 474152 - DNA, 30 bp, Artificial Sequence
  Synthetic oligonucleotide
ctgattgatgcaggtgcttattaaacaaag

SEQ ID NO: 474153 - DNA, 30 bp, Artificial Sequence
  Synthetic oligonucleotide
ttctctaactttatccggagaatcacaaag

SEQ ID NO: 474154 - DNA, 30 bp, Artificial Sequence
  Synthetic oligonucleotide
ttcaaggatccgcttggtactttcacaaag

SEQ ID NO: 474155 - DNA, 30 bp, Artificial Sequence
  Synthetic oligonucleotide
cacgcattgagaaaagcaaactcgacaaag

SEQ ID NO: 474156 - DNA, 30 bp, Artificial Sequence
  Synthetic oligonucleotide
tatatgtttatttacgaattgctgacaaag

SEQ ID NO: 474157 - DNA, 30 bp, Artificial Sequence
  Synthetic oligonucleotide
gtgcgcatggctcatgcgtttgatacaaag

SEQ ID NO: 474158 - DNA, 30 bp, Artificial Sequence
  Synthetic oligonucleotide
cgaagcccgtacatcccgctagctacaaag

SEQ ID NO: 474159 - DNA, 30 bp, Artificial Sequence
  Synthetic oligonucleotide
gcaaacgattgttgccgccgcggtacaaag

SEQ ID NO: 474160 - DNA, 30 bp, Artificial Sequence
  Synthetic oligonucleotide
tccgtttagtctcagttgttctgtacaaag

SEQ ID NO: 474161 - DNA, 30 bp, Artificial Sequence
  Synthetic oligonucleotide
gattctttagagtgtacgccaattacaaag

SEQ ID NO: 474162 - DNA, 30 bp, Artificial Sequence
  Synthetic oligonucleotide
gggtaagggcagccgcgggtttccccaaag

SEQ ID NO: 474163 - DNA, 30 bp, Artificial Sequence
  Synthetic oligonucleotide
aaccgcaatgagttaatccgtggcccaaag

SEQ ID NO: 474164 - DNA, 30 bp, Artificial Sequence
  Synthetic oligonucleotide
gccgatttagggcttttggaggagccaaag

SEQ ID NO: 474165 - DNA, 30 bp, Artificial Sequence
  Synthetic oligonucleotide
attctgagccagcttgagattgtagcaaag

SEQ ID NO: 474166 - DNA, 30 bp, Artificial Sequence
  Synthetic oligonucleotide
aaagcttgccccgccggtcggtgggcaaag

SEQ ID NO: 474167 - DNA, 30 bp, Artificial Sequence
  Synthetic oligonucleotide
agtataggttacatattacctatggcaaag

SEQ ID NO: 474168 - DNA, 30 bp, Artificial Sequence
  Synthetic oligonucleotide
gtgagtgtgcgaagagattgtaatgcaaag

SEQ ID NO: 474169 - DNA, 30 bp, Artificial Sequence
  Synthetic oligonucleotide
agcttttgtgtttttgtaattcatgcaaag

SEQ ID NO: 474170 - DNA, 30 bp, Artificial Sequence
  Synthetic oligonucleotide
tagttgaatgtaaaagtagtgtaatcaaag

SEQ ID NO: 474171 - DNA, 30 bp, Artificial Sequence
  Synthetic oligonucleotide
gaccgcggctacgcttgaaggcactcaaag

SEQ ID NO: 474172 - DNA, 30 bp, Artificial Sequence
  Synthetic oligonucleotide
tacatgagcaccgtacgccactagtcaaag

SEQ ID NO: 474173 - DNA, 30 bp, Artificial Sequence
  Synthetic oligonucleotide
gtacttgagctgagaatattctagtcaaag

SEQ ID NO: 474174 - DNA, 30 bp, Artificial Sequence
  Synthetic oligonucleotide
atctcatacgaacaagagcttacgtcaaag

SEQ ID NO: 474175 - DNA, 30 bp, Artificial Sequence
  Synthetic oligonucleotide
cttccgaactcttccaggggggattcaaag

SEQ ID NO: 474176 - DNA, 30 bp, Artificial Sequence
  Synthetic oligonucleotide
gaatatcacggtgctaccaccccttcaaag

SEQ ID NO: 474177 - DNA, 30 bp, Artificial Sequence
  Synthetic oligonucleotide
gttaattgttataaagactgtagttcaaag

SEQ ID NO: 474178 - DNA, 30 bp, Artificial Sequence
  Synthetic oligonucleotide
agagtattcgtttatcgggtttaaagaaag

SEQ ID NO: 474179 - DNA, 30 bp, Artificial Sequence
  Synthetic oligonucleotide
gtgttttcacatgcacgtggtacaagaaag

SEQ ID NO: 474180 - DNA, 30 bp, Artificial Sequence
  Synthetic oligonucleotide
gcagcttacggcacgcatctaaccagaaag

SEQ ID NO: 474181 - DNA, 30 bp, Artificial Sequence
  Synthetic oligonucleotide
gagaaatgagggggttaatcttatagaaag

SEQ ID NO: 474182 - DNA, 30 bp, Artificial Sequence
  Synthetic oligonucleotide
gaatgcgtatcggtatatcacgttagaaag

SEQ ID NO: 474183 - DNA, 30 bp, Artificial Sequence
  Synthetic oligonucleotide
tataatacttttagaaccaagactcgaaag

SEQ ID NO: 474184 - DNA, 30 bp, Artificial Sequence
  Synthetic oligonucleotide
gtttcccgctacaatatgggttggggaaag

SEQ ID NO: 474185 - DNA, 30 bp, Artificial Sequence
  Synthetic oligonucleotide
taggttatgtagtgacgaaccgatggaaag

SEQ ID NO: 474186 - DNA, 30 bp, Artificial Sequence
  Synthetic oligonucleotide
tcccccatacgacactaggcctgtggaaag

SEQ ID NO: 474187 - DNA, 30 bp, Artificial Sequence
  Synthetic oligonucleotide
tttggacgaccacgtatccacattggaaag

SEQ ID NO: 474188 - DNA, 30 bp, Artificial Sequence
  Synthetic oligonucleotide
acaaatctgtagaaccatttaagatgaaag

SEQ ID NO: 474189 - DNA, 30 bp, Artificial Sequence
  Synthetic oligonucleotide
gtgctcacgcggcactggtgccactgaaag

SEQ ID NO: 474190 - DNA, 30 bp, Artificial Sequence
  Synthetic oligonucleotide
gccctaaattcacacccacgagtgtgaaag

SEQ ID NO: 474191 - DNA, 30 bp, Artificial Sequence
  Synthetic oligonucleotide
cacttatcatcagggtgccggagaataaag

SEQ ID NO: 474192 - DNA, 30 bp, Artificial Sequence
  Synthetic oligonucleotide
ctgcgcctaagcgcacatctagacataaag

SEQ ID NO: 474193 - DNA, 30 bp, Artificial Sequence
  Synthetic oligonucleotide
ggacccccgcccgggcgtccgaccataaag

SEQ ID NO: 474194 - DNA, 30 bp, Artificial Sequence
  Synthetic oligonucleotide
tatgtatatcgagtggtgcgccgcataaag

SEQ ID NO: 474195 - DNA, 30 bp, Artificial Sequence
  Synthetic oligonucleotide
tattactaccccggacctgacggcataaag

SEQ ID NO: 474196 - DNA, 30 bp, Artificial Sequence
  Synthetic oligonucleotide
tgtgtggaaagattcaacgcatagataaag

SEQ ID NO: 474197 - DNA, 30 bp, Artificial Sequence
  Synthetic oligonucleotide
taaataagagttggccgacgtaaactaaag

SEQ ID NO: 474198 - DNA, 30 bp, Artificial Sequence
  Synthetic oligonucleotide
gtcggagtaaacttaggtagtttactaaag

SEQ ID NO: 474199 - DNA, 30 bp, Artificial Sequence
  Synthetic oligonucleotide
caatgctaatggcaattgggcacgctaaag

SEQ ID NO: 474200 - DNA, 30 bp, Artificial Sequence
  Synthetic oligonucleotide
taataattgtgatgcatactgagtctaaag

SEQ ID NO: 474201 - DNA, 30 bp, Artificial Sequence
  Synthetic oligonucleotide
gttaactctactagccttcgcagagtaaag

SEQ ID NO: 474202 - DNA, 30 bp, Artificial Sequence
  Synthetic oligonucleotide
tccctatggcccagatatgggtgagtaaag

SEQ ID NO: 474203 - DNA, 30 bp, Artificial Sequence
  Synthetic oligonucleotide
acaaacaacctttttctgttatccgtaaag

SEQ ID NO: 474204 - DNA, 30 bp, Artificial Sequence
  Synthetic oligonucleotide
acctgttgttcttacacggcaccggtaaag

SEQ ID NO: 474205 - DNA, 30 bp, Artificial Sequence
  Synthetic oligonucleotide
gggtatggaatggtagtgccatcggtaaag

SEQ ID NO: 474206 - DNA, 30 bp, Artificial Sequence
  Synthetic oligonucleotide
gcatctatttttggcgcttggcgggtaaag

SEQ ID NO: 474207 - DNA, 30 bp, Artificial Sequence
  Synthetic oligonucleotide
ggttttagtgggtgcgaggttgtggtaaag

SEQ ID NO: 474208 - DNA, 30 bp, Artificial Sequence
  Synthetic oligonucleotide
agtcacgccagcgcgtttagaattgtaaag

SEQ ID NO: 474209 - DNA, 30 bp, Artificial Sequence
  Synthetic oligonucleotide
tctcccttgcaatcaggaataccattaaag

SEQ ID NO: 474210 - DNA, 30 bp, Artificial Sequence
  Synthetic oligonucleotide
tatttggcgtgacctttagtgagattaaag

SEQ ID NO: 474211 - DNA, 30 bp, Artificial Sequence
  Synthetic oligonucleotide
gcaattatatatcaatggtgggtattaaag

SEQ ID NO: 474212 - DNA, 30 bp, Artificial Sequence
  Synthetic oligonucleotide
ccacccaagatttcggtggtgaacttaaag

SEQ ID NO: 474213 - DNA, 30 bp, Artificial Sequence
  Synthetic oligonucleotide
attattggtgtgagcgtctcgtgtttaaag

SEQ ID NO: 474214 - DNA, 30 bp, Artificial Sequence
  Synthetic oligonucleotide
ggttaaacgcaggatctacgcttaaacaag

SEQ ID NO: 474215 - DNA, 30 bp, Artificial Sequence
  Synthetic oligonucleotide
ggtttttatatattgttgcggaccaacaag

SEQ ID NO: 474216 - DNA, 30 bp, Artificial Sequence
  Synthetic oligonucleotide
tcctgacaccgtaagattagtcagaacaag

SEQ ID NO: 474217 - DNA, 30 bp, Artificial Sequence
  Synthetic oligonucleotide
gagttcggtatcggtcagatgccgaacaag

SEQ ID NO: 474218 - DNA, 30 bp, Artificial Sequence
  Synthetic oligonucleotide
ttatgactcacgccttgcgttcataacaag

SEQ ID NO: 474219 - DNA, 30 bp, Artificial Sequence
  Synthetic oligonucleotide
agcagatcactttgatagggcgataacaag

SEQ ID NO: 474220 - DNA, 30 bp, Artificial Sequence
  Synthetic oligonucleotide
gacccctctgcacctgagcgtcgccacaag

SEQ ID NO: 474221 - DNA, 30 bp, Artificial Sequence
  Synthetic oligonucleotide
ctggggggctacagcgcggcgcaggacaag

SEQ ID NO: 474222 - DNA, 30 bp, Artificial Sequence
  Synthetic oligonucleotide
aaatctctacgttgtaaaagctaggacaag

SEQ ID NO: 474223 - DNA, 30 bp, Artificial Sequence
  Synthetic oligonucleotide
gaacggccaatgattcaactgggtgacaag

SEQ ID NO: 474224 - DNA, 30 bp, Artificial Sequence
  Synthetic oligonucleotide
gtcaggttgtgtcaaatttcgattgacaag

SEQ ID NO: 474225 - DNA, 30 bp, Artificial Sequence
  Synthetic oligonucleotide
aattccatgattgtgttcggccttgacaag

SEQ ID NO: 474226 - DNA, 30 bp, Artificial Sequence
  Synthetic oligonucleotide
ttcgcccggtttaggacatcgatatacaag

SEQ ID NO: 474227 - DNA, 30 bp, Artificial Sequence
  Synthetic oligonucleotide
taagttcaaggtccaggaaatgcgtacaag

SEQ ID NO: 474228 - DNA, 30 bp, Artificial Sequence
  Synthetic oligonucleotide
gattaactgtacttgcttaagctgtacaag

SEQ ID NO: 474229 - DNA, 30 bp, Artificial Sequence
  Synthetic oligonucleotide
ctccgtgcaaaagcgcgctctgcttacaag

SEQ ID NO: 474230 - DNA, 30 bp, Artificial Sequence
  Synthetic oligonucleotide
aaccagtctattattcctatctcttacaag

SEQ ID NO: 474231 - DNA, 30 bp, Artificial Sequence
  Synthetic oligonucleotide
catgtacgagcacatatcggtttttacaag

SEQ ID NO: 474232 - DNA, 30 bp, Artificial Sequence
  Synthetic oligonucleotide
cgggcgggccttcttacgcaacacaccaag

SEQ ID NO: 474233 - DNA, 30 bp, Artificial Sequence
  Synthetic oligonucleotide
gagtttatcatcttcgatcatagcaccaag

SEQ ID NO: 474234 - DNA, 30 bp, Artificial Sequence
  Synthetic oligonucleotide
tgcttaccggtcgacgtgttcacacccaag

SEQ ID NO: 474235 - DNA, 30 bp, Artificial Sequence
  Synthetic oligonucleotide
tttaggcacttcttcatctttacacccaag

SEQ ID NO: 474236 - DNA, 30 bp, Artificial Sequence
  Synthetic oligonucleotide
tcaaggtggggcgcttttggcacgcccaag

SEQ ID NO: 474237 - DNA, 30 bp, Artificial Sequence
  Synthetic oligonucleotide
aaattagagagcgtcgcttgctatcccaag

SEQ ID NO: 474238 - DNA, 30 bp, Artificial Sequence
  Synthetic oligonucleotide
tcaactcggatatacatcggggctcccaag

SEQ ID NO: 474239 - DNA, 30 bp, Artificial Sequence
  Synthetic oligonucleotide
gagtatatagggcatactaaagtcgccaag

SEQ ID NO: 474240 - DNA, 30 bp, Artificial Sequence
  Synthetic oligonucleotide
ccggtaaccttcccggtggtcgcggccaag

SEQ ID NO: 474241 - DNA, 30 bp, Artificial Sequence
  Synthetic oligonucleotide
aggttttttggcttgagggtacctgccaag

SEQ ID NO: 474242 - DNA, 30 bp, Artificial Sequence
  Synthetic oligonucleotide
tccaaaccatccactcttgcagcgtccaag

SEQ ID NO: 474243 - DNA, 30 bp, Artificial Sequence
  Synthetic oligonucleotide
acgtatcagttcaacagctttaattccaag

SEQ ID NO: 474244 - DNA, 30 bp, Artificial Sequence
  Synthetic oligonucleotide
ttcagtaaattgggcccacaacaaagcaag

SEQ ID NO: 474245 - DNA, 30 bp, Artificial Sequence
  Synthetic oligonucleotide
ctgcttatttagtattgaagcttaagcaag

SEQ ID NO: 474246 - DNA, 30 bp, Artificial Sequence
  Synthetic oligonucleotide
acgtgtacgtatcgtcagatggacagcaag

SEQ ID NO: 474247 - DNA, 30 bp, Artificial Sequence
  Synthetic oligonucleotide
agttgttcaattgtgcggcgcgtcagcaag

SEQ ID NO: 474248 - DNA, 30 bp, Artificial Sequence
  Synthetic oligonucleotide
gtcttttacaatttgagagttctgagcaag

SEQ ID NO: 474249 - DNA, 30 bp, Artificial Sequence
  Synthetic oligonucleotide
gaaagttaccgtgttgataaggaacgcaag

SEQ ID NO: 474250 - DNA, 30 bp, Artificial Sequence
  Synthetic oligonucleotide
ccacggcgatatacgaacgcagtacgcaag

SEQ ID NO: 474251 - DNA, 30 bp, Artificial Sequence
  Synthetic oligonucleotide
gcgaaggcaccagacgactagccgcgcaag

SEQ ID NO: 474252 - DNA, 30 bp, Artificial Sequence
  Synthetic oligonucleotide
tagtatgttattgaagatcgtaaaggcaag

SEQ ID NO: 474253 - DNA, 30 bp, Artificial Sequence
  Synthetic oligonucleotide
acccactgagatctttcgaccggcggcaag

SEQ ID NO: 474254 - DNA, 30 bp, Artificial Sequence
  Synthetic oligonucleotide
ttaagcctagggtcctctcggtgcggcaag

SEQ ID NO: 474255 - DNA, 30 bp, Artificial Sequence
  Synthetic oligonucleotide
ttgcaaaaaatgtgcactgctacatgcaag

SEQ ID NO: 474256 - DNA, 30 bp, Artificial Sequence
  Synthetic oligonucleotide
gcactcggacggcgcaaagcccgatgcaag

SEQ ID NO: 474257 - DNA, 30 bp, Artificial Sequence
  Synthetic oligonucleotide
cgaggaaaattatcacttatgggatgcaag

SEQ ID NO: 474258 - DNA, 30 bp, Artificial Sequence
  Synthetic oligonucleotide
ccgaggcagaagtttcgtgacgcctgcaag

SEQ ID NO: 474259 - DNA, 30 bp, Artificial Sequence
  Synthetic oligonucleotide
cctggaaaattgggtatcactctgtgcaag

SEQ ID NO: 474260 - DNA, 30 bp, Artificial Sequence
  Synthetic oligonucleotide
gacccaagggcaggacacgatccaatcaag

SEQ ID NO: 474261 - DNA, 30 bp, Artificial Sequence
  Synthetic oligonucleotide
gtcagggaccttcgtcggcgagtaatcaag

SEQ ID NO: 474262 - DNA, 30 bp, Artificial Sequence
  Synthetic oligonucleotide
cacaatgagagaaggtgactctagatcaag

SEQ ID NO: 474263 - DNA, 30 bp, Artificial Sequence
  Synthetic oligonucleotide
aagcctagatttcatatatccgatatcaag

SEQ ID NO: 474264 - DNA, 30 bp, Artificial Sequence
  Synthetic oligonucleotide
gatcacggcgacctttctctttatatcaag

SEQ ID NO: 474265 - DNA, 30 bp, Artificial Sequence
  Synthetic oligonucleotide
aacgatggtaactgcagtacctttatcaag

SEQ ID NO: 474266 - DNA, 30 bp, Artificial Sequence
  Synthetic oligonucleotide
actgcaagctttcgcacaccgtttatcaag

SEQ ID NO: 474267 - DNA, 30 bp, Artificial Sequence
  Synthetic oligonucleotide
cttgctgaccccgcagaggggtttatcaag

SEQ ID NO: 474268 - DNA, 30 bp, Artificial Sequence
  Synthetic oligonucleotide
tatcgcattgctcggaatatgacactcaag

SEQ ID NO: 474269 - DNA, 30 bp, Artificial Sequence
  Synthetic oligonucleotide
ttatgattccgcgagcgctcacacctcaag

SEQ ID NO: 474270 - DNA, 30 bp, Artificial Sequence
  Synthetic oligonucleotide
aaaaaaacgtgtagaagacagaggctcaag

SEQ ID NO: 474271 - DNA, 30 bp, Artificial Sequence
  Synthetic oligonucleotide
cggacgagatggcggcatatcgtgctcaag

SEQ ID NO: 474272 - DNA, 30 bp, Artificial Sequence
  Synthetic oligonucleotide
cctctaggctcatggcgcacgactctcaag

SEQ ID NO: 474273 - DNA, 30 bp, Artificial Sequence
  Synthetic oligonucleotide
aaactacgggaacaaagcaagtgtctcaag

SEQ ID NO: 474274 - DNA, 30 bp, Artificial Sequence
  Synthetic oligonucleotide
ttagtactcgatatccgccagaaagtcaag

SEQ ID NO: 474275 - DNA, 30 bp, Artificial Sequence
  Synthetic oligonucleotide
cctctgggagacgttgggctgacagtcaag

SEQ ID NO: 474276 - DNA, 30 bp, Artificial Sequence
  Synthetic oligonucleotide
cttaagtttgagagatgccgcagagtcaag

SEQ ID NO: 474277 - DNA, 30 bp, Artificial Sequence
  Synthetic oligonucleotide
tgatgtgctctgatgtcatgtgccgtcaag

SEQ ID NO: 474278 - DNA, 30 bp, Artificial Sequence
  Synthetic oligonucleotide
tttgctagaatgaagcaatgatgggtcaag

SEQ ID NO: 474279 - DNA, 30 bp, Artificial Sequence
  Synthetic oligonucleotide
caagaacctggtggcttgtacccattcaag

SEQ ID NO: 474280 - DNA, 30 bp, Artificial Sequence
  Synthetic oligonucleotide
cgtaccggcggaggcttacaaatattcaag

SEQ ID NO: 474281 - DNA, 30 bp, Artificial Sequence
  Synthetic oligonucleotide
gtagagagtgtgtagaacgcgcgcttcaag

SEQ ID NO: 474282 - DNA, 30 bp, Artificial Sequence
  Synthetic oligonucleotide
atccgagggatttctaacgctaagttcaag

SEQ ID NO: 474283 - DNA, 30 bp, Artificial Sequence
  Synthetic oligonucleotide
gagggatgcctgggcgcgcggtcgttcaag

SEQ ID NO: 474284 - DNA, 30 bp, Artificial Sequence
  Synthetic oligonucleotide
gcttctgaaattacgtgcaaatatttcaag

SEQ ID NO: 474285 - DNA, 30 bp, Artificial Sequence
  Synthetic oligonucleotide
gacccatggttctacttgaactcaaagaag

SEQ ID NO: 474286 - DNA, 30 bp, Artificial Sequence
  Synthetic oligonucleotide
cttacattcaggtgtaatttgacgaagaag

SEQ ID NO: 474287 - DNA, 30 bp, Artificial Sequence
  Synthetic oligonucleotide
gccaagctggacatggtaagcgtgaagaag

SEQ ID NO: 474288 - DNA, 30 bp, Artificial Sequence
  Synthetic oligonucleotide
aaatgttttgggagcaataacttgaagaag

SEQ ID NO: 474289 - DNA, 30 bp, Artificial Sequence
  Synthetic oligonucleotide
ttctgagcagtcctcatattcaataagaag

SEQ ID NO: 474290 - DNA, 30 bp, Artificial Sequence
  Synthetic oligonucleotide
aaatctacagtgtatggtttatctaagaag

SEQ ID NO: 474291 - DNA, 30 bp, Artificial Sequence
  Synthetic oligonucleotide
gcctctgagttaactgaaatagaccagaag

SEQ ID NO: 474292 - DNA, 30 bp, Artificial Sequence
  Synthetic oligonucleotide
aaagcacagttggacgcgggcccccagaag

SEQ ID NO: 474293 - DNA, 30 bp, Artificial Sequence
  Synthetic oligonucleotide
atacacccctctgtgggtgaatggcagaag

SEQ ID NO: 474294 - DNA, 30 bp, Artificial Sequence
  Synthetic oligonucleotide
attcttttagcctagttgatgagtcagaag

SEQ ID NO: 474295 - DNA, 30 bp, Artificial Sequence
  Synthetic oligonucleotide
atctacggagccacggcaggctacgagaag

SEQ ID NO: 474296 - DNA, 30 bp, Artificial Sequence
  Synthetic oligonucleotide
gaagtgcataatgtcatgataagggagaag

SEQ ID NO: 474297 - DNA, 30 bp, Artificial Sequence
  Synthetic oligonucleotide
accgttcaatgtagaccacctcatgagaag

SEQ ID NO: 474298 - DNA, 30 bp, Artificial Sequence
  Synthetic oligonucleotide
agtttgatcacctgaatgctataatagaag

SEQ ID NO: 474299 - DNA, 30 bp, Artificial Sequence
  Synthetic oligonucleotide
tggactttgacgcacagaaacgcatagaag

SEQ ID NO: 474300 - DNA, 30 bp, Artificial Sequence
  Synthetic oligonucleotide
actatgcgcatctttctatgcgcgtagaag

SEQ ID NO: 474301 - DNA, 30 bp, Artificial Sequence
  Synthetic oligonucleotide
agtaacttttttcatgaaggactgtagaag

SEQ ID NO: 474302 - DNA, 30 bp, Artificial Sequence
  Synthetic oligonucleotide
gtacaaagatgatgatcacaagtaacgaag

SEQ ID NO: 474303 - DNA, 30 bp, Artificial Sequence
  Synthetic oligonucleotide
cataagcggtatacgccctatagcacgaag

SEQ ID NO: 474304 - DNA, 30 bp, Artificial Sequence
  Synthetic oligonucleotide
tatagacatagttgagtaactagcacgaag

SEQ ID NO: 474305 - DNA, 30 bp, Artificial Sequence
  Synthetic oligonucleotide
ttccgctatcgtctcttgtatcagacgaag

SEQ ID NO: 474306 - DNA, 30 bp, Artificial Sequence
  Synthetic oligonucleotide
tactctgatgatcgctcttataggacgaag

SEQ ID NO: 474307 - DNA, 30 bp, Artificial Sequence
  Synthetic oligonucleotide
acgctagggcacgtaatgcgagtgacgaag

SEQ ID NO: 474308 - DNA, 30 bp, Artificial Sequence
  Synthetic oligonucleotide
tgtttgcgaactaaaggactcgatacgaag

SEQ ID NO: 474309 - DNA, 30 bp, Artificial Sequence
  Synthetic oligonucleotide
gcgactcgtctaagccttagagttacgaag

SEQ ID NO: 474310 - DNA, 30 bp, Artificial Sequence
  Synthetic oligonucleotide
cacggtgcgctaaaattatggcaaccgaag

SEQ ID NO: 474311 - DNA, 30 bp, Artificial Sequence
  Synthetic oligonucleotide
ctcgacttcgagtcgtgatgcggaccgaag

SEQ ID NO: 474312 - DNA, 30 bp, Artificial Sequence
  Synthetic oligonucleotide
atgggcgggtccccctaatgaatcccgaag

SEQ ID NO: 474313 - DNA, 30 bp, Artificial Sequence
  Synthetic oligonucleotide
taatgtttaagacacatcgcactgccgaag

SEQ ID NO: 474314 - DNA, 31 bp, Artificial Sequence
  Synthetic oligonucleotide
atgaagactttgcacagttacgcgtccgaag

SEQ ID NO: 474315 - DNA, 30 bp, Artificial Sequence
  Synthetic oligonucleotide
agcgaactcgtccgtgcgacgcaagcgaag

SEQ ID NO: 474316 - DNA, 30 bp, Artificial Sequence
  Synthetic oligonucleotide
gctaataccacacaggagaacggagcgaag

SEQ ID NO: 474317 - DNA, 30 bp, Artificial Sequence
  Synthetic oligonucleotide
gcgtagaccacaattaggtatatagcgaag

SEQ ID NO: 474318 - DNA, 30 bp, Artificial Sequence
  Synthetic oligonucleotide
gcccatgactaaagcggcatatccgcgaag

SEQ ID NO: 474319 - DNA, 30 bp, Artificial Sequence
  Synthetic oligonucleotide
tgtgctatgtcctgggagggttaggcgaag

SEQ ID NO: 474320 - DNA, 30 bp, Artificial Sequence
  Synthetic oligonucleotide
tagtcttacacaccgcccagatagtcgaag

SEQ ID NO: 474321 - DNA, 30 bp, Artificial Sequence
  Synthetic oligonucleotide
cacgtatcccttctgcacttggaaaggaag

SEQ ID NO: 474322 - DNA, 30 bp, Artificial Sequence
  Synthetic oligonucleotide
tttccaacctgttacagcggatcaaggaag

SEQ ID NO: 474323 - DNA, 30 bp, Artificial Sequence
  Synthetic oligonucleotide
tacgctgcatctctggcttagtacaggaag

SEQ ID NO: 474324 - DNA, 30 bp, Artificial Sequence
  Synthetic oligonucleotide
ctgatgcagtggtattcctgggtcaggaag

SEQ ID NO: 474325 - DNA, 30 bp, Artificial Sequence
  Synthetic oligonucleotide
acgccgaacctgatttgggaacgacggaag

SEQ ID NO: 474326 - DNA, 30 bp, Artificial Sequence
  Synthetic oligonucleotide
ttaatactcctgccgccggccggacggaag

SEQ ID NO: 474327 - DNA, 30 bp, Artificial Sequence
  Synthetic oligonucleotide
atatgtataattcccgtttagaagcggaag

SEQ ID NO: 474328 - DNA, 30 bp, Artificial Sequence
  Synthetic oligonucleotide
ttttactatgctctgtaattgtggcggaag

SEQ ID NO: 474329 - DNA, 30 bp, Artificial Sequence
  Synthetic oligonucleotide
gaatttgtatggtatagattttgagggaag

SEQ ID NO: 474330 - DNA, 30 bp, Artificial Sequence
  Synthetic oligonucleotide
tgaatgatacacagacggtcgggtgggaag

SEQ ID NO: 474331 - DNA, 30 bp, Artificial Sequence
  Synthetic oligonucleotide
aaaattgcttcatctaaataaacctggaag

SEQ ID NO: 474332 - DNA, 30 bp, Artificial Sequence
  Synthetic oligonucleotide
cgtgtcaatagcaagcttcgcggttggaag

SEQ ID NO: 474333 - DNA, 30 bp, Artificial Sequence
  Synthetic oligonucleotide
gtcttttgcgaagcaccgttggtttggaag

SEQ ID NO: 474334 - DNA, 30 bp, Artificial Sequence
  Synthetic oligonucleotide
tagacccggtgagcatatgaattaatgaag

SEQ ID NO: 474335 - DNA, 30 bp, Artificial Sequence
  Synthetic oligonucleotide
ataagggcgcgcgtggcgccgccgatgaag

SEQ ID NO: 474336 - DNA, 30 bp, Artificial Sequence
  Synthetic oligonucleotide
taggtcggcacatgagatggggcgatgaag

SEQ ID NO: 474337 - DNA, 30 bp, Artificial Sequence
  Synthetic oligonucleotide
catcatccaagtgactttggaaggatgaag

SEQ ID NO: 474338 - DNA, 30 bp, Artificial Sequence
  Synthetic oligonucleotide
tacgcagagaactttcgattacggatgaag

SEQ ID NO: 474339 - DNA, 30 bp, Artificial Sequence
  Synthetic oligonucleotide
ctaaccctaagactgccgcacgtgatgaag

SEQ ID NO: 474340 - DNA, 30 bp, Artificial Sequence
  Synthetic oligonucleotide
agcccggcagtcacgcgcttcttgatgaag

SEQ ID NO: 474341 - DNA, 25 bp, Artificial Sequence
  Synthetic oligonucleotide
cttgagcttttcgatagttatgaag

SEQ ID NO: 474342 - DNA, 30 bp, Artificial Sequence
  Synthetic oligonucleotide
acgcagacctgcatcagtagtgaactgaag

SEQ ID NO: 474343 - DNA, 30 bp, Artificial Sequence
  Synthetic oligonucleotide
gtatttgcggacgagcggtacctactgaag

SEQ ID NO: 474344 - DNA, 30 bp, Artificial Sequence
  Synthetic oligonucleotide
tcaacctacccagtgagcttggcgctgaag

SEQ ID NO: 474345 - DNA, 30 bp, Artificial Sequence
  Synthetic oligonucleotide
gcttttacattttctaagcaagttctgaag

SEQ ID NO: 474346 - DNA, 30 bp, Artificial Sequence
  Synthetic oligonucleotide
tacttgaggcataacttactctcagtgaag

SEQ ID NO: 474347 - DNA, 30 bp, Artificial Sequence
  Synthetic oligonucleotide
cgaagactagagacctgataagaggtgaag

SEQ ID NO: 474348 - DNA, 30 bp, Artificial Sequence
  Synthetic oligonucleotide
ttttcggaacggtgtgagccggaggtgaag

SEQ ID NO: 474349 - DNA, 30 bp, Artificial Sequence
  Synthetic oligonucleotide
cttcaaagttttttgatagggtaggtgaag

SEQ ID NO: 474350 - DNA, 29 bp, Artificial Sequence
  Synthetic oligonucleotide
tgctacatccgaagaagtgcggggtgaag

SEQ ID NO: 474351 - DNA, 30 bp, Artificial Sequence
  Synthetic oligonucleotide
aaaaacttctcgtacataaatcatgtgaag

SEQ ID NO: 474352 - DNA, 30 bp, Artificial Sequence
  Synthetic oligonucleotide
gggcgttgacgagcacatgggcaattgaag

SEQ ID NO: 474353 - DNA, 30 bp, Artificial Sequence
  Synthetic oligonucleotide
gccactaagtaacgcgctaaacgcttgaag

SEQ ID NO: 474354 - DNA, 30 bp, Artificial Sequence
  Synthetic oligonucleotide
aagtaaacacgttgactctattttttgaag

SEQ ID NO: 474355 - DNA, 30 bp, Artificial Sequence
  Synthetic oligonucleotide
ccactcataagatgatatctttttttgaag

SEQ ID NO: 474356 - DNA, 30 bp, Artificial Sequence
  Synthetic oligonucleotide
atgccctggcattcagtgtcttgaaataag

SEQ ID NO: 474357 - DNA, 30 bp, Artificial Sequence
  Synthetic oligonucleotide
tggagacagcacattaaatctatcaataag

SEQ ID NO: 474358 - DNA, 30 bp, Artificial Sequence
  Synthetic oligonucleotide
ggcagctacttcggtgctactaagaataag

SEQ ID NO: 474359 - DNA, 30 bp, Artificial Sequence
  Synthetic oligonucleotide
cttgctccattttgtcggtccacgaataag

SEQ ID NO: 474360 - DNA, 30 bp, Artificial Sequence
  Synthetic oligonucleotide
ccgtcaacgggttgaagtttgacgaataag

SEQ ID NO: 474361 - DNA, 27 bp, Artificial Sequence
  Synthetic oligonucleotide
ctggctagtataccttcgccgaataag

SEQ ID NO: 474362 - DNA, 30 bp, Artificial Sequence
  Synthetic oligonucleotide
ctttgccgtcggacgggtactccgaataag

SEQ ID NO: 474363 - DNA, 30 bp, Artificial Sequence
  Synthetic oligonucleotide
aatgtccgtccatactacgtggggaataag

SEQ ID NO: 474364 - DNA, 30 bp, Artificial Sequence
  Synthetic oligonucleotide
aatactcatgtgtttcaactggtgaataag

SEQ ID NO: 474365 - DNA, 30 bp, Artificial Sequence
  Synthetic oligonucleotide
ctttctagagtaattttccggccacataag

SEQ ID NO: 474366 - DNA, 30 bp, Artificial Sequence
  Synthetic oligonucleotide
ttcggcgttcgcttcacagtattccataag

SEQ ID NO: 474367 - DNA, 30 bp, Artificial Sequence
  Synthetic oligonucleotide
aaatccccgctctgtccgcataagcataag

SEQ ID NO: 474368 - DNA, 30 bp, Artificial Sequence
  Synthetic oligonucleotide
ttcgcggcgattataatgatatatcataag

SEQ ID NO: 474369 - DNA, 30 bp, Artificial Sequence
  Synthetic oligonucleotide
tgttgttcaatgtgtcagtcctgtcataag

SEQ ID NO: 474370 - DNA, 30 bp, Artificial Sequence
  Synthetic oligonucleotide
cgctaacgcacctaaatcagtatatataag

SEQ ID NO: 474371 - DNA, 31 bp, Artificial Sequence
  Synthetic oligonucleotide
agtttcattttaagctttggatgtatataag

SEQ ID NO: 474372 - DNA, 30 bp, Artificial Sequence
  Synthetic oligonucleotide
tatatcatgttgcgtaaacttgtctataag

SEQ ID NO: 474373 - DNA, 30 bp, Artificial Sequence
  Synthetic oligonucleotide
gcccttgatcatcagttgtacgggtataag

SEQ ID NO: 474374 - DNA, 30 bp, Artificial Sequence
  Synthetic oligonucleotide
attaatgtgtgacagtaaagggtgtataag

SEQ ID NO: 474375 - DNA, 30 bp, Artificial Sequence
  Synthetic oligonucleotide
tgcggtatgccctctagacatttgtataag

SEQ ID NO: 474376 - DNA, 30 bp, Artificial Sequence
  Synthetic oligonucleotide
taattgtttccttcttacgtgtattataag

SEQ ID NO: 474377 - DNA, 30 bp, Artificial Sequence
  Synthetic oligonucleotide
accaccgggttgccggcggctagcactaag

SEQ ID NO: 474378 - DNA, 30 bp, Artificial Sequence
  Synthetic oligonucleotide
acttcgcatgggctcggttaacctactaag

SEQ ID NO: 474379 - DNA, 30 bp, Artificial Sequence
  Synthetic oligonucleotide
gtttttaacgtgtttattttaagtactaag

SEQ ID NO: 474380 - DNA, 30 bp, Artificial Sequence
  Synthetic oligonucleotide
taatgttaaacccagggctacacacctaag

SEQ ID NO: 474381 - DNA, 30 bp, Artificial Sequence
  Synthetic oligonucleotide
gttaccatctgtctatgtaaaggacctaag

SEQ ID NO: 474382 - DNA, 30 bp, Artificial Sequence
  Synthetic oligonucleotide
tttgtatgaaagctaaatttattccctaag

SEQ ID NO: 474383 - DNA, 30 bp, Artificial Sequence
  Synthetic oligonucleotide
gtaccccgggacctatttatgcggcctaag

SEQ ID NO: 474384 - DNA, 30 bp, Artificial Sequence
  Synthetic oligonucleotide
tataattatacggtcggcgtaaatcctaag

SEQ ID NO: 474385 - DNA, 30 bp, Artificial Sequence
  Synthetic oligonucleotide
ttccattcttgaacccaggcacatcctaag

SEQ ID NO: 474386 - DNA, 30 bp, Artificial Sequence
  Synthetic oligonucleotide
tattagtgacattccgtacctagtcctaag

SEQ ID NO: 474387 - DNA, 30 bp, Artificial Sequence
  Synthetic oligonucleotide
gagggttaaaatactccgggtcttcctaag

SEQ ID NO: 474388 - DNA, 30 bp, Artificial Sequence
  Synthetic oligonucleotide
ttattatacgtgtatggcacggcagctaag

SEQ ID NO: 474389 - DNA, 30 bp, Artificial Sequence
  Synthetic oligonucleotide
accggccccgatccctgtacgtacgctaag

SEQ ID NO: 474390 - DNA, 30 bp, Artificial Sequence
  Synthetic oligonucleotide
gcgtagcggagcgatcatcactccgctaag

SEQ ID NO: 474391 - DNA, 30 bp, Artificial Sequence
  Synthetic oligonucleotide
cctcccccggttggttatgaagtcgctaag

SEQ ID NO: 474392 - DNA, 27 bp, Artificial Sequence
  Synthetic oligonucleotide
aaatcaacataagacttataggctaag

SEQ ID NO: 474393 - DNA, 30 bp, Artificial Sequence
  Synthetic oligonucleotide
ggggccgcctttcgcacagccgtggctaag

SEQ ID NO: 474394 - DNA, 30 bp, Artificial Sequence
  Synthetic oligonucleotide
attttcctagcaatcgacccctatgctaag

SEQ ID NO: 474395 - DNA, 30 bp, Artificial Sequence
  Synthetic oligonucleotide
acagcctttaagtagcgtacgcgatctaag

SEQ ID NO: 474396 - DNA, 30 bp, Artificial Sequence
  Synthetic oligonucleotide
ggtggctagacacgacttcagccgtctaag

SEQ ID NO: 474397 - DNA, 30 bp, Artificial Sequence
  Synthetic oligonucleotide
gatacgggccccggatatcgagggtctaag

SEQ ID NO: 474398 - DNA, 30 bp, Artificial Sequence
  Synthetic oligonucleotide
agcaattctactaacgcgggcccaagtaag

SEQ ID NO: 474399 - DNA, 30 bp, Artificial Sequence
  Synthetic oligonucleotide
acccatttcataccgtctgattccagtaag

SEQ ID NO: 474400 - DNA, 30 bp, Artificial Sequence
  Synthetic oligonucleotide
gagtcctgggatttaaagcttaggagtaag

SEQ ID NO: 474401 - DNA, 30 bp, Artificial Sequence
  Synthetic oligonucleotide
agcttttcaaccacccgaatggctagtaag

SEQ ID NO: 474402 - DNA, 30 bp, Artificial Sequence
  Synthetic oligonucleotide
ggcgcagcgctattcggtaaccgtagtaag

SEQ ID NO: 474403 - DNA, 30 bp, Artificial Sequence
  Synthetic oligonucleotide
aggttttttaagtcatgttgctttagtaag

SEQ ID NO: 474404 - DNA, 30 bp, Artificial Sequence
  Synthetic oligonucleotide
ctcttcagttccagataggctatccgtaag

SEQ ID NO: 474405 - DNA, 30 bp, Artificial Sequence
  Synthetic oligonucleotide
tgccggtggcactacagagcttggcgtaag

SEQ ID NO: 474406 - DNA, 30 bp, Artificial Sequence
  Synthetic oligonucleotide
ccacatatcggttccgtaggcaaaggtaag

SEQ ID NO: 474407 - DNA, 30 bp, Artificial Sequence
  Synthetic oligonucleotide
attgggcattgcggtttgcgaacaggtaag

SEQ ID NO: 474408 - DNA, 30 bp, Artificial Sequence
  Synthetic oligonucleotide
gcacaagtcggcatgtcatataacggtaag

SEQ ID NO: 474409 - DNA, 30 bp, Artificial Sequence
  Synthetic oligonucleotide
agccttctaagtggttaggggcacggtaag

SEQ ID NO: 474410 - DNA, 30 bp, Artificial Sequence
  Synthetic oligonucleotide
cattacgccacgtgtggcttggttggtaag

SEQ ID NO: 474411 - DNA, 30 bp, Artificial Sequence
  Synthetic oligonucleotide
ggacggagcgaaacggaggaccaatgtaag

SEQ ID NO: 474412 - DNA, 30 bp, Artificial Sequence
  Synthetic oligonucleotide
ctatctgtcttccagtcgcgcacatgtaag

SEQ ID NO: 474413 - DNA, 30 bp, Artificial Sequence
  Synthetic oligonucleotide
tcgcagtttaatggtacgtaagcctgtaag

SEQ ID NO: 474414 - DNA, 30 bp, Artificial Sequence
  Synthetic oligonucleotide
ctactttcaaaattggagtttctgtgtaag

SEQ ID NO: 474415 - DNA, 30 bp, Artificial Sequence
  Synthetic oligonucleotide
ctgtcctcgctttgaagctctaaaattaag

SEQ ID NO: 474416 - DNA, 30 bp, Artificial Sequence
  Synthetic oligonucleotide
atgggcacgtaggtactatatataattaag

SEQ ID NO: 474417 - DNA, 30 bp, Artificial Sequence
  Synthetic oligonucleotide
aggtatgaagcagtacatgcagccattaag

SEQ ID NO: 474418 - DNA, 30 bp, Artificial Sequence
  Synthetic oligonucleotide
ctctatactgacatatttggaaagattaag

SEQ ID NO: 474419 - DNA, 30 bp, Artificial Sequence
  Synthetic oligonucleotide
tgaaagccagagagggagtcgaggattaag

SEQ ID NO: 474420 - DNA, 30 bp, Artificial Sequence
  Synthetic oligonucleotide
gcaccatacgctctatctgccatgattaag

SEQ ID NO: 474421 - DNA, 30 bp, Artificial Sequence
  Synthetic oligonucleotide
tcttatggcaaaagggaactgtgtattaag

SEQ ID NO: 474422 - DNA, 30 bp, Artificial Sequence
  Synthetic oligonucleotide
ccaattaatttgctaatgtagtcacttaag

SEQ ID NO: 474423 - DNA, 30 bp, Artificial Sequence
  Synthetic oligonucleotide
tacggctttgcttacagagcccaccttaag

SEQ ID NO: 474424 - DNA, 30 bp, Artificial Sequence
  Synthetic oligonucleotide
attggtccaattggtgccgaattccttaag

SEQ ID NO: 474425 - DNA, 30 bp, Artificial Sequence
  Synthetic oligonucleotide
atgtgattatacgcggcatatcctcttaag

SEQ ID NO: 474426 - DNA, 30 bp, Artificial Sequence
  Synthetic oligonucleotide
ggtaacttctacctccgtggtgttcttaag

SEQ ID NO: 474427 - DNA, 30 bp, Artificial Sequence
  Synthetic oligonucleotide
gccgtgggagagaggaattggacagttaag

SEQ ID NO: 474428 - DNA, 30 bp, Artificial Sequence
  Synthetic oligonucleotide
tgaagggtacactaaagcgcaatcgttaag

SEQ ID NO: 474429 - DNA, 30 bp, Artificial Sequence
  Synthetic oligonucleotide
ttctcaaacaagtggtcgcaacaggttaag

SEQ ID NO: 474430 - DNA, 30 bp, Artificial Sequence
  Synthetic oligonucleotide
ttcgggggatcttcggtgcatatatttaag

SEQ ID NO: 474431 - DNA, 30 bp, Artificial Sequence
  Synthetic oligonucleotide
aaggcggagtcttaatagcgagattttaag

SEQ ID NO: 474432 - DNA, 30 bp, Artificial Sequence
  Synthetic oligonucleotide
ggtcattacatgtcgcaagacacttttaag

SEQ ID NO: 474433 - DNA, 30 bp, Artificial Sequence
  Synthetic oligonucleotide
agttctcgaagcctaagtactgcttttaag

SEQ ID NO: 474434 - DNA, 30 bp, Artificial Sequence
  Synthetic oligonucleotide
gtgtacggaccagtgcagcgtctttttaag

SEQ ID NO: 474435 - DNA, 30 bp, Artificial Sequence
  Synthetic oligonucleotide
cctttcagcgtatttatcttaaaaaaacag

SEQ ID NO: 474436 - DNA, 30 bp, Artificial Sequence
  Synthetic oligonucleotide
aattaagctatgcgcgcttgagtaaaacag

SEQ ID NO: 474437 - DNA, 30 bp, Artificial Sequence
  Synthetic oligonucleotide
tatcgctgttaccgctcactatacaaacag

SEQ ID NO: 474438 - DNA, 30 bp, Artificial Sequence
  Synthetic oligonucleotide
ttgcgaccgggtggcttccaaaagaaacag

SEQ ID NO: 474439 - DNA, 30 bp, Artificial Sequence
  Synthetic oligonucleotide
tgctttcgttcattaaccgatgataaacag

SEQ ID NO: 474440 - DNA, 30 bp, Artificial Sequence
  Synthetic oligonucleotide
gatccgaaatagaaccccacgtctaaacag

SEQ ID NO: 474441 - DNA, 30 bp, Artificial Sequence
  Synthetic oligonucleotide
gcattcaacgggtactgcataagtaaacag

SEQ ID NO: 474442 - DNA, 30 bp, Artificial Sequence
  Synthetic oligonucleotide
ctacaaaccagattcagcaccagtaaacag

SEQ ID NO: 474443 - DNA, 30 bp, Artificial Sequence
  Synthetic oligonucleotide
tgtcagtcaggagctaacatatttaaacag

SEQ ID NO: 474444 - DNA, 30 bp, Artificial Sequence
  Synthetic oligonucleotide
tattaagtatagtatcaccagacacaacag

SEQ ID NO: 474445 - DNA, 30 bp, Artificial Sequence
  Synthetic oligonucleotide
aattgttatattaggaagaggggacaacag

SEQ ID NO: 474446 - DNA, 30 bp, Artificial Sequence
  Synthetic oligonucleotide
ttctttaccgaatgtctgggcacccaacag

SEQ ID NO: 474447 - DNA, 30 bp, Artificial Sequence
  Synthetic oligonucleotide
ttacgactagttcttattatactccaacag

SEQ ID NO: 474448 - DNA, 30 bp, Artificial Sequence
  Synthetic oligonucleotide
ttctttttttggtgaagtcagttagaacag

SEQ ID NO: 474449 - DNA, 30 bp, Artificial Sequence
  Synthetic oligonucleotide
gctcggaaacatatgacacattttgaacag

SEQ ID NO: 474450 - DNA, 30 bp, Artificial Sequence
  Synthetic oligonucleotide
atttagcggccaggattgagagaataacag

SEQ ID NO: 474451 - DNA, 30 bp, Artificial Sequence
  Synthetic oligonucleotide
atctgaggttataatcggctgccataacag

SEQ ID NO: 474452 - DNA, 30 bp, Artificial Sequence
  Synthetic oligonucleotide
gggccctgtatcttttacgtgccgtaacag

SEQ ID NO: 474453 - DNA, 30 bp, Artificial Sequence
  Synthetic oligonucleotide
cccaccgaaaccagattcgaatgttaacag

SEQ ID NO: 474454 - DNA, 30 bp, Artificial Sequence
  Synthetic oligonucleotide
attgggaggggcggcccaaaaaacacacag

SEQ ID NO: 474455 - DNA, 30 bp, Artificial Sequence
  Synthetic oligonucleotide
ttcatttttcaagggcggtgtggcacacag

SEQ ID NO: 474456 - DNA, 30 bp, Artificial Sequence
  Synthetic oligonucleotide
ggtgatattgttaattcatctgggacacag

SEQ ID NO: 474457 - DNA, 30 bp, Artificial Sequence
  Synthetic oligonucleotide
atttcggggtcctttcctttatatacacag

SEQ ID NO: 474458 - DNA, 30 bp, Artificial Sequence
  Synthetic oligonucleotide
agcaaaggacattacggcttatctacacag

SEQ ID NO: 474459 - DNA, 30 bp, Artificial Sequence
  Synthetic oligonucleotide
aaaagggaagtcaggtgactctgtacacag

SEQ ID NO: 474460 - DNA, 30 bp, Artificial Sequence
  Synthetic oligonucleotide
atgcaatgggagtgctgaccaaccccacag

SEQ ID NO: 474461 - DNA, 31 bp, Artificial Sequence
  Synthetic oligonucleotide
agaaagttggctccagcaatacagcccacag

SEQ ID NO: 474462 - DNA, 30 bp, Artificial Sequence
  Synthetic oligonucleotide
tcagcaaccgagcttctttgcgatccacag

SEQ ID NO: 474463 - DNA, 30 bp, Artificial Sequence
  Synthetic oligonucleotide
ctctaaatgggggttattttctatccacag

SEQ ID NO: 474464 - DNA, 30 bp, Artificial Sequence
  Synthetic oligonucleotide
ttatcctaatagtttccaccccagtcacag

SEQ ID NO: 474465 - DNA, 30 bp, Artificial Sequence
  Synthetic oligonucleotide
tctgacggcacttgatgtctagagtcacag

SEQ ID NO: 474466 - DNA, 30 bp, Artificial Sequence
  Synthetic oligonucleotide
atttatcttacgctcgtccgcgcgtcacag

SEQ ID NO: 474467 - DNA, 30 bp, Artificial Sequence
  Synthetic oligonucleotide
attttgacaataggccagtcaagttcacag

SEQ ID NO: 474468 - DNA, 30 bp, Artificial Sequence
  Synthetic oligonucleotide
cccgattcttagaatgagcgggtttcacag

SEQ ID NO: 474469 - DNA, 30 bp, Artificial Sequence
  Synthetic oligonucleotide
ctttttaaagggattattatttacagacag

SEQ ID NO: 474470 - DNA, 30 bp, Artificial Sequence
  Synthetic oligonucleotide
gttcagcaggacgcgggtgtcgtcagacag

SEQ ID NO: 474471 - DNA, 30 bp, Artificial Sequence
  Synthetic oligonucleotide
aatagattttgtcttgtggtaaagagacag

SEQ ID NO: 474472 - DNA, 30 bp, Artificial Sequence
  Synthetic oligonucleotide
tatagcggccgcacgacctgggagagacag

SEQ ID NO: 474473 - DNA, 30 bp, Artificial Sequence
  Synthetic oligonucleotide
gtagggtacagaagcgaacaattacgacag

SEQ ID NO: 474474 - DNA, 30 bp, Artificial Sequence
  Synthetic oligonucleotide
tcctttggcaattgggtatggtcgcgacag

SEQ ID NO: 474475 - DNA, 30 bp, Artificial Sequence
  Synthetic oligonucleotide
ttaggttctgcatagataacggctcgacag

SEQ ID NO: 474476 - DNA, 30 bp, Artificial Sequence
  Synthetic oligonucleotide
agtcgcacgtagcattgtgcaagtcgacag

SEQ ID NO: 474477 - DNA, 30 bp, Artificial Sequence
  Synthetic oligonucleotide
ctgccgcacctgatgcatccgggtcgacag

SEQ ID NO: 474478 - DNA, 30 bp, Artificial Sequence
  Synthetic oligonucleotide
ggctgatttggtttgtttggtgaaggacag

SEQ ID NO: 474479 - DNA, 30 bp, Artificial Sequence
  Synthetic oligonucleotide
catttcgtttattggcgctcattaggacag

SEQ ID NO: 474480 - DNA, 30 bp, Artificial Sequence
  Synthetic oligonucleotide
cggcgcagatccgcaccgtaccccggacag

SEQ ID NO: 474481 - DNA, 30 bp, Artificial Sequence
  Synthetic oligonucleotide
catgggactaccagccctgccactggacag

SEQ ID NO: 474482 - DNA, 30 bp, Artificial Sequence
  Synthetic oligonucleotide
gcgggaagtagttgaatttgtgggtgacag

SEQ ID NO: 474483 - DNA, 30 bp, Artificial Sequence
  Synthetic oligonucleotide
gttcatgttttgtgacacgcgtaaatacag

SEQ ID NO: 474484 - DNA, 30 bp, Artificial Sequence
  Synthetic oligonucleotide
gcaccgaaaaccaggcacgttctaatacag

SEQ ID NO: 474485 - DNA, 30 bp, Artificial Sequence
  Synthetic oligonucleotide
atgtataatggcccgcgcgcttatatacag

SEQ ID NO: 474486 - DNA, 30 bp, Artificial Sequence
  Synthetic oligonucleotide
aattttgtaggggaaggggccactatacag

SEQ ID NO: 474487 - DNA, 30 bp, Artificial Sequence
  Synthetic oligonucleotide
ctctgtgcggttgtccatagaccgctacag

SEQ ID NO: 474488 - DNA, 30 bp, Artificial Sequence
  Synthetic oligonucleotide
tttcattgaagtggagactaatggctacag

SEQ ID NO: 474489 - DNA, 30 bp, Artificial Sequence
  Synthetic oligonucleotide
ggctggctgatactagctgaggtagtacag

SEQ ID NO: 474490 - DNA, 30 bp, Artificial Sequence
  Synthetic oligonucleotide
gtgttactgttggcgatcagttctgtacag

SEQ ID NO: 474491 - DNA, 30 bp, Artificial Sequence
  Synthetic oligonucleotide
attgtcacacctccatacgcgtgtgtacag

SEQ ID NO: 474492 - DNA, 30 bp, Artificial Sequence
  Synthetic oligonucleotide
gatattcgtgtatgactggcagctttacag

SEQ ID NO: 474493 - DNA, 30 bp, Artificial Sequence
  Synthetic oligonucleotide
gatacggagatttttaacacgtctttacag

SEQ ID NO: 474494 - DNA, 30 bp, Artificial Sequence
  Synthetic oligonucleotide
cttgtggtggaatacgacgctagccaccag

SEQ ID NO: 474495 - DNA, 30 bp, Artificial Sequence
  Synthetic oligonucleotide
tgaaacactagtcggtagtggaatcaccag

SEQ ID NO: 474496 - DNA, 30 bp, Artificial Sequence
  Synthetic oligonucleotide
taatggtagtgtgtcgtaggccgtcaccag

SEQ ID NO: 474497 - DNA, 30 bp, Artificial Sequence
  Synthetic oligonucleotide
ggagtagtcaaggccagacgttacgaccag

SEQ ID NO: 474498 - DNA, 30 bp, Artificial Sequence
  Synthetic oligonucleotide
cccctgttcatctaaatgctccccgaccag

SEQ ID NO: 474499 - DNA, 30 bp, Artificial Sequence
  Synthetic oligonucleotide
ggttagatgaacaccctgaaagtcgaccag

SEQ ID NO: 474500 - DNA, 30 bp, Artificial Sequence
  Synthetic oligonucleotide
ttgtctgattagtttcagtacgtcgaccag

SEQ ID NO: 474501 - DNA, 30 bp, Artificial Sequence
  Synthetic oligonucleotide
tatccagggtaacttttttagacggaccag

SEQ ID NO: 474502 - DNA, 30 bp, Artificial Sequence
  Synthetic oligonucleotide
aatagaactggcacttcccgcgtggaccag

SEQ ID NO: 474503 - DNA, 30 bp, Artificial Sequence
  Synthetic oligonucleotide
tattcgactttgataaaatgtgatgaccag

SEQ ID NO: 474504 - DNA, 30 bp, Artificial Sequence
  Synthetic oligonucleotide
cccagccactgagggagctattgtgaccag

SEQ ID NO: 474505 - DNA, 30 bp, Artificial Sequence
  Synthetic oligonucleotide
cacggaaatatggctagtcgaaaataccag

SEQ ID NO: 474506 - DNA, 30 bp, Artificial Sequence
  Synthetic oligonucleotide
cctgtttatacttctagttatttctaccag

SEQ ID NO: 474507 - DNA, 30 bp, Artificial Sequence
  Synthetic oligonucleotide
ctaaactggtgtaaaacccgccggtaccag

SEQ ID NO: 474508 - DNA, 30 bp, Artificial Sequence
  Synthetic oligonucleotide
aaccttttttaggttgacgccggttaccag

SEQ ID NO: 474509 - DNA, 30 bp, Artificial Sequence
  Synthetic oligonucleotide
aaagattgtagacgcgctaacgtttaccag

SEQ ID NO: 474510 - DNA, 30 bp, Artificial Sequence
  Synthetic oligonucleotide
caccaaatctatcctggggccctcacccag

SEQ ID NO: 474511 - DNA, 30 bp, Artificial Sequence
  Synthetic oligonucleotide
cggagctcaatatatgagatcgggacccag

SEQ ID NO: 474512 - DNA, 30 bp, Artificial Sequence
  Synthetic oligonucleotide
catatagtggacgtgcgttcgtgaccccag

SEQ ID NO: 474513 - DNA, 35 bp, Artificial Sequence
  Synthetic oligonucleotide
cgccccacgagcacagtccgaacgcaagcccccag

SEQ ID NO: 474514 - DNA, 30 bp, Artificial Sequence
  Synthetic oligonucleotide
atgtgtatagtggacctttttaggccccag

SEQ ID NO: 474515 - DNA, 30 bp, Artificial Sequence
  Synthetic oligonucleotide
gctttgcgtacggcggaatggcctccccag

SEQ ID NO: 474516 - DNA, 30 bp, Artificial Sequence
  Synthetic oligonucleotide
agcactactttcccttaggggcttccccag

SEQ ID NO: 474517 - DNA, 30 bp, Artificial Sequence
  Synthetic oligonucleotide
gtaggttattgatctcccggcaaggcccag

SEQ ID NO: 474518 - DNA, 30 bp, Artificial Sequence
  Synthetic oligonucleotide
gaaactttctggaaaatacatggatcccag

SEQ ID NO: 474519 - DNA, 30 bp, Artificial Sequence
  Synthetic oligonucleotide
cccttttttcaataaaactggtcctcccag

SEQ ID NO: 474520 - DNA, 30 bp, Artificial Sequence
  Synthetic oligonucleotide
attaacggcttgggcggcaactcttcccag

SEQ ID NO: 474521 - DNA, 30 bp, Artificial Sequence
  Synthetic oligonucleotide
attccatggttgctagttgttatttcccag

SEQ ID NO: 474522 - DNA, 30 bp, Artificial Sequence
  Synthetic oligonucleotide
gagagtcttacacaacgtcgggagagccag

SEQ ID NO: 474523 - DNA, 30 bp, Artificial Sequence
  Synthetic oligonucleotide
agtctaacatactggagcgggcggagccag

SEQ ID NO: 474524 - DNA, 30 bp, Artificial Sequence
  Synthetic oligonucleotide
aaatcgctcaatgtcgaccagtcacgccag

SEQ ID NO: 474525 - DNA, 30 bp, Artificial Sequence
  Synthetic oligonucleotide
tctcacgccgaatctaaacagtgacgccag

SEQ ID NO: 474526 - DNA, 30 bp, Artificial Sequence
  Synthetic oligonucleotide
ttgtaagtgaacaggaaccgtctacgccag

SEQ ID NO: 474527 - DNA, 30 bp, Artificial Sequence
  Synthetic oligonucleotide
attaacagtcagaggcggatattacgccag

SEQ ID NO: 474528 - DNA, 30 bp, Artificial Sequence
  Synthetic oligonucleotide
ccgcaccttagggaggggcctgctcgccag

SEQ ID NO: 474529 - DNA, 30 bp, Artificial Sequence
  Synthetic oligonucleotide
caggggttcctacccctactcagtcgccag

SEQ ID NO: 474530 - DNA, 30 bp, Artificial Sequence
  Synthetic oligonucleotide
cgagttaaggtcgtcggcgctgtaggccag

SEQ ID NO: 474531 - DNA, 30 bp, Artificial Sequence
  Synthetic oligonucleotide
tcctttccttaagacctgacacgcggccag

SEQ ID NO: 474532 - DNA, 30 bp, Artificial Sequence
  Synthetic oligonucleotide
tttgtgttattcagcggtctcttcggccag

SEQ ID NO: 474533 - DNA, 30 bp, Artificial Sequence
  Synthetic oligonucleotide
taggaaggaacggagaacaggccgggccag

SEQ ID NO: 474534 - DNA, 30 bp, Artificial Sequence
  Synthetic oligonucleotide
cgtcttgacttgtctaccgtggggggccag

SEQ ID NO: 474535 - DNA, 30 bp, Artificial Sequence
  Synthetic oligonucleotide
agtgcggtggagccttgcaaggtgggccag

SEQ ID NO: 474536 - DNA, 30 bp, Artificial Sequence
  Synthetic oligonucleotide
gaatcgccacctcggagtgacaatggccag

SEQ ID NO: 474537 - DNA, 30 bp, Artificial Sequence
  Synthetic oligonucleotide
ttcctttgaaggtattatatgtctggccag

SEQ ID NO: 474538 - DNA, 30 bp, Artificial Sequence
  Synthetic oligonucleotide
gccactcgccttgccctgcctctctgccag

SEQ ID NO: 474539 - DNA, 30 bp, Artificial Sequence
  Synthetic oligonucleotide
actcgcgcgttgcacggctctaagtgccag

SEQ ID NO: 474540 - DNA, 30 bp, Artificial Sequence
  Synthetic oligonucleotide
tgaaggttttaattgggagtaaattgccag

SEQ ID NO: 474541 - DNA, 30 bp, Artificial Sequence
  Synthetic oligonucleotide
taccagaaatttttgacagtgccttgccag

SEQ ID NO: 474542 - DNA, 30 bp, Artificial Sequence
  Synthetic oligonucleotide
tagtaatcataaagttcggattcttgccag

SEQ ID NO: 474543 - DNA, 30 bp, Artificial Sequence
  Synthetic oligonucleotide
attcccgtcctaatcacagcgctaatccag

SEQ ID NO: 474544 - DNA, 30 bp, Artificial Sequence
  Synthetic oligonucleotide
agattaaaagagccgcccgtatgcatccag

SEQ ID NO: 474545 - DNA, 30 bp, Artificial Sequence
  Synthetic oligonucleotide
cgggtggtagtagcttggccctaactccag

SEQ ID NO: 474546 - DNA, 30 bp, Artificial Sequence
  Synthetic oligonucleotide
tgtattgatgccgagctgcttacactccag

SEQ ID NO: 474547 - DNA, 30 bp, Artificial Sequence
  Synthetic oligonucleotide
cgcacgatgaccagcgtaataccactccag

SEQ ID NO: 474548 - DNA, 30 bp, Artificial Sequence
  Synthetic oligonucleotide
ggctccgcgtccatgtgtgacccactccag

SEQ ID NO: 474549 - DNA, 30 bp, Artificial Sequence
  Synthetic oligonucleotide
atgtatgttactagccttggagcactccag

SEQ ID NO: 474550 - DNA, 30 bp, Artificial Sequence
  Synthetic oligonucleotide
tgtatgctagtagtatcttgctgcctccag

SEQ ID NO: 474551 - DNA, 30 bp, Artificial Sequence
  Synthetic oligonucleotide
ggatcgcgcaaaactcctaaatttctccag

SEQ ID NO: 474552 - DNA, 30 bp, Artificial Sequence
  Synthetic oligonucleotide
tcgcctaatatgaatattgtctttctccag

SEQ ID NO: 474553 - DNA, 31 bp, Artificial Sequence
  Synthetic oligonucleotide
tcgatgattacgatcccgaccgtcagtccag

SEQ ID NO: 474554 - DNA, 30 bp, Artificial Sequence
  Synthetic oligonucleotide
ggggatgccctccatgagcggtacgtccag

SEQ ID NO: 474555 - DNA, 30 bp, Artificial Sequence
  Synthetic oligonucleotide
tgggtgtggattccctaggagctcgtccag

SEQ ID NO: 474556 - DNA, 30 bp, Artificial Sequence
  Synthetic oligonucleotide
cccacctatctcgtgagacgagcggtccag

SEQ ID NO: 474557 - DNA, 30 bp, Artificial Sequence
  Synthetic oligonucleotide
cccttaaaaaaacgcttaacgagtgtccag

SEQ ID NO: 474558 - DNA, 30 bp, Artificial Sequence
  Synthetic oligonucleotide
gtccgttgcgacgcgtgcacacttgtccag

SEQ ID NO: 474559 - DNA, 30 bp, Artificial Sequence
  Synthetic oligonucleotide
attttgagcgttcctgttcggtttgtccag

SEQ ID NO: 474560 - DNA, 30 bp, Artificial Sequence
  Synthetic oligonucleotide
tcacaagaacgtttggctgcaacgttccag

SEQ ID NO: 474561 - DNA, 30 bp, Artificial Sequence
  Synthetic oligonucleotide
cttataaggtggaactcgtgagggttccag

SEQ ID NO: 474562 - DNA, 30 bp, Artificial Sequence
  Synthetic oligonucleotide
tctaactcctgtttgaggcacactttccag

SEQ ID NO: 474563 - DNA, 30 bp, Artificial Sequence
  Synthetic oligonucleotide
agtctttcgcggtgaccttagcctttccag

SEQ ID NO: 474564 - DNA, 30 bp, Artificial Sequence
  Synthetic oligonucleotide
ctcctcccgagtgtgctcgggggtttccag

SEQ ID NO: 474565 - DNA, 30 bp, Artificial Sequence
  Synthetic oligonucleotide
tcacggtggtttcggaatatgattttccag

SEQ ID NO: 474566 - DNA, 30 bp, Artificial Sequence
  Synthetic oligonucleotide
acgctccctatccagtgtcactacaagcag

SEQ ID NO: 474567 - DNA, 30 bp, Artificial Sequence
  Synthetic oligonucleotide
gtcatcggataacggatattacggaagcag

SEQ ID NO: 474568 - DNA, 30 bp, Artificial Sequence
  Synthetic oligonucleotide
tatctgctttatcctaagtttttgaagcag

SEQ ID NO: 474569 - DNA, 30 bp, Artificial Sequence
  Synthetic oligonucleotide
tattcaccggtacccctgacgaataagcag

SEQ ID NO: 474570 - DNA, 30 bp, Artificial Sequence
  Synthetic oligonucleotide
gagttaatttactttgtcattcaccagcag

SEQ ID NO: 474571 - DNA, 30 bp, Artificial Sequence
  Synthetic oligonucleotide
ggccggattaggaggtccagtggccagcag

SEQ ID NO: 474572 - DNA, 30 bp, Artificial Sequence
  Synthetic oligonucleotide
ccccggattccggggttcttaggtcagcag

SEQ ID NO: 474573 - DNA, 30 bp, Artificial Sequence
  Synthetic oligonucleotide
gccgggtttccagctcgcctatttcagcag

SEQ ID NO: 474574 - DNA, 30 bp, Artificial Sequence
  Synthetic oligonucleotide
gacgctttctcatgcacactacgcgagcag

SEQ ID NO: 474575 - DNA, 30 bp, Artificial Sequence
  Synthetic oligonucleotide
gacgcgcgcttgcttatccggcctgagcag

SEQ ID NO: 474576 - DNA, 30 bp, Artificial Sequence
  Synthetic oligonucleotide
ttgtatattttgccatttcttgcatagcag

SEQ ID NO: 474577 - DNA, 30 bp, Artificial Sequence
  Synthetic oligonucleotide
tggccggctcgacttagggtcgtctagcag

SEQ ID NO: 474578 - DNA, 30 bp, Artificial Sequence
  Synthetic oligonucleotide
ttttaccaccaccgggtggaaaaaacgcag

SEQ ID NO: 474579 - DNA, 30 bp, Artificial Sequence
  Synthetic oligonucleotide
gtgaaagcactctagttgcataaaacgcag

SEQ ID NO: 474580 - DNA, 30 bp, Artificial Sequence
  Synthetic oligonucleotide
gcattccgttatatatacgtatcaacgcag

SEQ ID NO: 474581 - DNA, 30 bp, Artificial Sequence
  Synthetic oligonucleotide
ccgtcgtatcgaaacctcgtttggacgcag

SEQ ID NO: 474582 - DNA, 30 bp, Artificial Sequence
  Synthetic oligonucleotide
tctcggagcgccgatccctgattgacgcag

SEQ ID NO: 474583 - DNA, 30 bp, Artificial Sequence
  Synthetic oligonucleotide
cgacgctgctctggtgtatgcgatacgcag

SEQ ID NO: 474584 - DNA, 30 bp, Artificial Sequence
  Synthetic oligonucleotide
atcccttcctgctagagtccaggtacgcag

SEQ ID NO: 474585 - DNA, 30 bp, Artificial Sequence
  Synthetic oligonucleotide
gaaaattctagtacctatatgtccccgcag

SEQ ID NO: 474586 - DNA, 30 bp, Artificial Sequence
  Synthetic oligonucleotide
aaaggacccgtctcactatcatgcccgcag

SEQ ID NO: 474587 - DNA, 30 bp, Artificial Sequence
  Synthetic oligonucleotide
gacatatccttcgttagaatgatgccgcag

SEQ ID NO: 474588 - DNA, 30 bp, Artificial Sequence
  Synthetic oligonucleotide
gataaattataccttgcggtactgccgcag

SEQ ID NO: 474589 - DNA, 30 bp, Artificial Sequence
  Synthetic oligonucleotide
ctggtcgataagacgctatgactagcgcag

SEQ ID NO: 474590 - DNA, 30 bp, Artificial Sequence
  Synthetic oligonucleotide
ttggacattatgtctcgaaaggcggcgcag

SEQ ID NO: 474591 - DNA, 30 bp, Artificial Sequence
  Synthetic oligonucleotide
gtagtgacttcataaaagcagttggcgcag

SEQ ID NO: 474592 - DNA, 30 bp, Artificial Sequence
  Synthetic oligonucleotide
ggctaccttttatgataaggtttggcgcag

SEQ ID NO: 474593 - DNA, 30 bp, Artificial Sequence
  Synthetic oligonucleotide
gctaaacgtccgctaagcttgtttgcgcag

SEQ ID NO: 474594 - DNA, 30 bp, Artificial Sequence
  Synthetic oligonucleotide
cctatagcccgtcctaccgaaacatcgcag

SEQ ID NO: 474595 - DNA, 30 bp, Artificial Sequence
  Synthetic oligonucleotide
cccagctcgcctgaatatcggtcatcgcag

SEQ ID NO: 474596 - DNA, 30 bp, Artificial Sequence
  Synthetic oligonucleotide
cgtggagttcctatatctgtaagttcgcag

SEQ ID NO: 474597 - DNA, 30 bp, Artificial Sequence
  Synthetic oligonucleotide
ctactgccgctcagcaacagcacaaggcag

SEQ ID NO: 474598 - DNA, 30 bp, Artificial Sequence
  Synthetic oligonucleotide
tcccgcgagtactgacacgtaagaaggcag

SEQ ID NO: 474599 - DNA, 30 bp, Artificial Sequence
  Synthetic oligonucleotide
gcatagctccgaagctttttagacaggcag

SEQ ID NO: 474600 - DNA, 30 bp, Artificial Sequence
  Synthetic oligonucleotide
gcagtcaagtaaaggatggaacgcaggcag

SEQ ID NO: 474601 - DNA, 30 bp, Artificial Sequence
  Synthetic oligonucleotide
gtctttagcgagtcttcccagcttaggcag

SEQ ID NO: 474602 - DNA, 30 bp, Artificial Sequence
  Synthetic oligonucleotide
ccccctgctagccattggttgtaacggcag

SEQ ID NO: 474603 - DNA, 30 bp, Artificial Sequence
  Synthetic oligonucleotide
tactttcttagcgttcacataatacggcag

SEQ ID NO: 474604 - DNA, 30 bp, Artificial Sequence
  Synthetic oligonucleotide
acgaatccaaatctgaacagcacgcggcag

SEQ ID NO: 474605 - DNA, 30 bp, Artificial Sequence
  Synthetic oligonucleotide
cccagttattatagttgttcaaggcggcag

SEQ ID NO: 474606 - DNA, 30 bp, Artificial Sequence
  Synthetic oligonucleotide
aattatacattttagcagtgctgtcggcag

SEQ ID NO: 474607 - DNA, 30 bp, Artificial Sequence
  Synthetic oligonucleotide
atcttatgcgtgcctaccacgcaagggcag

SEQ ID NO: 474608 - DNA, 30 bp, Artificial Sequence
  Synthetic oligonucleotide
aactcctggacaggcagagtgcgggggcag

SEQ ID NO: 474609 - DNA, 30 bp, Artificial Sequence
  Synthetic oligonucleotide
gctcgtggactggcagaatatatggggcag

SEQ ID NO: 474610 - DNA, 30 bp, Artificial Sequence
  Synthetic oligonucleotide
acgtacgtggaatctgccccggatgggcag

SEQ ID NO: 474611 - DNA, 30 bp, Artificial Sequence
  Synthetic oligonucleotide
aagtacaatttcatagttaaacgatggcag

SEQ ID NO: 474612 - DNA, 30 bp, Artificial Sequence
  Synthetic oligonucleotide
gctatcttggttaccgttgtaggatggcag

SEQ ID NO: 474613 - DNA, 30 bp, Artificial Sequence
  Synthetic oligonucleotide
gccaaaatagtcgcagtacccgcgtggcag

SEQ ID NO: 474614 - DNA, 30 bp, Artificial Sequence
  Synthetic oligonucleotide
tattttgagtggtggagctgtgattggcag

SEQ ID NO: 474615 - DNA, 30 bp, Artificial Sequence
  Synthetic oligonucleotide
acccaaggtatggctcatatccgttggcag

SEQ ID NO: 474616 - DNA, 30 bp, Artificial Sequence
  Synthetic oligonucleotide
atataccataggcccactggttaaatgcag

SEQ ID NO: 474617 - DNA, 30 bp, Artificial Sequence
  Synthetic oligonucleotide
ttccagtaattcatttggcgctcgatgcag

SEQ ID NO: 474618 - DNA, 30 bp, Artificial Sequence
  Synthetic oligonucleotide
cagagaaagacgcgctcagggaatatgcag

SEQ ID NO: 474619 - DNA, 30 bp, Artificial Sequence
  Synthetic oligonucleotide
gtcccatttcatgctggcttgaatatgcag

SEQ ID NO: 474620 - DNA, 30 bp, Artificial Sequence
  Synthetic oligonucleotide
ctgagaacgctttgctcaaggcatatgcag

SEQ ID NO: 474621 - DNA, 30 bp, Artificial Sequence
  Synthetic oligonucleotide
ccaccagtcccaggcaaacacagtatgcag

SEQ ID NO: 474622 - DNA, 30 bp, Artificial Sequence
  Synthetic oligonucleotide
tctctgttattcggaaagaccacgctgcag

SEQ ID NO: 474623 - DNA, 30 bp, Artificial Sequence
  Synthetic oligonucleotide
aagtttgttaactttggagaacggctgcag

SEQ ID NO: 474624 - DNA, 30 bp, Artificial Sequence
  Synthetic oligonucleotide
tacaagaatacaaccagctttctgctgcag

SEQ ID NO: 474625 - DNA, 30 bp, Artificial Sequence
  Synthetic oligonucleotide
agcgggctctgcaactaaatagatctgcag

SEQ ID NO: 474626 - DNA, 30 bp, Artificial Sequence
  Synthetic oligonucleotide
tattcgtgccatcatagcttgtcagtgcag

SEQ ID NO: 474627 - DNA, 30 bp, Artificial Sequence
  Synthetic oligonucleotide
attttttgttgccgttccgtatgcgtgcag

SEQ ID NO: 474628 - DNA, 30 bp, Artificial Sequence
  Synthetic oligonucleotide
gggtctacgttttgcaacggaatggtgcag

SEQ ID NO: 474629 - DNA, 30 bp, Artificial Sequence
  Synthetic oligonucleotide
ataatcttaggtaccggcttcgtggtgcag

SEQ ID NO: 474630 - DNA, 30 bp, Artificial Sequence
  Synthetic oligonucleotide
tgcaattcgttctcgatcttaccattgcag

SEQ ID NO: 474631 - DNA, 30 bp, Artificial Sequence
  Synthetic oligonucleotide
aactgtccagtatagacgtttttattgcag

SEQ ID NO: 474632 - DNA, 30 bp, Artificial Sequence
  Synthetic oligonucleotide
gtgtccaagtgtgttgggcttaacttgcag

SEQ ID NO: 474633 - DNA, 30 bp, Artificial Sequence
  Synthetic oligonucleotide
cgcagtaaccgatgtcaagctgcgttgcag

SEQ ID NO: 474634 - DNA, 30 bp, Artificial Sequence
  Synthetic oligonucleotide
cttaacgtctgctagattatctcgttgcag

SEQ ID NO: 474635 - DNA, 30 bp, Artificial Sequence
  Synthetic oligonucleotide
ggggcacagcacggcggtaccctgttgcag

SEQ ID NO: 474636 - DNA, 30 bp, Artificial Sequence
  Synthetic oligonucleotide
cgtcaccccgagctcaggacgctgttgcag

SEQ ID NO: 474637 - DNA, 30 bp, Artificial Sequence
  Synthetic oligonucleotide
tcccgctgttgattgattgacattttgcag

SEQ ID NO: 474638 - DNA, 30 bp, Artificial Sequence
  Synthetic oligonucleotide
aagggtaggctctgcggatggaacaatcag

SEQ ID NO: 474639 - DNA, 30 bp, Artificial Sequence
  Synthetic oligonucleotide
gactttcgagccttagcggatagcaatcag

SEQ ID NO: 474640 - DNA, 30 bp, Artificial Sequence
  Synthetic oligonucleotide
gagctctgtttgaggaatagggtcaatcag

SEQ ID NO: 474641 - DNA, 30 bp, Artificial Sequence
  Synthetic oligonucleotide
agcacgcaggctgatatttaacataatcag

SEQ ID NO: 474642 - DNA, 30 bp, Artificial Sequence
  Synthetic oligonucleotide
aaccctacgtggtttgtggttgataatcag

SEQ ID NO: 474643 - DNA, 30 bp, Artificial Sequence
  Synthetic oligonucleotide
tccagttacggttctgaagtcgctaatcag

SEQ ID NO: 474644 - DNA, 30 bp, Artificial Sequence
  Synthetic oligonucleotide
tgacaggagtctgggggtacacgtaatcag

SEQ ID NO: 474645 - DNA, 30 bp, Artificial Sequence
  Synthetic oligonucleotide
gcatttattctttttggcacaaaacatcag

SEQ ID NO: 474646 - DNA, 30 bp, Artificial Sequence
  Synthetic oligonucleotide
catttaggcacgttcgataagacgcatcag

SEQ ID NO: 474647 - DNA, 30 bp, Artificial Sequence
  Synthetic oligonucleotide
gatttattctgggaccctcatcggcatcag

SEQ ID NO: 474648 - DNA, 30 bp, Artificial Sequence
  Synthetic oligonucleotide
atctttctgttttatgaggaaagtcatcag

SEQ ID NO: 474649 - DNA, 30 bp, Artificial Sequence
  Synthetic oligonucleotide
gtcaaagtcggagccgggccttttcatcag

SEQ ID NO: 474650 - DNA, 30 bp, Artificial Sequence
  Synthetic oligonucleotide
accgcctttaacgtacgttgggtagatcag

SEQ ID NO: 474651 - DNA, 30 bp, Artificial Sequence
  Synthetic oligonucleotide
gtttacaacgctggtcctaattacgatcag

SEQ ID NO: 474652 - DNA, 30 bp, Artificial Sequence
  Synthetic oligonucleotide
gcgctctcgtccggtttataacccgatcag

SEQ ID NO: 474653 - DNA, 30 bp, Artificial Sequence
  Synthetic oligonucleotide
gcaactttaaagcggtagcttatggatcag

SEQ ID NO: 474654 - DNA, 30 bp, Artificial Sequence
  Synthetic oligonucleotide
gacactctagcgcggcgctacctggatcag

SEQ ID NO: 474655 - DNA, 30 bp, Artificial Sequence
  Synthetic oligonucleotide
cccacttcaggacgaagatggtaatatcag

SEQ ID NO: 474656 - DNA, 30 bp, Artificial Sequence
  Synthetic oligonucleotide
atactgtggtaggattaatcacgatatcag

SEQ ID NO: 474657 - DNA, 30 bp, Artificial Sequence
  Synthetic oligonucleotide
gtccgggttgaccagacgtgtccgtatcag

SEQ ID NO: 474658 - DNA, 30 bp, Artificial Sequence
  Synthetic oligonucleotide
gagatggaccggcgacgcacgtcgtatcag

SEQ ID NO: 474659 - DNA, 30 bp, Artificial Sequence
  Synthetic oligonucleotide
ccttttaaggaaccgttaggaaggtatcag

SEQ ID NO: 474660 - DNA, 30 bp, Artificial Sequence
  Synthetic oligonucleotide
tacaggtacgagctctcccataggtatcag

SEQ ID NO: 474661 - DNA, 30 bp, Artificial Sequence
  Synthetic oligonucleotide
aaactcgtctgtttagctactttgtatcag

SEQ ID NO: 474662 - DNA, 30 bp, Artificial Sequence
  Synthetic oligonucleotide
aatcatgggccgtatgttatggcttatcag

SEQ ID NO: 474663 - DNA, 30 bp, Artificial Sequence
  Synthetic oligonucleotide
ttatctgctgactgcaagcctgtttatcag

SEQ ID NO: 474664 - DNA, 30 bp, Artificial Sequence
  Synthetic oligonucleotide
tattataaccatctacaaacagaaactcag

SEQ ID NO: 474665 - DNA, 30 bp, Artificial Sequence
  Synthetic oligonucleotide
gagcacatgcgaggcgcgtcacccactcag

SEQ ID NO: 474666 - DNA, 30 bp, Artificial Sequence
  Synthetic oligonucleotide
gttccgtcggcagaggggcatcgcactcag

SEQ ID NO: 474667 - DNA, 30 bp, Artificial Sequence
  Synthetic oligonucleotide
tgactgagtttgtaaagctaaacacctcag

SEQ ID NO: 474668 - DNA, 30 bp, Artificial Sequence
  Synthetic oligonucleotide
atattacgcaggggtagatagggccctcag

SEQ ID NO: 474669 - DNA, 30 bp, Artificial Sequence
  Synthetic oligonucleotide
tgaccaggtgggatcatgcagcagcctcag

SEQ ID NO: 474670 - DNA, 30 bp, Artificial Sequence
  Synthetic oligonucleotide
acctcgtgggctacgctacgaacgcctcag

SEQ ID NO: 474671 - DNA, 30 bp, Artificial Sequence
  Synthetic oligonucleotide
catgagggcaacattccaccgcttcctcag

SEQ ID NO: 474672 - DNA, 30 bp, Artificial Sequence
  Synthetic oligonucleotide
gacgcggccctcatgacccaagacgctcag

SEQ ID NO: 474673 - DNA, 30 bp, Artificial Sequence
  Synthetic oligonucleotide
tttcacacgtaagtatcggcacaatctcag

SEQ ID NO: 474674 - DNA, 30 bp, Artificial Sequence
  Synthetic oligonucleotide
aattcataagctcgggatatggcatctcag

SEQ ID NO: 474675 - DNA, 30 bp, Artificial Sequence
  Synthetic oligonucleotide
ctgttatttcgcagtgatattgattctcag

SEQ ID NO: 474676 - DNA, 30 bp, Artificial Sequence
  Synthetic oligonucleotide
gatccctggcggatacagactataagtcag

SEQ ID NO: 474677 - DNA, 30 bp, Artificial Sequence
  Synthetic oligonucleotide
gcctttcacgtacacgttgcagatagtcag

SEQ ID NO: 474678 - DNA, 30 bp, Artificial Sequence
  Synthetic oligonucleotide
gctacgatgttaaacctgcttgcgcgtcag

SEQ ID NO: 474679 - DNA, 30 bp, Artificial Sequence
  Synthetic oligonucleotide
gagactcgcattgggggcagtcggcgtcag

SEQ ID NO: 474680 - DNA, 30 bp, Artificial Sequence
  Synthetic oligonucleotide
tcgtcggagtaatgcaataaattaggtcag

SEQ ID NO: 474681 - DNA, 30 bp, Artificial Sequence
  Synthetic oligonucleotide
gaccccgcattattgcatggcttaggtcag

SEQ ID NO: 474682 - DNA, 30 bp, Artificial Sequence
  Synthetic oligonucleotide
agttcgtacaaagacacgttctacggtcag

SEQ ID NO: 474683 - DNA, 30 bp, Artificial Sequence
  Synthetic oligonucleotide
aatttgaaagttcagaaagactccggtcag

SEQ ID NO: 474684 - DNA, 30 bp, Artificial Sequence
  Synthetic oligonucleotide
ttcgcctacggatctgtacagttcggtcag

SEQ ID NO: 474685 - DNA, 30 bp, Artificial Sequence
  Synthetic oligonucleotide
tatgtgctatttctcatgagaaagggtcag

SEQ ID NO: 474686 - DNA, 30 bp, Artificial Sequence
  Synthetic oligonucleotide
taactatagccccgtggataggcgggtcag

SEQ ID NO: 474687 - DNA, 30 bp, Artificial Sequence
  Synthetic oligonucleotide
agttttaaaggctatagaagccctggtcag

SEQ ID NO: 474688 - DNA, 30 bp, Artificial Sequence
  Synthetic oligonucleotide
ttgggagacgcgggggtgacacaatgtcag

SEQ ID NO: 474689 - DNA, 30 bp, Artificial Sequence
  Synthetic oligonucleotide
agttcctctgagtggaataactcatgtcag

SEQ ID NO: 474690 - DNA, 30 bp, Artificial Sequence
  Synthetic oligonucleotide
cagacacgatgcggtcatacatcctgtcag

SEQ ID NO: 474691 - DNA, 30 bp, Artificial Sequence
  Synthetic oligonucleotide
tctgatttatggtagcggcgtgcgtgtcag

SEQ ID NO: 474692 - DNA, 30 bp, Artificial Sequence
  Synthetic oligonucleotide
ttattgagcggtgacacccctatgtgtcag

SEQ ID NO: 474693 - DNA, 30 bp, Artificial Sequence
  Synthetic oligonucleotide
agcgtccagactgccaaaggtgattgtcag

SEQ ID NO: 474694 - DNA, 30 bp, Artificial Sequence
  Synthetic oligonucleotide
tcccttaagactaggctgtacgcttgtcag

SEQ ID NO: 474695 - DNA, 30 bp, Artificial Sequence
  Synthetic oligonucleotide
tcaagtagtcaggggagaatagaaattcag

SEQ ID NO: 474696 - DNA, 30 bp, Artificial Sequence
  Synthetic oligonucleotide
gattgtaacgccaaccttatatccattcag

SEQ ID NO: 474697 - DNA, 30 bp, Artificial Sequence
  Synthetic oligonucleotide
tgcggagttccacgtgcactcttgattcag

SEQ ID NO: 474698 - DNA, 30 bp, Artificial Sequence
  Synthetic oligonucleotide
gctgccgggcacaaacacccagatattcag

SEQ ID NO: 474699 - DNA, 30 bp, Artificial Sequence
  Synthetic oligonucleotide
aagaaccgcatactgttaatcgatattcag

SEQ ID NO: 474700 - DNA, 30 bp, Artificial Sequence
  Synthetic oligonucleotide
taaacttacaaggctggaattagtattcag

SEQ ID NO: 474701 - DNA, 30 bp, Artificial Sequence
  Synthetic oligonucleotide
taccccggtttggtggtggctatacttcag

SEQ ID NO: 474702 - DNA, 30 bp, Artificial Sequence
  Synthetic oligonucleotide
ttgccctgttgtcagtgacacggtcttcag

SEQ ID NO: 474703 - DNA, 30 bp, Artificial Sequence
  Synthetic oligonucleotide
gtattcgctccaatgttcaactaagttcag

SEQ ID NO: 474704 - DNA, 30 bp, Artificial Sequence
  Synthetic oligonucleotide
aaatgtttataacggcgtcgcatcgttcag

SEQ ID NO: 474705 - DNA, 30 bp, Artificial Sequence
  Synthetic oligonucleotide
aaaattttgggtaggtaacatacggttcag

SEQ ID NO: 474706 - DNA, 30 bp, Artificial Sequence
  Synthetic oligonucleotide
ctagacgattatggagactgatctgttcag

SEQ ID NO: 474707 - DNA, 30 bp, Artificial Sequence
  Synthetic oligonucleotide
gttggataatgacatagcagaattgttcag

SEQ ID NO: 474708 - DNA, 30 bp, Artificial Sequence
  Synthetic oligonucleotide
gattttttacgaaggaataaccttgttcag

SEQ ID NO: 474709 - DNA, 30 bp, Artificial Sequence
  Synthetic oligonucleotide
gaagctgctttaatcataggtcgatttcag

SEQ ID NO: 474710 - DNA, 30 bp, Artificial Sequence
  Synthetic oligonucleotide
ttagtgacatgttcacgggtagtatttcag

SEQ ID NO: 474711 - DNA, 30 bp, Artificial Sequence
  Synthetic oligonucleotide
tatgtgacggtaactcttggcgcgtttcag

SEQ ID NO: 474712 - DNA, 30 bp, Artificial Sequence
  Synthetic oligonucleotide
atggacttggcagagcgctgcataaaagag

SEQ ID NO: 474713 - DNA, 30 bp, Artificial Sequence
  Synthetic oligonucleotide
gtccgcctgtacaactcctggataaaagag

SEQ ID NO: 474714 - DNA, 30 bp, Artificial Sequence
  Synthetic oligonucleotide
caacatagactatagttacccatcaaagag

SEQ ID NO: 474715 - DNA, 30 bp, Artificial Sequence
  Synthetic oligonucleotide
tataattataaactcccagcctagaaagag

SEQ ID NO: 474716 - DNA, 30 bp, Artificial Sequence
  Synthetic oligonucleotide
gttcatattgaccggcttaattagaaagag

SEQ ID NO: 474717 - DNA, 30 bp, Artificial Sequence
  Synthetic oligonucleotide
gcagtctttgtccgtaaatgtcttaaagag

SEQ ID NO: 474718 - DNA, 30 bp, Artificial Sequence
  Synthetic oligonucleotide
ctctaacacaattagcaaacgcaagaagag

SEQ ID NO: 474719 - DNA, 30 bp, Artificial Sequence
  Synthetic oligonucleotide
gatccattcggatggctaaccccagaagag

SEQ ID NO: 474720 - DNA, 30 bp, Artificial Sequence
  Synthetic oligonucleotide
actgcgtcgaggttccgcgaactagaagag

SEQ ID NO: 474721 - DNA, 30 bp, Artificial Sequence
  Synthetic oligonucleotide
gtaaggctcatcctctaaatttccgaagag

SEQ ID NO: 474722 - DNA, 30 bp, Artificial Sequence
  Synthetic oligonucleotide
attgaccccactcttcgttgcttcgaagag

SEQ ID NO: 474723 - DNA, 30 bp, Artificial Sequence
  Synthetic oligonucleotide
tgcaggtggcgttggttgatgagggaagag

SEQ ID NO: 474724 - DNA, 30 bp, Artificial Sequence
  Synthetic oligonucleotide
aatcggatggatatgttcagaaaataagag

SEQ ID NO: 474725 - DNA, 30 bp, Artificial Sequence
  Synthetic oligonucleotide
ggtaaagccaagcatccatctggttaagag

SEQ ID NO: 474726 - DNA, 30 bp, Artificial Sequence
  Synthetic oligonucleotide
gccgtttcgttggggtttgtcccaacagag

SEQ ID NO: 474727 - DNA, 30 bp, Artificial Sequence
  Synthetic oligonucleotide
cacctttttgcggaggtggcatcaacagag

SEQ ID NO: 474728 - DNA, 30 bp, Artificial Sequence
  Synthetic oligonucleotide
agtcttatatgcgttaggtcacacacagag

SEQ ID NO: 474729 - DNA, 31 bp, Artificial Sequence
  Synthetic oligonucleotide
ctgggctctcccaagggacgtaaaaccagag

SEQ ID NO: 474730 - DNA, 30 bp, Artificial Sequence
  Synthetic oligonucleotide
agtggggtgttcctagtgagcacaccagag

SEQ ID NO: 474731 - DNA, 30 bp, Artificial Sequence
  Synthetic oligonucleotide
agacgacttctgagtcgttgatcaccagag

SEQ ID NO: 474732 - DNA, 30 bp, Artificial Sequence
  Synthetic oligonucleotide
aggaaatcttgacttaaggcactaccagag

SEQ ID NO: 474733 - DNA, 30 bp, Artificial Sequence
  Synthetic oligonucleotide
aatggggacacgggaccttgtccagcagag

SEQ ID NO: 474734 - DNA, 30 bp, Artificial Sequence
  Synthetic oligonucleotide
aatttgttttgcaccggatagcgagcagag

SEQ ID NO: 474735 - DNA, 30 bp, Artificial Sequence
  Synthetic oligonucleotide
actctatgatgtttgctccgctccgcagag

SEQ ID NO: 474736 - DNA, 30 bp, Artificial Sequence
  Synthetic oligonucleotide
taggaaggagaaaaattgaatccggcagag

SEQ ID NO: 474737 - DNA, 30 bp, Artificial Sequence
  Synthetic oligonucleotide
atttcaatactgaacagttgtaatgcagag

SEQ ID NO: 474738 - DNA, 30 bp, Artificial Sequence
  Synthetic oligonucleotide
gattttcctggcgtgagatctgttgcagag

SEQ ID NO: 474739 - DNA, 30 bp, Artificial Sequence
  Synthetic oligonucleotide
taattagtgtttaatggctatctatcagag

SEQ ID NO: 474740 - DNA, 30 bp, Artificial Sequence
  Synthetic oligonucleotide
tgacaaggataacctaccaaactctcagag

SEQ ID NO: 474741 - DNA, 30 bp, Artificial Sequence
  Synthetic oligonucleotide
cccccatgcgaacccacggggcagtcagag

SEQ ID NO: 474742 - DNA, 30 bp, Artificial Sequence
  Synthetic oligonucleotide
ccgctccgatcccgtcgtgctaggtcagag

SEQ ID NO: 474743 - DNA, 30 bp, Artificial Sequence
  Synthetic oligonucleotide
tctgcccacctgtcggacacgaattcagag

SEQ ID NO: 474744 - DNA, 30 bp, Artificial Sequence
  Synthetic oligonucleotide
gtccatggcacttatcaaatttattcagag

SEQ ID NO: 474745 - DNA, 30 bp, Artificial Sequence
  Synthetic oligonucleotide
tgcggcgagttaccaactataacttcagag

SEQ ID NO: 474746 - DNA, 30 bp, Artificial Sequence
  Synthetic oligonucleotide
gcctatctatatggaccctcttaaagagag

SEQ ID NO: 474747 - DNA, 30 bp, Artificial Sequence
  Synthetic oligonucleotide
ctgaccctaattcccttttcgacaagagag

SEQ ID NO: 474748 - DNA, 30 bp, Artificial Sequence
  Synthetic oligonucleotide
ccttgttgtcaccgcggtggtctaagagag

SEQ ID NO: 474749 - DNA, 30 bp, Artificial Sequence
  Synthetic oligonucleotide
tatggttttaatggataagaaggcagagag

SEQ ID NO: 474750 - DNA, 30 bp, Artificial Sequence
  Synthetic oligonucleotide
cccgtaagggggggccattaagatcgagag

SEQ ID NO: 474751 - DNA, 30 bp, Artificial Sequence
  Synthetic oligonucleotide
gcaactttattgtggccatgttgtcgagag

SEQ ID NO: 474752 - DNA, 30 bp, Artificial Sequence
  Synthetic oligonucleotide
aatcttggatccatcgagaatgcaggagag

SEQ ID NO: 474753 - DNA, 30 bp, Artificial Sequence
  Synthetic oligonucleotide
atattcccttgttcgggcacaatcggagag

SEQ ID NO: 474754 - DNA, 30 bp, Artificial Sequence
  Synthetic oligonucleotide
cgccccgcgaccggcggctcaaatggagag

SEQ ID NO: 474755 - DNA, 30 bp, Artificial Sequence
  Synthetic oligonucleotide
gggttaattttcacctggacaactggagag

SEQ ID NO: 474756 - DNA, 30 bp, Artificial Sequence
  Synthetic oligonucleotide
ggcaactctaacactgtggctgttggagag

SEQ ID NO: 474757 - DNA, 30 bp, Artificial Sequence
  Synthetic oligonucleotide
aatctctttgtcagatcaatggactgagag

SEQ ID NO: 474758 - DNA, 30 bp, Artificial Sequence
  Synthetic oligonucleotide
aaatgtcctggagttgccattgcttgagag

SEQ ID NO: 474759 - DNA, 30 bp, Artificial Sequence
  Synthetic oligonucleotide
ctatctctcacagtcggcgtaagttgagag

SEQ ID NO: 474760 - DNA, 30 bp, Artificial Sequence
  Synthetic oligonucleotide
ttgtctttcgcttagacaccgcatatagag

SEQ ID NO: 474761 - DNA, 30 bp, Artificial Sequence
  Synthetic oligonucleotide
gtgtacccggaatctgagattagtatagag

SEQ ID NO: 474762 - DNA, 30 bp, Artificial Sequence
  Synthetic oligonucleotide
tcatttcatggtgtatattcggtgctagag

SEQ ID NO: 474763 - DNA, 30 bp, Artificial Sequence
  Synthetic oligonucleotide
tcaagaactctactctgataaagagtagag

SEQ ID NO: 474764 - DNA, 30 bp, Artificial Sequence
  Synthetic oligonucleotide
ggctgtttaggaactcggtcttgagtagag

SEQ ID NO: 474765 - DNA, 30 bp, Artificial Sequence
  Synthetic oligonucleotide
aagttttagtaacgcgcggcccgcgtagag

SEQ ID NO: 474766 - DNA, 30 bp, Artificial Sequence
  Synthetic oligonucleotide
cttgataaatgcgggatacagcctgtagag

SEQ ID NO: 474767 - DNA, 30 bp, Artificial Sequence
  Synthetic oligonucleotide
cacgaggaaggtggagacaacattgtagag

SEQ ID NO: 474768 - DNA, 30 bp, Artificial Sequence
  Synthetic oligonucleotide
aaaacattgaccgcgaaggtcagattagag

SEQ ID NO: 474769 - DNA, 30 bp, Artificial Sequence
  Synthetic oligonucleotide
aaaaagggcacctgatctggatgcttagag

SEQ ID NO: 474770 - DNA, 30 bp, Artificial Sequence
  Synthetic oligonucleotide
tatcttggttaggcgaaccgcttcttagag

SEQ ID NO: 474771 - DNA, 29 bp, Artificial Sequence
  Synthetic oligonucleotide
taggctttcatggtcactcatggttagag

SEQ ID NO: 474772 - DNA, 30 bp, Artificial Sequence
  Synthetic oligonucleotide
gtccaaaccagagttgctattatgttagag

SEQ ID NO: 474773 - DNA, 30 bp, Artificial Sequence
  Synthetic oligonucleotide
ttgaacctcgcacgccgacactgtttagag

SEQ ID NO: 474774 - DNA, 30 bp, Artificial Sequence
  Synthetic oligonucleotide
ggaatgggcagcgtcacctttcctaacgag

SEQ ID NO: 474775 - DNA, 30 bp, Artificial Sequence
  Synthetic oligonucleotide
aatggttgttcgggacttgcgcttaacgag

SEQ ID NO: 474776 - DNA, 30 bp, Artificial Sequence
  Synthetic oligonucleotide
gcattcagacatgttcttagttaacacgag

SEQ ID NO: 474777 - DNA, 30 bp, Artificial Sequence
  Synthetic oligonucleotide
ccatgagcatagacgcatgtagacgacgag

SEQ ID NO: 474778 - DNA, 30 bp, Artificial Sequence
  Synthetic oligonucleotide
gccgtggaccgcgtatttgcatacgacgag

SEQ ID NO: 474779 - DNA, 30 bp, Artificial Sequence
  Synthetic oligonucleotide
tgccccaattgggtccggagagcttacgag

SEQ ID NO: 474780 - DNA, 30 bp, Artificial Sequence
  Synthetic oligonucleotide
tagtcggtagccaaccaatggctaaccgag

SEQ ID NO: 474781 - DNA, 30 bp, Artificial Sequence
  Synthetic oligonucleotide
aacgttacctttgtgtaacgtaagaccgag

SEQ ID NO: 474782 - DNA, 30 bp, Artificial Sequence
  Synthetic oligonucleotide
tattgctcgtgctaggcagtaatgaccgag

SEQ ID NO: 474783 - DNA, 30 bp, Artificial Sequence
  Synthetic oligonucleotide
gtggcaagccattattgtatgcaagccgag

SEQ ID NO: 474784 - DNA, 30 bp, Artificial Sequence
  Synthetic oligonucleotide
ccacattctgtttgagcgcctagcgccgag

SEQ ID NO: 474785 - DNA, 30 bp, Artificial Sequence
  Synthetic oligonucleotide
gatgagatgtcgcgaataatcgcggccgag

SEQ ID NO: 474786 - DNA, 30 bp, Artificial Sequence
  Synthetic oligonucleotide
gagttagcatgcttgggtatcaatgccgag

SEQ ID NO: 474787 - DNA, 30 bp, Artificial Sequence
  Synthetic oligonucleotide
cacagacaactccgcaccttttatgccgag

SEQ ID NO: 474788 - DNA, 30 bp, Artificial Sequence
  Synthetic oligonucleotide
ggtattacgcgtggccgtggcacgtccgag

SEQ ID NO: 474789 - DNA, 30 bp, Artificial Sequence
  Synthetic oligonucleotide
tatgcttatgttgctcaattattgtccgag

SEQ ID NO: 474790 - DNA, 30 bp, Artificial Sequence
  Synthetic oligonucleotide
gaattctcaagccggcctcgtgtaagcgag

SEQ ID NO: 474791 - DNA, 30 bp, Artificial Sequence
  Synthetic oligonucleotide
actctgatgctaccctgaccggagagcgag

SEQ ID NO: 474792 - DNA, 30 bp, Artificial Sequence
  Synthetic oligonucleotide
ctcgggcgcttaatttctgtaagtagcgag

SEQ ID NO: 474793 - DNA, 30 bp, Artificial Sequence
  Synthetic oligonucleotide
ttattatgaaaaacgatcctaatacgcgag

SEQ ID NO: 474794 - DNA, 30 bp, Artificial Sequence
  Synthetic oligonucleotide
cgtctaataatgattcaaatattccgcgag

SEQ ID NO: 474795 - DNA, 30 bp, Artificial Sequence
  Synthetic oligonucleotide
tagacggcctcggctactttacaaggcgag

SEQ ID NO: 474796 - DNA, 30 bp, Artificial Sequence
  Synthetic oligonucleotide
gaaaagttatggcatatatcgatcggcgag

SEQ ID NO: 474797 - DNA, 30 bp, Artificial Sequence
  Synthetic oligonucleotide
ccttatagtcactaaaatcgacgctgcgag

SEQ ID NO: 474798 - DNA, 30 bp, Artificial Sequence
  Synthetic oligonucleotide
aagtaacctgaaggccaatcgacgtgcgag

SEQ ID NO: 474799 - DNA, 30 bp, Artificial Sequence
  Synthetic oligonucleotide
aaaccaaccctgtgcatagttaattgcgag

SEQ ID NO: 474800 - DNA, 30 bp, Artificial Sequence
  Synthetic oligonucleotide
gcaagttaatgtatgcgtcatggttgcgag

SEQ ID NO: 474801 - DNA, 30 bp, Artificial Sequence
  Synthetic oligonucleotide
tgatcttaggtggcagtttcgcacatcgag

SEQ ID NO: 474802 - DNA, 30 bp, Artificial Sequence
  Synthetic oligonucleotide
gaatactaaaacggatcacagcgcatcgag

SEQ ID NO: 474803 - DNA, 30 bp, Artificial Sequence
  Synthetic oligonucleotide
atctttgacttacggatgtaaggcatcgag

SEQ ID NO: 474804 - DNA, 30 bp, Artificial Sequence
  Synthetic oligonucleotide
attcttgatttgcgtttaatgtgtctcgag

SEQ ID NO: 474805 - DNA, 30 bp, Artificial Sequence
  Synthetic oligonucleotide
gtcatgtttcttcccgggacttttctcgag

SEQ ID NO: 474806 - DNA, 30 bp, Artificial Sequence
  Synthetic oligonucleotide
tttaaacgacgccacgagtccgccgtcgag

SEQ ID NO: 474807 - DNA, 30 bp, Artificial Sequence
  Synthetic oligonucleotide
gaacctctcagactccgacgcatggtcgag

SEQ ID NO: 474808 - DNA, 30 bp, Artificial Sequence
  Synthetic oligonucleotide
tccgggtttaacccaggtattagtgtcgag

SEQ ID NO: 474809 - DNA, 30 bp, Artificial Sequence
  Synthetic oligonucleotide
taatttttatactgtggtacatgtgtcgag

SEQ ID NO: 474810 - DNA, 30 bp, Artificial Sequence
  Synthetic oligonucleotide
ttggcggtctctacatttactttattcgag

SEQ ID NO: 474811 - DNA, 30 bp, Artificial Sequence
  Synthetic oligonucleotide
ctctaagtggctcttccactgccgttcgag

SEQ ID NO: 474812 - DNA, 30 bp, Artificial Sequence
  Synthetic oligonucleotide
ttactaatcgtaaaggttttacctttcgag

SEQ ID NO: 474813 - DNA, 30 bp, Artificial Sequence
  Synthetic oligonucleotide
caggtaagaaatgggctttctttgaaggag

SEQ ID NO: 474814 - DNA, 30 bp, Artificial Sequence
  Synthetic oligonucleotide
agcttgaattgtaatagagtggctaaggag

SEQ ID NO: 474815 - DNA, 30 bp, Artificial Sequence
  Synthetic oligonucleotide
gtcagggtttgggcaggggactttcaggag

SEQ ID NO: 474816 - DNA, 30 bp, Artificial Sequence
  Synthetic oligonucleotide
ccgcatgggttgcaatgcacatcagaggag

SEQ ID NO: 474817 - DNA, 30 bp, Artificial Sequence
  Synthetic oligonucleotide
tttaatagtctcaagttacaatgggaggag

SEQ ID NO: 474818 - DNA, 30 bp, Artificial Sequence
  Synthetic oligonucleotide
tcataaccggggcagcagagtgactaggag

SEQ ID NO: 474819 - DNA, 30 bp, Artificial Sequence
  Synthetic oligonucleotide
catttcggtcccgtaagaggcagctaggag

SEQ ID NO: 474820 - DNA, 30 bp, Artificial Sequence
  Synthetic oligonucleotide
tatatatagtgagatacttagacgtaggag

SEQ ID NO: 474821 - DNA, 30 bp, Artificial Sequence
  Synthetic oligonucleotide
ataattcatctgaatcgcgattaaacggag

SEQ ID NO: 474822 - DNA, 30 bp, Artificial Sequence
  Synthetic oligonucleotide
attcttgtcatggaccggcccgcaacggag

SEQ ID NO: 474823 - DNA, 30 bp, Artificial Sequence
  Synthetic oligonucleotide
aaaatcacttctcccacgcagtcaacggag

SEQ ID NO: 474824 - DNA, 30 bp, Artificial Sequence
  Synthetic oligonucleotide
ttcttatcgggccccgaccataatacggag

SEQ ID NO: 474825 - DNA, 30 bp, Artificial Sequence
  Synthetic oligonucleotide
taacttaatcacgcgctggctccaccggag

SEQ ID NO: 474826 - DNA, 30 bp, Artificial Sequence
  Synthetic oligonucleotide
gattagaaggggtgttgagtctatccggag

SEQ ID NO: 474827 - DNA, 30 bp, Artificial Sequence
  Synthetic oligonucleotide
ctttaaaagtaagttaccttttgtccggag

SEQ ID NO: 474828 - DNA, 30 bp, Artificial Sequence
  Synthetic oligonucleotide
ttaaactaagattttgtatttacagcggag

SEQ ID NO: 474829 - DNA, 30 bp, Artificial Sequence
  Synthetic oligonucleotide
gcgaattaccattacagggtaacggcggag

SEQ ID NO: 474830 - DNA, 30 bp, Artificial Sequence
  Synthetic oligonucleotide
attacttgtccgctccaagcagatgcggag

SEQ ID NO: 474831 - DNA, 30 bp, Artificial Sequence
  Synthetic oligonucleotide
gtattgcagcatcccatgttagtctcggag

SEQ ID NO: 474832 - DNA, 30 bp, Artificial Sequence
  Synthetic oligonucleotide
tgtatatcgacgtgtagttaaacgtcggag

SEQ ID NO: 474833 - DNA, 30 bp, Artificial Sequence
  Synthetic oligonucleotide
tgactccagaggagtgtacgccggtcggag

SEQ ID NO: 474834 - DNA, 30 bp, Artificial Sequence
  Synthetic oligonucleotide
caagttctgattattgactttcaaagggag

SEQ ID NO: 474835 - DNA, 30 bp, Artificial Sequence
  Synthetic oligonucleotide
aattatatttgtgtaataatggaaagggag

SEQ ID NO: 474836 - DNA, 30 bp, Artificial Sequence
  Synthetic oligonucleotide
tcgataacctggagctcgaaataccgggag

SEQ ID NO: 474837 - DNA, 29 bp, Artificial Sequence
  Synthetic oligonucleotide
tttgatataccatgattagtctgcgggag

SEQ ID NO: 474838 - DNA, 30 bp, Artificial Sequence
  Synthetic oligonucleotide
aacgcctaggtggcagcgccctagggggag

SEQ ID NO: 474839 - DNA, 30 bp, Artificial Sequence
  Synthetic oligonucleotide
ttcacggagggaaggaagcctccgggggag

SEQ ID NO: 474840 - DNA, 30 bp, Artificial Sequence
  Synthetic oligonucleotide
taaacgtaggtgggaggggaagggggggag

SEQ ID NO: 474841 - DNA, 30 bp, Artificial Sequence
  Synthetic oligonucleotide
ccaactaatggggggagaagggaatgggag

SEQ ID NO: 474842 - DNA, 30 bp, Artificial Sequence
  Synthetic oligonucleotide
aatgtccggacagaactggagcattgggag

SEQ ID NO: 474843 - DNA, 30 bp, Artificial Sequence
  Synthetic oligonucleotide
aagttgtgttggttcatttctgcttgggag

SEQ ID NO: 474844 - DNA, 30 bp, Artificial Sequence
  Synthetic oligonucleotide
aatctgcggctgtaagtaaattggatggag

SEQ ID NO: 474845 - DNA, 30 bp, Artificial Sequence
  Synthetic oligonucleotide
acctgtgcataggtccttcagtttatggag

SEQ ID NO: 474846 - DNA, 30 bp, Artificial Sequence
  Synthetic oligonucleotide
aggacgtcgacaccgtgaaaaagactggag

SEQ ID NO: 474847 - DNA, 30 bp, Artificial Sequence
  Synthetic oligonucleotide
aattgaactaaggggaaggctaccctggag

SEQ ID NO: 474848 - DNA, 30 bp, Artificial Sequence
  Synthetic oligonucleotide
aaggacgttgccacttaatattggctggag

SEQ ID NO: 474849 - DNA, 30 bp, Artificial Sequence
  Synthetic oligonucleotide
tacataattgtataacagctctgtctggag

SEQ ID NO: 474850 - DNA, 30 bp, Artificial Sequence
  Synthetic oligonucleotide
gaacccgggcctcatcccacggttctggag

SEQ ID NO: 474851 - DNA, 30 bp, Artificial Sequence
  Synthetic oligonucleotide
agagacacgtgtctgggatcttttctggag

SEQ ID NO: 474852 - DNA, 30 bp, Artificial Sequence
  Synthetic oligonucleotide
agaagattttacgcagattttacagtggag

SEQ ID NO: 474853 - DNA, 30 bp, Artificial Sequence
  Synthetic oligonucleotide
ttcgggcctcacccgcatattgtcttggag

SEQ ID NO: 474854 - DNA, 30 bp, Artificial Sequence
  Synthetic oligonucleotide
gtgctgtgcgcgtaaatccttcatttggag

SEQ ID NO: 474855 - DNA, 30 bp, Artificial Sequence
  Synthetic oligonucleotide
cctgtttgattgctattgctgcttttggag

SEQ ID NO: 474856 - DNA, 30 bp, Artificial Sequence
  Synthetic oligonucleotide
aagattttcgtggcacccgggccaaatgag

SEQ ID NO: 474857 - DNA, 30 bp, Artificial Sequence
  Synthetic oligonucleotide
aggatcaggtcgcagcctgtgatcaatgag

SEQ ID NO: 474858 - DNA, 30 bp, Artificial Sequence
  Synthetic oligonucleotide
tttagaactcggtgcggtttatcacatgag

SEQ ID NO: 474859 - DNA, 30 bp, Artificial Sequence
  Synthetic oligonucleotide
catataggcctgcacacgggtgtgcatgag

SEQ ID NO: 474860 - DNA, 30 bp, Artificial Sequence
  Synthetic oligonucleotide
tgggcgctcgccagctccggctgtcatgag

SEQ ID NO: 474861 - DNA, 30 bp, Artificial Sequence
  Synthetic oligonucleotide
caaggcctctggcccccacggtgtcatgag

SEQ ID NO: 474862 - DNA, 30 bp, Artificial Sequence
  Synthetic oligonucleotide
aaattaaataaagtccagttaattgatgag

SEQ ID NO: 474863 - DNA, 30 bp, Artificial Sequence
  Synthetic oligonucleotide
aacatctgtgtcgaaacgtttaattatgag

SEQ ID NO: 474864 - DNA, 30 bp, Artificial Sequence
  Synthetic oligonucleotide
ttcggacataagagaatcgcggattatgag

SEQ ID NO: 474865 - DNA, 30 bp, Artificial Sequence
  Synthetic oligonucleotide
gagcgacggaggaatataatgggttatgag

SEQ ID NO: 474866 - DNA, 30 bp, Artificial Sequence
  Synthetic oligonucleotide
gtattgtttttgccaggtaggaccactgag

SEQ ID NO: 474867 - DNA, 30 bp, Artificial Sequence
  Synthetic oligonucleotide
acctctctgaggagaaagtctcgtactgag

SEQ ID NO: 474868 - DNA, 30 bp, Artificial Sequence
  Synthetic oligonucleotide
gagtccgcccgggggaggacaccccctgag

SEQ ID NO: 474869 - DNA, 30 bp, Artificial Sequence
  Synthetic oligonucleotide
aactggttactttcggtctttcgccctgag

SEQ ID NO: 474870 - DNA, 30 bp, Artificial Sequence
  Synthetic oligonucleotide
agtaggaacggcacatggtagggccctgag

SEQ ID NO: 474871 - DNA, 30 bp, Artificial Sequence
  Synthetic oligonucleotide
accgtttcggatttaacgggtggtcctgag

SEQ ID NO: 474872 - DNA, 30 bp, Artificial Sequence
  Synthetic oligonucleotide
gaaataaacgcgaacactagccaagctgag

SEQ ID NO: 474873 - DNA, 30 bp, Artificial Sequence
  Synthetic oligonucleotide
atgaggttacatcgacctggttgagctgag

SEQ ID NO: 474874 - DNA, 30 bp, Artificial Sequence
  Synthetic oligonucleotide
tagtgtatacggaagtaccgtgtagctgag

SEQ ID NO: 474875 - DNA, 30 bp, Artificial Sequence
  Synthetic oligonucleotide
aatttatgcttgggaacagtggaatctgag

SEQ ID NO: 474876 - DNA, 30 bp, Artificial Sequence
  Synthetic oligonucleotide
agggccttattcgtgtccttggattctgag

SEQ ID NO: 474877 - DNA, 30 bp, Artificial Sequence
  Synthetic oligonucleotide
gtccattttcacatggacgcttgttctgag

SEQ ID NO: 474878 - DNA, 30 bp, Artificial Sequence
  Synthetic oligonucleotide
actatggacacccggggcatgttaagtgag

SEQ ID NO: 474879 - DNA, 30 bp, Artificial Sequence
  Synthetic oligonucleotide
attagttttccgtgagtttttagcagtgag

SEQ ID NO: 474880 - DNA, 30 bp, Artificial Sequence
  Synthetic oligonucleotide
agagcacgctaggcctagccccgcagtgag

SEQ ID NO: 474881 - DNA, 30 bp, Artificial Sequence
  Synthetic oligonucleotide
gttgtagtttttgagttatagtcgggtgag

SEQ ID NO: 474882 - DNA, 30 bp, Artificial Sequence
  Synthetic oligonucleotide
accccacccggttgaactccgcttggtgag

SEQ ID NO: 474883 - DNA, 30 bp, Artificial Sequence
  Synthetic oligonucleotide
tttgggaccgaacgcttggatttatgtgag

SEQ ID NO: 474884 - DNA, 30 bp, Artificial Sequence
  Synthetic oligonucleotide
cggctttagcgtgcgacacgggaaattgag

SEQ ID NO: 474885 - DNA, 30 bp, Artificial Sequence
  Synthetic oligonucleotide
caaccaaccgagcctttctagtccattgag

SEQ ID NO: 474886 - DNA, 30 bp, Artificial Sequence
  Synthetic oligonucleotide
gccagtccccctggaccgggctttattgag

SEQ ID NO: 474887 - DNA, 30 bp, Artificial Sequence
  Synthetic oligonucleotide
gacgtctcaacgcgcggttgtaaacttgag

SEQ ID NO: 474888 - DNA, 30 bp, Artificial Sequence
  Synthetic oligonucleotide
atcccttttatcggcccagactcccttgag

SEQ ID NO: 474889 - DNA, 30 bp, Artificial Sequence
  Synthetic oligonucleotide
aacttgggtggtatcgatatatgtcttgag

SEQ ID NO: 474890 - DNA, 30 bp, Artificial Sequence
  Synthetic oligonucleotide
gtccgctctaggaagcccactcaagttgag

SEQ ID NO: 474891 - DNA, 30 bp, Artificial Sequence
  Synthetic oligonucleotide
tactgctctcgacacggccaacgggttgag

SEQ ID NO: 474892 - DNA, 30 bp, Artificial Sequence
  Synthetic oligonucleotide
tttatactcgtgtgcgcgtatcctgttgag

SEQ ID NO: 474893 - DNA, 30 bp, Artificial Sequence
  Synthetic oligonucleotide
agattgagtgggataatcagtctctttgag

SEQ ID NO: 474894 - DNA, 30 bp, Artificial Sequence
  Synthetic oligonucleotide
aatggcagcactacaaaggaacagtttgag

SEQ ID NO: 474895 - DNA, 30 bp, Artificial Sequence
  Synthetic oligonucleotide
aattttagagcggactcgaagacttttgag

SEQ ID NO: 474896 - DNA, 30 bp, Artificial Sequence
  Synthetic oligonucleotide
gtttatctctgttttcacagctcaaaatag

SEQ ID NO: 474897 - DNA, 30 bp, Artificial Sequence
  Synthetic oligonucleotide
ttttgtacacggtacctattgtcaaaatag

SEQ ID NO: 474898 - DNA, 30 bp, Artificial Sequence
  Synthetic oligonucleotide
gagtagacttcaaagttgattataaaatag

SEQ ID NO: 474899 - DNA, 30 bp, Artificial Sequence
  Synthetic oligonucleotide
ctttaacacgggtcgagcgggcccaaatag

SEQ ID NO: 474900 - DNA, 30 bp, Artificial Sequence
  Synthetic oligonucleotide
ctctggtatttgatcttggttatcaaatag

SEQ ID NO: 474901 - DNA, 30 bp, Artificial Sequence
  Synthetic oligonucleotide
ttattttcgcacctcacgtagaggaaatag

SEQ ID NO: 474902 - DNA, 30 bp, Artificial Sequence
  Synthetic oligonucleotide
gaatattgtatccaagtgactaggaaatag

SEQ ID NO: 474903 - DNA, 30 bp, Artificial Sequence
  Synthetic oligonucleotide
gatgcagctacccaaaagcatactaaatag

SEQ ID NO: 474904 - DNA, 30 bp, Artificial Sequence
  Synthetic oligonucleotide
ggatcttagtagtacagaggactacaatag

SEQ ID NO: 474905 - DNA, 30 bp, Artificial Sequence
  Synthetic oligonucleotide
gggcagatgtaagtcgcgcagcgccaatag

SEQ ID NO: 474906 - DNA, 30 bp, Artificial Sequence
  Synthetic oligonucleotide
tccgggtcccccagtttcgggtcgcaatag

SEQ ID NO: 474907 - DNA, 30 bp, Artificial Sequence
  Synthetic oligonucleotide
gcaccgactcacgcagacatctggcaatag

SEQ ID NO: 474908 - DNA, 30 bp, Artificial Sequence
  Synthetic oligonucleotide
caagtctccgcggctcacatgatgcaatag

SEQ ID NO: 474909 - DNA, 30 bp, Artificial Sequence
  Synthetic oligonucleotide
tttgatggtaatagctctgtgaatcaatag

SEQ ID NO: 474910 - DNA, 30 bp, Artificial Sequence
  Synthetic oligonucleotide
ggggtgagtgccgcgcgtcactgtcaatag

SEQ ID NO: 474911 - DNA, 30 bp, Artificial Sequence
  Synthetic oligonucleotide
atatatgggataatatgagcgattcaatag

SEQ ID NO: 474912 - DNA, 30 bp, Artificial Sequence
  Synthetic oligonucleotide
ccagtaggtcgtcaaattctcgatgaatag

SEQ ID NO: 474913 - DNA, 30 bp, Artificial Sequence
  Synthetic oligonucleotide
gagttcattactgcgcctcgacctgaatag

SEQ ID NO: 474914 - DNA, 30 bp, Artificial Sequence
  Synthetic oligonucleotide
ccaagatacgttttttgtatccaataatag

SEQ ID NO: 474915 - DNA, 30 bp, Artificial Sequence
  Synthetic oligonucleotide
agagggctggatagataagtctagtaatag

SEQ ID NO: 474916 - DNA, 30 bp, Artificial Sequence
  Synthetic oligonucleotide
attatatagaggtggtgttatgaaacatag

SEQ ID NO: 474917 - DNA, 30 bp, Artificial Sequence
  Synthetic oligonucleotide
ctacgttgacgctttaatcgatcaacatag

SEQ ID NO: 474918 - DNA, 30 bp, Artificial Sequence
  Synthetic oligonucleotide
acatcgtgacccagcctataggccacatag

SEQ ID NO: 474919 - DNA, 30 bp, Artificial Sequence
  Synthetic oligonucleotide
catattatttgtactctgggcatcacatag

SEQ ID NO: 474920 - DNA, 30 bp, Artificial Sequence
  Synthetic oligonucleotide
agcagttgctacgcgatacgcaggacatag

SEQ ID NO: 474921 - DNA, 30 bp, Artificial Sequence
  Synthetic oligonucleotide
attcttacgacgctgaggcattctacatag

SEQ ID NO: 474922 - DNA, 30 bp, Artificial Sequence
  Synthetic oligonucleotide
gagttttatcagtcgcttatggaaccatag

SEQ ID NO: 474923 - DNA, 30 bp, Artificial Sequence
  Synthetic oligonucleotide
gagaccgggcatgttaattccaccccatag

SEQ ID NO: 474924 - DNA, 30 bp, Artificial Sequence
  Synthetic oligonucleotide
acagaattaacgcgttagtcttagccatag

SEQ ID NO: 474925 - DNA, 30 bp, Artificial Sequence
  Synthetic oligonucleotide
actactatgttgtgaaataagtgtccatag

SEQ ID NO: 474926 - DNA, 30 bp, Artificial Sequence
  Synthetic oligonucleotide
cccgtatggctttgacttcagtaagcatag

SEQ ID NO: 474927 - DNA, 30 bp, Artificial Sequence
  Synthetic oligonucleotide
acacatgaaggtacgtttaatccagcatag

SEQ ID NO: 474928 - DNA, 30 bp, Artificial Sequence
  Synthetic oligonucleotide
gtgcctcggtacatctcgaaggacgcatag

SEQ ID NO: 474929 - DNA, 30 bp, Artificial Sequence
  Synthetic oligonucleotide
tatgtttattatcgcctttcgcgggcatag

SEQ ID NO: 474930 - DNA, 30 bp, Artificial Sequence
  Synthetic oligonucleotide
ctattaatatgttcacgactgaatgcatag

SEQ ID NO: 474931 - DNA, 30 bp, Artificial Sequence
  Synthetic oligonucleotide
gttaggatatgattagagaaagaatcatag

SEQ ID NO: 474932 - DNA, 30 bp, Artificial Sequence
  Synthetic oligonucleotide
attaagtggctacgataggtgtcatcatag

SEQ ID NO: 474933 - DNA, 30 bp, Artificial Sequence
  Synthetic oligonucleotide
tgtgtttatatattctgcctacactcatag

SEQ ID NO: 474934 - DNA, 30 bp, Artificial Sequence
  Synthetic oligonucleotide
tttaaccccgagacggagtaagactcatag

SEQ ID NO: 474935 - DNA, 30 bp, Artificial Sequence
  Synthetic oligonucleotide
taaatccctcagtaatttcttttgtcatag

SEQ ID NO: 474936 - DNA, 30 bp, Artificial Sequence
  Synthetic oligonucleotide
tatcacgagtgctatgtcgcagaaagatag

SEQ ID NO: 474937 - DNA, 30 bp, Artificial Sequence
  Synthetic oligonucleotide
atatatttcgtcttagaaggagaaagatag

SEQ ID NO: 474938 - DNA, 30 bp, Artificial Sequence
  Synthetic oligonucleotide
gtattaaccatgtcacccggagcaagatag

SEQ ID NO: 474939 - DNA, 30 bp, Artificial Sequence
  Synthetic oligonucleotide
atcctggtcagggtacgcggttacagatag

SEQ ID NO: 474940 - DNA, 30 bp, Artificial Sequence
  Synthetic oligonucleotide
gttcttctgtgggttgttacaaaacgatag

SEQ ID NO: 474941 - DNA, 30 bp, Artificial Sequence
  Synthetic oligonucleotide
gctttaaaagacggggctggcgaacgatag

SEQ ID NO: 474942 - DNA, 30 bp, Artificial Sequence
  Synthetic oligonucleotide
tataacctaatctgaaaagctgcacgatag

SEQ ID NO: 474943 - DNA, 29 bp, Artificial Sequence
  Synthetic oligonucleotide
gtataaagggtatgctgttggctcgatag

SEQ ID NO: 474944 - DNA, 30 bp, Artificial Sequence
  Synthetic oligonucleotide
aagggctaagtcttggggctgtgtcgatag

SEQ ID NO: 474945 - DNA, 30 bp, Artificial Sequence
  Synthetic oligonucleotide
gattttggtatgcagagcttttgaggatag

SEQ ID NO: 474946 - DNA, 30 bp, Artificial Sequence
  Synthetic oligonucleotide
gtttatacggcccgagaattgcgcggatag

SEQ ID NO: 474947 - DNA, 31 bp, Artificial Sequence
  Synthetic oligonucleotide
gttacggtgtaacaggccgatggcgggatag

SEQ ID NO: 474948 - DNA, 30 bp, Artificial Sequence
  Synthetic oligonucleotide
tttagctacttaaagcgtagtcatggatag

SEQ ID NO: 474949 - DNA, 30 bp, Artificial Sequence
  Synthetic oligonucleotide
tcaaatttctgtgacgtggcgcctggatag

SEQ ID NO: 474950 - DNA, 30 bp, Artificial Sequence
  Synthetic oligonucleotide
ggataatttccgtgcaggtacgctggatag

SEQ ID NO: 474951 - DNA, 30 bp, Artificial Sequence
  Synthetic oligonucleotide
aatatccacactactctagtcagtggatag

SEQ ID NO: 474952 - DNA, 30 bp, Artificial Sequence
  Synthetic oligonucleotide
aaatgtttgaagtccttgatgagtggatag

SEQ ID NO: 474953 - DNA, 30 bp, Artificial Sequence
  Synthetic oligonucleotide
aggaaatgggaattgagcataatatgatag

SEQ ID NO: 474954 - DNA, 30 bp, Artificial Sequence
  Synthetic oligonucleotide
tcgggttttatattttaggaccactgatag

SEQ ID NO: 474955 - DNA, 30 bp, Artificial Sequence
  Synthetic oligonucleotide
cctaaactacccgcaagcacgctctgatag

SEQ ID NO: 474956 - DNA, 30 bp, Artificial Sequence
  Synthetic oligonucleotide
gtacatcaatgaatgacaaattcgtgatag

SEQ ID NO: 474957 - DNA, 30 bp, Artificial Sequence
  Synthetic oligonucleotide
gacattcggctttacgtggagcattgatag

SEQ ID NO: 474958 - DNA, 30 bp, Artificial Sequence
  Synthetic oligonucleotide
acattcattgacacaggcaacagttgatag

SEQ ID NO: 474959 - DNA, 30 bp, Artificial Sequence
  Synthetic oligonucleotide
tgggcatacagacaagataggagaatatag

SEQ ID NO: 474960 - DNA, 30 bp, Artificial Sequence
  Synthetic oligonucleotide
ccgctctggaatcgggtacccggaatatag

SEQ ID NO: 474961 - DNA, 30 bp, Artificial Sequence
  Synthetic oligonucleotide
attgagacggaggcgccattgataatatag

SEQ ID NO: 474962 - DNA, 30 bp, Artificial Sequence
  Synthetic oligonucleotide
aggcttatcgacgtgtagcgacgcatatag

SEQ ID NO: 474963 - DNA, 30 bp, Artificial Sequence
  Synthetic oligonucleotide
ttttcagattagtagctagaactgatatag

SEQ ID NO: 474964 - DNA, 30 bp, Artificial Sequence
  Synthetic oligonucleotide
cctaagggcgtttttgggggtaatatatag

SEQ ID NO: 474965 - DNA, 30 bp, Artificial Sequence
  Synthetic oligonucleotide
tgggcggggatacgaaccggagatatatag

SEQ ID NO: 474966 - DNA, 30 bp, Artificial Sequence
  Synthetic oligonucleotide
tttatgctgattaaacactgaagtatatag

SEQ ID NO: 474967 - DNA, 30 bp, Artificial Sequence
  Synthetic oligonucleotide
tcttttctggaatatgtccgggcactatag

SEQ ID NO: 474968 - DNA, 30 bp, Artificial Sequence
  Synthetic oligonucleotide
atgagaaacggtgtatatgtggcactatag

SEQ ID NO: 474969 - DNA, 30 bp, Artificial Sequence
  Synthetic oligonucleotide
tgctgaatttgatttcactttgcactatag

SEQ ID NO: 474970 - DNA, 30 bp, Artificial Sequence
  Synthetic oligonucleotide
gatcaccagggttgatgatgttacctatag

SEQ ID NO: 474971 - DNA, 30 bp, Artificial Sequence
  Synthetic oligonucleotide
atccgtgtttggtcgacggtgaccctatag

SEQ ID NO: 474972 - DNA, 30 bp, Artificial Sequence
  Synthetic oligonucleotide
ccccggtcttatttagagaaaagcctatag

SEQ ID NO: 474973 - DNA, 30 bp, Artificial Sequence
  Synthetic oligonucleotide
atttcctagacatgggtaatagtcctatag

SEQ ID NO: 474974 - DNA, 30 bp, Artificial Sequence
  Synthetic oligonucleotide
cctacgtggacaagtgttcaccagctatag

SEQ ID NO: 474975 - DNA, 30 bp, Artificial Sequence
  Synthetic oligonucleotide
tcccttaaggtgatagttattattctatag

SEQ ID NO: 474976 - DNA, 30 bp, Artificial Sequence
  Synthetic oligonucleotide
gcattacacttacgcccccgtatagtatag

SEQ ID NO: 474977 - DNA, 30 bp, Artificial Sequence
  Synthetic oligonucleotide
taatccttaagtggcggtgggcacgtatag

SEQ ID NO: 474978 - DNA, 30 bp, Artificial Sequence
  Synthetic oligonucleotide
ctagaatcaaatcgcgtgaagacggtatag

SEQ ID NO: 474979 - DNA, 30 bp, Artificial Sequence
  Synthetic oligonucleotide
gaagtgcgtgcagaagtgtattcggtatag

SEQ ID NO: 474980 - DNA, 30 bp, Artificial Sequence
  Synthetic oligonucleotide
ggctggtgccgcgggctcgtttcggtatag

SEQ ID NO: 474981 - DNA, 30 bp, Artificial Sequence
  Synthetic oligonucleotide
cacgatctttcttcttcactatacttatag

SEQ ID NO: 474982 - DNA, 30 bp, Artificial Sequence
  Synthetic oligonucleotide
gtatctaatgtcccccgcttaggcttatag

SEQ ID NO: 474983 - DNA, 30 bp, Artificial Sequence
  Synthetic oligonucleotide
atcgcttgagttagtgctgcatgcttatag

SEQ ID NO: 474984 - DNA, 30 bp, Artificial Sequence
  Synthetic oligonucleotide
atcaaagtatttttcggtaatatgttatag

SEQ ID NO: 474985 - DNA, 30 bp, Artificial Sequence
  Synthetic oligonucleotide
gggatacatatgtccgtgattgatttatag

SEQ ID NO: 474986 - DNA, 30 bp, Artificial Sequence
  Synthetic oligonucleotide
tagatgaagcaacagttctaatgcaactag

SEQ ID NO: 474987 - DNA, 30 bp, Artificial Sequence
  Synthetic oligonucleotide
cattatgtcccgtatccttggattaactag

SEQ ID NO: 474988 - DNA, 30 bp, Artificial Sequence
  Synthetic oligonucleotide
gtgcgaatgggccggcgccgtcttaactag

SEQ ID NO: 474989 - DNA, 30 bp, Artificial Sequence
  Synthetic oligonucleotide
cggctgtagcactctctacttaagcactag

SEQ ID NO: 474990 - DNA, 30 bp, Artificial Sequence
  Synthetic oligonucleotide
ttgcattaggcttaatcgaaggatcactag

SEQ ID NO: 474991 - DNA, 30 bp, Artificial Sequence
  Synthetic oligonucleotide
agccatctgagtggactggttcaagactag

SEQ ID NO: 474992 - DNA, 30 bp, Artificial Sequence
  Synthetic oligonucleotide
tcatcgtttggcagcgcatggatagactag

SEQ ID NO: 474993 - DNA, 30 bp, Artificial Sequence
  Synthetic oligonucleotide
cgttagagagtattagagacgtaggactag

SEQ ID NO: 474994 - DNA, 30 bp, Artificial Sequence
  Synthetic oligonucleotide
gttttactcccactttggtgacgggactag

SEQ ID NO: 474995 - DNA, 30 bp, Artificial Sequence
  Synthetic oligonucleotide
gaattttcaaaggttacctctcctgactag

SEQ ID NO: 474996 - DNA, 30 bp, Artificial Sequence
  Synthetic oligonucleotide
aggctctagtcaatgtgacaccgtgactag

SEQ ID NO: 474997 - DNA, 30 bp, Artificial Sequence
  Synthetic oligonucleotide
tgatctattcatcatatatgtaagtactag

SEQ ID NO: 474998 - DNA, 30 bp, Artificial Sequence
  Synthetic oligonucleotide
cctaggctacgttacccatacgagtactag

SEQ ID NO: 474999 - DNA, 30 bp, Artificial Sequence
  Synthetic oligonucleotide
gcccacggaagctagcgcttgtcgtactag

SEQ ID NO: 475000 - DNA, 30 bp, Artificial Sequence
  Synthetic oligonucleotide
ttctgtatgaacgacgtcctaagttactag

SEQ ID NO: 475001 - DNA, 30 bp, Artificial Sequence
  Synthetic oligonucleotide
acgcgtttagggcaaggcccacgttactag

SEQ ID NO: 475002 - DNA, 30 bp, Artificial Sequence
  Synthetic oligonucleotide
aatgatctacgagggcatatcggaacctag

SEQ ID NO: 475003 - DNA, 30 bp, Artificial Sequence
  Synthetic oligonucleotide
aaccttcggggttctctccatcccacctag

SEQ ID NO: 475004 - DNA, 30 bp, Artificial Sequence
  Synthetic oligonucleotide
agtgtatgttctggacaaatttgtacctag

SEQ ID NO: 475005 - DNA, 30 bp, Artificial Sequence
  Synthetic oligonucleotide
aggctaccccccgaccgcgtaggaccctag

SEQ ID NO: 475006 - DNA, 30 bp, Artificial Sequence
  Synthetic oligonucleotide
cagttcttcttgtggggtttattaccctag

SEQ ID NO: 475007 - DNA, 30 bp, Artificial Sequence
  Synthetic oligonucleotide
aatactgaccggacacaagagaatccctag

SEQ ID NO: 475008 - DNA, 30 bp, Artificial Sequence
  Synthetic oligonucleotide
gcgcccggtaccccacagcagcaagcctag

SEQ ID NO: 475009 - DNA, 30 bp, Artificial Sequence
  Synthetic oligonucleotide
tctcctgcttcctgggtagtccgtgcctag

SEQ ID NO: 475010 - DNA, 30 bp, Artificial Sequence
  Synthetic oligonucleotide
cactctaaggatgcctgcatgtaatcctag

SEQ ID NO: 475011 - DNA, 30 bp, Artificial Sequence
  Synthetic oligonucleotide
tgaaacgggcgtttagctagaccctcctag

SEQ ID NO: 475012 - DNA, 30 bp, Artificial Sequence
  Synthetic oligonucleotide
ctgatttattcggtaagttggctgtcctag

SEQ ID NO: 475013 - DNA, 30 bp, Artificial Sequence
  Synthetic oligonucleotide
tttaatcaactacgggcaccgagttcctag

SEQ ID NO: 475014 - DNA, 30 bp, Artificial Sequence
  Synthetic oligonucleotide
catgctatgttattaccacgtaaaagctag

SEQ ID NO: 475015 - DNA, 30 bp, Artificial Sequence
  Synthetic oligonucleotide
tttcccaagataagaagagagagaagctag

SEQ ID NO: 475016 - DNA, 30 bp, Artificial Sequence
  Synthetic oligonucleotide
aaggaacgagaataatccgccataagctag

SEQ ID NO: 475017 - DNA, 30 bp, Artificial Sequence
  Synthetic oligonucleotide
tatcagctggcatgcacaccgcgcagctag

SEQ ID NO: 475018 - DNA, 30 bp, Artificial Sequence
  Synthetic oligonucleotide
atgtagatttcaccattgtccccgagctag

SEQ ID NO: 475019 - DNA, 30 bp, Artificial Sequence
  Synthetic oligonucleotide
gacagcgggggctcttattccgtgagctag

SEQ ID NO: 475020 - DNA, 30 bp, Artificial Sequence
  Synthetic oligonucleotide
gatggtaagcagttcggattaccacgctag

SEQ ID NO: 475021 - DNA, 30 bp, Artificial Sequence
  Synthetic oligonucleotide
aacgcgcatcggctattagagaagcgctag

SEQ ID NO: 475022 - DNA, 30 bp, Artificial Sequence
  Synthetic oligonucleotide
cccgcacgaaagcgcaaccgagacggctag

SEQ ID NO: 475023 - DNA, 30 bp, Artificial Sequence
  Synthetic oligonucleotide
atcaaggcaatggcttattttagcggctag

SEQ ID NO: 475024 - DNA, 30 bp, Artificial Sequence
  Synthetic oligonucleotide
agctcaagtaagggtagcgccgcgggctag

SEQ ID NO: 475025 - DNA, 30 bp, Artificial Sequence
  Synthetic oligonucleotide
tcacacggccccgagcataaccggggctag

SEQ ID NO: 475026 - DNA, 30 bp, Artificial Sequence
  Synthetic oligonucleotide
gagagtttgcagtcggaagtaatatgctag

SEQ ID NO: 475027 - DNA, 30 bp, Artificial Sequence
  Synthetic oligonucleotide
gaaagagagtgtccttattttaagtgctag

SEQ ID NO: 475028 - DNA, 30 bp, Artificial Sequence
  Synthetic oligonucleotide
tgctctttaggagcgtgaactcggtgctag

SEQ ID NO: 475029 - DNA, 30 bp, Artificial Sequence
  Synthetic oligonucleotide
gattgaaattaccttgcgtagctgtgctag

SEQ ID NO: 475030 - DNA, 30 bp, Artificial Sequence
  Synthetic oligonucleotide
atttttctacgcaccggaaaactttgctag

SEQ ID NO: 475031 - DNA, 30 bp, Artificial Sequence
  Synthetic oligonucleotide
tattatattcgggttgtggacctaatctag

SEQ ID NO: 475032 - DNA, 30 bp, Artificial Sequence
  Synthetic oligonucleotide
agtccgttacatgctggaagtaacatctag

SEQ ID NO: 475033 - DNA, 30 bp, Artificial Sequence
  Synthetic oligonucleotide
tataaccggttgtgggcatgcagcatctag

SEQ ID NO: 475034 - DNA, 30 bp, Artificial Sequence
  Synthetic oligonucleotide
aggactttagcactgatttcccgcatctag

SEQ ID NO: 475035 - DNA, 30 bp, Artificial Sequence
  Synthetic oligonucleotide
gtcactcttgtctttgttttcaagatctag

SEQ ID NO: 475036 - DNA, 30 bp, Artificial Sequence
  Synthetic oligonucleotide
tacagcatgaagatgcgactcccgatctag

SEQ ID NO: 475037 - DNA, 30 bp, Artificial Sequence
  Synthetic oligonucleotide
gcgcttatgctaatcgtctattcgatctag

SEQ ID NO: 475038 - DNA, 30 bp, Artificial Sequence
  Synthetic oligonucleotide
tttttattcggatacgggcctcgtatctag

SEQ ID NO: 475039 - DNA, 25 bp, Artificial Sequence
  Synthetic oligonucleotide
tattgaccacaatagtggtatctag

SEQ ID NO: 475040 - DNA, 30 bp, Artificial Sequence
  Synthetic oligonucleotide
gtatgactattaggtcacttcaacctctag

SEQ ID NO: 475041 - DNA, 30 bp, Artificial Sequence
  Synthetic oligonucleotide
ggcggcaggtgtcctagggggggcctctag

SEQ ID NO: 475042 - DNA, 30 bp, Artificial Sequence
  Synthetic oligonucleotide
tttctagcggacttgatcccgacgctctag

SEQ ID NO: 475043 - DNA, 30 bp, Artificial Sequence
  Synthetic oligonucleotide
ttggcatctgattggaatcagtggctctag

SEQ ID NO: 475044 - DNA, 30 bp, Artificial Sequence
  Synthetic oligonucleotide
ggaactgggtatcaggccggttggctctag

SEQ ID NO: 475045 - DNA, 30 bp, Artificial Sequence
  Synthetic oligonucleotide
ttgatctgtgaacgaggtatttatctctag

SEQ ID NO: 475046 - DNA, 30 bp, Artificial Sequence
  Synthetic oligonucleotide
tagcttgctgcgacttatggatgagtctag

SEQ ID NO: 475047 - DNA, 30 bp, Artificial Sequence
  Synthetic oligonucleotide
ttgctatctaagaatggaccgcaggtctag

SEQ ID NO: 475048 - DNA, 30 bp, Artificial Sequence
  Synthetic oligonucleotide
ggcgactgcgtacaggttttttgggtctag

SEQ ID NO: 475049 - DNA, 30 bp, Artificial Sequence
  Synthetic oligonucleotide
ctcatgcacgcaccggctaaatgtgtctag

SEQ ID NO: 475050 - DNA, 30 bp, Artificial Sequence
  Synthetic oligonucleotide
cgaaagtgcacatacttaggcacattctag

SEQ ID NO: 475051 - DNA, 30 bp, Artificial Sequence
  Synthetic oligonucleotide
ttattctcgtgacggaatagcccattctag

SEQ ID NO: 475052 - DNA, 30 bp, Artificial Sequence
  Synthetic oligonucleotide
gcggccccgtggggggatcccaggttctag

SEQ ID NO: 475053 - DNA, 30 bp, Artificial Sequence
  Synthetic oligonucleotide
ggggaggacacagcaatcgaggtgttctag

SEQ ID NO: 475054 - DNA, 30 bp, Artificial Sequence
  Synthetic oligonucleotide
cccacctatgagacgccggtctctttctag

SEQ ID NO: 475055 - DNA, 30 bp, Artificial Sequence
  Synthetic oligonucleotide
gtcctgtgggacgtgttgatgcgaaagtag

SEQ ID NO: 475056 - DNA, 30 bp, Artificial Sequence
  Synthetic oligonucleotide
taccgcagagaggatgctgatggaaagtag

SEQ ID NO: 475057 - DNA, 30 bp, Artificial Sequence
  Synthetic oligonucleotide
tattggaatgacttggttgtaataaagtag

SEQ ID NO: 475058 - DNA, 30 bp, Artificial Sequence
  Synthetic oligonucleotide
tagtactacgttgagagcagcgtaaagtag

SEQ ID NO: 475059 - DNA, 30 bp, Artificial Sequence
  Synthetic oligonucleotide
aagggatatcctggtccggtaaacaagtag

SEQ ID NO: 475060 - DNA, 30 bp, Artificial Sequence
  Synthetic oligonucleotide
ttggttcgaagtctcttgtaaggcaagtag

SEQ ID NO: 475061 - DNA, 30 bp, Artificial Sequence
  Synthetic oligonucleotide
gaattgatcgaattattatcactgaagtag

SEQ ID NO: 475062 - DNA, 30 bp, Artificial Sequence
  Synthetic oligonucleotide
aatgggcttggtcttcgcggggtgaagtag

SEQ ID NO: 475063 - DNA, 30 bp, Artificial Sequence
  Synthetic oligonucleotide
aatatcagggttaccaggctacttaagtag

SEQ ID NO: 475064 - DNA, 30 bp, Artificial Sequence
  Synthetic oligonucleotide
gtatctcccaatcgtgaagtgccgcagtag

SEQ ID NO: 475065 - DNA, 30 bp, Artificial Sequence
  Synthetic oligonucleotide
tctatttgggaatgaagccctttgcagtag

SEQ ID NO: 475066 - DNA, 30 bp, Artificial Sequence
  Synthetic oligonucleotide
gtctgaggtacccgcaatctttgtcagtag

SEQ ID NO: 475067 - DNA, 30 bp, Artificial Sequence
  Synthetic oligonucleotide
caggtatagcctattcgtcgacacgagtag

SEQ ID NO: 475068 - DNA, 30 bp, Artificial Sequence
  Synthetic oligonucleotide
ctttttgtcaacgttgccatgaaggagtag

SEQ ID NO: 475069 - DNA, 30 bp, Artificial Sequence
  Synthetic oligonucleotide
tatgctggggccatgttggccgctgagtag

SEQ ID NO: 475070 - DNA, 30 bp, Artificial Sequence
  Synthetic oligonucleotide
tagtccggcggtaatgtggctcttgagtag

SEQ ID NO: 475071 - DNA, 30 bp, Artificial Sequence
  Synthetic oligonucleotide
ttaaggcttgtaccagggacttttgagtag

SEQ ID NO: 475072 - DNA, 30 bp, Artificial Sequence
  Synthetic oligonucleotide
gttctactcgaggtagtgtacatatagtag

SEQ ID NO: 475073 - DNA, 30 bp, Artificial Sequence
  Synthetic oligonucleotide
ataaattcctttgagggccagccgtagtag

SEQ ID NO: 475074 - DNA, 30 bp, Artificial Sequence
  Synthetic oligonucleotide
actcatgtatgctgcaggaatatgtagtag

SEQ ID NO: 475075 - DNA, 30 bp, Artificial Sequence
  Synthetic oligonucleotide
gggccggtccgtgaggggttacaaacgtag

SEQ ID NO: 475076 - DNA, 25 bp, Artificial Sequence
  Synthetic oligonucleotide
agccgttcagttacttacaacgtag

SEQ ID NO: 475077 - DNA, 30 bp, Artificial Sequence
  Synthetic oligonucleotide
gcgccgagggtcgtagtaacacgaacgtag

SEQ ID NO: 475078 - DNA, 30 bp, Artificial Sequence
  Synthetic oligonucleotide
gagcctcattccttacgttaagacacgtag

SEQ ID NO: 475079 - DNA, 30 bp, Artificial Sequence
  Synthetic oligonucleotide
cataagtgaataagacttgcggacacgtag

SEQ ID NO: 475080 - DNA, 30 bp, Artificial Sequence
  Synthetic oligonucleotide
ccgacctcgcccccggacctgagcacgtag

SEQ ID NO: 475081 - DNA, 30 bp, Artificial Sequence
  Synthetic oligonucleotide
cagccctgatgtgcccaagtcggcacgtag

SEQ ID NO: 475082 - DNA, 30 bp, Artificial Sequence
  Synthetic oligonucleotide
atattacactgacgtgaaagggttacgtag

SEQ ID NO: 475083 - DNA, 30 bp, Artificial Sequence
  Synthetic oligonucleotide
ttacctgagcgggtaaaggttcaaccgtag

SEQ ID NO: 475084 - DNA, 30 bp, Artificial Sequence
  Synthetic oligonucleotide
gtcctctgcgggtgggtgtcacgcccgtag

SEQ ID NO: 475085 - DNA, 30 bp, Artificial Sequence
  Synthetic oligonucleotide
gatgagcagcatatacagagcctcccgtag

SEQ ID NO: 475086 - DNA, 30 bp, Artificial Sequence
  Synthetic oligonucleotide
gcgcttgacggtatgtggtttgcgccgtag

SEQ ID NO: 475087 - DNA, 31 bp, Artificial Sequence
  Synthetic oligonucleotide
aattacattttcgtcttccgatacagcgtag

SEQ ID NO: 475088 - DNA, 30 bp, Artificial Sequence
  Synthetic oligonucleotide
cgtcgtgtcagttgtcgaggaaccgcgtag

SEQ ID NO: 475089 - DNA, 30 bp, Artificial Sequence
  Synthetic oligonucleotide
accggccagtggacatcggttcctgcgtag

SEQ ID NO: 475090 - DNA, 30 bp, Artificial Sequence
  Synthetic oligonucleotide
gctttcttattgaatccccagggatcgtag

SEQ ID NO: 475091 - DNA, 31 bp, Artificial Sequence
  Synthetic oligonucleotide
attaacctggtggcaactagctatatcgtag

SEQ ID NO: 475092 - DNA, 30 bp, Artificial Sequence
  Synthetic oligonucleotide
gggcgcggccgtacgggattatcttcgtag

SEQ ID NO: 475093 - DNA, 30 bp, Artificial Sequence
  Synthetic oligonucleotide
acgcaggtatgagttatagcgtaaaggtag

SEQ ID NO: 475094 - DNA, 30 bp, Artificial Sequence
  Synthetic oligonucleotide
gaacactaccactcacgacagtgaaggtag

SEQ ID NO: 475095 - DNA, 29 bp, Artificial Sequence
  Synthetic oligonucleotide
gaatggcgagttttgaagaacgcaggtag

SEQ ID NO: 475096 - DNA, 30 bp, Artificial Sequence
  Synthetic oligonucleotide
gtcatacacctataactttatacgaggtag

SEQ ID NO: 475097 - DNA, 30 bp, Artificial Sequence
  Synthetic oligonucleotide
gagctctagctttgggattaccataggtag

SEQ ID NO: 475098 - DNA, 30 bp, Artificial Sequence
  Synthetic oligonucleotide
tattcaccaaaactctcgcaacgtaggtag

SEQ ID NO: 475099 - DNA, 30 bp, Artificial Sequence
  Synthetic oligonucleotide
gttctcatatctacctaggaatttaggtag

SEQ ID NO: 475100 - DNA, 30 bp, Artificial Sequence
  Synthetic oligonucleotide
ctttattgaggatctaatccgccacggtag

SEQ ID NO: 475101 - DNA, 30 bp, Artificial Sequence
  Synthetic oligonucleotide
tcactcgtagttattagagtcgtacggtag

SEQ ID NO: 475102 - DNA, 30 bp, Artificial Sequence
  Synthetic oligonucleotide
ttctacggtggtttaggtgcgcatcggtag

SEQ ID NO: 475103 - DNA, 30 bp, Artificial Sequence
  Synthetic oligonucleotide
ttaagtcaccctgttcgttgattcgggtag

SEQ ID NO: 475104 - DNA, 30 bp, Artificial Sequence
  Synthetic oligonucleotide
gtctctattacacgcaaggcgttcgggtag

SEQ ID NO: 475105 - DNA, 30 bp, Artificial Sequence
  Synthetic oligonucleotide
ttttattcatagatgcgaattagggggtag

SEQ ID NO: 475106 - DNA, 30 bp, Artificial Sequence
  Synthetic oligonucleotide
atcgtttattagccttaccgaggggggtag

SEQ ID NO: 475107 - DNA, 30 bp, Artificial Sequence
  Synthetic oligonucleotide
gcagtgttgccccaacgagtctatgggtag

SEQ ID NO: 475108 - DNA, 30 bp, Artificial Sequence
  Synthetic oligonucleotide
ccgataatgtttgtatgttagccaatgtag

SEQ ID NO: 475109 - DNA, 30 bp, Artificial Sequence
  Synthetic oligonucleotide
gtctttcatgggcttcgtcgaggaatgtag

SEQ ID NO: 475110 - DNA, 30 bp, Artificial Sequence
  Synthetic oligonucleotide
aaacatcctgtcacacgcactagcatgtag

SEQ ID NO: 475111 - DNA, 30 bp, Artificial Sequence
  Synthetic oligonucleotide
tatggaacgcagcgtctccctatgatgtag

SEQ ID NO: 475112 - DNA, 30 bp, Artificial Sequence
  Synthetic oligonucleotide
atctttagcaaaccattgctgattatgtag

SEQ ID NO: 475113 - DNA, 30 bp, Artificial Sequence
  Synthetic oligonucleotide
ggctgctataacatataattgattatgtag

SEQ ID NO: 475114 - DNA, 30 bp, Artificial Sequence
  Synthetic oligonucleotide
aggaccgattaacataaacaagcactgtag

SEQ ID NO: 475115 - DNA, 30 bp, Artificial Sequence
  Synthetic oligonucleotide
gcacccctatatgaggggctgggactgtag

SEQ ID NO: 475116 - DNA, 30 bp, Artificial Sequence
  Synthetic oligonucleotide
gtggcatgctgtaaagcacctcggctgtag

SEQ ID NO: 475117 - DNA, 30 bp, Artificial Sequence
  Synthetic oligonucleotide
ctaaaggggccgtggtactccggtctgtag

SEQ ID NO: 475118 - DNA, 30 bp, Artificial Sequence
  Synthetic oligonucleotide
acgggaaaatactaaagcgtaattctgtag

SEQ ID NO: 475119 - DNA, 30 bp, Artificial Sequence
  Synthetic oligonucleotide
cagcgcacaccttcctagataaacgtgtag

SEQ ID NO: 475120 - DNA, 30 bp, Artificial Sequence
  Synthetic oligonucleotide
gttttctgtatctgaccaactcaggtgtag

SEQ ID NO: 475121 - DNA, 30 bp, Artificial Sequence
  Synthetic oligonucleotide
aatagttgggattatgatacagcggtgtag

SEQ ID NO: 475122 - DNA, 30 bp, Artificial Sequence
  Synthetic oligonucleotide
gagtgttctggtgcctatgaatatgtgtag

SEQ ID NO: 475123 - DNA, 30 bp, Artificial Sequence
  Synthetic oligonucleotide
cttcggtcatccgatggtgttttattgtag

SEQ ID NO: 475124 - DNA, 30 bp, Artificial Sequence
  Synthetic oligonucleotide
cccaagttagtcctccgtagtcccttgtag

SEQ ID NO: 475125 - DNA, 29 bp, Artificial Sequence
  Synthetic oligonucleotide
caatgtaggctaagaagagtcatttgtag

SEQ ID NO: 475126 - DNA, 30 bp, Artificial Sequence
  Synthetic oligonucleotide
taagtccttggacactacactcctttgtag

SEQ ID NO: 475127 - DNA, 30 bp, Artificial Sequence
  Synthetic oligonucleotide
gtagggggtgcttatgtttgttgtttgtag

SEQ ID NO: 475128 - DNA, 30 bp, Artificial Sequence
  Synthetic oligonucleotide
gagaatccgtttggaataccatttttgtag

SEQ ID NO: 475129 - DNA, 30 bp, Artificial Sequence
  Synthetic oligonucleotide
tatggatgtgtcaagttacatgaaaattag

SEQ ID NO: 475130 - DNA, 30 bp, Artificial Sequence
  Synthetic oligonucleotide
gcacgtaaattgggatctcgagccaattag

SEQ ID NO: 475131 - DNA, 30 bp, Artificial Sequence
  Synthetic oligonucleotide
tgcaaacaggcctgatagcaatccaattag

SEQ ID NO: 475132 - DNA, 30 bp, Artificial Sequence
  Synthetic oligonucleotide
ttgactatagattttctccgcttcaattag

SEQ ID NO: 475133 - DNA, 30 bp, Artificial Sequence
  Synthetic oligonucleotide
cagttcagtagtgaggtcggaattaattag

SEQ ID NO: 475134 - DNA, 30 bp, Artificial Sequence
  Synthetic oligonucleotide
gaccctcataaacgctcgagagttaattag

SEQ ID NO: 475135 - DNA, 30 bp, Artificial Sequence
  Synthetic oligonucleotide
gaggtaatttcgttattttggtttaattag

SEQ ID NO: 475136 - DNA, 30 bp, Artificial Sequence
  Synthetic oligonucleotide
ggtgagcgtattatggagaatttccattag

SEQ ID NO: 475137 - DNA, 30 bp, Artificial Sequence
  Synthetic oligonucleotide
ctccaagtaccattagatagacagcattag

SEQ ID NO: 475138 - DNA, 30 bp, Artificial Sequence
  Synthetic oligonucleotide
tacactctgcttccaggttaggagcattag

SEQ ID NO: 475139 - DNA, 30 bp, Artificial Sequence
  Synthetic oligonucleotide
attgaattcatcttcccaaattagcattag

SEQ ID NO: 475140 - DNA, 30 bp, Artificial Sequence
  Synthetic oligonucleotide
gatgcaagcctctatcaaataatagattag

SEQ ID NO: 475141 - DNA, 30 bp, Artificial Sequence
  Synthetic oligonucleotide
gttacaaatttgtgcaccttgtgcgattag

SEQ ID NO: 475142 - DNA, 30 bp, Artificial Sequence
  Synthetic oligonucleotide
catttgcacagatactctggtcatgattag

SEQ ID NO: 475143 - DNA, 30 bp, Artificial Sequence
  Synthetic oligonucleotide
gcggcacctcgtatacagttctatgattag

SEQ ID NO: 475144 - DNA, 30 bp, Artificial Sequence
  Synthetic oligonucleotide
gattagaactactacgaattaaaatattag

SEQ ID NO: 475145 - DNA, 30 bp, Artificial Sequence
  Synthetic oligonucleotide
gagagtcagaggatttagacttaatattag

SEQ ID NO: 475146 - DNA, 30 bp, Artificial Sequence
  Synthetic oligonucleotide
tattcttttagctggctcatgagatattag

SEQ ID NO: 475147 - DNA, 30 bp, Artificial Sequence
  Synthetic oligonucleotide
cggtgactcctatactctggaatatattag

SEQ ID NO: 475148 - DNA, 30 bp, Artificial Sequence
  Synthetic oligonucleotide
tatcccccgagccttaaagttcgttattag

SEQ ID NO: 475149 - DNA, 30 bp, Artificial Sequence
  Synthetic oligonucleotide
cagctaatagcctgtcaacatgtaacttag

SEQ ID NO: 475150 - DNA, 30 bp, Artificial Sequence
  Synthetic oligonucleotide
gaaaggattatttactttgggcgcacttag

SEQ ID NO: 475151 - DNA, 30 bp, Artificial Sequence
  Synthetic oligonucleotide
atgtgttggaccattatacttttgacttag

SEQ ID NO: 475152 - DNA, 30 bp, Artificial Sequence
  Synthetic oligonucleotide
cgctctattgacctgcgccttagtacttag

SEQ ID NO: 475153 - DNA, 30 bp, Artificial Sequence
  Synthetic oligonucleotide
gtggcagggccgggactttgcggtacttag

SEQ ID NO: 475154 - DNA, 30 bp, Artificial Sequence
  Synthetic oligonucleotide
aattgaataaacgggcttcaatagccttag

SEQ ID NO: 475155 - DNA, 30 bp, Artificial Sequence
  Synthetic oligonucleotide
ccatacacgggctcttatacttgtccttag

SEQ ID NO: 475156 - DNA, 30 bp, Artificial Sequence
  Synthetic oligonucleotide
ccgctacccaatggtggaataacagcttag

SEQ ID NO: 475157 - DNA, 30 bp, Artificial Sequence
  Synthetic oligonucleotide
ctctggtgaaccccacgggccggagcttag

SEQ ID NO: 475158 - DNA, 30 bp, Artificial Sequence
  Synthetic oligonucleotide
gtgatgtgcagccagcgtttctccgcttag

SEQ ID NO: 475159 - DNA, 30 bp, Artificial Sequence
  Synthetic oligonucleotide
catactaaaaatgaggctaagatcgcttag

SEQ ID NO: 475160 - DNA, 30 bp, Artificial Sequence
  Synthetic oligonucleotide
ggattatgcggacttgaagtcgtcgcttag

SEQ ID NO: 475161 - DNA, 30 bp, Artificial Sequence
  Synthetic oligonucleotide
attttataagtgagatatcggttcgcttag

SEQ ID NO: 475162 - DNA, 30 bp, Artificial Sequence
  Synthetic oligonucleotide
cctgtgtccagtacataaatttaggcttag

SEQ ID NO: 475163 - DNA, 30 bp, Artificial Sequence
  Synthetic oligonucleotide
gtcgtgccatgaaaagagatggcggcttag

SEQ ID NO: 475164 - DNA, 30 bp, Artificial Sequence
  Synthetic oligonucleotide
ttatcgttatgcgccggagagtcggcttag

SEQ ID NO: 475165 - DNA, 30 bp, Artificial Sequence
  Synthetic oligonucleotide
agtaatcgtgccacaattcgcagggcttag

SEQ ID NO: 475166 - DNA, 30 bp, Artificial Sequence
  Synthetic oligonucleotide
gagggtaggggtaaagagggaggggcttag

SEQ ID NO: 475167 - DNA, 30 bp, Artificial Sequence
  Synthetic oligonucleotide
gggctagaatttggagcccagggggcttag

SEQ ID NO: 475168 - DNA, 30 bp, Artificial Sequence
  Synthetic oligonucleotide
tatctccggtctttagagatccctgcttag

SEQ ID NO: 475169 - DNA, 30 bp, Artificial Sequence
  Synthetic oligonucleotide
cgaacctcgacacacctgagcatctcttag

SEQ ID NO: 475170 - DNA, 30 bp, Artificial Sequence
  Synthetic oligonucleotide
tgtctaaatggggaccgtttgctaagttag

SEQ ID NO: 475171 - DNA, 30 bp, Artificial Sequence
  Synthetic oligonucleotide
gtttcggttaagagaaataatgtaagttag

SEQ ID NO: 475172 - DNA, 30 bp, Artificial Sequence
  Synthetic oligonucleotide
cgttttcgcggacaccgggaaggcagttag

SEQ ID NO: 475173 - DNA, 30 bp, Artificial Sequence
  Synthetic oligonucleotide
tattaaacgcacttggactatggcagttag

SEQ ID NO: 475174 - DNA, 30 bp, Artificial Sequence
  Synthetic oligonucleotide
gatttctagaatgtaagtttgtagagttag

SEQ ID NO: 475175 - DNA, 30 bp, Artificial Sequence
  Synthetic oligonucleotide
cctatatttgggtactacatttagagttag

SEQ ID NO: 475176 - DNA, 30 bp, Artificial Sequence
  Synthetic oligonucleotide
ttcagatctagatgtggctaacggagttag

SEQ ID NO: 475177 - DNA, 30 bp, Artificial Sequence
  Synthetic oligonucleotide
ataaggctcgcttcagatcgcggccgttag

SEQ ID NO: 475178 - DNA, 30 bp, Artificial Sequence
  Synthetic oligonucleotide
ctgttcgtatctacaagcttaactcgttag

SEQ ID NO: 475179 - DNA, 30 bp, Artificial Sequence
  Synthetic oligonucleotide
tattatagatcaagatcaaatcctcgttag

SEQ ID NO: 475180 - DNA, 30 bp, Artificial Sequence
  Synthetic oligonucleotide
attaagcgtctaattaggggatgtcgttag

SEQ ID NO: 475181 - DNA, 30 bp, Artificial Sequence
  Synthetic oligonucleotide
gtatattaggctctaataggatttcgttag

SEQ ID NO: 475182 - DNA, 30 bp, Artificial Sequence
  Synthetic oligonucleotide
ggcctcttttattgtatgagataaggttag

SEQ ID NO: 475183 - DNA, 30 bp, Artificial Sequence
  Synthetic oligonucleotide
tgtcatttgtcgtctctagctctaggttag

SEQ ID NO: 475184 - DNA, 30 bp, Artificial Sequence
  Synthetic oligonucleotide
attatgatgttccaatccgtcttcggttag

SEQ ID NO: 475185 - DNA, 30 bp, Artificial Sequence
  Synthetic oligonucleotide
ggtccatctctgttatctgtagttggttag

SEQ ID NO: 475186 - DNA, 30 bp, Artificial Sequence
  Synthetic oligonucleotide
ttctacccttcgtgggtggaacgctgttag

SEQ ID NO: 475187 - DNA, 30 bp, Artificial Sequence
  Synthetic oligonucleotide
tcggttaccgaagtaccattttgctgttag

SEQ ID NO: 475188 - DNA, 30 bp, Artificial Sequence
  Synthetic oligonucleotide
tctagtattgggagcgccccctggtgttag

SEQ ID NO: 475189 - DNA, 30 bp, Artificial Sequence
  Synthetic oligonucleotide
ttgtatacgttaaattacttatattgttag

SEQ ID NO: 475190 - DNA, 30 bp, Artificial Sequence
  Synthetic oligonucleotide
ctctagcgatagccgaggactagttgttag

SEQ ID NO: 475191 - DNA, 30 bp, Artificial Sequence
  Synthetic oligonucleotide
gatcacactcggcccgtaacgcaaatttag

SEQ ID NO: 475192 - DNA, 30 bp, Artificial Sequence
  Synthetic oligonucleotide
aatgttattggggccaccagaacaatttag

SEQ ID NO: 475193 - DNA, 29 bp, Artificial Sequence
  Synthetic oligonucleotide
ttatcgcgctactaaagtagataatttag

SEQ ID NO: 475194 - DNA, 30 bp, Artificial Sequence
  Synthetic oligonucleotide
aagactatcttagggcggcctttaatttag

SEQ ID NO: 475195 - DNA, 30 bp, Artificial Sequence
  Synthetic oligonucleotide
gatctacattttatatctggagccatttag

SEQ ID NO: 475196 - DNA, 30 bp, Artificial Sequence
  Synthetic oligonucleotide
cgctgataccaacttgttgcgtccatttag

SEQ ID NO: 475197 - DNA, 30 bp, Artificial Sequence
  Synthetic oligonucleotide
agtcgcgaggtgttgaccggtggactttag

SEQ ID NO: 475198 - DNA, 30 bp, Artificial Sequence
  Synthetic oligonucleotide
gttagaattctatgattaagtacgctttag

SEQ ID NO: 475199 - DNA, 30 bp, Artificial Sequence
  Synthetic oligonucleotide
actggtaatagcagcaataaggggctttag

SEQ ID NO: 475200 - DNA, 30 bp, Artificial Sequence
  Synthetic oligonucleotide
aaagtcatagagcagctttagctagtttag

SEQ ID NO: 475201 - DNA, 30 bp, Artificial Sequence
  Synthetic oligonucleotide
tccgtccaagcacgattgggatccgtttag

SEQ ID NO: 475202 - DNA, 30 bp, Artificial Sequence
  Synthetic oligonucleotide
ggcgttggctggtttttaaaaccggtttag

SEQ ID NO: 475203 - DNA, 30 bp, Artificial Sequence
  Synthetic oligonucleotide
gtggctgcaattgtccgaattaatgtttag

SEQ ID NO: 475204 - DNA, 30 bp, Artificial Sequence
  Synthetic oligonucleotide
gtacttatccgtaaagtgatacatgtttag

SEQ ID NO: 475205 - DNA, 30 bp, Artificial Sequence
  Synthetic oligonucleotide
tatggggcaaaggctttgagggctgtttag

SEQ ID NO: 475206 - DNA, 30 bp, Artificial Sequence
  Synthetic oligonucleotide
gctatcctgtttaaaggatgattattttag

SEQ ID NO: 475207 - DNA, 30 bp, Artificial Sequence
  Synthetic oligonucleotide
tccaaagtctttgtggctctgtcgttttag

SEQ ID NO: 475208 - DNA, 30 bp, Artificial Sequence
  Synthetic oligonucleotide
aatggcgagtcactaagacaacggttttag

SEQ ID NO: 475209 - DNA, 30 bp, Artificial Sequence
  Synthetic oligonucleotide
attagtgattggaccgtgggcttgttttag

SEQ ID NO: 475210 - DNA, 30 bp, Artificial Sequence
  Synthetic oligonucleotide
gtggatcatcaaacctgatgtgatttttag

SEQ ID NO: 475211 - DNA, 30 bp, Artificial Sequence
  Synthetic oligonucleotide
acatatagttcagtaagcgtatatttttag

SEQ ID NO: 475212 - DNA, 30 bp, Artificial Sequence
  Synthetic oligonucleotide
tttcctcagttactaactggtgctttttag

SEQ ID NO: 475213 - DNA, 30 bp, Artificial Sequence
  Synthetic oligonucleotide
cggactttctggggcagattgttcaaaacg

SEQ ID NO: 475214 - DNA, 30 bp, Artificial Sequence
  Synthetic oligonucleotide
agacgagcagatgcagcatacgagaaaacg

SEQ ID NO: 475215 - DNA, 30 bp, Artificial Sequence
  Synthetic oligonucleotide
tcacggagtgaccagtcacatgcgaaaacg

SEQ ID NO: 475216 - DNA, 30 bp, Artificial Sequence
  Synthetic oligonucleotide
aaacttgaaccgttttagatccataaaacg

SEQ ID NO: 475217 - DNA, 30 bp, Artificial Sequence
  Synthetic oligonucleotide
tgggtgctaatattgtcgacacaacaaacg

SEQ ID NO: 475218 - DNA, 30 bp, Artificial Sequence
  Synthetic oligonucleotide
gacagtctgtttggctctagtagacaaacg

SEQ ID NO: 475219 - DNA, 30 bp, Artificial Sequence
  Synthetic oligonucleotide
acccttcgagtacctgcagggacgcaaacg

SEQ ID NO: 475220 - DNA, 30 bp, Artificial Sequence
  Synthetic oligonucleotide
gaacgtacttttgattgcaagctgcaaacg

SEQ ID NO: 475221 - DNA, 30 bp, Artificial Sequence
  Synthetic oligonucleotide
gtccttctcggtcggagttctcctcaaacg

SEQ ID NO: 475222 - DNA, 30 bp, Artificial Sequence
  Synthetic oligonucleotide
actatcttatttacgacacgtcttcaaacg

SEQ ID NO: 475223 - DNA, 30 bp, Artificial Sequence
  Synthetic oligonucleotide
tatatgataccgtcaacttttttcgaaacg

SEQ ID NO: 475224 - DNA, 30 bp, Artificial Sequence
  Synthetic oligonucleotide
ttaactattctacaacggtatatggaaacg

SEQ ID NO: 475225 - DNA, 30 bp, Artificial Sequence
  Synthetic oligonucleotide
acttcatgactgcaagcggggggtgaaacg

SEQ ID NO: 475226 - DNA, 30 bp, Artificial Sequence
  Synthetic oligonucleotide
ataagccgggttccccgctgtggtgaaacg

SEQ ID NO: 475227 - DNA, 30 bp, Artificial Sequence
  Synthetic oligonucleotide
ccgctctcaggacattacccgttctaaacg

SEQ ID NO: 475228 - DNA, 30 bp, Artificial Sequence
  Synthetic oligonucleotide
gatggtacgtatgatctagcatcaacaacg

SEQ ID NO: 475229 - DNA, 30 bp, Artificial Sequence
  Synthetic oligonucleotide
atcgcaccacactgtatcgcaaccacaacg

SEQ ID NO: 475230 - DNA, 30 bp, Artificial Sequence
  Synthetic oligonucleotide
gtgcggttgagactatactccttcacaacg

SEQ ID NO: 475231 - DNA, 30 bp, Artificial Sequence
  Synthetic oligonucleotide
cagacgctgcgcaagaaacttgggacaacg

SEQ ID NO: 475232 - DNA, 31 bp, Artificial Sequence
  Synthetic oligonucleotide
tgtcccgagaccggtgctcttttgaccaacg

SEQ ID NO: 475233 - DNA, 30 bp, Artificial Sequence
  Synthetic oligonucleotide
agctcgacctgacgcttagcggagccaacg

SEQ ID NO: 475234 - DNA, 30 bp, Artificial Sequence
  Synthetic oligonucleotide
tcctatcgtatgggtttgtgatagccaacg

SEQ ID NO: 475235 - DNA, 30 bp, Artificial Sequence
  Synthetic oligonucleotide
ttagcatatatctaagggattaggccaacg

SEQ ID NO: 475236 - DNA, 30 bp, Artificial Sequence
  Synthetic oligonucleotide
cggcattttcaataattcaaggctccaacg

SEQ ID NO: 475237 - DNA, 30 bp, Artificial Sequence
  Synthetic oligonucleotide
cacgcacgcctcgacagcgctccagcaacg

SEQ ID NO: 475238 - DNA, 30 bp, Artificial Sequence
  Synthetic oligonucleotide
gagtgtgtccaccgcaaaccagtagcaacg

SEQ ID NO: 475239 - DNA, 30 bp, Artificial Sequence
  Synthetic oligonucleotide
agcgcccttcgtgatataaacgtagcaacg

SEQ ID NO: 475240 - DNA, 30 bp, Artificial Sequence
  Synthetic oligonucleotide
gggttctcgttcactctgctcaccgcaacg

SEQ ID NO: 475241 - DNA, 30 bp, Artificial Sequence
  Synthetic oligonucleotide
aattgggcagtggctgcctatgtcgcaacg

SEQ ID NO: 475242 - DNA, 30 bp, Artificial Sequence
  Synthetic oligonucleotide
attcggtgagtataagggtactgtgcaacg

SEQ ID NO: 475243 - DNA, 30 bp, Artificial Sequence
  Synthetic oligonucleotide
tttccaaagcgtagacccaatagatcaacg

SEQ ID NO: 475244 - DNA, 30 bp, Artificial Sequence
  Synthetic oligonucleotide
caatcttggctgctcttctgtggatcaacg

SEQ ID NO: 475245 - DNA, 30 bp, Artificial Sequence
  Synthetic oligonucleotide
gagtaattagggttcagtctattatcaacg

SEQ ID NO: 475246 - DNA, 30 bp, Artificial Sequence
  Synthetic oligonucleotide
gattaaccagcgcgattgacgtactcaacg

SEQ ID NO: 475247 - DNA, 30 bp, Artificial Sequence
  Synthetic oligonucleotide
atagcctgtcttggatttgctttctcaacg

SEQ ID NO: 475248 - DNA, 30 bp, Artificial Sequence
  Synthetic oligonucleotide
ggctattcagtaccttacgcacggtcaacg

SEQ ID NO: 475249 - DNA, 30 bp, Artificial Sequence
  Synthetic oligonucleotide
acccgttgatgtgaggtaaaggtttcaacg

SEQ ID NO: 475250 - DNA, 30 bp, Artificial Sequence
  Synthetic oligonucleotide
atagccggatcgcttcagttttgaagaacg

SEQ ID NO: 475251 - DNA, 30 bp, Artificial Sequence
  Synthetic oligonucleotide
atagttaaccgtggacatactgtaagaacg

SEQ ID NO: 475252 - DNA, 30 bp, Artificial Sequence
  Synthetic oligonucleotide
gtaggtgccggggttagtgacaatagaacg

SEQ ID NO: 475253 - DNA, 30 bp, Artificial Sequence
  Synthetic oligonucleotide
ttaacttggctctcagtattacatagaacg

SEQ ID NO: 475254 - DNA, 30 bp, Artificial Sequence
  Synthetic oligonucleotide
cgggccgatggctaggccgtgggtagaacg

SEQ ID NO: 475255 - DNA, 30 bp, Artificial Sequence
  Synthetic oligonucleotide
caaaccctactccgggcgcctactcgaacg

SEQ ID NO: 475256 - DNA, 30 bp, Artificial Sequence
  Synthetic oligonucleotide
caactatgaaactcgagggcgtttcgaacg

SEQ ID NO: 475257 - DNA, 30 bp, Artificial Sequence
  Synthetic oligonucleotide
aagcttgatcgtacgcggacgaacggaacg

SEQ ID NO: 475258 - DNA, 30 bp, Artificial Sequence
  Synthetic oligonucleotide
acgtcagaaccacgtagccatggcggaacg

SEQ ID NO: 475259 - DNA, 30 bp, Artificial Sequence
  Synthetic oligonucleotide
actgatcggggacctggcaaatagggaacg

SEQ ID NO: 475260 - DNA, 30 bp, Artificial Sequence
  Synthetic oligonucleotide
ggcgtcgcgcacgggcgttggccgggaacg

SEQ ID NO: 475261 - DNA, 30 bp, Artificial Sequence
  Synthetic oligonucleotide
gtcaggacgccgctaactgaacttggaacg

SEQ ID NO: 475262 - DNA, 30 bp, Artificial Sequence
  Synthetic oligonucleotide
ccgaacagattccggaggcagtcatgaacg

SEQ ID NO: 475263 - DNA, 30 bp, Artificial Sequence
  Synthetic oligonucleotide
caacccatgctcggtctcctttggtgaacg

SEQ ID NO: 475264 - DNA, 30 bp, Artificial Sequence
  Synthetic oligonucleotide
tgcacagctggtcgtcagctggtttgaacg

SEQ ID NO: 475265 - DNA, 30 bp, Artificial Sequence
  Synthetic oligonucleotide
gcgggttcatggtacgcgaaaagaataacg

SEQ ID NO: 475266 - DNA, 30 bp, Artificial Sequence
  Synthetic oligonucleotide
ttgctggtgactataacccttctaataacg

SEQ ID NO: 475267 - DNA, 30 bp, Artificial Sequence
  Synthetic oligonucleotide
ccctgttacgcactgagccatgtaataacg

SEQ ID NO: 475268 - DNA, 29 bp, Artificial Sequence
  Synthetic oligonucleotide
gagcgacctggccgttgtttgtaataacg

SEQ ID NO: 475269 - DNA, 30 bp, Artificial Sequence
  Synthetic oligonucleotide
ttcttgcttgtcagcttagcctagataacg

SEQ ID NO: 475270 - DNA, 30 bp, Artificial Sequence
  Synthetic oligonucleotide
attaggtactattgcggaatcgtgataacg

SEQ ID NO: 475271 - DNA, 30 bp, Artificial Sequence
  Synthetic oligonucleotide
cagaaccagccacattaggcatacctaacg

SEQ ID NO: 475272 - DNA, 30 bp, Artificial Sequence
  Synthetic oligonucleotide
ttgcgattacgatatcggacgtggctaacg

SEQ ID NO: 475273 - DNA, 30 bp, Artificial Sequence
  Synthetic oligonucleotide
gcctcttcacattcctttggtctagtaacg

SEQ ID NO: 475274 - DNA, 30 bp, Artificial Sequence
  Synthetic oligonucleotide
tttcaaggccgagacctatacagggtaacg

SEQ ID NO: 475275 - DNA, 30 bp, Artificial Sequence
  Synthetic oligonucleotide
tagccttggacttggctaccgttggtaacg

SEQ ID NO: 475276 - DNA, 30 bp, Artificial Sequence
  Synthetic oligonucleotide
tccgcggttaactaaacacgtatattaacg

SEQ ID NO: 475277 - DNA, 30 bp, Artificial Sequence
  Synthetic oligonucleotide
aatccccgggccgaaccgatcttattaacg

SEQ ID NO: 475278 - DNA, 30 bp, Artificial Sequence
  Synthetic oligonucleotide
gtttgctcaaaggacggcagtttattaacg

SEQ ID NO: 475279 - DNA, 30 bp, Artificial Sequence
  Synthetic oligonucleotide
caattgactttatacaaagtttacttaacg

SEQ ID NO: 475280 - DNA, 29 bp, Artificial Sequence
  Synthetic oligonucleotide
gcttcgctaaacagctgctcgtcttaacg

SEQ ID NO: 475281 - DNA, 30 bp, Artificial Sequence
  Synthetic oligonucleotide
gttatccttcacggtggggcggagttaacg

SEQ ID NO: 475282 - DNA, 30 bp, Artificial Sequence
  Synthetic oligonucleotide
gagtattgttaggggaagcattggttaacg

SEQ ID NO: 475283 - DNA, 30 bp, Artificial Sequence
  Synthetic oligonucleotide
aaccgccttccctcggccagcaatttaacg

SEQ ID NO: 475284 - DNA, 30 bp, Artificial Sequence
  Synthetic oligonucleotide
aaggaccttattcatttaggcgttttaacg

SEQ ID NO: 475285 - DNA, 30 bp, Artificial Sequence
  Synthetic oligonucleotide
aaaagattcagacgggccatgttgaacacg

SEQ ID NO: 475286 - DNA, 30 bp, Artificial Sequence
  Synthetic oligonucleotide
agtatttccggtaaatataatactaacacg

SEQ ID NO: 475287 - DNA, 30 bp, Artificial Sequence
  Synthetic oligonucleotide
cgaattattgcccgtgggcatccacacacg

SEQ ID NO: 475288 - DNA, 30 bp, Artificial Sequence
  Synthetic oligonucleotide
acatcatctgagatctggaagtcacacacg

SEQ ID NO: 475289 - DNA, 30 bp, Artificial Sequence
  Synthetic oligonucleotide
gaaaaacgcagtagccggtgctccgacacg

SEQ ID NO: 475290 - DNA, 30 bp, Artificial Sequence
  Synthetic oligonucleotide
ggccaagaggttagatggtggccggacacg

SEQ ID NO: 475291 - DNA, 30 bp, Artificial Sequence
  Synthetic oligonucleotide
cttcctgaccgctacgctaggtatgacacg

SEQ ID NO: 475292 - DNA, 30 bp, Artificial Sequence
  Synthetic oligonucleotide
ttcttgatgggtatgcggacaaaatacacg

SEQ ID NO: 475293 - DNA, 30 bp, Artificial Sequence
  Synthetic oligonucleotide
aatctacgggttctgaaaaagttatacacg

SEQ ID NO: 475294 - DNA, 30 bp, Artificial Sequence
  Synthetic oligonucleotide
gacactcttcctgcgctagtttagtacacg

SEQ ID NO: 475295 - DNA, 30 bp, Artificial Sequence
  Synthetic oligonucleotide
aatactatataagctgtcatacgttacacg

SEQ ID NO: 475296 - DNA, 31 bp, Artificial Sequence
  Synthetic oligonucleotide
cggagggcgcggaatggtatcacaaaccacg

SEQ ID NO: 475297 - DNA, 30 bp, Artificial Sequence
  Synthetic oligonucleotide
ggcgcgtggtaagactctgagtgaaccacg

SEQ ID NO: 475298 - DNA, 30 bp, Artificial Sequence
  Synthetic oligonucleotide
agggatattagaatgccggagtccaccacg

SEQ ID NO: 475299 - DNA, 30 bp, Artificial Sequence
  Synthetic oligonucleotide
gaccatctccgcaaaccatcacgcaccacg

SEQ ID NO: 475300 - DNA, 30 bp, Artificial Sequence
  Synthetic oligonucleotide
cagacagagtgtcaccgtaaatgccccacg

SEQ ID NO: 475301 - DNA, 30 bp, Artificial Sequence
  Synthetic oligonucleotide
acccagcatgataaagtacgggtgcccacg

SEQ ID NO: 475302 - DNA, 30 bp, Artificial Sequence
  Synthetic oligonucleotide
ttgatgcctgacgagtcgcgtggtcccacg

SEQ ID NO: 475303 - DNA, 30 bp, Artificial Sequence
  Synthetic oligonucleotide
aaggcgagcatcacatccgctattcccacg

SEQ ID NO: 475304 - DNA, 30 bp, Artificial Sequence
  Synthetic oligonucleotide
cttctgtggttaatcctgaaatttcccacg

SEQ ID NO: 475305 - DNA, 30 bp, Artificial Sequence
  Synthetic oligonucleotide
agaacgtgcgtagatttactatcagccacg

SEQ ID NO: 475306 - DNA, 30 bp, Artificial Sequence
  Synthetic oligonucleotide
cgataggggatcctccccgtcggggccacg

SEQ ID NO: 475307 - DNA, 30 bp, Artificial Sequence
  Synthetic oligonucleotide
ggctcaccgtcctatctggacctggccacg

SEQ ID NO: 475308 - DNA, 30 bp, Artificial Sequence
  Synthetic oligonucleotide
cacgggcatccctcgactgacatatccacg

SEQ ID NO: 475309 - DNA, 30 bp, Artificial Sequence
  Synthetic oligonucleotide
attgcaaattacctaggggtcaactccacg

SEQ ID NO: 475310 - DNA, 30 bp, Artificial Sequence
  Synthetic oligonucleotide
tatccggcataattgtcttcgacgtccacg

SEQ ID NO: 475311 - DNA, 30 bp, Artificial Sequence
  Synthetic oligonucleotide
gtcctatgagtacgaaatcacatgagcacg

SEQ ID NO: 475312 - DNA, 31 bp, Artificial Sequence
  Synthetic oligonucleotide
ctcggttgtttggcattgcggcggtagcacg

SEQ ID NO: 475313 - DNA, 30 bp, Artificial Sequence
  Synthetic oligonucleotide
ttaaggtcgtgtgacaatccgaaacgcacg

SEQ ID NO: 475314 - DNA, 30 bp, Artificial Sequence
  Synthetic oligonucleotide
tgtatcactcttcaagtgaatcgacgcacg

SEQ ID NO: 475315 - DNA, 30 bp, Artificial Sequence
  Synthetic oligonucleotide
ctgattgcttgtctcatgtaaggacgcacg

SEQ ID NO: 475316 - DNA, 30 bp, Artificial Sequence
  Synthetic oligonucleotide
atttcggagcgcaacggaagtaaccgcacg

SEQ ID NO: 475317 - DNA, 30 bp, Artificial Sequence
  Synthetic oligonucleotide
tttaatcgcactattattcttgtgcgcacg

SEQ ID NO: 475318 - DNA, 30 bp, Artificial Sequence
  Synthetic oligonucleotide
ctagaaattggctatttatgtaatcgcacg

SEQ ID NO: 475319 - DNA, 30 bp, Artificial Sequence
  Synthetic oligonucleotide
ctagctacggtactccttgagcctcgcacg

SEQ ID NO: 475320 - DNA, 30 bp, Artificial Sequence
  Synthetic oligonucleotide
atatataccgaggcttttttctaaggcacg

SEQ ID NO: 475321 - DNA, 30 bp, Artificial Sequence
  Synthetic oligonucleotide
gttcgacgtggaggtgcccgacacggcacg

SEQ ID NO: 475322 - DNA, 30 bp, Artificial Sequence
  Synthetic oligonucleotide
caatcgctctcgctaagaggacacggcacg

SEQ ID NO: 475323 - DNA, 30 bp, Artificial Sequence
  Synthetic oligonucleotide
ctctgcgacgcgagctttagacatggcacg

SEQ ID NO: 475324 - DNA, 30 bp, Artificial Sequence
  Synthetic oligonucleotide
gacttgggttacagtctgggaggatgcacg

SEQ ID NO: 475325 - DNA, 30 bp, Artificial Sequence
  Synthetic oligonucleotide
accgcagttcgcgtcgtgcttgcctgcacg

SEQ ID NO: 475326 - DNA, 30 bp, Artificial Sequence
  Synthetic oligonucleotide
agtaatttgctacgctgcaaagggatcacg

SEQ ID NO: 475327 - DNA, 30 bp, Artificial Sequence
  Synthetic oligonucleotide
aatgcgcagcaatgtgtacgaatgatcacg

SEQ ID NO: 475328 - DNA, 30 bp, Artificial Sequence
  Synthetic oligonucleotide
acacagtcggatcgttccacgtgtatcacg

SEQ ID NO: 475329 - DNA, 30 bp, Artificial Sequence
  Synthetic oligonucleotide
gagaatttgagcgttccctccattatcacg

SEQ ID NO: 475330 - DNA, 30 bp, Artificial Sequence
  Synthetic oligonucleotide
ctacctgaaagcgcaggctacgccctcacg

SEQ ID NO: 475331 - DNA, 30 bp, Artificial Sequence
  Synthetic oligonucleotide
ggggcagctaaactcagcggggagctcacg

SEQ ID NO: 475332 - DNA, 30 bp, Artificial Sequence
  Synthetic oligonucleotide
gttattgggcctttgttgcatcggctcacg

SEQ ID NO: 475333 - DNA, 31 bp, Artificial Sequence
  Synthetic oligonucleotide
gaattttaaacacatctgttagacagtcacg

SEQ ID NO: 475334 - DNA, 30 bp, Artificial Sequence
  Synthetic oligonucleotide
ttggaagccggatttcgtgacaccgtcacg

SEQ ID NO: 475335 - DNA, 30 bp, Artificial Sequence
  Synthetic oligonucleotide
tccgttgatacttccttatagacggtcacg

SEQ ID NO: 475336 - DNA, 30 bp, Artificial Sequence
  Synthetic oligonucleotide
gcctctgtggcctaggttggacgggtcacg

SEQ ID NO: 475337 - DNA, 30 bp, Artificial Sequence
  Synthetic oligonucleotide
aaggataacattaattgacagcgggtcacg

SEQ ID NO: 475338 - DNA, 30 bp, Artificial Sequence
  Synthetic oligonucleotide
cggcgcccgcagcccggatacgacttcacg

SEQ ID NO: 475339 - DNA, 30 bp, Artificial Sequence
  Synthetic oligonucleotide
tctagtacgcacggagtatgcgacttcacg

SEQ ID NO: 475340 - DNA, 30 bp, Artificial Sequence
  Synthetic oligonucleotide
gctcccccagccaaaggccttaagttcacg

SEQ ID NO: 475341 - DNA, 30 bp, Artificial Sequence
  Synthetic oligonucleotide
agtgaatgataaaccccggacaatttcacg

SEQ ID NO: 475342 - DNA, 30 bp, Artificial Sequence
  Synthetic oligonucleotide
taattttagaagcacagtggtgatttcacg

SEQ ID NO: 475343 - DNA, 30 bp, Artificial Sequence
  Synthetic oligonucleotide
aaatttaattgcgcacaagctccaaagacg

SEQ ID NO: 475344 - DNA, 30 bp, Artificial Sequence
  Synthetic oligonucleotide
agttaacggggctaggccaggggaaagacg

SEQ ID NO: 475345 - DNA, 30 bp, Artificial Sequence
  Synthetic oligonucleotide
ctttcgggcaccgttacctgaaggaagacg

SEQ ID NO: 475346 - DNA, 30 bp, Artificial Sequence
  Synthetic oligonucleotide
gcaccatcttatcgatgtgtcattaagacg

SEQ ID NO: 475347 - DNA, 30 bp, Artificial Sequence
  Synthetic oligonucleotide
tggaagcttaatcggctcgggggccagacg

SEQ ID NO: 475348 - DNA, 30 bp, Artificial Sequence
  Synthetic oligonucleotide
ttccacaaccgagtctagacacagcagacg

SEQ ID NO: 475349 - DNA, 30 bp, Artificial Sequence
  Synthetic oligonucleotide
ttcctcgtctaaataaatggcaggcagacg

SEQ ID NO: 475350 - DNA, 30 bp, Artificial Sequence
  Synthetic oligonucleotide
cctgcacatcctacgggacacaaagagacg

SEQ ID NO: 475351 - DNA, 30 bp, Artificial Sequence
  Synthetic oligonucleotide
gtctacacagaacgatttatttcagagacg

SEQ ID NO: 475352 - DNA, 30 bp, Artificial Sequence
  Synthetic oligonucleotide
gtgaccttggcagaagggatcatagagacg

SEQ ID NO: 475353 - DNA, 30 bp, Artificial Sequence
  Synthetic oligonucleotide
ggcttgcataaaagcacgcctgtagagacg

SEQ ID NO: 475354 - DNA, 30 bp, Artificial Sequence
  Synthetic oligonucleotide
tcctactaattttcctccaaagaatagacg

SEQ ID NO: 475355 - DNA, 30 bp, Artificial Sequence
  Synthetic oligonucleotide
tagtttaccgatatgtcttgaggatagacg

SEQ ID NO: 475356 - DNA, 30 bp, Artificial Sequence
  Synthetic oligonucleotide
tccgaatggaacacaggagctatatagacg

SEQ ID NO: 475357 - DNA, 30 bp, Artificial Sequence
  Synthetic oligonucleotide
gcagttagttagctagatgacggctagacg

SEQ ID NO: 475358 - DNA, 30 bp, Artificial Sequence
  Synthetic oligonucleotide
tgaacgtaatgcatgcccacgtggtagacg

SEQ ID NO: 475359 - DNA, 30 bp, Artificial Sequence
  Synthetic oligonucleotide
tctctctaatctatcatcaggtattagacg

SEQ ID NO: 475360 - DNA, 30 bp, Artificial Sequence
  Synthetic oligonucleotide
tgtgtatactttacgggattaacttagacg

SEQ ID NO: 475361 - DNA, 30 bp, Artificial Sequence
  Synthetic oligonucleotide
ccacgactaatgtcaccacctccaacgacg

SEQ ID NO: 475362 - DNA, 30 bp, Artificial Sequence
  Synthetic oligonucleotide
gaaaaacgcaaggtatttttaataacgacg

SEQ ID NO: 475363 - DNA, 30 bp, Artificial Sequence
  Synthetic oligonucleotide
gttacggcgcaaacatcgagcaacacgacg

SEQ ID NO: 475364 - DNA, 30 bp, Artificial Sequence
  Synthetic oligonucleotide
gtcggcgtactaccgcttacggtcacgacg

SEQ ID NO: 475365 - DNA, 30 bp, Artificial Sequence
  Synthetic oligonucleotide
ggctaagggagtaatttggcgcagacgacg

SEQ ID NO: 475366 - DNA, 30 bp, Artificial Sequence
  Synthetic oligonucleotide
gcagtggggtgacccgttattcggacgacg

SEQ ID NO: 475367 - DNA, 30 bp, Artificial Sequence
  Synthetic oligonucleotide
aaactgggccattcaccgggtagtacgacg

SEQ ID NO: 475368 - DNA, 30 bp, Artificial Sequence
  Synthetic oligonucleotide
agaatatctccggattaatgtgaagcgacg

SEQ ID NO: 475369 - DNA, 30 bp, Artificial Sequence
  Synthetic oligonucleotide
tgccgtttatagcgtcgaggctcagcgacg

SEQ ID NO: 475370 - DNA, 30 bp, Artificial Sequence
  Synthetic oligonucleotide
gcgcattggattatttgggtcggagcgacg

SEQ ID NO: 475371 - DNA, 30 bp, Artificial Sequence
  Synthetic oligonucleotide
accgcggacgcctgggtatataccgcgacg

SEQ ID NO: 475372 - DNA, 30 bp, Artificial Sequence
  Synthetic oligonucleotide
ccacgtctccttagcgtgaaaaaggcgacg

SEQ ID NO: 475373 - DNA, 30 bp, Artificial Sequence
  Synthetic oligonucleotide
aaattcaacccgaccatcacaaaggcgacg

SEQ ID NO: 475374 - DNA, 30 bp, Artificial Sequence
  Synthetic oligonucleotide
cgtttatctttcacctcctatgatgcgacg

SEQ ID NO: 475375 - DNA, 30 bp, Artificial Sequence
  Synthetic oligonucleotide
tagagacccctaagatgacacagtgcgacg

SEQ ID NO: 475376 - DNA, 30 bp, Artificial Sequence
  Synthetic oligonucleotide
aatccagtacgatacttacttattgcgacg

SEQ ID NO: 475377 - DNA, 30 bp, Artificial Sequence
  Synthetic oligonucleotide
ttaggtgatttcggtcggggtgttgcgacg

SEQ ID NO: 475378 - DNA, 30 bp, Artificial Sequence
  Synthetic oligonucleotide
gaacaggcagcgggtatagagtgatcgacg

SEQ ID NO: 475379 - DNA, 29 bp, Artificial Sequence
  Synthetic oligonucleotide
tagatgcaaagtttttcttagactcgacg

SEQ ID NO: 475380 - DNA, 30 bp, Artificial Sequence
  Synthetic oligonucleotide
tggccgtggtccatacgtgagtcctcgacg

SEQ ID NO: 475381 - DNA, 30 bp, Artificial Sequence
  Synthetic oligonucleotide
tgcgctcgcgggcggcacttcaggtcgacg

SEQ ID NO: 475382 - DNA, 30 bp, Artificial Sequence
  Synthetic oligonucleotide
gtctggggttggcagtgtatatggtcgacg

SEQ ID NO: 475383 - DNA, 30 bp, Artificial Sequence
  Synthetic oligonucleotide
gcaacagtggatattacccacttttcgacg

SEQ ID NO: 475384 - DNA, 30 bp, Artificial Sequence
  Synthetic oligonucleotide
attcacgcctaacacgagccatgcaggacg

SEQ ID NO: 475385 - DNA, 30 bp, Artificial Sequence
  Synthetic oligonucleotide
cattattaaagatatagaatcgttaggacg

SEQ ID NO: 475386 - DNA, 30 bp, Artificial Sequence
  Synthetic oligonucleotide
cgatttcctatcagaataatgacacggacg

SEQ ID NO: 475387 - DNA, 30 bp, Artificial Sequence
  Synthetic oligonucleotide
tcaggagagacgcaacgttctcgacggacg

SEQ ID NO: 475388 - DNA, 30 bp, Artificial Sequence
  Synthetic oligonucleotide
aacaaagggacctagggataacagcggacg

SEQ ID NO: 475389 - DNA, 30 bp, Artificial Sequence
  Synthetic oligonucleotide
actaaattgctagagaactctaatcggacg

SEQ ID NO: 475390 - DNA, 30 bp, Artificial Sequence
  Synthetic oligonucleotide
tttcgtagttgtacaatcttcgatcggacg

SEQ ID NO: 475391 - DNA, 30 bp, Artificial Sequence
  Synthetic oligonucleotide
catggcaacattaccacacgcaacgggacg

SEQ ID NO: 475392 - DNA, 30 bp, Artificial Sequence
  Synthetic oligonucleotide
tttttaaaaggcctaaaggtaggcgggacg

SEQ ID NO: 475393 - DNA, 30 bp, Artificial Sequence
  Synthetic oligonucleotide
aaggctactaggtacggattaagggggacg

SEQ ID NO: 475394 - DNA, 30 bp, Artificial Sequence
  Synthetic oligonucleotide
agtgttctaatttccaaagggaatgggacg

SEQ ID NO: 475395 - DNA, 30 bp, Artificial Sequence
  Synthetic oligonucleotide
ccgcagtaccgtcgaatcgaaactgggacg

SEQ ID NO: 475396 - DNA, 30 bp, Artificial Sequence
  Synthetic oligonucleotide
ataatagacttcgtagtcaattactggacg

SEQ ID NO: 475397 - DNA, 30 bp, Artificial Sequence
  Synthetic oligonucleotide
atcccaagaaattggtagccattctggacg

SEQ ID NO: 475398 - DNA, 30 bp, Artificial Sequence
  Synthetic oligonucleotide
atcttttggcatcgatattcgtagtggacg

SEQ ID NO: 475399 - DNA, 30 bp, Artificial Sequence
  Synthetic oligonucleotide
tcaccgcatgcggacattgtaacttggacg

SEQ ID NO: 475400 - DNA, 30 bp, Artificial Sequence
  Synthetic oligonucleotide
acctgaactagtcgtaacggacgttggacg

SEQ ID NO: 475401 - DNA, 30 bp, Artificial Sequence
  Synthetic oligonucleotide
acgcagatataattgttgatctcaatgacg

SEQ ID NO: 475402 - DNA, 30 bp, Artificial Sequence
  Synthetic oligonucleotide
atggatctatatagtcgtttgtcaatgacg

SEQ ID NO: 475403 - DNA, 30 bp, Artificial Sequence
  Synthetic oligonucleotide
tatgtttgccacattcaatgtagaatgacg

SEQ ID NO: 475404 - DNA, 30 bp, Artificial Sequence
  Synthetic oligonucleotide
tggtaagcgggttggtttacagtaatgacg

SEQ ID NO: 475405 - DNA, 30 bp, Artificial Sequence
  Synthetic oligonucleotide
gaatccctggggattggaaaattaatgacg

SEQ ID NO: 475406 - DNA, 30 bp, Artificial Sequence
  Synthetic oligonucleotide
gggttacagacctggattcctaacatgacg

SEQ ID NO: 475407 - DNA, 30 bp, Artificial Sequence
  Synthetic oligonucleotide
ggtaggggatgcgggagatgtcgcatgacg

SEQ ID NO: 475408 - DNA, 30 bp, Artificial Sequence
  Synthetic oligonucleotide
ccaaaggtgaaggtcatggtccctatgacg

SEQ ID NO: 475409 - DNA, 30 bp, Artificial Sequence
  Synthetic oligonucleotide
aataatgtaaatattgttattacactgacg

SEQ ID NO: 475410 - DNA, 30 bp, Artificial Sequence
  Synthetic oligonucleotide
caaacgtctaagtcgttgtaagacctgacg

SEQ ID NO: 475411 - DNA, 30 bp, Artificial Sequence
  Synthetic oligonucleotide
gacactgcatcgttcagtgaactcctgacg

SEQ ID NO: 475412 - DNA, 30 bp, Artificial Sequence
  Synthetic oligonucleotide
cgtcttgttaagttaatataggagctgacg

SEQ ID NO: 475413 - DNA, 30 bp, Artificial Sequence
  Synthetic oligonucleotide
ttccgagatggcatgtcccgcactctgacg

SEQ ID NO: 475414 - DNA, 30 bp, Artificial Sequence
  Synthetic oligonucleotide
tatctgattttatttatgtcgggtctgacg

SEQ ID NO: 475415 - DNA, 30 bp, Artificial Sequence
  Synthetic oligonucleotide
agcgccatacacagttgcgctattctgacg

SEQ ID NO: 475416 - DNA, 30 bp, Artificial Sequence
  Synthetic oligonucleotide
tatatatcggaataaaaattttttctgacg

SEQ ID NO: 475417 - DNA, 30 bp, Artificial Sequence
  Synthetic oligonucleotide
cacttcccgcgcatggacagaacagtgacg

SEQ ID NO: 475418 - DNA, 30 bp, Artificial Sequence
  Synthetic oligonucleotide
ttgacaaaaacgcctaggttctcagtgacg

SEQ ID NO: 475419 - DNA, 30 bp, Artificial Sequence
  Synthetic oligonucleotide
ggttctcgtttagcactgatgttagtgacg

SEQ ID NO: 475420 - DNA, 30 bp, Artificial Sequence
  Synthetic oligonucleotide
atcaatgtgatttgtaggagttaattgacg

SEQ ID NO: 475421 - DNA, 30 bp, Artificial Sequence
  Synthetic oligonucleotide
tggttgatgtctacggacaattcattgacg

SEQ ID NO: 475422 - DNA, 30 bp, Artificial Sequence
  Synthetic oligonucleotide
ttgcgagatcgtacggatcttaacttgacg

SEQ ID NO: 475423 - DNA, 29 bp, Artificial Sequence
  Synthetic oligonucleotide
tagagcaaagaaaccctgggggcttgacg

SEQ ID NO: 475424 - DNA, 30 bp, Artificial Sequence
  Synthetic oligonucleotide
aatacgatagtcttcatttaaacgttgacg

SEQ ID NO: 475425 - DNA, 30 bp, Artificial Sequence
  Synthetic oligonucleotide
gcagtttgaacaacggtcgcagtgttgacg

SEQ ID NO: 475426 - DNA, 30 bp, Artificial Sequence
  Synthetic oligonucleotide
gagctcgcggccagagtttatggtttgacg

SEQ ID NO: 475427 - DNA, 30 bp, Artificial Sequence
  Synthetic oligonucleotide
attagtctccctatagatagcaaaaatacg

SEQ ID NO: 475428 - DNA, 30 bp, Artificial Sequence
  Synthetic oligonucleotide
gccgtcccgggatctaagtttgaaaatacg

SEQ ID NO: 475429 - DNA, 30 bp, Artificial Sequence
  Synthetic oligonucleotide
gacgttattatcgcagttccgtaaaatacg

SEQ ID NO: 475430 - DNA, 31 bp, Artificial Sequence
  Synthetic oligonucleotide
gagagatcccagtctgtagtctacgaatacg

SEQ ID NO: 475431 - DNA, 30 bp, Artificial Sequence
  Synthetic oligonucleotide
gcacgctttccagtcgggccatggaatacg

SEQ ID NO: 475432 - DNA, 30 bp, Artificial Sequence
  Synthetic oligonucleotide
gaataaatcgggtggacgccctctaatacg

SEQ ID NO: 475433 - DNA, 30 bp, Artificial Sequence
  Synthetic oligonucleotide
gtacgcagaaggtttcagtctattaatacg

SEQ ID NO: 475434 - DNA, 30 bp, Artificial Sequence
  Synthetic oligonucleotide
gtaaagcctgatggtgcacggaaccatacg

SEQ ID NO: 475435 - DNA, 30 bp, Artificial Sequence
  Synthetic oligonucleotide
aaaaataaggctttactcagttagcatacg

SEQ ID NO: 475436 - DNA, 30 bp, Artificial Sequence
  Synthetic oligonucleotide
tataactactggttcgggcggtggcatacg

SEQ ID NO: 475437 - DNA, 30 bp, Artificial Sequence
  Synthetic oligonucleotide
ctgtccgtattgggtgaaccaactcatacg

SEQ ID NO: 475438 - DNA, 30 bp, Artificial Sequence
  Synthetic oligonucleotide
cgaccaaatacgttcacagcttgtcatacg

SEQ ID NO: 475439 - DNA, 30 bp, Artificial Sequence
  Synthetic oligonucleotide
aggggcgggttgctgcacatttgtcatacg

SEQ ID NO: 475440 - DNA, 30 bp, Artificial Sequence
  Synthetic oligonucleotide
gaaacggcatcttgggttgggttagatacg

SEQ ID NO: 475441 - DNA, 30 bp, Artificial Sequence
  Synthetic oligonucleotide
catgatatcgcgaacgttttcgtcgatacg

SEQ ID NO: 475442 - DNA, 30 bp, Artificial Sequence
  Synthetic oligonucleotide
ctggacgtgcagtaacactgttcatatacg

SEQ ID NO: 475443 - DNA, 30 bp, Artificial Sequence
  Synthetic oligonucleotide
cggcatgatcaagcgacagacgtatatacg

SEQ ID NO: 475444 - DNA, 30 bp, Artificial Sequence
  Synthetic oligonucleotide
atcgcactgtggtaagatgtatactatacg

SEQ ID NO: 475445 - DNA, 30 bp, Artificial Sequence
  Synthetic oligonucleotide
gagtgtaggacagaaaaacggtgctatacg

SEQ ID NO: 475446 - DNA, 25 bp, Artificial Sequence
  Synthetic oligonucleotide
acataagaattcttatcgttatacg

SEQ ID NO: 475447 - DNA, 30 bp, Artificial Sequence
  Synthetic oligonucleotide
ttgagggtataatcaacgagacaaactacg

SEQ ID NO: 475448 - DNA, 30 bp, Artificial Sequence
  Synthetic oligonucleotide
gacttaattgacatttggtgacaaactacg

SEQ ID NO: 475449 - DNA, 30 bp, Artificial Sequence
  Synthetic oligonucleotide
catgaagtctggttctcacgttcaactacg

SEQ ID NO: 475450 - DNA, 30 bp, Artificial Sequence
  Synthetic oligonucleotide
tttactaggagttccagtatcagaactacg

SEQ ID NO: 475451 - DNA, 30 bp, Artificial Sequence
  Synthetic oligonucleotide
tagtactttagagtgagccttaacactacg

SEQ ID NO: 475452 - DNA, 30 bp, Artificial Sequence
  Synthetic oligonucleotide
gtattttgttgaaatcagcaatacactacg

SEQ ID NO: 475453 - DNA, 30 bp, Artificial Sequence
  Synthetic oligonucleotide
cataatttattaaatgtgtatctcactacg

SEQ ID NO: 475454 - DNA, 30 bp, Artificial Sequence
  Synthetic oligonucleotide
tgccgcaaaccggatggacccaatactacg

SEQ ID NO: 475455 - DNA, 30 bp, Artificial Sequence
  Synthetic oligonucleotide
atagcctagtacgaagttttccctactacg

SEQ ID NO: 475456 - DNA, 30 bp, Artificial Sequence
  Synthetic oligonucleotide
gagctatggtcgtggatagttttacctacg

SEQ ID NO: 475457 - DNA, 30 bp, Artificial Sequence
  Synthetic oligonucleotide
tccgtaagtatatattctgttttacctacg

SEQ ID NO: 475458 - DNA, 30 bp, Artificial Sequence
  Synthetic oligonucleotide
cgcagcttggtcgtgaagtgcgcgcctacg

SEQ ID NO: 475459 - DNA, 30 bp, Artificial Sequence
  Synthetic oligonucleotide
cacgttttcacggaaataagatttcctacg

SEQ ID NO: 475460 - DNA, 30 bp, Artificial Sequence
  Synthetic oligonucleotide
ggacgaacatggctaggcttctaagctacg

SEQ ID NO: 475461 - DNA, 30 bp, Artificial Sequence
  Synthetic oligonucleotide
tttttctaagttttggttcaccacgctacg

SEQ ID NO: 475462 - DNA, 30 bp, Artificial Sequence
  Synthetic oligonucleotide
ccccaattcacagaggatggatctgctacg

SEQ ID NO: 475463 - DNA, 30 bp, Artificial Sequence
  Synthetic oligonucleotide
atctcggcgccaacccttgtgcaatctacg

SEQ ID NO: 475464 - DNA, 30 bp, Artificial Sequence
  Synthetic oligonucleotide
ttgcacgacacagacccgtctgactctacg

SEQ ID NO: 475465 - DNA, 30 bp, Artificial Sequence
  Synthetic oligonucleotide
gtccaactgtccggattatatctctctacg

SEQ ID NO: 475466 - DNA, 30 bp, Artificial Sequence
  Synthetic oligonucleotide
gtttatccgcgacgaaattaatcgtctacg

SEQ ID NO: 475467 - DNA, 30 bp, Artificial Sequence
  Synthetic oligonucleotide
gattccacagagacagtatcagggtctacg

SEQ ID NO: 475468 - DNA, 30 bp, Artificial Sequence
  Synthetic oligonucleotide
ctctatactagctagaacaggatttctacg

SEQ ID NO: 475469 - DNA, 30 bp, Artificial Sequence
  Synthetic oligonucleotide
gctagccacgacgtgtacttactaagtacg

SEQ ID NO: 475470 - DNA, 30 bp, Artificial Sequence
  Synthetic oligonucleotide
gaaatttgcgactttacataaatcagtacg

SEQ ID NO: 475471 - DNA, 30 bp, Artificial Sequence
  Synthetic oligonucleotide
cgcggatagtcggaaagcgacgcgagtacg

SEQ ID NO: 475472 - DNA, 30 bp, Artificial Sequence
  Synthetic oligonucleotide
atgtttcctctgattgcatgaagtagtacg

SEQ ID NO: 475473 - DNA, 30 bp, Artificial Sequence
  Synthetic oligonucleotide
aaaccgagctcatggaggcggtttagtacg

SEQ ID NO: 475474 - DNA, 30 bp, Artificial Sequence
  Synthetic oligonucleotide
ttggtgtgctgaagtacgtcccaacgtacg

SEQ ID NO: 475475 - DNA, 30 bp, Artificial Sequence
  Synthetic oligonucleotide
cagctcagcacatatatggtttcgcgtacg

SEQ ID NO: 475476 - DNA, 30 bp, Artificial Sequence
  Synthetic oligonucleotide
ggccaaaagtgccactgggagtggcgtacg

SEQ ID NO: 475477 - DNA, 30 bp, Artificial Sequence
  Synthetic oligonucleotide
ggtcgcggtttacgatcacaacgtcgtacg

SEQ ID NO: 475478 - DNA, 30 bp, Artificial Sequence
  Synthetic oligonucleotide
ttctgtgtcaggtgtagtatacgtcgtacg

SEQ ID NO: 475479 - DNA, 30 bp, Artificial Sequence
  Synthetic oligonucleotide
ctttcgtaaagccagcggactggaggtacg

SEQ ID NO: 475480 - DNA, 30 bp, Artificial Sequence
  Synthetic oligonucleotide
gcacggaccaatcgtaatttcctcggtacg

SEQ ID NO: 475481 - DNA, 30 bp, Artificial Sequence
  Synthetic oligonucleotide
gccctctcacggaaccctggcccgggtacg

SEQ ID NO: 475482 - DNA, 30 bp, Artificial Sequence
  Synthetic oligonucleotide
ggagcattgcgagttacgacagttggtacg

SEQ ID NO: 475483 - DNA, 30 bp, Artificial Sequence
  Synthetic oligonucleotide
ttcaaagccgcgctcatgtcctcatgtacg

SEQ ID NO: 475484 - DNA, 30 bp, Artificial Sequence
  Synthetic oligonucleotide
aatcgaaaacgatgtgcatcttattgtacg

SEQ ID NO: 475485 - DNA, 30 bp, Artificial Sequence
  Synthetic oligonucleotide
tgctctgataaataacggctctgttgtacg

SEQ ID NO: 475486 - DNA, 30 bp, Artificial Sequence
  Synthetic oligonucleotide
gagctgatttcgcatgcgtacgtttgtacg

SEQ ID NO: 475487 - DNA, 30 bp, Artificial Sequence
  Synthetic oligonucleotide
cgcgtttcgggagttgatacgtaaattacg

SEQ ID NO: 475488 - DNA, 30 bp, Artificial Sequence
  Synthetic oligonucleotide
gtcagtgaagtgactcgccaaagaattacg

SEQ ID NO: 475489 - DNA, 30 bp, Artificial Sequence
  Synthetic oligonucleotide
accccggaaccttgtgggatactaattacg

SEQ ID NO: 475490 - DNA, 30 bp, Artificial Sequence
  Synthetic oligonucleotide
tgtccttttttccagaaaattaacattacg

SEQ ID NO: 475491 - DNA, 30 bp, Artificial Sequence
  Synthetic oligonucleotide
tgttagatcaccggagcgcgcgacattacg

SEQ ID NO: 475492 - DNA, 30 bp, Artificial Sequence
  Synthetic oligonucleotide
ctgcctcctctgttgacttcgtgcattacg

SEQ ID NO: 475493 - DNA, 30 bp, Artificial Sequence
  Synthetic oligonucleotide
tacaaggcgcattacgaaagtttcattacg

SEQ ID NO: 475494 - DNA, 30 bp, Artificial Sequence
  Synthetic oligonucleotide
tcggtggcatgctatcgcagtgagattacg

SEQ ID NO: 475495 - DNA, 30 bp, Artificial Sequence
  Synthetic oligonucleotide
ttcaccattccatcccaggatccgattacg

SEQ ID NO: 475496 - DNA, 30 bp, Artificial Sequence
  Synthetic oligonucleotide
gcctccttgtaccttgtatgtatgattacg

SEQ ID NO: 475497 - DNA, 30 bp, Artificial Sequence
  Synthetic oligonucleotide
ctaatcgtggaggctcacgtggatattacg

SEQ ID NO: 475498 - DNA, 30 bp, Artificial Sequence
  Synthetic oligonucleotide
gtgctgataaataggggcgcatatattacg

SEQ ID NO: 475499 - DNA, 30 bp, Artificial Sequence
  Synthetic oligonucleotide
gatgcgagtcacctgtgatatactattacg

SEQ ID NO: 475500 - DNA, 30 bp, Artificial Sequence
  Synthetic oligonucleotide
ttccgtcagtcgagcccattgcgtattacg

SEQ ID NO: 475501 - DNA, 30 bp, Artificial Sequence
  Synthetic oligonucleotide
aagtgtaacaccacagtataatttattacg

SEQ ID NO: 475502 - DNA, 30 bp, Artificial Sequence
  Synthetic oligonucleotide
gcttggtgatgtgtccctgatccacttacg

SEQ ID NO: 475503 - DNA, 30 bp, Artificial Sequence
  Synthetic oligonucleotide
ggcgtggtgacggtgaaacctttacttacg

SEQ ID NO: 475504 - DNA, 30 bp, Artificial Sequence
  Synthetic oligonucleotide
tgaaaacactgcttgcataactaccttacg

SEQ ID NO: 475505 - DNA, 30 bp, Artificial Sequence
  Synthetic oligonucleotide
gtcagttaagggcgtgcgcgaaatcttacg

SEQ ID NO: 475506 - DNA, 30 bp, Artificial Sequence
  Synthetic oligonucleotide
aatctaggtgcgttttttccgcgagttacg

SEQ ID NO: 475507 - DNA, 30 bp, Artificial Sequence
  Synthetic oligonucleotide
aacatgcgggtaaccgccctcaaggttacg

SEQ ID NO: 475508 - DNA, 30 bp, Artificial Sequence
  Synthetic oligonucleotide
gataagactcacgttctatcagaggttacg

SEQ ID NO: 475509 - DNA, 30 bp, Artificial Sequence
  Synthetic oligonucleotide
atttctcctcagtactcttgtagggttacg

SEQ ID NO: 475510 - DNA, 30 bp, Artificial Sequence
  Synthetic oligonucleotide
ggaaaaacccctgtcgggtccttggttacg

SEQ ID NO: 475511 - DNA, 30 bp, Artificial Sequence
  Synthetic oligonucleotide
ttgatttcagcgtcagcgctgacatttacg

SEQ ID NO: 475512 - DNA, 30 bp, Artificial Sequence
  Synthetic oligonucleotide
gaatcaatatctccttgttgccgatttacg

SEQ ID NO: 475513 - DNA, 30 bp, Artificial Sequence
  Synthetic oligonucleotide
ccctcttccctaaaccgatgttgatttacg

SEQ ID NO: 475514 - DNA, 30 bp, Artificial Sequence
  Synthetic oligonucleotide
aaaaaagggatctactaaaacctatttacg

SEQ ID NO: 475515 - DNA, 30 bp, Artificial Sequence
  Synthetic oligonucleotide
ttaatgtttacgctggtccacctatttacg

SEQ ID NO: 475516 - DNA, 30 bp, Artificial Sequence
  Synthetic oligonucleotide
tcggctccaggatcagcctgcagctttacg

SEQ ID NO: 475517 - DNA, 30 bp, Artificial Sequence
  Synthetic oligonucleotide
attagacttcgactatccgggtcgtttacg

SEQ ID NO: 475518 - DNA, 30 bp, Artificial Sequence
  Synthetic oligonucleotide
cttactttattctaagtgagtttgtttacg

SEQ ID NO: 475519 - DNA, 30 bp, Artificial Sequence
  Synthetic oligonucleotide
acagtatatattctaatctacatttttacg

SEQ ID NO: 475520 - DNA, 30 bp, Artificial Sequence
  Synthetic oligonucleotide
ttacgaggctttttggatacgcgcaaaccg

SEQ ID NO: 475521 - DNA, 30 bp, Artificial Sequence
  Synthetic oligonucleotide
atgcgcgatcttttcacgtttggcaaaccg

SEQ ID NO: 475522 - DNA, 30 bp, Artificial Sequence
  Synthetic oligonucleotide
ccggtccagcggcatccagttcaacaaccg

SEQ ID NO: 475523 - DNA, 30 bp, Artificial Sequence
  Synthetic oligonucleotide
cccgggcttgtcataatttcgcaagaaccg

SEQ ID NO: 475524 - DNA, 30 bp, Artificial Sequence
  Synthetic oligonucleotide
ttatttatggtgggcttaaagatagaaccg

SEQ ID NO: 475525 - DNA, 30 bp, Artificial Sequence
  Synthetic oligonucleotide
gaaaccgtaaacctttgtaacgtggaaccg

SEQ ID NO: 475526 - DNA, 30 bp, Artificial Sequence
  Synthetic oligonucleotide
ggacgtagcgcatatcgagcacctgaaccg

SEQ ID NO: 475527 - DNA, 30 bp, Artificial Sequence
  Synthetic oligonucleotide
ttgagtcacactatcacattaggtgaaccg

SEQ ID NO: 475528 - DNA, 30 bp, Artificial Sequence
  Synthetic oligonucleotide
tgacctctatcagatgctgacattgaaccg

SEQ ID NO: 475529 - DNA, 30 bp, Artificial Sequence
  Synthetic oligonucleotide
gagaagggttcagggctatatcttgaaccg

SEQ ID NO: 475530 - DNA, 30 bp, Artificial Sequence
  Synthetic oligonucleotide
attacgcctggacaccggcttgcgtaaccg

SEQ ID NO: 475531 - DNA, 30 bp, Artificial Sequence
  Synthetic oligonucleotide
gtttggcgataatctaagcagtcgtaaccg

SEQ ID NO: 475532 - DNA, 30 bp, Artificial Sequence
  Synthetic oligonucleotide
ttcatcgtaaataaattattggattaaccg

SEQ ID NO: 475533 - DNA, 30 bp, Artificial Sequence
  Synthetic oligonucleotide
ttgttgactcgacgtgttcgccgttaaccg

SEQ ID NO: 475534 - DNA, 30 bp, Artificial Sequence
  Synthetic oligonucleotide
ggattcccatttatgttggtcgcaacaccg

SEQ ID NO: 475535 - DNA, 30 bp, Artificial Sequence
  Synthetic oligonucleotide
gtcctaacgtctgagatcggaagaacaccg

SEQ ID NO: 475536 - DNA, 30 bp, Artificial Sequence
  Synthetic oligonucleotide
gcgctgttttctatattgttcatcacaccg

SEQ ID NO: 475537 - DNA, 30 bp, Artificial Sequence
  Synthetic oligonucleotide
aacccacgtgtaaggagcccttttacaccg

SEQ ID NO: 475538 - DNA, 30 bp, Artificial Sequence
  Synthetic oligonucleotide
gtggcgagtaactattctacgagcccaccg

SEQ ID NO: 475539 - DNA, 30 bp, Artificial Sequence
  Synthetic oligonucleotide
tgcgcacgcgggctctcccacgcagcaccg

SEQ ID NO: 475540 - DNA, 30 bp, Artificial Sequence
  Synthetic oligonucleotide
tcgacccgtctacagtgtcttaacgcaccg

SEQ ID NO: 475541 - DNA, 30 bp, Artificial Sequence
  Synthetic oligonucleotide
tctgcctcattaacacttcctgacgcaccg

SEQ ID NO: 475542 - DNA, 30 bp, Artificial Sequence
  Synthetic oligonucleotide
tattaaagccttttgtagagccccgcaccg

SEQ ID NO: 475543 - DNA, 30 bp, Artificial Sequence
  Synthetic oligonucleotide
ggatagccagcgctgtttcaggccgcaccg

SEQ ID NO: 475544 - DNA, 30 bp, Artificial Sequence
  Synthetic oligonucleotide
ctagtctttcttaatgtggatgatgcaccg

SEQ ID NO: 475545 - DNA, 30 bp, Artificial Sequence
  Synthetic oligonucleotide
agaacgtaggttgagctctcttgtgcaccg

SEQ ID NO: 475546 - DNA, 30 bp, Artificial Sequence
  Synthetic oligonucleotide
ggacgcgaggctggtgaggaattatcaccg

SEQ ID NO: 475547 - DNA, 30 bp, Artificial Sequence
  Synthetic oligonucleotide
atttgggttttggttgggtatgcctcaccg

SEQ ID NO: 475548 - DNA, 30 bp, Artificial Sequence
  Synthetic oligonucleotide
gttatatccccacgcgaaatggagtcaccg

SEQ ID NO: 475549 - DNA, 30 bp, Artificial Sequence
  Synthetic oligonucleotide
ggattcaggacggttttcatgtcgtcaccg

SEQ ID NO: 475550 - DNA, 28 bp, Artificial Sequence
  Synthetic oligonucleotide
ggaccgaaccacattgttacgcagaccg

SEQ ID NO: 475551 - DNA, 30 bp, Artificial Sequence
  Synthetic oligonucleotide
gctttgaagtgaattctatttaagagaccg

SEQ ID NO: 475552 - DNA, 30 bp, Artificial Sequence
  Synthetic oligonucleotide
tcattgagtgtcatggtttaaatgagaccg

SEQ ID NO: 475553 - DNA, 28 bp, Artificial Sequence
  Synthetic oligonucleotide
atccatatgatttaacgtgcaacgaccg

SEQ ID NO: 475554 - DNA, 30 bp, Artificial Sequence
  Synthetic oligonucleotide
taatcagttcttattttgtgtgcccgaccg

SEQ ID NO: 475555 - DNA, 30 bp, Artificial Sequence
  Synthetic oligonucleotide
ctctacgactcaccgggcttagtccgaccg

SEQ ID NO: 475556 - DNA, 30 bp, Artificial Sequence
  Synthetic oligonucleotide
ttttgcagcaggacgtgttcaaagcgaccg

SEQ ID NO: 475557 - DNA, 30 bp, Artificial Sequence
  Synthetic oligonucleotide
tttgcctgtggggttgtcgacgcgcgaccg

SEQ ID NO: 475558 - DNA, 30 bp, Artificial Sequence
  Synthetic oligonucleotide
gataacttgtggtgcgcttgccgcggaccg

SEQ ID NO: 475559 - DNA, 30 bp, Artificial Sequence
  Synthetic oligonucleotide
gcacgcgagcgatgaaaacttatcggaccg

SEQ ID NO: 475560 - DNA, 30 bp, Artificial Sequence
  Synthetic oligonucleotide
gtggagggcttcgagggattcgatggaccg

SEQ ID NO: 475561 - DNA, 30 bp, Artificial Sequence
  Synthetic oligonucleotide
atttgtacggaccactataagatatgaccg

SEQ ID NO: 475562 - DNA, 30 bp, Artificial Sequence
  Synthetic oligonucleotide
gggccgtcacgtacatgtcatatatgaccg

SEQ ID NO: 475563 - DNA, 30 bp, Artificial Sequence
  Synthetic oligonucleotide
taggggtagggtggtcgacccgtatgaccg

SEQ ID NO: 475564 - DNA, 30 bp, Artificial Sequence
  Synthetic oligonucleotide
gtccgattgctgaagcggatacggtgaccg

SEQ ID NO: 475565 - DNA, 30 bp, Artificial Sequence
  Synthetic oligonucleotide
cggtaacggttcgaagactaggcttgaccg

SEQ ID NO: 475566 - DNA, 30 bp, Artificial Sequence
  Synthetic oligonucleotide
agggacgcagtaccgccaatggcaataccg

SEQ ID NO: 475567 - DNA, 30 bp, Artificial Sequence
  Synthetic oligonucleotide
ggccacggtagtccgcaacagataataccg

SEQ ID NO: 475568 - DNA, 30 bp, Artificial Sequence
  Synthetic oligonucleotide
gagggactgtagaacgttagactaataccg

SEQ ID NO: 475569 - DNA, 30 bp, Artificial Sequence
  Synthetic oligonucleotide
ctcgacttagcctatccggcttagataccg

SEQ ID NO: 475570 - DNA, 30 bp, Artificial Sequence
  Synthetic oligonucleotide
ttccaactcgatgttgaaagcagactaccg

SEQ ID NO: 475571 - DNA, 30 bp, Artificial Sequence
  Synthetic oligonucleotide
cgggtaaggactcaggtcagcgtcctaccg

SEQ ID NO: 475572 - DNA, 30 bp, Artificial Sequence
  Synthetic oligonucleotide
ttttacctcaggactgacaggacagtaccg

SEQ ID NO: 475573 - DNA, 30 bp, Artificial Sequence
  Synthetic oligonucleotide
gcccggatgcgcgctggacccccagtaccg

SEQ ID NO: 475574 - DNA, 30 bp, Artificial Sequence
  Synthetic oligonucleotide
gttctgctcgtggggggttctccagtaccg

SEQ ID NO: 475575 - DNA, 29 bp, Artificial Sequence
  Synthetic oligonucleotide
tacctatagacgttagcttgaatgtaccg

SEQ ID NO: 475576 - DNA, 30 bp, Artificial Sequence
  Synthetic oligonucleotide
ctcggaacctaagtaaagggatatgtaccg

SEQ ID NO: 475577 - DNA, 30 bp, Artificial Sequence
  Synthetic oligonucleotide
gcgggcctgaggctctccccatgtgtaccg

SEQ ID NO: 475578 - DNA, 30 bp, Artificial Sequence
  Synthetic oligonucleotide
aatttcgtgaggaaaggacttatgttaccg

SEQ ID NO: 475579 - DNA, 30 bp, Artificial Sequence
  Synthetic oligonucleotide
ttgtacgtatgcgagaatccgtatttaccg

SEQ ID NO: 475580 - DNA, 30 bp, Artificial Sequence
  Synthetic oligonucleotide
atagcagccacgccaccttcacctttaccg

SEQ ID NO: 475581 - DNA, 30 bp, Artificial Sequence
  Synthetic oligonucleotide
agcgcacttgcgcaggctaagcctttaccg

SEQ ID NO: 475582 - DNA, 30 bp, Artificial Sequence
  Synthetic oligonucleotide
acgtgcataacaaatttcacaagcaacccg

SEQ ID NO: 475583 - DNA, 30 bp, Artificial Sequence
  Synthetic oligonucleotide
tatttgctgagaggcatttgccgcaacccg

SEQ ID NO: 475584 - DNA, 30 bp, Artificial Sequence
  Synthetic oligonucleotide
gcttatttcactcccatgacgcataacccg

SEQ ID NO: 475585 - DNA, 30 bp, Artificial Sequence
  Synthetic oligonucleotide
cttgctgccgggatgttgctcagtaacccg

SEQ ID NO: 475586 - DNA, 30 bp, Artificial Sequence
  Synthetic oligonucleotide
tcatggttgatgtttcctccacgtaacccg

SEQ ID NO: 475587 - DNA, 30 bp, Artificial Sequence
  Synthetic oligonucleotide
tatccatttgaaaggttatagtttaacccg

SEQ ID NO: 475588 - DNA, 30 bp, Artificial Sequence
  Synthetic oligonucleotide
accagctatactgacgtttaggaacacccg

SEQ ID NO: 475589 - DNA, 30 bp, Artificial Sequence
  Synthetic oligonucleotide
gctgcgcgtctgtctcatgcactacacccg

SEQ ID NO: 475590 - DNA, 30 bp, Artificial Sequence
  Synthetic oligonucleotide
gcgccattgggatttattcgcgtccacccg

SEQ ID NO: 475591 - DNA, 30 bp, Artificial Sequence
  Synthetic oligonucleotide
gattggactaaacgttgacccaatcacccg

SEQ ID NO: 475592 - DNA, 30 bp, Artificial Sequence
  Synthetic oligonucleotide
tcgccaccactgtacgggcagcttcacccg

SEQ ID NO: 475593 - DNA, 30 bp, Artificial Sequence
  Synthetic oligonucleotide
tgagtattcgggggcgcattaagagacccg

SEQ ID NO: 475594 - DNA, 30 bp, Artificial Sequence
  Synthetic oligonucleotide
gcagccgtggcctagcgtacatgagacccg

SEQ ID NO: 475595 - DNA, 30 bp, Artificial Sequence
  Synthetic oligonucleotide
aaagtcttgatagatcttaattgcgacccg

SEQ ID NO: 475596 - DNA, 30 bp, Artificial Sequence
  Synthetic oligonucleotide
atctgactgtagggctacgattgcgacccg

SEQ ID NO: 475597 - DNA, 30 bp, Artificial Sequence
  Synthetic oligonucleotide
gttccgtcctgtgctctggacgttgacccg

SEQ ID NO: 475598 - DNA, 30 bp, Artificial Sequence
  Synthetic oligonucleotide
gcatggttgggtctttcgtcattatacccg

SEQ ID NO: 475599 - DNA, 30 bp, Artificial Sequence
  Synthetic oligonucleotide
gggtgtcctaccggcgtgagtccaaccccg

SEQ ID NO: 475600 - DNA, 30 bp, Artificial Sequence
  Synthetic oligonucleotide
cttaaaataagtgctgatgccggaaccccg

SEQ ID NO: 475601 - DNA, 30 bp, Artificial Sequence
  Synthetic oligonucleotide
ataaagcgtacttggagcctcggaaccccg

SEQ ID NO: 475602 - DNA, 30 bp, Artificial Sequence
  Synthetic oligonucleotide
atatgtgtcgtttgccgcaagggaaccccg

SEQ ID NO: 475603 - DNA, 30 bp, Artificial Sequence
  Synthetic oligonucleotide
tgaatacgttacgcaagggcctgacccccg

SEQ ID NO: 475604 - DNA, 30 bp, Artificial Sequence
  Synthetic oligonucleotide
atatcgaagcaacgcgtacggaaccccccg

SEQ ID NO: 475605 - DNA, 30 bp, Artificial Sequence
  Synthetic oligonucleotide
gtattgtgttccctttagatcccggccccg

SEQ ID NO: 475606 - DNA, 30 bp, Artificial Sequence
  Synthetic oligonucleotide
ccgcatttacttggtgcccacttggccccg

SEQ ID NO: 475607 - DNA, 30 bp, Artificial Sequence
  Synthetic oligonucleotide
cgcgcacttctcgtgcaatactgctccccg

SEQ ID NO: 475608 - DNA, 30 bp, Artificial Sequence
  Synthetic oligonucleotide
taattgcctgttaagaccatggagtccccg

SEQ ID NO: 475609 - DNA, 30 bp, Artificial Sequence
  Synthetic oligonucleotide
accttgagcgtataagcgggatgaagcccg

SEQ ID NO: 475610 - DNA, 30 bp, Artificial Sequence
  Synthetic oligonucleotide
ggttcgagcgcacggaaattgttaagcccg

SEQ ID NO: 475611 - DNA, 30 bp, Artificial Sequence
  Synthetic oligonucleotide
agaaagtgatgctttacccgagccagcccg

SEQ ID NO: 475612 - DNA, 30 bp, Artificial Sequence
  Synthetic oligonucleotide
gtctatatgtcacaggcggtcaatagcccg

SEQ ID NO: 475613 - DNA, 30 bp, Artificial Sequence
  Synthetic oligonucleotide
gagacgacctgaggcgtagcacaacgcccg

SEQ ID NO: 475614 - DNA, 30 bp, Artificial Sequence
  Synthetic oligonucleotide
acattgggagtttgttgggggatgcgcccg

SEQ ID NO: 475615 - DNA, 30 bp, Artificial Sequence
  Synthetic oligonucleotide
ctcctacgttcttttctgcactaaggcccg

SEQ ID NO: 475616 - DNA, 30 bp, Artificial Sequence
  Synthetic oligonucleotide
tcgcactggatgtcgattaccgtcggcccg

SEQ ID NO: 475617 - DNA, 30 bp, Artificial Sequence
  Synthetic oligonucleotide
ggtcacgctcagagctttacacggggcccg

SEQ ID NO: 475618 - DNA, 30 bp, Artificial Sequence
  Synthetic oligonucleotide
aataaaaaggcgcggaagtcacggggcccg

SEQ ID NO: 475619 - DNA, 30 bp, Artificial Sequence
  Synthetic oligonucleotide
ggcagcgatatctcttgcagttctggcccg

SEQ ID NO: 475620 - DNA, 30 bp, Artificial Sequence
  Synthetic oligonucleotide
tgtcactgatgagatcacaaaacatgcccg

SEQ ID NO: 475621 - DNA, 29 bp, Artificial Sequence
  Synthetic oligonucleotide
cttcgaatatttggtaaatccagtgcccg

SEQ ID NO: 475622 - DNA, 30 bp, Artificial Sequence
  Synthetic oligonucleotide
tgtcagtctctagatatctggtggtgcccg

SEQ ID NO: 475623 - DNA, 30 bp, Artificial Sequence
  Synthetic oligonucleotide
taggccaagaaggcgtcgcttgattgcccg

SEQ ID NO: 475624 - DNA, 30 bp, Artificial Sequence
  Synthetic oligonucleotide
gcagccctttgaggttactcctattgcccg

SEQ ID NO: 475625 - DNA, 30 bp, Artificial Sequence
  Synthetic oligonucleotide
aaaacttaattaactaaagggaaaatcccg

SEQ ID NO: 475626 - DNA, 30 bp, Artificial Sequence
  Synthetic oligonucleotide
agtacagtatgggattgaagttaaatcccg

SEQ ID NO: 475627 - DNA, 30 bp, Artificial Sequence
  Synthetic oligonucleotide
tagccgaattctactttgaagcagatcccg

SEQ ID NO: 475628 - DNA, 30 bp, Artificial Sequence
  Synthetic oligonucleotide
gccatatcctgcggatagtcagtgatcccg

SEQ ID NO: 475629 - DNA, 30 bp, Artificial Sequence
  Synthetic oligonucleotide
ggtctggtgctcatgagaagcctactcccg

SEQ ID NO: 475630 - DNA, 30 bp, Artificial Sequence
  Synthetic oligonucleotide
cgccgggtcctgtaggtggcgttactcccg

SEQ ID NO: 475631 - DNA, 30 bp, Artificial Sequence
  Synthetic oligonucleotide
tagtatttgtgactgtcagtttttctcccg

SEQ ID NO: 475632 - DNA, 30 bp, Artificial Sequence
  Synthetic oligonucleotide
ggagagccacgggaccctactaaagtcccg

SEQ ID NO: 475633 - DNA, 30 bp, Artificial Sequence
  Synthetic oligonucleotide
gattcaatttaacgatgaatccaagtcccg

SEQ ID NO: 475634 - DNA, 30 bp, Artificial Sequence
  Synthetic oligonucleotide
ttgtgagtgtggggtggctgccgggtcccg

SEQ ID NO: 475635 - DNA, 30 bp, Artificial Sequence
  Synthetic oligonucleotide
atgcaaacgtaacaggtcccctgattcccg

SEQ ID NO: 475636 - DNA, 30 bp, Artificial Sequence
  Synthetic oligonucleotide
cacattgaaggagacaaggtatagaagccg

SEQ ID NO: 475637 - DNA, 30 bp, Artificial Sequence
  Synthetic oligonucleotide
aattgcggtaccgtggttttttcgaagccg

SEQ ID NO: 475638 - DNA, 30 bp, Artificial Sequence
  Synthetic oligonucleotide
tatttggacggtgttagggcaaggaagccg

SEQ ID NO: 475639 - DNA, 30 bp, Artificial Sequence
  Synthetic oligonucleotide
tgccattaagcgggtctatgaccccagccg

SEQ ID NO: 475640 - DNA, 30 bp, Artificial Sequence
  Synthetic oligonucleotide
atgtactgtgagattattttggtgcagccg

SEQ ID NO: 475641 - DNA, 30 bp, Artificial Sequence
  Synthetic oligonucleotide
gccgcttaaaacgcacaagagtatcagccg

SEQ ID NO: 475642 - DNA, 30 bp, Artificial Sequence
  Synthetic oligonucleotide
cataccgtcgatcttagatgtgttcagccg

SEQ ID NO: 475643 - DNA, 30 bp, Artificial Sequence
  Synthetic oligonucleotide
gcgcgacttaatatcccatggtgggagccg

SEQ ID NO: 475644 - DNA, 30 bp, Artificial Sequence
  Synthetic oligonucleotide
gcattggttttcggctaccaggcctagccg

SEQ ID NO: 475645 - DNA, 30 bp, Artificial Sequence
  Synthetic oligonucleotide
cttcattgagtggcgcatttctcgtagccg

SEQ ID NO: 475646 - DNA, 30 bp, Artificial Sequence
  Synthetic oligonucleotide
cttaggtaactttcggcagcgggttagccg

SEQ ID NO: 475647 - DNA, 30 bp, Artificial Sequence
  Synthetic oligonucleotide
tttcggtgcgagccacgcgggcgaacgccg

SEQ ID NO: 475648 - DNA, 30 bp, Artificial Sequence
  Synthetic oligonucleotide
ctctatcacttgccgttatgatgaacgccg

SEQ ID NO: 475649 - DNA, 30 bp, Artificial Sequence
  Synthetic oligonucleotide
tcatgaatggggagacacagtagaccgccg

SEQ ID NO: 475650 - DNA, 30 bp, Artificial Sequence
  Synthetic oligonucleotide
tcctctcagccgcaagcatacttaccgccg

SEQ ID NO: 475651 - DNA, 30 bp, Artificial Sequence
  Synthetic oligonucleotide
tttcacttgccggatgcaacggccccgccg

SEQ ID NO: 475652 - DNA, 30 bp, Artificial Sequence
  Synthetic oligonucleotide
gtttaggcctcggcgacgaaaatcccgccg

SEQ ID NO: 475653 - DNA, 30 bp, Artificial Sequence
  Synthetic oligonucleotide
gcccactgacgttcaaattagaacgcgccg

SEQ ID NO: 475654 - DNA, 30 bp, Artificial Sequence
  Synthetic oligonucleotide
aatttatggttctgtcaatcttcggcgccg

SEQ ID NO: 475655 - DNA, 30 bp, Artificial Sequence
  Synthetic oligonucleotide
ataaagcactcgtggggtcacctttcgccg

SEQ ID NO: 475656 - DNA, 30 bp, Artificial Sequence
  Synthetic oligonucleotide
ttacacggtgttggccgcaattcaaggccg

SEQ ID NO: 475657 - DNA, 30 bp, Artificial Sequence
  Synthetic oligonucleotide
ggtaccagtccgggtattagatggaggccg

SEQ ID NO: 475658 - DNA, 30 bp, Artificial Sequence
  Synthetic oligonucleotide
gaggaacctgtgccacggttattacggccg

SEQ ID NO: 475659 - DNA, 30 bp, Artificial Sequence
  Synthetic oligonucleotide
acgcagtagtcgttgtagcttcaccggccg

SEQ ID NO: 475660 - DNA, 30 bp, Artificial Sequence
  Synthetic oligonucleotide
gggcgtgacgttgcgtttcacccgcggccg

SEQ ID NO: 475661 - DNA, 30 bp, Artificial Sequence
  Synthetic oligonucleotide
catttctaggccccagaaaccgctcggccg

SEQ ID NO: 475662 - DNA, 30 bp, Artificial Sequence
  Synthetic oligonucleotide
tgggctatttaggcactgcctgcagggccg

SEQ ID NO: 475663 - DNA, 30 bp, Artificial Sequence
  Synthetic oligonucleotide
ccgtgttcgccgtacacccaccgagggccg

SEQ ID NO: 475664 - DNA, 30 bp, Artificial Sequence
  Synthetic oligonucleotide
atataagtgtgtggcggatcatatgggccg

SEQ ID NO: 475665 - DNA, 30 bp, Artificial Sequence
  Synthetic oligonucleotide
ggttgactctgattgattattcttgggccg

SEQ ID NO: 475666 - DNA, 30 bp, Artificial Sequence
  Synthetic oligonucleotide
tgagtgtaaacgttttgggcctttgggccg

SEQ ID NO: 475667 - DNA, 30 bp, Artificial Sequence
  Synthetic oligonucleotide
agatgtaacacgctacctgcctaatggccg

SEQ ID NO: 475668 - DNA, 30 bp, Artificial Sequence
  Synthetic oligonucleotide
aatggttgtcgtttgatcaccatctggccg

SEQ ID NO: 475669 - DNA, 30 bp, Artificial Sequence
  Synthetic oligonucleotide
tgatttcccaacctggttaatatgtggccg

SEQ ID NO: 475670 - DNA, 30 bp, Artificial Sequence
  Synthetic oligonucleotide
atattggcacaaagcccgtcggtgtggccg

SEQ ID NO: 475671 - DNA, 30 bp, Artificial Sequence
  Synthetic oligonucleotide
gcatttaagacgctgtaggcggattggccg

SEQ ID NO: 475672 - DNA, 30 bp, Artificial Sequence
  Synthetic oligonucleotide
ggtttaggcagcagtatgtttcccatgccg

SEQ ID NO: 475673 - DNA, 30 bp, Artificial Sequence
  Synthetic oligonucleotide
ccagtgcagcatttgcccggctgcatgccg

SEQ ID NO: 475674 - DNA, 30 bp, Artificial Sequence
  Synthetic oligonucleotide
ttgtcagtacaggatgcagactggatgccg

SEQ ID NO: 475675 - DNA, 30 bp, Artificial Sequence
  Synthetic oligonucleotide
gattagtttgtcacacttaaggctatgccg

SEQ ID NO: 475676 - DNA, 30 bp, Artificial Sequence
  Synthetic oligonucleotide
gtcgcataagtactctgcttagttatgccg

SEQ ID NO: 475677 - DNA, 30 bp, Artificial Sequence
  Synthetic oligonucleotide
gatatccttttcggggtctttgtactgccg

SEQ ID NO: 475678 - DNA, 30 bp, Artificial Sequence
  Synthetic oligonucleotide
cgacctggtcatgcaggtacgtgcctgccg

SEQ ID NO: 475679 - DNA, 30 bp, Artificial Sequence
  Synthetic oligonucleotide
gtcctctggacagctgggtggtgcctgccg

SEQ ID NO: 475680 - DNA, 30 bp, Artificial Sequence
  Synthetic oligonucleotide
tcaggccaattgttacgcagggtcgtgccg

SEQ ID NO: 475681 - DNA, 30 bp, Artificial Sequence
  Synthetic oligonucleotide
ccattagaacccagcatcgagcaggtgccg

SEQ ID NO: 475682 - DNA, 30 bp, Artificial Sequence
  Synthetic oligonucleotide
ccccgggtctgaccgaatccaacggtgccg

SEQ ID NO: 475683 - DNA, 30 bp, Artificial Sequence
  Synthetic oligonucleotide
tctgagcctcggtgcgatcgtattgtgccg

SEQ ID NO: 475684 - DNA, 30 bp, Artificial Sequence
  Synthetic oligonucleotide
tcacctattgcgtgacggagcctattgccg

SEQ ID NO: 475685 - DNA, 30 bp, Artificial Sequence
  Synthetic oligonucleotide
gtgagtctatagacttgttaccacttgccg

SEQ ID NO: 475686 - DNA, 30 bp, Artificial Sequence
  Synthetic oligonucleotide
catttcccttcacggtctttatctttgccg

SEQ ID NO: 475687 - DNA, 30 bp, Artificial Sequence
  Synthetic oligonucleotide
tccgtcgtccgtagcaggtcgcgtttgccg

SEQ ID NO: 475688 - DNA, 30 bp, Artificial Sequence
  Synthetic oligonucleotide
cgccgagtccatattagcgctgctaatccg

SEQ ID NO: 475689 - DNA, 30 bp, Artificial Sequence
  Synthetic oligonucleotide
gaatcgagtgttttaaagctagcgcatccg

SEQ ID NO: 475690 - DNA, 30 bp, Artificial Sequence
  Synthetic oligonucleotide
gcagataagcgcacaacggcctttcatccg

SEQ ID NO: 475691 - DNA, 30 bp, Artificial Sequence
  Synthetic oligonucleotide
cgcggctggtagggtgaaagaaccgatccg

SEQ ID NO: 475692 - DNA, 30 bp, Artificial Sequence
  Synthetic oligonucleotide
cagcacaaagcacccagtgtgttcgatccg

SEQ ID NO: 475693 - DNA, 30 bp, Artificial Sequence
  Synthetic oligonucleotide
taacgctctgagttaggcgtcatggatccg

SEQ ID NO: 475694 - DNA, 30 bp, Artificial Sequence
  Synthetic oligonucleotide
agatgcatcacctacgtaatgtatgatccg

SEQ ID NO: 475695 - DNA, 30 bp, Artificial Sequence
  Synthetic oligonucleotide
aaagacactaacattgcattgattgatccg

SEQ ID NO: 475696 - DNA, 30 bp, Artificial Sequence
  Synthetic oligonucleotide
tctgtagaccgcacatacaggtcatatccg

SEQ ID NO: 475697 - DNA, 30 bp, Artificial Sequence
  Synthetic oligonucleotide
gatggctattttaacgtcgttgtatatccg

SEQ ID NO: 475698 - DNA, 30 bp, Artificial Sequence
  Synthetic oligonucleotide
tacccaatggcatgtggttgtcactatccg

SEQ ID NO: 475699 - DNA, 30 bp, Artificial Sequence
  Synthetic oligonucleotide
ctctcattggtcctaggcttggcctatccg

SEQ ID NO: 475700 - DNA, 31 bp, Artificial Sequence
  Synthetic oligonucleotide
atttcgcttaaactaatgcttggagtatccg

SEQ ID NO: 475701 - DNA, 30 bp, Artificial Sequence
  Synthetic oligonucleotide
taccctacgaggaagagtatcaggtatccg

SEQ ID NO: 475702 - DNA, 30 bp, Artificial Sequence
  Synthetic oligonucleotide
ccattggtttgaaactacatgtcaactccg

SEQ ID NO: 475703 - DNA, 30 bp, Artificial Sequence
  Synthetic oligonucleotide
agatgtacgaggctcgagttattaactccg

SEQ ID NO: 475704 - DNA, 30 bp, Artificial Sequence
  Synthetic oligonucleotide
agttgacgcccagccacacggcacactccg

SEQ ID NO: 475705 - DNA, 30 bp, Artificial Sequence
  Synthetic oligonucleotide
ccgcaacaattcataatcacgaggactccg

SEQ ID NO: 475706 - DNA, 30 bp, Artificial Sequence
  Synthetic oligonucleotide
taagggattattaatctcggtattactccg

SEQ ID NO: 475707 - DNA, 30 bp, Artificial Sequence
  Synthetic oligonucleotide
acccatagtatggggtgatccccccctccg

SEQ ID NO: 475708 - DNA, 30 bp, Artificial Sequence
  Synthetic oligonucleotide
gaacggtaagaaccgcggcgtttggctccg

SEQ ID NO: 475709 - DNA, 30 bp, Artificial Sequence
  Synthetic oligonucleotide
gcgggccagtgacgcgtacttactgctccg

SEQ ID NO: 475710 - DNA, 30 bp, Artificial Sequence
  Synthetic oligonucleotide
cgcgtatgactcgtgacagcaccatctccg

SEQ ID NO: 475711 - DNA, 30 bp, Artificial Sequence
  Synthetic oligonucleotide
tttgattcggaattctagtgcaactctccg

SEQ ID NO: 475712 - DNA, 30 bp, Artificial Sequence
  Synthetic oligonucleotide
tgtaggtgttataagtatgcgccctctccg

SEQ ID NO: 475713 - DNA, 30 bp, Artificial Sequence
  Synthetic oligonucleotide
gacctccggatttctgatagagtcagtccg

SEQ ID NO: 475714 - DNA, 30 bp, Artificial Sequence
  Synthetic oligonucleotide
aggctagggcccccgggtagggagagtccg

SEQ ID NO: 475715 - DNA, 30 bp, Artificial Sequence
  Synthetic oligonucleotide
taacccgagcactggccctgatggagtccg

SEQ ID NO: 475716 - DNA, 30 bp, Artificial Sequence
  Synthetic oligonucleotide
caacgccggcttttggctaagatgagtccg

SEQ ID NO: 475717 - DNA, 30 bp, Artificial Sequence
  Synthetic oligonucleotide
ggtcgctccgtcggatattgcattagtccg

SEQ ID NO: 475718 - DNA, 30 bp, Artificial Sequence
  Synthetic oligonucleotide
ggtcttccgtcgccgacgagactacgtccg

SEQ ID NO: 475719 - DNA, 30 bp, Artificial Sequence
  Synthetic oligonucleotide
ctttcgctattgctgacgaccaaccgtccg

SEQ ID NO: 475720 - DNA, 30 bp, Artificial Sequence
  Synthetic oligonucleotide
cgcatatgcccagagagccgataccgtccg

SEQ ID NO: 475721 - DNA, 30 bp, Artificial Sequence
  Synthetic oligonucleotide
cgcaccgatgtttttgtcgtggcccgtccg

SEQ ID NO: 475722 - DNA, 30 bp, Artificial Sequence
  Synthetic oligonucleotide
ctcggttaaaaggctccgatatatcgtccg

SEQ ID NO: 475723 - DNA, 30 bp, Artificial Sequence
  Synthetic oligonucleotide
taggaggcaatacacgcttaagcaggtccg

SEQ ID NO: 475724 - DNA, 30 bp, Artificial Sequence
  Synthetic oligonucleotide
gggaatagggacttgattatcaagggtccg

SEQ ID NO: 475725 - DNA, 30 bp, Artificial Sequence
  Synthetic oligonucleotide
gttcttgcgtggggtctggtggtgggtccg

SEQ ID NO: 475726 - DNA, 30 bp, Artificial Sequence
  Synthetic oligonucleotide
gtccgcaccacatagacgcccgatggtccg

SEQ ID NO: 475727 - DNA, 30 bp, Artificial Sequence
  Synthetic oligonucleotide
tcggcgttaggtcgacgtaaaggtggtccg

SEQ ID NO: 475728 - DNA, 30 bp, Artificial Sequence
  Synthetic oligonucleotide
ccccaccacgacgtaaaacagtattgtccg

SEQ ID NO: 475729 - DNA, 30 bp, Artificial Sequence
  Synthetic oligonucleotide
atttcgggaggctggtgcgcactcattccg

SEQ ID NO: 475730 - DNA, 30 bp, Artificial Sequence
  Synthetic oligonucleotide
gcttttcaagcatgaacagcggcgattccg

SEQ ID NO: 475731 - DNA, 30 bp, Artificial Sequence
  Synthetic oligonucleotide
gacggcacgcgcgggaaagattatattccg

SEQ ID NO: 475732 - DNA, 30 bp, Artificial Sequence
  Synthetic oligonucleotide
cttgtacagaactggcgttaatgtcttccg

SEQ ID NO: 475733 - DNA, 30 bp, Artificial Sequence
  Synthetic oligonucleotide
attgacaatagttctttattcccagttccg

SEQ ID NO: 475734 - DNA, 30 bp, Artificial Sequence
  Synthetic oligonucleotide
ttgctgcagatgcaagcggatccatttccg

SEQ ID NO: 475735 - DNA, 30 bp, Artificial Sequence
  Synthetic oligonucleotide
taaaatcccggtgcagcgtaattatttccg

SEQ ID NO: 475736 - DNA, 30 bp, Artificial Sequence
  Synthetic oligonucleotide
gtacagtatggtacagtcttgacgtttccg

SEQ ID NO: 475737 - DNA, 30 bp, Artificial Sequence
  Synthetic oligonucleotide
ccggccagggggtactcggttaggtttccg

SEQ ID NO: 475738 - DNA, 30 bp, Artificial Sequence
  Synthetic oligonucleotide
gaaaaaccttcatgcgccggcgattttccg

SEQ ID NO: 475739 - DNA, 30 bp, Artificial Sequence
  Synthetic oligonucleotide
aattctaccgccaagcgttagagaaaagcg

SEQ ID NO: 475740 - DNA, 30 bp, Artificial Sequence
  Synthetic oligonucleotide
attgaaatgtgccgcatcggtcacaaagcg

SEQ ID NO: 475741 - DNA, 30 bp, Artificial Sequence
  Synthetic oligonucleotide
agatataatgggactccacaacgcaaagcg

SEQ ID NO: 475742 - DNA, 30 bp, Artificial Sequence
  Synthetic oligonucleotide
gagagcatcgcattggagacgcgtaaagcg

SEQ ID NO: 475743 - DNA, 30 bp, Artificial Sequence
  Synthetic oligonucleotide
gcgattaagaccaggttcattcgccaagcg

SEQ ID NO: 475744 - DNA, 30 bp, Artificial Sequence
  Synthetic oligonucleotide
gaatagtccctgtgctcttgtatccaagcg

SEQ ID NO: 475745 - DNA, 30 bp, Artificial Sequence
  Synthetic oligonucleotide
gccccacatccgatgcggcgcttccaagcg

SEQ ID NO: 475746 - DNA, 30 bp, Artificial Sequence
  Synthetic oligonucleotide
aagttccccgcgcgaatttctaagcaagcg

SEQ ID NO: 475747 - DNA, 30 bp, Artificial Sequence
  Synthetic oligonucleotide
gagtttgggtttgtcataagagtcgaagcg

SEQ ID NO: 475748 - DNA, 30 bp, Artificial Sequence
  Synthetic oligonucleotide
cacttgaccgagcctcagcacacggaagcg

SEQ ID NO: 475749 - DNA, 30 bp, Artificial Sequence
  Synthetic oligonucleotide
ctctgggccaatcgaccgcaacgctaagcg

SEQ ID NO: 475750 - DNA, 30 bp, Artificial Sequence
  Synthetic oligonucleotide
aatcgtttatgtaaaacagcgctctaagcg

SEQ ID NO: 475751 - DNA, 30 bp, Artificial Sequence
  Synthetic oligonucleotide
agtgtgtggtgtacaatttagggaacagcg

SEQ ID NO: 475752 - DNA, 30 bp, Artificial Sequence
  Synthetic oligonucleotide
aatgaagcgctgcaggacactgtaacagcg

SEQ ID NO: 475753 - DNA, 30 bp, Artificial Sequence
  Synthetic oligonucleotide
tcgcacgaacgcatttttagcagcacagcg

SEQ ID NO: 475754 - DNA, 30 bp, Artificial Sequence
  Synthetic oligonucleotide
tggatgttttactccccatttacgacagcg

SEQ ID NO: 475755 - DNA, 30 bp, Artificial Sequence
  Synthetic oligonucleotide
tcggtactggacgggttcccggtgacagcg

SEQ ID NO: 475756 - DNA, 30 bp, Artificial Sequence
  Synthetic oligonucleotide
gcattgaccatgctctcctgtttgacagcg

SEQ ID NO: 475757 - DNA, 30 bp, Artificial Sequence
  Synthetic oligonucleotide
ccaaggacccggatgccggagcctacagcg

SEQ ID NO: 475758 - DNA, 30 bp, Artificial Sequence
  Synthetic oligonucleotide
cgggtcgcagtaggcctccgccgtacagcg

SEQ ID NO: 475759 - DNA, 30 bp, Artificial Sequence
  Synthetic oligonucleotide
tagccacgattttaccctgacttgccagcg

SEQ ID NO: 475760 - DNA, 30 bp, Artificial Sequence
  Synthetic oligonucleotide
ctgttctccagggcggtcccgggcgcagcg

SEQ ID NO: 475761 - DNA, 30 bp, Artificial Sequence
  Synthetic oligonucleotide
gcgacctagcatcatttagcatgcgcagcg

SEQ ID NO: 475762 - DNA, 30 bp, Artificial Sequence
  Synthetic oligonucleotide
cgtgggccgagcacacggaagacggcagcg

SEQ ID NO: 475763 - DNA, 30 bp, Artificial Sequence
  Synthetic oligonucleotide
ctggtcctaaattctgtgatctcggcagcg

SEQ ID NO: 475764 - DNA, 30 bp, Artificial Sequence
  Synthetic oligonucleotide
agaggatcatgctgactctgtgtggcagcg

SEQ ID NO: 475765 - DNA, 30 bp, Artificial Sequence
  Synthetic oligonucleotide
tgaccgagaggccggtggctattggcagcg

SEQ ID NO: 475766 - DNA, 30 bp, Artificial Sequence
  Synthetic oligonucleotide
ggccgccaaatgctgctgtactgatcagcg

SEQ ID NO: 475767 - DNA, 30 bp, Artificial Sequence
  Synthetic oligonucleotide
caatttttgggggaggaggtctgatcagcg

SEQ ID NO: 475768 - DNA, 30 bp, Artificial Sequence
  Synthetic oligonucleotide
ggccaacagacggtaataacgcagtcagcg

SEQ ID NO: 475769 - DNA, 30 bp, Artificial Sequence
  Synthetic oligonucleotide
taaggcggggcgacgataacctattcagcg

SEQ ID NO: 475770 - DNA, 30 bp, Artificial Sequence
  Synthetic oligonucleotide
atgatgaatcttacgagtccgacttcagcg

SEQ ID NO: 475771 - DNA, 30 bp, Artificial Sequence
  Synthetic oligonucleotide
ggagagccgctgtttagaaaaatttcagcg

SEQ ID NO: 475772 - DNA, 30 bp, Artificial Sequence
  Synthetic oligonucleotide
gctctggtgttctatgatcaaagaagagcg

SEQ ID NO: 475773 - DNA, 30 bp, Artificial Sequence
  Synthetic oligonucleotide
aatcgaatgacaaatctcactcagagagcg

SEQ ID NO: 475774 - DNA, 30 bp, Artificial Sequence
  Synthetic oligonucleotide
tctgacactcttatgtccggacttagagcg

SEQ ID NO: 475775 - DNA, 30 bp, Artificial Sequence
  Synthetic oligonucleotide
agttcatcacatactgttatacgacgagcg

SEQ ID NO: 475776 - DNA, 30 bp, Artificial Sequence
  Synthetic oligonucleotide
ttttcatgcgctcgtcggaacagccgagcg

SEQ ID NO: 475777 - DNA, 30 bp, Artificial Sequence
  Synthetic oligonucleotide
gtccccggtcaattccagacctgtcgagcg

SEQ ID NO: 475778 - DNA, 30 bp, Artificial Sequence
  Synthetic oligonucleotide
cttctcaaacctcttatatgtttaggagcg

SEQ ID NO: 475779 - DNA, 30 bp, Artificial Sequence
  Synthetic oligonucleotide
cgttttcataaacggtttcgatacggagcg

SEQ ID NO: 475780 - DNA, 30 bp, Artificial Sequence
  Synthetic oligonucleotide
agcccggaacggtgtccgcaagccggagcg

SEQ ID NO: 475781 - DNA, 30 bp, Artificial Sequence
  Synthetic oligonucleotide
cgttgtgcaggcagcgccgagaagggagcg

SEQ ID NO: 475782 - DNA, 30 bp, Artificial Sequence
  Synthetic oligonucleotide
tgcatacgcctgcctccttaggcgggagcg

SEQ ID NO: 475783 - DNA, 30 bp, Artificial Sequence
  Synthetic oligonucleotide
aaagtctcgacgaggtcttgcggtggagcg

SEQ ID NO: 475784 - DNA, 30 bp, Artificial Sequence
  Synthetic oligonucleotide
ctaacgacgcatcccccagttaaatgagcg

SEQ ID NO: 475785 - DNA, 30 bp, Artificial Sequence
  Synthetic oligonucleotide
gccacgcttaaagttcctcgatgatgagcg

SEQ ID NO: 475786 - DNA, 30 bp, Artificial Sequence
  Synthetic oligonucleotide
ctaggcaaaggtgttggagtatgatgagcg

SEQ ID NO: 475787 - DNA, 30 bp, Artificial Sequence
  Synthetic oligonucleotide
gcccggtcactagagtaggatttctgagcg

SEQ ID NO: 475788 - DNA, 30 bp, Artificial Sequence
  Synthetic oligonucleotide
gcccaggacagggcggtgaccgcgtgagcg

SEQ ID NO: 475789 - DNA, 30 bp, Artificial Sequence
  Synthetic oligonucleotide
aagctacacacgctctactaggcgtgagcg

SEQ ID NO: 475790 - DNA, 30 bp, Artificial Sequence
  Synthetic oligonucleotide
actcgagcatgtcttttcctcgcaatagcg

SEQ ID NO: 475791 - DNA, 30 bp, Artificial Sequence
  Synthetic oligonucleotide
ctattgaaaattacggtcttcaacatagcg

SEQ ID NO: 475792 - DNA, 30 bp, Artificial Sequence
  Synthetic oligonucleotide
aactttaagccaggcaattttgggatagcg

SEQ ID NO: 475793 - DNA, 30 bp, Artificial Sequence
  Synthetic oligonucleotide
ctgtatctgccgtggcttctaagtatagcg

SEQ ID NO: 475794 - DNA, 30 bp, Artificial Sequence
  Synthetic oligonucleotide
agctcaatttcatgcaactagaaactagcg

SEQ ID NO: 475795 - DNA, 30 bp, Artificial Sequence
  Synthetic oligonucleotide
agggaggcacgccaacacggtgagctagcg

SEQ ID NO: 475796 - DNA, 30 bp, Artificial Sequence
  Synthetic oligonucleotide
attttcgcattggacgcgacagttctagcg

SEQ ID NO: 475797 - DNA, 30 bp, Artificial Sequence
  Synthetic oligonucleotide
gcgcagcgcagaggttccgttagcgtagcg

SEQ ID NO: 475798 - DNA, 30 bp, Artificial Sequence
  Synthetic oligonucleotide
atacttgacggaaaacgtggtgtcgtagcg

SEQ ID NO: 475799 - DNA, 30 bp, Artificial Sequence
  Synthetic oligonucleotide
caacgcgggaggccgcttgaggaattagcg

SEQ ID NO: 475800 - DNA, 30 bp, Artificial Sequence
  Synthetic oligonucleotide
gatccacgcttggtgaggggtaccttagcg

SEQ ID NO: 475801 - DNA, 30 bp, Artificial Sequence
  Synthetic oligonucleotide
ataatggcagcgcaacgcgaggctttagcg

SEQ ID NO: 475802 - DNA, 30 bp, Artificial Sequence
  Synthetic oligonucleotide
cgcccgcgggacaacgagccgcttttagcg

SEQ ID NO: 475803 - DNA, 30 bp, Artificial Sequence
  Synthetic oligonucleotide
ggcagtgaatgcggttgtcgctgaaacgcg

SEQ ID NO: 475804 - DNA, 30 bp, Artificial Sequence
  Synthetic oligonucleotide
agcgaatagcgatgataacttgtcaacgcg

SEQ ID NO: 475805 - DNA, 30 bp, Artificial Sequence
  Synthetic oligonucleotide
gtgggcccatagctccccacgaagaacgcg

SEQ ID NO: 475806 - DNA, 30 bp, Artificial Sequence
  Synthetic oligonucleotide
tggcttccgattggttcgttatggaacgcg

SEQ ID NO: 475807 - DNA, 30 bp, Artificial Sequence
  Synthetic oligonucleotide
gctattggaagtcacactgatttgaacgcg

SEQ ID NO: 475808 - DNA, 30 bp, Artificial Sequence
  Synthetic oligonucleotide
aggaatctctaggccaggtaatctaacgcg

SEQ ID NO: 475809 - DNA, 30 bp, Artificial Sequence
  Synthetic oligonucleotide
attcggcccatccccgcgcagtctaacgcg

SEQ ID NO: 475810 - DNA, 30 bp, Artificial Sequence
  Synthetic oligonucleotide
cactagggtgtctcccaatggggtaacgcg

SEQ ID NO: 475811 - DNA, 30 bp, Artificial Sequence
  Synthetic oligonucleotide
gtatatcgccgtgttgagcggggacacgcg

SEQ ID NO: 475812 - DNA, 30 bp, Artificial Sequence
  Synthetic oligonucleotide
taactcatcaataccacaagggtacacgcg

SEQ ID NO: 475813 - DNA, 30 bp, Artificial Sequence
  Synthetic oligonucleotide
cacagtagcgatgcggacttctaccacgcg

SEQ ID NO: 475814 - DNA, 30 bp, Artificial Sequence
  Synthetic oligonucleotide
attaagaagaaagaagagtgggctcacgcg

SEQ ID NO: 475815 - DNA, 30 bp, Artificial Sequence
  Synthetic oligonucleotide
ttcaacatcgctggcaatttcagtcacgcg

SEQ ID NO: 475816 - DNA, 30 bp, Artificial Sequence
  Synthetic oligonucleotide
tgcgcgttcccgggtgaaaaatttcacgcg

SEQ ID NO: 475817 - DNA, 31 bp, Artificial Sequence
  Synthetic oligonucleotide
ttgtagctaatgatgaccaagcaacgacgcg

SEQ ID NO: 475818 - DNA, 30 bp, Artificial Sequence
  Synthetic oligonucleotide
gattacgcctgtatatccaataacgacgcg

SEQ ID NO: 475819 - DNA, 30 bp, Artificial Sequence
  Synthetic oligonucleotide
tttacatgagataaaagaagatgcgacgcg

SEQ ID NO: 475820 - DNA, 30 bp, Artificial Sequence
  Synthetic oligonucleotide
ttgtttcattatcagtatttatgcgacgcg

SEQ ID NO: 475821 - DNA, 30 bp, Artificial Sequence
  Synthetic oligonucleotide
catagaggtcaagtaaatcagatcgacgcg

SEQ ID NO: 475822 - DNA, 30 bp, Artificial Sequence
  Synthetic oligonucleotide
ccacatcagtatagcgcgcaagtcgacgcg

SEQ ID NO: 475823 - DNA, 30 bp, Artificial Sequence
  Synthetic oligonucleotide
ttggcgtccaacaacctgtctcaggacgcg

SEQ ID NO: 475824 - DNA, 30 bp, Artificial Sequence
  Synthetic oligonucleotide
cttcaatgttacctgtaatgtccggacgcg

SEQ ID NO: 475825 - DNA, 30 bp, Artificial Sequence
  Synthetic oligonucleotide
ttcacaccatacgtcgtatgaatggacgcg

SEQ ID NO: 475826 - DNA, 30 bp, Artificial Sequence
  Synthetic oligonucleotide
agtcaaaagcttctcaaaggtatggacgcg

SEQ ID NO: 475827 - DNA, 30 bp, Artificial Sequence
  Synthetic oligonucleotide
cgaaagcggcggtggctgtcccctgacgcg

SEQ ID NO: 475828 - DNA, 30 bp, Artificial Sequence
  Synthetic oligonucleotide
taggcatagagtttactatgttctgacgcg

SEQ ID NO: 475829 - DNA, 30 bp, Artificial Sequence
  Synthetic oligonucleotide
tgtgaggcataagcacacggcgaatacgcg

SEQ ID NO: 475830 - DNA, 30 bp, Artificial Sequence
  Synthetic oligonucleotide
ggattctaaccttatcaaggaggatacgcg

SEQ ID NO: 475831 - DNA, 30 bp, Artificial Sequence
  Synthetic oligonucleotide
cggtcgatgttatccgcgtagttatacgcg

SEQ ID NO: 475832 - DNA, 30 bp, Artificial Sequence
  Synthetic oligonucleotide
cgagccgcgtaaacgagtgggcggtacgcg

SEQ ID NO: 475833 - DNA, 30 bp, Artificial Sequence
  Synthetic oligonucleotide
cccctatgcgggtaatatcgttggtacgcg

SEQ ID NO: 475834 - DNA, 30 bp, Artificial Sequence
  Synthetic oligonucleotide
gtttcgtagaccaaccatttcctgtacgcg

SEQ ID NO: 475835 - DNA, 30 bp, Artificial Sequence
  Synthetic oligonucleotide
cggggtacattacttactgaaccttacgcg

SEQ ID NO: 475836 - DNA, 30 bp, Artificial Sequence
  Synthetic oligonucleotide
tcccgtaaaatatagttaaattgttacgcg

SEQ ID NO: 475837 - DNA, 30 bp, Artificial Sequence
  Synthetic oligonucleotide
tgtgccggcttataaagccttaagaccgcg

SEQ ID NO: 475838 - DNA, 30 bp, Artificial Sequence
  Synthetic oligonucleotide
agctgtctcacggcccgcagcgtacccgcg

SEQ ID NO: 475839 - DNA, 30 bp, Artificial Sequence
  Synthetic oligonucleotide
caaaacccccggtccttactgctccccgcg

SEQ ID NO: 475840 - DNA, 30 bp, Artificial Sequence
  Synthetic oligonucleotide
tatatacccacctccagttggaagcccgcg

SEQ ID NO: 475841 - DNA, 30 bp, Artificial Sequence
  Synthetic oligonucleotide
aatccaaggtccgatcccggggggcccgcg

SEQ ID NO: 475842 - DNA, 30 bp, Artificial Sequence
  Synthetic oligonucleotide
tctccaacaggattgatcaacatgcccgcg

SEQ ID NO: 475843 - DNA, 30 bp, Artificial Sequence
  Synthetic oligonucleotide
aacgcagatatgtgaagatggtgtcccgcg

SEQ ID NO: 475844 - DNA, 30 bp, Artificial Sequence
  Synthetic oligonucleotide
tatcgggatgatgcgactacgacagccgcg

SEQ ID NO: 475845 - DNA, 30 bp, Artificial Sequence
  Synthetic oligonucleotide
aggcttctgataacatacttctcagccgcg

SEQ ID NO: 475846 - DNA, 30 bp, Artificial Sequence
  Synthetic oligonucleotide
accttaacccaatttcggtcaatagccgcg

SEQ ID NO: 475847 - DNA, 30 bp, Artificial Sequence
  Synthetic oligonucleotide
tgtacccctagacaagtcttggtagccgcg

SEQ ID NO: 475848 - DNA, 30 bp, Artificial Sequence
  Synthetic oligonucleotide
gggtgagtcttatttgcagacgaggccgcg

SEQ ID NO: 475849 - DNA, 30 bp, Artificial Sequence
  Synthetic oligonucleotide
tggcggagaacgcgccacgtcgaggccgcg

SEQ ID NO: 475850 - DNA, 30 bp, Artificial Sequence
  Synthetic oligonucleotide
tggagaaccaggtaaggggcgttggccgcg

SEQ ID NO: 475851 - DNA, 30 bp, Artificial Sequence
  Synthetic oligonucleotide
ctcctgactccgaatgacggttatgccgcg

SEQ ID NO: 475852 - DNA, 30 bp, Artificial Sequence
  Synthetic oligonucleotide
gggtcatcaaccgggccatatcgatccgcg

SEQ ID NO: 475853 - DNA, 30 bp, Artificial Sequence
  Synthetic oligonucleotide
accaaccaacatcttgttttttgatccgcg

SEQ ID NO: 475854 - DNA, 30 bp, Artificial Sequence
  Synthetic oligonucleotide
gtttgttgaagacgcgattcatcgtccgcg

SEQ ID NO: 475855 - DNA, 30 bp, Artificial Sequence
  Synthetic oligonucleotide
aagcaatccaacgtcgacctgaggtccgcg

SEQ ID NO: 475856 - DNA, 30 bp, Artificial Sequence
  Synthetic oligonucleotide
ctggagcttggctttgtgaagttaagcgcg

SEQ ID NO: 475857 - DNA, 30 bp, Artificial Sequence
  Synthetic oligonucleotide
tctcgcttaggtacgagatgacacagcgcg

SEQ ID NO: 475858 - DNA, 30 bp, Artificial Sequence
  Synthetic oligonucleotide
aacgaagaccaaagagcggttggcagcgcg

SEQ ID NO: 475859 - DNA, 30 bp, Artificial Sequence
  Synthetic oligonucleotide
gcaggatcgcctgtgagtagcatcagcgcg

SEQ ID NO: 475860 - DNA, 30 bp, Artificial Sequence
  Synthetic oligonucleotide
atctcgcgaagaagaatccggtgacgcgcg

SEQ ID NO: 475861 - DNA, 30 bp, Artificial Sequence
  Synthetic oligonucleotide
attttcggcggctacagatgctgaggcgcg

SEQ ID NO: 475862 - DNA, 30 bp, Artificial Sequence
  Synthetic oligonucleotide
cgcgatagggtagattcgggacccggcgcg

SEQ ID NO: 475863 - DNA, 30 bp, Artificial Sequence
  Synthetic oligonucleotide
accccttacagagccctaccctgcggcgcg

SEQ ID NO: 475864 - DNA, 30 bp, Artificial Sequence
  Synthetic oligonucleotide
gcccctgaggcgtgttttgggactggcgcg

SEQ ID NO: 475865 - DNA, 30 bp, Artificial Sequence
  Synthetic oligonucleotide
catttatagttgacactaaaatctggcgcg

SEQ ID NO: 475866 - DNA, 30 bp, Artificial Sequence
  Synthetic oligonucleotide
aaatgtagcttctgacagaaatctggcgcg

SEQ ID NO: 475867 - DNA, 30 bp, Artificial Sequence
  Synthetic oligonucleotide
tggtatgcagtactcctgatcacaatcgcg

SEQ ID NO: 475868 - DNA, 30 bp, Artificial Sequence
  Synthetic oligonucleotide
taaatcacttatctactcatggcaatcgcg

SEQ ID NO: 475869 - DNA, 30 bp, Artificial Sequence
  Synthetic oligonucleotide
catattgcactgccgcgttccgtgatcgcg

SEQ ID NO: 475870 - DNA, 30 bp, Artificial Sequence
  Synthetic oligonucleotide
ttggagacatgtatctaagtttctatcgcg

SEQ ID NO: 475871 - DNA, 30 bp, Artificial Sequence
  Synthetic oligonucleotide
atgggtcaagcctaggatctgagtatcgcg

SEQ ID NO: 475872 - DNA, 30 bp, Artificial Sequence
  Synthetic oligonucleotide
gcacgatcgggtgtcttatcccggctcgcg

SEQ ID NO: 475873 - DNA, 31 bp, Artificial Sequence
  Synthetic oligonucleotide
cgcattccgtacggacacgtggaatctcgcg

SEQ ID NO: 475874 - DNA, 30 bp, Artificial Sequence
  Synthetic oligonucleotide
ctagaggttcgaaagcgcgggtttctcgcg

SEQ ID NO: 475875 - DNA, 30 bp, Artificial Sequence
  Synthetic oligonucleotide
tagagatttttcgcctgatttggggtcgcg

SEQ ID NO: 475876 - DNA, 30 bp, Artificial Sequence
  Synthetic oligonucleotide
cgcaatttcatcccactgtgagaattcgcg

SEQ ID NO: 475877 - DNA, 30 bp, Artificial Sequence
  Synthetic oligonucleotide
gtcagtcgggatggtcatatatcattcgcg

SEQ ID NO: 475878 - DNA, 30 bp, Artificial Sequence
  Synthetic oligonucleotide
tatcgcaaaccgcggtcacgggtcttcgcg

SEQ ID NO: 475879 - DNA, 30 bp, Artificial Sequence
  Synthetic oligonucleotide
atacaactgaccgtagcgtgtgtcttcgcg

SEQ ID NO: 475880 - DNA, 30 bp, Artificial Sequence
  Synthetic oligonucleotide
agtaaagatcgacggggcacatagttcgcg

SEQ ID NO: 475881 - DNA, 30 bp, Artificial Sequence
  Synthetic oligonucleotide
agtgattgtactaacgtaacgcggttcgcg

SEQ ID NO: 475882 - DNA, 30 bp, Artificial Sequence
  Synthetic oligonucleotide
aggttaacaacacctaaaccaagtttcgcg

SEQ ID NO: 475883 - DNA, 30 bp, Artificial Sequence
  Synthetic oligonucleotide
agcggggacgccgtttttactgaaaaggcg

SEQ ID NO: 475884 - DNA, 30 bp, Artificial Sequence
  Synthetic oligonucleotide
ttgggggctgaatctattcatcccaaggcg

SEQ ID NO: 475885 - DNA, 30 bp, Artificial Sequence
  Synthetic oligonucleotide
gcacgctcaaccacgtatagagccaaggcg

SEQ ID NO: 475886 - DNA, 30 bp, Artificial Sequence
  Synthetic oligonucleotide
gcaccttcgtttcgacgaactccgaaggcg

SEQ ID NO: 475887 - DNA, 30 bp, Artificial Sequence
  Synthetic oligonucleotide
atgtggtttcggcagttacagtcgaaggcg

SEQ ID NO: 475888 - DNA, 30 bp, Artificial Sequence
  Synthetic oligonucleotide
atctacccagacggcgggtacctgaaggcg

SEQ ID NO: 475889 - DNA, 30 bp, Artificial Sequence
  Synthetic oligonucleotide
agatctgcacttcggtgcgacgcacaggcg

SEQ ID NO: 475890 - DNA, 30 bp, Artificial Sequence
  Synthetic oligonucleotide
gtatctgagcagccgcttgatgtacaggcg

SEQ ID NO: 475891 - DNA, 30 bp, Artificial Sequence
  Synthetic oligonucleotide
atgtagctcatcgaaacaacttaccaggcg

SEQ ID NO: 475892 - DNA, 30 bp, Artificial Sequence
  Synthetic oligonucleotide
gcttttgttgtttcagacatacgtcaggcg

SEQ ID NO: 475893 - DNA, 30 bp, Artificial Sequence
  Synthetic oligonucleotide
gtcttggactctcggccatcgggagaggcg

SEQ ID NO: 475894 - DNA, 30 bp, Artificial Sequence
  Synthetic oligonucleotide
aaaatatagtggtaaacgatatacgaggcg

SEQ ID NO: 475895 - DNA, 30 bp, Artificial Sequence
  Synthetic oligonucleotide
acgtactcctcggagagtggtcccgaggcg

SEQ ID NO: 475896 - DNA, 30 bp, Artificial Sequence
  Synthetic oligonucleotide
atacaagcattttccatcagatgggaggcg

SEQ ID NO: 475897 - DNA, 30 bp, Artificial Sequence
  Synthetic oligonucleotide
taagatcgacgcggacgattaatggaggcg

SEQ ID NO: 475898 - DNA, 30 bp, Artificial Sequence
  Synthetic oligonucleotide
cgcgcaatatggagctacttttctgaggcg

SEQ ID NO: 475899 - DNA, 30 bp, Artificial Sequence
  Synthetic oligonucleotide
ggccgcgtataccacctggcaattgaggcg

SEQ ID NO: 475900 - DNA, 30 bp, Artificial Sequence
  Synthetic oligonucleotide
atcctatctagatattaccgggttgaggcg

SEQ ID NO: 475901 - DNA, 30 bp, Artificial Sequence
  Synthetic oligonucleotide
ccatgtgaccgtggcaggctctttgaggcg

SEQ ID NO: 475902 - DNA, 30 bp, Artificial Sequence
  Synthetic oligonucleotide
agcgtgcaacgtcggcagtgtttataggcg

SEQ ID NO: 475903 - DNA, 30 bp, Artificial Sequence
  Synthetic oligonucleotide
ataagtcgcatacgccaagtggggtaggcg

SEQ ID NO: 475904 - DNA, 30 bp, Artificial Sequence
  Synthetic oligonucleotide
ttcgttttcttaagtagattctgttaggcg

SEQ ID NO: 475905 - DNA, 30 bp, Artificial Sequence
  Synthetic oligonucleotide
tttagagcggtgtacggacagcaaacggcg

SEQ ID NO: 475906 - DNA, 30 bp, Artificial Sequence
  Synthetic oligonucleotide
aattttggaatcgggatttcattcccggcg

SEQ ID NO: 475907 - DNA, 30 bp, Artificial Sequence
  Synthetic oligonucleotide
cgcacggtttggcgtagtgatgggccggcg

SEQ ID NO: 475908 - DNA, 30 bp, Artificial Sequence
  Synthetic oligonucleotide
tgcagacgcacaaggttcggatggccggcg

SEQ ID NO: 475909 - DNA, 30 bp, Artificial Sequence
  Synthetic oligonucleotide
tagttaggatacgggcagttgtatccggcg

SEQ ID NO: 475910 - DNA, 30 bp, Artificial Sequence
  Synthetic oligonucleotide
tccagagaatgattctcactgactccggcg

SEQ ID NO: 475911 - DNA, 30 bp, Artificial Sequence
  Synthetic oligonucleotide
aatgtattttgccgacctgtcagagcggcg

SEQ ID NO: 475912 - DNA, 30 bp, Artificial Sequence
  Synthetic oligonucleotide
gtgatttaggtactcgtggtgtaggcggcg

SEQ ID NO: 475913 - DNA, 30 bp, Artificial Sequence
  Synthetic oligonucleotide
atgatgcgtggtgtgataaaatcggcggcg

SEQ ID NO: 475914 - DNA, 30 bp, Artificial Sequence
  Synthetic oligonucleotide
tctatatattttggtatatagtgtgcggcg

SEQ ID NO: 475915 - DNA, 30 bp, Artificial Sequence
  Synthetic oligonucleotide
tctaagctttttgggtatcaccaaagggcg

SEQ ID NO: 475916 - DNA, 30 bp, Artificial Sequence
  Synthetic oligonucleotide
taagagaccggtaaccctgtggtgagggcg

SEQ ID NO: 475917 - DNA, 30 bp, Artificial Sequence
  Synthetic oligonucleotide
gtaacccttaaagccgggtgatttagggcg

SEQ ID NO: 475918 - DNA, 30 bp, Artificial Sequence
  Synthetic oligonucleotide
ggagaggttccttattcggcggcacgggcg

SEQ ID NO: 475919 - DNA, 30 bp, Artificial Sequence
  Synthetic oligonucleotide
ggattggggtacgttctggccgtacgggcg

SEQ ID NO: 475920 - DNA, 30 bp, Artificial Sequence
  Synthetic oligonucleotide
gatatgcaccacagagttggtgcccgggcg

SEQ ID NO: 475921 - DNA, 30 bp, Artificial Sequence
  Synthetic oligonucleotide
cgcccagtgacgcgaaaaagtctccgggcg

SEQ ID NO: 475922 - DNA, 30 bp, Artificial Sequence
  Synthetic oligonucleotide
ctttctttcctattcttccgggtccgggcg

SEQ ID NO: 475923 - DNA, 30 bp, Artificial Sequence
  Synthetic oligonucleotide
ggggccatgatcaactgccaaaggcgggcg

SEQ ID NO: 475924 - DNA, 30 bp, Artificial Sequence
  Synthetic oligonucleotide
cttgagaattcgatcaatttttggcgggcg

SEQ ID NO: 475925 - DNA, 30 bp, Artificial Sequence
  Synthetic oligonucleotide
ctcttatccgtatagcgaatgtatcgggcg

SEQ ID NO: 475926 - DNA, 30 bp, Artificial Sequence
  Synthetic oligonucleotide
gaatttcctaggggtcttccggccggggcg

SEQ ID NO: 475927 - DNA, 30 bp, Artificial Sequence
  Synthetic oligonucleotide
gaaaccgattttatttctcacttgggggcg

SEQ ID NO: 475928 - DNA, 30 bp, Artificial Sequence
  Synthetic oligonucleotide
tttagtagcaggcccgtctggcctggggcg

SEQ ID NO: 475929 - DNA, 30 bp, Artificial Sequence
  Synthetic oligonucleotide
cttacggcaagccctcaaagtgcctgggcg

SEQ ID NO: 475930 - DNA, 30 bp, Artificial Sequence
  Synthetic oligonucleotide
tcgatctaagatcgatagaacgagtgggcg

SEQ ID NO: 475931 - DNA, 30 bp, Artificial Sequence
  Synthetic oligonucleotide
tacactctcctctgcagggacgagtgggcg

SEQ ID NO: 475932 - DNA, 30 bp, Artificial Sequence
  Synthetic oligonucleotide
gattatgggcaccgtgtagtctattgggcg

SEQ ID NO: 475933 - DNA, 30 bp, Artificial Sequence
  Synthetic oligonucleotide
ctgccacctcggcggagttcttattgggcg

SEQ ID NO: 475934 - DNA, 30 bp, Artificial Sequence
  Synthetic oligonucleotide
tcacatgtaaattcacccggtcgaatggcg

SEQ ID NO: 475935 - DNA, 30 bp, Artificial Sequence
  Synthetic oligonucleotide
agataatggcgtacgttgcaattcatggcg

SEQ ID NO: 475936 - DNA, 30 bp, Artificial Sequence
  Synthetic oligonucleotide
aacctctaggttcatgggcatcctatggcg

SEQ ID NO: 475937 - DNA, 30 bp, Artificial Sequence
  Synthetic oligonucleotide
ctgcagagccatgaccgatcttctatggcg

SEQ ID NO: 475938 - DNA, 30 bp, Artificial Sequence
  Synthetic oligonucleotide
tgcgatggggccgaccgtttatgtatggcg

SEQ ID NO: 475939 - DNA, 30 bp, Artificial Sequence
  Synthetic oligonucleotide
gcgaccatcgggcgcagttacgtcctggcg

SEQ ID NO: 475940 - DNA, 30 bp, Artificial Sequence
  Synthetic oligonucleotide
ttatctgataggttacagctgtatctggcg

SEQ ID NO: 475941 - DNA, 30 bp, Artificial Sequence
  Synthetic oligonucleotide
gccctgtaaagttgggacgtggttctggcg

SEQ ID NO: 475942 - DNA, 30 bp, Artificial Sequence
  Synthetic oligonucleotide
gagtggcgaaaaacagttgcttccgtggcg

SEQ ID NO: 475943 - DNA, 30 bp, Artificial Sequence
  Synthetic oligonucleotide
gtcacagcacgcggggcgtccaaggtggcg

SEQ ID NO: 475944 - DNA, 30 bp, Artificial Sequence
  Synthetic oligonucleotide
ggtgctctatcacgcgcgtctcaggtggcg

SEQ ID NO: 475945 - DNA, 30 bp, Artificial Sequence
  Synthetic oligonucleotide
taattaattttggatggatacctattggcg

SEQ ID NO: 475946 - DNA, 30 bp, Artificial Sequence
  Synthetic oligonucleotide
atgtataatagaggttcgctactcttggcg

SEQ ID NO: 475947 - DNA, 30 bp, Artificial Sequence
  Synthetic oligonucleotide
ttttttctacattgctcggttaagttggcg

SEQ ID NO: 475948 - DNA, 30 bp, Artificial Sequence
  Synthetic oligonucleotide
ctgaggagctgcaccgttaagacgttggcg

SEQ ID NO: 475949 - DNA, 30 bp, Artificial Sequence
  Synthetic oligonucleotide
atattcccctcgggggcgttaccgttggcg

SEQ ID NO: 475950 - DNA, 30 bp, Artificial Sequence
  Synthetic oligonucleotide
taattgtgatctctatcatccagtttggcg

SEQ ID NO: 475951 - DNA, 30 bp, Artificial Sequence
  Synthetic oligonucleotide
cttcgtagcgctccgacggtacgtttggcg

SEQ ID NO: 475952 - DNA, 30 bp, Artificial Sequence
  Synthetic oligonucleotide
cttaattaaggctcatgctgtgcaaatgcg

SEQ ID NO: 475953 - DNA, 30 bp, Artificial Sequence
  Synthetic oligonucleotide
gcatgtgtttcgcggccatcatcaaatgcg

SEQ ID NO: 475954 - DNA, 30 bp, Artificial Sequence
  Synthetic oligonucleotide
caagcaccacgcccttcacggtacaatgcg

SEQ ID NO: 475955 - DNA, 30 bp, Artificial Sequence
  Synthetic oligonucleotide
ctttcgggacgagtctatttactcaatgcg

SEQ ID NO: 475956 - DNA, 30 bp, Artificial Sequence
  Synthetic oligonucleotide
gccacgcaagagtagtgtaacgggaatgcg

SEQ ID NO: 475957 - DNA, 32 bp, Artificial Sequence
  Synthetic oligonucleotide
tttgttgtgtaggtttactcctctaccatgcg

SEQ ID NO: 475958 - DNA, 30 bp, Artificial Sequence
  Synthetic oligonucleotide
aacacaaaaacgggagatgcagcccatgcg

SEQ ID NO: 475959 - DNA, 30 bp, Artificial Sequence
  Synthetic oligonucleotide
gtttagtctcaaggacatcagacgcatgcg

SEQ ID NO: 475960 - DNA, 30 bp, Artificial Sequence
  Synthetic oligonucleotide
cctgtaaggtagggttgttgcggtcatgcg

SEQ ID NO: 475961 - DNA, 30 bp, Artificial Sequence
  Synthetic oligonucleotide
gcctagcaactatctggggcagcagatgcg

SEQ ID NO: 475962 - DNA, 30 bp, Artificial Sequence
  Synthetic oligonucleotide
aatactacatcccagaacgatgtcgatgcg

SEQ ID NO: 475963 - DNA, 30 bp, Artificial Sequence
  Synthetic oligonucleotide
cctctaattgaactggctgctcgggatgcg

SEQ ID NO: 475964 - DNA, 30 bp, Artificial Sequence
  Synthetic oligonucleotide
ccgtcgaatagtatcattgatcatgatgcg

SEQ ID NO: 475965 - DNA, 30 bp, Artificial Sequence
  Synthetic oligonucleotide
gtactacgtagaggcaagcccaaatatgcg

SEQ ID NO: 475966 - DNA, 30 bp, Artificial Sequence
  Synthetic oligonucleotide
aaaagtgtcgtgccaaaatcctaatatgcg

SEQ ID NO: 475967 - DNA, 30 bp, Artificial Sequence
  Synthetic oligonucleotide
tggtgtcctagatcaacccaggcatatgcg

SEQ ID NO: 475968 - DNA, 30 bp, Artificial Sequence
  Synthetic oligonucleotide
gattgtgactgtcaccttcagttatatgcg

SEQ ID NO: 475969 - DNA, 30 bp, Artificial Sequence
  Synthetic oligonucleotide
tattaatgcgccagtctttgttactatgcg

SEQ ID NO: 475970 - DNA, 30 bp, Artificial Sequence
  Synthetic oligonucleotide
atagtaattcatgcacatgtctagtatgcg

SEQ ID NO: 475971 - DNA, 30 bp, Artificial Sequence
  Synthetic oligonucleotide
attaatagtgtggaatttatgtattatgcg

SEQ ID NO: 475972 - DNA, 30 bp, Artificial Sequence
  Synthetic oligonucleotide
aggtgttcacaagcgtttggtttttatgcg

SEQ ID NO: 475973 - DNA, 30 bp, Artificial Sequence
  Synthetic oligonucleotide
caacgcaagactaagaacgcaaggactgcg

SEQ ID NO: 475974 - DNA, 30 bp, Artificial Sequence
  Synthetic oligonucleotide
gttttcggttgagccttacacacacctgcg

SEQ ID NO: 475975 - DNA, 30 bp, Artificial Sequence
  Synthetic oligonucleotide
accagttttctgacgcatataatacctgcg

SEQ ID NO: 475976 - DNA, 30 bp, Artificial Sequence
  Synthetic oligonucleotide
attctaacgagcgctaatgactttcctgcg

SEQ ID NO: 475977 - DNA, 30 bp, Artificial Sequence
  Synthetic oligonucleotide
tatacttgaggcaacgaagtatacgctgcg

SEQ ID NO: 475978 - DNA, 30 bp, Artificial Sequence
  Synthetic oligonucleotide
gtccccggagatcccattgggtaatctgcg

SEQ ID NO: 475979 - DNA, 30 bp, Artificial Sequence
  Synthetic oligonucleotide
aatcaattacaagaaaggaccacatctgcg

SEQ ID NO: 475980 - DNA, 30 bp, Artificial Sequence
  Synthetic oligonucleotide
aaactcctctgtttgtctctcgtctctgcg

SEQ ID NO: 475981 - DNA, 30 bp, Artificial Sequence
  Synthetic oligonucleotide
tctatatcagatactcccctctcaagtgcg

SEQ ID NO: 475982 - DNA, 30 bp, Artificial Sequence
  Synthetic oligonucleotide
caattatgtatctaaaaataattaagtgcg

SEQ ID NO: 475983 - DNA, 30 bp, Artificial Sequence
  Synthetic oligonucleotide
ctgatttgtatgtaattccagtggagtgcg

SEQ ID NO: 475984 - DNA, 30 bp, Artificial Sequence
  Synthetic oligonucleotide
aagcttgaaactacggcttttgtgagtgcg

SEQ ID NO: 475985 - DNA, 30 bp, Artificial Sequence
  Synthetic oligonucleotide
tttcatcaatgtctaggtggtgtccgtgcg

SEQ ID NO: 475986 - DNA, 30 bp, Artificial Sequence
  Synthetic oligonucleotide
ggctgccaataacacagttacgctcgtgcg

SEQ ID NO: 475987 - DNA, 30 bp, Artificial Sequence
  Synthetic oligonucleotide
ccacatagctgtagacaccaacctggtgcg

SEQ ID NO: 475988 - DNA, 30 bp, Artificial Sequence
  Synthetic oligonucleotide
atcatgaatctctcattaacagttggtgcg

SEQ ID NO: 475989 - DNA, 30 bp, Artificial Sequence
  Synthetic oligonucleotide
tgttgtttggtatgtttaatcgtttgtgcg

SEQ ID NO: 475990 - DNA, 30 bp, Artificial Sequence
  Synthetic oligonucleotide
ctgatttttaggtgtgacctggggattgcg

SEQ ID NO: 475991 - DNA, 30 bp, Artificial Sequence
  Synthetic oligonucleotide
aaggggtttacggcccctttaacacttgcg

SEQ ID NO: 475992 - DNA, 30 bp, Artificial Sequence
  Synthetic oligonucleotide
gtatagtgtactcactaactcacacttgcg

SEQ ID NO: 475993 - DNA, 30 bp, Artificial Sequence
  Synthetic oligonucleotide
tgatgtgtaagtttactcctctaccttgcg

SEQ ID NO: 475994 - DNA, 30 bp, Artificial Sequence
  Synthetic oligonucleotide
tgatgtgtagttttactcctctaccttgcg

SEQ ID NO: 475995 - DNA, 30 bp, Artificial Sequence
  Synthetic oligonucleotide
gcgcgctaagtgtttggtttcggccttgcg

SEQ ID NO: 475996 - DNA, 30 bp, Artificial Sequence
  Synthetic oligonucleotide
tcgcgcgccgaaagtctctagggtcttgcg

SEQ ID NO: 475997 - DNA, 30 bp, Artificial Sequence
  Synthetic oligonucleotide
tgttgcttccgtgtaacttacctcgttgcg

SEQ ID NO: 475998 - DNA, 30 bp, Artificial Sequence
  Synthetic oligonucleotide
cctattcatggggaccccatataggttgcg

SEQ ID NO: 475999 - DNA, 30 bp, Artificial Sequence
  Synthetic oligonucleotide
ggacttttctacatcgtgcgtctggttgcg

SEQ ID NO: 476000 - DNA, 30 bp, Artificial Sequence
  Synthetic oligonucleotide
cctcatattcgaggtagtttcgctgttgcg

SEQ ID NO: 476001 - DNA, 30 bp, Artificial Sequence
  Synthetic oligonucleotide
taattgtcttggggataaacgcttgttgcg

SEQ ID NO: 476002 - DNA, 30 bp, Artificial Sequence
  Synthetic oligonucleotide
ctccaaagtaacgttacttatacatttgcg

SEQ ID NO: 476003 - DNA, 30 bp, Artificial Sequence
  Synthetic oligonucleotide
gagcaggtattcagtgttaatgcatttgcg

SEQ ID NO: 476004 - DNA, 30 bp, Artificial Sequence
  Synthetic oligonucleotide
gtcctaagttttgtgaaaaccgggtttgcg

SEQ ID NO: 476005 - DNA, 30 bp, Artificial Sequence
  Synthetic oligonucleotide
cttgagaccgggcatcccctcggaaaatcg

SEQ ID NO: 476006 - DNA, 30 bp, Artificial Sequence
  Synthetic oligonucleotide
cccaaatgtaaaagtttttttggcaaatcg

SEQ ID NO: 476007 - DNA, 30 bp, Artificial Sequence
  Synthetic oligonucleotide
ctctgatatgtgcacgagcgatataaatcg

SEQ ID NO: 476008 - DNA, 30 bp, Artificial Sequence
  Synthetic oligonucleotide
tgcccacggtcagtaattcgggttaaatcg

SEQ ID NO: 476009 - DNA, 30 bp, Artificial Sequence
  Synthetic oligonucleotide
gcccagacgcttggttgtggttcgcaatcg

SEQ ID NO: 476010 - DNA, 30 bp, Artificial Sequence
  Synthetic oligonucleotide
gcttttgggtatttagagatcgttcaatcg

SEQ ID NO: 476011 - DNA, 30 bp, Artificial Sequence
  Synthetic oligonucleotide
gtctcgatctttcgttaaatttaagaatcg

SEQ ID NO: 476012 - DNA, 30 bp, Artificial Sequence
  Synthetic oligonucleotide
gttacagcaggaaggagactggccgaatcg

SEQ ID NO: 476013 - DNA, 30 bp, Artificial Sequence
  Synthetic oligonucleotide
gccctttaatagggggcatctggcgaatcg

SEQ ID NO: 476014 - DNA, 30 bp, Artificial Sequence
  Synthetic oligonucleotide
gcacccctaagactaacgcagaaggaatcg

SEQ ID NO: 476015 - DNA, 30 bp, Artificial Sequence
  Synthetic oligonucleotide
gcgcgattacgcctgttttgcgaataatcg

SEQ ID NO: 476016 - DNA, 30 bp, Artificial Sequence
  Synthetic oligonucleotide
tcccaatctgcaatgacacggccataatcg

SEQ ID NO: 476017 - DNA, 30 bp, Artificial Sequence
  Synthetic oligonucleotide
taagcggctttcgcagctagaagctaatcg

SEQ ID NO: 476018 - DNA, 30 bp, Artificial Sequence
  Synthetic oligonucleotide
tttagagtatgttaaatttatcagtaatcg

SEQ ID NO: 476019 - DNA, 30 bp, Artificial Sequence
  Synthetic oligonucleotide
acccgacgtctttgcttatgggggtaatcg

SEQ ID NO: 476020 - DNA, 30 bp, Artificial Sequence
  Synthetic oligonucleotide
gcattgaacatccgctaggtggggtaatcg

SEQ ID NO: 476021 - DNA, 30 bp, Artificial Sequence
  Synthetic oligonucleotide
ctatgccggacttcgtccccaacttaatcg

SEQ ID NO: 476022 - DNA, 30 bp, Artificial Sequence
  Synthetic oligonucleotide
gctaacgagtctagttcctccagaacatcg

SEQ ID NO: 476023 - DNA, 30 bp, Artificial Sequence
  Synthetic oligonucleotide
gaggcagcggcttctacttctataacatcg

SEQ ID NO: 476024 - DNA, 30 bp, Artificial Sequence
  Synthetic oligonucleotide
acagtacgcacagcttacgcagtaacatcg

SEQ ID NO: 476025 - DNA, 30 bp, Artificial Sequence
  Synthetic oligonucleotide
tcaagtgtgattgacgcgaaattcacatcg

SEQ ID NO: 476026 - DNA, 30 bp, Artificial Sequence
  Synthetic oligonucleotide
ataaaatcttttgtattccggacgacatcg

SEQ ID NO: 476027 - DNA, 30 bp, Artificial Sequence
  Synthetic oligonucleotide
ggtctactgttcgttccggttacgacatcg

SEQ ID NO: 476028 - DNA, 30 bp, Artificial Sequence
  Synthetic oligonucleotide
tttaaaattagtgactcggtaactacatcg

SEQ ID NO: 476029 - DNA, 30 bp, Artificial Sequence
  Synthetic oligonucleotide
aggtttgactagcaccgtcgccaaccatcg

SEQ ID NO: 476030 - DNA, 30 bp, Artificial Sequence
  Synthetic oligonucleotide
cgttcggtcaaacgatgatttgacccatcg

SEQ ID NO: 476031 - DNA, 30 bp, Artificial Sequence
  Synthetic oligonucleotide
gcacgctttcttgggttaattaacgcatcg

SEQ ID NO: 476032 - DNA, 30 bp, Artificial Sequence
  Synthetic oligonucleotide
cacttagatagatcagtgagcgacgcatcg

SEQ ID NO: 476033 - DNA, 30 bp, Artificial Sequence
  Synthetic oligonucleotide
gctcagggcatggtggtgccatcggcatcg

SEQ ID NO: 476034 - DNA, 30 bp, Artificial Sequence
  Synthetic oligonucleotide
gctgacgtaattgatcgatcacgatcatcg

SEQ ID NO: 476035 - DNA, 30 bp, Artificial Sequence
  Synthetic oligonucleotide
tacgcgagaccatacgggaccgtatcatcg

SEQ ID NO: 476036 - DNA, 30 bp, Artificial Sequence
  Synthetic oligonucleotide
tcgggacaaacgagaagctgggtatcatcg

SEQ ID NO: 476037 - DNA, 30 bp, Artificial Sequence
  Synthetic oligonucleotide
gacttcctcgactatcggagtttatcatcg

SEQ ID NO: 476038 - DNA, 30 bp, Artificial Sequence
  Synthetic oligonucleotide
gagggcgcgagcccggaggtttcgtcatcg

SEQ ID NO: 476039 - DNA, 30 bp, Artificial Sequence
  Synthetic oligonucleotide
atctgcacgactttctatgacaaaagatcg

SEQ ID NO: 476040 - DNA, 30 bp, Artificial Sequence
  Synthetic oligonucleotide
gcctattcctcgatttaacgcaatagatcg

SEQ ID NO: 476041 - DNA, 30 bp, Artificial Sequence
  Synthetic oligonucleotide
ttttgccgcgtcctgctgtcccctagatcg

SEQ ID NO: 476042 - DNA, 30 bp, Artificial Sequence
  Synthetic oligonucleotide
tggtgttcccagggccagtgtgtacgatcg

SEQ ID NO: 476043 - DNA, 30 bp, Artificial Sequence
  Synthetic oligonucleotide
ttgcagatcgcacatcgatcgaaccgatcg

SEQ ID NO: 476044 - DNA, 30 bp, Artificial Sequence
  Synthetic oligonucleotide
gccggtccgcacgtaaagacgacgcgatcg

SEQ ID NO: 476045 - DNA, 30 bp, Artificial Sequence
  Synthetic oligonucleotide
actggaatgacttatgtagacgtaggatcg

SEQ ID NO: 476046 - DNA, 30 bp, Artificial Sequence
  Synthetic oligonucleotide
agattgttagacgcctgtgatagcggatcg

SEQ ID NO: 476047 - DNA, 30 bp, Artificial Sequence
  Synthetic oligonucleotide
acgaacgatacgatgaagccgttcggatcg

SEQ ID NO: 476048 - DNA, 30 bp, Artificial Sequence
  Synthetic oligonucleotide
ctctcgctttgcacgccttaaggatgatcg

SEQ ID NO: 476049 - DNA, 30 bp, Artificial Sequence
  Synthetic oligonucleotide
ttagtcttctcggcttatattctatgatcg

SEQ ID NO: 476050 - DNA, 30 bp, Artificial Sequence
  Synthetic oligonucleotide
agccattatgggatcggtctaaagtgatcg

SEQ ID NO: 476051 - DNA, 30 bp, Artificial Sequence
  Synthetic oligonucleotide
tctgggaaggtcgcgggtcatgggtgatcg

SEQ ID NO: 476052 - DNA, 30 bp, Artificial Sequence
  Synthetic oligonucleotide
attatcacaaggttactagtataaatatcg

SEQ ID NO: 476053 - DNA, 30 bp, Artificial Sequence
  Synthetic oligonucleotide
cactccattggacgttcccgatacatatcg

SEQ ID NO: 476054 - DNA, 30 bp, Artificial Sequence
  Synthetic oligonucleotide
cacggtgtccaaggtttttgccggatatcg

SEQ ID NO: 476055 - DNA, 30 bp, Artificial Sequence
  Synthetic oligonucleotide
agcaacaaaaacctttaacttatgatatcg

SEQ ID NO: 476056 - DNA, 30 bp, Artificial Sequence
  Synthetic oligonucleotide
ctgcgccggtggcataaagttggtatatcg

SEQ ID NO: 476057 - DNA, 30 bp, Artificial Sequence
  Synthetic oligonucleotide
gcgttcccagggtcttgcacgcttatatcg

SEQ ID NO: 476058 - DNA, 30 bp, Artificial Sequence
  Synthetic oligonucleotide
tccgtccggataactaggtcgttactatcg

SEQ ID NO: 476059 - DNA, 30 bp, Artificial Sequence
  Synthetic oligonucleotide
tggcgctgtaagaatgtaactttgctatcg

SEQ ID NO: 476060 - DNA, 30 bp, Artificial Sequence
  Synthetic oligonucleotide
aatatgtggtcaacctaaacgtaggtatcg

SEQ ID NO: 476061 - DNA, 30 bp, Artificial Sequence
  Synthetic oligonucleotide
gacccgcacacgggatcgctggatgtatcg

SEQ ID NO: 476062 - DNA, 30 bp, Artificial Sequence
  Synthetic oligonucleotide
tacatactggatataagtatgtttgtatcg

SEQ ID NO: 476063 - DNA, 30 bp, Artificial Sequence
  Synthetic oligonucleotide
aaagcgggtagattgacttccagattatcg

SEQ ID NO: 476064 - DNA, 30 bp, Artificial Sequence
  Synthetic oligonucleotide
acttatgagatgcagccctcacacttatcg

SEQ ID NO: 476065 - DNA, 29 bp, Artificial Sequence
  Synthetic oligonucleotide
ttacgacgtgcgctaatgttaatttatcg

SEQ ID NO: 476066 - DNA, 30 bp, Artificial Sequence
  Synthetic oligonucleotide
tactgtagacgggtgagtgatacaaactcg

SEQ ID NO: 476067 - DNA, 30 bp, Artificial Sequence
  Synthetic oligonucleotide
gttgctgtccgtaaatagggctctaactcg

SEQ ID NO: 476068 - DNA, 30 bp, Artificial Sequence
  Synthetic oligonucleotide
gaagggagagttaaagtctagtttaactcg

SEQ ID NO: 476069 - DNA, 30 bp, Artificial Sequence
  Synthetic oligonucleotide
tggtccatcgtagtaattgtaacccactcg

SEQ ID NO: 476070 - DNA, 30 bp, Artificial Sequence
  Synthetic oligonucleotide
tcgcgaggctttggataataatcgcactcg

SEQ ID NO: 476071 - DNA, 30 bp, Artificial Sequence
  Synthetic oligonucleotide
atgagccgggctcgcgccttcgggcactcg

SEQ ID NO: 476072 - DNA, 30 bp, Artificial Sequence
  Synthetic oligonucleotide
aaatgggttctcgatcccatgtaagactcg

SEQ ID NO: 476073 - DNA, 30 bp, Artificial Sequence
  Synthetic oligonucleotide
gtctgaaacgttcaacgtagggtggactcg

SEQ ID NO: 476074 - DNA, 30 bp, Artificial Sequence
  Synthetic oligonucleotide
gtttaagagaccgcatggcattctgactcg

SEQ ID NO: 476075 - DNA, 30 bp, Artificial Sequence
  Synthetic oligonucleotide
ctccctggaggattttcggccgattactcg

SEQ ID NO: 476076 - DNA, 30 bp, Artificial Sequence
  Synthetic oligonucleotide
tacccttgtgatctgcacgctagttactcg

SEQ ID NO: 476077 - DNA, 30 bp, Artificial Sequence
  Synthetic oligonucleotide
cagacacagtcgagtatcaaggtttactcg

SEQ ID NO: 476078 - DNA, 30 bp, Artificial Sequence
  Synthetic oligonucleotide
gtccctccctctccgctttcccaaacctcg

SEQ ID NO: 476079 - DNA, 30 bp, Artificial Sequence
  Synthetic oligonucleotide
gtcaacacgcgcattctgagtgcaacctcg

SEQ ID NO: 476080 - DNA, 28 bp, Artificial Sequence
  Synthetic oligonucleotide
tgggtaatgcggtatgtcggtcacctcg

SEQ ID NO: 476081 - DNA, 30 bp, Artificial Sequence
  Synthetic oligonucleotide
tagaaagtatatagtgtagctgttacctcg

SEQ ID NO: 476082 - DNA, 30 bp, Artificial Sequence
  Synthetic oligonucleotide
tctaaaggcttcctgatcttggccccctcg

SEQ ID NO: 476083 - DNA, 30 bp, Artificial Sequence
  Synthetic oligonucleotide
attcgtagcgaggccatgggacgtccctcg

SEQ ID NO: 476084 - DNA, 30 bp, Artificial Sequence
  Synthetic oligonucleotide
tctcacgtcagcgggaggagccgcgcctcg

SEQ ID NO: 476085 - DNA, 30 bp, Artificial Sequence
  Synthetic oligonucleotide
aaaaatggattatcttccgtgttttcctcg

SEQ ID NO: 476086 - DNA, 30 bp, Artificial Sequence
  Synthetic oligonucleotide
cgagatattattcacgaacgtcgcagctcg

SEQ ID NO: 476087 - DNA, 30 bp, Artificial Sequence
  Synthetic oligonucleotide
atgtcaaatggatgcaactcgagtagctcg

SEQ ID NO: 476088 - DNA, 30 bp, Artificial Sequence
  Synthetic oligonucleotide
ttaaaaatctctgctcaaattcttagctcg

SEQ ID NO: 476089 - DNA, 31 bp, Artificial Sequence
  Synthetic oligonucleotide
tggtctttcggagagtcggcacgaccgctcg

SEQ ID NO: 476090 - DNA, 30 bp, Artificial Sequence
  Synthetic oligonucleotide
cggacacccgcacagaggctgaatcgctcg

SEQ ID NO: 476091 - DNA, 30 bp, Artificial Sequence
  Synthetic oligonucleotide
ggcaacgagcttttttttacgtatcgctcg

SEQ ID NO: 476092 - DNA, 30 bp, Artificial Sequence
  Synthetic oligonucleotide
ctattactttctctcagcacaagcggctcg

SEQ ID NO: 476093 - DNA, 30 bp, Artificial Sequence
  Synthetic oligonucleotide
atggtgcactgtgcgtcgtgattcggctcg

SEQ ID NO: 476094 - DNA, 30 bp, Artificial Sequence
  Synthetic oligonucleotide
acactacaaccactttttcggttgggctcg

SEQ ID NO: 476095 - DNA, 30 bp, Artificial Sequence
  Synthetic oligonucleotide
cgtcctaaccgtgcgtatataggtggctcg

SEQ ID NO: 476096 - DNA, 30 bp, Artificial Sequence
  Synthetic oligonucleotide
aaggtatagctcacccggctcgcctgctcg

SEQ ID NO: 476097 - DNA, 30 bp, Artificial Sequence
  Synthetic oligonucleotide
gagttccggaacgattatggctgctgctcg

SEQ ID NO: 476098 - DNA, 30 bp, Artificial Sequence
  Synthetic oligonucleotide
gcatggtcgactgcttttcctacgtgctcg

SEQ ID NO: 476099 - DNA, 30 bp, Artificial Sequence
  Synthetic oligonucleotide
ccccaacacacacacgtataacggtgctcg

SEQ ID NO: 476100 - DNA, 30 bp, Artificial Sequence
  Synthetic oligonucleotide
acacacgagcgtatcatcatcctgtgctcg

SEQ ID NO: 476101 - DNA, 30 bp, Artificial Sequence
  Synthetic oligonucleotide
ctattcgtgggtctgtattatatttgctcg

SEQ ID NO: 476102 - DNA, 30 bp, Artificial Sequence
  Synthetic oligonucleotide
atacgctcagaaacgcgtgcacaaatctcg

SEQ ID NO: 476103 - DNA, 30 bp, Artificial Sequence
  Synthetic oligonucleotide
atgtttaggaataacagaatattgatctcg

SEQ ID NO: 476104 - DNA, 30 bp, Artificial Sequence
  Synthetic oligonucleotide
cttcttttatggcgatacagatgtatctcg

SEQ ID NO: 476105 - DNA, 30 bp, Artificial Sequence
  Synthetic oligonucleotide
ggcccggatggctgggctcttattatctcg

SEQ ID NO: 476106 - DNA, 30 bp, Artificial Sequence
  Synthetic oligonucleotide
gcccgtgtaagaaaggctagtagtctctcg

SEQ ID NO: 476107 - DNA, 30 bp, Artificial Sequence
  Synthetic oligonucleotide
tccccgagggcatcttaattggtagtctcg

SEQ ID NO: 476108 - DNA, 30 bp, Artificial Sequence
  Synthetic oligonucleotide
caggtcagtagtccagtcagagccgtctcg

SEQ ID NO: 476109 - DNA, 30 bp, Artificial Sequence
  Synthetic oligonucleotide
gtgccgcgccgtacgacaagcctattctcg

SEQ ID NO: 476110 - DNA, 30 bp, Artificial Sequence
  Synthetic oligonucleotide
cgcgcacaacggcacattgagcgcttctcg

SEQ ID NO: 476111 - DNA, 30 bp, Artificial Sequence
  Synthetic oligonucleotide
aagagctcgttgacgaactaacttttctcg

SEQ ID NO: 476112 - DNA, 30 bp, Artificial Sequence
  Synthetic oligonucleotide
gtaatgcgtccacggatggaccacaagtcg

SEQ ID NO: 476113 - DNA, 30 bp, Artificial Sequence
  Synthetic oligonucleotide
tcgctggacttcgtcctcaatatgaagtcg

SEQ ID NO: 476114 - DNA, 30 bp, Artificial Sequence
  Synthetic oligonucleotide
tcgtaagcagttgatactcgagcacagtcg

SEQ ID NO: 476115 - DNA, 30 bp, Artificial Sequence
  Synthetic oligonucleotide
cggcactcgccgcgcagagaggggcagtcg

SEQ ID NO: 476116 - DNA, 30 bp, Artificial Sequence
  Synthetic oligonucleotide
tacgtcacgggtctcattagggcggagtcg

SEQ ID NO: 476117 - DNA, 30 bp, Artificial Sequence
  Synthetic oligonucleotide
gtcccgttggcaaatcgttcatcggagtcg

SEQ ID NO: 476118 - DNA, 30 bp, Artificial Sequence
  Synthetic oligonucleotide
agctcggagtcgtgattatgatatgagtcg

SEQ ID NO: 476119 - DNA, 30 bp, Artificial Sequence
  Synthetic oligonucleotide
aattttttccgtagatacgcaactgagtcg

SEQ ID NO: 476120 - DNA, 30 bp, Artificial Sequence
  Synthetic oligonucleotide
gaaaaagtgttcacgtgacaggaatagtcg

SEQ ID NO: 476121 - DNA, 30 bp, Artificial Sequence
  Synthetic oligonucleotide
tgggacctctttaaacgatgcacctagtcg

SEQ ID NO: 476122 - DNA, 30 bp, Artificial Sequence
  Synthetic oligonucleotide
tctcgatagggagtataagagatttagtcg

SEQ ID NO: 476123 - DNA, 30 bp, Artificial Sequence
  Synthetic oligonucleotide
ccagatttcttctcatgggccgacccgtcg

SEQ ID NO: 476124 - DNA, 30 bp, Artificial Sequence
  Synthetic oligonucleotide
cgtctacacgcatggggtcaccgagcgtcg

SEQ ID NO: 476125 - DNA, 30 bp, Artificial Sequence
  Synthetic oligonucleotide
gtattcgctgagttctaatctagctcgtcg

SEQ ID NO: 476126 - DNA, 30 bp, Artificial Sequence
  Synthetic oligonucleotide
tttacgtgacataaaatcactgtgtcgtcg

SEQ ID NO: 476127 - DNA, 30 bp, Artificial Sequence
  Synthetic oligonucleotide
taagcactcgcgtgactcttgacttcgtcg

SEQ ID NO: 476128 - DNA, 30 bp, Artificial Sequence
  Synthetic oligonucleotide
gtgaagagaacccgcatattctcttcgtcg

SEQ ID NO: 476129 - DNA, 30 bp, Artificial Sequence
  Synthetic oligonucleotide
gttgcatactgaaggtcactcatttcgtcg

SEQ ID NO: 476130 - DNA, 30 bp, Artificial Sequence
  Synthetic oligonucleotide
tacaaatattagggtcttacggtaaggtcg

SEQ ID NO: 476131 - DNA, 30 bp, Artificial Sequence
  Synthetic oligonucleotide
ctggtctatcagtcgacgacaatcaggtcg

SEQ ID NO: 476132 - DNA, 30 bp, Artificial Sequence
  Synthetic oligonucleotide
tctttaatcctggcatcgggatgtaggtcg

SEQ ID NO: 476133 - DNA, 30 bp, Artificial Sequence
  Synthetic oligonucleotide
catgagacgccaggtccacggtcacggtcg

SEQ ID NO: 476134 - DNA, 30 bp, Artificial Sequence
  Synthetic oligonucleotide
ctattgtatgctgtcgccgcagtacggtcg

SEQ ID NO: 476135 - DNA, 30 bp, Artificial Sequence
  Synthetic oligonucleotide
tgttttccccctccactgggagaccggtcg

SEQ ID NO: 476136 - DNA, 30 bp, Artificial Sequence
  Synthetic oligonucleotide
ccttttgttctagaccatttctcccggtcg

SEQ ID NO: 476137 - DNA, 30 bp, Artificial Sequence
  Synthetic oligonucleotide
atatttgaacctcgaggaggagagcggtcg

SEQ ID NO: 476138 - DNA, 30 bp, Artificial Sequence
  Synthetic oligonucleotide
tgttataaagaattcagaacctggcggtcg

SEQ ID NO: 476139 - DNA, 30 bp, Artificial Sequence
  Synthetic oligonucleotide
ccttcatccaatggagccgcgactcggtcg

SEQ ID NO: 476140 - DNA, 30 bp, Artificial Sequence
  Synthetic oligonucleotide
ttatttaaggaggttcatcgaatagggtcg

SEQ ID NO: 476141 - DNA, 30 bp, Artificial Sequence
  Synthetic oligonucleotide
agatatcccagggacttacctgacgggtcg

SEQ ID NO: 476142 - DNA, 30 bp, Artificial Sequence
  Synthetic oligonucleotide
ccaaacgctcgttcggtgatggccgggtcg

SEQ ID NO: 476143 - DNA, 30 bp, Artificial Sequence
  Synthetic oligonucleotide
gccgactcccgcataatcctaggcgggtcg

SEQ ID NO: 476144 - DNA, 30 bp, Artificial Sequence
  Synthetic oligonucleotide
ttccgggaagcaagtgcaacacttgggtcg

SEQ ID NO: 476145 - DNA, 30 bp, Artificial Sequence
  Synthetic oligonucleotide
cccctgtccatgaaaccgtgttttgggtcg

SEQ ID NO: 476146 - DNA, 30 bp, Artificial Sequence
  Synthetic oligonucleotide
atctagatgcaggaatgtcgagcctggtcg

SEQ ID NO: 476147 - DNA, 30 bp, Artificial Sequence
  Synthetic oligonucleotide
aaagtattactctcacggcaggtttggtcg

SEQ ID NO: 476148 - DNA, 30 bp, Artificial Sequence
  Synthetic oligonucleotide
tggctgtttgtagtgctccagttttggtcg

SEQ ID NO: 476149 - DNA, 30 bp, Artificial Sequence
  Synthetic oligonucleotide
gttttgttttggtccaggctgaggatgtcg

SEQ ID NO: 476150 - DNA, 30 bp, Artificial Sequence
  Synthetic oligonucleotide
ggtataaatgactatcaggcccgtatgtcg

SEQ ID NO: 476151 - DNA, 30 bp, Artificial Sequence
  Synthetic oligonucleotide
cccccattaggtggaccgatacgactgtcg

SEQ ID NO: 476152 - DNA, 30 bp, Artificial Sequence
  Synthetic oligonucleotide
aggcgtaaacagtaaaggcctcacctgtcg

SEQ ID NO: 476153 - DNA, 30 bp, Artificial Sequence
  Synthetic oligonucleotide
cacaaaggcatgaattccacacttctgtcg

SEQ ID NO: 476154 - DNA, 30 bp, Artificial Sequence
  Synthetic oligonucleotide
gagtccccggcgccccttagggtcgtgtcg

SEQ ID NO: 476155 - DNA, 30 bp, Artificial Sequence
  Synthetic oligonucleotide
cgtaagcgggataaaggtcgtatggtgtcg

SEQ ID NO: 476156 - DNA, 30 bp, Artificial Sequence
  Synthetic oligonucleotide
agtacatctgagtccgcagcgtctgtgtcg

SEQ ID NO: 476157 - DNA, 30 bp, Artificial Sequence
  Synthetic oligonucleotide
aatattctctcaattattattagattgtcg

SEQ ID NO: 476158 - DNA, 30 bp, Artificial Sequence
  Synthetic oligonucleotide
aatataatgtatcgccatgatgtattgtcg

SEQ ID NO: 476159 - DNA, 30 bp, Artificial Sequence
  Synthetic oligonucleotide
cgtcgcagatctcgagaattttagttgtcg

SEQ ID NO: 476160 - DNA, 30 bp, Artificial Sequence
  Synthetic oligonucleotide
agggaatgcagccgtagcgtcccgttgtcg

SEQ ID NO: 476161 - DNA, 30 bp, Artificial Sequence
  Synthetic oligonucleotide
cacttggataattaactatatggaaattcg

SEQ ID NO: 476162 - DNA, 30 bp, Artificial Sequence
  Synthetic oligonucleotide
tcggtacagcgccggtacggtgtaaattcg

SEQ ID NO: 476163 - DNA, 30 bp, Artificial Sequence
  Synthetic oligonucleotide
taacagaacttggggctcgtggtcaattcg

SEQ ID NO: 476164 - DNA, 30 bp, Artificial Sequence
  Synthetic oligonucleotide
attagatgaaaatgaattggtatgaattcg

SEQ ID NO: 476165 - DNA, 30 bp, Artificial Sequence
  Synthetic oligonucleotide
aatggttgggcccgagacacggtgaattcg

SEQ ID NO: 476166 - DNA, 30 bp, Artificial Sequence
  Synthetic oligonucleotide
gccgccttcgaatgtcactcgttccattcg

SEQ ID NO: 476167 - DNA, 30 bp, Artificial Sequence
  Synthetic oligonucleotide
cgtatccaatggtaaggtccggagcattcg

SEQ ID NO: 476168 - DNA, 30 bp, Artificial Sequence
  Synthetic oligonucleotide
ccgcagtattataacgttgccacgcattcg

SEQ ID NO: 476169 - DNA, 30 bp, Artificial Sequence
  Synthetic oligonucleotide
tctcatgcgcagcccaccccggggcattcg

SEQ ID NO: 476170 - DNA, 30 bp, Artificial Sequence
  Synthetic oligonucleotide
cttggcgtcggttttacctccatggattcg

SEQ ID NO: 476171 - DNA, 30 bp, Artificial Sequence
  Synthetic oligonucleotide
tttccggtgcgtgaccgtggtgctgattcg

SEQ ID NO: 476172 - DNA, 30 bp, Artificial Sequence
  Synthetic oligonucleotide
cacccgggtagccgccacattcttgattcg

SEQ ID NO: 476173 - DNA, 30 bp, Artificial Sequence
  Synthetic oligonucleotide
acagatttctctgttgtactcagatattcg

SEQ ID NO: 476174 - DNA, 30 bp, Artificial Sequence
  Synthetic oligonucleotide
tttactgttaaatgtacactactatattcg

SEQ ID NO: 476175 - DNA, 30 bp, Artificial Sequence
  Synthetic oligonucleotide
gtctcttgtgactccgcggagtcctattcg

SEQ ID NO: 476176 - DNA, 30 bp, Artificial Sequence
  Synthetic oligonucleotide
gacgtagctcagtataggttcctctattcg

SEQ ID NO: 476177 - DNA, 30 bp, Artificial Sequence
  Synthetic oligonucleotide
agcccaagtgacgctaatcgtacgtattcg

SEQ ID NO: 476178 - DNA, 30 bp, Artificial Sequence
  Synthetic oligonucleotide
ggcaggacgataaaatgacgccattattcg

SEQ ID NO: 476179 - DNA, 30 bp, Artificial Sequence
  Synthetic oligonucleotide
ttaattttgatggattggttcatttattcg

SEQ ID NO: 476180 - DNA, 30 bp, Artificial Sequence
  Synthetic oligonucleotide
atggagattatcgcgtgtaccctgacttcg

SEQ ID NO: 476181 - DNA, 30 bp, Artificial Sequence
  Synthetic oligonucleotide
aattaaaacgccttaagaaatttgacttcg

SEQ ID NO: 476182 - DNA, 30 bp, Artificial Sequence
  Synthetic oligonucleotide
tcagaggcgccgaaggattgaataccttcg

SEQ ID NO: 476183 - DNA, 30 bp, Artificial Sequence
  Synthetic oligonucleotide
tgttatatgaatcggacgtgtaagccttcg

SEQ ID NO: 476184 - DNA, 27 bp, Artificial Sequence
  Synthetic oligonucleotide
aacgtcagtgccgatcaagtagcttcg

SEQ ID NO: 476185 - DNA, 30 bp, Artificial Sequence
  Synthetic oligonucleotide
tccatgaggattgatgcagtttcctcttcg

SEQ ID NO: 476186 - DNA, 30 bp, Artificial Sequence
  Synthetic oligonucleotide
aaacacgctagctgtgactcgaagtcttcg

SEQ ID NO: 476187 - DNA, 30 bp, Artificial Sequence
  Synthetic oligonucleotide
actaggatttacaaagaagcatagtcttcg

SEQ ID NO: 476188 - DNA, 30 bp, Artificial Sequence
  Synthetic oligonucleotide
tgtaatttcattgtcgggcgtaattcttcg

SEQ ID NO: 476189 - DNA, 30 bp, Artificial Sequence
  Synthetic oligonucleotide
ttatatcagcgtcaagctccagcttcttcg

SEQ ID NO: 476190 - DNA, 30 bp, Artificial Sequence
  Synthetic oligonucleotide
agcgtccggatctgtccgtctatttcttcg

SEQ ID NO: 476191 - DNA, 30 bp, Artificial Sequence
  Synthetic oligonucleotide
tatattcgcctgggcctctgagcaagttcg

SEQ ID NO: 476192 - DNA, 30 bp, Artificial Sequence
  Synthetic oligonucleotide
ctctcgcccttcatgtcgagacggagttcg

SEQ ID NO: 476193 - DNA, 30 bp, Artificial Sequence
  Synthetic oligonucleotide
gctgtaggtagcctagaggtctatagttcg

SEQ ID NO: 476194 - DNA, 30 bp, Artificial Sequence
  Synthetic oligonucleotide
gtgagcgctggccgcggtcccggtagttcg

SEQ ID NO: 476195 - DNA, 30 bp, Artificial Sequence
  Synthetic oligonucleotide
catgtacattcccatgtcttttttagttcg

SEQ ID NO: 476196 - DNA, 30 bp, Artificial Sequence
  Synthetic oligonucleotide
tgcacacagtacgtttaaaattaacgttcg

SEQ ID NO: 476197 - DNA, 30 bp, Artificial Sequence
  Synthetic oligonucleotide
ggatacgtgtctttggatccagcccgttcg

SEQ ID NO: 476198 - DNA, 30 bp, Artificial Sequence
  Synthetic oligonucleotide
ctgtcagacgctggttagtcgaagcgttcg

SEQ ID NO: 476199 - DNA, 30 bp, Artificial Sequence
  Synthetic oligonucleotide
tcaaagttctgaacaacgactgcgcgttcg

SEQ ID NO: 476200 - DNA, 30 bp, Artificial Sequence
  Synthetic oligonucleotide
gtttcggctggaaaccggtcctccggttcg

SEQ ID NO: 476201 - DNA, 30 bp, Artificial Sequence
  Synthetic oligonucleotide
gttgcgaagcttcgaatgggaacgggttcg

SEQ ID NO: 476202 - DNA, 30 bp, Artificial Sequence
  Synthetic oligonucleotide
gagaggttttatcaggacctcggtggttcg

SEQ ID NO: 476203 - DNA, 30 bp, Artificial Sequence
  Synthetic oligonucleotide
cgaattagtaaacttttgtttacgtgttcg

SEQ ID NO: 476204 - DNA, 30 bp, Artificial Sequence
  Synthetic oligonucleotide
aaggctgctcgagctctaaatctgtgttcg

SEQ ID NO: 476205 - DNA, 30 bp, Artificial Sequence
  Synthetic oligonucleotide
aaaagtgataccataggcgcaacttgttcg

SEQ ID NO: 476206 - DNA, 30 bp, Artificial Sequence
  Synthetic oligonucleotide
cggtggaagggcccctgttgtacttgttcg

SEQ ID NO: 476207 - DNA, 30 bp, Artificial Sequence
  Synthetic oligonucleotide
attttcggtcacaatatgggaacgatttcg

SEQ ID NO: 476208 - DNA, 30 bp, Artificial Sequence
  Synthetic oligonucleotide
ttatgcacacattcggaaggcgtcctttcg

SEQ ID NO: 476209 - DNA, 30 bp, Artificial Sequence
  Synthetic oligonucleotide
gtcccgagcaagttctgcgaaaggctttcg

SEQ ID NO: 476210 - DNA, 30 bp, Artificial Sequence
  Synthetic oligonucleotide
aaaatgataaaagtgtagaaatggctttcg

SEQ ID NO: 476211 - DNA, 30 bp, Artificial Sequence
  Synthetic oligonucleotide
cgcccacgccaggtaggacgttggctttcg

SEQ ID NO: 476212 - DNA, 30 bp, Artificial Sequence
  Synthetic oligonucleotide
tccggtccggggcgaaggttctgtctttcg

SEQ ID NO: 476213 - DNA, 30 bp, Artificial Sequence
  Synthetic oligonucleotide
ctcacactgagggatcaagagaaagtttcg

SEQ ID NO: 476214 - DNA, 30 bp, Artificial Sequence
  Synthetic oligonucleotide
tttggttctgatacgatggatcgattttcg

SEQ ID NO: 476215 - DNA, 30 bp, Artificial Sequence
  Synthetic oligonucleotide
gacccgtccgtttcccggtcgaccttttcg

SEQ ID NO: 476216 - DNA, 30 bp, Artificial Sequence
  Synthetic oligonucleotide
tgtgatttaatatgtcattgagggttttcg

SEQ ID NO: 476217 - DNA, 30 bp, Artificial Sequence
  Synthetic oligonucleotide
tataggtccagtaatttcctcgggttttcg

SEQ ID NO: 476218 - DNA, 30 bp, Artificial Sequence
  Synthetic oligonucleotide
agtgtgattgaaatggcgggccatttttcg

SEQ ID NO: 476219 - DNA, 30 bp, Artificial Sequence
  Synthetic oligonucleotide
gcgacgctagctgtagataaatatttttcg

SEQ ID NO: 476220 - DNA, 30 bp, Artificial Sequence
  Synthetic oligonucleotide
tgggggcgtatgcaccccaacgaaaaaagg

SEQ ID NO: 476221 - DNA, 30 bp, Artificial Sequence
  Synthetic oligonucleotide
attatggtaaggctcggtagggcaaaaagg

SEQ ID NO: 476222 - DNA, 30 bp, Artificial Sequence
  Synthetic oligonucleotide
gattttatgtaggtatctatggtaaaaagg

SEQ ID NO: 476223 - DNA, 30 bp, Artificial Sequence
  Synthetic oligonucleotide
cttttgatggttctattacccggcaaaagg

SEQ ID NO: 476224 - DNA, 30 bp, Artificial Sequence
  Synthetic oligonucleotide
ttagaaggctagccccgtgtgctcaaaagg

SEQ ID NO: 476225 - DNA, 30 bp, Artificial Sequence
  Synthetic oligonucleotide
atttgaacgtgaaagtgtttggagaaaagg

SEQ ID NO: 476226 - DNA, 30 bp, Artificial Sequence
  Synthetic oligonucleotide
gttcttatgtacgaaatggaccataaaagg

SEQ ID NO: 476227 - DNA, 30 bp, Artificial Sequence
  Synthetic oligonucleotide
atatactacgtgtagtgattcggccaaagg

SEQ ID NO: 476228 - DNA, 30 bp, Artificial Sequence
  Synthetic oligonucleotide
gcagggagcacctgatgaagtaatcaaagg

SEQ ID NO: 476229 - DNA, 30 bp, Artificial Sequence
  Synthetic oligonucleotide
gtaagtcgtatgggcaacttttatcaaagg

SEQ ID NO: 476230 - DNA, 30 bp, Artificial Sequence
  Synthetic oligonucleotide
taatacctgtctgtgtcaccttgggaaagg

SEQ ID NO: 476231 - DNA, 30 bp, Artificial Sequence
  Synthetic oligonucleotide
acgatggggtaagcgagcctaggtgaaagg

SEQ ID NO: 476232 - DNA, 30 bp, Artificial Sequence
  Synthetic oligonucleotide
tcgccctcgctggtcgggtctggtgaaagg

SEQ ID NO: 476233 - DNA, 30 bp, Artificial Sequence
  Synthetic oligonucleotide
tttagttcgagttacgagacacgataaagg

SEQ ID NO: 476234 - DNA, 30 bp, Artificial Sequence
  Synthetic oligonucleotide
ttcccgcgggttttagagcctgtataaagg

SEQ ID NO: 476235 - DNA, 30 bp, Artificial Sequence
  Synthetic oligonucleotide
aggacgtagcttcctgattatttctaaagg

SEQ ID NO: 476236 - DNA, 30 bp, Artificial Sequence
  Synthetic oligonucleotide
gtttctccgcatgggtcgtctttctaaagg

SEQ ID NO: 476237 - DNA, 30 bp, Artificial Sequence
  Synthetic oligonucleotide
ctcccgatcgacgacccttcgcagtaaagg

SEQ ID NO: 476238 - DNA, 30 bp, Artificial Sequence
  Synthetic oligonucleotide
ttatggctttgtctgttgttgacgtaaagg

SEQ ID NO: 476239 - DNA, 31 bp, Artificial Sequence
  Synthetic oligonucleotide
tatccagaatctggacgcgcgcaggtaaagg

SEQ ID NO: 476240 - DNA, 30 bp, Artificial Sequence
  Synthetic oligonucleotide
ctttgcatccgctgattaccattgtaaagg

SEQ ID NO: 476241 - DNA, 30 bp, Artificial Sequence
  Synthetic oligonucleotide
gatgatgttcgcagagcttcgcattaaagg

SEQ ID NO: 476242 - DNA, 30 bp, Artificial Sequence
  Synthetic oligonucleotide
acacagtcgcctacttcgtgttgttaaagg

SEQ ID NO: 476243 - DNA, 30 bp, Artificial Sequence
  Synthetic oligonucleotide
actgaacgaaaaagagcaaggtaaacaagg

SEQ ID NO: 476244 - DNA, 30 bp, Artificial Sequence
  Synthetic oligonucleotide
gaacaacggttcaaataaaaaataacaagg

SEQ ID NO: 476245 - DNA, 30 bp, Artificial Sequence
  Synthetic oligonucleotide
gtcaggcatactgctgatataggcacaagg

SEQ ID NO: 476246 - DNA, 30 bp, Artificial Sequence
  Synthetic oligonucleotide
agaccatccgtcccggttcttggtacaagg

SEQ ID NO: 476247 - DNA, 30 bp, Artificial Sequence
  Synthetic oligonucleotide
accagctacgagaagagcatgcggccaagg

SEQ ID NO: 476248 - DNA, 30 bp, Artificial Sequence
  Synthetic oligonucleotide
catgcaccgtgccacagctaagttccaagg

SEQ ID NO: 476249 - DNA, 30 bp, Artificial Sequence
  Synthetic oligonucleotide
tttgctgtgcgcattgttgtacaagcaagg

SEQ ID NO: 476250 - DNA, 30 bp, Artificial Sequence
  Synthetic oligonucleotide
ggaagtacgcagggcattagaggagcaagg

SEQ ID NO: 476251 - DNA, 30 bp, Artificial Sequence
  Synthetic oligonucleotide
gtccgagagcgaagtcccggctgagcaagg

SEQ ID NO: 476252 - DNA, 30 bp, Artificial Sequence
  Synthetic oligonucleotide
ttgtacgtccccctatgggatgacgcaagg

SEQ ID NO: 476253 - DNA, 31 bp, Artificial Sequence
  Synthetic oligonucleotide
aacctaaagcaatggtgccgttttcgcaagg

SEQ ID NO: 476254 - DNA, 30 bp, Artificial Sequence
  Synthetic oligonucleotide
gatgtgtcgtgttttgttaaagtggcaagg

SEQ ID NO: 476255 - DNA, 30 bp, Artificial Sequence
  Synthetic oligonucleotide
gcaagttgatcactttcgcacattgcaagg

SEQ ID NO: 476256 - DNA, 30 bp, Artificial Sequence
  Synthetic oligonucleotide
ctactaggtcctgtggatagggtatcaagg

SEQ ID NO: 476257 - DNA, 30 bp, Artificial Sequence
  Synthetic oligonucleotide
attatttctgccattataattttatcaagg

SEQ ID NO: 476258 - DNA, 30 bp, Artificial Sequence
  Synthetic oligonucleotide
tgttcttgacgcgtcgagcgagtgtcaagg

SEQ ID NO: 476259 - DNA, 30 bp, Artificial Sequence
  Synthetic oligonucleotide
tttcctaagagatactatgtgaaaagaagg

SEQ ID NO: 476260 - DNA, 30 bp, Artificial Sequence
  Synthetic oligonucleotide
cgtgcacggtctcacacgccgcacagaagg

SEQ ID NO: 476261 - DNA, 30 bp, Artificial Sequence
  Synthetic oligonucleotide
cgtgccttacgcgccaccctgtatagaagg

SEQ ID NO: 476262 - DNA, 30 bp, Artificial Sequence
  Synthetic oligonucleotide
atgttacaaccccttggagtttttagaagg

SEQ ID NO: 476263 - DNA, 30 bp, Artificial Sequence
  Synthetic oligonucleotide
aattaacgccgattttttccccaccgaagg

SEQ ID NO: 476264 - DNA, 31 bp, Artificial Sequence
  Synthetic oligonucleotide
acgcattgcgcggtatactccgccccgaagg

SEQ ID NO: 476265 - DNA, 30 bp, Artificial Sequence
  Synthetic oligonucleotide
cagacctgagggccaacctaggctcgaagg

SEQ ID NO: 476266 - DNA, 30 bp, Artificial Sequence
  Synthetic oligonucleotide
gggcgtttaattgtcctggtctacggaagg

SEQ ID NO: 476267 - DNA, 30 bp, Artificial Sequence
  Synthetic oligonucleotide
agtaaggctcggcggtgataactgggaagg

SEQ ID NO: 476268 - DNA, 30 bp, Artificial Sequence
  Synthetic oligonucleotide
aaggctgtacgctgaacactcgtgggaagg

SEQ ID NO: 476269 - DNA, 30 bp, Artificial Sequence
  Synthetic oligonucleotide
atgctttgtcatacgagacaaactggaagg

SEQ ID NO: 476270 - DNA, 30 bp, Artificial Sequence
  Synthetic oligonucleotide
taggaaaacataggcgtttatcttggaagg

SEQ ID NO: 476271 - DNA, 30 bp, Artificial Sequence
  Synthetic oligonucleotide
caactgcccaagctattgcctgttggaagg

SEQ ID NO: 476272 - DNA, 30 bp, Artificial Sequence
  Synthetic oligonucleotide
gttttacgggcctcaacgattcaatgaagg

SEQ ID NO: 476273 - DNA, 30 bp, Artificial Sequence
  Synthetic oligonucleotide
cctttaccccggttcccccctatctgaagg

SEQ ID NO: 476274 - DNA, 30 bp, Artificial Sequence
  Synthetic oligonucleotide
acgtacaatcgcttcacaaagtcgtgaagg

SEQ ID NO: 476275 - DNA, 30 bp, Artificial Sequence
  Synthetic oligonucleotide
ccataactatgtgttcccagttcgtgaagg

SEQ ID NO: 476276 - DNA, 30 bp, Artificial Sequence
  Synthetic oligonucleotide
gcaattccctaggagtagagcaaaataagg

SEQ ID NO: 476277 - DNA, 30 bp, Artificial Sequence
  Synthetic oligonucleotide
caggacactaccggatgaggaacaataagg

SEQ ID NO: 476278 - DNA, 30 bp, Artificial Sequence
  Synthetic oligonucleotide
tgagttagctattgcactcgtgtaataagg

SEQ ID NO: 476279 - DNA, 30 bp, Artificial Sequence
  Synthetic oligonucleotide
ggtctgctattctcgctgtgcagtataagg

SEQ ID NO: 476280 - DNA, 30 bp, Artificial Sequence
  Synthetic oligonucleotide
tatactccaaggaccaaccaaggtataagg

SEQ ID NO: 476281 - DNA, 30 bp, Artificial Sequence
  Synthetic oligonucleotide
aagagggaggcagaccggccgtttataagg

SEQ ID NO: 476282 - DNA, 30 bp, Artificial Sequence
  Synthetic oligonucleotide
tctcttgcgttcccaatcagaaacctaagg

SEQ ID NO: 476283 - DNA, 30 bp, Artificial Sequence
  Synthetic oligonucleotide
tctcgttttgtcagccacaatgtcctaagg

SEQ ID NO: 476284 - DNA, 30 bp, Artificial Sequence
  Synthetic oligonucleotide
gattaatctttgatcctccaaacgctaagg

SEQ ID NO: 476285 - DNA, 30 bp, Artificial Sequence
  Synthetic oligonucleotide
gccgtacgggttttaatttaatcgctaagg

SEQ ID NO: 476286 - DNA, 30 bp, Artificial Sequence
  Synthetic oligonucleotide
attgacaaatagtggactatatggctaagg

SEQ ID NO: 476287 - DNA, 30 bp, Artificial Sequence
  Synthetic oligonucleotide
ctgcgccggatgtggttgtcgcatctaagg

SEQ ID NO: 476288 - DNA, 30 bp, Artificial Sequence
  Synthetic oligonucleotide
ataccactataggacgtgcttcatctaagg

SEQ ID NO: 476289 - DNA, 30 bp, Artificial Sequence
  Synthetic oligonucleotide
atgctccttggaggagggtaccctctaagg

SEQ ID NO: 476290 - DNA, 30 bp, Artificial Sequence
  Synthetic oligonucleotide
ttagtgtttcgggtaccgcgttgtctaagg

SEQ ID NO: 476291 - DNA, 30 bp, Artificial Sequence
  Synthetic oligonucleotide
accaaggccacgaaattgagttgagtaagg

SEQ ID NO: 476292 - DNA, 30 bp, Artificial Sequence
  Synthetic oligonucleotide
gacattaacagcgcttatgggtccgtaagg

SEQ ID NO: 476293 - DNA, 30 bp, Artificial Sequence
  Synthetic oligonucleotide
acccatcgggcgaagtcccccggggtaagg

SEQ ID NO: 476294 - DNA, 30 bp, Artificial Sequence
  Synthetic oligonucleotide
atttatagtggtatttcattgttggtaagg

SEQ ID NO: 476295 - DNA, 30 bp, Artificial Sequence
  Synthetic oligonucleotide
agaatttgacaagcagtgaatcatgtaagg

SEQ ID NO: 476296 - DNA, 30 bp, Artificial Sequence
  Synthetic oligonucleotide
agaaactttgtgcgttggaacttattaagg

SEQ ID NO: 476297 - DNA, 30 bp, Artificial Sequence
  Synthetic oligonucleotide
gaagggcaccgggtggtagccggcttaagg

SEQ ID NO: 476298 - DNA, 30 bp, Artificial Sequence
  Synthetic oligonucleotide
aaaaactaatagtgcccacgattcttaagg

SEQ ID NO: 476299 - DNA, 30 bp, Artificial Sequence
  Synthetic oligonucleotide
gtaggaccgccttaatgggaaccgttaagg

SEQ ID NO: 476300 - DNA, 30 bp, Artificial Sequence
  Synthetic oligonucleotide
aaccaacccctagggacgtcagcgttaagg

SEQ ID NO: 476301 - DNA, 30 bp, Artificial Sequence
  Synthetic oligonucleotide
gtcgttaacacgcaattgtcacggttaagg

SEQ ID NO: 476302 - DNA, 30 bp, Artificial Sequence
  Synthetic oligonucleotide
ttttagactttgttagctatgtggttaagg

SEQ ID NO: 476303 - DNA, 30 bp, Artificial Sequence
  Synthetic oligonucleotide
gcgattctgtgcttagtcttgctgttaagg

SEQ ID NO: 476304 - DNA, 30 bp, Artificial Sequence
  Synthetic oligonucleotide
aacttattagcggtccgaaaggtgttaagg

SEQ ID NO: 476305 - DNA, 30 bp, Artificial Sequence
  Synthetic oligonucleotide
atttcgcctggactgccgtacgctttaagg

SEQ ID NO: 476306 - DNA, 30 bp, Artificial Sequence
  Synthetic oligonucleotide
ggccctgtaatgcctggaatacttttaagg

SEQ ID NO: 476307 - DNA, 30 bp, Artificial Sequence
  Synthetic oligonucleotide
tcaatctgtcagtttgaccgccttttaagg

SEQ ID NO: 476308 - DNA, 30 bp, Artificial Sequence
  Synthetic oligonucleotide
aagttgcaccattgcttatttaaaaacagg

SEQ ID NO: 476309 - DNA, 30 bp, Artificial Sequence
  Synthetic oligonucleotide
acgggcaaattatgttgatgcgcaaacagg

SEQ ID NO: 476310 - DNA, 30 bp, Artificial Sequence
  Synthetic oligonucleotide
aaaaagaggtgttctatcgtgtgaaacagg

SEQ ID NO: 476311 - DNA, 30 bp, Artificial Sequence
  Synthetic oligonucleotide
gatactgcatctggctaactccgtaacagg

SEQ ID NO: 476312 - DNA, 30 bp, Artificial Sequence
  Synthetic oligonucleotide
atcgccaaactgcctgtcagcgttaacagg

SEQ ID NO: 476313 - DNA, 30 bp, Artificial Sequence
  Synthetic oligonucleotide
atataaggccttgcaatagggacgcacagg

SEQ ID NO: 476314 - DNA, 30 bp, Artificial Sequence
  Synthetic oligonucleotide
tcttgcatttgttgacacgctacgcacagg

SEQ ID NO: 476315 - DNA, 30 bp, Artificial Sequence
  Synthetic oligonucleotide
caccatgatcgttgtttgtgttcgcacagg

SEQ ID NO: 476316 - DNA, 30 bp, Artificial Sequence
  Synthetic oligonucleotide
gcgtgctacacaaagaatacacggcacagg

SEQ ID NO: 476317 - DNA, 30 bp, Artificial Sequence
  Synthetic oligonucleotide
aatggatcaatagcttgtgggatgcacagg

SEQ ID NO: 476318 - DNA, 30 bp, Artificial Sequence
  Synthetic oligonucleotide
atttcttgcagccattcacagactcacagg

SEQ ID NO: 476319 - DNA, 30 bp, Artificial Sequence
  Synthetic oligonucleotide
gagtcatgcgaaaccgcacgctctcacagg

SEQ ID NO: 476320 - DNA, 30 bp, Artificial Sequence
  Synthetic oligonucleotide
ctggccacaccttgtaccatgattcacagg

SEQ ID NO: 476321 - DNA, 30 bp, Artificial Sequence
  Synthetic oligonucleotide
gagctccataatgacgtaacgaacgacagg

SEQ ID NO: 476322 - DNA, 30 bp, Artificial Sequence
  Synthetic oligonucleotide
ggtccgtcagcaaaactgggacccgacagg

SEQ ID NO: 476323 - DNA, 30 bp, Artificial Sequence
  Synthetic oligonucleotide
agggccttcgctataggaacgtaggacagg

SEQ ID NO: 476324 - DNA, 30 bp, Artificial Sequence
  Synthetic oligonucleotide
gccgatagtggtggatgcttgggtgacagg

SEQ ID NO: 476325 - DNA, 30 bp, Artificial Sequence
  Synthetic oligonucleotide
atgtatgtaggtgatgcaggatcctacagg

SEQ ID NO: 476326 - DNA, 30 bp, Artificial Sequence
  Synthetic oligonucleotide
cataactaggttcttagattatgctacagg

SEQ ID NO: 476327 - DNA, 30 bp, Artificial Sequence
  Synthetic oligonucleotide
cgagatacgagttacttcgtcgtgtacagg

SEQ ID NO: 476328 - DNA, 31 bp, Artificial Sequence
  Synthetic oligonucleotide
tagtacgcacgaccgtttggcgaattacagg

SEQ ID NO: 476329 - DNA, 30 bp, Artificial Sequence
  Synthetic oligonucleotide
ataaatctacagcatattgtgctaaccagg

SEQ ID NO: 476330 - DNA, 30 bp, Artificial Sequence
  Synthetic oligonucleotide
agcggttttagtaccctagtggagaccagg

SEQ ID NO: 476331 - DNA, 30 bp, Artificial Sequence
  Synthetic oligonucleotide
gtgtcaacagatgcgtaaggctagaccagg

SEQ ID NO: 476332 - DNA, 30 bp, Artificial Sequence
  Synthetic oligonucleotide
catcagtcccactgtctgaggtggaccagg

SEQ ID NO: 476333 - DNA, 30 bp, Artificial Sequence
  Synthetic oligonucleotide
tggacggagttctggccggggatgaccagg

SEQ ID NO: 476334 - DNA, 30 bp, Artificial Sequence
  Synthetic oligonucleotide
attgtacaacgaatacgcagaactaccagg

SEQ ID NO: 476335 - DNA, 30 bp, Artificial Sequence
  Synthetic oligonucleotide
agggccggtgtgcagtgaatggttaccagg

SEQ ID NO: 476336 - DNA, 30 bp, Artificial Sequence
  Synthetic oligonucleotide
ttatatatatcgagcaggctgatacccagg

SEQ ID NO: 476337 - DNA, 30 bp, Artificial Sequence
  Synthetic oligonucleotide
tagtgacgggagacgcactaggaccccagg

SEQ ID NO: 476338 - DNA, 30 bp, Artificial Sequence
  Synthetic oligonucleotide
tactggacctccgcaccaccaccgcccagg

SEQ ID NO: 476339 - DNA, 30 bp, Artificial Sequence
  Synthetic oligonucleotide
tagactttaggcccaggatgtcatcccagg

SEQ ID NO: 476340 - DNA, 30 bp, Artificial Sequence
  Synthetic oligonucleotide
ggcacgaagataattcttgccgcagccagg

SEQ ID NO: 476341 - DNA, 30 bp, Artificial Sequence
  Synthetic oligonucleotide
gcgaccaaccgtgagagactcgacgccagg

SEQ ID NO: 476342 - DNA, 30 bp, Artificial Sequence
  Synthetic oligonucleotide
gcaccatggggccggtacgataccgccagg

SEQ ID NO: 476343 - DNA, 30 bp, Artificial Sequence
  Synthetic oligonucleotide
atcaaagaatctgtgagaagccccgccagg

SEQ ID NO: 476344 - DNA, 30 bp, Artificial Sequence
  Synthetic oligonucleotide
tgtcgggctggatagccgtgtccggccagg

SEQ ID NO: 476345 - DNA, 30 bp, Artificial Sequence
  Synthetic oligonucleotide
tcggatgcgacgccctatgtattatccagg

SEQ ID NO: 476346 - DNA, 30 bp, Artificial Sequence
  Synthetic oligonucleotide
tactcaaatgaatgcgtcaggttctccagg

SEQ ID NO: 476347 - DNA, 30 bp, Artificial Sequence
  Synthetic oligonucleotide
aaataaagttatggtccgctctcttccagg

SEQ ID NO: 476348 - DNA, 30 bp, Artificial Sequence
  Synthetic oligonucleotide
gaccagagcaatgttagggctatacgcagg

SEQ ID NO: 476349 - DNA, 30 bp, Artificial Sequence
  Synthetic oligonucleotide
gctgtcggatcactatttacttgccgcagg

SEQ ID NO: 476350 - DNA, 30 bp, Artificial Sequence
  Synthetic oligonucleotide
ggagttactgtttcagctaggtggcgcagg

SEQ ID NO: 476351 - DNA, 30 bp, Artificial Sequence
  Synthetic oligonucleotide
gtgtgcgctgaactaccttactctcgcagg

SEQ ID NO: 476352 - DNA, 30 bp, Artificial Sequence
  Synthetic oligonucleotide
tctgtctcctgggtatttgaggaaggcagg

SEQ ID NO: 476353 - DNA, 30 bp, Artificial Sequence
  Synthetic oligonucleotide
gttttgtggcagaggtttcgagtcggcagg

SEQ ID NO: 476354 - DNA, 30 bp, Artificial Sequence
  Synthetic oligonucleotide
ttcttgtggacgaatagcttcccgggcagg

SEQ ID NO: 476355 - DNA, 30 bp, Artificial Sequence
  Synthetic oligonucleotide
ccggcgcgagagtggcaggtgtcgggcagg

SEQ ID NO: 476356 - DNA, 30 bp, Artificial Sequence
  Synthetic oligonucleotide
tgagcatgacgccccccgcgtgggggcagg

SEQ ID NO: 476357 - DNA, 30 bp, Artificial Sequence
  Synthetic oligonucleotide
gggcccccgggtaccggggtactgggcagg

SEQ ID NO: 476358 - DNA, 30 bp, Artificial Sequence
  Synthetic oligonucleotide
tcatctcggctggattagtaaccatgcagg

SEQ ID NO: 476359 - DNA, 30 bp, Artificial Sequence
  Synthetic oligonucleotide
taacctgctcttcattgtctgtcatgcagg

SEQ ID NO: 476360 - DNA, 30 bp, Artificial Sequence
  Synthetic oligonucleotide
aagctttggactctattaagccactgcagg

SEQ ID NO: 476361 - DNA, 30 bp, Artificial Sequence
  Synthetic oligonucleotide
ccagaaaatggatacaccaacaggtgcagg

SEQ ID NO: 476362 - DNA, 30 bp, Artificial Sequence
  Synthetic oligonucleotide
ttttttgaaaggggattagtaagttgcagg

SEQ ID NO: 476363 - DNA, 30 bp, Artificial Sequence
  Synthetic oligonucleotide
atcacggtggaatccctcgcggtcatcagg

SEQ ID NO: 476364 - DNA, 30 bp, Artificial Sequence
  Synthetic oligonucleotide
tttttattccaatctttggcccagatcagg

SEQ ID NO: 476365 - DNA, 30 bp, Artificial Sequence
  Synthetic oligonucleotide
ttgtctttaggaaagctcacctcgatcagg

SEQ ID NO: 476366 - DNA, 30 bp, Artificial Sequence
  Synthetic oligonucleotide
tgtaagccatgcgtactggtctaactcagg

SEQ ID NO: 476367 - DNA, 30 bp, Artificial Sequence
  Synthetic oligonucleotide
agtgtttgggatctcggagcgttactcagg

SEQ ID NO: 476368 - DNA, 30 bp, Artificial Sequence
  Synthetic oligonucleotide
gccgtgctgaaacttcaacggcggctcagg

SEQ ID NO: 476369 - DNA, 30 bp, Artificial Sequence
  Synthetic oligonucleotide
gtgccgcatcacctcaaaatattgctcagg

SEQ ID NO: 476370 - DNA, 30 bp, Artificial Sequence
  Synthetic oligonucleotide
gatccattatatgtgcattaaattctcagg

SEQ ID NO: 476371 - DNA, 30 bp, Artificial Sequence
  Synthetic oligonucleotide
gatggggattcccttagaaagaaagtcagg

SEQ ID NO: 476372 - DNA, 30 bp, Artificial Sequence
  Synthetic oligonucleotide
aatatcatttagcgatcggtttaggtcagg

SEQ ID NO: 476373 - DNA, 30 bp, Artificial Sequence
  Synthetic oligonucleotide
cttagtagggataagcggttttcggtcagg

SEQ ID NO: 476374 - DNA, 30 bp, Artificial Sequence
  Synthetic oligonucleotide
cccctcagggccttcgacggacctgtcagg

SEQ ID NO: 476375 - DNA, 30 bp, Artificial Sequence
  Synthetic oligonucleotide
agctctccgtgtcgagcgccgattgtcagg

SEQ ID NO: 476376 - DNA, 30 bp, Artificial Sequence
  Synthetic oligonucleotide
gccctccgtcatctcgcgcccggattcagg

SEQ ID NO: 476377 - DNA, 30 bp, Artificial Sequence
  Synthetic oligonucleotide
tgatattgccctgaatctttcggattcagg

SEQ ID NO: 476378 - DNA, 30 bp, Artificial Sequence
  Synthetic oligonucleotide
aaaagatttacatcgtatactttattcagg

SEQ ID NO: 476379 - DNA, 30 bp, Artificial Sequence
  Synthetic oligonucleotide
tcattagagagccggtttgcgcgcttcagg

SEQ ID NO: 476380 - DNA, 30 bp, Artificial Sequence
  Synthetic oligonucleotide
ctactctacaataaacgatggctgttcagg

SEQ ID NO: 476381 - DNA, 30 bp, Artificial Sequence
  Synthetic oligonucleotide
tcccggccgtgatgctctgataatttcagg

SEQ ID NO: 476382 - DNA, 30 bp, Artificial Sequence
  Synthetic oligonucleotide
gagggctatattgacgtgtattatttcagg

SEQ ID NO: 476383 - DNA, 30 bp, Artificial Sequence
  Synthetic oligonucleotide
tgcctagattacccccttgtccctttcagg

SEQ ID NO: 476384 - DNA, 30 bp, Artificial Sequence
  Synthetic oligonucleotide
ggcgacagtcagacagcatgcaccaagagg

SEQ ID NO: 476385 - DNA, 30 bp, Artificial Sequence
  Synthetic oligonucleotide
actggttggccgcgccgtggcttcaagagg

SEQ ID NO: 476386 - DNA, 31 bp, Artificial Sequence
  Synthetic oligonucleotide
tagaccagtgctagtacttcgctagaagagg

SEQ ID NO: 476387 - DNA, 30 bp, Artificial Sequence
  Synthetic oligonucleotide
gtcctcaacctataactgcacgggaagagg

SEQ ID NO: 476388 - DNA, 30 bp, Artificial Sequence
  Synthetic oligonucleotide
tcgtaagcacctatcaatagcgggaagagg

SEQ ID NO: 476389 - DNA, 30 bp, Artificial Sequence
  Synthetic oligonucleotide
atctgcttacgtaggtggctgtctaagagg

SEQ ID NO: 476390 - DNA, 30 bp, Artificial Sequence
  Synthetic oligonucleotide
ctgttgcgagcacccagctaagttaagagg

SEQ ID NO: 476391 - DNA, 30 bp, Artificial Sequence
  Synthetic oligonucleotide
agcatccttcgtaacgcatgcgttaagagg

SEQ ID NO: 476392 - DNA, 30 bp, Artificial Sequence
  Synthetic oligonucleotide
gttagtaatccgagatacggattacagagg

SEQ ID NO: 476393 - DNA, 30 bp, Artificial Sequence
  Synthetic oligonucleotide
caggcttgcggttttgacccctggcagagg

SEQ ID NO: 476394 - DNA, 30 bp, Artificial Sequence
  Synthetic oligonucleotide
ggggaggccgtgtgtcgggcgtggcagagg

SEQ ID NO: 476395 - DNA, 30 bp, Artificial Sequence
  Synthetic oligonucleotide
tcctatgatgcggttgggtattatcagagg

SEQ ID NO: 476396 - DNA, 30 bp, Artificial Sequence
  Synthetic oligonucleotide
actgatggtatgtgcctcgatcacgagagg

SEQ ID NO: 476397 - DNA, 30 bp, Artificial Sequence
  Synthetic oligonucleotide
gtgtcttacgaccataatccgtaggagagg

SEQ ID NO: 476398 - DNA, 30 bp, Artificial Sequence
  Synthetic oligonucleotide
cggttgtcgtacttggccatcagtgagagg

SEQ ID NO: 476399 - DNA, 30 bp, Artificial Sequence
  Synthetic oligonucleotide
tgtttttatcttaatatcaactcatagagg

SEQ ID NO: 476400 - DNA, 30 bp, Artificial Sequence
  Synthetic oligonucleotide
acgaatgacgcaacgcttctatgctagagg

SEQ ID NO: 476401 - DNA, 30 bp, Artificial Sequence
  Synthetic oligonucleotide
gtccaatcgacaagattctttttgtagagg

SEQ ID NO: 476402 - DNA, 30 bp, Artificial Sequence
  Synthetic oligonucleotide
ggacgcccatgcgactcacatcgcacgagg

SEQ ID NO: 476403 - DNA, 30 bp, Artificial Sequence
  Synthetic oligonucleotide
cattaggacaggtggatttttcagacgagg

SEQ ID NO: 476404 - DNA, 30 bp, Artificial Sequence
  Synthetic oligonucleotide
ggtatctgataggttttttaagatacgagg

SEQ ID NO: 476405 - DNA, 30 bp, Artificial Sequence
  Synthetic oligonucleotide
gtagaaatattgcgggtacgtggtacgagg

SEQ ID NO: 476406 - DNA, 30 bp, Artificial Sequence
  Synthetic oligonucleotide
gaaagcccatggggccgggtgcttacgagg

SEQ ID NO: 476407 - DNA, 30 bp, Artificial Sequence
  Synthetic oligonucleotide
aatgattaagagccgtggtctgccccgagg

SEQ ID NO: 476408 - DNA, 30 bp, Artificial Sequence
  Synthetic oligonucleotide
tgcagatttcaactggtgccgtccccgagg

SEQ ID NO: 476409 - DNA, 30 bp, Artificial Sequence
  Synthetic oligonucleotide
agttttgcagattcgttaggcgtcccgagg

SEQ ID NO: 476410 - DNA, 30 bp, Artificial Sequence
  Synthetic oligonucleotide
atctcgggctcaatttgctactcgccgagg

SEQ ID NO: 476411 - DNA, 30 bp, Artificial Sequence
  Synthetic oligonucleotide
tgtggcttgtgtgcggcagtaaatccgagg

SEQ ID NO: 476412 - DNA, 30 bp, Artificial Sequence
  Synthetic oligonucleotide
gtttctggcaggcacggaggtagggcgagg

SEQ ID NO: 476413 - DNA, 30 bp, Artificial Sequence
  Synthetic oligonucleotide
cggcaggtgggccaggatatacgggcgagg

SEQ ID NO: 476414 - DNA, 30 bp, Artificial Sequence
  Synthetic oligonucleotide
tttgtccattgagttgcactgcaatcgagg

SEQ ID NO: 476415 - DNA, 30 bp, Artificial Sequence
  Synthetic oligonucleotide
aggcccggcacagtcgatggcgcatcgagg

SEQ ID NO: 476416 - DNA, 30 bp, Artificial Sequence
  Synthetic oligonucleotide
gccgtcgattgttgctggtatatatcgagg

SEQ ID NO: 476417 - DNA, 30 bp, Artificial Sequence
  Synthetic oligonucleotide
ccagttctatggactattcaactatcgagg

SEQ ID NO: 476418 - DNA, 30 bp, Artificial Sequence
  Synthetic oligonucleotide
gtaacgtgcctcggaatataacagtcgagg

SEQ ID NO: 476419 - DNA, 30 bp, Artificial Sequence
  Synthetic oligonucleotide
tattctcacgcgtctgatgcactgaggagg

SEQ ID NO: 476420 - DNA, 30 bp, Artificial Sequence
  Synthetic oligonucleotide
taccgcagacggatgggcggacgacggagg

SEQ ID NO: 476421 - DNA, 30 bp, Artificial Sequence
  Synthetic oligonucleotide
tatatgatggtacgttctcgcccccggagg

SEQ ID NO: 476422 - DNA, 30 bp, Artificial Sequence
  Synthetic oligonucleotide
actataacacttcaggtttaactccggagg

SEQ ID NO: 476423 - DNA, 30 bp, Artificial Sequence
  Synthetic oligonucleotide
gagaggacacgggcctcgaactgtcggagg

SEQ ID NO: 476424 - DNA, 30 bp, Artificial Sequence
  Synthetic oligonucleotide
cgcatggccccaggccaaccctgagggagg

SEQ ID NO: 476425 - DNA, 30 bp, Artificial Sequence
  Synthetic oligonucleotide
caagccatatatcgaattctcaaggggagg

SEQ ID NO: 476426 - DNA, 30 bp, Artificial Sequence
  Synthetic oligonucleotide
cctcgcggtatgccacggctacttgggagg

SEQ ID NO: 476427 - DNA, 30 bp, Artificial Sequence
  Synthetic oligonucleotide
atatactcaaccacgctcagcgttgggagg

SEQ ID NO: 476428 - DNA, 30 bp, Artificial Sequence
  Synthetic oligonucleotide
gaggtcgacgagccgaacggcgtctggagg

SEQ ID NO: 476429 - DNA, 30 bp, Artificial Sequence
  Synthetic oligonucleotide
gacataccggttctctacacggtctggagg

SEQ ID NO: 476430 - DNA, 30 bp, Artificial Sequence
  Synthetic oligonucleotide
gctctccaaaaagagtctgaagagtggagg

SEQ ID NO: 476431 - DNA, 30 bp, Artificial Sequence
  Synthetic oligonucleotide
atagtgttaaaaggaaccaaagattggagg

SEQ ID NO: 476432 - DNA, 30 bp, Artificial Sequence
  Synthetic oligonucleotide
gtattattaacgctttcggtagattggagg

SEQ ID NO: 476433 - DNA, 30 bp, Artificial Sequence
  Synthetic oligonucleotide
tcaaggctagtgcagttaaatccttggagg

SEQ ID NO: 476434 - DNA, 30 bp, Artificial Sequence
  Synthetic oligonucleotide
gagtgattttgtctcgataaagaaatgagg

SEQ ID NO: 476435 - DNA, 30 bp, Artificial Sequence
  Synthetic oligonucleotide
atcttcgtgctggagccttttaacatgagg

SEQ ID NO: 476436 - DNA, 30 bp, Artificial Sequence
  Synthetic oligonucleotide
catttagtgtaatatcacgtgtccatgagg

SEQ ID NO: 476437 - DNA, 30 bp, Artificial Sequence
  Synthetic oligonucleotide
gtcatggggcttggattcatggcgatgagg

SEQ ID NO: 476438 - DNA, 30 bp, Artificial Sequence
  Synthetic oligonucleotide
ataatgttaattgcacgaggtcctatgagg

SEQ ID NO: 476439 - DNA, 30 bp, Artificial Sequence
  Synthetic oligonucleotide
tgctgcattgtaaaagtgacttctatgagg

SEQ ID NO: 476440 - DNA, 30 bp, Artificial Sequence
  Synthetic oligonucleotide
cacctgagggagagtcacgggaccctgagg

SEQ ID NO: 476441 - DNA, 30 bp, Artificial Sequence
  Synthetic oligonucleotide
atcgaccggtgtaacttgcatgtcctgagg

SEQ ID NO: 476442 - DNA, 30 bp, Artificial Sequence
  Synthetic oligonucleotide
gttgcagtcgaaataagcgggtggctgagg

SEQ ID NO: 476443 - DNA, 30 bp, Artificial Sequence
  Synthetic oligonucleotide
cgcaagcccggcctagattgtctgctgagg

SEQ ID NO: 476444 - DNA, 30 bp, Artificial Sequence
  Synthetic oligonucleotide
tttcatctagtcactaaacccgttctgagg

SEQ ID NO: 476445 - DNA, 30 bp, Artificial Sequence
  Synthetic oligonucleotide
cacaggcgaccaagaccgaagtacgtgagg

SEQ ID NO: 476446 - DNA, 30 bp, Artificial Sequence
  Synthetic oligonucleotide
aggagtactaattatcttcaaatggtgagg

SEQ ID NO: 476447 - DNA, 30 bp, Artificial Sequence
  Synthetic oligonucleotide
ctactattccccacttctatggatgtgagg

SEQ ID NO: 476448 - DNA, 30 bp, Artificial Sequence
  Synthetic oligonucleotide
tctgactacgtcagtggtagcgctgtgagg

SEQ ID NO: 476449 - DNA, 30 bp, Artificial Sequence
  Synthetic oligonucleotide
ccgtggcgcaatatgacaataaaattgagg

SEQ ID NO: 476450 - DNA, 30 bp, Artificial Sequence
  Synthetic oligonucleotide
gtgtcaatgattgccagcgcccgattgagg

SEQ ID NO: 476451 - DNA, 30 bp, Artificial Sequence
  Synthetic oligonucleotide
aagactcgcactctgagctgaggcttgagg

SEQ ID NO: 476452 - DNA, 30 bp, Artificial Sequence
  Synthetic oligonucleotide
aatcaagcatacagcccacaaatcttgagg

SEQ ID NO: 476453 - DNA, 30 bp, Artificial Sequence
  Synthetic oligonucleotide
tggtatgttttggactgtgcacagttgagg

SEQ ID NO: 476454 - DNA, 30 bp, Artificial Sequence
  Synthetic oligonucleotide
atcaggcggcgaatgattacgtcgttgagg

SEQ ID NO: 476455 - DNA, 30 bp, Artificial Sequence
  Synthetic oligonucleotide
aagattcggcaagcttgaagaactttgagg

SEQ ID NO: 476456 - DNA, 30 bp, Artificial Sequence
  Synthetic oligonucleotide
ctctgacacaaatgcgcccctgctttgagg

SEQ ID NO: 476457 - DNA, 30 bp, Artificial Sequence
  Synthetic oligonucleotide
accacggtacaataagctcggcttttgagg

SEQ ID NO: 476458 - DNA, 30 bp, Artificial Sequence
  Synthetic oligonucleotide
cactccttacttcataagtagtgaaatagg

SEQ ID NO: 476459 - DNA, 30 bp, Artificial Sequence
  Synthetic oligonucleotide
gtgttcgcgtaaacacagcgggccaatagg

SEQ ID NO: 476460 - DNA, 30 bp, Artificial Sequence
  Synthetic oligonucleotide
gtcgcgttgttttactaagaacgcaatagg

SEQ ID NO: 476461 - DNA, 30 bp, Artificial Sequence
  Synthetic oligonucleotide
gtccaaggaaagaatcgggcaaagaatagg

SEQ ID NO: 476462 - DNA, 30 bp, Artificial Sequence
  Synthetic oligonucleotide
tccatacaccggttatgtcacaagaatagg

SEQ ID NO: 476463 - DNA, 30 bp, Artificial Sequence
  Synthetic oligonucleotide
tgtatacgttctatagggggaccgaatagg

SEQ ID NO: 476464 - DNA, 30 bp, Artificial Sequence
  Synthetic oligonucleotide
ttatggttaagcttcgggtttgcgaatagg

SEQ ID NO: 476465 - DNA, 30 bp, Artificial Sequence
  Synthetic oligonucleotide
ggactttacagcagcccactcgggaatagg

SEQ ID NO: 476466 - DNA, 30 bp, Artificial Sequence
  Synthetic oligonucleotide
ctggaacggcgactgtaggactaacatagg

SEQ ID NO: 476467 - DNA, 30 bp, Artificial Sequence
  Synthetic oligonucleotide
attcatttatggccttaagggtcacatagg

SEQ ID NO: 476468 - DNA, 30 bp, Artificial Sequence
  Synthetic oligonucleotide
gttacgtgttagagcttatccctacatagg

SEQ ID NO: 476469 - DNA, 30 bp, Artificial Sequence
  Synthetic oligonucleotide
gggtaggcagtggttcatgtcacccatagg

SEQ ID NO: 476470 - DNA, 30 bp, Artificial Sequence
  Synthetic oligonucleotide
ttagttctgtgccgtcagcatggccatagg

SEQ ID NO: 476471 - DNA, 30 bp, Artificial Sequence
  Synthetic oligonucleotide
cgatatccccggcaccatgttggccatagg

SEQ ID NO: 476472 - DNA, 30 bp, Artificial Sequence
  Synthetic oligonucleotide
ttcccttcggtgggttagataatccatagg

SEQ ID NO: 476473 - DNA, 30 bp, Artificial Sequence
  Synthetic oligonucleotide
caggcccacacgcacagtcttgagcatagg

SEQ ID NO: 476474 - DNA, 30 bp, Artificial Sequence
  Synthetic oligonucleotide
gtagtccgagtctactggcagacgcatagg

SEQ ID NO: 476475 - DNA, 30 bp, Artificial Sequence
  Synthetic oligonucleotide
gtttgccttggcgaaagagcgcatcatagg

SEQ ID NO: 476476 - DNA, 30 bp, Artificial Sequence
  Synthetic oligonucleotide
aggacgccatgaggaggattattcgatagg

SEQ ID NO: 476477 - DNA, 30 bp, Artificial Sequence
  Synthetic oligonucleotide
gtgtaaacgttctctgtcacataggatagg

SEQ ID NO: 476478 - DNA, 30 bp, Artificial Sequence
  Synthetic oligonucleotide
gctgctattaatacgcgtaattaggatagg

SEQ ID NO: 476479 - DNA, 29 bp, Artificial Sequence
  Synthetic oligonucleotide
ctcttcgcacctttattacgactgatagg

SEQ ID NO: 476480 - DNA, 30 bp, Artificial Sequence
  Synthetic oligonucleotide
aaataatcaaatggagggacacctgatagg

SEQ ID NO: 476481 - DNA, 30 bp, Artificial Sequence
  Synthetic oligonucleotide
atcccatcagaaacttgggcaccatatagg

SEQ ID NO: 476482 - DNA, 30 bp, Artificial Sequence
  Synthetic oligonucleotide
gttcactttatggcgggttataggtatagg

SEQ ID NO: 476483 - DNA, 30 bp, Artificial Sequence
  Synthetic oligonucleotide
ttagtttatgcagactcaaaatggtatagg

SEQ ID NO: 476484 - DNA, 30 bp, Artificial Sequence
  Synthetic oligonucleotide
aactgggtaaatttgttcagcgtgtatagg

SEQ ID NO: 476485 - DNA, 30 bp, Artificial Sequence
  Synthetic oligonucleotide
gagcgtgacttctgatcatgggtgtatagg

SEQ ID NO: 476486 - DNA, 31 bp, Artificial Sequence
  Synthetic oligonucleotide
ctcgaagtagtaagcacgaagttcttatagg

SEQ ID NO: 476487 - DNA, 30 bp, Artificial Sequence
  Synthetic oligonucleotide
cttaaaccgccaaacagaatcgtaactagg

SEQ ID NO: 476488 - DNA, 30 bp, Artificial Sequence
  Synthetic oligonucleotide
cggctgaatattatgctctgttcgactagg

SEQ ID NO: 476489 - DNA, 30 bp, Artificial Sequence
  Synthetic oligonucleotide
gactcctatatctgggctacccggactagg

SEQ ID NO: 476490 - DNA, 30 bp, Artificial Sequence
  Synthetic oligonucleotide
tgtcccgttttcgtactgatattgactagg

SEQ ID NO: 476491 - DNA, 30 bp, Artificial Sequence
  Synthetic oligonucleotide
ttgttggatgctaaagttctacctactagg

SEQ ID NO: 476492 - DNA, 30 bp, Artificial Sequence
  Synthetic oligonucleotide
ttttggttcttgaaggttgcgcaacctagg

SEQ ID NO: 476493 - DNA, 30 bp, Artificial Sequence
  Synthetic oligonucleotide
tcctcttgcttctcggctggcctacctagg

SEQ ID NO: 476494 - DNA, 30 bp, Artificial Sequence
  Synthetic oligonucleotide
tatggtcccggggtatctggggctcctagg

SEQ ID NO: 476495 - DNA, 30 bp, Artificial Sequence
  Synthetic oligonucleotide
atatttgacggggaaatgtaaggagctagg

SEQ ID NO: 476496 - DNA, 30 bp, Artificial Sequence
  Synthetic oligonucleotide
ataaatacgtgtcggacgcggatagctagg

SEQ ID NO: 476497 - DNA, 30 bp, Artificial Sequence
  Synthetic oligonucleotide
ggtgcttgtcataagagtcattcggctagg

SEQ ID NO: 476498 - DNA, 30 bp, Artificial Sequence
  Synthetic oligonucleotide
gtcgtagggtttggtccgttacggtctagg

SEQ ID NO: 476499 - DNA, 30 bp, Artificial Sequence
  Synthetic oligonucleotide
cgtgtttgtggactcttgaaggtgtctagg

SEQ ID NO: 476500 - DNA, 30 bp, Artificial Sequence
  Synthetic oligonucleotide
ttgtaataattgttgttttagtattctagg

SEQ ID NO: 476501 - DNA, 30 bp, Artificial Sequence
  Synthetic oligonucleotide
actcctagaaccgttgaagagcgttctagg

SEQ ID NO: 476502 - DNA, 30 bp, Artificial Sequence
  Synthetic oligonucleotide
ttctgttatccaaattacccgacaagtagg

SEQ ID NO: 476503 - DNA, 30 bp, Artificial Sequence
  Synthetic oligonucleotide
gtctatgtgatttatggtctgacaagtagg

SEQ ID NO: 476504 - DNA, 30 bp, Artificial Sequence
  Synthetic oligonucleotide
ttttctaaatgtaggcggataccaagtagg

SEQ ID NO: 476505 - DNA, 30 bp, Artificial Sequence
  Synthetic oligonucleotide
gtcttggtcgtttacgacgtaagaagtagg

SEQ ID NO: 476506 - DNA, 30 bp, Artificial Sequence
  Synthetic oligonucleotide
gggctgggtctcacctctaacaagagtagg

SEQ ID NO: 476507 - DNA, 30 bp, Artificial Sequence
  Synthetic oligonucleotide
cattcagagtacaagttccccgcgagtagg

SEQ ID NO: 476508 - DNA, 30 bp, Artificial Sequence
  Synthetic oligonucleotide
aaatcaatgtctgtgttccacatgagtagg

SEQ ID NO: 476509 - DNA, 30 bp, Artificial Sequence
  Synthetic oligonucleotide
aagcgaaagatgttgctccttttgagtagg

SEQ ID NO: 476510 - DNA, 30 bp, Artificial Sequence
  Synthetic oligonucleotide
agcaggcgcatgggggcacaccatagtagg

SEQ ID NO: 476511 - DNA, 30 bp, Artificial Sequence
  Synthetic oligonucleotide
ggaactaagccgtgggggcggtctagtagg

SEQ ID NO: 476512 - DNA, 30 bp, Artificial Sequence
  Synthetic oligonucleotide
ttaacccgtattcctgccctaattagtagg

SEQ ID NO: 476513 - DNA, 30 bp, Artificial Sequence
  Synthetic oligonucleotide
cacttttaatcagtcaggcgtagccgtagg

SEQ ID NO: 476514 - DNA, 30 bp, Artificial Sequence
  Synthetic oligonucleotide
gaatactcaggactctgccgtcgccgtagg

SEQ ID NO: 476515 - DNA, 30 bp, Artificial Sequence
  Synthetic oligonucleotide
gaaagtgctataaaagctacatgccgtagg

SEQ ID NO: 476516 - DNA, 30 bp, Artificial Sequence
  Synthetic oligonucleotide
gatgcctcgcacccggtgggcgggcgtagg

SEQ ID NO: 476517 - DNA, 30 bp, Artificial Sequence
  Synthetic oligonucleotide
tagacccggttgttagaatcttctcgtagg

SEQ ID NO: 476518 - DNA, 30 bp, Artificial Sequence
  Synthetic oligonucleotide
ctggaaaacaaatacatgggttctcgtagg

SEQ ID NO: 476519 - DNA, 30 bp, Artificial Sequence
  Synthetic oligonucleotide
gagatgtactgtgctcgcgttggtcgtagg

SEQ ID NO: 476520 - DNA, 30 bp, Artificial Sequence
  Synthetic oligonucleotide
ccgagagaaaattcgaatgaagaaggtagg

SEQ ID NO: 476521 - DNA, 30 bp, Artificial Sequence
  Synthetic oligonucleotide
ccaccgtgcttttgctgagcaccaggtagg

SEQ ID NO: 476522 - DNA, 30 bp, Artificial Sequence
  Synthetic oligonucleotide
agtgcggaggcagccgttttcttaggtagg

SEQ ID NO: 476523 - DNA, 30 bp, Artificial Sequence
  Synthetic oligonucleotide
gtctcaaagagacgtgacactttaggtagg

SEQ ID NO: 476524 - DNA, 30 bp, Artificial Sequence
  Synthetic oligonucleotide
ttcggcaccgagttttattccgccggtagg

SEQ ID NO: 476525 - DNA, 30 bp, Artificial Sequence
  Synthetic oligonucleotide
cggtcattctgttctttcggcaagggtagg

SEQ ID NO: 476526 - DNA, 30 bp, Artificial Sequence
  Synthetic oligonucleotide
aagaaacgctttttaatatgtgagggtagg

SEQ ID NO: 476527 - DNA, 30 bp, Artificial Sequence
  Synthetic oligonucleotide
ttttgctgccaatcagtggcctagggtagg

SEQ ID NO: 476528 - DNA, 30 bp, Artificial Sequence
  Synthetic oligonucleotide
acactctaccctttgggaatgtcgggtagg

SEQ ID NO: 476529 - DNA, 30 bp, Artificial Sequence
  Synthetic oligonucleotide
acagcggcttatcggcctatagtgggtagg

SEQ ID NO: 476530 - DNA, 30 bp, Artificial Sequence
  Synthetic oligonucleotide
tagatggatacagtcaagtaggaatgtagg

SEQ ID NO: 476531 - DNA, 30 bp, Artificial Sequence
  Synthetic oligonucleotide
attagtcattggcaccatttataatgtagg

SEQ ID NO: 476532 - DNA, 30 bp, Artificial Sequence
  Synthetic oligonucleotide
aaggtatttggaaaagtaagtatatgtagg

SEQ ID NO: 476533 - DNA, 30 bp, Artificial Sequence
  Synthetic oligonucleotide
taagctgctcaattttttgtagactgtagg

SEQ ID NO: 476534 - DNA, 30 bp, Artificial Sequence
  Synthetic oligonucleotide
tagcagtatgagcgatgctcctactgtagg

SEQ ID NO: 476535 - DNA, 30 bp, Artificial Sequence
  Synthetic oligonucleotide
tacgagtattatgaattcccctggtgtagg

SEQ ID NO: 476536 - DNA, 30 bp, Artificial Sequence
  Synthetic oligonucleotide
atctatcccgcggccaggcgaaattgtagg

SEQ ID NO: 476537 - DNA, 30 bp, Artificial Sequence
  Synthetic oligonucleotide
tgcgactcatgttagtccctaccttgtagg

SEQ ID NO: 476538 - DNA, 30 bp, Artificial Sequence
  Synthetic oligonucleotide
ccccaacagttgtggacctcgccttgtagg

SEQ ID NO: 476539 - DNA, 30 bp, Artificial Sequence
  Synthetic oligonucleotide
tagagtcttggtatattatgcgaaattagg

SEQ ID NO: 476540 - DNA, 30 bp, Artificial Sequence
  Synthetic oligonucleotide
tcttattggcttgttgctacccacattagg

SEQ ID NO: 476541 - DNA, 30 bp, Artificial Sequence
  Synthetic oligonucleotide
ttacatatcttgaaatttacagccattagg

SEQ ID NO: 476542 - DNA, 30 bp, Artificial Sequence
  Synthetic oligonucleotide
tgcatatggtctctataatagtagattagg

SEQ ID NO: 476543 - DNA, 30 bp, Artificial Sequence
  Synthetic oligonucleotide
ttagcgctaggctagggtcctgcgattagg

SEQ ID NO: 476544 - DNA, 30 bp, Artificial Sequence
  Synthetic oligonucleotide
cagatgagatacaaaaaggacatacttagg

SEQ ID NO: 476545 - DNA, 30 bp, Artificial Sequence
  Synthetic oligonucleotide
tttgattcaatcttacgagatctacttagg

SEQ ID NO: 476546 - DNA, 30 bp, Artificial Sequence
  Synthetic oligonucleotide
gctggtgtgggacaccatgggttacttagg

SEQ ID NO: 476547 - DNA, 30 bp, Artificial Sequence
  Synthetic oligonucleotide
atcggacctaatagtctaggtgatcttagg

SEQ ID NO: 476548 - DNA, 30 bp, Artificial Sequence
  Synthetic oligonucleotide
gcgctagatgctacgcttatatatcttagg

SEQ ID NO: 476549 - DNA, 30 bp, Artificial Sequence
  Synthetic oligonucleotide
gataggaaattggtgggtttgtcagttagg

SEQ ID NO: 476550 - DNA, 30 bp, Artificial Sequence
  Synthetic oligonucleotide
acgttttaggagacttacggcagcgttagg

SEQ ID NO: 476551 - DNA, 30 bp, Artificial Sequence
  Synthetic oligonucleotide
catagaagtggaccgctataagcggttagg

SEQ ID NO: 476552 - DNA, 30 bp, Artificial Sequence
  Synthetic oligonucleotide
gctttagggttaccgtgaggtgcggttagg

SEQ ID NO: 476553 - DNA, 30 bp, Artificial Sequence
  Synthetic oligonucleotide
tgaatatacgcggcctcgttatcggttagg

SEQ ID NO: 476554 - DNA, 30 bp, Artificial Sequence
  Synthetic oligonucleotide
gggttacccgatcagctcggggactttagg

SEQ ID NO: 476555 - DNA, 30 bp, Artificial Sequence
  Synthetic oligonucleotide
atatccccagtaccatgttgttactttagg

SEQ ID NO: 476556 - DNA, 30 bp, Artificial Sequence
  Synthetic oligonucleotide
caactaagttgggaaattttcggctttagg

SEQ ID NO: 476557 - DNA, 30 bp, Artificial Sequence
  Synthetic oligonucleotide
tttagtttgccgataattcagaagtttagg

SEQ ID NO: 476558 - DNA, 30 bp, Artificial Sequence
  Synthetic oligonucleotide
agagcagaattcctttaacttatgtttagg

SEQ ID NO: 476559 - DNA, 30 bp, Artificial Sequence
  Synthetic oligonucleotide
taggtacctgcttaccagcgtaattttagg

SEQ ID NO: 476560 - DNA, 29 bp, Artificial Sequence
  Synthetic oligonucleotide
gactgccacgaaatctccttggttttagg

SEQ ID NO: 476561 - DNA, 30 bp, Artificial Sequence
  Synthetic oligonucleotide
tgtttgtgcttccatcgcagctgttttagg

SEQ ID NO: 476562 - DNA, 30 bp, Artificial Sequence
  Synthetic oligonucleotide
agttagtctgtaccaccttaaggaaaacgg

SEQ ID NO: 476563 - DNA, 30 bp, Artificial Sequence
  Synthetic oligonucleotide
tatcgccgcatcgggcctgatggaaaacgg

SEQ ID NO: 476564 - DNA, 30 bp, Artificial Sequence
  Synthetic oligonucleotide
acgtgattacagcgtttgcgatgcaaacgg

SEQ ID NO: 476565 - DNA, 30 bp, Artificial Sequence
  Synthetic oligonucleotide
aactgtaactttgatgaagtaccgaaacgg

SEQ ID NO: 476566 - DNA, 30 bp, Artificial Sequence
  Synthetic oligonucleotide
ttggaaagcgggagtctagtatggaaacgg

SEQ ID NO: 476567 - DNA, 30 bp, Artificial Sequence
  Synthetic oligonucleotide
gaaatagcgcctgcatacgtcgtgaaacgg

SEQ ID NO: 476568 - DNA, 30 bp, Artificial Sequence
  Synthetic oligonucleotide
cgaggcaaggccgacatggtaaataaacgg

SEQ ID NO: 476569 - DNA, 30 bp, Artificial Sequence
  Synthetic oligonucleotide
ttgccatcttgtctgtgacattataaacgg

SEQ ID NO: 476570 - DNA, 30 bp, Artificial Sequence
  Synthetic oligonucleotide
gtagtgtcataatgtctcctgcgtaaacgg

SEQ ID NO: 476571 - DNA, 30 bp, Artificial Sequence
  Synthetic oligonucleotide
atcgaacatgcgacagaacccgttaaacgg

SEQ ID NO: 476572 - DNA, 30 bp, Artificial Sequence
  Synthetic oligonucleotide
cctgggatcacgcgatctccctcccaacgg

SEQ ID NO: 476573 - DNA, 30 bp, Artificial Sequence
  Synthetic oligonucleotide
ctcctatcgatgagcatacatcgccaacgg

SEQ ID NO: 476574 - DNA, 30 bp, Artificial Sequence
  Synthetic oligonucleotide
gagtgtcggaactctacggagcggcaacgg

SEQ ID NO: 476575 - DNA, 30 bp, Artificial Sequence
  Synthetic oligonucleotide
atactgggatatgagccttcgcggcaacgg

SEQ ID NO: 476576 - DNA, 30 bp, Artificial Sequence
  Synthetic oligonucleotide
ttagtgtagaagcacgcgaggaatcaacgg

SEQ ID NO: 476577 - DNA, 28 bp, Artificial Sequence
  Synthetic oligonucleotide
aaaatatggatcgcgggtaagtcaacgg

SEQ ID NO: 476578 - DNA, 30 bp, Artificial Sequence
  Synthetic oligonucleotide
atatagtaactactatcatctagtcaacgg

SEQ ID NO: 476579 - DNA, 30 bp, Artificial Sequence
  Synthetic oligonucleotide
gtgtatttgtggttatgttgtcgtcaacgg

SEQ ID NO: 476580 - DNA, 30 bp, Artificial Sequence
  Synthetic oligonucleotide
tgtgatatgacgtcggatgcgggtcaacgg

SEQ ID NO: 476581 - DNA, 30 bp, Artificial Sequence
  Synthetic oligonucleotide
tcctgtacactctccgggcgctttcaacgg

SEQ ID NO: 476582 - DNA, 30 bp, Artificial Sequence
  Synthetic oligonucleotide
gggcttctctatgccgggataaccgaacgg

SEQ ID NO: 476583 - DNA, 30 bp, Artificial Sequence
  Synthetic oligonucleotide
ggtcgtgcacagattctttgggcggaacgg

SEQ ID NO: 476584 - DNA, 30 bp, Artificial Sequence
  Synthetic oligonucleotide
taaagggacgggacatgatgtatggaacgg

SEQ ID NO: 476585 - DNA, 30 bp, Artificial Sequence
  Synthetic oligonucleotide
tgcttttaataccacggatgactggaacgg

SEQ ID NO: 476586 - DNA, 30 bp, Artificial Sequence
  Synthetic oligonucleotide
gcaagtgtataaatgcggacgctggaacgg

SEQ ID NO: 476587 - DNA, 30 bp, Artificial Sequence
  Synthetic oligonucleotide
gctcgtacgaatgtacgaggttgataacgg

SEQ ID NO: 476588 - DNA, 30 bp, Artificial Sequence
  Synthetic oligonucleotide
caacagctaccctgacccgagttctaacgg

SEQ ID NO: 476589 - DNA, 30 bp, Artificial Sequence
  Synthetic oligonucleotide
taggttctcaatttatgtctatggtaacgg

SEQ ID NO: 476590 - DNA, 30 bp, Artificial Sequence
  Synthetic oligonucleotide
gccgttgaatccgcacgatcggcttaacgg

SEQ ID NO: 476591 - DNA, 30 bp, Artificial Sequence
  Synthetic oligonucleotide
taaatgcacatgccttatggatcaacacgg

SEQ ID NO: 476592 - DNA, 30 bp, Artificial Sequence
  Synthetic oligonucleotide
atctgcttgcgcaaaggagttctaacacgg

SEQ ID NO: 476593 - DNA, 30 bp, Artificial Sequence
  Synthetic oligonucleotide
cgtgaaacgaaagtgtagcaggagacacgg

SEQ ID NO: 476594 - DNA, 30 bp, Artificial Sequence
  Synthetic oligonucleotide
agctcttttatgtgtatcgtaccgacacgg

SEQ ID NO: 476595 - DNA, 30 bp, Artificial Sequence
  Synthetic oligonucleotide
ggcggggactaggacgtgcgtaatacacgg

SEQ ID NO: 476596 - DNA, 30 bp, Artificial Sequence
  Synthetic oligonucleotide
cccgcacggccaggtggacagacaccacgg

SEQ ID NO: 476597 - DNA, 30 bp, Artificial Sequence
  Synthetic oligonucleotide
aaacccacataatggcggcctgcaccacgg

SEQ ID NO: 476598 - DNA, 30 bp, Artificial Sequence
  Synthetic oligonucleotide
gggggacaatgcaccctgagttcaccacgg

SEQ ID NO: 476599 - DNA, 31 bp, Artificial Sequence
  Synthetic oligonucleotide
gaattatgagatgctgatgtatataccacgg

SEQ ID NO: 476600 - DNA, 30 bp, Artificial Sequence
  Synthetic oligonucleotide
gcgccccgcattgttgattagaccccacgg

SEQ ID NO: 476601 - DNA, 29 bp, Artificial Sequence
  Synthetic oligonucleotide
ggggtggaatacacgtggatgggccacgg

SEQ ID NO: 476602 - DNA, 30 bp, Artificial Sequence
  Synthetic oligonucleotide
gaaatgcggtactatgttttgttgccacgg

SEQ ID NO: 476603 - DNA, 30 bp, Artificial Sequence
  Synthetic oligonucleotide
ccgcgaaaaggctcttcgggggatccacgg

SEQ ID NO: 476604 - DNA, 30 bp, Artificial Sequence
  Synthetic oligonucleotide
cttcatatagcgttttggggcggtccacgg

SEQ ID NO: 476605 - DNA, 30 bp, Artificial Sequence
  Synthetic oligonucleotide
atgaacaatttttaccatctgtgtccacgg

SEQ ID NO: 476606 - DNA, 30 bp, Artificial Sequence
  Synthetic oligonucleotide
ccaggtacgggaacatgttgcaaagcacgg

SEQ ID NO: 476607 - DNA, 30 bp, Artificial Sequence
  Synthetic oligonucleotide
ccgtccaccggcggttgtacgacagcacgg

SEQ ID NO: 476608 - DNA, 30 bp, Artificial Sequence
  Synthetic oligonucleotide
cagccaggtaaataagatataaatgcacgg

SEQ ID NO: 476609 - DNA, 30 bp, Artificial Sequence
  Synthetic oligonucleotide
taatggactttatgtatggattatgcacgg

SEQ ID NO: 476610 - DNA, 30 bp, Artificial Sequence
  Synthetic oligonucleotide
agcgatgtcactcgcataattactgcacgg

SEQ ID NO: 476611 - DNA, 30 bp, Artificial Sequence
  Synthetic oligonucleotide
ggctgttcaatccgatgctatgctgcacgg

SEQ ID NO: 476612 - DNA, 30 bp, Artificial Sequence
  Synthetic oligonucleotide
cgctcgaatgtggatactggagttgcacgg

SEQ ID NO: 476613 - DNA, 30 bp, Artificial Sequence
  Synthetic oligonucleotide
gtgtaatattatcgcctggggtaatcacgg

SEQ ID NO: 476614 - DNA, 30 bp, Artificial Sequence
  Synthetic oligonucleotide
atatagctgaaaaggttcgggacatcacgg

SEQ ID NO: 476615 - DNA, 30 bp, Artificial Sequence
  Synthetic oligonucleotide
tgcagctaaacttagttgtatgactcacgg

SEQ ID NO: 476616 - DNA, 30 bp, Artificial Sequence
  Synthetic oligonucleotide
atacccgccacgcgtagctgctactcacgg

SEQ ID NO: 476617 - DNA, 30 bp, Artificial Sequence
  Synthetic oligonucleotide
gagagattagttctacggagaccctcacgg

SEQ ID NO: 476618 - DNA, 30 bp, Artificial Sequence
  Synthetic oligonucleotide
tactactcctgggagtcaaaacgctcacgg

SEQ ID NO: 476619 - DNA, 30 bp, Artificial Sequence
  Synthetic oligonucleotide
cgtttgacggtcgatagcacgtgctcacgg

SEQ ID NO: 476620 - DNA, 30 bp, Artificial Sequence
  Synthetic oligonucleotide
attccaggattacgccgtggagtctcacgg

SEQ ID NO: 476621 - DNA, 30 bp, Artificial Sequence
  Synthetic oligonucleotide
tacagctctagcaatgacggacagtcacgg

SEQ ID NO: 476622 - DNA, 30 bp, Artificial Sequence
  Synthetic oligonucleotide
caagtacagagggcaaatagttagtcacgg

SEQ ID NO: 476623 - DNA, 30 bp, Artificial Sequence
  Synthetic oligonucleotide
taccctagcgcgtcttaagggcggtcacgg

SEQ ID NO: 476624 - DNA, 30 bp, Artificial Sequence
  Synthetic oligonucleotide
ggtatacgattgttctgtcaagattcacgg

SEQ ID NO: 476625 - DNA, 30 bp, Artificial Sequence
  Synthetic oligonucleotide
ttaactgggagaaacttttgtcgttcacgg

SEQ ID NO: 476626 - DNA, 30 bp, Artificial Sequence
  Synthetic oligonucleotide
tggtgtcatcagcacttgggactttcacgg

SEQ ID NO: 476627 - DNA, 30 bp, Artificial Sequence
  Synthetic oligonucleotide
gtataagctttctccggcacaataagacgg

SEQ ID NO: 476628 - DNA, 30 bp, Artificial Sequence
  Synthetic oligonucleotide
aggtcagtatttggattaaattacagacgg

SEQ ID NO: 476629 - DNA, 30 bp, Artificial Sequence
  Synthetic oligonucleotide
agcaatgttataggagccagctagagacgg

SEQ ID NO: 476630 - DNA, 30 bp, Artificial Sequence
  Synthetic oligonucleotide
acgtggcgaagatccgctggctcgagacgg

SEQ ID NO: 476631 - DNA, 30 bp, Artificial Sequence
  Synthetic oligonucleotide
gggcacggccggctgtaaatcgtgagacgg

SEQ ID NO: 476632 - DNA, 30 bp, Artificial Sequence
  Synthetic oligonucleotide
tcagtactagccgcataatcgaatagacgg

SEQ ID NO: 476633 - DNA, 30 bp, Artificial Sequence
  Synthetic oligonucleotide
gacacgttttcaacggtctctagtagacgg

SEQ ID NO: 476634 - DNA, 30 bp, Artificial Sequence
  Synthetic oligonucleotide
ttctggctgacgagccctcgtgttagacgg

SEQ ID NO: 476635 - DNA, 30 bp, Artificial Sequence
  Synthetic oligonucleotide
accactgaagtgatccgggtataacgacgg

SEQ ID NO: 476636 - DNA, 30 bp, Artificial Sequence
  Synthetic oligonucleotide
cacggcgaccgattgttatgacaccgacgg

SEQ ID NO: 476637 - DNA, 30 bp, Artificial Sequence
  Synthetic oligonucleotide
gagggctgcggaatagcgggttggcgacgg

SEQ ID NO: 476638 - DNA, 30 bp, Artificial Sequence
  Synthetic oligonucleotide
catcgggcgtgttagcggccttcaggacgg

SEQ ID NO: 476639 - DNA, 30 bp, Artificial Sequence
  Synthetic oligonucleotide
ccaaaacactgcttgtacatgataggacgg

SEQ ID NO: 476640 - DNA, 30 bp, Artificial Sequence
  Synthetic oligonucleotide
gacacctcagacagacgcgtttcgggacgg

SEQ ID NO: 476641 - DNA, 30 bp, Artificial Sequence
  Synthetic oligonucleotide
gggggtatcggcatccgactaaggggacgg

SEQ ID NO: 476642 - DNA, 30 bp, Artificial Sequence
  Synthetic oligonucleotide
taactatagcacaagacgtttcttggacgg

SEQ ID NO: 476643 - DNA, 30 bp, Artificial Sequence
  Synthetic oligonucleotide
aatcaattatagcaaactgtgttctgacgg

SEQ ID NO: 476644 - DNA, 30 bp, Artificial Sequence
  Synthetic oligonucleotide
ctggggcaaaacgtggtgggttagtgacgg

SEQ ID NO: 476645 - DNA, 30 bp, Artificial Sequence
  Synthetic oligonucleotide
ccgtaccgcacctatgcatatctgtgacgg

SEQ ID NO: 476646 - DNA, 30 bp, Artificial Sequence
  Synthetic oligonucleotide
aaattcgaaacactttatttattgtgacgg

SEQ ID NO: 476647 - DNA, 31 bp, Artificial Sequence
  Synthetic oligonucleotide
ccgggtcacaggggcactcgacacttgacgg

SEQ ID NO: 476648 - DNA, 30 bp, Artificial Sequence
  Synthetic oligonucleotide
aagcaaaagtattccggcgctttaatacgg

SEQ ID NO: 476649 - DNA, 30 bp, Artificial Sequence
  Synthetic oligonucleotide
agtcgctggtttaatatgggggccatacgg

SEQ ID NO: 476650 - DNA, 30 bp, Artificial Sequence
  Synthetic oligonucleotide
gctcaccggatatatgggagtgccatacgg

SEQ ID NO: 476651 - DNA, 30 bp, Artificial Sequence
  Synthetic oligonucleotide
gtcggtgtcgctagcactgtgcagatacgg

SEQ ID NO: 476652 - DNA, 30 bp, Artificial Sequence
  Synthetic oligonucleotide
tgttattcttgggcgcgctactcactacgg

SEQ ID NO: 476653 - DNA, 30 bp, Artificial Sequence
  Synthetic oligonucleotide
agggggccctttaagggcaagggactacgg

SEQ ID NO: 476654 - DNA, 30 bp, Artificial Sequence
  Synthetic oligonucleotide
ttctgggatccctggatttctaacctacgg

SEQ ID NO: 476655 - DNA, 30 bp, Artificial Sequence
  Synthetic oligonucleotide
gttgacgtttagggcgtatcgtgcctacgg

SEQ ID NO: 476656 - DNA, 30 bp, Artificial Sequence
  Synthetic oligonucleotide
tcgcccgactatctacgatgcgggctacgg

SEQ ID NO: 476657 - DNA, 30 bp, Artificial Sequence
  Synthetic oligonucleotide
cactgaaccgtcgaagacagccttctacgg

SEQ ID NO: 476658 - DNA, 30 bp, Artificial Sequence
  Synthetic oligonucleotide
gtctggaatatagagttttctgtagtacgg

SEQ ID NO: 476659 - DNA, 30 bp, Artificial Sequence
  Synthetic oligonucleotide
attttttggaacgaggacgacttagtacgg

SEQ ID NO: 476660 - DNA, 30 bp, Artificial Sequence
  Synthetic oligonucleotide
atccgttacaaagaccgtggtatcgtacgg

SEQ ID NO: 476661 - DNA, 30 bp, Artificial Sequence
  Synthetic oligonucleotide
taatgatcgtccacgcacattagggtacgg

SEQ ID NO: 476662 - DNA, 30 bp, Artificial Sequence
  Synthetic oligonucleotide
tatagttttagtcatttagactgggtacgg

SEQ ID NO: 476663 - DNA, 30 bp, Artificial Sequence
  Synthetic oligonucleotide
ggcatggttggtacgaagacctgggtacgg

SEQ ID NO: 476664 - DNA, 30 bp, Artificial Sequence
  Synthetic oligonucleotide
gccgcagtattcgtgaacaggtatgtacgg

SEQ ID NO: 476665 - DNA, 30 bp, Artificial Sequence
  Synthetic oligonucleotide
cacggtttacggataaaccattctgtacgg

SEQ ID NO: 476666 - DNA, 30 bp, Artificial Sequence
  Synthetic oligonucleotide
ggttaaagtttgactatgatcattgtacgg

SEQ ID NO: 476667 - DNA, 30 bp, Artificial Sequence
  Synthetic oligonucleotide
gcgattaaaaccttgatgcacgcattacgg

SEQ ID NO: 476668 - DNA, 30 bp, Artificial Sequence
  Synthetic oligonucleotide
gatttagctggtccagtcattgcattacgg

SEQ ID NO: 476669 - DNA, 30 bp, Artificial Sequence
  Synthetic oligonucleotide
aactgattagttcgagttctaatgttacgg

SEQ ID NO: 476670 - DNA, 30 bp, Artificial Sequence
  Synthetic oligonucleotide
gagaaccccgccgatgcgtccgcgaaccgg

SEQ ID NO: 476671 - DNA, 30 bp, Artificial Sequence
  Synthetic oligonucleotide
gccccctgacccgactggtatatgaaccgg

SEQ ID NO: 476672 - DNA, 30 bp, Artificial Sequence
  Synthetic oligonucleotide
tctcgtacatacatgaacgagactaaccgg

SEQ ID NO: 476673 - DNA, 30 bp, Artificial Sequence
  Synthetic oligonucleotide
ggggtggacatgtgtagaaccggacaccgg

SEQ ID NO: 476674 - DNA, 30 bp, Artificial Sequence
  Synthetic oligonucleotide
aattagaaccgtggactcggcggacaccgg

SEQ ID NO: 476675 - DNA, 30 bp, Artificial Sequence
  Synthetic oligonucleotide
ctctcttcggccaattagcgacaccaccgg

SEQ ID NO: 476676 - DNA, 30 bp, Artificial Sequence
  Synthetic oligonucleotide
gtggatcagtcgttcgacaatgtccaccgg

SEQ ID NO: 476677 - DNA, 30 bp, Artificial Sequence
  Synthetic oligonucleotide
gatgcgctagatgtgggaactccgcaccgg

SEQ ID NO: 476678 - DNA, 30 bp, Artificial Sequence
  Synthetic oligonucleotide
cctctgtacaattgagtctatcaagaccgg

SEQ ID NO: 476679 - DNA, 30 bp, Artificial Sequence
  Synthetic oligonucleotide
ttgatcttgaatagagcaaatgaagaccgg

SEQ ID NO: 476680 - DNA, 30 bp, Artificial Sequence
  Synthetic oligonucleotide
ttcgagggccggagggccgatctagaccgg

SEQ ID NO: 476681 - DNA, 30 bp, Artificial Sequence
  Synthetic oligonucleotide
tgactttatctcatgccacagtaggaccgg

SEQ ID NO: 476682 - DNA, 30 bp, Artificial Sequence
  Synthetic oligonucleotide
gcagggctttcgtacttgaatgcggaccgg

SEQ ID NO: 476683 - DNA, 30 bp, Artificial Sequence
  Synthetic oligonucleotide
aagatacttttgtcctacctccgggaccgg

SEQ ID NO: 476684 - DNA, 30 bp, Artificial Sequence
  Synthetic oligonucleotide
gcgtagcattagtctactttcaaataccgg

SEQ ID NO: 476685 - DNA, 30 bp, Artificial Sequence
  Synthetic oligonucleotide
atacacgctgcatgctggacattataccgg

SEQ ID NO: 476686 - DNA, 30 bp, Artificial Sequence
  Synthetic oligonucleotide
gtttaatagtacatgaaaagattctaccgg

SEQ ID NO: 476687 - DNA, 30 bp, Artificial Sequence
  Synthetic oligonucleotide
cttatggaacctgatgaagaagcgtaccgg

SEQ ID NO: 476688 - DNA, 29 bp, Artificial Sequence
  Synthetic oligonucleotide
tgacatctcttatcatgctggcgacccgg

SEQ ID NO: 476689 - DNA, 30 bp, Artificial Sequence
  Synthetic oligonucleotide
aatacggagcccctgattcggtggacccgg

SEQ ID NO: 476690 - DNA, 30 bp, Artificial Sequence
  Synthetic oligonucleotide
ccaggctctaacacagaggcccctccccgg

SEQ ID NO: 476691 - DNA, 30 bp, Artificial Sequence
  Synthetic oligonucleotide
tgaaaatggaagctaaattctggtccccgg

SEQ ID NO: 476692 - DNA, 30 bp, Artificial Sequence
  Synthetic oligonucleotide
atttaccacagcagacccccgattccccgg

SEQ ID NO: 476693 - DNA, 30 bp, Artificial Sequence
  Synthetic oligonucleotide
ttgcggacggtatctgggactagagcccgg

SEQ ID NO: 476694 - DNA, 29 bp, Artificial Sequence
  Synthetic oligonucleotide
aagggggtaccttcttagagttggcccgg

SEQ ID NO: 476695 - DNA, 30 bp, Artificial Sequence
  Synthetic oligonucleotide
atccagagttaaagctctggtattgcccgg

SEQ ID NO: 476696 - DNA, 30 bp, Artificial Sequence
  Synthetic oligonucleotide
atgtgtgcctgcaagtaaaaaaaatcccgg

SEQ ID NO: 476697 - DNA, 30 bp, Artificial Sequence
  Synthetic oligonucleotide
gggctttttgttaagtttgggcaatcccgg

SEQ ID NO: 476698 - DNA, 30 bp, Artificial Sequence
  Synthetic oligonucleotide
gtgtgtggctcttccacccctgtatcccgg

SEQ ID NO: 476699 - DNA, 30 bp, Artificial Sequence
  Synthetic oligonucleotide
gcggtatacgcggcccctgggcactcccgg

SEQ ID NO: 476700 - DNA, 30 bp, Artificial Sequence
  Synthetic oligonucleotide
ataaagaggcgaggattaattagctcccgg

SEQ ID NO: 476701 - DNA, 30 bp, Artificial Sequence
  Synthetic oligonucleotide
tcatataggacataagccattcagtcccgg

SEQ ID NO: 476702 - DNA, 30 bp, Artificial Sequence
  Synthetic oligonucleotide
tttcaccgctactctggacgagagtcccgg

SEQ ID NO: 476703 - DNA, 30 bp, Artificial Sequence
  Synthetic oligonucleotide
catatcctttctccaggcctctagtcccgg

SEQ ID NO: 476704 - DNA, 30 bp, Artificial Sequence
  Synthetic oligonucleotide
taatatctggtgcttgtcgtcgtgtcccgg

SEQ ID NO: 476705 - DNA, 30 bp, Artificial Sequence
  Synthetic oligonucleotide
gccgtatggactggggttcagacaagccgg

SEQ ID NO: 476706 - DNA, 30 bp, Artificial Sequence
  Synthetic oligonucleotide
ctggacgagcacttctcccctggcagccgg

SEQ ID NO: 476707 - DNA, 30 bp, Artificial Sequence
  Synthetic oligonucleotide
ctgttgttacacttccaattctctagccgg

SEQ ID NO: 476708 - DNA, 30 bp, Artificial Sequence
  Synthetic oligonucleotide
ggtgtagtgaccttaactctacgtagccgg

SEQ ID NO: 476709 - DNA, 30 bp, Artificial Sequence
  Synthetic oligonucleotide
tccaaggcttacactgatgcctttagccgg

SEQ ID NO: 476710 - DNA, 30 bp, Artificial Sequence
  Synthetic oligonucleotide
gagataatcaaatccgggtgtgggcgccgg

SEQ ID NO: 476711 - DNA, 30 bp, Artificial Sequence
  Synthetic oligonucleotide
ttccgcgcacgacacaatctggacggccgg

SEQ ID NO: 476712 - DNA, 30 bp, Artificial Sequence
  Synthetic oligonucleotide
aggttttgcggtttattcgggcgcggccgg

SEQ ID NO: 476713 - DNA, 30 bp, Artificial Sequence
  Synthetic oligonucleotide
atgtataccacccggtcgatcatcggccgg

SEQ ID NO: 476714 - DNA, 30 bp, Artificial Sequence
  Synthetic oligonucleotide
aacgatggacgatcaagggcccggggccgg

SEQ ID NO: 476715 - DNA, 30 bp, Artificial Sequence
  Synthetic oligonucleotide
ttttcaacagtatttaatatatctggccgg

SEQ ID NO: 476716 - DNA, 30 bp, Artificial Sequence
  Synthetic oligonucleotide
aaaatggcccgtaactccttgcgtggccgg

SEQ ID NO: 476717 - DNA, 30 bp, Artificial Sequence
  Synthetic oligonucleotide
accattctggggcccctaggaagatgccgg

SEQ ID NO: 476718 - DNA, 30 bp, Artificial Sequence
  Synthetic oligonucleotide
gtccacacgccgtcgtcagcaagctgccgg

SEQ ID NO: 476719 - DNA, 30 bp, Artificial Sequence
  Synthetic oligonucleotide
aattgcgcgctccataccagattgtgccgg

SEQ ID NO: 476720 - DNA, 30 bp, Artificial Sequence
  Synthetic oligonucleotide
ggtaggtatatataatggtgtaattgccgg

SEQ ID NO: 476721 - DNA, 30 bp, Artificial Sequence
  Synthetic oligonucleotide
gatgggacacgctgattggatccttgccgg

SEQ ID NO: 476722 - DNA, 30 bp, Artificial Sequence
  Synthetic oligonucleotide
ttaaaatagttggatttagagggttgccgg

SEQ ID NO: 476723 - DNA, 30 bp, Artificial Sequence
  Synthetic oligonucleotide
gcgcacgttcgaagccagtacgtttgccgg

SEQ ID NO: 476724 - DNA, 30 bp, Artificial Sequence
  Synthetic oligonucleotide
ttatggtagtttcaatcgtgttcaatccgg

SEQ ID NO: 476725 - DNA, 30 bp, Artificial Sequence
  Synthetic oligonucleotide
aattttgatttcgttggaagtggaatccgg

SEQ ID NO: 476726 - DNA, 30 bp, Artificial Sequence
  Synthetic oligonucleotide
aactgatccatactccaattgcgcatccgg

SEQ ID NO: 476727 - DNA, 31 bp, Artificial Sequence
  Synthetic oligonucleotide
ttactgatgggcaaatatatttactatccgg

SEQ ID NO: 476728 - DNA, 30 bp, Artificial Sequence
  Synthetic oligonucleotide
tgttaatttacatgcccagcccttatccgg

SEQ ID NO: 476729 - DNA, 30 bp, Artificial Sequence
  Synthetic oligonucleotide
ttgcggatcgcgcagaaaggttttatccgg

SEQ ID NO: 476730 - DNA, 30 bp, Artificial Sequence
  Synthetic oligonucleotide
catgcgatagtgggacgaaaggcactccgg

SEQ ID NO: 476731 - DNA, 30 bp, Artificial Sequence
  Synthetic oligonucleotide
ggagtcgaagccagccgggttagactccgg

SEQ ID NO: 476732 - DNA, 30 bp, Artificial Sequence
  Synthetic oligonucleotide
acctgatcttctactatatcgggactccgg

SEQ ID NO: 476733 - DNA, 30 bp, Artificial Sequence
  Synthetic oligonucleotide
accctcaagattaatgggtaagtcctccgg

SEQ ID NO: 476734 - DNA, 30 bp, Artificial Sequence
  Synthetic oligonucleotide
tcgattgataccgccgcacctttcctccgg

SEQ ID NO: 476735 - DNA, 30 bp, Artificial Sequence
  Synthetic oligonucleotide
cggagtgccgatgtcagaagtaggctccgg

SEQ ID NO: 476736 - DNA, 30 bp, Artificial Sequence
  Synthetic oligonucleotide
gaaatagagtcgttcctctgtactctccgg

SEQ ID NO: 476737 - DNA, 30 bp, Artificial Sequence
  Synthetic oligonucleotide
ctaacctgagcaggaaaaattcctctccgg

SEQ ID NO: 476738 - DNA, 30 bp, Artificial Sequence
  Synthetic oligonucleotide
gcggctccagttctttcgtcagaagtccgg

SEQ ID NO: 476739 - DNA, 30 bp, Artificial Sequence
  Synthetic oligonucleotide
aatcctgactcgacctgattctgtgtccgg

SEQ ID NO: 476740 - DNA, 30 bp, Artificial Sequence
  Synthetic oligonucleotide
ctcttggcatgaaccggacctcgcttccgg

SEQ ID NO: 476741 - DNA, 30 bp, Artificial Sequence
  Synthetic oligonucleotide
ctcgacctggcatcgccagtccagttccgg

SEQ ID NO: 476742 - DNA, 30 bp, Artificial Sequence
  Synthetic oligonucleotide
gaaagtacaagactctgagtcaggttccgg

SEQ ID NO: 476743 - DNA, 30 bp, Artificial Sequence
  Synthetic oligonucleotide
gattaaacatgggtccggaaaattttccgg

SEQ ID NO: 476744 - DNA, 31 bp, Artificial Sequence
  Synthetic oligonucleotide
gaccaagtgtactttaaagacagttttccgg

SEQ ID NO: 476745 - DNA, 30 bp, Artificial Sequence
  Synthetic oligonucleotide
tacttgctgtacacgttattctttttccgg

SEQ ID NO: 476746 - DNA, 30 bp, Artificial Sequence
  Synthetic oligonucleotide
aaatacgtgtaacgcagggccagaaagcgg

SEQ ID NO: 476747 - DNA, 30 bp, Artificial Sequence
  Synthetic oligonucleotide
gagagaggctaagttagacagtgaaagcgg

SEQ ID NO: 476748 - DNA, 30 bp, Artificial Sequence
  Synthetic oligonucleotide
aaatagacaaggaatggtgacataaagcgg

SEQ ID NO: 476749 - DNA, 30 bp, Artificial Sequence
  Synthetic oligonucleotide
ataccttagggccggaaggggagcaagcgg

SEQ ID NO: 476750 - DNA, 30 bp, Artificial Sequence
  Synthetic oligonucleotide
atgccatggcccgctaacgagccgaagcgg

SEQ ID NO: 476751 - DNA, 30 bp, Artificial Sequence
  Synthetic oligonucleotide
gcgcaattgacactacggtagatgaagcgg

SEQ ID NO: 476752 - DNA, 30 bp, Artificial Sequence
  Synthetic oligonucleotide
tcaagggctatgctcagcgcaaaacagcgg

SEQ ID NO: 476753 - DNA, 30 bp, Artificial Sequence
  Synthetic oligonucleotide
gcgatcttgaaccctacattgaagcagcgg

SEQ ID NO: 476754 - DNA, 30 bp, Artificial Sequence
  Synthetic oligonucleotide
aaggcagcacaccttgttaaaattcagcgg

SEQ ID NO: 476755 - DNA, 30 bp, Artificial Sequence
  Synthetic oligonucleotide
gagtttcgctcatgtcgcggcagagagcgg

SEQ ID NO: 476756 - DNA, 30 bp, Artificial Sequence
  Synthetic oligonucleotide
gtcaggacgtgctcctcccttcccgagcgg

SEQ ID NO: 476757 - DNA, 30 bp, Artificial Sequence
  Synthetic oligonucleotide
cgcggtaagtcatttggccctgatgagcgg

SEQ ID NO: 476758 - DNA, 30 bp, Artificial Sequence
  Synthetic oligonucleotide
gcacgcgatccgggggacacgcattagcgg

SEQ ID NO: 476759 - DNA, 30 bp, Artificial Sequence
  Synthetic oligonucleotide
ttaagtattccttacgctgtgatttagcgg

SEQ ID NO: 476760 - DNA, 30 bp, Artificial Sequence
  Synthetic oligonucleotide
tggtttgtcacctttgcacacaaaacgcgg

SEQ ID NO: 476761 - DNA, 30 bp, Artificial Sequence
  Synthetic oligonucleotide
ctgccatgtccacgggagcctaacacgcgg

SEQ ID NO: 476762 - DNA, 30 bp, Artificial Sequence
  Synthetic oligonucleotide
ggcatttctttaagcgttagtagcacgcgg

SEQ ID NO: 476763 - DNA, 30 bp, Artificial Sequence
  Synthetic oligonucleotide
atcttcgtcaagctccaagaatgcacgcgg

SEQ ID NO: 476764 - DNA, 30 bp, Artificial Sequence
  Synthetic oligonucleotide
aacgcgcacacaggctggtatacgacgcgg

SEQ ID NO: 476765 - DNA, 30 bp, Artificial Sequence
  Synthetic oligonucleotide
aactcaagacaaggggattgggcgacgcgg

SEQ ID NO: 476766 - DNA, 30 bp, Artificial Sequence
  Synthetic oligonucleotide
ggatacgcgctatggctgagggggacgcgg

SEQ ID NO: 476767 - DNA, 30 bp, Artificial Sequence
  Synthetic oligonucleotide
ttcatggttaggaggttggtatggacgcgg

SEQ ID NO: 476768 - DNA, 30 bp, Artificial Sequence
  Synthetic oligonucleotide
caaatgaagactggcgtttagctgacgcgg

SEQ ID NO: 476769 - DNA, 30 bp, Artificial Sequence
  Synthetic oligonucleotide
aatgcaggaaatagctacgagtatacgcgg

SEQ ID NO: 476770 - DNA, 30 bp, Artificial Sequence
  Synthetic oligonucleotide
ttggcgacgtaactgcgcgtgggaccgcgg

SEQ ID NO: 476771 - DNA, 30 bp, Artificial Sequence
  Synthetic oligonucleotide
acgaaggtcccggtattgataacgccgcgg

SEQ ID NO: 476772 - DNA, 30 bp, Artificial Sequence
  Synthetic oligonucleotide
tatttaatgaccatacggatgttgccgcgg

SEQ ID NO: 476773 - DNA, 30 bp, Artificial Sequence
  Synthetic oligonucleotide
cccagctgtacgggttcaccatatccgcgg

SEQ ID NO: 476774 - DNA, 30 bp, Artificial Sequence
  Synthetic oligonucleotide
atatctgatgaggatgcagcttatccgcgg

SEQ ID NO: 476775 - DNA, 30 bp, Artificial Sequence
  Synthetic oligonucleotide
ttcaaacccgcagtgacttgagctccgcgg

SEQ ID NO: 476776 - DNA, 30 bp, Artificial Sequence
  Synthetic oligonucleotide
gtcgcacgtaattaatgaatatctccgcgg

SEQ ID NO: 476777 - DNA, 30 bp, Artificial Sequence
  Synthetic oligonucleotide
gaaatgcactgacgcgggttgcttccgcgg

SEQ ID NO: 476778 - DNA, 30 bp, Artificial Sequence
  Synthetic oligonucleotide
ccggagcggttaggtagtgtagacgcgcgg

SEQ ID NO: 476779 - DNA, 30 bp, Artificial Sequence
  Synthetic oligonucleotide
tagtcgctacaagaaggtacgggtgcgcgg

SEQ ID NO: 476780 - DNA, 30 bp, Artificial Sequence
  Synthetic oligonucleotide
gtctctggtggtgccggtgagagatcgcgg

SEQ ID NO: 476781 - DNA, 30 bp, Artificial Sequence
  Synthetic oligonucleotide
cattttcttctacgtcaacatcgctcgcgg

SEQ ID NO: 476782 - DNA, 30 bp, Artificial Sequence
  Synthetic oligonucleotide
agatcgtgaaagcatccaagatcgtcgcgg

SEQ ID NO: 476783 - DNA, 30 bp, Artificial Sequence
  Synthetic oligonucleotide
aagacggcgatccgcccagataaaaggcgg

SEQ ID NO: 476784 - DNA, 30 bp, Artificial Sequence
  Synthetic oligonucleotide
gaatcgacgatttttccgctggacaggcgg

SEQ ID NO: 476785 - DNA, 31 bp, Artificial Sequence
  Synthetic oligonucleotide
gccgctccatcgtctactgtctggcaggcgg

SEQ ID NO: 476786 - DNA, 30 bp, Artificial Sequence
  Synthetic oligonucleotide
tacgttcgagtgcagaccattgataggcgg

SEQ ID NO: 476787 - DNA, 30 bp, Artificial Sequence
  Synthetic oligonucleotide
ccaaagcgggtgagcctatgacttaggcgg

SEQ ID NO: 476788 - DNA, 30 bp, Artificial Sequence
  Synthetic oligonucleotide
ctttgatacagacttagtgtggtccggcgg

SEQ ID NO: 476789 - DNA, 30 bp, Artificial Sequence
  Synthetic oligonucleotide
gccggcctctgttcgtaggagtagcggcgg

SEQ ID NO: 476790 - DNA, 30 bp, Artificial Sequence
  Synthetic oligonucleotide
gtggcagggagtgctacgacactgcggcgg

SEQ ID NO: 476791 - DNA, 30 bp, Artificial Sequence
  Synthetic oligonucleotide
gagtcttcaggggttgcaatggtgcggcgg

SEQ ID NO: 476792 - DNA, 30 bp, Artificial Sequence
  Synthetic oligonucleotide
gttcgccactgctactcgtatatagggcgg

SEQ ID NO: 476793 - DNA, 30 bp, Artificial Sequence
  Synthetic oligonucleotide
gaagggcacaacaagccagttcccgggcgg

SEQ ID NO: 476794 - DNA, 30 bp, Artificial Sequence
  Synthetic oligonucleotide
gcgctgcgaccgcatgcactacaggggcgg

SEQ ID NO: 476795 - DNA, 30 bp, Artificial Sequence
  Synthetic oligonucleotide
gtcaggataaaatgtttacaataggggcgg

SEQ ID NO: 476796 - DNA, 29 bp, Artificial Sequence
  Synthetic oligonucleotide
gtagtcccacccatcacggctcggggcgg

SEQ ID NO: 476797 - DNA, 30 bp, Artificial Sequence
  Synthetic oligonucleotide
atctatttgtgcgagacgttgggtgggcgg

SEQ ID NO: 476798 - DNA, 30 bp, Artificial Sequence
  Synthetic oligonucleotide
gaggtaccacgccagtcatgctaatggcgg

SEQ ID NO: 476799 - DNA, 30 bp, Artificial Sequence
  Synthetic oligonucleotide
cggttcgcgcggcggaggcggagatggcgg

SEQ ID NO: 476800 - DNA, 30 bp, Artificial Sequence
  Synthetic oligonucleotide
actttcggatatccaaactgtggctggcgg

SEQ ID NO: 476801 - DNA, 30 bp, Artificial Sequence
  Synthetic oligonucleotide
ttgcataagtcccgacgacgccattggcgg

SEQ ID NO: 476802 - DNA, 30 bp, Artificial Sequence
  Synthetic oligonucleotide
atgcgctatacagttcggtcactttggcgg

SEQ ID NO: 476803 - DNA, 30 bp, Artificial Sequence
  Synthetic oligonucleotide
agaagtgttatgaccatgctaacaatgcgg

SEQ ID NO: 476804 - DNA, 30 bp, Artificial Sequence
  Synthetic oligonucleotide
gtcgggctgggcgtccggacccatatgcgg

SEQ ID NO: 476805 - DNA, 30 bp, Artificial Sequence
  Synthetic oligonucleotide
aagcaactcttccggacagccagtatgcgg

SEQ ID NO: 476806 - DNA, 30 bp, Artificial Sequence
  Synthetic oligonucleotide
gtttaggctttgcatctcgaaattatgcgg

SEQ ID NO: 476807 - DNA, 30 bp, Artificial Sequence
  Synthetic oligonucleotide
cacttctatagagccggggaacttatgcgg

SEQ ID NO: 476808 - DNA, 30 bp, Artificial Sequence
  Synthetic oligonucleotide
cgtaagggtatcgatcgggtgggcctgcgg

SEQ ID NO: 476809 - DNA, 30 bp, Artificial Sequence
  Synthetic oligonucleotide
gactggccaggttcttctgactgtctgcgg

SEQ ID NO: 476810 - DNA, 30 bp, Artificial Sequence
  Synthetic oligonucleotide
atcaagataatattctcggcatacgtgcgg

SEQ ID NO: 476811 - DNA, 30 bp, Artificial Sequence
  Synthetic oligonucleotide
ccccgtgaatttgtggatgcgctcgtgcgg

SEQ ID NO: 476812 - DNA, 30 bp, Artificial Sequence
  Synthetic oligonucleotide
gtacagaacgttatcgcttaaaaggtgcgg

SEQ ID NO: 476813 - DNA, 30 bp, Artificial Sequence
  Synthetic oligonucleotide
cgcgcgcgacccgctcagaatgatgtgcgg

SEQ ID NO: 476814 - DNA, 30 bp, Artificial Sequence
  Synthetic oligonucleotide
ccgctggaagcggatgcgtcgggtgtgcgg

SEQ ID NO: 476815 - DNA, 30 bp, Artificial Sequence
  Synthetic oligonucleotide
ttacgttactcgggcccgcagacattgcgg

SEQ ID NO: 476816 - DNA, 30 bp, Artificial Sequence
  Synthetic oligonucleotide
cggtggttgtcggttcttggtacattgcgg

SEQ ID NO: 476817 - DNA, 30 bp, Artificial Sequence
  Synthetic oligonucleotide
ggttgtcattattcctgtaaattattgcgg

SEQ ID NO: 476818 - DNA, 30 bp, Artificial Sequence
  Synthetic oligonucleotide
ttctacgcctctctagcgttgggcttgcgg

SEQ ID NO: 476819 - DNA, 30 bp, Artificial Sequence
  Synthetic oligonucleotide
ctccagttaagaggacgctagatcttgcgg

SEQ ID NO: 476820 - DNA, 30 bp, Artificial Sequence
  Synthetic oligonucleotide
gtgggtgtgggggatgtcagagctttgcgg

SEQ ID NO: 476821 - DNA, 30 bp, Artificial Sequence
  Synthetic oligonucleotide
tgtaactttagggtaacgatggcgaatcgg

SEQ ID NO: 476822 - DNA, 30 bp, Artificial Sequence
  Synthetic oligonucleotide
gaattatagcaataatccctaactaatcgg

SEQ ID NO: 476823 - DNA, 30 bp, Artificial Sequence
  Synthetic oligonucleotide
gagcaggattgacagccgatgcgtaatcgg

SEQ ID NO: 476824 - DNA, 30 bp, Artificial Sequence
  Synthetic oligonucleotide
ccattcacgcttacagatctgtgtaatcgg

SEQ ID NO: 476825 - DNA, 30 bp, Artificial Sequence
  Synthetic oligonucleotide
aagcgacacgttgaccctgaggttaatcgg

SEQ ID NO: 476826 - DNA, 30 bp, Artificial Sequence
  Synthetic oligonucleotide
caatcgctaactcagtacggaagacatcgg

SEQ ID NO: 476827 - DNA, 30 bp, Artificial Sequence
  Synthetic oligonucleotide
tcagttgcttttagatgggaaggacatcgg

SEQ ID NO: 476828 - DNA, 30 bp, Artificial Sequence
  Synthetic oligonucleotide
gttctcggaccacaggacggggaccatcgg

SEQ ID NO: 476829 - DNA, 30 bp, Artificial Sequence
  Synthetic oligonucleotide
aggttaacgacatgcccgtcataccatcgg

SEQ ID NO: 476830 - DNA, 30 bp, Artificial Sequence
  Synthetic oligonucleotide
gcaagacccttgtccttactggttcatcgg

SEQ ID NO: 476831 - DNA, 30 bp, Artificial Sequence
  Synthetic oligonucleotide
gaaaaatcttttactggacgatcagatcgg

SEQ ID NO: 476832 - DNA, 30 bp, Artificial Sequence
  Synthetic oligonucleotide
tcctatctaaagatatggtactgagatcgg

SEQ ID NO: 476833 - DNA, 30 bp, Artificial Sequence
  Synthetic oligonucleotide
cggtattctgggggtttgtgagaggatcgg

SEQ ID NO: 476834 - DNA, 30 bp, Artificial Sequence
  Synthetic oligonucleotide
gtggtttgagaagcaccaccgggtgatcgg

SEQ ID NO: 476835 - DNA, 30 bp, Artificial Sequence
  Synthetic oligonucleotide
gttgctggtcttatatgcgacgcatatcgg

SEQ ID NO: 476836 - DNA, 30 bp, Artificial Sequence
  Synthetic oligonucleotide
aaattcaagcttcattgctcgccctatcgg

SEQ ID NO: 476837 - DNA, 31 bp, Artificial Sequence
  Synthetic oligonucleotide
atgccacctgatgcggcaggattcaactcgg

SEQ ID NO: 476838 - DNA, 30 bp, Artificial Sequence
  Synthetic oligonucleotide
gattatgacgtcggaatggggcccactcgg

SEQ ID NO: 476839 - DNA, 30 bp, Artificial Sequence
  Synthetic oligonucleotide
ttgcagaagccggggcatgtacgcactcgg

SEQ ID NO: 476840 - DNA, 30 bp, Artificial Sequence
  Synthetic oligonucleotide
gcaccggccaggagagtgactaggactcgg

SEQ ID NO: 476841 - DNA, 30 bp, Artificial Sequence
  Synthetic oligonucleotide
agtgtatccttcggaggtagagtgactcgg

SEQ ID NO: 476842 - DNA, 30 bp, Artificial Sequence
  Synthetic oligonucleotide
tatcttaaacattcttactaggtgactcgg

SEQ ID NO: 476843 - DNA, 30 bp, Artificial Sequence
  Synthetic oligonucleotide
gcagtacattaggacactctcttgactcgg

SEQ ID NO: 476844 - DNA, 30 bp, Artificial Sequence
  Synthetic oligonucleotide
tattcacagtgagggggttcctaccctcgg

SEQ ID NO: 476845 - DNA, 30 bp, Artificial Sequence
  Synthetic oligonucleotide
gtgtttacggtccctagccctgcgcctcgg

SEQ ID NO: 476846 - DNA, 30 bp, Artificial Sequence
  Synthetic oligonucleotide
gagtcatgactagcgtcatgcatcgctcgg

SEQ ID NO: 476847 - DNA, 30 bp, Artificial Sequence
  Synthetic oligonucleotide
aaccttttaaccaaccgtcttggggctcgg

SEQ ID NO: 476848 - DNA, 30 bp, Artificial Sequence
  Synthetic oligonucleotide
gcggttagccattggtaaacccttgctcgg

SEQ ID NO: 476849 - DNA, 30 bp, Artificial Sequence
  Synthetic oligonucleotide
actggataaccctgcgctcagtaatctcgg

SEQ ID NO: 476850 - DNA, 30 bp, Artificial Sequence
  Synthetic oligonucleotide
aagagttctatcaataaactcccatctcgg

SEQ ID NO: 476851 - DNA, 30 bp, Artificial Sequence
  Synthetic oligonucleotide
cggacgcgaaagcttaaccaatgatctcgg

SEQ ID NO: 476852 - DNA, 30 bp, Artificial Sequence
  Synthetic oligonucleotide
acatatggaccagcacacagcccctctcgg

SEQ ID NO: 476853 - DNA, 30 bp, Artificial Sequence
  Synthetic oligonucleotide
agtacagttaaagtcgaaatagtctctcgg

SEQ ID NO: 476854 - DNA, 30 bp, Artificial Sequence
  Synthetic oligonucleotide
ccaaggtagaaagcgggttattgtagtcgg

SEQ ID NO: 476855 - DNA, 30 bp, Artificial Sequence
  Synthetic oligonucleotide
tgattgtatttagagaggtttgttagtcgg

SEQ ID NO: 476856 - DNA, 30 bp, Artificial Sequence
  Synthetic oligonucleotide
aaatttaatggtttgcgtcccttgcgtcgg

SEQ ID NO: 476857 - DNA, 30 bp, Artificial Sequence
  Synthetic oligonucleotide
actcgcggatccgcagcgatgaatcgtcgg

SEQ ID NO: 476858 - DNA, 30 bp, Artificial Sequence
  Synthetic oligonucleotide
gtaacgtagcttcctatgatcgtcggtcgg

SEQ ID NO: 476859 - DNA, 30 bp, Artificial Sequence
  Synthetic oligonucleotide
ggggtcagccgcacctctaggattggtcgg

SEQ ID NO: 476860 - DNA, 30 bp, Artificial Sequence
  Synthetic oligonucleotide
tgaaatcttgtttcagtacggttctgtcgg

SEQ ID NO: 476861 - DNA, 30 bp, Artificial Sequence
  Synthetic oligonucleotide
tttagtataacaggacgctctacgtgtcgg

SEQ ID NO: 476862 - DNA, 30 bp, Artificial Sequence
  Synthetic oligonucleotide
tatatccggtgtttctctcttgcgtgtcgg

SEQ ID NO: 476863 - DNA, 30 bp, Artificial Sequence
  Synthetic oligonucleotide
tatagctcttatacagtcagggtttgtcgg

SEQ ID NO: 476864 - DNA, 30 bp, Artificial Sequence
  Synthetic oligonucleotide
gcgaagaggcaccccggcaacttttgtcgg

SEQ ID NO: 476865 - DNA, 30 bp, Artificial Sequence
  Synthetic oligonucleotide
ttacgtcggggtatagaatacacaattcgg

SEQ ID NO: 476866 - DNA, 30 bp, Artificial Sequence
  Synthetic oligonucleotide
ttaaatttgccctccaggtcgggcattcgg

SEQ ID NO: 476867 - DNA, 30 bp, Artificial Sequence
  Synthetic oligonucleotide
catcccctgcattgatgatggctcattcgg

SEQ ID NO: 476868 - DNA, 30 bp, Artificial Sequence
  Synthetic oligonucleotide
tagccataccagttcttggccatgattcgg

SEQ ID NO: 476869 - DNA, 30 bp, Artificial Sequence
  Synthetic oligonucleotide
tatgtaaccggcataagtttcatgattcgg

SEQ ID NO: 476870 - DNA, 30 bp, Artificial Sequence
  Synthetic oligonucleotide
cgtcgcggtcccgggtcggtgactattcgg

SEQ ID NO: 476871 - DNA, 30 bp, Artificial Sequence
  Synthetic oligonucleotide
ataattatactctactggtcgcgtattcgg

SEQ ID NO: 476872 - DNA, 30 bp, Artificial Sequence
  Synthetic oligonucleotide
tattcaatcttccccgggacacgacttcgg

SEQ ID NO: 476873 - DNA, 30 bp, Artificial Sequence
  Synthetic oligonucleotide
gtattagacctacggattgatggacttcgg

SEQ ID NO: 476874 - DNA, 30 bp, Artificial Sequence
  Synthetic oligonucleotide
ctcctaacgatcgtgtaacgcgcccttcgg

SEQ ID NO: 476875 - DNA, 30 bp, Artificial Sequence
  Synthetic oligonucleotide
gtgtccgtatcggtcatcaatgcccttcgg

SEQ ID NO: 476876 - DNA, 30 bp, Artificial Sequence
  Synthetic oligonucleotide
cacttttttgagtatctttcatgccttcgg

SEQ ID NO: 476877 - DNA, 30 bp, Artificial Sequence
  Synthetic oligonucleotide
accttgggtgtcccacaaggcgcgcttcgg

SEQ ID NO: 476878 - DNA, 30 bp, Artificial Sequence
  Synthetic oligonucleotide
gctcttatgatttggagtgaaaggcttcgg

SEQ ID NO: 476879 - DNA, 30 bp, Artificial Sequence
  Synthetic oligonucleotide
gtctaaccaatattctttttagtgcttcgg

SEQ ID NO: 476880 - DNA, 30 bp, Artificial Sequence
  Synthetic oligonucleotide
ctacgaaaactgtatgattagcgtcttcgg

SEQ ID NO: 476881 - DNA, 30 bp, Artificial Sequence
  Synthetic oligonucleotide
tacggcgcctgaatagggctgcgtcttcgg

SEQ ID NO: 476882 - DNA, 30 bp, Artificial Sequence
  Synthetic oligonucleotide
accaagctcaggaggcgtttcaaagttcgg

SEQ ID NO: 476883 - DNA, 30 bp, Artificial Sequence
  Synthetic oligonucleotide
gcgagcacgatgatgcagccgacagttcgg

SEQ ID NO: 476884 - DNA, 30 bp, Artificial Sequence
  Synthetic oligonucleotide
aagttatctcctagtacgataaatgttcgg

SEQ ID NO: 476885 - DNA, 30 bp, Artificial Sequence
  Synthetic oligonucleotide
cttgcctaccagaacagtcgtgctgttcgg

SEQ ID NO: 476886 - DNA, 30 bp, Artificial Sequence
  Synthetic oligonucleotide
aatataagatccctcgtattttgtgttcgg

SEQ ID NO: 476887 - DNA, 30 bp, Artificial Sequence
  Synthetic oligonucleotide
cagcgtttagagggggcaaccggatttcgg

SEQ ID NO: 476888 - DNA, 30 bp, Artificial Sequence
  Synthetic oligonucleotide
acagtatcatagatagacaggacctttcgg

SEQ ID NO: 476889 - DNA, 30 bp, Artificial Sequence
  Synthetic oligonucleotide
ccagattacccatcactccagtgctttcgg

SEQ ID NO: 476890 - DNA, 25 bp, Artificial Sequence
  Synthetic oligonucleotide
ttcaaagtgctgccctctctttcgg

SEQ ID NO: 476891 - DNA, 30 bp, Artificial Sequence
  Synthetic oligonucleotide
ttttcacaccccagagccattgtctttcgg

SEQ ID NO: 476892 - DNA, 30 bp, Artificial Sequence
  Synthetic oligonucleotide
cgcaacggcagataaaccccatggtttcgg

SEQ ID NO: 476893 - DNA, 30 bp, Artificial Sequence
  Synthetic oligonucleotide
ctcaggcggatcgtagcaggggattttcgg

SEQ ID NO: 476894 - DNA, 30 bp, Artificial Sequence
  Synthetic oligonucleotide
agatgggcgcttcgggcagtcggttttcgg

SEQ ID NO: 476895 - DNA, 30 bp, Artificial Sequence
  Synthetic oligonucleotide
gcccgttggggtcctaacaccgtaaaaggg

SEQ ID NO: 476896 - DNA, 30 bp, Artificial Sequence
  Synthetic oligonucleotide
ggcgtcttatgtgtcctattgtacaaaggg

SEQ ID NO: 476897 - DNA, 30 bp, Artificial Sequence
  Synthetic oligonucleotide
gagagtggggcggcatcatggtggaaaggg

SEQ ID NO: 476898 - DNA, 30 bp, Artificial Sequence
  Synthetic oligonucleotide
ctgcagcaggcacgccaagtaatgaaaggg

SEQ ID NO: 476899 - DNA, 30 bp, Artificial Sequence
  Synthetic oligonucleotide
gcccactttgtcacgtccgtagtgaaaggg

SEQ ID NO: 476900 - DNA, 30 bp, Artificial Sequence
  Synthetic oligonucleotide
acattcttatatccacaaccatgacaaggg

SEQ ID NO: 476901 - DNA, 30 bp, Artificial Sequence
  Synthetic oligonucleotide
gttctatgtgtctaggttcatgtccaaggg

SEQ ID NO: 476902 - DNA, 30 bp, Artificial Sequence
  Synthetic oligonucleotide
cgtcgtggtgactttgatggctggcaaggg

SEQ ID NO: 476903 - DNA, 30 bp, Artificial Sequence
  Synthetic oligonucleotide
atctgcagtcgctattgtcgatgtcaaggg

SEQ ID NO: 476904 - DNA, 30 bp, Artificial Sequence
  Synthetic oligonucleotide
gaggggtcgcgcccatcagtagaagaaggg

SEQ ID NO: 476905 - DNA, 30 bp, Artificial Sequence
  Synthetic oligonucleotide
gactatctagggcttttctacgtagaaggg

SEQ ID NO: 476906 - DNA, 30 bp, Artificial Sequence
  Synthetic oligonucleotide
ttgtctcttaacgtaagcgcgcgataaggg

SEQ ID NO: 476907 - DNA, 30 bp, Artificial Sequence
  Synthetic oligonucleotide
aataggtttgcatctgggcccatataaggg

SEQ ID NO: 476908 - DNA, 30 bp, Artificial Sequence
  Synthetic oligonucleotide
atgtcctgaagcatgagggggtactaaggg

SEQ ID NO: 476909 - DNA, 30 bp, Artificial Sequence
  Synthetic oligonucleotide
gttttctgagactgtggggaaccgtaaggg

SEQ ID NO: 476910 - DNA, 30 bp, Artificial Sequence
  Synthetic oligonucleotide
gcttcccttacataacaaccatgttaaggg

SEQ ID NO: 476911 - DNA, 30 bp, Artificial Sequence
  Synthetic oligonucleotide
tagccccttcattcggagtggtgttaaggg

SEQ ID NO: 476912 - DNA, 30 bp, Artificial Sequence
  Synthetic oligonucleotide
aagttttttgcgatgtttttcatttaaggg

SEQ ID NO: 476913 - DNA, 30 bp, Artificial Sequence
  Synthetic oligonucleotide
caggggcatggggtcgcatatgtgacaggg

SEQ ID NO: 476914 - DNA, 30 bp, Artificial Sequence
  Synthetic oligonucleotide
gaattagggcgggcatccatatatacaggg

SEQ ID NO: 476915 - DNA, 30 bp, Artificial Sequence
  Synthetic oligonucleotide
ttgacctaaagctgctgggggttaccaggg

SEQ ID NO: 476916 - DNA, 30 bp, Artificial Sequence
  Synthetic oligonucleotide
tatatatggattatgtgtcgctacccaggg

SEQ ID NO: 476917 - DNA, 30 bp, Artificial Sequence
  Synthetic oligonucleotide
tgcccctcctcttagctgtcgttcccaggg

SEQ ID NO: 476918 - DNA, 30 bp, Artificial Sequence
  Synthetic oligonucleotide
gcagccgcggttggtaagtggggtccaggg

SEQ ID NO: 476919 - DNA, 26 bp, Artificial Sequence
  Synthetic oligonucleotide
cgatgaaagttcgcctcagagcaggg

SEQ ID NO: 476920 - DNA, 30 bp, Artificial Sequence
  Synthetic oligonucleotide
gtaagtcccaggctgcagtgacgagcaggg

SEQ ID NO: 476921 - DNA, 30 bp, Artificial Sequence
  Synthetic oligonucleotide
gtggggaacgggaaaaccatactagcaggg

SEQ ID NO: 476922 - DNA, 30 bp, Artificial Sequence
  Synthetic oligonucleotide
taacaacgcgccctcttcccgaacgcaggg

SEQ ID NO: 476923 - DNA, 30 bp, Artificial Sequence
  Synthetic oligonucleotide
atcccccgatctagcggtagtaaggcaggg

SEQ ID NO: 476924 - DNA, 30 bp, Artificial Sequence
  Synthetic oligonucleotide
gtattgggccgcggagattgactggcaggg

SEQ ID NO: 476925 - DNA, 30 bp, Artificial Sequence
  Synthetic oligonucleotide
tagacaaattcaaattcctaaccctcaggg

SEQ ID NO: 476926 - DNA, 30 bp, Artificial Sequence
  Synthetic oligonucleotide
tattttgtattttgggtgcgactctcaggg

SEQ ID NO: 476927 - DNA, 30 bp, Artificial Sequence
  Synthetic oligonucleotide
ctaatgttactggctccacccagttcaggg

SEQ ID NO: 476928 - DNA, 30 bp, Artificial Sequence
  Synthetic oligonucleotide
tatggcgcctcgcatcgacgcgtcagaggg

SEQ ID NO: 476929 - DNA, 30 bp, Artificial Sequence
  Synthetic oligonucleotide
gccttttcgataacgcgaggcaagagaggg

SEQ ID NO: 476930 - DNA, 30 bp, Artificial Sequence
  Synthetic oligonucleotide
tcctgggattagaccggtagcccgagaggg

SEQ ID NO: 476931 - DNA, 30 bp, Artificial Sequence
  Synthetic oligonucleotide
ccggactaggctggtggggtttctagaggg

SEQ ID NO: 476932 - DNA, 31 bp, Artificial Sequence
  Synthetic oligonucleotide
aaccgcccctcaggatagtctcagtagaggg

SEQ ID NO: 476933 - DNA, 30 bp, Artificial Sequence
  Synthetic oligonucleotide
ctgtaacagttcgtggttgacagacgaggg

SEQ ID NO: 476934 - DNA, 30 bp, Artificial Sequence
  Synthetic oligonucleotide
ctcccctcgcggctcatggcccgccgaggg

SEQ ID NO: 476935 - DNA, 30 bp, Artificial Sequence
  Synthetic oligonucleotide
ccgtcagtgcagtcgacgtagatgcgaggg

SEQ ID NO: 476936 - DNA, 30 bp, Artificial Sequence
  Synthetic oligonucleotide
gcacatcccgtctcttgttgctttcgaggg

SEQ ID NO: 476937 - DNA, 30 bp, Artificial Sequence
  Synthetic oligonucleotide
acgtctaaataatcgatcaccgggggaggg

SEQ ID NO: 476938 - DNA, 30 bp, Artificial Sequence
  Synthetic oligonucleotide
ataagtgcttggcatgggactagatgaggg

SEQ ID NO: 476939 - DNA, 30 bp, Artificial Sequence
  Synthetic oligonucleotide
ttaggtttacctatggacggtatatgaggg

SEQ ID NO: 476940 - DNA, 30 bp, Artificial Sequence
  Synthetic oligonucleotide
aggcactttttcttgaggggctgctgaggg

SEQ ID NO: 476941 - DNA, 30 bp, Artificial Sequence
  Synthetic oligonucleotide
tacatatattattccacacccgcttgaggg

SEQ ID NO: 476942 - DNA, 30 bp, Artificial Sequence
  Synthetic oligonucleotide
tgtgtaacgtcttgcaagtgtttttgaggg

SEQ ID NO: 476943 - DNA, 30 bp, Artificial Sequence
  Synthetic oligonucleotide
gttgcccgttataccccttagtaaataggg

SEQ ID NO: 476944 - DNA, 26 bp, Artificial Sequence
  Synthetic oligonucleotide
tcataggcacctgtcacgtaataggg

SEQ ID NO: 476945 - DNA, 30 bp, Artificial Sequence
  Synthetic oligonucleotide
ggcaacttagtctctacgtcgctcataggg

SEQ ID NO: 476946 - DNA, 30 bp, Artificial Sequence
  Synthetic oligonucleotide
tgtgcggcgattacagacgacgtcataggg

SEQ ID NO: 476947 - DNA, 30 bp, Artificial Sequence
  Synthetic oligonucleotide
attttatgggtacattttaaccagataggg

SEQ ID NO: 476948 - DNA, 30 bp, Artificial Sequence
  Synthetic oligonucleotide
accctgaactgatgacgcctactgataggg

SEQ ID NO: 476949 - DNA, 30 bp, Artificial Sequence
  Synthetic oligonucleotide
taacacacacgtgttatggaatctataggg

SEQ ID NO: 476950 - DNA, 30 bp, Artificial Sequence
  Synthetic oligonucleotide
atccgggtattcccggaggggtctataggg

SEQ ID NO: 476951 - DNA, 30 bp, Artificial Sequence
  Synthetic oligonucleotide
cgagccttcagtaataggtttcaactaggg

SEQ ID NO: 476952 - DNA, 30 bp, Artificial Sequence
  Synthetic oligonucleotide
aatacacatcacacgcaacagggactaggg

SEQ ID NO: 476953 - DNA, 30 bp, Artificial Sequence
  Synthetic oligonucleotide
gggagggaggtgaccctgttctacctaggg

SEQ ID NO: 476954 - DNA, 30 bp, Artificial Sequence
  Synthetic oligonucleotide
cgcaatccaccccatcaatctaccctaggg

SEQ ID NO: 476955 - DNA, 30 bp, Artificial Sequence
  Synthetic oligonucleotide
tatggatacaccttgggtggtctcctaggg

SEQ ID NO: 476956 - DNA, 30 bp, Artificial Sequence
  Synthetic oligonucleotide
gaattaaggtaggcgactcgatatctaggg

SEQ ID NO: 476957 - DNA, 30 bp, Artificial Sequence
  Synthetic oligonucleotide
tctggttatattcagtgatgccaagtaggg

SEQ ID NO: 476958 - DNA, 30 bp, Artificial Sequence
  Synthetic oligonucleotide
ttttccaatcatccgcgaaaatccgtaggg

SEQ ID NO: 476959 - DNA, 30 bp, Artificial Sequence
  Synthetic oligonucleotide
gtcgtttatgtctccaggcccggcgtaggg

SEQ ID NO: 476960 - DNA, 30 bp, Artificial Sequence
  Synthetic oligonucleotide
gggtgaagccgtacggccagtccggtaggg

SEQ ID NO: 476961 - DNA, 30 bp, Artificial Sequence
  Synthetic oligonucleotide
atgcagggtcgcttaatactatgggtaggg

SEQ ID NO: 476962 - DNA, 30 bp, Artificial Sequence
  Synthetic oligonucleotide
cggtggtcaagatacctctccctggtaggg

SEQ ID NO: 476963 - DNA, 30 bp, Artificial Sequence
  Synthetic oligonucleotide
gttctctcgaggatgatggtggatgtaggg

SEQ ID NO: 476964 - DNA, 30 bp, Artificial Sequence
  Synthetic oligonucleotide
ccgccttaggggaagtgcgaacctgtaggg

SEQ ID NO: 476965 - DNA, 30 bp, Artificial Sequence
  Synthetic oligonucleotide
aggtcttggtttcaacgcgctgctgtaggg

SEQ ID NO: 476966 - DNA, 30 bp, Artificial Sequence
  Synthetic oligonucleotide
gattcgttacggtgtgcaccatttgtaggg

SEQ ID NO: 476967 - DNA, 30 bp, Artificial Sequence
  Synthetic oligonucleotide
cagagaggaagggtcgtaaatggattaggg

SEQ ID NO: 476968 - DNA, 30 bp, Artificial Sequence
  Synthetic oligonucleotide
aaatttatgggggatgttacactattaggg

SEQ ID NO: 476969 - DNA, 30 bp, Artificial Sequence
  Synthetic oligonucleotide
gtaaatgctgggcgcataggagtcttaggg

SEQ ID NO: 476970 - DNA, 30 bp, Artificial Sequence
  Synthetic oligonucleotide
aaatgggcgatacgtgagtagcggttaggg

SEQ ID NO: 476971 - DNA, 30 bp, Artificial Sequence
  Synthetic oligonucleotide
ctactctccatgggtgcataaaatttaggg

SEQ ID NO: 476972 - DNA, 30 bp, Artificial Sequence
  Synthetic oligonucleotide
taattctctggtcacattccttatttaggg

SEQ ID NO: 476973 - DNA, 30 bp, Artificial Sequence
  Synthetic oligonucleotide
ggcaaccgtgatcgtgttgatccaaacggg

SEQ ID NO: 476974 - DNA, 30 bp, Artificial Sequence
  Synthetic oligonucleotide
aatcaaagggcctgtctaatttcacacggg

SEQ ID NO: 476975 - DNA, 30 bp, Artificial Sequence
  Synthetic oligonucleotide
attcattaatgactgggtaggttacacggg

SEQ ID NO: 476976 - DNA, 26 bp, Artificial Sequence
  Synthetic oligonucleotide
ggtgaaacgctgttatttgccacggg

SEQ ID NO: 476977 - DNA, 30 bp, Artificial Sequence
  Synthetic oligonucleotide
gaatatgtcaatatccgaattagtcacggg

SEQ ID NO: 476978 - DNA, 30 bp, Artificial Sequence
  Synthetic oligonucleotide
aatataggtcctagggtacattttcacggg

SEQ ID NO: 476979 - DNA, 30 bp, Artificial Sequence
  Synthetic oligonucleotide
tatagtagtggcatctggcaccacgacggg

SEQ ID NO: 476980 - DNA, 30 bp, Artificial Sequence
  Synthetic oligonucleotide
gtcagccgtggctgacgagccacatacggg

SEQ ID NO: 476981 - DNA, 30 bp, Artificial Sequence
  Synthetic oligonucleotide
ggccctgggtgtctgcgtattgcatacggg

SEQ ID NO: 476982 - DNA, 30 bp, Artificial Sequence
  Synthetic oligonucleotide
gtttacaaacgtgggtaaacatcatacggg

SEQ ID NO: 476983 - DNA, 30 bp, Artificial Sequence
  Synthetic oligonucleotide
tttaatgcagctcagtcttctatatacggg

SEQ ID NO: 476984 - DNA, 30 bp, Artificial Sequence
  Synthetic oligonucleotide
gcaccggaaaatgtttaaacattatacggg

SEQ ID NO: 476985 - DNA, 30 bp, Artificial Sequence
  Synthetic oligonucleotide
atcttgagaatagtttgtaacgcctacggg

SEQ ID NO: 476986 - DNA, 30 bp, Artificial Sequence
  Synthetic oligonucleotide
gaggcgggtgggaacttgtcacagtacggg

SEQ ID NO: 476987 - DNA, 30 bp, Artificial Sequence
  Synthetic oligonucleotide
tcccctttgcatgcagatttgtgttacggg

SEQ ID NO: 476988 - DNA, 30 bp, Artificial Sequence
  Synthetic oligonucleotide
tcagtaccggtttgatacaatataaccggg

SEQ ID NO: 476989 - DNA, 30 bp, Artificial Sequence
  Synthetic oligonucleotide
actcgccactctggcttgactctaaccggg

SEQ ID NO: 476990 - DNA, 30 bp, Artificial Sequence
  Synthetic oligonucleotide
gagttctgtcctttattccagaacaccggg

SEQ ID NO: 476991 - DNA, 30 bp, Artificial Sequence
  Synthetic oligonucleotide
acatgtatatgggcggtatgcggcaccggg

SEQ ID NO: 476992 - DNA, 30 bp, Artificial Sequence
  Synthetic oligonucleotide
gaaagtgtggcctggccggccatcaccggg

SEQ ID NO: 476993 - DNA, 30 bp, Artificial Sequence
  Synthetic oligonucleotide
ctcgcacacgtttcgcttctgtggaccggg

SEQ ID NO: 476994 - DNA, 30 bp, Artificial Sequence
  Synthetic oligonucleotide
ccctggtttatgttgactcggaatcccggg

SEQ ID NO: 476995 - DNA, 30 bp, Artificial Sequence
  Synthetic oligonucleotide
cttagtcggagcaacgggttcgctcccggg

SEQ ID NO: 476996 - DNA, 30 bp, Artificial Sequence
  Synthetic oligonucleotide
attagcggcttgtctagaagcagtcccggg

SEQ ID NO: 476997 - DNA, 30 bp, Artificial Sequence
  Synthetic oligonucleotide
tttgtggcgtcatacctggccacagccggg

SEQ ID NO: 476998 - DNA, 30 bp, Artificial Sequence
  Synthetic oligonucleotide
atcattctgcattaagatcttatggccggg

SEQ ID NO: 476999 - DNA, 30 bp, Artificial Sequence
  Synthetic oligonucleotide
gaatgggtgtaaataggcccgcactccggg

SEQ ID NO: 477000 - DNA, 30 bp, Artificial Sequence
  Synthetic oligonucleotide
tgcccacccacatatgggcctttctccggg

SEQ ID NO: 477001 - DNA, 30 bp, Artificial Sequence
  Synthetic oligonucleotide
aagacagaatagccccgcccagcgtccggg

SEQ ID NO: 477002 - DNA, 30 bp, Artificial Sequence
  Synthetic oligonucleotide
ggcatcccggggcatacgaccgtgtccggg

SEQ ID NO: 477003 - DNA, 30 bp, Artificial Sequence
  Synthetic oligonucleotide
gttaccgcatgaaccgctccgaattccggg

SEQ ID NO: 477004 - DNA, 30 bp, Artificial Sequence
  Synthetic oligonucleotide
gcagggcatcgttgtggaggcagttccggg

SEQ ID NO: 477005 - DNA, 30 bp, Artificial Sequence
  Synthetic oligonucleotide
ttacttcgcgttaatcaataataaagcggg

SEQ ID NO: 477006 - DNA, 30 bp, Artificial Sequence
  Synthetic oligonucleotide
ttgggtcaattacacttctttacaagcggg

SEQ ID NO: 477007 - DNA, 30 bp, Artificial Sequence
  Synthetic oligonucleotide
gagtcttccaatacgacccgcagaagcggg

SEQ ID NO: 477008 - DNA, 30 bp, Artificial Sequence
  Synthetic oligonucleotide
cttctgtgggtggtacggagcctaagcggg

SEQ ID NO: 477009 - DNA, 30 bp, Artificial Sequence
  Synthetic oligonucleotide
gtttttagattcataggcatacacagcggg

SEQ ID NO: 477010 - DNA, 29 bp, Artificial Sequence
  Synthetic oligonucleotide
ttgatagtgacgacaccgtccctagcggg

SEQ ID NO: 477011 - DNA, 30 bp, Artificial Sequence
  Synthetic oligonucleotide
aattcttgggcctgggcgatctgtagcggg

SEQ ID NO: 477012 - DNA, 30 bp, Artificial Sequence
  Synthetic oligonucleotide
cggccgcattattgcatcttttcacgcggg

SEQ ID NO: 477013 - DNA, 30 bp, Artificial Sequence
  Synthetic oligonucleotide
gcgattacggacagttggttaagacgcggg

SEQ ID NO: 477014 - DNA, 30 bp, Artificial Sequence
  Synthetic oligonucleotide
tttggcatacctcgttcgcccagacgcggg

SEQ ID NO: 477015 - DNA, 30 bp, Artificial Sequence
  Synthetic oligonucleotide
ttttaatcggtcaaatatgtacgacgcggg

SEQ ID NO: 477016 - DNA, 30 bp, Artificial Sequence
  Synthetic oligonucleotide
ccccatagttgctatttccctgaccgcggg

SEQ ID NO: 477017 - DNA, 30 bp, Artificial Sequence
  Synthetic oligonucleotide
tccggagcacacataagctctatgcgcggg

SEQ ID NO: 477018 - DNA, 30 bp, Artificial Sequence
  Synthetic oligonucleotide
atatttcaagttaggttatggaccggcggg

SEQ ID NO: 477019 - DNA, 30 bp, Artificial Sequence
  Synthetic oligonucleotide
gagccgaggttacaactctccgccggcggg

SEQ ID NO: 477020 - DNA, 30 bp, Artificial Sequence
  Synthetic oligonucleotide
taacatgggatttttcgtctttcgggcggg

SEQ ID NO: 477021 - DNA, 30 bp, Artificial Sequence
  Synthetic oligonucleotide
ggttagtttttaattgggaggtgtggcggg

SEQ ID NO: 477022 - DNA, 30 bp, Artificial Sequence
  Synthetic oligonucleotide
agggctctatctttatattaaatatgcggg

SEQ ID NO: 477023 - DNA, 30 bp, Artificial Sequence
  Synthetic oligonucleotide
tatgcgcactcggaagcttacggttgcggg

SEQ ID NO: 477024 - DNA, 30 bp, Artificial Sequence
  Synthetic oligonucleotide
actgagtcgcggcacatagttgtttgcggg

SEQ ID NO: 477025 - DNA, 30 bp, Artificial Sequence
  Synthetic oligonucleotide
tagtgagttgtggattcataacgaatcggg

SEQ ID NO: 477026 - DNA, 30 bp, Artificial Sequence
  Synthetic oligonucleotide
gcgcacgatccggactgtaaaggaatcggg

SEQ ID NO: 477027 - DNA, 30 bp, Artificial Sequence
  Synthetic oligonucleotide
ccgcatttttcgtaatgttttcccatcggg

SEQ ID NO: 477028 - DNA, 30 bp, Artificial Sequence
  Synthetic oligonucleotide
gaccgaggtaggtatcgtactgccatcggg

SEQ ID NO: 477029 - DNA, 30 bp, Artificial Sequence
  Synthetic oligonucleotide
ggcgcttaaagggtgttaagtgccatcggg

SEQ ID NO: 477030 - DNA, 30 bp, Artificial Sequence
  Synthetic oligonucleotide
attaaaattgggaggggtggcccgatcggg

SEQ ID NO: 477031 - DNA, 30 bp, Artificial Sequence
  Synthetic oligonucleotide
tccgtgccaggcacatggcaatggatcggg

SEQ ID NO: 477032 - DNA, 30 bp, Artificial Sequence
  Synthetic oligonucleotide
tttagctgacaacgcaaaaactatatcggg

SEQ ID NO: 477033 - DNA, 30 bp, Artificial Sequence
  Synthetic oligonucleotide
ttattctaaaatttcacccaccttatcggg

SEQ ID NO: 477034 - DNA, 30 bp, Artificial Sequence
  Synthetic oligonucleotide
gtaaaggcgtgtccggggattgtcctcggg

SEQ ID NO: 477035 - DNA, 30 bp, Artificial Sequence
  Synthetic oligonucleotide
gcccttcggaatgcatgttcttagctcggg

SEQ ID NO: 477036 - DNA, 30 bp, Artificial Sequence
  Synthetic oligonucleotide
taaatcttggtaatggttgatttgctcggg

SEQ ID NO: 477037 - DNA, 30 bp, Artificial Sequence
  Synthetic oligonucleotide
gcagcgtacctgccaagcgctgcggtcggg

SEQ ID NO: 477038 - DNA, 30 bp, Artificial Sequence
  Synthetic oligonucleotide
ttatctaaggccattatctgctaattcggg

SEQ ID NO: 477039 - DNA, 30 bp, Artificial Sequence
  Synthetic oligonucleotide
ctcacccggatataaggatgattattcggg

SEQ ID NO: 477040 - DNA, 30 bp, Artificial Sequence
  Synthetic oligonucleotide
ctgctgaacggaattgtctaacagttcggg

SEQ ID NO: 477041 - DNA, 30 bp, Artificial Sequence
  Synthetic oligonucleotide
gggtcgtattaatgcatattcaggttcggg

SEQ ID NO: 477042 - DNA, 30 bp, Artificial Sequence
  Synthetic oligonucleotide
aattcctcgagtggttgtgtttatttcggg

SEQ ID NO: 477043 - DNA, 30 bp, Artificial Sequence
  Synthetic oligonucleotide
ttagtatagtctccttacgtaagaaagggg

SEQ ID NO: 477044 - DNA, 30 bp, Artificial Sequence
  Synthetic oligonucleotide
cctgtggggacggaattggggcggaagggg

SEQ ID NO: 477045 - DNA, 30 bp, Artificial Sequence
  Synthetic oligonucleotide
ttgttatttgaggcatgcgctctgaagggg

SEQ ID NO: 477046 - DNA, 31 bp, Artificial Sequence
  Synthetic oligonucleotide
tgtatttcatcatatcccgatgaataagggg

SEQ ID NO: 477047 - DNA, 30 bp, Artificial Sequence
  Synthetic oligonucleotide
atcgggacgttggcataaggaatccagggg

SEQ ID NO: 477048 - DNA, 30 bp, Artificial Sequence
  Synthetic oligonucleotide
cactaagcgttgggtcgcgaatggcagggg

SEQ ID NO: 477049 - DNA, 30 bp, Artificial Sequence
  Synthetic oligonucleotide
aggtactcgtttctcagacggctgcagggg

SEQ ID NO: 477050 - DNA, 30 bp, Artificial Sequence
  Synthetic oligonucleotide
tcttcttcttaagtgcgccatatagagggg

SEQ ID NO: 477051 - DNA, 30 bp, Artificial Sequence
  Synthetic oligonucleotide
ataatgtcaatcccctttagaatcgagggg

SEQ ID NO: 477052 - DNA, 30 bp, Artificial Sequence
  Synthetic oligonucleotide
ataccccggtgtcccgataggtcggagggg

SEQ ID NO: 477053 - DNA, 30 bp, Artificial Sequence
  Synthetic oligonucleotide
ctgcccgctctaagtgcatcaagggagggg

SEQ ID NO: 477054 - DNA, 30 bp, Artificial Sequence
  Synthetic oligonucleotide
tggcactaagtccaaggtgtggaatagggg

SEQ ID NO: 477055 - DNA, 30 bp, Artificial Sequence
  Synthetic oligonucleotide
gaggctcggctgtggccgcgctcatagggg

SEQ ID NO: 477056 - DNA, 30 bp, Artificial Sequence
  Synthetic oligonucleotide
agttggtggcttcggggaattatatagggg

SEQ ID NO: 477057 - DNA, 30 bp, Artificial Sequence
  Synthetic oligonucleotide
ggcacctgtagggttgagcgcacgtagggg

SEQ ID NO: 477058 - DNA, 30 bp, Artificial Sequence
  Synthetic oligonucleotide
agttcaggcaccctttcgtcagggtagggg

SEQ ID NO: 477059 - DNA, 30 bp, Artificial Sequence
  Synthetic oligonucleotide
cttcgtgggagatctagccgtcacacgggg

SEQ ID NO: 477060 - DNA, 30 bp, Artificial Sequence
  Synthetic oligonucleotide
tattataggatgaagaagccatccacgggg

SEQ ID NO: 477061 - DNA, 30 bp, Artificial Sequence
  Synthetic oligonucleotide
actgtggagcgcaccagccttaccccgggg

SEQ ID NO: 477062 - DNA, 30 bp, Artificial Sequence
  Synthetic oligonucleotide
atcctgtcactctggcctggggtcccgggg

SEQ ID NO: 477063 - DNA, 30 bp, Artificial Sequence
  Synthetic oligonucleotide
ccggggggcaacccgatgctacgtccgggg

SEQ ID NO: 477064 - DNA, 30 bp, Artificial Sequence
  Synthetic oligonucleotide
gcacgctaatatgctctgcgagcagcgggg

SEQ ID NO: 477065 - DNA, 30 bp, Artificial Sequence
  Synthetic oligonucleotide
cattagagggtagggtacgatacggcgggg

SEQ ID NO: 477066 - DNA, 30 bp, Artificial Sequence
  Synthetic oligonucleotide
tccgaacagtagacactgcggatggcgggg

SEQ ID NO: 477067 - DNA, 30 bp, Artificial Sequence
  Synthetic oligonucleotide
tgttagggaatccggggatatcattcgggg

SEQ ID NO: 477068 - DNA, 30 bp, Artificial Sequence
  Synthetic oligonucleotide
tctcacagtgtctgacggaggacaaggggg

SEQ ID NO: 477069 - DNA, 30 bp, Artificial Sequence
  Synthetic oligonucleotide
tgcacaatagaacggtaggcacagaggggg

SEQ ID NO: 477070 - DNA, 30 bp, Artificial Sequence
  Synthetic oligonucleotide
cggttcagtagttcactgcagccgaggggg

SEQ ID NO: 477071 - DNA, 30 bp, Artificial Sequence
  Synthetic oligonucleotide
atgtttactcagcgttagaccctgaggggg

SEQ ID NO: 477072 - DNA, 30 bp, Artificial Sequence
  Synthetic oligonucleotide
ccctacgggcattgtctcgatcgtaggggg

SEQ ID NO: 477073 - DNA, 30 bp, Artificial Sequence
  Synthetic oligonucleotide
ttgaacgaagcattatacatttgtaggggg

SEQ ID NO: 477074 - DNA, 30 bp, Artificial Sequence
  Synthetic oligonucleotide
ggataacggattctatggcagttacggggg

SEQ ID NO: 477075 - DNA, 30 bp, Artificial Sequence
  Synthetic oligonucleotide
gtccgaaaggtcccccgccatcaccggggg

SEQ ID NO: 477076 - DNA, 30 bp, Artificial Sequence
  Synthetic oligonucleotide
agtcggtccgcccgcggtcagagccggggg

SEQ ID NO: 477077 - DNA, 30 bp, Artificial Sequence
  Synthetic oligonucleotide
ttgcaccccggattcaaaggaatgcggggg

SEQ ID NO: 477078 - DNA, 30 bp, Artificial Sequence
  Synthetic oligonucleotide
gtatctctggttgggggtgaggatcggggg

SEQ ID NO: 477079 - DNA, 30 bp, Artificial Sequence
  Synthetic oligonucleotide
ccctactggtttacagtcgcatatcggggg

SEQ ID NO: 477080 - DNA, 30 bp, Artificial Sequence
  Synthetic oligonucleotide
cagattaatactggtttctgagctcggggg

SEQ ID NO: 477081 - DNA, 30 bp, Artificial Sequence
  Synthetic oligonucleotide
aaacgccagccccagcctaagtgtcggggg

SEQ ID NO: 477082 - DNA, 30 bp, Artificial Sequence
  Synthetic oligonucleotide
cgaaagtttttgtagcaccttacagggggg

SEQ ID NO: 477083 - DNA, 30 bp, Artificial Sequence
  Synthetic oligonucleotide
ttgcatgttgccgggccggtgggggggggg

SEQ ID NO: 477084 - DNA, 30 bp, Artificial Sequence
  Synthetic oligonucleotide
gtcttactacgtcgcaagaattatatgggg

SEQ ID NO: 477085 - DNA, 30 bp, Artificial Sequence
  Synthetic oligonucleotide
cttactaagtcgtagttatccattatgggg

SEQ ID NO: 477086 - DNA, 30 bp, Artificial Sequence
  Synthetic oligonucleotide
gttcttttagatgtagaggtcccactgggg

SEQ ID NO: 477087 - DNA, 30 bp, Artificial Sequence
  Synthetic oligonucleotide
taccaatattgggatagaacaatactgggg

SEQ ID NO: 477088 - DNA, 30 bp, Artificial Sequence
  Synthetic oligonucleotide
gtggctggccaacgggacacaatactgggg

SEQ ID NO: 477089 - DNA, 30 bp, Artificial Sequence
  Synthetic oligonucleotide
cctaactgcgcagccccttggttgctgggg

SEQ ID NO: 477090 - DNA, 30 bp, Artificial Sequence
  Synthetic oligonucleotide
gatggtgagatcgcaaccccgcttctgggg

SEQ ID NO: 477091 - DNA, 30 bp, Artificial Sequence
  Synthetic oligonucleotide
aaagtctagccggtttgacgcgttctgggg

SEQ ID NO: 477092 - DNA, 30 bp, Artificial Sequence
  Synthetic oligonucleotide
cccggaatgtgtgtcaactttcgggtgggg

SEQ ID NO: 477093 - DNA, 30 bp, Artificial Sequence
  Synthetic oligonucleotide
ttggttattttcattttttatcgattgggg

SEQ ID NO: 477094 - DNA, 30 bp, Artificial Sequence
  Synthetic oligonucleotide
aatatcattcggcctcgctgatcgttgggg

SEQ ID NO: 477095 - DNA, 30 bp, Artificial Sequence
  Synthetic oligonucleotide
agtaccatttcactttgccagatgttgggg

SEQ ID NO: 477096 - DNA, 30 bp, Artificial Sequence
  Synthetic oligonucleotide
atatgtccttatatgctcttaaacaatggg

SEQ ID NO: 477097 - DNA, 30 bp, Artificial Sequence
  Synthetic oligonucleotide
aatttagtgggtgcacgcacaggcaatggg

SEQ ID NO: 477098 - DNA, 30 bp, Artificial Sequence
  Synthetic oligonucleotide
cccccgtatgggcccgtcacgtataatggg

SEQ ID NO: 477099 - DNA, 30 bp, Artificial Sequence
  Synthetic oligonucleotide
gattcaacagagccctttttccgtaatggg

SEQ ID NO: 477100 - DNA, 30 bp, Artificial Sequence
  Synthetic oligonucleotide
agattgttagtctgatttaattgtaatggg

SEQ ID NO: 477101 - DNA, 30 bp, Artificial Sequence
  Synthetic oligonucleotide
ttggcaagaccgcagttctctttccatggg

SEQ ID NO: 477102 - DNA, 30 bp, Artificial Sequence
  Synthetic oligonucleotide
ctagtgatttcactggcgccgtggcatggg

SEQ ID NO: 477103 - DNA, 30 bp, Artificial Sequence
  Synthetic oligonucleotide
gtaataattggtcctcttatttggcatggg

SEQ ID NO: 477104 - DNA, 30 bp, Artificial Sequence
  Synthetic oligonucleotide
tttgtgcggcgtactcggaacgttcatggg

SEQ ID NO: 477105 - DNA, 30 bp, Artificial Sequence
  Synthetic oligonucleotide
aacataacggatccgagggaaggcgatggg

SEQ ID NO: 477106 - DNA, 30 bp, Artificial Sequence
  Synthetic oligonucleotide
tctcaaagtgcacactcttaaggggatggg

SEQ ID NO: 477107 - DNA, 30 bp, Artificial Sequence
  Synthetic oligonucleotide
atagatgcgctcgcaggcacaggatatggg

SEQ ID NO: 477108 - DNA, 30 bp, Artificial Sequence
  Synthetic oligonucleotide
actggtacgtacgccccccgcacgtatggg

SEQ ID NO: 477109 - DNA, 30 bp, Artificial Sequence
  Synthetic oligonucleotide
gggtctaagctggagaagtcgatgtatggg

SEQ ID NO: 477110 - DNA, 30 bp, Artificial Sequence
  Synthetic oligonucleotide
gtgctctagatagtcacgcaagcttatggg

SEQ ID NO: 477111 - DNA, 30 bp, Artificial Sequence
  Synthetic oligonucleotide
gcaatcagtattgacatagatataactggg

SEQ ID NO: 477112 - DNA, 30 bp, Artificial Sequence
  Synthetic oligonucleotide
gtcatcagtctgtacacgccagtaactggg

SEQ ID NO: 477113 - DNA, 28 bp, Artificial Sequence
  Synthetic oligonucleotide
tgtaccactctcttcctgtcccactggg

SEQ ID NO: 477114 - DNA, 30 bp, Artificial Sequence
  Synthetic oligonucleotide
cttctagaaaggcgctgacatacgactggg

SEQ ID NO: 477115 - DNA, 30 bp, Artificial Sequence
  Synthetic oligonucleotide
accacaaccatatagcggctccatactggg

SEQ ID NO: 477116 - DNA, 30 bp, Artificial Sequence
  Synthetic oligonucleotide
cctttcctctgtgatttctgttatactggg

SEQ ID NO: 477117 - DNA, 30 bp, Artificial Sequence
  Synthetic oligonucleotide
gaatatgcagtacgcaacttaagtactggg

SEQ ID NO: 477118 - DNA, 30 bp, Artificial Sequence
  Synthetic oligonucleotide
tcaccctggcactgagggaccctccctggg

SEQ ID NO: 477119 - DNA, 30 bp, Artificial Sequence
  Synthetic oligonucleotide
ctagtcttatgagcgcgagttcggcctggg

SEQ ID NO: 477120 - DNA, 30 bp, Artificial Sequence
  Synthetic oligonucleotide
attgttcgtatgaactcggggcctcctggg

SEQ ID NO: 477121 - DNA, 30 bp, Artificial Sequence
  Synthetic oligonucleotide
tgtccgcccccgtttgcatacattcctggg

SEQ ID NO: 477122 - DNA, 30 bp, Artificial Sequence
  Synthetic oligonucleotide
gattactattcgtctgccattatagctggg

SEQ ID NO: 477123 - DNA, 30 bp, Artificial Sequence
  Synthetic oligonucleotide
ccaacccgtcggccgtagactgccgctggg

SEQ ID NO: 477124 - DNA, 30 bp, Artificial Sequence
  Synthetic oligonucleotide
cttggccatcgtacttatatttgatctggg

SEQ ID NO: 477125 - DNA, 30 bp, Artificial Sequence
  Synthetic oligonucleotide
cttgttcttcagatgggggtgggcagtggg

SEQ ID NO: 477126 - DNA, 30 bp, Artificial Sequence
  Synthetic oligonucleotide
gccagaagtgtcaataagggccagagtggg

SEQ ID NO: 477127 - DNA, 30 bp, Artificial Sequence
  Synthetic oligonucleotide
gctttttcagggggcatgtgtcagagtggg

SEQ ID NO: 477128 - DNA, 30 bp, Artificial Sequence
  Synthetic oligonucleotide
cgcagctctaaacatagagcctcgagtggg

SEQ ID NO: 477129 - DNA, 30 bp, Artificial Sequence
  Synthetic oligonucleotide
gttcccgggggtgggttagatctgagtggg

SEQ ID NO: 477130 - DNA, 30 bp, Artificial Sequence
  Synthetic oligonucleotide
agtttataatatccaacaggtggtagtggg

SEQ ID NO: 477131 - DNA, 30 bp, Artificial Sequence
  Synthetic oligonucleotide
ttacatgtagtgaggctccgcggacgtggg

SEQ ID NO: 477132 - DNA, 30 bp, Artificial Sequence
  Synthetic oligonucleotide
actggcacatacgcacaacccttacgtggg

SEQ ID NO: 477133 - DNA, 30 bp, Artificial Sequence
  Synthetic oligonucleotide
gtttttcgttttgttgtggctatgcgtggg

SEQ ID NO: 477134 - DNA, 30 bp, Artificial Sequence
  Synthetic oligonucleotide
gtagcctgtatatttaggtcatccggtggg

SEQ ID NO: 477135 - DNA, 30 bp, Artificial Sequence
  Synthetic oligonucleotide
aggtaatataagtcacccacgtggggtggg

SEQ ID NO: 477136 - DNA, 30 bp, Artificial Sequence
  Synthetic oligonucleotide
gtgtgagcgggtccaccttcattgggtggg

SEQ ID NO: 477137 - DNA, 30 bp, Artificial Sequence
  Synthetic oligonucleotide
gtcgacgggatcgtcaacccacaatgtggg

SEQ ID NO: 477138 - DNA, 30 bp, Artificial Sequence
  Synthetic oligonucleotide
gtatcaaatagtccaatattttattgtggg

SEQ ID NO: 477139 - DNA, 30 bp, Artificial Sequence
  Synthetic oligonucleotide
caattccgaagtccgctttttttttgtggg

SEQ ID NO: 477140 - DNA, 30 bp, Artificial Sequence
  Synthetic oligonucleotide
tagcattacgttttaaagtaagcaattggg

SEQ ID NO: 477141 - DNA, 30 bp, Artificial Sequence
  Synthetic oligonucleotide
ttcgggcctatctgcccgttgtgaattggg

SEQ ID NO: 477142 - DNA, 30 bp, Artificial Sequence
  Synthetic oligonucleotide
agtaaataacgccgacccaagagcattggg

SEQ ID NO: 477143 - DNA, 30 bp, Artificial Sequence
  Synthetic oligonucleotide
atgtcgcgcaacccagttccacgcattggg

SEQ ID NO: 477144 - DNA, 30 bp, Artificial Sequence
  Synthetic oligonucleotide
gagttccgcctggcggctgttgagattggg

SEQ ID NO: 477145 - DNA, 30 bp, Artificial Sequence
  Synthetic oligonucleotide
cccaaaggtatttgaatcctaaggattggg

SEQ ID NO: 477146 - DNA, 30 bp, Artificial Sequence
  Synthetic oligonucleotide
tcagtactgcgccttaatcttgggattggg

SEQ ID NO: 477147 - DNA, 30 bp, Artificial Sequence
  Synthetic oligonucleotide
tccccgcgattgtcgtaatcgcatattggg

SEQ ID NO: 477148 - DNA, 30 bp, Artificial Sequence
  Synthetic oligonucleotide
tgctggggtggttagcgcccacctattggg

SEQ ID NO: 477149 - DNA, 30 bp, Artificial Sequence
  Synthetic oligonucleotide
cattagccaatatgccgaccgtttattggg

SEQ ID NO: 477150 - DNA, 31 bp, Artificial Sequence
  Synthetic oligonucleotide
aagttattggggttcctagcattttattggg

SEQ ID NO: 477151 - DNA, 30 bp, Artificial Sequence
  Synthetic oligonucleotide
ctttagggaaggcaatcgaaatcccttggg

SEQ ID NO: 477152 - DNA, 30 bp, Artificial Sequence
  Synthetic oligonucleotide
aacttattctggttttctattcgccttggg

SEQ ID NO: 477153 - DNA, 30 bp, Artificial Sequence
  Synthetic oligonucleotide
tttctatccggattggagagtgtccttggg

SEQ ID NO: 477154 - DNA, 30 bp, Artificial Sequence
  Synthetic oligonucleotide
ctggtatttcatcctattgcgacgcttggg

SEQ ID NO: 477155 - DNA, 30 bp, Artificial Sequence
  Synthetic oligonucleotide
tagccgtatatacgacgcaacgcgcttggg

SEQ ID NO: 477156 - DNA, 30 bp, Artificial Sequence
  Synthetic oligonucleotide
tgaaggcgggggagggagggggcgcttggg

SEQ ID NO: 477157 - DNA, 30 bp, Artificial Sequence
  Synthetic oligonucleotide
aacaaagattgaagtatgtaaaatcttggg

SEQ ID NO: 477158 - DNA, 30 bp, Artificial Sequence
  Synthetic oligonucleotide
gtgtgaattggctaggtttctcatcttggg

SEQ ID NO: 477159 - DNA, 30 bp, Artificial Sequence
  Synthetic oligonucleotide
agatatttctacatcccccggactcttggg

SEQ ID NO: 477160 - DNA, 30 bp, Artificial Sequence
  Synthetic oligonucleotide
cggtctctacaagatggggtcgaggttggg

SEQ ID NO: 477161 - DNA, 31 bp, Artificial Sequence
  Synthetic oligonucleotide
agggtgaaccgaagggggtcacccggttggg

SEQ ID NO: 477162 - DNA, 30 bp, Artificial Sequence
  Synthetic oligonucleotide
gaaatttctccacaggcaatctttgttggg

SEQ ID NO: 477163 - DNA, 30 bp, Artificial Sequence
  Synthetic oligonucleotide
taatgtgcgacaaaccttccgttatttggg

SEQ ID NO: 477164 - DNA, 30 bp, Artificial Sequence
  Synthetic oligonucleotide
ttataattagtatttgataggttatttggg

SEQ ID NO: 477165 - DNA, 30 bp, Artificial Sequence
  Synthetic oligonucleotide
agggctccgggatttagtctttcgtttggg

SEQ ID NO: 477166 - DNA, 30 bp, Artificial Sequence
  Synthetic oligonucleotide
taaggcggagcgcacctttatcaaaaatgg

SEQ ID NO: 477167 - DNA, 30 bp, Artificial Sequence
  Synthetic oligonucleotide
ggtgtccaataaggtcagcagcacaaatgg

SEQ ID NO: 477168 - DNA, 30 bp, Artificial Sequence
  Synthetic oligonucleotide
caaaagtttacgacagctattcagaaatgg

SEQ ID NO: 477169 - DNA, 30 bp, Artificial Sequence
  Synthetic oligonucleotide
ttccggtttggagcactttcagcgaaatgg

SEQ ID NO: 477170 - DNA, 30 bp, Artificial Sequence
  Synthetic oligonucleotide
aattgacagtagatcatatgttggaaatgg

SEQ ID NO: 477171 - DNA, 30 bp, Artificial Sequence
  Synthetic oligonucleotide
tatatgtacgtgcgcatactcgtgaaatgg

SEQ ID NO: 477172 - DNA, 30 bp, Artificial Sequence
  Synthetic oligonucleotide
tggcctgccacgctctagggtggacaatgg

SEQ ID NO: 477173 - DNA, 30 bp, Artificial Sequence
  Synthetic oligonucleotide
gcaagcacgaccactagtccttgccaatgg

SEQ ID NO: 477174 - DNA, 30 bp, Artificial Sequence
  Synthetic oligonucleotide
ttatagtcgttttgcggtcaccggcaatgg

SEQ ID NO: 477175 - DNA, 30 bp, Artificial Sequence
  Synthetic oligonucleotide
acaaacactcattcagccccgcggcaatgg

SEQ ID NO: 477176 - DNA, 30 bp, Artificial Sequence
  Synthetic oligonucleotide
gtccgtatagtgctgatcaaatatcaatgg

SEQ ID NO: 477177 - DNA, 30 bp, Artificial Sequence
  Synthetic oligonucleotide
gctttaaaaggcatgcaaacttcagaatgg

SEQ ID NO: 477178 - DNA, 30 bp, Artificial Sequence
  Synthetic oligonucleotide
ctgtaatgcgtttatttctttgtcgaatgg

SEQ ID NO: 477179 - DNA, 30 bp, Artificial Sequence
  Synthetic oligonucleotide
ctaacgatcgaagaagcaccaagggaatgg

SEQ ID NO: 477180 - DNA, 30 bp, Artificial Sequence
  Synthetic oligonucleotide
acatttcggtacgctaggcttaatgaatgg

SEQ ID NO: 477181 - DNA, 30 bp, Artificial Sequence
  Synthetic oligonucleotide
actaagcagcaccgatggccaagtgaatgg

SEQ ID NO: 477182 - DNA, 30 bp, Artificial Sequence
  Synthetic oligonucleotide
tggatatatcgcacggcatacccctaatgg

SEQ ID NO: 477183 - DNA, 30 bp, Artificial Sequence
  Synthetic oligonucleotide
tatgactaattactttctaaccagtaatgg

SEQ ID NO: 477184 - DNA, 30 bp, Artificial Sequence
  Synthetic oligonucleotide
gagtacactcaaactgtcagcatttaatgg

SEQ ID NO: 477185 - DNA, 30 bp, Artificial Sequence
  Synthetic oligonucleotide
atgggaaatataaaaaggtgtgtttaatgg

SEQ ID NO: 477186 - DNA, 30 bp, Artificial Sequence
  Synthetic oligonucleotide
attaaactcattcgattgaaattttaatgg

SEQ ID NO: 477187 - DNA, 30 bp, Artificial Sequence
  Synthetic oligonucleotide
attagcgacgtatacatcttaaaaacatgg

SEQ ID NO: 477188 - DNA, 30 bp, Artificial Sequence
  Synthetic oligonucleotide
aagaattcaacaaacctagttacaacatgg

SEQ ID NO: 477189 - DNA, 30 bp, Artificial Sequence
  Synthetic oligonucleotide
ttttgtgtcggccaatggcgggtcacatgg

SEQ ID NO: 477190 - DNA, 30 bp, Artificial Sequence
  Synthetic oligonucleotide
caaagcaggctcgttgaagtcgtgacatgg

SEQ ID NO: 477191 - DNA, 30 bp, Artificial Sequence
  Synthetic oligonucleotide
tgcattctcgcgtaagacgtcactacatgg

SEQ ID NO: 477192 - DNA, 30 bp, Artificial Sequence
  Synthetic oligonucleotide
aaatttcacagaggattctcgcaaccatgg

SEQ ID NO: 477193 - DNA, 30 bp, Artificial Sequence
  Synthetic oligonucleotide
atagattacggttgtttcattcaaccatgg

SEQ ID NO: 477194 - DNA, 30 bp, Artificial Sequence
  Synthetic oligonucleotide
aggagttatagtaccccagttcaaccatgg

SEQ ID NO: 477195 - DNA, 30 bp, Artificial Sequence
  Synthetic oligonucleotide
cacgtacaggtccggacaccgagaccatgg

SEQ ID NO: 477196 - DNA, 30 bp, Artificial Sequence
  Synthetic oligonucleotide
ctggaatcataaatctgcgaaggaccatgg

SEQ ID NO: 477197 - DNA, 30 bp, Artificial Sequence
  Synthetic oligonucleotide
aattaatatctaggtgatcgctgcccatgg

SEQ ID NO: 477198 - DNA, 30 bp, Artificial Sequence
  Synthetic oligonucleotide
aactagcgactggccgaagcaacgccatgg

SEQ ID NO: 477199 - DNA, 30 bp, Artificial Sequence
  Synthetic oligonucleotide
atccacactccaggctacggacggccatgg

SEQ ID NO: 477200 - DNA, 30 bp, Artificial Sequence
  Synthetic oligonucleotide
cgtgaatcaatctgagtcaatcggccatgg

SEQ ID NO: 477201 - DNA, 30 bp, Artificial Sequence
  Synthetic oligonucleotide
tatcacacgtcgcgagacctcattccatgg

SEQ ID NO: 477202 - DNA, 30 bp, Artificial Sequence
  Synthetic oligonucleotide
tttagtagttcgatacgcagtgaagcatgg

SEQ ID NO: 477203 - DNA, 30 bp, Artificial Sequence
  Synthetic oligonucleotide
tacggaagagggaccatttcataagcatgg

SEQ ID NO: 477204 - DNA, 30 bp, Artificial Sequence
  Synthetic oligonucleotide
gatttgaccgccattggcttgtgcgcatgg

SEQ ID NO: 477205 - DNA, 30 bp, Artificial Sequence
  Synthetic oligonucleotide
ctgacatttattcggcaggatgtcgcatgg

SEQ ID NO: 477206 - DNA, 30 bp, Artificial Sequence
  Synthetic oligonucleotide
cattgtctcctataattcgagtgggcatgg

SEQ ID NO: 477207 - DNA, 30 bp, Artificial Sequence
  Synthetic oligonucleotide
aagaagtgccatatatatttattggcatgg

SEQ ID NO: 477208 - DNA, 30 bp, Artificial Sequence
  Synthetic oligonucleotide
acaaaatggtaaattaatcccgaatcatgg

SEQ ID NO: 477209 - DNA, 30 bp, Artificial Sequence
  Synthetic oligonucleotide
gaattttgagagatcattgcatcatcatgg

SEQ ID NO: 477210 - DNA, 30 bp, Artificial Sequence
  Synthetic oligonucleotide
attataaggtatgccatgatatcatcatgg

SEQ ID NO: 477211 - DNA, 30 bp, Artificial Sequence
  Synthetic oligonucleotide
aaagacttagtttcccaccttggatcatgg

SEQ ID NO: 477212 - DNA, 30 bp, Artificial Sequence
  Synthetic oligonucleotide
atgtcatgtcgactgtacgctccctcatgg

SEQ ID NO: 477213 - DNA, 30 bp, Artificial Sequence
  Synthetic oligonucleotide
tgtcctttagagctgggtcagtcctcatgg

SEQ ID NO: 477214 - DNA, 30 bp, Artificial Sequence
  Synthetic oligonucleotide
gagtatctcttatgtgagttgctttcatgg

SEQ ID NO: 477215 - DNA, 30 bp, Artificial Sequence
  Synthetic oligonucleotide
actcaaggatgtcttgataggaaaagatgg

SEQ ID NO: 477216 - DNA, 30 bp, Artificial Sequence
  Synthetic oligonucleotide
gtccgggctatcgccaggttattaagatgg

SEQ ID NO: 477217 - DNA, 30 bp, Artificial Sequence
  Synthetic oligonucleotide
gcaccctcgaaggagaaagaactgagatgg

SEQ ID NO: 477218 - DNA, 30 bp, Artificial Sequence
  Synthetic oligonucleotide
agcgctgcttattctcatggtgatagatgg

SEQ ID NO: 477219 - DNA, 30 bp, Artificial Sequence
  Synthetic oligonucleotide
ttcgcccaggtgggtctctttgatagatgg

SEQ ID NO: 477220 - DNA, 30 bp, Artificial Sequence
  Synthetic oligonucleotide
gccaccccggggggccgggaccgacgatgg

SEQ ID NO: 477221 - DNA, 30 bp, Artificial Sequence
  Synthetic oligonucleotide
gtgtagctttaagtgacattaaagcgatgg

SEQ ID NO: 477222 - DNA, 30 bp, Artificial Sequence
  Synthetic oligonucleotide
gatagtatgaactttactcggccgcgatgg

SEQ ID NO: 477223 - DNA, 30 bp, Artificial Sequence
  Synthetic oligonucleotide
gcaccacagaataggttgtatccgcgatgg

SEQ ID NO: 477224 - DNA, 30 bp, Artificial Sequence
  Synthetic oligonucleotide
ggccctatgtgaaaaatagggactcgatgg

SEQ ID NO: 477225 - DNA, 30 bp, Artificial Sequence
  Synthetic oligonucleotide
atttctctagggtcagtccatagtcgatgg

SEQ ID NO: 477226 - DNA, 30 bp, Artificial Sequence
  Synthetic oligonucleotide
gttaatgcagaagtcgacttgagaggatgg

SEQ ID NO: 477227 - DNA, 30 bp, Artificial Sequence
  Synthetic oligonucleotide
gccacaggcacttcatatactgtaggatgg

SEQ ID NO: 477228 - DNA, 30 bp, Artificial Sequence
  Synthetic oligonucleotide
ggccccgtaatatattcaagggccggatgg

SEQ ID NO: 477229 - DNA, 30 bp, Artificial Sequence
  Synthetic oligonucleotide
ggtttacattcccaagcgacgctcggatgg

SEQ ID NO: 477230 - DNA, 30 bp, Artificial Sequence
  Synthetic oligonucleotide
gaattagaggggcggatcggggggggatgg

SEQ ID NO: 477231 - DNA, 30 bp, Artificial Sequence
  Synthetic oligonucleotide
aaaagcatccagcccttcattgctggatgg

SEQ ID NO: 477232 - DNA, 30 bp, Artificial Sequence
  Synthetic oligonucleotide
tggatgaagaacccacccggcatgtgatgg

SEQ ID NO: 477233 - DNA, 30 bp, Artificial Sequence
  Synthetic oligonucleotide
tattgcttcgtccttgtcgagaattgatgg

SEQ ID NO: 477234 - DNA, 30 bp, Artificial Sequence
  Synthetic oligonucleotide
tcccgcagtgctgcagaaggataaatatgg

SEQ ID NO: 477235 - DNA, 30 bp, Artificial Sequence
  Synthetic oligonucleotide
tatttactctcaacaaatcgtcgaatatgg

SEQ ID NO: 477236 - DNA, 30 bp, Artificial Sequence
  Synthetic oligonucleotide
agatagtaatctctgagttctatcatatgg

SEQ ID NO: 477237 - DNA, 30 bp, Artificial Sequence
  Synthetic oligonucleotide
gtaatggttgtagaattcacgaggatatgg

SEQ ID NO: 477238 - DNA, 30 bp, Artificial Sequence
  Synthetic oligonucleotide
atagcaaacggcagctgatctgtgatatgg

SEQ ID NO: 477239 - DNA, 30 bp, Artificial Sequence
  Synthetic oligonucleotide
gcgcactgcacaaaccgtcccaatatatgg

SEQ ID NO: 477240 - DNA, 30 bp, Artificial Sequence
  Synthetic oligonucleotide
tcgccttaggacgtggggtcataactatgg

SEQ ID NO: 477241 - DNA, 30 bp, Artificial Sequence
  Synthetic oligonucleotide
cagtattaagttgaagtactaaacctatgg

SEQ ID NO: 477242 - DNA, 30 bp, Artificial Sequence
  Synthetic oligonucleotide
agtgttcgtgacgaaagccgcagcctatgg

SEQ ID NO: 477243 - DNA, 30 bp, Artificial Sequence
  Synthetic oligonucleotide
ggtccccaatatttaaatcttaagctatgg

SEQ ID NO: 477244 - DNA, 30 bp, Artificial Sequence
  Synthetic oligonucleotide
ggggttgtaacgacacagcagccgctatgg

SEQ ID NO: 477245 - DNA, 30 bp, Artificial Sequence
  Synthetic oligonucleotide
gtagtcgcagtagattattaagccgtatgg

SEQ ID NO: 477246 - DNA, 30 bp, Artificial Sequence
  Synthetic oligonucleotide
gtcggttaatgtagcaaccttttcgtatgg

SEQ ID NO: 477247 - DNA, 30 bp, Artificial Sequence
  Synthetic oligonucleotide
cagtgtagatgcaggttaagtgctgtatgg

SEQ ID NO: 477248 - DNA, 30 bp, Artificial Sequence
  Synthetic oligonucleotide
gttatacccgggaagattctaagtgtatgg

SEQ ID NO: 477249 - DNA, 30 bp, Artificial Sequence
  Synthetic oligonucleotide
gagttcgcttgtagaggtggttttgtatgg

SEQ ID NO: 477250 - DNA, 30 bp, Artificial Sequence
  Synthetic oligonucleotide
agcgcaacggcggcctgaaaataattatgg

SEQ ID NO: 477251 - DNA, 30 bp, Artificial Sequence
  Synthetic oligonucleotide
agaaagtgattttggttactactattatgg

SEQ ID NO: 477252 - DNA, 29 bp, Artificial Sequence
  Synthetic oligonucleotide
atagaagggtcttcgatgtaaccttatgg

SEQ ID NO: 477253 - DNA, 30 bp, Artificial Sequence
  Synthetic oligonucleotide
agaaccgtcgcacattaactattgttatgg

SEQ ID NO: 477254 - DNA, 30 bp, Artificial Sequence
  Synthetic oligonucleotide
tgctaacgggtaaccttcaccgatttatgg

SEQ ID NO: 477255 - DNA, 30 bp, Artificial Sequence
  Synthetic oligonucleotide
tgtagtccagaaggaaacactttcaactgg

SEQ ID NO: 477256 - DNA, 30 bp, Artificial Sequence
  Synthetic oligonucleotide
gcaccgcatggtatgcgtaagactaactgg

SEQ ID NO: 477257 - DNA, 30 bp, Artificial Sequence
  Synthetic oligonucleotide
aagcgccactgacccgatccaattaactgg

SEQ ID NO: 477258 - DNA, 30 bp, Artificial Sequence
  Synthetic oligonucleotide
atagtaattgaagtgaaattatcacactgg

SEQ ID NO: 477259 - DNA, 30 bp, Artificial Sequence
  Synthetic oligonucleotide
acaccctaatttctgtggcggctacactgg

SEQ ID NO: 477260 - DNA, 30 bp, Artificial Sequence
  Synthetic oligonucleotide
gggtaatcgcgcacatgtctgtggcactgg

SEQ ID NO: 477261 - DNA, 30 bp, Artificial Sequence
  Synthetic oligonucleotide
tgtctggaagtcgttagcatattgcactgg

SEQ ID NO: 477262 - DNA, 30 bp, Artificial Sequence
  Synthetic oligonucleotide
cgcatgacagctataatttattccgactgg

SEQ ID NO: 477263 - DNA, 30 bp, Artificial Sequence
  Synthetic oligonucleotide
ggaagacggtaccattgccgccgggactgg

SEQ ID NO: 477264 - DNA, 30 bp, Artificial Sequence
  Synthetic oligonucleotide
ttcgcagcaattcagaatagccctgactgg

SEQ ID NO: 477265 - DNA, 30 bp, Artificial Sequence
  Synthetic oligonucleotide
ccaagtggggtgttggtgtgattctactgg

SEQ ID NO: 477266 - DNA, 30 bp, Artificial Sequence
  Synthetic oligonucleotide
gatctggacgcactcgacgccgggtactgg

SEQ ID NO: 477267 - DNA, 30 bp, Artificial Sequence
  Synthetic oligonucleotide
tgctgggtttctctgccagcccaaacctgg

SEQ ID NO: 477268 - DNA, 30 bp, Artificial Sequence
  Synthetic oligonucleotide
gcaatctgacttatgcgcgggcgcacctgg

SEQ ID NO: 477269 - DNA, 30 bp, Artificial Sequence
  Synthetic oligonucleotide
tatacctataggaccggatattatacctgg

SEQ ID NO: 477270 - DNA, 30 bp, Artificial Sequence
  Synthetic oligonucleotide
tcggtcgcggcgcggcccggccgtacctgg

SEQ ID NO: 477271 - DNA, 30 bp, Artificial Sequence
  Synthetic oligonucleotide
aactcagctgttcgcgttcgaaacccctgg

SEQ ID NO: 477272 - DNA, 30 bp, Artificial Sequence
  Synthetic oligonucleotide
cttctctgctgagagaaacgtgcgccctgg

SEQ ID NO: 477273 - DNA, 30 bp, Artificial Sequence
  Synthetic oligonucleotide
aatatgccatgtgtgtacgaagatccctgg

SEQ ID NO: 477274 - DNA, 30 bp, Artificial Sequence
  Synthetic oligonucleotide
taatctttgcgctgcggttgtgaagcctgg

SEQ ID NO: 477275 - DNA, 30 bp, Artificial Sequence
  Synthetic oligonucleotide
acacatacatactcattgacatacgcctgg

SEQ ID NO: 477276 - DNA, 30 bp, Artificial Sequence
  Synthetic oligonucleotide
acctagcgggtgtccgacgattagtcctgg

SEQ ID NO: 477277 - DNA, 30 bp, Artificial Sequence
  Synthetic oligonucleotide
aaagttatatgctgcccccgtacttcctgg

SEQ ID NO: 477278 - DNA, 30 bp, Artificial Sequence
  Synthetic oligonucleotide
gaacaccgatactcgaggatcgcgagctgg

SEQ ID NO: 477279 - DNA, 30 bp, Artificial Sequence
  Synthetic oligonucleotide
aataagtgccagaggcactatcctagctgg

SEQ ID NO: 477280 - DNA, 30 bp, Artificial Sequence
  Synthetic oligonucleotide
ccttactatgctgcagtctgcaaacgctgg

SEQ ID NO: 477281 - DNA, 30 bp, Artificial Sequence
  Synthetic oligonucleotide
tcactacctccaggagatgattagcgctgg

SEQ ID NO: 477282 - DNA, 30 bp, Artificial Sequence
  Synthetic oligonucleotide
gcatggggtctaacggttaggacaggctgg

SEQ ID NO: 477283 - DNA, 30 bp, Artificial Sequence
  Synthetic oligonucleotide
gaaaagattctgaaggctctgggtggctgg

SEQ ID NO: 477284 - DNA, 30 bp, Artificial Sequence
  Synthetic oligonucleotide
aatagcgctcatacagttcaattatgctgg

SEQ ID NO: 477285 - DNA, 30 bp, Artificial Sequence
  Synthetic oligonucleotide
agagccaaggggtcacacagccactgctgg

SEQ ID NO: 477286 - DNA, 30 bp, Artificial Sequence
  Synthetic oligonucleotide
tgacggaagtaatatgccgctccctgctgg

SEQ ID NO: 477287 - DNA, 30 bp, Artificial Sequence
  Synthetic oligonucleotide
tggcatgtgccaggggatcatgagtgctgg

SEQ ID NO: 477288 - DNA, 30 bp, Artificial Sequence
  Synthetic oligonucleotide
aacctatgcatgcacacggcgtgttgctgg

SEQ ID NO: 477289 - DNA, 30 bp, Artificial Sequence
  Synthetic oligonucleotide
taagactggtgtctatatttacccatctgg

SEQ ID NO: 477290 - DNA, 30 bp, Artificial Sequence
  Synthetic oligonucleotide
gtgacacggtctctggacgcattcatctgg

SEQ ID NO: 477291 - DNA, 30 bp, Artificial Sequence
  Synthetic oligonucleotide
gccgcttttaaccctttgtgcgagatctgg

SEQ ID NO: 477292 - DNA, 30 bp, Artificial Sequence
  Synthetic oligonucleotide
ggatgtttatactgttgggcctctatctgg

SEQ ID NO: 477293 - DNA, 30 bp, Artificial Sequence
  Synthetic oligonucleotide
gccactcctttgcaacagccccaactctgg

SEQ ID NO: 477294 - DNA, 30 bp, Artificial Sequence
  Synthetic oligonucleotide
ttcacaacccagaactagatattgctctgg

SEQ ID NO: 477295 - DNA, 30 bp, Artificial Sequence
  Synthetic oligonucleotide
tagattcacccaccatagatgcgtctctgg

SEQ ID NO: 477296 - DNA, 30 bp, Artificial Sequence
  Synthetic oligonucleotide
ctctcttttagggtcgcaggtatagtctgg

SEQ ID NO: 477297 - DNA, 30 bp, Artificial Sequence
  Synthetic oligonucleotide
aaaagatgttaaagatatgggtcggtctgg

SEQ ID NO: 477298 - DNA, 30 bp, Artificial Sequence
  Synthetic oligonucleotide
gttacttgcgctcgaggtgcatatgtctgg

SEQ ID NO: 477299 - DNA, 30 bp, Artificial Sequence
  Synthetic oligonucleotide
tcaggagacgagtggcatgaacacttctgg

SEQ ID NO: 477300 - DNA, 30 bp, Artificial Sequence
  Synthetic oligonucleotide
tcccacagtggaatagttccccggttctgg

SEQ ID NO: 477301 - DNA, 30 bp, Artificial Sequence
  Synthetic oligonucleotide
aaaactgatttgatacagagttctttctgg

SEQ ID NO: 477302 - DNA, 30 bp, Artificial Sequence
  Synthetic oligonucleotide
aaacccctgagaccggcgattagaaagtgg

SEQ ID NO: 477303 - DNA, 30 bp, Artificial Sequence
  Synthetic oligonucleotide
gcacctcccgtccttgcgcgctgcaagtgg

SEQ ID NO: 477304 - DNA, 30 bp, Artificial Sequence
  Synthetic oligonucleotide
attgggttttccgtgtgtatatcgaagtgg

SEQ ID NO: 477305 - DNA, 30 bp, Artificial Sequence
  Synthetic oligonucleotide
aacagcagctcacactgaagaatgaagtgg

SEQ ID NO: 477306 - DNA, 30 bp, Artificial Sequence
  Synthetic oligonucleotide
cttactgcagagaccgttttgtataagtgg

SEQ ID NO: 477307 - DNA, 30 bp, Artificial Sequence
  Synthetic oligonucleotide
gcggtcgtggggtcaaaatacaaacagtgg

SEQ ID NO: 477308 - DNA, 30 bp, Artificial Sequence
  Synthetic oligonucleotide
ttgtcaagcgagctagtttgaagccagtgg

SEQ ID NO: 477309 - DNA, 30 bp, Artificial Sequence
  Synthetic oligonucleotide
ttagtgtttcagcagcggaatatgcagtgg

SEQ ID NO: 477310 - DNA, 30 bp, Artificial Sequence
  Synthetic oligonucleotide
agtatggacggcgtaaccacccgtcagtgg

SEQ ID NO: 477311 - DNA, 30 bp, Artificial Sequence
  Synthetic oligonucleotide
tcaaagctttaaggcagactctgagagtgg

SEQ ID NO: 477312 - DNA, 30 bp, Artificial Sequence
  Synthetic oligonucleotide
tgccgacgcggttcactcatccatgagtgg

SEQ ID NO: 477313 - DNA, 30 bp, Artificial Sequence
  Synthetic oligonucleotide
acagcacatcgatgttttgtgacatagtgg

SEQ ID NO: 477314 - DNA, 30 bp, Artificial Sequence
  Synthetic oligonucleotide
atatcccagcgctcggctgctgtatagtgg

SEQ ID NO: 477315 - DNA, 30 bp, Artificial Sequence
  Synthetic oligonucleotide
tataaagcggaccacttgactctctagtgg

SEQ ID NO: 477316 - DNA, 30 bp, Artificial Sequence
  Synthetic oligonucleotide
gacgtaatatacgtcggcaccttctagtgg

SEQ ID NO: 477317 - DNA, 30 bp, Artificial Sequence
  Synthetic oligonucleotide
atttctgcccggaaaagcctaaggtagtgg

SEQ ID NO: 477318 - DNA, 30 bp, Artificial Sequence
  Synthetic oligonucleotide
tgggtcacctatcgaaccaacgtcacgtgg

SEQ ID NO: 477319 - DNA, 30 bp, Artificial Sequence
  Synthetic oligonucleotide
aattgactgacggttcatcggcctacgtgg

SEQ ID NO: 477320 - DNA, 30 bp, Artificial Sequence
  Synthetic oligonucleotide
ctcgcaaactgatattacatgcttccgtgg

SEQ ID NO: 477321 - DNA, 30 bp, Artificial Sequence
  Synthetic oligonucleotide
cccttcggggcagctcgccaggatgcgtgg

SEQ ID NO: 477322 - DNA, 30 bp, Artificial Sequence
  Synthetic oligonucleotide
cgctcaaggtctacatatttcggtgcgtgg

SEQ ID NO: 477323 - DNA, 30 bp, Artificial Sequence
  Synthetic oligonucleotide
ctccggctgtagtgccgcaggcactcgtgg

SEQ ID NO: 477324 - DNA, 30 bp, Artificial Sequence
  Synthetic oligonucleotide
gattccagtcacttctaagcgggttcgtgg

SEQ ID NO: 477325 - DNA, 30 bp, Artificial Sequence
  Synthetic oligonucleotide
agtccatcggagctacatcgcctttcgtgg

SEQ ID NO: 477326 - DNA, 30 bp, Artificial Sequence
  Synthetic oligonucleotide
ccctttatagtgggttactcttgaaggtgg

SEQ ID NO: 477327 - DNA, 30 bp, Artificial Sequence
  Synthetic oligonucleotide
ttacggcgcggtggatccggaaggaggtgg

SEQ ID NO: 477328 - DNA, 30 bp, Artificial Sequence
  Synthetic oligonucleotide
catactacgcctcactccaacgggaggtgg

SEQ ID NO: 477329 - DNA, 30 bp, Artificial Sequence
  Synthetic oligonucleotide
ttatagcgggaatctcagtttaataggtgg

SEQ ID NO: 477330 - DNA, 30 bp, Artificial Sequence
  Synthetic oligonucleotide
aaacttccgtggcccaccgatcaacggtgg

SEQ ID NO: 477331 - DNA, 30 bp, Artificial Sequence
  Synthetic oligonucleotide
tttgtgacatgaaaggggggcccacggtgg

SEQ ID NO: 477332 - DNA, 30 bp, Artificial Sequence
  Synthetic oligonucleotide
aagtagattttggtggtatgtgagcggtgg

SEQ ID NO: 477333 - DNA, 30 bp, Artificial Sequence
  Synthetic oligonucleotide
aacttggagcggcccgagcctgggcggtgg

SEQ ID NO: 477334 - DNA, 30 bp, Artificial Sequence
  Synthetic oligonucleotide
gcctggaacggcaggctaattactcggtgg

SEQ ID NO: 477335 - DNA, 30 bp, Artificial Sequence
  Synthetic oligonucleotide
gtcagttcaaggcgagggacctgagggtgg

SEQ ID NO: 477336 - DNA, 30 bp, Artificial Sequence
  Synthetic oligonucleotide
aagattgtaactgcagcataatctgggtgg

SEQ ID NO: 477337 - DNA, 30 bp, Artificial Sequence
  Synthetic oligonucleotide
caagatttgcatggcagttctgcctggtgg

SEQ ID NO: 477338 - DNA, 29 bp, Artificial Sequence
  Synthetic oligonucleotide
agtaggccgttgggttgggcctttggtgg

SEQ ID NO: 477339 - DNA, 30 bp, Artificial Sequence
  Synthetic oligonucleotide
cccggtacgcattatgcagcgggaatgtgg

SEQ ID NO: 477340 - DNA, 30 bp, Artificial Sequence
  Synthetic oligonucleotide
cggatggtcttcgtaggggtcctaatgtgg

SEQ ID NO: 477341 - DNA, 30 bp, Artificial Sequence
  Synthetic oligonucleotide
tttttatttaactctcgtgtgctaatgtgg

SEQ ID NO: 477342 - DNA, 30 bp, Artificial Sequence
  Synthetic oligonucleotide
accgaagttgatggtgcggccatgatgtgg

SEQ ID NO: 477343 - DNA, 30 bp, Artificial Sequence
  Synthetic oligonucleotide
tgaagctgtcagcttgtcaggtttatgtgg

SEQ ID NO: 477344 - DNA, 30 bp, Artificial Sequence
  Synthetic oligonucleotide
gacattgcagattggtaccacgccctgtgg

SEQ ID NO: 477345 - DNA, 30 bp, Artificial Sequence
  Synthetic oligonucleotide
cccgcgtagctatcgatcctgcagctgtgg

SEQ ID NO: 477346 - DNA, 30 bp, Artificial Sequence
  Synthetic oligonucleotide
gaggacctagcctacatcgtgtcgctgtgg

SEQ ID NO: 477347 - DNA, 30 bp, Artificial Sequence
  Synthetic oligonucleotide
catccatgagggcctttagagtctctgtgg

SEQ ID NO: 477348 - DNA, 30 bp, Artificial Sequence
  Synthetic oligonucleotide
cggacactcaactgcccataaatagtgtgg

SEQ ID NO: 477349 - DNA, 30 bp, Artificial Sequence
  Synthetic oligonucleotide
gagtacgatgtagcagcatgtttagtgtgg

SEQ ID NO: 477350 - DNA, 30 bp, Artificial Sequence
  Synthetic oligonucleotide
gccgctttatggactacgccttcggtgtgg

SEQ ID NO: 477351 - DNA, 30 bp, Artificial Sequence
  Synthetic oligonucleotide
gctgttagactgatcgtatcttatgtgtgg

SEQ ID NO: 477352 - DNA, 30 bp, Artificial Sequence
  Synthetic oligonucleotide
ggtttctctcccgccgaaacagttgtgtgg

SEQ ID NO: 477353 - DNA, 30 bp, Artificial Sequence
  Synthetic oligonucleotide
ttcctccagatcacgtaggaggttgtgtgg

SEQ ID NO: 477354 - DNA, 30 bp, Artificial Sequence
  Synthetic oligonucleotide
tagatctgtgtcctccggtctttcttgtgg

SEQ ID NO: 477355 - DNA, 30 bp, Artificial Sequence
  Synthetic oligonucleotide
cctccctattgtcgggggggtcagttgtgg

SEQ ID NO: 477356 - DNA, 30 bp, Artificial Sequence
  Synthetic oligonucleotide
aaccttagcttgacgcctgaagggttgtgg

SEQ ID NO: 477357 - DNA, 30 bp, Artificial Sequence
  Synthetic oligonucleotide
tttggtcatgtgggatactctactttgtgg

SEQ ID NO: 477358 - DNA, 30 bp, Artificial Sequence
  Synthetic oligonucleotide
catcttcgacgttggaccgaggctttgtgg

SEQ ID NO: 477359 - DNA, 30 bp, Artificial Sequence
  Synthetic oligonucleotide
gcaaaaaaatcccccagctactttttgtgg

SEQ ID NO: 477360 - DNA, 30 bp, Artificial Sequence
  Synthetic oligonucleotide
ttgagtggcgcgccaactctcataaattgg

SEQ ID NO: 477361 - DNA, 30 bp, Artificial Sequence
  Synthetic oligonucleotide
caattccaggtagacgcaggccacaattgg

SEQ ID NO: 477362 - DNA, 30 bp, Artificial Sequence
  Synthetic oligonucleotide
aattaattcgtaccggtcagttgcaattgg

SEQ ID NO: 477363 - DNA, 30 bp, Artificial Sequence
  Synthetic oligonucleotide
acgcaggaacaatttggtgctacgaattgg

SEQ ID NO: 477364 - DNA, 30 bp, Artificial Sequence
  Synthetic oligonucleotide
gtgtatgctctcggcggggcacggaattgg

SEQ ID NO: 477365 - DNA, 30 bp, Artificial Sequence
  Synthetic oligonucleotide
gaataactcgtatgaccgcggcgtaattgg

SEQ ID NO: 477366 - DNA, 30 bp, Artificial Sequence
  Synthetic oligonucleotide
taccctctggtttttgctgtgtttaattgg

SEQ ID NO: 477367 - DNA, 30 bp, Artificial Sequence
  Synthetic oligonucleotide
cgttttatttctggtctttccgcacattgg

SEQ ID NO: 477368 - DNA, 30 bp, Artificial Sequence
  Synthetic oligonucleotide
tcggttgtttctgtggaatcttcacattgg

SEQ ID NO: 477369 - DNA, 30 bp, Artificial Sequence
  Synthetic oligonucleotide
tacccttagcttggttattcgtagcattgg

SEQ ID NO: 477370 - DNA, 30 bp, Artificial Sequence
  Synthetic oligonucleotide
tttacggagatttggcgggaaaatcattgg

SEQ ID NO: 477371 - DNA, 30 bp, Artificial Sequence
  Synthetic oligonucleotide
aattgtggagctttttcccacccggattgg

SEQ ID NO: 477372 - DNA, 30 bp, Artificial Sequence
  Synthetic oligonucleotide
tcccgttacgctcctcagcaatgggattgg

SEQ ID NO: 477373 - DNA, 30 bp, Artificial Sequence
  Synthetic oligonucleotide
atcgcccgccactccctgggcgaatattgg

SEQ ID NO: 477374 - DNA, 30 bp, Artificial Sequence
  Synthetic oligonucleotide
gtgatcagttattgtaccgcaacatattgg

SEQ ID NO: 477375 - DNA, 30 bp, Artificial Sequence
  Synthetic oligonucleotide
ctgtctgttacgcccccatactactattgg

SEQ ID NO: 477376 - DNA, 30 bp, Artificial Sequence
  Synthetic oligonucleotide
gagcctcggcatgtgcgagcccattattgg

SEQ ID NO: 477377 - DNA, 30 bp, Artificial Sequence
  Synthetic oligonucleotide
aagccgatcaaactgctcagggattattgg

SEQ ID NO: 477378 - DNA, 30 bp, Artificial Sequence
  Synthetic oligonucleotide
gaccttatgcttgggatcaagacttattgg

SEQ ID NO: 477379 - DNA, 30 bp, Artificial Sequence
  Synthetic oligonucleotide
gcgccctcggcttgaaataccgaaacttgg

SEQ ID NO: 477380 - DNA, 30 bp, Artificial Sequence
  Synthetic oligonucleotide
aagctgatgtcctagcattaggaaacttgg

SEQ ID NO: 477381 - DNA, 30 bp, Artificial Sequence
  Synthetic oligonucleotide
ttattccgcctagtaaacggcaacacttgg

SEQ ID NO: 477382 - DNA, 30 bp, Artificial Sequence
  Synthetic oligonucleotide
cttagtgtagttatgttctatgagacttgg

SEQ ID NO: 477383 - DNA, 30 bp, Artificial Sequence
  Synthetic oligonucleotide
tccaatactccctacacgcggcatacttgg

SEQ ID NO: 477384 - DNA, 30 bp, Artificial Sequence
  Synthetic oligonucleotide
ttaggacataattcaataacttgtacttgg

SEQ ID NO: 477385 - DNA, 30 bp, Artificial Sequence
  Synthetic oligonucleotide
agacgttgacactaaggaatcgaaccttgg

SEQ ID NO: 477386 - DNA, 30 bp, Artificial Sequence
  Synthetic oligonucleotide
ttgcttaggtgggacgtttttaccccttgg

SEQ ID NO: 477387 - DNA, 30 bp, Artificial Sequence
  Synthetic oligonucleotide
tacgagttctcccaaaatcccgccccttgg

SEQ ID NO: 477388 - DNA, 30 bp, Artificial Sequence
  Synthetic oligonucleotide
tgtagtagggcacaaattcatggcccttgg

SEQ ID NO: 477389 - DNA, 30 bp, Artificial Sequence
  Synthetic oligonucleotide
gctacacgcctttatgtataaatgccttgg

SEQ ID NO: 477390 - DNA, 30 bp, Artificial Sequence
  Synthetic oligonucleotide
gttaagaagccagactagcgttccgcttgg

SEQ ID NO: 477391 - DNA, 30 bp, Artificial Sequence
  Synthetic oligonucleotide
ccgggcttggttacgagtaggatcgcttgg

SEQ ID NO: 477392 - DNA, 30 bp, Artificial Sequence
  Synthetic oligonucleotide
gacacccagtcacctatgaggaaggcttgg

SEQ ID NO: 477393 - DNA, 30 bp, Artificial Sequence
  Synthetic oligonucleotide
ggattttaattttcaagagtataggcttgg

SEQ ID NO: 477394 - DNA, 30 bp, Artificial Sequence
  Synthetic oligonucleotide
aagctaagtctcgacgacacctaggcttgg

SEQ ID NO: 477395 - DNA, 29 bp, Artificial Sequence
  Synthetic oligonucleotide
attatgatatgtattataattaggcttgg

SEQ ID NO: 477396 - DNA, 30 bp, Artificial Sequence
  Synthetic oligonucleotide
gggggccgcaggtgcgatggtcctgcttgg

SEQ ID NO: 477397 - DNA, 30 bp, Artificial Sequence
  Synthetic oligonucleotide
aatcggttccgggatccctgcgcttcttgg

SEQ ID NO: 477398 - DNA, 30 bp, Artificial Sequence
  Synthetic oligonucleotide
tgccatccgcggcacgctattagttcttgg

SEQ ID NO: 477399 - DNA, 30 bp, Artificial Sequence
  Synthetic oligonucleotide
atttagcatctagcatgatggtcaagttgg

SEQ ID NO: 477400 - DNA, 30 bp, Artificial Sequence
  Synthetic oligonucleotide
gattgtatttcaagtcgaccgccgagttgg

SEQ ID NO: 477401 - DNA, 30 bp, Artificial Sequence
  Synthetic oligonucleotide
ttctcattggatgtcaggtttaggagttgg

SEQ ID NO: 477402 - DNA, 30 bp, Artificial Sequence
  Synthetic oligonucleotide
agctattgttgtgaccaatcttatagttgg

SEQ ID NO: 477403 - DNA, 30 bp, Artificial Sequence
  Synthetic oligonucleotide
aaatactaccgagggttgatgtgccgttgg

SEQ ID NO: 477404 - DNA, 30 bp, Artificial Sequence
  Synthetic oligonucleotide
taaacattttgagtattagcatggcgttgg

SEQ ID NO: 477405 - DNA, 30 bp, Artificial Sequence
  Synthetic oligonucleotide
ggcctatatggggttgaaggagctcgttgg

SEQ ID NO: 477406 - DNA, 30 bp, Artificial Sequence
  Synthetic oligonucleotide
ttctgtcgtcagattatagtagccggttgg

SEQ ID NO: 477407 - DNA, 30 bp, Artificial Sequence
  Synthetic oligonucleotide
cccggtccctggccgttccgtaaatgttgg

SEQ ID NO: 477408 - DNA, 30 bp, Artificial Sequence
  Synthetic oligonucleotide
tttaatataaatccctttattgcgtgttgg

SEQ ID NO: 477409 - DNA, 30 bp, Artificial Sequence
  Synthetic oligonucleotide
cacgcttcccatttcgtgaaggggtgttgg

SEQ ID NO: 477410 - DNA, 30 bp, Artificial Sequence
  Synthetic oligonucleotide
actctctttattactcgctgactttgttgg

SEQ ID NO: 477411 - DNA, 30 bp, Artificial Sequence
  Synthetic oligonucleotide
tttccggtatctagtcccggacaaatttgg

SEQ ID NO: 477412 - DNA, 30 bp, Artificial Sequence
  Synthetic oligonucleotide
atgggttgagaatcggccatttacctttgg

SEQ ID NO: 477413 - DNA, 30 bp, Artificial Sequence
  Synthetic oligonucleotide
cttcgtttcaggagtaccggtagcctttgg

SEQ ID NO: 477414 - DNA, 30 bp, Artificial Sequence
  Synthetic oligonucleotide
ttacagcgtaattgacaggcaggcctttgg

SEQ ID NO: 477415 - DNA, 30 bp, Artificial Sequence
  Synthetic oligonucleotide
atacgcgcagcaatgggtatactcctttgg

SEQ ID NO: 477416 - DNA, 30 bp, Artificial Sequence
  Synthetic oligonucleotide
attcgtccggtcgcgctaccttctctttgg

SEQ ID NO: 477417 - DNA, 30 bp, Artificial Sequence
  Synthetic oligonucleotide
gctcatcctacagtgaacactgaagtttgg

SEQ ID NO: 477418 - DNA, 30 bp, Artificial Sequence
  Synthetic oligonucleotide
agagtgatctattggtatatttaggtttgg

SEQ ID NO: 477419 - DNA, 30 bp, Artificial Sequence
  Synthetic oligonucleotide
atttagtctgcagtggcctaaggggtttgg

SEQ ID NO: 477420 - DNA, 30 bp, Artificial Sequence
  Synthetic oligonucleotide
acggttccatcgccttccgcagatgtttgg

SEQ ID NO: 477421 - DNA, 30 bp, Artificial Sequence
  Synthetic oligonucleotide
caccatacgatatctgtccggtgtgtttgg

SEQ ID NO: 477422 - DNA, 30 bp, Artificial Sequence
  Synthetic oligonucleotide
ctcggtgcgagcccggccgcccaattttgg

SEQ ID NO: 477423 - DNA, 29 bp, Artificial Sequence
  Synthetic oligonucleotide
tagggcggtatcttcggtcgtgattttgg

SEQ ID NO: 477424 - DNA, 30 bp, Artificial Sequence
  Synthetic oligonucleotide
aagtaacaaattttttccttgagcttttgg

SEQ ID NO: 477425 - DNA, 30 bp, Artificial Sequence
  Synthetic oligonucleotide
ccgagtgaacagataaatgcaaagttttgg

SEQ ID NO: 477426 - DNA, 30 bp, Artificial Sequence
  Synthetic oligonucleotide
agtcgggctttaccaacaacttggttttgg

SEQ ID NO: 477427 - DNA, 30 bp, Artificial Sequence
  Synthetic oligonucleotide
atttatgaagattttacaagttaaaaaatg

SEQ ID NO: 477428 - DNA, 30 bp, Artificial Sequence
  Synthetic oligonucleotide
tgaaagtactgcgaggaactcatcaaaatg

SEQ ID NO: 477429 - DNA, 30 bp, Artificial Sequence
  Synthetic oligonucleotide
aatgccctggggcgttcgtttttcaaaatg

SEQ ID NO: 477430 - DNA, 30 bp, Artificial Sequence
  Synthetic oligonucleotide
aactgcactttccatccacgatcgaaaatg

SEQ ID NO: 477431 - DNA, 30 bp, Artificial Sequence
  Synthetic oligonucleotide
ggtgtacctgggacgctgcccgtgaaaatg

SEQ ID NO: 477432 - DNA, 30 bp, Artificial Sequence
  Synthetic oligonucleotide
aatggtgggtcataacgggcgaataaaatg

SEQ ID NO: 477433 - DNA, 30 bp, Artificial Sequence
  Synthetic oligonucleotide
tttttggtcgtggttatttttcctaaaatg

SEQ ID NO: 477434 - DNA, 30 bp, Artificial Sequence
  Synthetic oligonucleotide
ggatttcagggcgcacagcaacgtaaaatg

SEQ ID NO: 477435 - DNA, 30 bp, Artificial Sequence
  Synthetic oligonucleotide
cgggtacggcaggtttggagtttccaaatg

SEQ ID NO: 477436 - DNA, 30 bp, Artificial Sequence
  Synthetic oligonucleotide
gcacgcagggcagaggattcttagcaaatg

SEQ ID NO: 477437 - DNA, 30 bp, Artificial Sequence
  Synthetic oligonucleotide
accctcacacgtcctgacgaacatcaaatg

SEQ ID NO: 477438 - DNA, 30 bp, Artificial Sequence
  Synthetic oligonucleotide
caagtataacggtcacgagttcatcaaatg

SEQ ID NO: 477439 - DNA, 30 bp, Artificial Sequence
  Synthetic oligonucleotide
gctactggtatgttcctagtttgtcaaatg

SEQ ID NO: 477440 - DNA, 30 bp, Artificial Sequence
  Synthetic oligonucleotide
ttatcatgatatcttgtttcgtaagaaatg

SEQ ID NO: 477441 - DNA, 30 bp, Artificial Sequence
  Synthetic oligonucleotide
tactgcttatgctcacgacggtgagaaatg

SEQ ID NO: 477442 - DNA, 30 bp, Artificial Sequence
  Synthetic oligonucleotide
tgtccttcaattaatagtgtttgcgaaatg

SEQ ID NO: 477443 - DNA, 30 bp, Artificial Sequence
  Synthetic oligonucleotide
tgcccgagtacatttaagtttgtggaaatg

SEQ ID NO: 477444 - DNA, 30 bp, Artificial Sequence
  Synthetic oligonucleotide
taccgactgctcttaaagatattggaaatg

SEQ ID NO: 477445 - DNA, 30 bp, Artificial Sequence
  Synthetic oligonucleotide
gaacgtatacgctccgagggacatgaaatg

SEQ ID NO: 477446 - DNA, 30 bp, Artificial Sequence
  Synthetic oligonucleotide
aagttagggttttgtcacgaggcataaatg

SEQ ID NO: 477447 - DNA, 30 bp, Artificial Sequence
  Synthetic oligonucleotide
cgccaagtcacgatgacgattagctaaatg

SEQ ID NO: 477448 - DNA, 30 bp, Artificial Sequence
  Synthetic oligonucleotide
ataggagtgggcttttaggttcgttaaatg

SEQ ID NO: 477449 - DNA, 30 bp, Artificial Sequence
  Synthetic oligonucleotide
tagtacagttatgaaaggtgcatttaaatg

SEQ ID NO: 477450 - DNA, 30 bp, Artificial Sequence
  Synthetic oligonucleotide
gcattaatcacacggcggagtctttaaatg

SEQ ID NO: 477451 - DNA, 30 bp, Artificial Sequence
  Synthetic oligonucleotide
tctataattgggttacggctagaaacaatg

SEQ ID NO: 477452 - DNA, 30 bp, Artificial Sequence
  Synthetic oligonucleotide
attaggtatacattctgtagtaagacaatg

SEQ ID NO: 477453 - DNA, 30 bp, Artificial Sequence
  Synthetic oligonucleotide
gaatcttcacattctactccccggacaatg

SEQ ID NO: 477454 - DNA, 30 bp, Artificial Sequence
  Synthetic oligonucleotide
atgattgcaattcggagctggtatacaatg

SEQ ID NO: 477455 - DNA, 30 bp, Artificial Sequence
  Synthetic oligonucleotide
ctacattggttgttgtctataagaccaatg

SEQ ID NO: 477456 - DNA, 30 bp, Artificial Sequence
  Synthetic oligonucleotide
actaatcacaagtgacacaacataccaatg

SEQ ID NO: 477457 - DNA, 30 bp, Artificial Sequence
  Synthetic oligonucleotide
tcgctcccggccaagcgcgcagccccaatg

SEQ ID NO: 477458 - DNA, 30 bp, Artificial Sequence
  Synthetic oligonucleotide
gaatagtacgctgccaaagggacagcaatg

SEQ ID NO: 477459 - DNA, 30 bp, Artificial Sequence
  Synthetic oligonucleotide
gaaaaagccgggaacccgcgattagcaatg

SEQ ID NO: 477460 - DNA, 30 bp, Artificial Sequence
  Synthetic oligonucleotide
ctcctgcaccagtacgaacgcaccgcaatg

SEQ ID NO: 477461 - DNA, 30 bp, Artificial Sequence
  Synthetic oligonucleotide
tcacggcgaattacgccaaaatgcgcaatg

SEQ ID NO: 477462 - DNA, 30 bp, Artificial Sequence
  Synthetic oligonucleotide
tgaatggtgctactcgccattaaggcaatg

SEQ ID NO: 477463 - DNA, 30 bp, Artificial Sequence
  Synthetic oligonucleotide
ctagttcttgacgtccagctttaggcaatg

SEQ ID NO: 477464 - DNA, 30 bp, Artificial Sequence
  Synthetic oligonucleotide
cgtaaaagtcatgagacactgtgtgcaatg

SEQ ID NO: 477465 - DNA, 30 bp, Artificial Sequence
  Synthetic oligonucleotide
gttttgagggtcggaacatacaaatcaatg

SEQ ID NO: 477466 - DNA, 30 bp, Artificial Sequence
  Synthetic oligonucleotide
ttggccttccgctacacgatgagatcaatg

SEQ ID NO: 477467 - DNA, 30 bp, Artificial Sequence
  Synthetic oligonucleotide
gcttgggcttttggttcttaagccagaatg

SEQ ID NO: 477468 - DNA, 30 bp, Artificial Sequence
  Synthetic oligonucleotide
gtctggtattctagctttatggatagaatg

SEQ ID NO: 477469 - DNA, 30 bp, Artificial Sequence
  Synthetic oligonucleotide
ttatactgggtcgtgcaggcatctagaatg

SEQ ID NO: 477470 - DNA, 30 bp, Artificial Sequence
  Synthetic oligonucleotide
ggcgcgcccggacgcttagcttctagaatg

SEQ ID NO: 477471 - DNA, 30 bp, Artificial Sequence
  Synthetic oligonucleotide
aattcggttccaatggctcagacacgaatg

SEQ ID NO: 477472 - DNA, 30 bp, Artificial Sequence
  Synthetic oligonucleotide
ggttaggtacgctagttccgtatacgaatg

SEQ ID NO: 477473 - DNA, 30 bp, Artificial Sequence
  Synthetic oligonucleotide
gaaactattcaacacactactttacgaatg

SEQ ID NO: 477474 - DNA, 30 bp, Artificial Sequence
  Synthetic oligonucleotide
aacgagtggcgcacactgttccaccgaatg

SEQ ID NO: 477475 - DNA, 30 bp, Artificial Sequence
  Synthetic oligonucleotide
gggcgacgcctaagggatccagggcgaatg

SEQ ID NO: 477476 - DNA, 30 bp, Artificial Sequence
  Synthetic oligonucleotide
ttaatttatggggcgtcgagaattcgaatg

SEQ ID NO: 477477 - DNA, 30 bp, Artificial Sequence
  Synthetic oligonucleotide
ctactctgcgggcctttcagcagaggaatg

SEQ ID NO: 477478 - DNA, 30 bp, Artificial Sequence
  Synthetic oligonucleotide
gaggtagcaacgcagtactgtgggggaatg

SEQ ID NO: 477479 - DNA, 30 bp, Artificial Sequence
  Synthetic oligonucleotide
gccacatctcccattagcgggggatgaatg

SEQ ID NO: 477480 - DNA, 30 bp, Artificial Sequence
  Synthetic oligonucleotide
cgagctgtcaaaccgggcgcttggtgaatg

SEQ ID NO: 477481 - DNA, 30 bp, Artificial Sequence
  Synthetic oligonucleotide
atgaatctccctgtgagggcgctaataatg

SEQ ID NO: 477482 - DNA, 30 bp, Artificial Sequence
  Synthetic oligonucleotide
gccttgcagttagataatggagccataatg

SEQ ID NO: 477483 - DNA, 30 bp, Artificial Sequence
  Synthetic oligonucleotide
acctcccagtttcgaatggcccttataatg

SEQ ID NO: 477484 - DNA, 30 bp, Artificial Sequence
  Synthetic oligonucleotide
gatcttataggctccagcgcataactaatg

SEQ ID NO: 477485 - DNA, 30 bp, Artificial Sequence
  Synthetic oligonucleotide
gtattgacgatggaatcgatgagactaatg

SEQ ID NO: 477486 - DNA, 30 bp, Artificial Sequence
  Synthetic oligonucleotide
aagtacattatatcgtttatagggctaatg

SEQ ID NO: 477487 - DNA, 27 bp, Artificial Sequence
  Synthetic oligonucleotide
ttaatcgattaccttcccttgctaatg

SEQ ID NO: 477488 - DNA, 30 bp, Artificial Sequence
  Synthetic oligonucleotide
cggtcactttgctatctatgtgcagtaatg

SEQ ID NO: 477489 - DNA, 30 bp, Artificial Sequence
  Synthetic oligonucleotide
aaatgatatctgccaatgactaccgtaatg

SEQ ID NO: 477490 - DNA, 30 bp, Artificial Sequence
  Synthetic oligonucleotide
aaaagattatatattggcataccggtaatg

SEQ ID NO: 477491 - DNA, 30 bp, Artificial Sequence
  Synthetic oligonucleotide
actaggtacataagaccgggatttgtaatg

SEQ ID NO: 477492 - DNA, 30 bp, Artificial Sequence
  Synthetic oligonucleotide
ttatacgtcccgtggtccgattgattaatg

SEQ ID NO: 477493 - DNA, 30 bp, Artificial Sequence
  Synthetic oligonucleotide
tcgcttccattcatcttgatcgccttaatg

SEQ ID NO: 477494 - DNA, 30 bp, Artificial Sequence
  Synthetic oligonucleotide
cctagcaaaacgagccatccgttcttaatg

SEQ ID NO: 477495 - DNA, 30 bp, Artificial Sequence
  Synthetic oligonucleotide
gtgtcatccttattggttgcacagttaatg

SEQ ID NO: 477496 - DNA, 30 bp, Artificial Sequence
  Synthetic oligonucleotide
aactgtatgtaatattttggtttgttaatg

SEQ ID NO: 477497 - DNA, 30 bp, Artificial Sequence
  Synthetic oligonucleotide
ctctgtacaatcctgtgtcgaagtttaatg

SEQ ID NO: 477498 - DNA, 30 bp, Artificial Sequence
  Synthetic oligonucleotide
cgatgggcttggctttgtggggaaaacatg

SEQ ID NO: 477499 - DNA, 30 bp, Artificial Sequence
  Synthetic oligonucleotide
gaaacttaacgcgacacgcagcgaaacatg

SEQ ID NO: 477500 - DNA, 30 bp, Artificial Sequence
  Synthetic oligonucleotide
cgcctgcgtgtgcaacgcttgtgaaacatg

SEQ ID NO: 477501 - DNA, 30 bp, Artificial Sequence
  Synthetic oligonucleotide
tattccagatgccaaagtgcgtccaacatg

SEQ ID NO: 477502 - DNA, 30 bp, Artificial Sequence
  Synthetic oligonucleotide
ccccatctcgttttttgaaagaagaacatg

SEQ ID NO: 477503 - DNA, 30 bp, Artificial Sequence
  Synthetic oligonucleotide
gagtggttagtagacaactagaagaacatg

SEQ ID NO: 477504 - DNA, 30 bp, Artificial Sequence
  Synthetic oligonucleotide
aatcttggcgttcgcgtggaatgccacatg

SEQ ID NO: 477505 - DNA, 30 bp, Artificial Sequence
  Synthetic oligonucleotide
gcaattaatctttaaccccgtctgcacatg

SEQ ID NO: 477506 - DNA, 30 bp, Artificial Sequence
  Synthetic oligonucleotide
aataaattgtcgagtatcaaaattcacatg

SEQ ID NO: 477507 - DNA, 30 bp, Artificial Sequence
  Synthetic oligonucleotide
aatttggtcgtggtacggtcagttcacatg

SEQ ID NO: 477508 - DNA, 30 bp, Artificial Sequence
  Synthetic oligonucleotide
gtgtcatctaggttcccaaaacaagacatg

SEQ ID NO: 477509 - DNA, 30 bp, Artificial Sequence
  Synthetic oligonucleotide
aaaatgcatggatcttacttccaagacatg

SEQ ID NO: 477510 - DNA, 30 bp, Artificial Sequence
  Synthetic oligonucleotide
gtcgtatttagcattaccaggagggacatg

SEQ ID NO: 477511 - DNA, 30 bp, Artificial Sequence
  Synthetic oligonucleotide
attcttgcgaggcctcactcaatggacatg

SEQ ID NO: 477512 - DNA, 30 bp, Artificial Sequence
  Synthetic oligonucleotide
cgaacatttgattcgttacaataatacatg

SEQ ID NO: 477513 - DNA, 30 bp, Artificial Sequence
  Synthetic oligonucleotide
ggaggactcagacaatgtagctaatacatg

SEQ ID NO: 477514 - DNA, 30 bp, Artificial Sequence
  Synthetic oligonucleotide
caagcatgatagtaccatcgttactacatg

SEQ ID NO: 477515 - DNA, 30 bp, Artificial Sequence
  Synthetic oligonucleotide
gacatttagatgacagagcagatctacatg

SEQ ID NO: 477516 - DNA, 30 bp, Artificial Sequence
  Synthetic oligonucleotide
aatggtggcgatctctcccttgtgtacatg

SEQ ID NO: 477517 - DNA, 30 bp, Artificial Sequence
  Synthetic oligonucleotide
ctataatcaatgtgcttttgtgattacatg

SEQ ID NO: 477518 - DNA, 30 bp, Artificial Sequence
  Synthetic oligonucleotide
atactttcatcctgcatacaaggttacatg

SEQ ID NO: 477519 - DNA, 29 bp, Artificial Sequence
  Synthetic oligonucleotide
cgactctcggacacgatgtaaagaccatg

SEQ ID NO: 477520 - DNA, 30 bp, Artificial Sequence
  Synthetic oligonucleotide
ggacggtccggaggcatgtaagtgaccatg

SEQ ID NO: 477521 - DNA, 30 bp, Artificial Sequence
  Synthetic oligonucleotide
gatgtgtatccgatcgcaccacaacccatg

SEQ ID NO: 477522 - DNA, 30 bp, Artificial Sequence
  Synthetic oligonucleotide
ggcggccagtggtaagagaactaccccatg

SEQ ID NO: 477523 - DNA, 30 bp, Artificial Sequence
  Synthetic oligonucleotide
actggctcgcccacagtgatcccccccatg

SEQ ID NO: 477524 - DNA, 30 bp, Artificial Sequence
  Synthetic oligonucleotide
tagtttgattatacttgcattaggcccatg

SEQ ID NO: 477525 - DNA, 30 bp, Artificial Sequence
  Synthetic oligonucleotide
ttcgtttcgtgacatagcagccctcccatg

SEQ ID NO: 477526 - DNA, 30 bp, Artificial Sequence
  Synthetic oligonucleotide
aatcctcaggcctgaggctttcgtcccatg

SEQ ID NO: 477527 - DNA, 30 bp, Artificial Sequence
  Synthetic oligonucleotide
ggtagcctaagggggacgttttgtcccatg

SEQ ID NO: 477528 - DNA, 30 bp, Artificial Sequence
  Synthetic oligonucleotide
ctctacgcgaaaaggccacgaattcccatg

SEQ ID NO: 477529 - DNA, 30 bp, Artificial Sequence
  Synthetic oligonucleotide
acggtggtctactgtgatagcgaagccatg

SEQ ID NO: 477530 - DNA, 30 bp, Artificial Sequence
  Synthetic oligonucleotide
tactatgatagcttatacaccgccgccatg

SEQ ID NO: 477531 - DNA, 30 bp, Artificial Sequence
  Synthetic oligonucleotide
gtatgcggggcttcaatggcgtccgccatg

SEQ ID NO: 477532 - DNA, 30 bp, Artificial Sequence
  Synthetic oligonucleotide
tcccgaaatttttcgggaaacagggccatg

SEQ ID NO: 477533 - DNA, 30 bp, Artificial Sequence
  Synthetic oligonucleotide
gcaggggccctagtgatttcgagggccatg

SEQ ID NO: 477534 - DNA, 30 bp, Artificial Sequence
  Synthetic oligonucleotide
tcaccggaccgcacgcggatgtactccatg

SEQ ID NO: 477535 - DNA, 30 bp, Artificial Sequence
  Synthetic oligonucleotide
tctctctactcttacgttagtagctccatg

SEQ ID NO: 477536 - DNA, 30 bp, Artificial Sequence
  Synthetic oligonucleotide
gcacggttcaggcctatacaacgttccatg

SEQ ID NO: 477537 - DNA, 30 bp, Artificial Sequence
  Synthetic oligonucleotide
ggtgcatagagtacaagcttttaaagcatg

SEQ ID NO: 477538 - DNA, 30 bp, Artificial Sequence
  Synthetic oligonucleotide
accaccatcggggtcacttcaggcagcatg

SEQ ID NO: 477539 - DNA, 30 bp, Artificial Sequence
  Synthetic oligonucleotide
aaagaagtccgcaggctgatatagagcatg

SEQ ID NO: 477540 - DNA, 30 bp, Artificial Sequence
  Synthetic oligonucleotide
tcaagtaatgctaaaatggtacgtagcatg

SEQ ID NO: 477541 - DNA, 30 bp, Artificial Sequence
  Synthetic oligonucleotide
agccgccgttattctcattgtccacgcatg

SEQ ID NO: 477542 - DNA, 30 bp, Artificial Sequence
  Synthetic oligonucleotide
tccgttaccaagtcagggttgttacgcatg

SEQ ID NO: 477543 - DNA, 30 bp, Artificial Sequence
  Synthetic oligonucleotide
tacctcgttgtccatgaagcaagccgcatg

SEQ ID NO: 477544 - DNA, 30 bp, Artificial Sequence
  Synthetic oligonucleotide
tgaatatctaacagggctttgaggcgcatg

SEQ ID NO: 477545 - DNA, 30 bp, Artificial Sequence
  Synthetic oligonucleotide
gacccatcggggtcaatatgaaacggcatg

SEQ ID NO: 477546 - DNA, 30 bp, Artificial Sequence
  Synthetic oligonucleotide
cgtgggcatcttttctacacgtgcggcatg

SEQ ID NO: 477547 - DNA, 30 bp, Artificial Sequence
  Synthetic oligonucleotide
tcactcgaggatcctagaactagtggcatg

SEQ ID NO: 477548 - DNA, 30 bp, Artificial Sequence
  Synthetic oligonucleotide
gtcgttaggacgcagtgtttgcttggcatg

SEQ ID NO: 477549 - DNA, 30 bp, Artificial Sequence
  Synthetic oligonucleotide
taatagttggcgcacatatttcagtgcatg

SEQ ID NO: 477550 - DNA, 30 bp, Artificial Sequence
  Synthetic oligonucleotide
ttctatggtttccctgtattatagtgcatg

SEQ ID NO: 477551 - DNA, 30 bp, Artificial Sequence
  Synthetic oligonucleotide
attttaactaaacaagataggacgtgcatg

SEQ ID NO: 477552 - DNA, 30 bp, Artificial Sequence
  Synthetic oligonucleotide
atcaatagatgcttaccgtgtctgtgcatg

SEQ ID NO: 477553 - DNA, 30 bp, Artificial Sequence
  Synthetic oligonucleotide
ttggattacacctattagtcgaattgcatg

SEQ ID NO: 477554 - DNA, 30 bp, Artificial Sequence
  Synthetic oligonucleotide
ttcttctccattacatgctggccttgcatg

SEQ ID NO: 477555 - DNA, 30 bp, Artificial Sequence
  Synthetic oligonucleotide
tgtacaacactacgcacgcacgtttgcatg

SEQ ID NO: 477556 - DNA, 30 bp, Artificial Sequence
  Synthetic oligonucleotide
ggaacgcgcacactgactacctagatcatg

SEQ ID NO: 477557 - DNA, 30 bp, Artificial Sequence
  Synthetic oligonucleotide
tgtaacctatgcgtttaattaaatatcatg

SEQ ID NO: 477558 - DNA, 30 bp, Artificial Sequence
  Synthetic oligonucleotide
cttgttgactttcctacatacaatatcatg

SEQ ID NO: 477559 - DNA, 30 bp, Artificial Sequence
  Synthetic oligonucleotide
aaagccattagttcctcgaactatatcatg

SEQ ID NO: 477560 - DNA, 30 bp, Artificial Sequence
  Synthetic oligonucleotide
aagccggaggactaggatgattatatcatg

SEQ ID NO: 477561 - DNA, 30 bp, Artificial Sequence
  Synthetic oligonucleotide
tggattggcgagaaaggctaggcactcatg

SEQ ID NO: 477562 - DNA, 30 bp, Artificial Sequence
  Synthetic oligonucleotide
caggttcgggcggcagggataatactcatg

SEQ ID NO: 477563 - DNA, 30 bp, Artificial Sequence
  Synthetic oligonucleotide
cggaacgggatttacctagtggtcctcatg

SEQ ID NO: 477564 - DNA, 30 bp, Artificial Sequence
  Synthetic oligonucleotide
accggttgacccccacagctaactctcatg

SEQ ID NO: 477565 - DNA, 30 bp, Artificial Sequence
  Synthetic oligonucleotide
tttcatctggccacgcgcgatggagtcatg

SEQ ID NO: 477566 - DNA, 30 bp, Artificial Sequence
  Synthetic oligonucleotide
taagggacacgacgtgctccagaggtcatg

SEQ ID NO: 477567 - DNA, 30 bp, Artificial Sequence
  Synthetic oligonucleotide
gtttctcggtgtcacgacagggtggtcatg

SEQ ID NO: 477568 - DNA, 30 bp, Artificial Sequence
  Synthetic oligonucleotide
aagattccttgcgggtgcatgagtgtcatg

SEQ ID NO: 477569 - DNA, 30 bp, Artificial Sequence
  Synthetic oligonucleotide
ttgtttttgctacaagatgcatgtgtcatg

SEQ ID NO: 477570 - DNA, 30 bp, Artificial Sequence
  Synthetic oligonucleotide
ggagcatgaagctaaggactttgtttcatg

SEQ ID NO: 477571 - DNA, 30 bp, Artificial Sequence
  Synthetic oligonucleotide
ccccctcatgaaatgtactaaacaaagatg

SEQ ID NO: 477572 - DNA, 30 bp, Artificial Sequence
  Synthetic oligonucleotide
atatattcgacctgtgccattcgaaagatg

SEQ ID NO: 477573 - DNA, 30 bp, Artificial Sequence
  Synthetic oligonucleotide
gagccccatgcatgacagggcctcaagatg

SEQ ID NO: 477574 - DNA, 30 bp, Artificial Sequence
  Synthetic oligonucleotide
ctttcgcgccaagttcggtagtcgaagatg

SEQ ID NO: 477575 - DNA, 30 bp, Artificial Sequence
  Synthetic oligonucleotide
tcttaaaataaacaggttcggcggaagatg

SEQ ID NO: 477576 - DNA, 30 bp, Artificial Sequence
  Synthetic oligonucleotide
tttgttctacagggaataggaatgaagatg

SEQ ID NO: 477577 - DNA, 30 bp, Artificial Sequence
  Synthetic oligonucleotide
ctcgccgcgttactccggctgtataagatg

SEQ ID NO: 477578 - DNA, 30 bp, Artificial Sequence
  Synthetic oligonucleotide
gctggttcgcccgtggtgcacgcacagatg

SEQ ID NO: 477579 - DNA, 30 bp, Artificial Sequence
  Synthetic oligonucleotide
gatgggcttggggcttagtcgttacagatg

SEQ ID NO: 477580 - DNA, 30 bp, Artificial Sequence
  Synthetic oligonucleotide
ttcagacacggatgggtatgccagcagatg

SEQ ID NO: 477581 - DNA, 30 bp, Artificial Sequence
  Synthetic oligonucleotide
attaccggaatgaagcgaaggcagcagatg

SEQ ID NO: 477582 - DNA, 30 bp, Artificial Sequence
  Synthetic oligonucleotide
attcgtaaatacgtacggtacgcagagatg

SEQ ID NO: 477583 - DNA, 30 bp, Artificial Sequence
  Synthetic oligonucleotide
ggggatctttatgaggaagtgacggagatg

SEQ ID NO: 477584 - DNA, 30 bp, Artificial Sequence
  Synthetic oligonucleotide
gctcactctccaggatacaactgggagatg

SEQ ID NO: 477585 - DNA, 30 bp, Artificial Sequence
  Synthetic oligonucleotide
aaaatgcttttttggtctgacggtgagatg

SEQ ID NO: 477586 - DNA, 30 bp, Artificial Sequence
  Synthetic oligonucleotide
atttagctatttctatctgggcttgagatg

SEQ ID NO: 477587 - DNA, 30 bp, Artificial Sequence
  Synthetic oligonucleotide
acagcaattccgataatgtcgacctagatg

SEQ ID NO: 477588 - DNA, 30 bp, Artificial Sequence
  Synthetic oligonucleotide
aggactccagtacgacaagcgtgctagatg

SEQ ID NO: 477589 - DNA, 30 bp, Artificial Sequence
  Synthetic oligonucleotide
tttgtccggggtatcccctaggagtagatg

SEQ ID NO: 477590 - DNA, 30 bp, Artificial Sequence
  Synthetic oligonucleotide
tcttcacttaggttcaggtagaattagatg

SEQ ID NO: 477591 - DNA, 30 bp, Artificial Sequence
  Synthetic oligonucleotide
ttcatgccagtattatgacgcataacgatg

SEQ ID NO: 477592 - DNA, 30 bp, Artificial Sequence
  Synthetic oligonucleotide
aaagttttcgtcgccgatttacgcacgatg

SEQ ID NO: 477593 - DNA, 30 bp, Artificial Sequence
  Synthetic oligonucleotide
gggtagggccgtggatctacacagacgatg

SEQ ID NO: 477594 - DNA, 30 bp, Artificial Sequence
  Synthetic oligonucleotide
gcgacagatagaatatgatcggcgacgatg

SEQ ID NO: 477595 - DNA, 30 bp, Artificial Sequence
  Synthetic oligonucleotide
gggagcccggacagggcgcgtggcccgatg

SEQ ID NO: 477596 - DNA, 30 bp, Artificial Sequence
  Synthetic oligonucleotide
ggccatagtagtatggggttgcagccgatg

SEQ ID NO: 477597 - DNA, 30 bp, Artificial Sequence
  Synthetic oligonucleotide
gccgtatgcgccggcgttacccttccgatg

SEQ ID NO: 477598 - DNA, 30 bp, Artificial Sequence
  Synthetic oligonucleotide
ctacgcccttgacagcataggtaagcgatg

SEQ ID NO: 477599 - DNA, 30 bp, Artificial Sequence
  Synthetic oligonucleotide
gctctaagtcgaggcatgtcgcccgcgatg

SEQ ID NO: 477600 - DNA, 30 bp, Artificial Sequence
  Synthetic oligonucleotide
cgcacaccggggaatgggtcgtaggcgatg

SEQ ID NO: 477601 - DNA, 30 bp, Artificial Sequence
  Synthetic oligonucleotide
atgcacataaggcggagccacggggcgatg

SEQ ID NO: 477602 - DNA, 30 bp, Artificial Sequence
  Synthetic oligonucleotide
atcatcaatagccacggtgagcgtgcgatg

SEQ ID NO: 477603 - DNA, 30 bp, Artificial Sequence
  Synthetic oligonucleotide
tttgtgaggtctttatctaattttgcgatg

SEQ ID NO: 477604 - DNA, 30 bp, Artificial Sequence
  Synthetic oligonucleotide
gcagcacatatagcaggaatttcgtcgatg

SEQ ID NO: 477605 - DNA, 30 bp, Artificial Sequence
  Synthetic oligonucleotide
gcaggcagctccttccgacacaaaaggatg

SEQ ID NO: 477606 - DNA, 30 bp, Artificial Sequence
  Synthetic oligonucleotide
atccataccattggctgtggccaaaggatg

SEQ ID NO: 477607 - DNA, 30 bp, Artificial Sequence
  Synthetic oligonucleotide
gtaggtggggcacaaggccatcaaaggatg

SEQ ID NO: 477608 - DNA, 30 bp, Artificial Sequence
  Synthetic oligonucleotide
gcacatccaaataatccgtcgctgaggatg

SEQ ID NO: 477609 - DNA, 30 bp, Artificial Sequence
  Synthetic oligonucleotide
aagacacttttcatagtgtcagataggatg

SEQ ID NO: 477610 - DNA, 30 bp, Artificial Sequence
  Synthetic oligonucleotide
ctcacctatcagccgtaagatactaggatg

SEQ ID NO: 477611 - DNA, 30 bp, Artificial Sequence
  Synthetic oligonucleotide
cactctgcgagtatacggagtaaacggatg

SEQ ID NO: 477612 - DNA, 30 bp, Artificial Sequence
  Synthetic oligonucleotide
ctttaagaaacagcgcatcatgcacggatg

SEQ ID NO: 477613 - DNA, 30 bp, Artificial Sequence
  Synthetic oligonucleotide
acacagatggactgtctctaagaccggatg

SEQ ID NO: 477614 - DNA, 30 bp, Artificial Sequence
  Synthetic oligonucleotide
gggatgtaagccaacctctgacagcggatg

SEQ ID NO: 477615 - DNA, 30 bp, Artificial Sequence
  Synthetic oligonucleotide
ctagttctttgatcgatcggcgcgcggatg

SEQ ID NO: 477616 - DNA, 30 bp, Artificial Sequence
  Synthetic oligonucleotide
attccctatgttaacgcgacttatcggatg

SEQ ID NO: 477617 - DNA, 30 bp, Artificial Sequence
  Synthetic oligonucleotide
tttgactgccggcccgtcaatcacgggatg

SEQ ID NO: 477618 - DNA, 30 bp, Artificial Sequence
  Synthetic oligonucleotide
gcgccttggggagacggcaactcgtggatg

SEQ ID NO: 477619 - DNA, 30 bp, Artificial Sequence
  Synthetic oligonucleotide
cgaagagaggcgctacagtgggacatgatg

SEQ ID NO: 477620 - DNA, 30 bp, Artificial Sequence
  Synthetic oligonucleotide
ttagatgttttacgacgtggaccgatgatg

SEQ ID NO: 477621 - DNA, 30 bp, Artificial Sequence
  Synthetic oligonucleotide
atcgattaatactaaacacttcgattgatg

SEQ ID NO: 477622 - DNA, 30 bp, Artificial Sequence
  Synthetic oligonucleotide
tttgcttataaattcggattagccttgatg

SEQ ID NO: 477623 - DNA, 30 bp, Artificial Sequence
  Synthetic oligonucleotide
ggttagcgggatctgtcattgtgcttgatg

SEQ ID NO: 477624 - DNA, 30 bp, Artificial Sequence
  Synthetic oligonucleotide
atgtttttggccttcaaaggcataaatatg

SEQ ID NO: 477625 - DNA, 30 bp, Artificial Sequence
  Synthetic oligonucleotide
agtcccatgggctaccgctccaagaatatg

SEQ ID NO: 477626 - DNA, 30 bp, Artificial Sequence
  Synthetic oligonucleotide
ccccggcaacccgcttcagttactaatatg

SEQ ID NO: 477627 - DNA, 30 bp, Artificial Sequence
  Synthetic oligonucleotide
cttcccagatatgtgaatcggggtaatatg

SEQ ID NO: 477628 - DNA, 30 bp, Artificial Sequence
  Synthetic oligonucleotide
tcttcggaagtagcacgttagaaacatatg

SEQ ID NO: 477629 - DNA, 30 bp, Artificial Sequence
  Synthetic oligonucleotide
aaaatttcatctctcagccgagaacatatg

SEQ ID NO: 477630 - DNA, 30 bp, Artificial Sequence
  Synthetic oligonucleotide
tagccagttcactatggcgacagacatatg

SEQ ID NO: 477631 - DNA, 30 bp, Artificial Sequence
  Synthetic oligonucleotide
agctaatagtcacactccaaggaccatatg

SEQ ID NO: 477632 - DNA, 30 bp, Artificial Sequence
  Synthetic oligonucleotide
aaactgttgttgttggggcctggccatatg

SEQ ID NO: 477633 - DNA, 30 bp, Artificial Sequence
  Synthetic oligonucleotide
caagtttgctatctggttactttccatatg

SEQ ID NO: 477634 - DNA, 30 bp, Artificial Sequence
  Synthetic oligonucleotide
tggacgcactactagtaatacacgcatatg

SEQ ID NO: 477635 - DNA, 30 bp, Artificial Sequence
  Synthetic oligonucleotide
atttacctcacattaaggagggcgcatatg

SEQ ID NO: 477636 - DNA, 30 bp, Artificial Sequence
  Synthetic oligonucleotide
gcccggtatatctcccgattttcgcatatg

SEQ ID NO: 477637 - DNA, 30 bp, Artificial Sequence
  Synthetic oligonucleotide
tttttatgtacgtaccatccagatcatatg

SEQ ID NO: 477638 - DNA, 30 bp, Artificial Sequence
  Synthetic oligonucleotide
ctcgttgggtgttgattacagtatcatatg

SEQ ID NO: 477639 - DNA, 30 bp, Artificial Sequence
  Synthetic oligonucleotide
taggtagagccgtgtttcggccctcatatg

SEQ ID NO: 477640 - DNA, 30 bp, Artificial Sequence
  Synthetic oligonucleotide
aaacttactggtctaatacgatctcatatg

SEQ ID NO: 477641 - DNA, 30 bp, Artificial Sequence
  Synthetic oligonucleotide
cgactgttatcaatttcatctggcgatatg

SEQ ID NO: 477642 - DNA, 30 bp, Artificial Sequence
  Synthetic oligonucleotide
agttatcaggagttagatacagtcgatatg

SEQ ID NO: 477643 - DNA, 30 bp, Artificial Sequence
  Synthetic oligonucleotide
ctgacgcttgagccaatacagcaggatatg

SEQ ID NO: 477644 - DNA, 30 bp, Artificial Sequence
  Synthetic oligonucleotide
agacatatgaagacaaaacttgtggatatg

SEQ ID NO: 477645 - DNA, 30 bp, Artificial Sequence
  Synthetic oligonucleotide
gaacccttaacggatctctttaatgatatg

SEQ ID NO: 477646 - DNA, 30 bp, Artificial Sequence
  Synthetic oligonucleotide
atcctgggcattgtctttgatatatatatg

SEQ ID NO: 477647 - DNA, 30 bp, Artificial Sequence
  Synthetic oligonucleotide
gccatcagacttgccattgaagactatatg

SEQ ID NO: 477648 - DNA, 30 bp, Artificial Sequence
  Synthetic oligonucleotide
cagaaatcctaattttgaatgggctatatg

SEQ ID NO: 477649 - DNA, 30 bp, Artificial Sequence
  Synthetic oligonucleotide
gcccgacttagtgagtcctaaatctatatg

SEQ ID NO: 477650 - DNA, 30 bp, Artificial Sequence
  Synthetic oligonucleotide
atttccatgtattgacgggcccagtatatg

SEQ ID NO: 477651 - DNA, 30 bp, Artificial Sequence
  Synthetic oligonucleotide
gacccaaacatcgctagcattaggtatatg

SEQ ID NO: 477652 - DNA, 30 bp, Artificial Sequence
  Synthetic oligonucleotide
tggcaggacgtggcactctttaggtatatg

SEQ ID NO: 477653 - DNA, 30 bp, Artificial Sequence
  Synthetic oligonucleotide
gatccaactaagcatcctatagcttatatg

SEQ ID NO: 477654 - DNA, 30 bp, Artificial Sequence
  Synthetic oligonucleotide
aatatgttgaacctccccttaagaactatg

SEQ ID NO: 477655 - DNA, 30 bp, Artificial Sequence
  Synthetic oligonucleotide
tctgttttgaaaagcgggccgggcactatg

SEQ ID NO: 477656 - DNA, 30 bp, Artificial Sequence
  Synthetic oligonucleotide
ttttgggtgagcggtccacatacgactatg

SEQ ID NO: 477657 - DNA, 30 bp, Artificial Sequence
  Synthetic oligonucleotide
ctggttgaccgacgtctacgcgcgactatg

SEQ ID NO: 477658 - DNA, 30 bp, Artificial Sequence
  Synthetic oligonucleotide
cacccgcgggggactcatgatcaacctatg

SEQ ID NO: 477659 - DNA, 30 bp, Artificial Sequence
  Synthetic oligonucleotide
cccgtctccgtacacaagggaacacctatg

SEQ ID NO: 477660 - DNA, 30 bp, Artificial Sequence
  Synthetic oligonucleotide
cactccgatagctagttggtgaccgctatg

SEQ ID NO: 477661 - DNA, 30 bp, Artificial Sequence
  Synthetic oligonucleotide
agtagcactgcaaataatgttcccgctatg

SEQ ID NO: 477662 - DNA, 30 bp, Artificial Sequence
  Synthetic oligonucleotide
aattaactgttaaccctgtttttggctatg

SEQ ID NO: 477663 - DNA, 30 bp, Artificial Sequence
  Synthetic oligonucleotide
ggggaagcggtcacgcaactaactgctatg

SEQ ID NO: 477664 - DNA, 30 bp, Artificial Sequence
  Synthetic oligonucleotide
aacatttagcaagccgggaggcctgctatg

SEQ ID NO: 477665 - DNA, 30 bp, Artificial Sequence
  Synthetic oligonucleotide
gggcgaattatgagttgcccggtctctatg

SEQ ID NO: 477666 - DNA, 30 bp, Artificial Sequence
  Synthetic oligonucleotide
gcctgggcggcatttggacgctgaagtatg

SEQ ID NO: 477667 - DNA, 30 bp, Artificial Sequence
  Synthetic oligonucleotide
tgacgtcatgaggcatggaaagtaagtatg

SEQ ID NO: 477668 - DNA, 30 bp, Artificial Sequence
  Synthetic oligonucleotide
gtattttatgggacgtgggatgtaagtatg

SEQ ID NO: 477669 - DNA, 30 bp, Artificial Sequence
  Synthetic oligonucleotide
cttaccgggaaaggtaatgtttacagtatg

SEQ ID NO: 477670 - DNA, 30 bp, Artificial Sequence
  Synthetic oligonucleotide
gattattggccctaactaatggccagtatg

SEQ ID NO: 477671 - DNA, 30 bp, Artificial Sequence
  Synthetic oligonucleotide
aattcagtcgactgcgacaggtcgagtatg

SEQ ID NO: 477672 - DNA, 30 bp, Artificial Sequence
  Synthetic oligonucleotide
gttacgggaacacagttgccacggagtatg

SEQ ID NO: 477673 - DNA, 30 bp, Artificial Sequence
  Synthetic oligonucleotide
cgagcgtatacatactctccgtggagtatg

SEQ ID NO: 477674 - DNA, 30 bp, Artificial Sequence
  Synthetic oligonucleotide
agttttgggtttattactacgttccgtatg

SEQ ID NO: 477675 - DNA, 30 bp, Artificial Sequence
  Synthetic oligonucleotide
gtgaccacggagcaaataccccagcgtatg

SEQ ID NO: 477676 - DNA, 30 bp, Artificial Sequence
  Synthetic oligonucleotide
acccgctatcgttatatacgagagcgtatg

SEQ ID NO: 477677 - DNA, 29 bp, Artificial Sequence
  Synthetic oligonucleotide
tgtggtacggtccggtcataccgcgtatg

SEQ ID NO: 477678 - DNA, 30 bp, Artificial Sequence
  Synthetic oligonucleotide
ttaaactacgttcgacgcggctggcgtatg

SEQ ID NO: 477679 - DNA, 30 bp, Artificial Sequence
  Synthetic oligonucleotide
tataggctagtatggtccgtattaggtatg

SEQ ID NO: 477680 - DNA, 30 bp, Artificial Sequence
  Synthetic oligonucleotide
gagtatgccttggatcgcttttggggtatg

SEQ ID NO: 477681 - DNA, 30 bp, Artificial Sequence
  Synthetic oligonucleotide
gattaaaaaagggacacacagttgggtatg

SEQ ID NO: 477682 - DNA, 30 bp, Artificial Sequence
  Synthetic oligonucleotide
tgaatgcagcatatactacgttctggtatg

SEQ ID NO: 477683 - DNA, 30 bp, Artificial Sequence
  Synthetic oligonucleotide
gttagagtttattggcgttaacgtggtatg

SEQ ID NO: 477684 - DNA, 30 bp, Artificial Sequence
  Synthetic oligonucleotide
acctttaaacaggtaaggacaggtggtatg

SEQ ID NO: 477685 - DNA, 30 bp, Artificial Sequence
  Synthetic oligonucleotide
ggtctgggacatagtgtacaaccatgtatg

SEQ ID NO: 477686 - DNA, 30 bp, Artificial Sequence
  Synthetic oligonucleotide
aattgctggttaaaatgtcggctctgtatg

SEQ ID NO: 477687 - DNA, 30 bp, Artificial Sequence
  Synthetic oligonucleotide
agaatttgctgtggtacgtatcagtgtatg

SEQ ID NO: 477688 - DNA, 30 bp, Artificial Sequence
  Synthetic oligonucleotide
ttaatgggcgcaggatactcgttgtgtatg

SEQ ID NO: 477689 - DNA, 30 bp, Artificial Sequence
  Synthetic oligonucleotide
gataggaagtcgactgcagcctattgtatg

SEQ ID NO: 477690 - DNA, 30 bp, Artificial Sequence
  Synthetic oligonucleotide
taaaatataaattcccttggagcttgtatg

SEQ ID NO: 477691 - DNA, 30 bp, Artificial Sequence
  Synthetic oligonucleotide
accctacgagcgattgtagccctttgtatg

SEQ ID NO: 477692 - DNA, 30 bp, Artificial Sequence
  Synthetic oligonucleotide
aaatttatcactcgcctgcaattaattatg

SEQ ID NO: 477693 - DNA, 30 bp, Artificial Sequence
  Synthetic oligonucleotide
tacattgaaactattatatgagacattatg

SEQ ID NO: 477694 - DNA, 30 bp, Artificial Sequence
  Synthetic oligonucleotide
ccgatgtccattgtctagagaaccattatg

SEQ ID NO: 477695 - DNA, 30 bp, Artificial Sequence
  Synthetic oligonucleotide
ccggttgtgactagttggcaagagattatg

SEQ ID NO: 477696 - DNA, 30 bp, Artificial Sequence
  Synthetic oligonucleotide
gtgtttattgctcaaaagatcgggattatg

SEQ ID NO: 477697 - DNA, 30 bp, Artificial Sequence
  Synthetic oligonucleotide
gcaattaatactttggccggctgtattatg

SEQ ID NO: 477698 - DNA, 30 bp, Artificial Sequence
  Synthetic oligonucleotide
tctggggcgtttcctggtgacattattatg

SEQ ID NO: 477699 - DNA, 30 bp, Artificial Sequence
  Synthetic oligonucleotide
gtatagaatgttagtccagcctttattatg

SEQ ID NO: 477700 - DNA, 30 bp, Artificial Sequence
  Synthetic oligonucleotide
gccacatagatgagtctctaaccacttatg

SEQ ID NO: 477701 - DNA, 30 bp, Artificial Sequence
  Synthetic oligonucleotide
tgaattccgattttattaagtagccttatg

SEQ ID NO: 477702 - DNA, 30 bp, Artificial Sequence
  Synthetic oligonucleotide
aaatacactccagttgggtggcagcttatg

SEQ ID NO: 477703 - DNA, 30 bp, Artificial Sequence
  Synthetic oligonucleotide
actttccgcataacgtgcttttatcttatg

SEQ ID NO: 477704 - DNA, 30 bp, Artificial Sequence
  Synthetic oligonucleotide
ctccgagaattagaatgtgcttgtcttatg

SEQ ID NO: 477705 - DNA, 30 bp, Artificial Sequence
  Synthetic oligonucleotide
actttaccacctgtgttatctcaggttatg

SEQ ID NO: 477706 - DNA, 30 bp, Artificial Sequence
  Synthetic oligonucleotide
atacccagttatggtaaggtgcgggttatg

SEQ ID NO: 477707 - DNA, 30 bp, Artificial Sequence
  Synthetic oligonucleotide
tgaagcagccatgcagtccagtgggttatg

SEQ ID NO: 477708 - DNA, 30 bp, Artificial Sequence
  Synthetic oligonucleotide
gtacgaagggtttgtccctataaatttatg

SEQ ID NO: 477709 - DNA, 30 bp, Artificial Sequence
  Synthetic oligonucleotide
ttggacagcaacggattcgtgaactttatg

SEQ ID NO: 477710 - DNA, 30 bp, Artificial Sequence
  Synthetic oligonucleotide
ttccttacgaagtggcccggcatctttatg

SEQ ID NO: 477711 - DNA, 30 bp, Artificial Sequence
  Synthetic oligonucleotide
gtagcctaaaagcgttgcccccagtttatg

SEQ ID NO: 477712 - DNA, 30 bp, Artificial Sequence
  Synthetic oligonucleotide
ttctagagggttagcataaggcagtttatg

SEQ ID NO: 477713 - DNA, 30 bp, Artificial Sequence
  Synthetic oligonucleotide
atgcggtttatggtaatgtagcggtttatg

SEQ ID NO: 477714 - DNA, 30 bp, Artificial Sequence
  Synthetic oligonucleotide
tatacacactatgttagagaatggtttatg

SEQ ID NO: 477715 - DNA, 30 bp, Artificial Sequence
  Synthetic oligonucleotide
gttcacggcatatgttgaatttggtttatg

SEQ ID NO: 477716 - DNA, 30 bp, Artificial Sequence
  Synthetic oligonucleotide
ttcggtcacatactgtcctctgcttttatg

SEQ ID NO: 477717 - DNA, 30 bp, Artificial Sequence
  Synthetic oligonucleotide
cgaaatgatttgtcatgggttctttttatg

SEQ ID NO: 477718 - DNA, 30 bp, Artificial Sequence
  Synthetic oligonucleotide
cgccgaaagttttggtgacgtaaaaaactg

SEQ ID NO: 477719 - DNA, 30 bp, Artificial Sequence
  Synthetic oligonucleotide
gcccgcatatccgcccgttttttgaaactg

SEQ ID NO: 477720 - DNA, 30 bp, Artificial Sequence
  Synthetic oligonucleotide
agtacctctacacgcagcgtgtataaactg

SEQ ID NO: 477721 - DNA, 30 bp, Artificial Sequence
  Synthetic oligonucleotide
gtacagaaataataactttgaggtaaactg

SEQ ID NO: 477722 - DNA, 30 bp, Artificial Sequence
  Synthetic oligonucleotide
gctctgttggtatctggatggctccaactg

SEQ ID NO: 477723 - DNA, 30 bp, Artificial Sequence
  Synthetic oligonucleotide
ctgttatcaggatttaggagtctccaactg

SEQ ID NO: 477724 - DNA, 30 bp, Artificial Sequence
  Synthetic oligonucleotide
tgtgaaccgcgacggcacgcagagcaactg

SEQ ID NO: 477725 - DNA, 30 bp, Artificial Sequence
  Synthetic oligonucleotide
ttaatacctttggaagggtctgcgcaactg

SEQ ID NO: 477726 - DNA, 30 bp, Artificial Sequence
  Synthetic oligonucleotide
ttttcttcagtttcccgtagtattcaactg

SEQ ID NO: 477727 - DNA, 30 bp, Artificial Sequence
  Synthetic oligonucleotide
tttattttgtaacattcgagagccgaactg

SEQ ID NO: 477728 - DNA, 30 bp, Artificial Sequence
  Synthetic oligonucleotide
ctccatgatgcgggttaggcagtcgaactg

SEQ ID NO: 477729 - DNA, 30 bp, Artificial Sequence
  Synthetic oligonucleotide
tccaacgctcggtctaaggttgctgaactg

SEQ ID NO: 477730 - DNA, 30 bp, Artificial Sequence
  Synthetic oligonucleotide
aaatgatggccaaagtgttcgattgaactg

SEQ ID NO: 477731 - DNA, 30 bp, Artificial Sequence
  Synthetic oligonucleotide
gtggtcccattcgggatttaccgctaactg

SEQ ID NO: 477732 - DNA, 30 bp, Artificial Sequence
  Synthetic oligonucleotide
aacttcgcatcgggcagatagcattaactg

SEQ ID NO: 477733 - DNA, 30 bp, Artificial Sequence
  Synthetic oligonucleotide
gcctagatagtgtaagacatgcattaactg

SEQ ID NO: 477734 - DNA, 30 bp, Artificial Sequence
  Synthetic oligonucleotide
ttgaattagagtaacagttaatattaactg

SEQ ID NO: 477735 - DNA, 30 bp, Artificial Sequence
  Synthetic oligonucleotide
gcacgtaggggacattccttgttttaactg

SEQ ID NO: 477736 - DNA, 30 bp, Artificial Sequence
  Synthetic oligonucleotide
tccaccataattttgatgggcggaacactg

SEQ ID NO: 477737 - DNA, 30 bp, Artificial Sequence
  Synthetic oligonucleotide
tttgcaatgtttatgctcgatagcacactg

SEQ ID NO: 477738 - DNA, 30 bp, Artificial Sequence
  Synthetic oligonucleotide
aaattgtggcagttctgagcaggcacactg

SEQ ID NO: 477739 - DNA, 30 bp, Artificial Sequence
  Synthetic oligonucleotide
ctgcccacagtcccttgtacctcgacactg

SEQ ID NO: 477740 - DNA, 30 bp, Artificial Sequence
  Synthetic oligonucleotide
aacccgccgaattcagcgggggatacactg

SEQ ID NO: 477741 - DNA, 30 bp, Artificial Sequence
  Synthetic oligonucleotide
gagccggcctttgagtaaaatgatacactg

SEQ ID NO: 477742 - DNA, 30 bp, Artificial Sequence
  Synthetic oligonucleotide
actgaagtttttgagagcggcgcgccactg

SEQ ID NO: 477743 - DNA, 30 bp, Artificial Sequence
  Synthetic oligonucleotide
ccccgttgttctaccacatgtaatccactg

SEQ ID NO: 477744 - DNA, 30 bp, Artificial Sequence
  Synthetic oligonucleotide
gttacactttggtggcgggtttaagcactg

SEQ ID NO: 477745 - DNA, 30 bp, Artificial Sequence
  Synthetic oligonucleotide
tttttttataagcatacaaacaccgcactg

SEQ ID NO: 477746 - DNA, 30 bp, Artificial Sequence
  Synthetic oligonucleotide
tgcaataaggttattaagatgggcgcactg

SEQ ID NO: 477747 - DNA, 30 bp, Artificial Sequence
  Synthetic oligonucleotide
tcctatggccatgcttggaggatggcactg

SEQ ID NO: 477748 - DNA, 30 bp, Artificial Sequence
  Synthetic oligonucleotide
catcgcacaacagtggacctgtcatcactg

SEQ ID NO: 477749 - DNA, 30 bp, Artificial Sequence
  Synthetic oligonucleotide
cacacggtattattcgttgtgttatcactg

SEQ ID NO: 477750 - DNA, 30 bp, Artificial Sequence
  Synthetic oligonucleotide
gatgtcgaatatagtgcctatagtagactg

SEQ ID NO: 477751 - DNA, 30 bp, Artificial Sequence
  Synthetic oligonucleotide
atgaaggcctatgtttttgttaaccgactg

SEQ ID NO: 477752 - DNA, 30 bp, Artificial Sequence
  Synthetic oligonucleotide
gtccacttcctcctccagacgaggcgactg

SEQ ID NO: 477753 - DNA, 30 bp, Artificial Sequence
  Synthetic oligonucleotide
gagtgggtatatcccccccggcatcgactg

SEQ ID NO: 477754 - DNA, 30 bp, Artificial Sequence
  Synthetic oligonucleotide
ggggtagacaaaatgacgcgtcttggactg

SEQ ID NO: 477755 - DNA, 30 bp, Artificial Sequence
  Synthetic oligonucleotide
aaatgctcggtcccattgggagtatgactg

SEQ ID NO: 477756 - DNA, 30 bp, Artificial Sequence
  Synthetic oligonucleotide
gtctacaattctctaaagtttttatgactg

SEQ ID NO: 477757 - DNA, 30 bp, Artificial Sequence
  Synthetic oligonucleotide
ccattctctggtgtaccgtggacaatactg

SEQ ID NO: 477758 - DNA, 30 bp, Artificial Sequence
  Synthetic oligonucleotide
ggcacacgcaacggccagtacttaatactg

SEQ ID NO: 477759 - DNA, 30 bp, Artificial Sequence
  Synthetic oligonucleotide
acacgagttttaaggggcgcccggatactg

SEQ ID NO: 477760 - DNA, 30 bp, Artificial Sequence
  Synthetic oligonucleotide
cgcactttatgaagtgtttaggttatactg

SEQ ID NO: 477761 - DNA, 30 bp, Artificial Sequence
  Synthetic oligonucleotide
ttatctggtcacaaagtcaatccactactg

SEQ ID NO: 477762 - DNA, 30 bp, Artificial Sequence
  Synthetic oligonucleotide
ggtaagtattcatctcggacgctactactg

SEQ ID NO: 477763 - DNA, 30 bp, Artificial Sequence
  Synthetic oligonucleotide
accagataccggggtctcagggctctactg

SEQ ID NO: 477764 - DNA, 30 bp, Artificial Sequence
  Synthetic oligonucleotide
tttaggaatcgggacatgtatgaagtactg

SEQ ID NO: 477765 - DNA, 30 bp, Artificial Sequence
  Synthetic oligonucleotide
tttctcaagctcaaagtgaggatcgtactg

SEQ ID NO: 477766 - DNA, 30 bp, Artificial Sequence
  Synthetic oligonucleotide
tttgatgaccacgtggtgaacgcggtactg

SEQ ID NO: 477767 - DNA, 30 bp, Artificial Sequence
  Synthetic oligonucleotide
tttacagacatgggatgataccatgtactg

SEQ ID NO: 477768 - DNA, 30 bp, Artificial Sequence
  Synthetic oligonucleotide
tgccctgttgctccccaagcgggattactg

SEQ ID NO: 477769 - DNA, 30 bp, Artificial Sequence
  Synthetic oligonucleotide
tgaggtctgggattagtacgggtgttactg

SEQ ID NO: 477770 - DNA, 30 bp, Artificial Sequence
  Synthetic oligonucleotide
gtaatagaaacggtcggggcaagtttactg

SEQ ID NO: 477771 - DNA, 30 bp, Artificial Sequence
  Synthetic oligonucleotide
atctgttcagactggactaatggtttactg

SEQ ID NO: 477772 - DNA, 30 bp, Artificial Sequence
  Synthetic oligonucleotide
ttactttagggttttgacagcgaaaacctg

SEQ ID NO: 477773 - DNA, 30 bp, Artificial Sequence
  Synthetic oligonucleotide
agtaaattcagtgtccacctcgtgaacctg

SEQ ID NO: 477774 - DNA, 30 bp, Artificial Sequence
  Synthetic oligonucleotide
ctgggtcaaagtactgaccagtgtaacctg

SEQ ID NO: 477775 - DNA, 30 bp, Artificial Sequence
  Synthetic oligonucleotide
acacgcgtactcttatgagtagttaacctg

SEQ ID NO: 477776 - DNA, 30 bp, Artificial Sequence
  Synthetic oligonucleotide
agttgacaccagtagcttcagtttaacctg

SEQ ID NO: 477777 - DNA, 30 bp, Artificial Sequence
  Synthetic oligonucleotide
ctttatgatgaatcggttatgacacacctg

SEQ ID NO: 477778 - DNA, 30 bp, Artificial Sequence
  Synthetic oligonucleotide
gatgcatctcgcaaatgtgttttacacctg

SEQ ID NO: 477779 - DNA, 30 bp, Artificial Sequence
  Synthetic oligonucleotide
cactctttaggttagtgaacctgccacctg

SEQ ID NO: 477780 - DNA, 30 bp, Artificial Sequence
  Synthetic oligonucleotide
aatccccaaccggaagatataaggcacctg

SEQ ID NO: 477781 - DNA, 30 bp, Artificial Sequence
  Synthetic oligonucleotide
gagagaacttttgcgggcactgggcacctg

SEQ ID NO: 477782 - DNA, 30 bp, Artificial Sequence
  Synthetic oligonucleotide
gctcatttaccccaagtcgttaaggacctg

SEQ ID NO: 477783 - DNA, 30 bp, Artificial Sequence
  Synthetic oligonucleotide
agtaatctacgtcgaacgatctcggacctg

SEQ ID NO: 477784 - DNA, 30 bp, Artificial Sequence
  Synthetic oligonucleotide
gcgtacaggtcaggaatatcctgtgacctg

SEQ ID NO: 477785 - DNA, 30 bp, Artificial Sequence
  Synthetic oligonucleotide
aactccccgctaaattgtcaagaatacctg

SEQ ID NO: 477786 - DNA, 30 bp, Artificial Sequence
  Synthetic oligonucleotide
gtcaccgacttgattactagaaactacctg

SEQ ID NO: 477787 - DNA, 30 bp, Artificial Sequence
  Synthetic oligonucleotide
tcaggttccgtgattttgccatactacctg

SEQ ID NO: 477788 - DNA, 30 bp, Artificial Sequence
  Synthetic oligonucleotide
tccggatcttatgtctcctggagttacctg

SEQ ID NO: 477789 - DNA, 30 bp, Artificial Sequence
  Synthetic oligonucleotide
tatggattatctagaaaggcctaaaccctg

SEQ ID NO: 477790 - DNA, 30 bp, Artificial Sequence
  Synthetic oligonucleotide
gtttcctcaaccttcattacgccaaccctg

SEQ ID NO: 477791 - DNA, 30 bp, Artificial Sequence
  Synthetic oligonucleotide
tataaataagtgcacagatgctgaaccctg

SEQ ID NO: 477792 - DNA, 30 bp, Artificial Sequence
  Synthetic oligonucleotide
catctgtatctccaaagtgagtataccctg

SEQ ID NO: 477793 - DNA, 30 bp, Artificial Sequence
  Synthetic oligonucleotide
cttaagcacttagtgccgagtagacccctg

SEQ ID NO: 477794 - DNA, 30 bp, Artificial Sequence
  Synthetic oligonucleotide
tttttcatcttacaatcgttatcgcccctg

SEQ ID NO: 477795 - DNA, 30 bp, Artificial Sequence
  Synthetic oligonucleotide
gattgtttcatggtaatgatcattcccctg

SEQ ID NO: 477796 - DNA, 30 bp, Artificial Sequence
  Synthetic oligonucleotide
acccaggctccacccgcatccgtcgccctg

SEQ ID NO: 477797 - DNA, 30 bp, Artificial Sequence
  Synthetic oligonucleotide
actacttttgaacacagagcggatgccctg

SEQ ID NO: 477798 - DNA, 30 bp, Artificial Sequence
  Synthetic oligonucleotide
gttaggccaaactctttggaggttgccctg

SEQ ID NO: 477799 - DNA, 30 bp, Artificial Sequence
  Synthetic oligonucleotide
gacgtgtgtggtttgctataggaatccctg

SEQ ID NO: 477800 - DNA, 30 bp, Artificial Sequence
  Synthetic oligonucleotide
ggaacatgacggatcgggttagtatccctg

SEQ ID NO: 477801 - DNA, 30 bp, Artificial Sequence
  Synthetic oligonucleotide
gagccccgggcaaatttttagctgtccctg

SEQ ID NO: 477802 - DNA, 30 bp, Artificial Sequence
  Synthetic oligonucleotide
gggaatggtagtatcacagttaaaagcctg

SEQ ID NO: 477803 - DNA, 30 bp, Artificial Sequence
  Synthetic oligonucleotide
gacgagcgcgcagcttgttatgaaagcctg

SEQ ID NO: 477804 - DNA, 30 bp, Artificial Sequence
  Synthetic oligonucleotide
cacgataatacgtacgctaactacagcctg

SEQ ID NO: 477805 - DNA, 30 bp, Artificial Sequence
  Synthetic oligonucleotide
ctttggcttccaagcacttcactcagcctg

SEQ ID NO: 477806 - DNA, 30 bp, Artificial Sequence
  Synthetic oligonucleotide
attcaacttttacttggccagtagagcctg

SEQ ID NO: 477807 - DNA, 30 bp, Artificial Sequence
  Synthetic oligonucleotide
cgctcggctcagcagggaccatggagcctg

SEQ ID NO: 477808 - DNA, 30 bp, Artificial Sequence
  Synthetic oligonucleotide
ttgtcatcggagccagggcctcctcgcctg

SEQ ID NO: 477809 - DNA, 30 bp, Artificial Sequence
  Synthetic oligonucleotide
attacgcgtgggccgtctggagttcgcctg

SEQ ID NO: 477810 - DNA, 30 bp, Artificial Sequence
  Synthetic oligonucleotide
tagtcggaggagtacggccattacggcctg

SEQ ID NO: 477811 - DNA, 30 bp, Artificial Sequence
  Synthetic oligonucleotide
aaagatttattacggagctccaatggcctg

SEQ ID NO: 477812 - DNA, 30 bp, Artificial Sequence
  Synthetic oligonucleotide
tgtttggctggggaccttttgtatggcctg

SEQ ID NO: 477813 - DNA, 30 bp, Artificial Sequence
  Synthetic oligonucleotide
ctctagtattaatggtctacggagtgcctg

SEQ ID NO: 477814 - DNA, 30 bp, Artificial Sequence
  Synthetic oligonucleotide
gttgccaccaagttggacgcgccgtgcctg

SEQ ID NO: 477815 - DNA, 30 bp, Artificial Sequence
  Synthetic oligonucleotide
gccttaaatgccggcgttagacggtgcctg

SEQ ID NO: 477816 - DNA, 30 bp, Artificial Sequence
  Synthetic oligonucleotide
caataagttggaccggcggaaagttgcctg

SEQ ID NO: 477817 - DNA, 30 bp, Artificial Sequence
  Synthetic oligonucleotide
tagaacctgggcaacgcagttggaatcctg

SEQ ID NO: 477818 - DNA, 30 bp, Artificial Sequence
  Synthetic oligonucleotide
aaatctcccggtactgaccgagacatcctg

SEQ ID NO: 477819 - DNA, 29 bp, Artificial Sequence
  Synthetic oligonucleotide
tgcgtgggcgaaaatcgggggtgatcctg

SEQ ID NO: 477820 - DNA, 30 bp, Artificial Sequence
  Synthetic oligonucleotide
gcagccggactctctcgacccactatcctg

SEQ ID NO: 477821 - DNA, 30 bp, Artificial Sequence
  Synthetic oligonucleotide
attttatatattctgaactcttgtatcctg

SEQ ID NO: 477822 - DNA, 30 bp, Artificial Sequence
  Synthetic oligonucleotide
gtttgttattaatgttacaatattatcctg

SEQ ID NO: 477823 - DNA, 30 bp, Artificial Sequence
  Synthetic oligonucleotide
gtgctcgattagttctaccatattatcctg

SEQ ID NO: 477824 - DNA, 30 bp, Artificial Sequence
  Synthetic oligonucleotide
gtcgtatggtcaggaacgggttttatcctg

SEQ ID NO: 477825 - DNA, 30 bp, Artificial Sequence
  Synthetic oligonucleotide
gacatatcagtacacagaggcccactcctg

SEQ ID NO: 477826 - DNA, 30 bp, Artificial Sequence
  Synthetic oligonucleotide
ttctaagatttagtccttgccagactcctg

SEQ ID NO: 477827 - DNA, 30 bp, Artificial Sequence
  Synthetic oligonucleotide
actcggtaagcagcgccgtcggtagtcctg

SEQ ID NO: 477828 - DNA, 30 bp, Artificial Sequence
  Synthetic oligonucleotide
aaaatagatgatttttgatctttattcctg

SEQ ID NO: 477829 - DNA, 30 bp, Artificial Sequence
  Synthetic oligonucleotide
tttaacttctggagggtaaagtacttcctg

SEQ ID NO: 477830 - DNA, 30 bp, Artificial Sequence
  Synthetic oligonucleotide
tagtaccgttactgacggttttacttcctg

SEQ ID NO: 477831 - DNA, 30 bp, Artificial Sequence
  Synthetic oligonucleotide
gttaaggaagccctattgacgtgcttcctg

SEQ ID NO: 477832 - DNA, 30 bp, Artificial Sequence
  Synthetic oligonucleotide
gccttgtatgcctattgttttcgaaagctg

SEQ ID NO: 477833 - DNA, 30 bp, Artificial Sequence
  Synthetic oligonucleotide
aatcgcgcgataccacggttctccaagctg

SEQ ID NO: 477834 - DNA, 30 bp, Artificial Sequence
  Synthetic oligonucleotide
cgccaattaagcgtgggcttcggcaagctg

SEQ ID NO: 477835 - DNA, 30 bp, Artificial Sequence
  Synthetic oligonucleotide
gcctggtcttggccgctcatatgcaagctg

SEQ ID NO: 477836 - DNA, 30 bp, Artificial Sequence
  Synthetic oligonucleotide
cggtgacccaccgtaaacatcgttaagctg

SEQ ID NO: 477837 - DNA, 30 bp, Artificial Sequence
  Synthetic oligonucleotide
gctgcacccatccactcccgataccagctg

SEQ ID NO: 477838 - DNA, 30 bp, Artificial Sequence
  Synthetic oligonucleotide
ccaattatggggacggtggagtaccagctg

SEQ ID NO: 477839 - DNA, 30 bp, Artificial Sequence
  Synthetic oligonucleotide
ctggaacggtgctgagcgtgcccgcagctg

SEQ ID NO: 477840 - DNA, 30 bp, Artificial Sequence
  Synthetic oligonucleotide
taaaacaggtcgcagtcggcgtggcagctg

SEQ ID NO: 477841 - DNA, 30 bp, Artificial Sequence
  Synthetic oligonucleotide
gtaatagcccacctctcgggaactcagctg

SEQ ID NO: 477842 - DNA, 30 bp, Artificial Sequence
  Synthetic oligonucleotide
atggagcacaagccactgggcagcgagctg

SEQ ID NO: 477843 - DNA, 30 bp, Artificial Sequence
  Synthetic oligonucleotide
tcttcggagacatttgaatgattggagctg

SEQ ID NO: 477844 - DNA, 30 bp, Artificial Sequence
  Synthetic oligonucleotide
tatttggtctccggagcaccatttgagctg

SEQ ID NO: 477845 - DNA, 30 bp, Artificial Sequence
  Synthetic oligonucleotide
tgggccctgggcaggtttcctgtatagctg

SEQ ID NO: 477846 - DNA, 30 bp, Artificial Sequence
  Synthetic oligonucleotide
cgatcaccccaagaatgacctggaacgctg

SEQ ID NO: 477847 - DNA, 30 bp, Artificial Sequence
  Synthetic oligonucleotide
atcggataagccctgttttgtatcacgctg

SEQ ID NO: 477848 - DNA, 30 bp, Artificial Sequence
  Synthetic oligonucleotide
ctatcttgagcggaaggacttgctacgctg

SEQ ID NO: 477849 - DNA, 30 bp, Artificial Sequence
  Synthetic oligonucleotide
acgtcatggcagcccaatccttgtacgctg

SEQ ID NO: 477850 - DNA, 30 bp, Artificial Sequence
  Synthetic oligonucleotide
tagggtttatcgagctcctctgacccgctg

SEQ ID NO: 477851 - DNA, 30 bp, Artificial Sequence
  Synthetic oligonucleotide
agtaaatttttcgttcgctgtagtccgctg

SEQ ID NO: 477852 - DNA, 30 bp, Artificial Sequence
  Synthetic oligonucleotide
agtcgtagggccgccgaactctcggcgctg

SEQ ID NO: 477853 - DNA, 30 bp, Artificial Sequence
  Synthetic oligonucleotide
gatgaaggcttattattcattcgatcgctg

SEQ ID NO: 477854 - DNA, 30 bp, Artificial Sequence
  Synthetic oligonucleotide
agcgtatttattttggtcccaatatcgctg
